United States Patent Application Publication US 2004/0031072 A1 - sequence listing, part 24

SEQ ID NO: 109667 - DNA, 837 bp, Glycine max
  Clone ID: PAT_MRT3847_70042C.1
tttaagggagggggagttgaaagaaagaaaggaaggatgggagtgacaccgaaaattgctccttcgatgctctcttccgacttcgccaatttggcttccgaggctcagcgcatgctccacttcggcgccgattggctccacatggacatcatggatgggcattttgtccccaatttaactattggcgctccagttattgaaagtttgagaaagcacacaaagggatatttggattgtcaccttatggttacaaatcctcttgattatgttgagcccttggcaaaagctggtgcttctggttttacatttcatgtagagacatcaaaagataactgggaagaacttatccaaagaatcaagtcacatggcatgactcctggtgtagcattaaagcctgggacccccattgaagaggtttatcctctggtggaagccggaaatcctgtggaaatggttcttgtgatgactgtagaaccgggattcggaggacaaaaatttatgccagagatgatggataaagtacgtatacttaggaagaagtatccatcacttgacatagaggttgatggtggtttagggccttcaaccatagatgtggccgcatcagcaggggcaaactgcattgttgctggaagttcagtgtttggtgcccctgagccagttcaagtaatatccttactaaggaattctgttgagaaagcccagcaaaccttgatacagtaaaaaaaaaatgtcgttttaagttgcagtacacttcacaactttgcataaacaatatgcttaatgtttaacattttccataagttgaataaaagatcatgtgacttgataatgttt

SEQ ID NO: 109668 - DNA, 268 bp, Glycine max
  unsure (1)..(268): unsure at all n locations
  Clone ID: PAT_MRT3847_70043C.1
cttcactgtggcgcagttttggtttacattacaaactgtcttttctggtgcatagatcctatgatgatgggaaccagtcaaaatataatggggtgggtgatagaactanttgttatgattgtggggttatttgacaaggttgtttgggcacctctccccaanaaatatgcggggctatccctgcatagaataacaaatgcctccttcaaccgtaacgataaagccctatctccccttcgttttcctctaccaacctctactcttcctt

SEQ ID NO: 109669 - DNA, 151 bp, Glycine max
  Clone ID: PAT_MRT3847_70044C.1
acagtaaaatcaaaatttcgactggcactttatagactatccggtcgacccaacggctgaattagggattcgacgaggatgggtgctgctcttctccttcaaaaaacaaattcttcagcaattccaattcactaaaaacactccgatgaaa

SEQ ID NO: 109670 - DNA, 1391 bp, Glycine max
  unsure (1)..(1391): unsure at all n locations
  Clone ID: PAT_MRT3847_70045C.1
cttgatgcctgagctatatagaggttattgtgaccaatcaagtgctagcgtatcatcaggtaaattgtttacttggggtgacggagataaaaaccgccttggacacggagacaaggacgcccggcttgaaccaacttgtgtaccttcacttattgaagacaattttcatagaattgcttgcgggcacagtttgacagtaggcctgacaacatctggacgtgtttttacaatgggaagcactgtttatggtcagcttgggaatccccagtccgatggaaaactgccgtgtttggttgaagacaagtttgcaggagaatctgttgaagaaattgcatgtggagcttatcatgttgctgttttaacatccaaaaatgaagttttcacttggggaaagggtgcaaatgggagattgggtcatggagatgttgaagatcgaaaatcacctactttagttgaagccttgaaagatagacatgtgaaatatattgcatgtggttcaaactactcttctgccatatgccttcataagtgggtatctggtgctgagcagtctcagtgctctgcttgtagacgggtacttgggttcactagaaagaggcacaactgttataattgtggacttgtgcactgccattcatgtagttctaggaaagcattaagagctgccctggctcctaatcctgggaagccatatcgtgtttgtgattcttgttttgtaaaattgaacaaggttgcagaattgggcaacaataatcggaggaatgctatgcctcgtttgtcaggtgagaacaaggataggctagacaagtctgacctaagattgtccaaggcagtaattcattctaacatggatttgataaagcagctagatagtaaggcagccaagcaaggaaagaaaggtgatacattctcactggttcacccctcacaaccaccttctttgctacagctgaaagatgttgtcttgtcctctgctcttgatctgagacgaacagttccaagacctgtggttgcaccatcaggagtaagttccagatctgtctcccctttctctagaagaccaagcccccctcgttcagctacgcctattccaacaacttcaggacttgccttctcaaaaagtatttctgatagtttgaagaaaacaaatgaacttttaaatcaagaagtgcagaagttgcatgctcaggtcgagagcctgagacagagatgtgaactgcaagaattagagcttcaaaggtcagcaaaaaatactcaagaagctatggcactggctgctgaggaatctgctaaatgtaaagctgcaaaagaagttattaagtcgctcacagcacagctcaaaaatctggctgagaagcttnctnctggagtgtatgatgctgagaaacgta

SEQ ID NO: 109671 - DNA, 275 bp, Glycine max
  Clone ID: PAT_MRT3847_70046C.1
cagttgttgtagttctatgagtcatagactgccaattcaccttatgagattgctggcgacaagtctagcaaaaaggttgaataagttgaagcatgcccaataccaatacttccgagtcacataacatatactgcttttttctgagaaacacgtttcttttaaagctaacttatttcagcagcacacctctgtaactgattgtgattaataaaaaatgtattacttatttttcaaattggcgttttgcttttactggctgactgccccagtctggg

SEQ ID NO: 109672 - DNA, 633 bp, Glycine max
  Clone ID: PAT_MRT3847_70047C.1
cccgcgtccggtttatacttaattcaggattgtaatattgattgtgatgaccacatagatgtgacttgaatgatagggagaacattgggaatttgggattcaatcccttttgatttttgctttcattcgatgcttctcacttttattctgttatcaaaatagtagagtttgatctactgactgttggttaggttttagggttctgcaagaaatatggagacaaaacttttgttgcaatgtgctgtgtttgcagatctgtgttttatttggttagagcaaaatccatatttttcaagttctctcttcgtcccttgtttcattttgggggtagtgttgtgtttatggtttctttctagtgctctcatagtcatagttgtttcatgggaataactattgctgatatgttggactgaacatccctgttacattcttgattatatttctttgtttgcgtctctttccttgttcttgtcttcttttctgttttggtggatgtcttatcctccccttactcatacctgacttcgctaacaatcttacaatgtcttccaatgttaagtcatcaacggatgctgttttacccaagtatgagcatgggtgacaaagagggttgctacccagctactatgcgac

SEQ ID NO: 109673 - DNA, 345 bp, Glycine max
  Clone ID: PAT_MRT3847_70048C.1
cgaccaaaaacattttacatactggtatacaccaataatcctaatatatgggcaaatgattttttttttaaaatcaaatacatgtaaaataagtggagaggataaacaacggcttaacgatgaagaggaacagatgatgacgaacaattttgatatgaaagcattgtgataagctatttttagatggcactgagacacatgaactgataataacccaaatacttagtctctctgtaagtggtgacagaaccaggcttattgttcactggctggcctcgaatttggactggtgggtagcccggcattgagcactggctggtatgccatttagtttattaatttgag

SEQ ID NO: 109674 - DNA, 289 bp, Glycine max
  Clone ID: PAT_MRT3847_70049C.1
cgagaagcgagagctggtgttcaaggaggacgggcaggatgacgcgcgggtactttggatgctactatacaggctattattaggccaattctgtatacttgtgatataggataggaatttcttgacgaattacaatttctcattttgaagaaataaggtggcaaaaatgtttatatatgaattgttattattttttttcttattaggcctatactgatttcaaaggaattgagattggaatttcttgttggtacctaactctaattccttataatgagtcttattaaat

SEQ ID NO: 109675 - DNA, 423 bp, Glycine max
  Clone ID: PAT_MRT3847_7004C.1
ggggggaacaatttgaaaaccccaaccggggtgtttaacataaaaaaaattttgcccttatacaaattaacgggggggcccctggcttaacctttaattttaaaaagaaatccccccgaagggctttttccttaggggggggaaatttttaaaacctaagggggggccatcaaaaagaattttattttttatttgggccaaacaacaccccaaaccccaaattttttttcccggccgcaataatctaaattgaattgaattggtccgggggggaattaaggtccccttgccaactcccaaaaaattccctgggcgaagggttgacttgggccctacaaaaattaagggttttaagcgggtttccggggggcttggaaaaccccacccccgggaccttgggggcccccttaaaaacctcccccg

SEQ ID NO: 109676 - DNA, 547 bp, Glycine max
  Clone ID: PAT_MRT3847_70050C.1
tgtagcagtaccacctgcttgggggggggggggggggaaagaaaggatgaaatagaaaggaatgtactgcgcccgactataacaaaggtgctggtggaggataacagtgattactaaacggccaaaggagaacaagaataagccagtttatggaggttagtccataggtaatagttagattagatcccagtatgcagagcgccatacatgttatagcctagattagaatgaagaaaaaaatagcctagactagaaagaattaaatttaaagaagaaagcagataacaggtagttagcaataacataacaggtggactgagggataaagctataagctgggtgcagtgtggtggagcgtttgcgtgggataggaaggtggcttaggggtgttagccaacggctaaatgtactaaacaaaggcgtaatgcatttggtaactaaggtaagcagggcacttgggcgcatgcacgggcgtaataagctaccagtgcatgcaaagacattttggtgtggaagtatagcatgagacgactgaacagtaaagcgt

SEQ ID NO: 109677 - DNA, 227 bp, Glycine max
  Clone ID: PAT_MRT3847_70051C.1
ttgccatcttgatcccaggcattatcatcatcttgacctgtattatctgtacatgagtcctaataatgtcatccaagtatgcagtcctaatctgtatatgctctatgatttcgatttgttgttccaaaagcttgcattgggtgtcgagaaggactggtttcgcagatgcaggaaatggtcaatgaatttctcgtttcgaaaaaagtttcctaagattgcggtatgtt

SEQ ID NO: 109678 - DNA, 255 bp, Glycine max
  Clone ID: PAT_MRT3847_70052C.1
gtttcctttacgggaacacacatatcattctataggaaacgggttggataacaaggcttacttccccctaacacgcggatctatcataacagcacataaatcccaagcatgtaaaaaccacatgggaacggggtttgaaagaaattattactaacagagaggtgctaggaacaaagctttgagcagtgtctttctgacaccctggtcagaagctaaaaaccacgcgatggcaactggactggatataggacccat

SEQ ID NO: 109679 - DNA, 320 bp, Glycine max
  Clone ID: PAT_MRT3847_70053C.1
cgccccccctcgcggcgtcttttggaggggtaaaacccgcacagaggcccccccaaaaaatagtgaagcgctgaactcaaagtttcaccagggcatatgataccacccattattgaaataatttctcaaaatacagtagtgcgcccgtgtaacataccaacgccggtcgtgccggaaaacacaaaggctccatgaatatgtcccgagagccgacggaggaggaggaggagccaaacacaacacagatgcaaattaaacgacactccgcactactgggcggacccgattttaagagaattcgcgcctactatctcagctaa

SEQ ID NO: 109680 - DNA, 398 bp, Glycine max
  Clone ID: PAT_MRT3847_70054C.1
cgcatactgactctacagctcaggacgctctacacgctcacgcttcattatgaactgcactctctggccactgttccctcattctaacggtatggggcctcccaccctgcctctatctgggtcactcggatgttagtctcatgaacgatcgcttcatgcccgcaccgcgctcaatccatatgggaccacagcattgacagggccaaacttacaccccttactctaaacaggacagacactctactctacccaccatctatattagcctactaaacatgactgctcagtacgatgctctgatcacctcgccaggagcatgagccgcttgctctgacagcgcatttcacgaccaaggacaactaaacctcggatagaattactagatgtacagacggctg

SEQ ID NO: 109681 - DNA, 453 bp, Glycine max
  Clone ID: PAT_MRT3847_70055C.1
tacggctgcgagaagacgacagaagggggggtgtggctatgggaagggtcaggagaattctcagttcgctccgcatatcaggccagatttgatgatggtgttattcatgaagaagatcaggtatttcagcatgtgtggaaattaaaaattccaccgaaggccatgttctttatatggagattagttgttgatagattacctacttgtgataatctcattagaagaaatattatactgcctgatatatataatgattctcaaacgtatattaatctaaagttttcatagtctaaaaacgtagatacaagaattagaaaaattaataaagcaactaaagttttcatagtctaatttagtatattaatctaatctcgttcaaatgattctccaacgtatgggttgtagtttagaaatattgattcaagttaattgattgagcttgatgaattaatt

SEQ ID NO: 109682 - DNA, 1427 bp, Glycine max
  Clone ID: PAT_MRT3847_70056C.1
acggacggaaggaacccgaagtgagctgaaaaaacccaaggctcttgacaagaccgacagaagggggaagttgaagatctgaaaccctaattatccaccgatcgatctggtgtggagggtgtgaattgtgaatttgtgattgtgggaaaaagatgccgcagaggcactcgaagaacaacaacgatcttgcgttcttcacgtacgatgagaagcgaaaactaggttatgggacccagaaggagaggttgggcaaggactccattaagcccttcgatgcttgctctctctgcctcaaatccctaattgatcctatgagctgccagaaaggccatctcttttgcaaagagtgcattcttcagtgcctcttgtctcagaagaaagacattcaaaggaagcttgcagcccatgctgctcagcagaagcaagaaaaagaggaggaagaagagaagttgaagttgcaaaaggctaaagagcttgatgcatttgatcaacaaaatcatggtgctgtaccacaatacagcgacagaaattatagtcgtgataagaatggtttccatggggcaaacagtgtgaaggtcacttcctatgaggaggaagcccttcggacaatgaaggcattttggttgccttctgctacaccagaagcttctattaaagtagatgcaccttctaacagtactatctgtccggaaggcaatgagaaactgaagttaaagacacttttccctgtgcagtttactgaggatactactgagcagaaaaaaatccaaggctcttgacaagacctacatttgccctagctgcaaagttactctcaccaacacaatgtcgcttgtggcccttagtacatgtgggcatgtattttgcaagaaatgtgctgacagatttatggctgttgataaagtttgtcttgtttgcaacaaggcgtgtaaagagagaaatttggtgaatttggagaagggagggacaggttttgccggtcatggggatcatcttgaagccagagacttcaagcatttgggaagcggtagtggtttagggctggttagacctgcaatgaaaacttgacgctttattgatttaggttgttgggtgtatgatatagtccattcaggagaagaaaattgtgctttaacttctcttgatgaagttaccttgttaccgcgatacacattattatctgtcttattatcttatgatgttctacttcgttttattttatttttacttttttttttggtttatcccagataaacctttataacgtaaaaaatcagcttgattcattaatgactagcgattggcaatgttaaatgtaaatggatgcattctctgctgtattcttatttattattgtgaaaggatgctgtctgtcaacactgtcccgattcttaaacaaatgaaaaaattggcacagatatatatcg

SEQ ID NO: 109683 - DNA, 549 bp, Glycine max
  Clone ID: PAT_MRT3847_70057C.1
gcagtttactgaggatactagtgagctgaaaaaattcaaggctcttgacaagacctacatttgccctagctgcaaagttactctcaccaacacaatgtcgcttgtggcccttagtacatgtgggcatgtcttttgcaagaaatgtgctgacagatttatggctgttgataaagtttgtcttgtttgcaacaaggcgtgtaaagagagaaatttggtgaatttggagaagggagggacaggttttgctggtcatggagatcatcttgaagccacagacttcaagcatttgggaagcggtagtggtttagggctggttagacctgcaatgaaaacttgatgctttatttaggttctttcaggagaagaaaattgtgctttaacttctcttgatgaagttaccttgttaccgtggtaaacatcattatctatcttatctatgatatgatgttctacttcgtttattttatttttacttttttttgtttacccgagataaacttaacgtgaaaaatcagcttgatccattaatgactagcgattggcaatgtt

SEQ ID NO: 109684 - DNA, 312 bp, Glycine max
  Clone ID: PAT_MRT3847_70058C.1
tttgtttttttttttttttttttttttttttttttttttatatttgtttttttttttttgtttttggttcaaggaatgaatccgatgaggaagcccggcacactacaacgaattgaagcaaaccacctggctataaagcactcacagaaaagaaccattgagggcctggcccaaaaatagtggaaactaccgcactcacgaggagcaataataaaatccattttagaaaacctatgtcaattgggacggcaacaaatgaagtactaactggtgataccccgaggatgcgacaaacgataacgatttgataca

SEQ ID NO: 109685 - DNA, 254 bp, Glycine max
  Clone ID: PAT_MRT3847_70059C.1
ggctcgaggtcacatggcgtagaatgcaacgagtgcagtgagagatggcaacttctatatcctggagacagctatcatgttcaagcctgtggacagtcactctaatccagaatcgcactctgctcctgggctggtatactgaagaacgcttttggcgtagaccgctcgcgattaatggacgcagacaccgtgcgggttagtgcggcttaaagagcctggatccagaacaaatgctgtgagtgcacattagctga

SEQ ID NO: 109686 - DNA, 295 bp, Glycine max
  unsure (1)..(295): unsure at all n locations
  Clone ID: PAT_MRT3847_7005C.1
acnnangcacncgtacgtaagcncngaattanncacananatangacacnnagganaaggnacgtgannacagataannacaactnnannaaacangcnananncaagaacngcaaaaaaggnaannaccantnaancaagnaannnnnngnnangnaagannaagacancangangngacaaaaggaaagnncagaannaaangaanccnnaaagcagggnancncgangaaaaccaannnanngnnnannancagcnannannnngggnggnngangnncnngnaggancacc

SEQ ID NO: 109687 - DNA, 1679 bp, Glycine max
  Clone ID: PAT_MRT3847_70060C.1
ccacgggcgagaagacgacagaagggggaggaaagcgcgatcctcgtgactcgcgacccctcgggtttaaatcccctgcgacgcagcacaggctactacttcaccatcgccggataaaatggtcgacgacggagcaacctcggcggcgacgagccggagaaagccgtcgtggagagaaagagaaaacaacaggagaagagaacggaggagaagagcaatagctgcgaaaatatactctggacttcgagctcaggggaacttcaacttgccaaagcactgcgacaacaacgaagttctgaaagctctctgcgcagaagctggctggtgcgtggaagaagacggaaccacttatcgcaagggttgcaagccacctctggccaatggtgcagggagctccatgagaaacattaccttttcttcttctcaaaatccaagtcctctgtcttcgtcatttcccagcccaattccttcataccaagtgagcccttcctcctcctctttcccgagcccgtttcgtttagatgtggataaggacaatgtatcacacctcattccatacattcgcaatgcgtccttgtctcttcctcctctcaggatatcaaacagtgcccctgtgacaccacctctttcatcaccaacatcaagaaatccaaaaccaattcctacttgggagtctattgccaaagaatccatggcctccttcagttaccctttctttgcagcttctgcccctgctagccccacacaccgtcacctttacactccgcccactattccagaatgcgatgaatctgatacttccaccggcgagtctggccagtgggtgaaattccaagcatttgctccttcttcatctgtgttgccaatttctccaacctttaatcttgttaaacctgtggttccacccgggatgcctgataactcaatccaagagatgaggacgagttcagatgagtttggggtacaggtaaagccttgggttggggaaaaaattcatgaagtggcattggatgacttggagctcacacttggaagtgggaaggtgcggagttaggctgctagcagaattacctcatctgggttatgtaagaatgagaccacgggattgtttttgctggttggttgttcactcaacttggtgttagagcttgagctaatagctacctcatccagctctgttggtgcaagcagtttatctggaagagactagagagttattattgggaaccagatttatcagatattgtggtcattttatgtagaaaatcatctccttccatgccttgggtaaaatgtagaaatgagaattacacttcatcccttcttgattaaatcagctatggttcaaaaaatctcatcaggcataactgcttaagagttatgtgttgtgagtgatttgaattagaaatttgaggttttgtcaagtttattgtctgtcagaaagctcacaagaccaacttatttgttaatgtcatacatttaagttgtattgtttttctttatgttcctgttctttgtatcaaatagtttgtatgtgattttgattttcaccaacaaaaaccttaaggcttaggtatatgggttttctcctcactatgatgtttaacttttccacttttgtccgatgtgaaacttcatcttacacttgtaacccaacagagatttgctgttatattgtc

SEQ ID NO: 109688 - DNA, 469 bp, Glycine max
  Clone ID: PAT_MRT3847_70061C.1
caaaaaggggccaaaataaattcctccaacaagaagctcctcaaaagtcaaatcgcttggtaaaagctggaaaatgaagggaaaccggccgtcctcatagatggatcatcctgccgttgggaaaattttcataaccaataggaaccaaagggtaaaaaaaaaaacctattgctcagggaaaatccatacccttttgaacagatttttgttggaagccacttttttggaaaaacgccttgttctcgaccctgcaataaaaaatcaccttgtagcatcccattgaacccccttgctccgggaggaacttgatgattttttttcccaaatgcttcccgcgaatgctaaaatccacaacaccttcctaaatttgcccaattttgccgaattttctaaaaaactttttttcaataaacaccctcccggccgcaatgatctttccggaagcctggttttcgatcaccccgatcac

SEQ ID NO: 109689 - DNA, 276 bp, Glycine max
  unsure (1)..(276): unsure at all n locations
  Clone ID: PAT_MRT3847_70062C.1
attaacctcactcaaactcgggatcncananaccaacaacagttacttgnactgaggtttcangatgttnctggaacttgtcacttggtttgtntgtgttanctttgtatctgcacttgagtcncacaccaagtncaanatccaaaagcacttcgncacnccccaaancctccaagncncaangctngtccttcctncattggnccacnttaanctnttaaaaggntaanttcgnccananggaagncatcnatctcnncnaaagagcagggccct

SEQ ID NO: 109690 - DNA, 193 bp, Glycine max
  Clone ID: PAT_MRT3847_70063C.1
gcccaatacaggctatttatgctttttttagaccaacacgcgctatttggggacgtggccgtgggaggccatatgatgcttgaaggtgtcggccatatgaaggagggggggcttggtcccaccgcggacctgtttcctcaggggatgcccgtgggaacaatggacaaaatgttcgggggggttttggttccgg

SEQ ID NO: 109691 - DNA, 370 bp, Glycine max
  Clone ID: PAT_MRT3847_70064C.1
aagatctgcctccgcattctcactatcttcaccaaacaaaggaagatgtgatcgcagggaacaatgggtgactacttcctatagactagtccttgcctgctaagacatgcggctactgatacaccaccttgcaccagataccaacatcaccaagtgtgcatatctcgaaataaaaccagtatagcaacgatcgtgatcaacagccggtccattgtagaaacagagaaatatttaaacgcgctctggcatccgtgggatgggaattgataggacgctacccatcgtttgttgaaacgtctcatgctgctgactcgatacatcacatacagcgttgctaatatcaacctagggcgaaggaaacactttttac

SEQ ID NO: 109692 - DNA, 221 bp, Glycine max
  Clone ID: PAT_MRT3847_70065C.1
cccacacgtactcttacctggtttcctttctaccatggctgctaaaacacaggctgggattcacgctcgtgcgaacgaccctgacatccactgcgacgcgtccttcaattcatctttcccacgattatgcctatcgagaacaatctccagggcatactcccgcgataaatctagcgattactcttgaaataccgattcaagcacaaatttccattcataca

SEQ ID NO: 109693 - DNA, 1694 bp, Glycine max
  Clone ID: PAT_MRT3847_70066C.1
aaagagacatgttggaaattttactgtattagactcataatataatacaaataatttatacttgtatttccacttgttcttcagcaaactcacaaccacaacccaaccaacccacctgaactactgaacaacaacctcttcttcttctctctctctctttagcataatcattcatcaccacacaagagaaaaaagaaaaagaacaaagaacaaataaacctttttttttttataaaaaaagaaagaaaaggaaataaagttttttgttttttcgatgaaccagaagttcatcggaaagccgccggcgacggtggacctggatcggatgccggagcgtgggtcccaccaccggcgttcccactccgacacctccttccgcttcgccgcgaacttcgacgaccttctcctcttcgacccctccgacttcgacatctccggcctcccgtcgccgctccctctgccatctccggtctccgccggcttggttccgatgtccgtcgactccgacgagtccggcaaacagccgaggccggccggggcgtccgccggcgggcacctgcggagtctgtcggtggattctgacttcttcgacgggctcgggttcggcggcgacgagagaggcgccgggaaaggaggcggcggcgagcggagggtggggcaccaccggcacagcaactcgatggacgggtcgtcgacgacgtcgtttgaggcggactcggcgatgataatggacggtgtgaagaaagctatggctcctgataaacttgctgaacttgctcttatggatcccaagagagctaagaggattcttgctaacaggcaatctgctgcaagatccaaggagaggaagattcgttacacaagtgagttggagaggaaggtgcagactcttcagactgaagcaactaacctttctgcacagcttaccatgcttcagagagacactacagatttgactacagagaataaggagctcaaactgcgtttagaggctttggagcaggaagcacagcttagagaagatctcaatgaggcattgaaggaagaactgcagcgccttagggcacaaagtactcgtttgggtgctattggtggtaacccttcttttggtgggatattcaaccagttggcttcccaattagccatgcaacagttgtctaattctgcaccccatcagcagacacaacaccagccacaggttggcatgcctcctcctccctctggacagaaccaccctaacttcatggacttcaatcagcagaagtaactcataatagcagtagcagtaaatgattgattacatgaatgtataactggtgagacttgtgaagggtatattgtgcagttcagtgtctttagtcctgtgttgtttatcttcagctctaggatgtgtactttacgcagttctaggttagaagcgcagcctctgaaatgttgtgttatagctcttgggtgaatgaagttaacataaatatgtagaaagacttgttgataatactatagatggtgaatgaagtttattaattagcttctggaattaaaaagggtgaatgagggtaacataaaggtgtagaaagactagttaataatagtatagatggtgaatgaagtttattaactagcttctggacttaaatagcatgctatatatgttaaaagttaaagcagaaagcatcttctcggtatgccttgct

SEQ ID NO: 109694 - DNA, 586 bp, Glycine max
  Clone ID: PAT_MRT3847_70067C.1
agttaataaacttcattcaccatctatactattattaactagtctttctacacctttatgttaccctcattcacccaagagctatgacgcttacatttcaaaggctatgcttctcacctagaactgcagaaagtacacatatcctagaactaaagataaacaacacatgactaaagacactgaactgcacaatatatccttcacaagtctcaccagttagttatacattcatatgcacaggatgttacttgtgatgaatattgcatgtaatcaatcatttactgctacaactattattagctacttctgctgattgaagtccatgaacttagggtgcttctgtccagaggggggaggaggcatgccaacctgtggctggtgttgtgtctggtgctgatgggacacagaattagacaactgttgcatggctaactgggaagccaactggttgaatatcccaccaaaagaagggttaccaccagtcatagcaccccagcaagcactttgtaccctaaggcgctgcagttctttcttcaatgcctcattggagatcttctctaagctgtgcttcttgctcaaaagcctg

SEQ ID NO: 109695 - DNA, 288 bp, Glycine max
  Clone ID: PAT_MRT3847_70068C.1
tcttggtgtgtatggttgaagatgccttttaatgcacattacagtgttgtaggctatggtatagaataagtatggaactatcgactgtgcttcatataatactactttgggtcgattctaggagaggcaggaaacataatttgctttctctatctaataagtaataagaaattatgatcttctctcattttaatcttactcataagttcaagtgttttaagtcaggtaatactgaatgatttaatttttgcccatcttataaaaaccgagcaagggaactctcagatg

SEQ ID NO: 109696 - DNA, 465 bp, Glycine max
  Clone ID: PAT_MRT3847_70069C.1
acggctttattttttatgattgtgggtgaataggttgtggtcgaggtcggaattcgccaacaaaatgttggttcccatgttgctggaagcaatggatgactgggatatgcttcatggactccacatactgtgccagatgtgcatgccaaaagtagcggaaagatactttgacttcctccttggggagggtgatagtcaaaagggagatgctcacattggtgaattgaacattgagtggtttgtttcagtgactacaaaaacttagtcgggggtaactcctaatgaatggcatctggttctaccttgtgacaaaatttctggcgttttgatctacaattgaccagagattgggttgggcagaacatgagggatatgacccttttcttgggggaattttataatatgctagcaccgatgaagcccctagatgatgaaattctttccaaggttgaaaaagatcttgtt

SEQ ID NO: 109697 - DNA, 808 bp, Glycine max
  Clone ID: PAT_MRT3847_7006C.1
acgagccggaaacaaaagtccgcccacgcgtccgctcaattccgcgctttaacaacagaaagaaatccacacatttccctttcaatggcacgaaccaagcaaacagcgcgcaagtccaccggcggcaaggctcctcggaagcagctcgccacaaaagccgctagaaagtccgctccggcaaccggcggagtaaaaaagccgcaccgttttaggcccggcacggtggcgctgagggagatccgaaagtaccagaagagcacggaacttctgatccggaagctcccgttccagcggctggtgcgcgagatcgcacaggatttcaaaaccgatttgcggtttcagagtagcgctgtttccgcgcttcaggaagcggcggaggcttatttggttgggttgtttgaggatactaatctttgtgccattcacgcaaagcgcgtcaccatcatgcctaaggatattcaacttgcaaggaggatcaggggcgagagggcttgaggttttaaaatgtttcgtcaccgctaggatacgttaaaataggatctggttcatgtagtttggggttttggtgtatttagtctatcgtgagggttgggattgttagtatgaagatgtggagttaaagatatctggcttattagtagtttagtgattactttgaattttctgattgggttaatgaattgaaaggttgattgcaatgaattttggcttcatctagttcttcttccattttggtttgcaaaatcatgcattccgttttgtattatgaggttgatggcatttgctttagcaattttaagtggtagtt

SEQ ID NO: 109698 - DNA, 534 bp, Glycine max
  Clone ID: PAT_MRT3847_70070C.1
ctaatacgactgactataatgcacgctgtcctcgcgcggttcctgtacagcggtcccgcttcgtcccactcgttcggccgcatataaagatgagcttgattgctcatcatatatcggagtccacgttgcctggccactccaaacatgacactcagttgactgtgatgaatcaaacccccacactgtatcctaagattgagggccctgatcatgaactgaaaatgctcattagcctagctattgggcatgatcacatggtgttgcggcccatatttgtctcaccagcgaatccaatggtggctgctgccggcgcgccctagggcatccgcactaggaaatatagatggctgatccactacaaaagttgtttgatgctctatactaggccctatctgttggacctattcactcactagctgtacatagctaccgatgacacgaagaaggcgcttggatatagctatacctcgactattagcttgcaccaaacacttgatgtgcggcctaaccacttccatccacatacaccccatt

SEQ ID NO: 109699 - DNA, 456 bp, Glycine max
  unsure (1)..(456): unsure at all n locations
  Clone ID: PAT_MRT3847_70071C.1
nnnnnnnnnnttttttttttttttttttttttttttttttttttttttttttttttgttttttttttttggacaaaataagccatttttagttttgggtagattctatgcttcacaatagcatacaattccatcttttttcaatttgggatttggaaagggaaacggtttaatccttttttagaagggaaaaaaagggagggagggggatttgcccttgttttttagcccttcacattgccccggattttgataggcccttcaaaggatgggcaatcttgccctcagtggtttaactaatgctggcaacaaggggactctttttgggcccaacatcctctttttgggagcttccgggacctttaagttttccttctgaaccattaaacacaacatccttaaattttttgggctggtggggcccaaaaatcaactttttattaatgggggccccagt

SEQ ID NO: 109700 - DNA, 193 bp, Glycine max
  Clone ID: PAT_MRT3847_70072C.1
catatgcttttggtgagattaccctgcagacaatgagcgagaaggaaaacatgtcttgctgcgtcgggggtggcaatgaaacagtgatgcctgcttggacacacctgttgtggtcgaagccctccatcatgtcttcttcgccgaaatgcctctgcctgtgtctgatgcagaatcaaaccttggaactctgcta

SEQ ID NO: 109701 - DNA, 168 bp, Glycine max
  Clone ID: PAT_MRT3847_70073C.1
ggccaaaagatgaaagttttttttattttattagactttcccatttcaatagacacaaataaaagctacccttttctctaatttacgcacaagaaaaaaaaaacggccaggtcggagaatttaaatttttggaaagaacaataaacatggcaaaaattttgggcggag

SEQ ID NO: 109702 - DNA, 159 bp, Glycine max
  Clone ID: PAT_MRT3847_70074C.1
ctcgagcctaactacgacgagaactgaagaaaaataggaatcgaaataaatccgataggaacatgatgtaggaatgggaacccaactgaacggatatggtgggtgggctgcgatccacaccgatgcggggcttcgatgctgtgcattactggcaccgat

SEQ ID NO: 109703 - DNA, 419 bp, Glycine max
  Clone ID: PAT_MRT3847_70075C.1
gaagacgacagaaggggggtatgccgtgacaggttaatataacagtctacaaatgaacaaagactcaaacacatgaaaatgtaattttgcagtaattaatccagcaccataattccacatcattcatttacaagttacaaccataggctagcacagggtaacagctaatctcacttgaaacttgtgagtcatccacagcaagtagagtaataataggccatagcatacagacaacagacactaaatgaaaaactaacctggtaaagtccatgaaataatccactgtcttttccagcttccaacctccatactcaccagcccagggtggaagcgagtgatgaaaaagagtgagcatcactttcattccatacgatcgaaccctattgataatccacttataccgttccaatgcagcatag

SEQ ID NO: 109704 - DNA, 578 bp, Glycine max
  Clone ID: PAT_MRT3847_70076C.1
atgggggaaccactattcttttttttcttttttttcatttcttcaaattgcttcctaaataatggtcccaaccggataaacccaacccaatcaaccaatctttgaactggccccttaggggcagtaataacacaatcatttttatttgtccccccaataaccaaatgggcaacaattttgaccctacaaactggatcctggggggcaatggctgccccccatttgctgggaaaccttctcaaaagacccaactcatggggatgttttggctctccctcccaaacaggaacgagcttccattcctttggaaccttttcaaccgccaaagtataaacttcaaaatccccctccgaattgatgggaaacccggggaatgatttgaaattaactattcaaaaaaaccaaaaggcttcatcaaagtgtaagggaaccccgttgatgccaatgtataaatagctcccaaaccccaaggaaacaacagggggcgggaagacccaaaaataaaggaagacggaagcctaatattttaccgccccccctcgggaaataaactctaatccattggtgcaaatattgct

SEQ ID NO: 109705 - DNA, 486 bp, Glycine max
  Clone ID: PAT_MRT3847_70077C.1
gtatgcacgcgtacgtaagctcggaattcggctcgagggcccgcgctaccgagaactggccaaaaactggatccccacagccggcatgtggggcactgtgggtgccgtgggactggtgtgggtcacggactggcggctgatcctggactgggtgccgtacatcaatggcaagtttaagaaggacgattaggcagccccctcccccaccacaggcctcgatggtagcatgcgctgaggcctcagaaacagcttagtcctgtggaggacacggaggaagaagtctgcatcgatctggggagctcctgccttgacgggtgcagcattaaaccttgttcgtacgccttggacgcctggctccctctacgtcatctcccttgaggatttcccagctcaagaatcctttgagctcccaacacttgcatgtcgggagagtctaatgtcaggcagaaatccttattacactcaagtattttctggatggaaaaa

SEQ ID NO: 109706 - DNA, 241 bp, Glycine max
  Clone ID: PAT_MRT3847_70078C.1
ggcagcgattctaagatacaatctaggaaagccaaccttatgcaattttcaacccagaaatcgtagattacttctaaaaatatactgcgcattgatctcctttaaaaattgaggaaagaggattaaaagaccataattggaagagatggcttgaagggggtgctgggagtgccttcagaagctgaataacttaatactgaccactaactggtctgaccattgaggagctacgagaatctat

SEQ ID NO: 109707 - DNA, 275 bp, Glycine max
  Clone ID: PAT_MRT3847_70079C.1
tacactattaaagcccgccaaggatttattgtattgtcaaacctcattactgaatcaaggtgctctctacgcaccaaaggttgattgagctttggcatgctaaagaaaccatgccagtgctaaggagcacactcactgccaatctttcaaaggcagcataattaagtcaactgagacgggcttgaactgcaaaggctcagtcagactggcatgctagacgtcctgagcggggcccaattccaccctagtggttgattgatatgcggagctctaca

SEQ ID NO: 109708 - DNA, 270 bp, Glycine max
  unsure (1)..(270): unsure at all n locations
  Clone ID: PAT_MRT3847_7007C.1
ttataactnactcactagcttctnntctgtnctcaccantggcatcaacaatatcagcancggncatgatcaacgccaantgcgtcaacccaaagttccccantnncaccaagctcgcaccatcaaaaccctgcgcttcagatcaaatntcnaaagggcgtcatagcntcacccganagcataaactttcccccgcgacanaatcgcnggagcaatattcacaaccctcggaactgcngaagccgcattcgtgttcaacnaaagccgnnc

SEQ ID NO: 109709 - DNA, 198 bp, Glycine max
  Clone ID: PAT_MRT3847_70080C.1
aacatttctctaatctgaatatggcagtgaacaacagtcgtaagggaattcaattcatgacgtttaatctctttcatcttctccgttctgccatctctgtttattcccatgcatcctctaatgcctttcagatttgccgatgggtataacatcttgggtatcacatcgtgagaactcaccatgtggaagtcgcctaag

SEQ ID NO: 109710 - DNA, 247 bp, Glycine max
  Clone ID: PAT_MRT3847_70081C.1
ctcaatctttcccagcttttttatttaccagacacactcactactacccttttcacacccaactatctctctccctctctcctcaactccaacccaatcaacccacttcattaatcactccaattgttgtcccactttgtcacattgctactactactcctttaactcctctcccttgtttcctaatataattcccaaaatcacatcattttgcttcaggttccagagacatatacatgataaacct

SEQ ID NO: 109711 - DNA, 400 bp, Glycine max
  Clone ID: PAT_MRT3847_70082C.1
gccacaggccttctccgacctcatcgaacgcaccaactggcgctacagcgagtacttgaacgccgataacaagggtgaagtctatcgagacatgctcagcaacaccgttccgtcctccagctaaccgacattgacgggcgttgctgcctacgatattagtcccaatgacttggacctcatttgcatcctggctatgaactgcggaaccatttatgccgacgatgcaaatcccccaacagctggtgcaacatcatacgcagctcgcttttaccattactatcatcttcaggactgttgtttatcttccacacaactcaatgcagagcccacaaggcctagcgcgcttgcatgggccatggacttgctgcggaacaaggtccacattcaggatgctccgcta

SEQ ID NO: 109712 - DNA, 336 bp, Glycine max
  Clone ID: PAT_MRT3847_70083C.1
agctagaagtttgcattcgtaggacaacccagtgtgatattggcctgaccaatttcatttattggggattttggccagatgccatccctggatatgccattgttgaacggacaagctttgaaatttctactgagactcatgatgagcttttatatgacaaggtgaagctgctttgaaatggggtacggttgtagactgatatatcagaaaacctgagatctgaaagcctttatcgctgataatttacatgtgatccttggcctgatgcttttttcgtctaattgggcaatgatctatgaaatgaccagcgcatgaatttaaagaactgtatgcata

SEQ ID NO: 109713 - DNA, 534 bp, Glycine max
  Clone ID: PAT_MRT3847_70084C.1
ggctcgagttctgatttctgaaacttactccatacatgatcggcgacaacatccttctcagtactcactactcaggtcagatttcaattctcccttctatttgtctctcttcattaatatcctttgactttgttccatggcaaataaagcttccatcttcggcacaccctactcgattcctcagatgggtttatctctcttcaagctgtattgcagatatttcagaaacccctggaattcttaagcccaaggattcatctgaattcgaccaaaacctcaactttttgaaaaataagcttgccccagataacttaatccgggttctggaccgtacaagcgatttgaactcggcagtgaggatattcaaatgggcttcaaggcagaagagttttcaccacacttacaacacttatttcaggataatcttgaactgggtatggccgggaaagttttggccatgagggatttctgtgaattcatggctaaggataggtgcccgggtgctgaagaagctcttgtggcatggctcataca

SEQ ID NO: 109714 - DNA, 310 bp, Glycine max
  Clone ID: PAT_MRT3847_70085C.1
ggctgtaaatcaccaaaccggaatcgtgtgacagaagcatgatatgactacagcggtcactatcgcagaggtgatagcgacgagatctacatgaacatatcttggactaatatcctgataccatcacacatcactccgtgtcaagagaattcacctactgttccacagctgaagcatcgaagatcacgactaaacgctatgctgatattgacagaagatcgtggtgccgttcatactcctgatctggacttgcacagaatgattgctctctaatatgccagttaacagctggatacgagctaatttacga

SEQ ID NO: 109715 - DNA, 564 bp, Glycine max
  Clone ID: PAT_MRT3847_70086C.1
cccacgcgtccgggcaaagcctagtcctaggaaaaaaaaaaaaaaaaaaaaaaaaaaaaaaaaaaaaaaaaaaaaaaaaaaaaaaaaaaaaaaaaaaaaaaaaaaaaaaaaaaaaaaaaaaaaaaaaaaaaaaaaaaaaaaaaaaaaaaaaaagggggggcggtttaaaagaacccaagttaacgaccccgggcaggaaatataaaaccctttcaaaaggggccccaaaataaaattcaagggccgaagtttaaaaagggcggaacgggaaaaaccctggggtacccaaattaaatgccctggaaaaaaatccccttttcccaaagggggaaaaaacaaaaaaggcccgaacaaaccccccttccaaaaattggcccacccaaaaaagaaaagggaaccccccatgaacagggccataaagcgcggggggggaggggataacccccaaaaaaaccgtacaatttgcaagccccctagcgcccgttctttaggttttttaccctaattttttagcaaagttcacagggttttccccgaaaaaacatataaaaaggggggcccccc

SEQ ID NO: 109716 - DNA, 238 bp, Glycine max
  Clone ID: PAT_MRT3847_70087C.1
cggtcacatgtcattagaaactcatatacactcacatgcagacactacagtgtccatctgcactgctataacacgcagaataccacgaaaacgactgactcatgaaggaaatggattctcgggctcattaatcatgacatccctcagcccgcgctagaaacgccacacgtatatcggactcacagtgaatcacccgtcgccagatctggtaacaccttggggagattatagtcgtgga

SEQ ID NO: 109717 - DNA, 590 bp, Glycine max
  Clone ID: PAT_MRT3847_70088C.1
ggctcgaggcttgttgtagttgaagttactgcgttctctcgcagcctagctcaaggcaagccctacaagcattcgccaaggcctgtacccagcttgtcagggggcctgtgggcccaaaaaaacagcttcaagatgagccacggacttgaaatgctatgggcgaatatcaaggatggctaccttgaggctgtgttgcgagggcatcgctcagggctccttacagtggctgactacaacaacttgtgccagtgcgagaccttggaagacatcaagctaaacttgactgcatctgactatggaccatacctagccaacgagccatctcctctgcacaccactactattgtggaaaagtgcacagagaagcttgtggatgactggaacaggatgcgctgccaggcagatgaagcgctaggtcgcttcatggattactgcacctatggccatatgattgacaacgtggtgctcatcgtcacaggcacactgcatgagagggacgtgcaggagcttctagataagtgccacccattaggcatgtttgacagcatagctacactggcggtggcccataacatgcgggagctgtaccg

SEQ ID NO: 109718 - DNA, 241 bp, Glycine max
  Clone ID: PAT_MRT3847_70089C.1
ttcaaatgttgattagtggaaaggaaagtgaggcatatagaggaatagatacgcttgaagcttctgttgaccattctaaggtctcttgtgaagttggtagcataaaagaacctaatccttcttatagtgaaggtaggatccatattgatcatgtaaatggtgacattcatgacattacacccgttaccttctcaacttcttaagaattttacaatattgcaacctttctttttttttattt

SEQ ID NO: 109719 - DNA, 207 bp, Glycine max
  Clone ID: PAT_MRT3847_7008C.1
ttcgctgaaacggcaaaaatacatcaaattaaaacatcacgaggggcgggccttatactaaaattgcactgcgcagaaaaatggaaaacagctactcaaacatttcagccttgttgaaacattaaatgctgggaatcctaattagcaaactccaacaaagatgttgacttgacgcttattgtcaccaccaatgtaaaagggcttgcg

SEQ ID NO: 109720 - DNA, 632 bp, Glycine max
  unsure (1)..(632): unsure at all n locations
  Clone ID: PAT_MRT3847_70090C.1
gcgggataaggattacaaagacagaggaagggtgagggaatcaagggaacgggatagacaagacaggtccctcactctctcgtactgccatcaatccaagttggtgatgctgtttcaatataagattttgtttaatttatagaagacggcataaagagaaaaaggaagaagcaacagaacctgaggctgatcctgaaagagatcaaaggactgtgtttgcttatcagatttctctgaaagcagatgaaagagatgtatatgagttcttctcaagggctggcaaggtgcgagatgttcgcttgattatggatcgcaattcaagacgttccaagggtgttgggtatattgagttttatgatgtcatgtctgtccccatggcaatagcactttcgggccaacctcttcttggtcaaccagtgatggtgaagccatcagaagcagaaaagaatttggttcagtccacaacatctgttgctaatggactcactggacttataggcccttattctgggggagcaagaaagctgtatgtnggcaatctgcatgtcagtattactgaagctgatattcgtagggtgtttgaagcatctggtcagggtgagctagtccagctgcctcttgatgaaagtggg

SEQ ID NO: 109721 - DNA, 350 bp, Glycine max
  Clone ID: PAT_MRT3847_70091C.1
ccaacaccactaaaccctcgtacagccttaaaactacgacagttatctctaacaaatggctttcaggccggcttcactgccacgctccttaaggtccaccgatagggacaaacttcaacaggcggttccatcgatacacttttcacaccgttgatcgacaccattagccgatactcgcgagcacaagcgtcgtttttccatgcctgcttgcaggacttaggggcaattggggtgcatacaacagcttgtgccgatatctaaaactagcctgacctcacacgctgctatcagtgcgcgtgcttgcttataactgtgccatagaacctgaggaaacggatggattagcatag

SEQ ID NO: 109722 - DNA, 425 bp, Glycine max
  Clone ID: PAT_MRT3847_70092C.1
tcggttgtgacagggagtatagagatatagagagaagccgggataaggattacaaagacagaggaagggtgagggaatcaaaggaacgggatagacaagacagacggtataaagagaaaaaggaagaagcaacagaacctgaggctgatcctgaaagagatcaaaggactgtgtttgcttatcagatttctctgaaagcagatgaaagagatgtatatgagttcttctcaagggctgtcaaggtgcgagatgttcgcttgattatggatcgcaattcaagacgttccaagggtgttgtgtatattgagtattatgatgtcatgtctgtgcccatggcaatagcactttcgggccaacctcttattgatcaaccagagatggtgaagccatcagaagcagaaaagaatttggttaagtccacaaca

SEQ ID NO: 109723 - DNA, 1146 bp, Glycine max
  Clone ID: PAT_MRT3847_70093C.1
gtctcgggctttccttctctctcacatttcattacttctaccaagctactacatttttaacttcctctttctacatttcattcaaaacaatcatggcttctcttcattccattacattttcaacaaaaactgtcctttatgtatttgtattggcctcttccatcgcagcctctgctggcaacttctaccaggattttgacgtaacttggggagatggtcgtgccaagatactcaacaacggcgatcttctcactctttcccttgacaaagcctctggctcggggtttcagtccaaaaacgagtatctctttggcaagattgatatgcaactcaagcttgtacccggaaattctgcaggcactgtcaccgcctattatttgtcatcaaaaggatcaaattgggatgagattgactttgaattcttggggaatctgagcggtgacccatacattcttcacaccaatgtgttcagtcagggcaaaggcagcagagagcaacagttctatctgtggttcgacccaactgcagatttccatacctattccattctttggaatcctcagcgcataatcttctcagtggatgggaccccaataagagaattcaagaacatggaatcaaaaggagttgcattcccaaaggaacagccaatgaggatatactctagtctatggaatgctgatgactgggcaacaagaggtggacttgtgaagacagattggacacaagctccattcacagcatcatatagaaatttcaatgccaatgcctgtcccaactgtggatctcaataagcaacaacatacttacttgggtgcagaagaattacataatttcacaattactgcactgacaccaaaagatttccacaaggccttcccccagagtgccaaacatcttgaactccttctaatcctactcgaaacaaataccacaacactattctttattcttcctaggctgattgaattgcttttcatttgtatggatgttcattcttttattctttgatacttgtcgattgtattacaagaaacggaaagaagcctcaataatacttttcttgaatcttttacccaaaaaaaaaaaaaaaaaaaaaaaaaaaaaaaaaaaaaaaaaaaaaaaaaagggcgaacaacaactaag

SEQ ID NO: 109724 - DNA, 793 bp, Glycine max
  Clone ID: PAT_MRT3847_70094C.1
tacatcaaaactttgtgattgctatccgccaaagttgaattacatcgatgtttctagcatcacaacccttgttccaatcaataaaactgccaagccacaacagtaataggacgcttatatcaaaccaaaatccccgaaaaaattattcaagtagtaactgcagcttttacacataagcacctttaacttatccaagacaaatgtgcatagctaaatctttttcaaaggaagccgttatataattctaaggatgattatttctgccacgagactcctcatcacacaacaaccgtgaatttatctgctgtctgggaatttatcctcgtatgactgaggcaccatgaagcttgcagtgatcatcttcccagcaaaccatcttccgtgcaaggcctgctgtgcacttattgcagattgggtatcttcaaatcgtaaatagacaaaaccagcactcttcttatcaacatatatgtgttttaaggccccaaacttagagcattcggcttcaacatcttctttaatatccaaatcaaaatctggttcagtctcatctttgggatcaaacatattctttaacattaagcattcacttggaacaccgattggatcaatagaaggaattgtagccgtgggaatttggagacctccacctgccaatccacccacaggcgcagctgcgagtatgtttcctgttgcaggtagattaagacctgtgttgttgacaccagaattaccgatggaaccaaccatgcttgatgcagtaccactacgatccaacttctgcatgagaattgct

SEQ ID NO: 109725 - DNA, 1222 bp, Glycine max
  Clone ID: PAT_MRT3847_70095C.1
cccactcttccgcccacgcgtacgctttccttctctctcacatcagattactactaccaagctactgcatttttaacttcctctgtctacatttcattcaaaacaatcatggcttctcttcattccattacattgtcaacaaaaactgtcctttatgtatttgtattggcctcttccatcgcagcctctactggcaacttctaccaagattttgacgtaacttggggagatggtcgtgccaagatactcaacaacggcagatcttctcactctttcccttgacaaagcctctggctcagggttttagtccaaaaacgagtatctctttggcaagattgatatgcaactcaagcttgtacccgagaattctgcaggcactgtcaccgcctattatttgtcatcaaaaggatcaaattgggatgagattgactttgaattcttggggaatctgagcggtgacccatacattcttcacaccaatgtgttcagtcagggcaaaagcagcagagagcaccagttctatctgtggttcgacccaactgcagatttccatacctattccattctttggaatcctcagcgcataatcctgagttatattaatcaatccatggtggttcatatgtacgtatgtttcagcttctcagtggatgggaccccaataagagaattcaagaacatggaatcaaaaggagttgcattcccaaaggaacagccaatgaggatatactctagtctatggaatgctgatgactgggcaacaagaggtggacttgtgaagacagattggacacaagctccattcacagcatcatatagaaatttcaatgccaatgcctgcgtccattctggatcatcatcatcatcatcatcttgcactgccaactcttcttcctccaatgcctggttctcccaacagttggattcaacaagccaggacagactgagttgggtgcagaagaattacatgatttacaattactgcactgacaccaaaagatttccacaaggccttcccccagagtgccaaacatcttgaactccttctaatcctactcgaaacaaataccacaacactattctttattcttcctaggctgattgaattgcttttcatttgtatggatgttcattcttttattctttgatacttgtcgattgtattacaagaaacggaaagaagcctcaataatacttttcttgaatcttttacccttaaaaa

SEQ ID NO: 109726 - DNA, 2667 bp, Glycine max
  Clone ID: PAT_MRT3847_70096C.1
ccacgcgacagcttgcgcccgggcaaacggcaacgcgcagcaggcaggtggctattgaaaagcgctcgcctgctgtgcacgcccgaagctcggtttgcagattcgaccactcaaaccctaacgcttccaacttggaaggccttcgttccagaagatatttagcaaacacaagttgttctaaattacattgttggagcttattagggttacgatggattttgatgagtatgagtatttagagaacgcagttgaaaaccctcaagctaagcacagggctaatggtggggacaaaagtgtgaaatctgaagagagagggcggaatgggagttcaaagcataagggtgatgatgatgatgatgttgatctccatcccaagcattcaaaacctggagacgattctcatgatcgcgagaggctcagagaaaaaagaggctcatcccgtcatggttcaaagtcccgagatggagacaaggacagaagctctgggggcattagggataggaagagggatagggacagagatcatgagaacaaggataggaagagagaccatggggacaaggatgtgaagagagatagggagagagacagagaccacggtcgtgaccaagaaagggacagaagggaccgtgggagtgaggctgagcggcaacagcgaagcagaagtaggtctgataggcatcgaactgatctggatgacaaagacagagagacaagtcgtgacagggagtatagagatatagagagaagccgggataaggattacaaagacagaggaagggtgagggaatcaagggaacgggatagacaagacaggtttcaacttaatgcaattaggtccctcactctctcgtactgccatcaatccaagttggtgatgctgtttcaatataagattgtgattaatttatagaaggcacaaaatcttgtgttaatagcaattgggtgagattcattccctttaattaccatttccgtcaatccacgggtttgattctttgcctatgtcaggtggatttgggctttatacatgtaaagacaatttgctgccatgttgcgaatttaaggaacatgaaaattttgtgttgggaaaatatgacggcataaagagaaaaaggaagaagcaacagaacctgaggctgatcctgaaagagatcaaaggactgtgtttgcttatcagatttctctgaaagcagatgaaagagatgtatatgagttcttctcaagggctggcaaggtgcgagatgttcgcttgattatggatcgcaattcaagacgttccaagggtgttgggtatattgagttttatgatgtcatgtctgtccccatggcaatagcactttcgggccaacctcttcttggtcaaccagtgatggtgaagccatcagaagccgaaaagaatttggttcagtccacaacatctgttgctaatggactcactggacttataggcccttattctgggggagcaagaaagctgtatgttggcaatctgcatgtcagtattactgaagctgatattcgtagggtgtttgaagcatttggtcaggttgagctagtccagctgcctcttgatgaaagtgggcactgcaaaggttttggctttgtgcagtttgcacgccttgaagatgcaagaaatgctcagagcttgaatggtcaattagagattggtggtaggacaatcaaggtatcagctgttactgatcaatctggaatgcaagaagttggaggaaatactggtgattttgatgatgatgaaggaggtggcatgtccttgaatgcatgttctcgagcaatgctcatgcagaagttggatcgtagtggtactgcatcaagcatggttggttccctcggtaattctgttgtcaacaacacaggtcttaatctaccagcgacaggaaacatactcgcagctgcgcctgttggtgaattggcaggtggaggtctccaaatacccacggctacaattccttctattgatacaatcggtgttgcaagtgaatgcttaatgttaaagaatatgtttgatcccaaagatgagattgaaccagattttgatttggatattaaagaagatgttgaagcagaatgctctaagcttggaacgttaaaacacatatatgttgacaagaagagtgctggttttgtctacttacgatttgaagatacccaatctgcaataagtgcacagcaggccttgcacggaagatggtttgctgggaagatgatcactgcaagcttcatggtgcctcaatcatatgaggataaattcccagacagcagataaattcacggtttatgcgagatgaggaatctcgtggcagaaatagtcatccttagaattatataacggcttcttttgagatagatgtagctatgcacatttgtcttgggaagttaaaaggtgcttatttgtaaaagctgcagttactactttcataaaattttcgggggtgttggtttgatttaagcgtcctattatggtattactgttgtggtttggcagtgttattgattggaacaagggttttgtgatgcctagaaacatcgatgtaattcaaactttggctgatggcaatcacaaagttttgatgtatgatcaatgatgggaccatctttctttgtgagtcgattaataagcctgaaagggaatcagtagaggtggtt

SEQ ID NO: 109727 - DNA, 513 bp, Glycine max
  Clone ID: PAT_MRT3847_70097C.1
ctctctcacatttcattacttctagcaagctattacatcttttccttcctctgtctacatttcatttcattcaaaacaatcatggcatctcttcattccacatgttcaacaaaaaccgtcctttatgcattggtattgttggcctcttccatggcaacttctaccaggattttgacataacatggggagatggtcgtgccaagatactcaacaacggcgatcttcttactctttcccttgacaaagcctccggatcagggtttcagtccaagaacgagtatctctttggcaagattgatatgcaactcaagcttgtacccggaaattctgcaggcactgtcactgcctattagcttctcagtggatgggaccccaataagagaattcaagaacatggaatcgaaaagagtttcattcccaaaggagcagccaatgaggatatactcaagcctatggaatgctgatgactgggcaacaagaggtggcattgtgaagactgattggagccaagct

SEQ ID NO: 109728 - DNA, 1235 bp, Glycine max
  Clone ID: PAT_MRT3847_70098C.1
ctctctcacatttcattacttctagcaggctattacatcttttccttcctctgtctacatttcatttcattcaaaacaatcatggcatctcttcattccacatgttcaacaaaaaccgtcctttatgcattggtattgttggcctcttccatggcaacttctaccaggattttgacataacatggggagatggtcgtgccaagatactcaacaacggcgatcttcttactctttcccttgacaaagcctccggatcagggtttcagtccaagaacgagtatctctttggcaagattgatatgcaactcaagcttgtacccggaaatttacggctgcgagaagacgacagaagggtgtcatcaaaaggatcaaattgggatgagattgactttgaattcttggggaatctgagcggtgacccatacattcttcacaccaatgtgttcagtcagggcaaaggcagcagagagcaacagttctatctgtggttcgacccaactgcagatttccatacctattccattctttggaatcctcagcgcataatgtaagcacttgtcaatggcctaagtaccctcaagcattcctcaaaaatgttttatatttataattcataatttcacaattcacagcctgagttatattaatcaatccatggtggttcatatgtacgtatgtttcagcttctcagtggatgggaccccaataagagaattcaagaacatggaatcaaaaggagttgcattcccaaaggaacagccaatgaggatatactctagtctatggaatgctgatgactgggcaacaagaggtggcattgtgaagactgattggagccaagctccattcacagcatcatataggaacttcaatgccaatgcctgtgtccattctggagcatcatcttgcacttccaactctgcctcctccaatgcctggttcaaccaacagttggattcaacaagccaagacagactgagttgggtgcagaagaattacatgatttacaattactgcactgacaccaatagatttccacaaggccttcccccagagtgccaagcatcatgattgaattggttttcatttgtatggatgttcattcttttattctttgatacttgcaagttagtatatcttgaaacttttacacttaatttacatcatgattgtattacaagaaacggaaagaagcctcactaatatatcttgaatcttttacacttaatttacag

SEQ ID NO: 109729 - DNA, 547 bp, Glycine max
  Clone ID: PAT_MRT3847_70099C.1
gtgagcgaggtacggattgacggtgccaagcccagtatatgaattctgtgggcgacgatggggtacataatgaatccaagcgagactagcgtggcgactcatgccagattggactagactgagagaccaatttccttcatgacgagctgatcctttctttgataagagcttttcaaccacttttactacctatagcaaaaactatactacaaattcgatgatctgaacgaaagattagaccgcttacaacactaattacgactcgctacatcttctctgtcgaatggaaacctaactcgacggctcgctactaatcgaactacgcacgctggactctcgctgaacagctgaactgtatgaactattgaccgacacagtctacattattgacaggtaccccgacggcgaaggcgacgacactacctgtgttatactcaaactaaagtccttatgtcttcacgtggacgcatatgggatctgcggcttactcagcgccaagaagaaagagctcgaccgtctacgcgctgagatgcctgtggctatggcc

SEQ ID NO: 109730 - DNA, 202 bp, Glycine max
  Clone ID: PAT_MRT3847_7009C.1
gcgaaacgcacgcgggctagacgctatcctgttacatcgattccccattctgcagggctgagagacgttttcctgagcccagtaaccgcccgtaccatctctcacgatgtggttatcgcgaacaagctaggtgtcgcgtcttgctggaagttgaggccgcctaggagattgctctgaggatgacatgcctatcatgggagca

SEQ ID NO: 109731 - DNA, 517 bp, Glycine max
  Clone ID: PAT_MRT3847_700C.1
gcgcccacgcgtgcgattaaacagcatgagtgtggatttgaacaaaactgcctccaacggtcatgataaaatggtaatatcacaagaacatcaggcaaagatcactaaggttagagggttgatagggccactatcagataaggaatctgtgtactgttctgatgcttccatctcaaggtatttaaggtcccgaaattggaatgtcaagaaggcagctcaaatgttgaaacagagcctaaaatggagaaaagaatacaaacctgaagagattcgctggtttaagagacaatgcatggttgggatgtgtcccttttcaataaaactaggttaagatggttaaagtgagtattacttgagagaatgccagagtaaacatctaaagaagtgctcacaggtcagtaactgctaatgttgacatattgttctttcagcagcagcaacctaatatcgttccaatatctggttttaccgtcggtggcacattttatctcaagaccttcctgtcacgttcgtaatc

SEQ ID NO: 109732 - DNA, 746 bp, Glycine max
  unsure (1)..(746): unsure at all n locations
  Clone ID: PAT_MRT3847_70100C.1
cttgatgcctgcaggttgtatatttgctgaacttcttcttcgtcgaccttttttgcaggtaaaaaagatttacatgattgatattctgaagtagatgggctctgacatcaagtgtggtccatttattgggacatgttatccatttaactttatcaactagttgaaattaattttttgcagtctgaaaatcctaaaccattctaagttgttttaactgagcttgaattagctctgaagctgtaggctatggtacttgtatgcatggatgactgttaatgggcttccatttattcccactctatattttgtgaatagctggttttaatatactttccaagatttaaaagtaattcattgcattggctgcctttcttcatttttattttatacttacattattaagcttgtttcttatggttttttcatcagtttgttattatcacttggtagggtacaagtgacattgatcaattaggaaagattttttctgcatttggcattccaacagctcctcagtggcctgatatggtatacctgcctgattatgtggaataccaatatgttcttgccccccctctgcgttccttatttccgatggcaactgatgatgctctagatctgttgtcaaagatgtttacatatgatccaaaaactagaatttcagtgcaccaggcactagagcataggtacctgcctncagcatcccattaacacatcaataaaaaaatttctccatgattaatctc

SEQ ID NO: 109733 - DNA, 299 bp, Glycine max
  Clone ID: PAT_MRT3847_70101C.1
ctacgtcaatttcatacgaaatctatcccatgcgcactgtatacccggcgctgactcgcgtgcacatcaagctaattctgtcgtacacactcgtagtactcgtcgccttgtgctcaatcaccactatagctcaatcaccagctgcagccctcaaagccctatgcaaagcctgcaccttctaaacctgctcctcgacacaccggctcgagcgcccgcaaatccattactcccttcattaccccactcacgctcttcagcgtgtcgattcatgtggcgctcaagacattgcgaagatccta

SEQ ID NO: 109734 - DNA, 201 bp, Glycine max
  Clone ID: PAT_MRT3847_70102C.1
gggggcaaaaattgaagttatgctgggtaaaaaaaagcaagaaatgtttgatctacacgtgaaatgaccaacccaacaaatggaacaaaagcaaaacattattcaaagtaccaggtaaaaaaggctcaggccaatatcaaaaatgaaaaggagaggagcgacattcataaacagggtccacaggaatggtggacatataat

SEQ ID NO: 109735 - DNA, 818 bp, Glycine max
  Clone ID: PAT_MRT3847_70103C.1
caccaccttaatgtaattcatgagcctaagttccccacccgccaaccttccccgccacaacctacccttttgaggtcgggttgcttggcactaacgtaacaccaccatgagtttgaattgccttgcctgtggccaaattcttcaaagggtaaattctgatagggatgatgaatgtctcccaccacaagaaacaaagacgcataaaaggaaagtggcaatgcaagttgatagaagctggtcaaggaacatgaccccacccaaatgtgcacgtagtggaccattggcgaaggttaagacacaagagcatcatagacgcaccaatagtgaagggaatgttggaccgaggttggtaaggagcagtggaatgagaagagattggagttttgaggatttggctgggcaacaagacaagggagttagatgccattgagatatgtatccttcatgggtcataattagttgaattttattgccttttccatatacattgtgtattcatgtgttgggttaattctttgggggagaaattattacatgatccctgactacttggttatattctagatcagtttttacttggcatatactcgagtttttcagtttactaaaaagaattaataaaacttgattatgtgtcatgtgaaaattaaaatatgtaataatttctcatgtcttgggagtgtgagagtgtgggagatgtaaaaaggggatcagtggaattctgacatggtgttttaagcgtttggcaaattatgggagggcttttttttccccatatagtaaattaaatcccttttttgttgttagtttttctttct

SEQ ID NO: 109736 - DNA, 428 bp, Glycine max
  Clone ID: PAT_MRT3847_70104C.1
gcaccaggagagagaactagtctgagttttgtttgaaaatctgttttctgtttttcattctctccaataactacaaaattgcacattcttttcactttgtttattattttaatttttaatgattatacaggaaacattaagtgaaaaaaaggcagtaattttgcaattatttataaaaataagaaaaaaaaataaaaaaaaaatgtattttctcaaactcaacatgttaatagattttagatgaataaaccactaattttgtctctgatgtattatcctttctcctaaagtaactaaattatttaagcgattcccccatttttaaacattcactactttagtcaccaagttcaagtatttcagtaaagttcaggaatcagtctgaaggttctaccaaatactaataataggagtactacttagcatga

SEQ ID NO: 109737 - DNA, 276 bp, Glycine max
  unsure (1)..(276): unsure at all n locations
  Clone ID: PAT_MRT3847_70105C.1
accatggatgcgagactcgcggtaacagcagtagccgcggatagcttcctcaacaactctctgccaatgttcagctacagcagcatcagtgggaaaattcgtcgacaaaaccatcattgccaccacgacaggcccttctcacatagacataatgaccattctttntaaagggtgaaaaaangccncatagaacncgagccattactccgaaccctngccgtcaaacacggacctatcttaattntcaacataggatcaccccccgacatattcatc

SEQ ID NO: 109738 - DNA, 809 bp, Glycine max
  Clone ID: PAT_MRT3847_70106C.1
ctgactggttagggcgacgctttcgacatgcttgttatcgacggccccccccgccttcccttttttccctccctcaccgcacccggttcccccttcgcctcactcctcagcgcgtcggccggggccgttttgttagggcccttggttatggagttcatacagagccgcgtggagccgtgggtgagggaccagcgggcgcggctgctggggctgaaggagaaggtgtcgtggggcccactccagtggcggatgaagtggccgtgggcgtcgcaccgcgagcataagaagcggatccaagaagagtaccagcgcttccggagcctctgccgcgccctcaaggcggaatccgtctccgatttgcaggaccttctctgctgcatggtcctctccgagtgcgtctacaagagacctgctgctgagatgattcgtgctgtaaataaatttaaggatgattttggtggacaagttgttgctttggagcgggtgcaaccttcgtcagatcatgttcctcataggtatgtggtggcagatgcaggagacactctatttgcctcctttattggaacaaagcagtacatcgatgtaattgctgatgcatacatacttctaggcgccatctttcatgatgatgctttcgaggaatctgacaagcatgatgcgactgattctgacgggatgaaaacccaaacggatagattatatgtggaattctctacaatcaagcctaaaaaactgaaagaaaatacaaacctgcagttcataggggtttcatggctcgtgctaaaggaatacctgctttagaattatat

SEQ ID NO: 109739 - DNA, 801 bp, Glycine max
  Clone ID: PAT_MRT3847_70107C.1
gcaatgtgcaaaatccactactgttgctgagtttgaaggccatatggcccatttgaagacaatcaactgccaggcttgggagtatttgaataaatggcccaaacaagcatggacaaaagcccacttcagtacaatacccaaggtggacaatatatgcaacaacacttgtgaggtattcaatttcagaattctgcagtatagatgcaagcctattatcacaatgcttgaagaaattagaagttatatcatgagaaccatggctgcccgcaaggttaaactttctggaaaacctggaccattatgtctagtgcagtataaaagactagaaaaagaattccattttgctaatcaatggactcccatttggtgtggtgataacatgggcctgagatatgaggtccacatgtgggggaataaggttgaggtcaatttaggtgaatggacatgcacttgtggagtatggcaactaacagggatgccatgccgacatgccattgcaacaataactcacaaaggagggaagcctgaggacatgtgtcatgagtggctgtcaatagaagcttataataagacataccagcattttattgaaccagtccaaggaccacaatattgggcccagacacaatatacacaccctgttccaccacataaaaaggtccaaagaggaaggccaaagaaaaatagaaagagatctgtagatgaggacaatgtcacaggacataagctaaagagaaaattggctgagtttacatgtggaaggtgtggccaaactaatcataacattagaagctgtaaaaa

SEQ ID NO: 109740 - DNA, 510 bp, Glycine max
  Clone ID: PAT_MRT3847_70108C.1
ctcaagacaatggagcgttcacgtgacgttcacggtcacgctctacccgtaaaacggatgagctaacggtcctggaaaactccttaagaaaagccctgactgacgctgacagctgcagcgttgggagcgaatatcaacaaatgctgtacaagcttcggcaaacaatcttttggcgaaaacctgacgtgaaggatctataagaaagatccttatggagcatgaagctgcgcctatgtggacgaactcctcgtgaggaaccgtttcaccgttttagcatggatgaaggttggcttcggaatcgggcaccacttgccttggctgtatcgaactttgacggttttcgtcaatgactatccgtatgatcaaaaccctactgggctcggtggtgaatcattggatgaagaagactcgctgcttgcagaacaggccgggactgggttttttgaggcaaactcggagctgatgataccacccaagagcactctgggtgctgcgaggttggctttgcat

SEQ ID NO: 109741 - DNA, 156 bp, Glycine max
  unsure (1)..(156): unsure at all n locations
  Clone ID: PAT_MRT3847_70109C.1
gtcgcactcncngntcgagctcgacgccgctggatatatgtgaatgtgatatttcagcaagggttttgaattatattcagaaaacatggaatctgattcaaaacccttgctgatatatgtgaatntgatatttctctttagccaaaaaaaaaaaaa

SEQ ID NO: 109742 - DNA, 320 bp, Glycine max
  Clone ID: PAT_MRT3847_7010C.1
gggggcctgcctggtgctaaatttattatttttttcataacttccccgggataaatttgaaggattaaaaggtgggcgcttcccctgccggtttgtttactaaaaaaatgtgggtcccctggggggagggaaatcttatattaaaacctctaccctttaggggggattggcccaaacccacttacaccgaccatttaagggtgggacccgcggggaccacatttattgggccccggcttacaagttttattatttggatttttgtttccgccataacgttggttttggctttccatggggggaatttttgattggggggg

SEQ ID NO: 109743 - DNA, 231 bp, Glycine max
  Clone ID: PAT_MRT3847_70110C.1
cccttcctttttttttttttctttttcagtatacagtctgtttatttctatcatatccacaaattgatatcaaacagtagtctcattgatgggacactagtgttcaactcataccaagcttattttcaaagggcattacaagacccattacacatcacattctgttcttaaaatggcagggtaaaaccaacatcgaacatcacacagaagtcagctgcagtcttaaaaccc

SEQ ID NO: 109744 - DNA, 1218 bp, Glycine max
  Clone ID: PAT_MRT3847_70111C.1
ccacgcgtccgttccttcacctgtttttacgaagtgaacctgaatggtttagacgcattgcaacgcctgctttttaagtctactacaaccatatcgctactacaatgatgaacgctgattaccccaactttgccaacccctgaccgggcgtgctccttctccgatggccgtgcgtactaccaccggctagcgccgacctcattggccctccgagacttaccgctcttcatgtgccattcacagatgaccctgacttccaacaatgtcccagaaccacgcgcattccgagatatccttcaggaggatcattgctagaatttctacgtaccccgaaaccaagccacccctccatagggaggttcacgccccgtgtagaccacgtaagtttgattctcctgccttcaatagaagtgctcattattatcgcaaggaagagattagtcacgatgtgggcaacttgttaagtaaaaattaccaaagggcgaaaaattccgcgttagctagcattaggtttggggaaaagggcaaggaggtgatagaagtggatgctgatagttccaaggatatggtttcggaggaggattcgagtgtggaagaggttcgactgtgtggaataagatggacgacaagtgcgctccgtggtgacggagcacaagtggcaagagggtgatttggttgtgactgaggttaacgatttggatgctaaggatatgtgtggtggccctcagcagcggtcaacttcatccgaggtttctgagttgactaatggcgatctgaatgaggctaatgctgacaagatggtggacattctttctttgactccagatcatgatctttcctccgtgcaagcctacaagaagttgctcgatgctcttggccagcgaacggatacccttaacaggctggaggctgaaattaaagttaacgagaagcgtatgtccacgtttgaattgttgcgcccgaagaaggaactagtagaggaagttccattggaaccttttattcctcttactaaagaggaagaagttgaggttgcacatgccttttctaccaaccggaaaaagatcttggtttcccatgagaaatctggcattgagatctcgggagaaaagtttcaatgccttagaccgggtgcatggttaaacgatgaggtaataaatgtgtaccttgaattgctgaaagagagggagagaagagagccacagaagtttctgaact

SEQ ID NO: 109745 - DNA, 1342 bp, Glycine max
  Clone ID: PAT_MRT3847_70112C.1
tcgccgtcccccccgccgtgtacgaggaaaatgtgtccgttgataagaagaagacttatttgatgatggtcggggacggtataaacaagacaattatcacaggcaatcgtagtgtcgtcgatggctggacaaccttcagctccgcaacacttgctgtggttgggcaaggattcgtgggtgtgaatatgaccatccgcaacaccgccggggccgtgaagcaccaagcagttgcacctgatagtggcgcccttttgtccacgttctacagcttctgcttcgaaaggtactccgtcacattatacgtacattccctgagacaattctacagcgaatgcgacatgaatatcacggtcgatttcatcttcgtcgacgccaaggttgtcttccaaaactgcaaaatgtacccacgtctccccatgagtggtcaattcaacgccatcaccgcacaaggaagaacagacccaaaccaagacacaggtatttcaatccataattgtaccataagagcagctgatgatttagctgctagcaacggtgttgcaacgtatttgggaaggccgtggaaggagtattctagaacggtttatatgcaaactgttatggacagtgtgatccacgctaaggggtggcgtgaatgggacggtgattttgcattaagcactttgtattacgcagagtacagcaacagtgggccagggtctggaaccgataatagagtgacgtggcccggttatcatgtgattaatgccacggatgcagctaactttactgtgtccaattttttgcttggtgatgattggttaccgcagacaggagtgagttacaccaataacttgatatagtggattgacacattccctttattcttttgcttcttgtatttttttttatactaaaaagtctgtactctaatctactaattaattaaataccctacctccgacaaatgttcaaagcatattgtttcagtgaaaattattctggtttagttataattaataccacctattcatctaactttactttatccaatttctttcttggagatgattggttaccacagacaggagtgagttataccaataatttgatatagaagatctagtggattgattacacattcactttgttcttttactttgggtattttttgtattaaaaaaataagctgaccattgccagtactctaatctactaattaattaataccctacctctacccgccaaatgttcaaagcatcttgtttcattgaaaattattgtgatttagttataaagcaaaaaatgtattgatttctgtccccttcacaattatttagtactcaatcagtttgtgactctt

SEQ ID NO: 109746 - DNA, 615 bp, Glycine max
  Clone ID: PAT_MRT3847_70113C.1
ccccctggaaggggttaaaaatcttaaacccggtttagctttataaaaaaggcaaaatgggggcctggttcggcccactcccgaacttcctaaaagcctctttgggggaattctgggcccccttgaaccactggaccccctgggggctaaaaaagcccaaaacgagggcggcccgggtttttttgaactggaacccgaacccctggggggaggagcccttttcgttccccgggcccttgggggacaggaggagggggaagcccgagtttttcgtcgttgggcccaggacaatgctgaccagggcattgatcggcccctttttgggggggggggggaacaaccagggctgcttgttcttgaactggacaaagggggcgtcgttacggacaatctcgaacccgaggttttcggaccccgggaaaagttttggaaaccaaaaccacgggcgggccattttaaaccgggggtggggggaaacaaactggtcgtggtacccccacccgggggggtaccgggccacgcgctaaaggggggggggacacgaggacaaggggaacaccgggtcgaagagcttttaacggttcgggggaaaaggggagctctgggggggggggg

SEQ ID NO: 109747 - DNA, 347 bp, Glycine max
  Clone ID: PAT_MRT3847_70114C.1
aattcaaggtcactaggacctagggaataatatttataactggcactggattggtgttttacaaactcggaattttttataaaaaagcccccaagggccacataatcaaaccggagccttcctatgattatttcctccccactcaaacttgctccaggaaaaaaaaaggccctggaaagggttaagggatagtcaccattataggtggcccgcatttcagcaacttttggtttttatagcaaaacaaaaaagtgatgctgctttgttgaaggggagcctttttagcttgaaagggaactaaaactctggttgcaaagctatgcttttaggggaagcctctttgaagg

SEQ ID NO: 109748 - DNA, 276 bp, Glycine max
  Clone ID: PAT_MRT3847_70115C.1
cagctacagacttgaagctattcattccaagaggtggcagtgccgggaagtgggaagagaatgatagctgtgtatgttggtattggggtgtaagggttgtctccatcaggagactactggaaggcatgattaggggatggagcaagggctcacgtttgtgtgagccttcacccctaaccaggactgtgaaggctaaactgtccttggttttattcccaggcctggtgagtaccttgtaattcacagtcacacacggagcagcggcacctctccttg

SEQ ID NO: 109749 - DNA, 310 bp, Glycine max
  Clone ID: PAT_MRT3847_70116C.1
gacaaaactgtgattggatcacacttatacaaaattctcaattagtaactgtgagagttgctgcttgaagaaaggctgttaatggttaagattggatgtctggaatgcactcaaaaggagtgattggcctattggtcaggtttaacacacacagtcaacatttgatgcatgtaaggcaaaatgacccattcggaatgacttcaatgaggttgtggtcctaataaggttgaatggggtctgagtgggcaaataaacttatgcttggtttctatgacatccaacgctacagtttgattctttggaattctag

SEQ ID NO: 109750 - DNA, 178 bp, Glycine max
  Clone ID: PAT_MRT3847_70117C.1
cccacgcgtccgtccacacatccgaccacgcttccgaaaaaaaatgcttactgacgccatgggtcacaaaactagaatgagcaagaagagccaatatccatcatttaacatagactgttactttacatagtgtaaacacccttcttgaattgcattaacgtaaaaaagttcatcgata

SEQ ID NO: 109751 - DNA, 2702 bp, Glycine max
  Clone ID: PAT_MRT3847_70118C.1
tgttattcagtttggttctaaaaaggtgaaatgaaaggtcttaaaaagcagttgcagtatactcatgttacacatttgcattttttaggacttatattaggtatatgaaccactgagttcacccctcaaacgttaattaattacaaggcttatgtctattttcagtatttttgacatcttcgttctcctgatttttgttggctttaactttaaaccaccaattctgttccccttgtttcttcatcattagattttaagtgccatgcattgatataatataaatatataacttcatttaattaatgcaaacgattgagctcaaagtcgaatctattagccacaaaacacacacacacatattctcacacaaactgcaaccatggctactaccttatgttacaattctcttaacccttcaacaaccgttttctcaagaacccatttctcagttcccttgaataaagagcttccactggatgcttcaccttttgttgttggctataactgtggtgtaggatgcagaacaaggaagcaaaggaagaaagtgatgcatgtgaagtgtgcagtggtggaggctccaccaggtgtttcaccctcagcaaaagatgggaatggaaccaccccttcgaagaagcagcttcgtatacttgtggatggtggaagggattggagggttaggtttttgctttggctgcaaagggaaaggggtttgaggttatcgttttgtattaaggagacaagttctgttccaagggtctcagaaaatgaaagcccactagctttgcagggagtatgactgattctgctcaattgcaatttgtaagttatggaaaaattatacagcacaaatttgctattgtatagtactatctgcattgttttagggtggggtattataccccagtctagtcatttaagatctgatatgttacatgcctatatggacatttaagagggactcttgggtataaatttgttactccactccaatactttttgtgtatgacatttgtaatttgttagagttagatttataacatgacacacataaacttgcacgtgattaaggtaacagtagagcaagagaatcgtccgaaatatgaaggagatgtcttggttggagcggatggaatatggtccaaggtgaggaagcagttatttgggctcacagaagctgtttactctggttatacttgttatactggcattgcagattttgtgcctgctgacattgaaactgttggataccgagtattgctcgcgtacaaacatctgtttgtatcttcagatgttggtgcgggaaagatgcaatggtatgcatttcacaaagaacctcctggtggtgttgatgagcccaacggaaaaaaggaaaggctgcttaggatatttgagggctggtgtgataatgctgtagatctgatacttgccacagaagaagaagcaattgtaagacgagacatatatgacaggataccaacattgacatggtgaaagggtcgcgtgactttgcttggtgattccgtccatgccatgcagccaaatatgggccaaggagggtgcatggctattgaggacagttatcaacttgcatgggagttggcgaatgcatgggaacaaagtattaaatcagggagtccaattgacattgattcttccctaaggagctacgagagagaaagaagactacgagttgccattattcatggaatggctagaatggcggctctcatggcttccacttacaaggcatatctgggtgttggtcttggccctttagaatttttgactaagtttcgtataccacatcctggaagagttggaggaaggttttttgttgacatcatgatgccttctatgttgagctgggtcttaggtggcaatagcgacaaacttgagggcagaccactaagttgcaggctcacagacaaagcaaatgatcagttacgtagatggtttgaagatgatgaagcactcgagcgtgctattaatggagaatggattttattaccgcatggagatggaacaggtctttcaaagcctatatctttaagtcgaaatgagatgaaacccttcataatcgggagtgcaccaatgcaagataattcaggcagttcagttacaatttcttcaccacaggtttctccaacgcatgctcgaattaactataaggatggtgccttcttcttgattgatttacggagtgagcatggcacctggatcattgacaacgaaggaaagcagtaccgggtacctcctaattatcctgctcgcatccgtccatctgatgttattcagtttggttctgagaaggtttcgttccgtgttaaggtgacaagctctgttccaagagtctcagaaaatgaaagcacactagctttgcagggagtatgactgattctgctcaattgcaatttgtaagttatggaaaaattatacagcacaaatttgctattgtatagtactatctgcattgttttagggtggggtattataccacagtctagtcatttaagatctgatatgttacatgcctatatggacatttaagagggactcttgggtataaatttgttactccactccaatactttttgtgtatgacatttgtaatttgttagagttagatttataacatgacacacataaacttgcacgtgattaatgttgaatggagtaagcaatgcctagctatgaatttttgc

SEQ ID NO: 109752 - DNA, 1590 bp, Glycine max
  Clone ID: PAT_MRT3847_70119C.1
ccacgcgtccggtatcgtatctctatttatccattttctgtggactatgttgaaattttgtaaacattacttacattgagttgagaagcttacttgaacttcttcgctggaagataccgagtattcttgggacacaaacaatactttgtatcttcagatgttggtgcgggaaagatgcaatggtatgcatttcacaaagaacctcctggtggtgttgatgagcccaacggaaaaaaggaaaggttgcttaggatatttgagggctggtgtgataatgctgtagatctgatacttgccacagaagaagaagcaattctaagacgagacatatatgacaggataccaacattgacatggggaaagggtcgcgtgactttgcttggtgattccgtccatgccatgcagccaaatatgggccaaggagggtgcatggctattgaggacagttatcaacttgcatgggagttggagaatgcatgggaacaaagtattaaatcagggagtccaattgacattgattcttccctaaggagctacgagagagaaagaagactacgagttgccattattcagaaaaatatggtgaaatcggacttcatttgaaataattaaatgccaaaattcattcttgcttcccttactctgcagtttttgactaagtttcgtataccacatcctggaagagttggaggaaggttttttgttgacatcatgatgccttctatgttgagctgggtcttaggtggcaatagcgacaaacttgagggcagaccactaagttgcaggctcacagacaaagtacgttgctcaaataaagtttcttttgtactttgttgctgagaagatattgtatatctggcaaatgatcagttacgtagatggtttgaagatgatgaagcactcgagccgtgctattaatggagaatggattttattaccgcatggagatggaacaggtctttcaaagcctatatctttaagtcgaaatgagatgaaacccttcataatcgggagtgcaccaatgcaagataattcaggcagttcagttacaatttcttcaccacaggtttctccaacgcatgctcgaattaactataaggatggtgccttcttcttgattgatttacggagtgagcatggcacctggatcattgacaacgaaggaaagcagtaccgggtacctcctaattatcctgctcgcatccgtccatctgatgttattcagtttggttctgagaaggtttcgttccgtgttaaggtgacaagctctgttccaagagtctcagaaaatgaaagcacactagctttgcagggagtatgactgattctgctcaattgcaatttgtaagttatggaaaaattatacagcacaaatttgctattgtatagtactatctgcattgttttagggtggggtattataccacagtctagtcatttaagatctgatatgttacatgcctatatggacatttaagagggactcttgggtataaatttgttactccactccaatactttttgtgtatgacatttgtaatttgttagagttagatttataacatgacacacataaacttgcacgtgatt

SEQ ID NO: 109753 - DNA, 415 bp, Glycine max
  Clone ID: PAT_MRT3847_7011C.1
ggttggcatttggcattgcgtacttttttaatccaagttccacagacaccaacaacgctttagctctctcgttctatccgtcaccgctaccggcgatatacatctgaacccgttccagacactagatctcatatatccaaatggataacctaatctattaggtcaacaaagtgcagagacgcttgtaccgtcttatgcgaccacggtgaaaacagtgcactccccacactatgggactctgttaccgacattgacgttatcagaggtcaatactcatgaaagtacctcgtcttggatagcactgtccttaaatatttcttacgttgtggatcaagccttgttgcgctacaaccttttgtgttgcaaatgaacatgatttactggggaagcaacgtgtacgcagagttactgcatc

SEQ ID NO: 109754 - DNA, 634 bp, Glycine max
  Clone ID: PAT_MRT3847_70120C.1
gtgtacagaacctgaatactctaccctcaacttttggggttgctatacttttgactttgactcagttgattcaagttcctcgttgttgattggtaaccggaggcttattattgtaagtcatttcttaccaggttttggagactaccttacaagacaattttgtcccaaatgatacaaacatgcatgcagatggagagtactgtcagattgttactggacccaatatggggggaaaaagttgttatattcgccaggtggctctgattgttataatggctcagcatcatcagcaaaattgcatgtcctggataggatctacacccggatgggtgcatctgacagtattcagctagggagaagcaccttcctagaagaactaagtgagacttcgcatatactcaatagttgcacagaacattcactggttatcattgatgagcttgggagaggtacaagtacacatgatggtatggccattgctcatgcgacattgcattatcttctgaagcaaaaaagaagcatggtcctctttgtcactcactatcccaagattgccagcctggcaactgaatttcctggctctgtggcagcatatcacgtgtcacatctgatctcacatgatgcaagtaaaaat

SEQ ID NO: 109755 - DNA, 941 bp, Glycine max
  Clone ID: PAT_MRT3847_70121C.1
gcacgagtttcgcaatcctctctgtggcccgcagctagggttttaatttcaatttccaactatttaacgcttggatcgtttattttatgccagaacaacaactctatattgttttttttttaattcgagtttgtgttcttgagctatccgttacggtggggagagattgaaattgacgaattcgatttgcaattgattgattaggtgagagtgagaagtgcgtggaggacgatgaatcacgcgttccgattcacatcgtgaccgcggcgtcacaacttcccgtcgactttctggaaccctcgcctcaatccaagctcgtcatcgactttgattgcgagggcgttgacctgtgtcgcaaaggcactctctgcgtaatgcagcttgcattttcggatgctgtgtacttggttgatgcgattgaagggggagaggagcttagcatagcgtgcattatactttcagtttggcatcaagttgaacaacgtagtggatacccaggaattaatgaagcattgggtttgaatccagaattgggcttgggcttgaatccagaattgagcttggacttgaagagggcagactattttattctacaaaattagatcttatcttatctttatcttatctaaatattatttagatttgatctcatctagatattatttaatctagatcttatcttatctagatttgaatttctcatctagatattatttaatctagatcttatcttatcttatctagatttgaatttaatttgtttatgggcctggatttaaaacagatttgtaagctttgggactgaaaaactatataacagcaccaaggttctagtttaggctctctcttcgattattcgtttttagttttagtctctctctctctctctctctcttcttctctctcctattttcgtttttagttttaggcttttcttagcc

SEQ ID NO: 109756 - DNA, 276 bp, Glycine max
  Clone ID: PAT_MRT3847_70122C.1
ccctcgcgtccgcgcacgcgttcgaggacgcatggctggtggttttgctggcccaccggatgcaaacgcgaacgagacctggatctaccatgctggcataagatctgcagaggttgttgctcgaattgttgagggaccaaaaaaggctctgtgggctcgcgaccaaactcaggacagatatgcaaggggactgtcagatgggctgctaaaaactgtccgatccgagggaacacttaggggtgaacaagggattagtgccgttatggggacaacaga

SEQ ID NO: 109757 - DNA, 356 bp, Glycine max
  Clone ID: PAT_MRT3847_70123C.1
cgaggaacaagccctggtgatcgaggagcagctgcgaagggcggcttacctgaacatgtcagaggacccctctcatccgtctatggcccttaacacccgttttgctgaggtggagtgtttggcagaaagtcaccagcacctgtccaaggagtcgatggcaggaaataagccagccaatgcagtcttacacaaagtcctaaaacagctggaagaactgttgagtgacatgaaggctgacgtgacacggctcccagccaccattgcccgcatccccccagttgctgtgaggttacagatgtcagagcggaacattctcagccgcctggcaaacagggcgccagaacctcccccacagc

SEQ ID NO: 109758 - DNA, 633 bp, Glycine max
  Clone ID: PAT_MRT3847_70124C.1
attaggcagttctatatttgggcccactcagctaatttgatgtttttaaccaattccaggaattaatgaagcattgggtttgaatccagaattgggcttgcgcttgaatccagaattgagcttggacttgaagagggcagactattttattctacaaaattagatcttatcttatctttatcttatctagatattatttagatttgatctcatctagatattatttaatctagatcttatcttatctagatttgaatttctcatctagatattatttaatctagatcttatcttatcttatctagatttgaatttctcatctagatattatttaatctagatcttatcttatcttatctagatttgaatttaatttatttatgggcctggatttaaaacagatttgtaagctttgggactgaaaaactatataacagcaccaaggttctagtttaggctctctcttcgattattcgtttttagttttagtctctctctctctctctctctctcttcttctctctcctattttcgtttttagttttaggcttttcttagacacttttttgttttgcaattccagttttgacttttcattttagcaataaaatttcgttcttcaatctataaaaa

SEQ ID NO: 109759 - DNA, 1128 bp, Glycine max
  Clone ID: PAT_MRT3847_70125C.1
tctagcaattcaccctaattaaaatccactaacacaattttcttttctctctctcctctcatttcgcaatcctctctgtggcccgcagctagggttttaatttcaatttccaactatttaacgcttggatcgtttattttatgccagaacaacaactctatattgttttttttttaattcgagtttgtgttcttgagctatccgttacggtggggagagattgaaattgacgaattcgatttgcaattgattgattaggtgagagtgagaagtgcgtggaggacgatgaatcacgcgttccgattcacatcgtgaccgcggcgtcacaacttcccgtcgactttctggaaccctcgcctcaatccaagctcgtcatcgactttgattgcgagggcgttgacctgtgtcgcaaaggcactctctgcgtaatgcagcttgcattttcggatgctgtgtacttggttgatgcgattgaagggggagaggagcttagcatagcgtgtaagcttgcacttgagtctaattacatcacaaaagtgattcatgattgcaaacgggacagtgaggcattatactttcagtttggcatcaagttgaacaacgtagtggatacccaggaattaatgaagcattgggtttgaatccagaattgggcttgggcttgaatccagaattgagcttggacttgaagagggcagactattttattctacaaaattagatcttatcttatctttatcttatctaaatattatttagatttgatctcatctagatattatttaatctagatcttatcttatctagatttgaatttctcatctagatattatttaatctagatcttatcttatcttatctagatttgaatttaatttgtttatgggcctggatttaaaacagatttgtaagctttgggactgaaaaactatataacagcaccaaggttctagtttaggctctctcttcgattattcgtttttagttttagtctctctctctctctctctctcttcttctctctcctattttcgtttttagttttaggcttttcttagacacttttttgttttgcaattccagttttgacttttcattttagcaataaaatttcgttcttcaatctat

SEQ ID NO: 109760 - DNA, 227 bp, Glycine max
  Clone ID: PAT_MRT3847_70126C.1
ttttatattgttaaataaaatagggaacgtgaatataaatatcaccaattggatctgatcaactgcacccgttatcaacttggccttaacacacatgcatagtaacaaatctgcacattacgatctcgtcacaaccgatggccccttccaagagtgactcagcctttattatcaccagaattcacagcaacaagccatatcacacctggcgaggtcactgcttcctt

SEQ ID NO: 109761 - DNA, 274 bp, Glycine max
  Clone ID: PAT_MRT3847_70127C.1
tcgcccactcttacttttgtctgcaactatgagcattttttatttaatcatactatctctccttcttgccacttttcttgcaactgcatcttctttttcttctttattcttcttttatcttgggaagtgctatttccatctcatattgtcttccaattatcacattcacatattcattgactaatcctaatcagttattttccattctctctatcacactaagccttcttcatttttatctttttaaccaacaattatatcttatttaaatttt

SEQ ID NO: 109762 - DNA, 238 bp, Glycine max
  Clone ID: PAT_MRT3847_70128C.1
ctcgacgccatttctggtttgcaggggtttagtgagttatatgagtgggtgcttcatcttcaatcttactgacacatagattgggaagaaggtggttggttggtgtggcaaagaagacagcgccatcaattgcaaggcaatcaagttgcttcaatttttagatcatacttagttaattttttaattttgcatttatctctgtctgaagaattgaaatatgttatttttagaggtatta

SEQ ID NO: 109763 - DNA, 221 bp, Glycine max
  Clone ID: PAT_MRT3847_70129C.1
tttcctttttttttcagtctaatttgttgtgttgtgcccacccagattcaaaattcatcttggaatctctgatttgtcttctttttccactctggctctctatttctgtgtcttatcttcctgtttgcttgtgactttgtgtggtgtgtgtgatgtggctgtgaagtggttgttaaaagtctcaccttttggggttctttggtgatttgtttttgttgcat

SEQ ID NO: 109764 - DNA, 111 bp, Glycine max
  Clone ID: PAT_MRT3847_7012C.1
gtaaatctctttcttctctagatacagcaatacatacactgctgtcaaattgaaagtataacaagttgggggtcttctaaggccggagaagggggaatagatttacctatg

SEQ ID NO: 109765 - DNA, 441 bp, Glycine max
  unsure (1)..(441): unsure at all n locations
  Clone ID: PAT_MRT3847_70130C.1
acgaggtcaaaaccaccatgattggtacaagtacatgacccaaggagcaaacacaatccacgacatcaaccccgattttatagttatcatttcagggttagcctttgacaacgaccttagcttcttgaagaaaaaacctcttgacttaaacttccctcacaaaatagtgtacgagtcacacatctattccgtctcaggagatacacacaggtggcgcgtgcaaccagtgaattggatatgcaacgccacaattcaattgttgcaccaacaatcaagctttcttctgagtgcttgtgggctttccaaggaagctattactatagacaaggcaaagttggactaggacaatcatatgcggtgatggatgatganttggaaagttatagagaccctaacttcacttcaaagtttgagcttctgcaaaggatggttcaagatcca

SEQ ID NO: 109766 - DNA, 488 bp, Glycine max
  unsure (1)..(488): unsure at all n locations
  Clone ID: PAT_MRT3847_70131C.1
taaattagtcgagataggttttaaaatcgtgttgtgacctataaagaaaattcttttatgtagtcttgaaacattcaaagatggcttcttgggttttgaggaaggaatgaaatgaatgttcattttaagcagaaagtgtaattattttgcttatctactatgactcttgtttttctagcgatacgtcagtctagcacatgatgaatattcaatggttgtctttattgattgtagtgagaacttttattgaatctatgactgaaagcatatctcgctgctgttgttaaattgatctgttttttgttggaccataatttctgataactcttgtatattgatgccactatgacattgtttggaaattgaatgacctgttcttactcactcaatctcatggaaaatntagtgcttctaattgaacatgcttctttgtctgtcaacttcattgtttacaaggatcatgatccatggctagaagtattagtctc

SEQ ID NO: 109767 - DNA, 193 bp, Glycine max
  Clone ID: PAT_MRT3847_70132C.1
cacgcagtgcagcacgctcggaagctcggtcgagggctcgagaaaacaactaagatttacacattataactgaccttactaggatcatgcgacacttctcgaatggcactgcttctcactctgactgatgaaataactgggttctccgatatctttgtcatcttcgaacaaggcgaactagatagatagaccc

SEQ ID NO: 109768 - DNA, 560 bp, Glycine max
  Clone ID: PAT_MRT3847_70133C.1
tcgcgccaaatccactccttaaactcaaaacccttatccatcgccaattccacctgcatgattcggatctcgatccgatttccatttccggttcggctccgataagcttcgccaccattgccgccgtcaatggcgtcgaagccttcgccttcgccctcgccctcttcttccagatcagagcctctcgtcgatccctccaaatcaaagaatgaccgaggatcagtcagttgtaggccggagacgaatttattatgatcagaatggtggagaagcactgatttgcagtgacagtgaagaggaaactatggatgatgaagaggagaaaagagaattcatagaatcagaagattatatacttcgcatgactgtcaaagagtttggtttaactgacattgttctggagtcgttggctcagtgtttttctagaaacatcagtgaaattaaggcaaagtatgaaaccctcagtattcatgacaatgctggcgggtgttcccaggctggagattctgaagagaattctcaaagtggcaatttttttctgggaaagggacttgaagcag

SEQ ID NO: 109769 - DNA, 384 bp, Glycine max
  Clone ID: PAT_MRT3847_70134C.1
ttgacattgattgtggttacaagagcagtaagctttcaacagatgttttgtgatagcttggttgctacacacaagatttctttgagggaaattttccagtggattctgggttaccaattttggggaattgtctttatcctgtaagtcaataaccttcaaaagctgtcgttgtaaatgttacttgtggtaggggacgtgggggtttacccaccactgcttggataagttctgcagttaacaatcgctcctcaaatatcaccaaaaaaattcgcccagcacttgggaaaggtaaaaaaattgtttttcttaccaaagttgatccttttccagaagctttactggctgtgctttttggggttaaaaatgaaattctgagttttaacg

SEQ ID NO: 109770 - DNA, 285 bp, Glycine max
  Clone ID: PAT_MRT3847_70135C.1
aaaaaaaaatatgttattaaaaaattatatttcacaaaattgggtagcttggaaggggggggttgggcataattttcattcacaataaaacctcttgcattggctcatcattgaagccaagaaatttttcaccttttataccgtttctacgctccgaatgtgcagaggcactcgctgatcaatctctggtggttgtatgttaagtattctttggtggccatctgaccctttttaacaagcgctgtttactatgaagcttatatttagcacattcatgcaggagcc

SEQ ID NO: 109771 - DNA, 432 bp, Glycine max
  Clone ID: PAT_MRT3847_70136C.1
aaaaaaacccctgggttttgttcaaaagggaaatggaaagaaaatttttgggaaaaattaccttaggcaaatccggggtttttttttttgccaaaaagcaaaatttaaaaacaggggtcccttttttaaaaaacatttttttaacgggtctaatttttttctccataaccaaccggggattctaaacttaaactttggtttttctcccccaaaaaaaaaaggggctgggtccctttgaataaaaagcccttttggactatttaaaacttttttatgactgccccaaaggctcctggaaatccctggccataaaagttggcccccttttgccccaccctccaagcggaagcggaatttttttgtttcttggccaccccccaggaatcgaaaaaaagccttttcccctggacccggcccaagttggaaccccta

SEQ ID NO: 109772 - DNA, 581 bp, Glycine max
  Clone ID: PAT_MRT3847_70137C.1
agaagattgtcatgtggttggaaaagagctgcaccctatccagatatttccacacttccggtggggcgaatctcggtgaatgagatagggcatctgatgctcttgtatttgaaaatgaggagttttcccagggagctggatggtgagaactggctagtgcgcacgagaaagattgcctagattctcgaaaagcgggaaacgctatccaagtatcacgacacttccggtggggagaatctcagtgaatgatctagggcatctgattctcttgtatttgaaaatgaggagatatgatcttcgaaagggtggtgatatctggatagagtgcaccagttttggaggaaagattgtctacaggctggaaaagagctgcacccagtaaggttttcaagtttcaaccctcgtgtaccctgataatggggtagttgattcgaaagagtaatttattgtatgggtaagttgcaataaatttggtactcttttaaatgatttgcagcacatttatgtaaaactcatttcatccaaatacgtgcctttggatggaaattattaattaagtgttaatagtatgctaaaaaaaa

SEQ ID NO: 109773 - DNA, 264 bp, Glycine max
  Clone ID: PAT_MRT3847_70138C.1
ctattatggaaatcggattttaacgcttttgaacaaaacacccaaaaagcgggcgccgggccagctgctaagggaacactgacacgaagcacagacggccgaaccagcaggaacggactcgcgctagtgaccaagctgcgcggggagcaccgtgacaaaaggttacaaggaaccgtacaaggagaagtgggcgaaaaaaatcccacgcagcaccacccgctgccccagcaccctcgtcgagaagaacccgcaccggaactggga

SEQ ID NO: 109774 - DNA, 165 bp, Glycine max
  unsure (1)..(165): unsure at all n locations
  Clone ID: PAT_MRT3847_70139C.1
gttgagaggaggcactgtggcagaagtccnaggagngnaaaacagagacgcaaaangnagacgatcnngtcgtctgagaccangaananncccgacggcgngagcnncaaggtncacgcnaaggnnatcgaggttgagggccctcgtggaaaacncgtgcgagac

SEQ ID NO: 109775 - DNA, 315 bp, Glycine max
  Clone ID: PAT_MRT3847_7013C.1
ggcaaccacctaaggtcattaatagggggtttaaggccaaacgaaaggcctttaaaatttttaaaaataaaaatccccccgtaccctttgaattaatcctaatcccccttagatttaaaaaactgaaggactgaaaaaaaaaaaggttttaattagacccgtccgacctttccttattaaattttccacctaaaccggttattccaaccatttggactcaaaccaccttcaagggcctttaagcttccaggtagagcaattttttccttggggggcaaaaaagccaaccgaagccttccgggtccttaaccttcc

SEQ ID NO: 109776 - DNA, 385 bp, Glycine max
  Clone ID: PAT_MRT3847_70140C.1
ggatttctattgttgcagttgcattgcagccggagccaagtgatccctcattgatcttccctttcctcaaagtaagttaagttgcctttcgtcttctcctttttccatgcatactttttttctgtctttaattccgtacttctggtagtcactgtttttttccttaagaatcttgtttacagatactattttataggcttagcgtagaagttccgttaataattacaatgattttttattgcacgggaagaatttatttacttttttttcgcatccagttattttctttcaggtaatcatacaaacagtaaggtaaacaattgttgaagtgtttttctgtgaattgtaataacaagagtattgttaatatttttttaataagtat

SEQ ID NO: 109777 - DNA, 1847 bp, Glycine max
  Clone ID: PAT_MRT3847_70141C.1
tccggctccagcttttatcttttacatccttaaacacttggtgcttctttggtttaccgaagatcctaacgacccatgaatcaaaaatttcaaatttttatttttcaaaaaaacgtgcatgtaaatgtgtgtttattcaatttaacgtcgaaactgtgagtttgtttcatacgttgttgttggttgtgtttttctttttttacgttgttgttgagttatggctgatgaagcttctggagatgttgatctaaggttgggagagcccaaggggcctaaagaggagcccgagacggaggaggggtccgccatacgtgtgatgccggtggcggtgcacgtgccggcggggatgtctatgtccatgtccaaggctctggcccaggcccaagcccaggcccaaccacaaaagcgggcctccaccaaagaccgccacaccaaagtagaggggcgaggcagaaggatccgaatgcccgccacgtgtgcggcgaggatcttccagctgacccgagagctcggtcataaatccgacggcgaaaccatccggtggctcctcgagcacgccgagcccgccatcatcgccgccaccggcaccggcacagtccccgccatcgcgatgtccgtcaatggaacgttaaagattccgaccacctcaccttccgatcaagaacccggagagccgcccgagaggaagaagcgcaaacgacccgcgaatagcgcctacgtggacataaacggcgccgccgtttcggtctcggccgggctcgcaagctctattattaataataataaccaaaacgcagcaacgacgatgacgacaacgatggcaattccgcaacatacagcaattccgttgccgcaaggaatggttcccgtgtgggccatcccttcaaacgccgtcgttccggctgcaggagctttttttgtggttcctcaaacggcgtcgtttcagcatcaacctcagtttttcaccatagcgagacctatctccgagtttgtctcttccatggtcacacccgtcgttcagcttcaaccaacctcgataaactcttccaccaacactaactctaacgcttcctccactgcgccgtcgtcgaagtccccggcgagagccaccgtcatggctccgacaaccaccaccaccaccacgaggcagatgctgagagatttctcgttggagatttacgacaagcaggagctgcagttcatgtcgcgcgcgtcttccaagcattgagagaattagaagaacgttgaatctggtttgtatcttcgtttccgccatgaacgacgacgacgacgacgtcgttgctgcgggagagagaggaagagcacgtgcgcacgtgcggcgggattaaaaaatggtggggaccacgtgtgtgtgtgtgtgggtgtgggtcaacacgaaaaaagtggagggcatggtggggacccagtgcggggtactacataaccagcaccagaagatcagaactacggagagaagttttttctttagtatttctcagaataataatgtccatgacaattaattagaataaattttagactttaattttcatgtactagtattttttttttttttctaaaaaaaatttgactgtcacaatttaaaactaaggcaactatgaattttagatagaaaaaaaaaaaaaaaaaaaaaaaaaaaaaaaacttcgggggggggcccggtccccatttcgccttatagtgagtcgttttacgcgcgctcactggccgtggttttacaacgtcgtgactggaaaacccttggcgttacccaacttaatcgccttgcagcacatccccttttcgcagttgcgtaataacgaagaggcccgacggatcgcccttcc

SEQ ID NO: 109778 - DNA, 294 bp, Glycine max
  Clone ID: PAT_MRT3847_70142C.1
gggagtggcagcacagataggtttgtttccctccccctaaaattgccgcacccttcggtgttgtttctcgatgttattcgccacaagctggggacggagaatttgagagatctttcaatccagtatccattgatcccgacatctaatcttattctgagaaacgatcaccgtttcatctctcatctatctatcggtgtcatatctgtaagcaaacattttttttcgtttctgatgatcgacaaacacatcttccctacaaacaaccattctttatgatatgccgaactatgtttt

SEQ ID NO: 109779 - DNA, 629 bp, Glycine max
  Clone ID: PAT_MRT3847_70143C.1
cgggatttccaggcgaagcccaaagaggagaggcccaaaaaaaaagatagtaggtgaataagaaaggaaatgatttgggccttggagagaagggtaaatggggaaatatgaaaagataaggagagggataaagcggtaagggatgagtgtttgagatagagcgaaagagatgtcgttggtttcaagcatgttcgggtgtggagtggtgatggcggcgtcgcaagcaatgggaattggaaggagaagcgatggtggattgacgatagtgtgttcgtctaggccgcagaagaaagcgacggcgcatcacatgaagactcggcctcggaagacgcaggcatgggatagaaaccgcaagcccaccgtctacgatccactccctcctcttcctcctgattggaccctcgttattcccgctgacgcttcttctgctcccgttacgcctccgcctccaactccctctgcctagtcactctctcggtactctctctcgttttcatgtagtcttatctttaattccagcagcttttctttcatgttttcatctcaaatcaaaccttcatcatttgttttggatcaataaatgtttctgaattctctctaaaaaaaaaaaaaaaaaaaaaaacgctttc

SEQ ID NO: 109780 - DNA, 163 bp, Glycine max
  Clone ID: PAT_MRT3847_70144C.1
gggaaaaccttaccctcccatccttaccaaaggggtccttttatgttttaaaaaaacagacatacagactcattggtatacccttaaataacgggaccggcacaccgcgggcgtacaattcttatcatatatgtgaggaagcataaaatgcttgtcagaaaac

SEQ ID NO: 109781 - DNA, 335 bp, Glycine max
  Clone ID: PAT_MRT3847_70145C.1
gaatccaaaacaatttgatatttattactataagacagggggtggattacctccgccgaattccccttaaagcatatatattacagaactgcaagcttattttgactatgaacgcaccctggaagagcgtatctacgcgaaaatctatttgattctctgctccccggaagaaagccatgcaatgatcatcccagccacgtggcactgggtcgatatactccactatggcactcggactggttcaatgatccatactctctcggccatatgagagacacccgcggcaactgctaaaatagactgaccctggtgtgtagaatattgacatggatata

SEQ ID NO: 109782 - DNA, 433 bp, Glycine max
  Clone ID: PAT_MRT3847_70146C.1
acggctgcgagaagacgacagaagggtatacacgtataaatcataattttcaaactatacatacagtcaacatcgtttttttctttttttgtcaaaagttgtagtttaacctttgagaagggtattagtgtagtactacgagctgaacattaacgcagggcacagtcaaccatgaacttgttctgattgaagctgaaaatcacgtttctgccccaaataaatgaatgagcggattcaatagtatttatgatgtttgactactttctaatcaaattactggtatgggtgggggatttttttttttaaaagatgctttcaaattaaaattcaatgtcaaatttttaaaaggtgccttatagtaaaacttagaaattaaataagaaatattttggtcaattatattttttttcaatttaaaaaaaatgacctcccc

SEQ ID NO: 109783 - DNA, 706 bp, Glycine max
  Clone ID: PAT_MRT3847_70147C.1
gaaactaattgacacttgagttttgatttatatttattccacaaataacacccggatcacctcgagatagaggttagtacaaaaatgtataaaatcaatgctataatatgaccctaattaacaagcccaccaaaccaaaacaaaccaaaccatcctcaccaattaagtataataataatcagaaaaacaaaagttaaatctcttaataacagttatatggcaaaggtataaatattttattatatgatgaaatgtatgtatatatatatatatatatccagctcccaagttattcaccaccaatctggcctgccattagatcttcaaaatatattagtttgtaaatgtaacatgtgacacttcttcactaccaaccattgctgcattagaagaataccatgcatcttctgtaatgaactgcatccatgaatcatctttgtcctcctcttccaagcatgatgatgatgcccctggtatgtcaggtgacatggtttcacactcattaattatggtttgggagctttcaattagtgatatattacattgtccttgctcttcaatatcagaacagattccatttttcttgaacacacgacacaatgcataagtatcctgtaatccagtggtgtcttcacactctttgtcatcaaggcgatactcatgcattacccagtcagttctgatcccttgaggagctcggacgcgt

SEQ ID NO: 109784 - DNA, 425 bp, Glycine max
  Clone ID: PAT_MRT3847_70148C.1
gcccaagggcttgatggatagttttttacataattcataacaggaccactttaatttccccattggatttttttttaaaggaaaacctctaacccattggcataaactacaggggccttgggaaacgattaccggtgggtcacactttgggggaggaccctggggaaagctcaaagatactatgctgcacagggtaaaacttaagcctttttattgggacaggtgggccccctaaaaaccaaattttgttaattggaaagggaaagaaaaaaaaaaatctcctaattagccgggcaaaaatttgttcccttggttctagggaaaaaaatattgggcccttagtggagggaaaaaactctgggtacttttttcttcatccgtcccccaggggggttgaaaaaaatggttggctggacccctgaggg

SEQ ID NO: 109785 - DNA, 255 bp, Glycine max
  unsure (1)..(255): unsure at all n locations
  Clone ID: PAT_MRT3847_70149C.1
cgcatggcaccgccgtaccgtaagcctcggnaattcggcttcgagtaccagcatgacgacaagacgcatataggggatccatgaccacaagtgaaatgtgaggtactattaacacgatcccgaccacatacgatcatgagaacacaacactgactttagcaaccaccaagaacatgaaaggctgcaccatggatccttgcgctgccgaataactaaatcaaacatgacgatccactgaagggcacacactagtcc

SEQ ID NO: 109786 - DNA, 368 bp, Glycine max
  unsure (1)..(368): unsure at all n locations
  Clone ID: PAT_MRT3847_7014C.1
aatanttttcttaactcctttttaaaaaacgttgaacattttaaaaccactgcgtgtttataccctatctcctatatgtacaacactctcccatggaaaagatgataaataataaaaccaccctcaacactgttttaactactaacatattcatttactactaatttacctactaccatattcaaataccaccagaaattgtaggcatccacaagctccactacaataatagtgccaaatccactcttccatattattaacatccctttccacccttctcttattatccgcttgctcctccatttcgagttatctctgccccaaacatacctagttatatcattgaatcttgacctgtcctgatgcct

SEQ ID NO: 109787 - DNA, 790 bp, Glycine max
  Clone ID: PAT_MRT3847_70150C.1
ctggaattcggctcgaggctcggtgtatctaggtgtgcttgaagatggcactcaattggctgtaaaaaaattggaaggtgttggacaaggtgcaaaagagtttaaagcggaagtgtccatagttggaagtattcatcatgttcatttggttaagctatcagttattgttcaagttgaagagatcttccctcatatgacagagttaacaagtttttgttcaagtcacctatgtaacaaggatatactctagctagagtagttgcaaatgcctcatatgtagtactggtaaaagcttactttcttaagcctcattttgctcccttactcactcaatttgatggcaccatcttcaggccctagagaacactgattctggatttccaaactgttactgtgaatgccgtccttgcccatccaactttggttgagtggcttgtgttctcttctgctggtccttgggaaaattgggatcatttgtgcactatttataaccttgaggaccatgttgctttcgatgcgggtaatattgttatgaccgagcccattagtgttgagcccaacattacccttactaaagaacagactgcaacttctgagaatactagatccaagaggatcatttcaatagctaagaaatgaaacaattatgttgtttacaaattggctcttttggttgttagaataaatatttcaggtagattctagaatattatagcaattacaggtgctctacttatatatccctgtaattccattgaatgggtaatgagaatttagtctattttaaaaa

SEQ ID NO: 109788 - DNA, 1819 bp, Glycine max
  unsure (1)..(1819): unsure at all n locations
  Clone ID: PAT_MRT3847_70151C.1
gagtctgggcgctaatatctcaaaccaggcaaacttcatgcgtttgatgttcgacaccatgaacgaaacagcagatgaagcagctattggtgccaagaaatacgccacgaagcaagcaaacatatctgggtttcagaccctctattgtctggttcagtgcacgccggacttgtcaacccagggttgcagaagttgtcttagtgatgccatagggctccttccatggtgttgtgaaggaaaacaaggagggagaattctaaatcccagctgtaatgttaggtatgatttgtaccctttctaccgcaccaacgtctctgcaccaccagcgtctgtccctccaaccgattcttctaattcgggaggaggaggtagtgaaatttcaccggggacaattgttgcaattgtggttccaattacagtggctgtgctgctatttattgttggaatttggctcttaagtaaaagagcagcaaagaagcgtaactctgcgcaagaccccaaaactgagactgagatcagtgcccgttctttatagtggacatgttacatccttgagatttgatttcagtacaattgaagcagccacagaaaaattctctgaagctaacaagctaggtgaaggtggatttggtgaggtttacaagggcttgcttccaagcggacaagaagtggctgtcaagagactctctaaaatctctggacaaggtggggaagaatttaaaaatgaagtagagattgttgcaaagcttcaacacaaaaatttggtgaggcttctaggattttgtttggaaggggaagaaaagatacttgtctacgaatttgtagtcaacaaaagccttgactatattctttttgatcctgagaagcaaaaatcattggattggacaaggcgatacaaaattgttgaaggaattgctcgaggcattcaatatcttcatgaagattccaggcttaagattatacatcgtgaccttaaagctagcaatgtcttgttagatggagatatgaatccaaaaatctcggattttggcatggcaagaatatttggagtggatcaaactcaagcaaataccaacaggattgtagggacatatggttacatgtctccagagtatgcaatgcatggagaatactctgctaagtctgatgtatacagttttggggtcctcattttggagattataagtggcaagaggaacagctctttctatgaaacagatgttgctgaggatctgttgagctatgcctggaaactttggaaggatgaagctcctttggagttgatggaccaatcattaagagaatcatatactcgaaatgaagttatcagatgcatccatatcggtttactgtgtgtccaagaagatccaatagatagacctacaatggcatcagtagttcttatgcttgatagttactctgttactctacaggtacctaatcagcccgcattctatataaacagtagaactgaaccaaacatgccgaaggggcttaaaattgatcagtctactaccaattcaacatcaaagtctgtcaatgatatgtcggttagtgaagtagatcctcgataagtctgaaattgtgaggaggttttagagaagatatgtatccatctacattctaaatttttgttagccgtggcttcttatgaccgaattacaattgctgataacattttatgattgtttatttttcaacgaggaaaagatatctgcgggtcgtttaggacattttttttgtatttattgcgtgtggcacgagnnnnnacttcagttaattattaagttggcaacatatcaacttctaagatgtacgt

SEQ ID NO: 109789 - DNA, 452 bp, Glycine max
  unsure (1)..(452): unsure at all n locations
  Clone ID: PAT_MRT3847_70152C.1
atacgcggacaaggcacgagttactatttagttcttgtaaaataatgtgnnnnnnnngaaaaaaaattaaaagagatatatttatacttattttccttattatttaactgaattaattaagtttgcaatttattttataatttaaatcaagagttatatacagttgtttgtactttttctcttgataccttctttgactttataggaattaaattcagaattgtcattcttacgagacgacccatgttcaaaaacgggtggccttaccctatttgatctattaattgtttaagtgggtaataaaannnnnnatcctgaaataggataattggcatcaaataaaatttgccgtaattagcacttaaaaccaagtagaaagatagattagatcaaattaattaaatgcaagagaaggagaatgaaagttccaccttcttgatccctttgtatat

SEQ ID NO: 109790 - DNA, 305 bp, Glycine max
  Clone ID: PAT_MRT3847_70153C.1
ggggggggtggttttttttttttttttttttttttttttttttttttttttggggaaaagatatagatctttattaactgaacaattatttgtttaaccaatacaccaaaagaaaactggggggatagacccaaacataacagccagaaaaaaaattggggttagccttgaaaatattaaaacttacttattaatatcttcagactgagatttagatcacatcaataaaatatacatgggccattactggttttcaccccacaaaaaaaaaagggaaaaaatatacaaaagcaaactattggcta

SEQ ID NO: 109791 - DNA, 1290 bp, Glycine max
  Clone ID: PAT_MRT3847_70154C.1
aaaaattctcagaagctaacaagctaggtgaaggtggatttggtgaggtttacaagggcttgcttccaagcggacaagaagtggctgtcaagagactctctaaaatctctggacaaggtggggaagaatttaaaaatgacgtccagattgttgcaaagcttcaacacaggaatttggtgaggcttctaggattttgtttggaaggggaagaaaagatacttgtctacgaatttgtagtcaacaaaagccttgactatattctttttgatcctgagaagcaaaaatcattggattggacaaggcgatacaaaattgttgaaggaattgctcgaggcattcaatatcttcatgaagattccaggcttaagattatacatcgtgaccttaaagctagcaatgtcttgttagatggagatatgaatccaaaaatctcggattttggcatggcaagaatatttggagtggatcaaactcaagcaaataccaacaggattgtagggacatatggttacatgtctccagagtatgcaatgcatggagaatactctgctaagtctgatgtatatagttttggagtcctagttttggagattttaagtggcaagaaaaacagctctttctatgaaaccgacgttgctgaagatctattgagctatgcctggaaattttggaaggatgaaacacccctggagttgctagaacactcattaagagaatcatatactccaaatgaagttatcagaagcatccatattggtttgctttgtgtccaagaagatccagcagatagacctacaatggcatcagtagttctcatgctttctagttactctgttactctaccggtacctaatcagcctgcattatttatgcatagtagaactgaatcaaacatgctgaagtgggtgcaaattgatcagtctattaccaagtcaacaacaaagtctgtcaatgagatgtcgcttagtggagatattcctcgataagtatgaaaatgcaaggaggttttaaagaaagtgtatccatggaaaaaaaaaaaaaaaaccttttggtgagtagtggcttctttcaacgtggaataaatacgagcgggtcttttaggccaatttgcatttattgtgtggcactgagagacgactttacttaattgttttctctctgcaaaatgtaaactttacctagtgcaagtttaataaagattggcagtgtaagttggcaacaaaaaaacttctaaaatgtagtcaacatactattatggtaatatcaataaggtttttgaaactcaaacac

SEQ ID NO: 109792 - DNA, 2051 bp, Glycine max
  Clone ID: PAT_MRT3847_70155C.1
ccacgcgtccggtcgtggcagaatctgtttggtgaatggagggggcagtgcatggcgtccacctcaaaagttgtaggaaatcgccgacctcgaaacccgcctcaagtcaagttcgtgtcttttcaaggttgagaacaaccaagaaccagagcgacacaagcacatgactgtctctcttcctaaaccgaatgaactgcgacctttaaaccaatcttcttacataatggtcgtttgaaaatctcgtattttcatctgggtttccttcaaaatcatttttttttgtttccctttcttcacttcctctgcccttcttgtcttggttcttctgttttaagcagctttctcttgttgatcattaatcatgtcaatatttaaggctttgaagcagtatctgtcactagtctacattcaatctgatttgctgtactggagtgtctagaagagacgttatttggtatattgacaaaagcaatatctacagttccacctatgttacaggttgcatagtctccctctctctgttttcatctttctttcgcttcgactcttgcactctctgttcactccctcaaatcctctcgctgtttcacctttctcatgccgttcttctctgctatttgagtcaaaggattatccccatggtcagttgcaccagttgacggtattccctcattaaacagtgatctcttctatgatatatttcgtcgacttgatggtgcaacattggctagtgcagcatgtacttgtgcagcgctgtgttccatctcaaaagaagagagtttatgggagaacgtatgttcctctatgtggccttcaaccaatagagaggatgtcaaaagtttaatatcttctgttggtggattcagaaaattctatgcagattgtttcccacttattgtaaacaaggaggttgtagggtatcaaccaaacaactatctcgagtacccggacaattggactgaagctgaatattatggggacatgaatgaatctgaaagcatctctccatcagattttgtttctatagtagatattaggttcaaggggaaaccaatctgttccaaagttctgtggggaattccaaatgcaaatggctatgatggttggttctataactgccctttccggattgatattctcacttatgcagatagagatgataacaatgatggagcggttcacctttctgtatctgatggtctgccaccaattacatccttggagagggaaaggaaagatgggaagctgtggcgggaactccgtgaagggctccagcttagttggattatagtaaacaggaaaataaagcaagctgcaaatcttgctagctggagccctcttggtggtcaaagacactggccaaccgataaggattttgttatccgctttggatcagttctacccgccagggacattcttccttgtcaggtagcagagtgtatccttattatgaagtttagagtgaatgatgaggaagaagttgggtttcaaacaactcttaaattaacagagctgagcatgcagttggaagacatggaaggtgctcatgttaatggaagaaacagtttgcttatacttaaggaagcacttagcagccgaaggagcaaaaattatggtgaagtactcgagtcttgtcatatgtattcaaaagtacagaatgagttgaaagaggagaagatgagaaacgaaagtcggttggacagactttgtattttaagtggcattgcagcatttatgacgttctggtactgtgttttatgaaatggtagcgcatagtcatttagtggaatatgctaatgtagctctaacaaatgctggaccttggcactcctgtgtaagatgtggttttgcttaccataataaacaaatcaataaacagcaacgccccctggtttgagatttataattctacctgtatgatcatttgtacaaattcagcagaggggattacaaaaacatttgtgttaaacctcactcagactacgaagtaggaatgttgtttatgtggagctatttttaaattaagttatgctataagcataacaagagct

SEQ ID NO: 109793 - DNA, 1072 bp, Glycine max
  unsure (1)..(1072): unsure at all n locations
  Clone ID: PAT_MRT3847_70156C.1
gaacaggtcagtaaataaaataaaatataggaataccataacaatcacgcgtatagagggttacaacattaggctgcaaatccttgctgtgatttggatgcgattctaagctatgtaaccaagagcttgctgtcataactagccgcgttgcttctcatcttggacgtagtggaacctaagttacatatttttgcagggaggaggaattgagttgaaatcgaaagggaagcggtggtttaggttaggatttggtgagtgggtggggatggcgaagttccggggggtttaggtgcgggtttggtgagcgatagggatggcgaagttcaatgtggtgcagaagaaaagaagagctctaatagcagagaagaagagacagcttcacggagaccctttaaccggcaagctcaagatcaaggaccaacccctttccctatccggaaaacgcaaacgcaagctcttcaaaaaatggcgccgggaccaaaaggacgccttgcagaatggtttggtaaccatggaagatgttcaaatggcagttgctgaaggggataccaaagatgcccctagaccttcagcaaaaattcacttgaagaagaagacattgaaacttaaacaactcaagcgcaaagggaagaacaaaagaaaatctgatgtgcctgctgctgatgtttcagccgatgcaatggtggaataaacaggaaaagctttaatattctacgtacttggtagggtggaggtagaagaggcaatgtctgatggtataaaatgttgtaaccctcgactcgagtgattgttatggtattcctatattttattttatttactgacctgcattgattaatagaaattagattaaaacatggaaaatgcttcctaccgtgacagcataacgttatttttaagatttagtgcctatctttaaattcctttaaanaannaantnntatcaagtccttcggggggccatggattttaaataaacccggttttaaccagtttttgcccttttcaagtgaagtattggtatgaattttgttttttgcaaaccaatcgagctttttttgtttcccgcctt

SEQ ID NO: 109794 - DNA, 708 bp, Glycine max
  Clone ID: PAT_MRT3847_70157C.1
ggctcgaggttaacaaattagggttaaaatccaattttaaaattgaatactaaaataagcaaaataatcaagagattaaattcataactaggggattaaatttacaattatgagataaaggaaccaaatttacaaaattttgcaggtaggaggaattgagttgaaatcgaaagggaagcggtggtttaggttaggatttggtgagtgagtggggatggcgaagttcaatgtggtgcagaagcgaaggagagctctaatagcagagaagaagagacagcttcacggagaccctttaaccggcaagctcaagatcaaggaccaacccctttccctatccggaaaacgcaaacgcaagctcttcaaaaaatggcgccgggaccaaaaggacgccttacagaatggtttggtaaccatggaagatgttcaaatggcagttgctgaagcaggggataccaaagatacccctagaccttcaccaaaaattcacttaaagaagaaggccttgaaacttaaacagctcaagcgcaaagggaagaacaaaagaaaatctgatgtgcctgctgatgtttcggctgatgcaatggtggaataaatatgaaagttttgatatcctacatacttggtagggtggaggatagaagaggccgatgtctgatggtatataatgttgcaatcctcgagtgaatatgctattcctatattttcttc

SEQ ID NO: 109795 - DNA, 267 bp, Glycine max
  Clone ID: PAT_MRT3847_70158C.1
ccacaaaaaaacaacattaatctatttcacacctccatgcttgcacactcaactatgcacaaacataccttttattatcaccttatacttcatgtctcacaatcatatacttggactctttttttctaacataccaaaatttattcttgtttctagcaacacccattccatccacaacagtaatttttgctcctcaatactactcaacaaactccacaataaccactttatttcactattataaaccaatccagttttctaaggtct

SEQ ID NO: 109796 - DNA, 289 bp, Glycine max
  unsure (1)..(289): unsure at all n locations
  Clone ID: PAT_MRT3847_70159C.1
aagcnnggaattcggatcgagcaacgaaaaggcttgcacgcatgcaacaacagaggcagcatgtgctacggtctgcggccactatcatatatgatgtcggttacgactcgcatgtgacaagctcacctttctctcatatcactacatctactcagcatatgcctgcaatctatatgatcaaagagagacgtaacctcactgtgcaaagagaggaatagaggcttggtcagagcgaaggagtttctcgattgcatacagaacacgatcccacgatccgttacctatttat

SEQ ID NO: 109797 - DNA, 408 bp, Glycine max
  unsure (1)..(408): unsure at all n locations
  Clone ID: PAT_MRT3847_7015C.1
ccataggctatattgagcatggtaactgagagagacctgtgaacctgaatactcagaaatatgaacatccgtcnctaactccgcgggagctggaagaaaacctcactctcttaaaggcagatctctccgaactaggggtgtcttcgctcacaaattcctgaatgcactgaacgcttccatgttgcttgccctgtaccctcaatcagcgtttctaaccctaaggcaagctctttcttttgggctttcattgcttacacaaccactgtgcaagggctgtcgtttaatcaattcttctgcaggncgaaatgattgaacctgctgcggaaggagcagctaatggacaggaagctagccttgaagctaaggtgcaacgacttgtctttgtttaatctttaaactgatatatcc

SEQ ID NO: 109798 - DNA, 171 bp, Glycine max
  Clone ID: PAT_MRT3847_70160C.1
gacaaattacaaagaatatccactttaaaactaaaagtgggcccgaagacccgaaaaagcggctgaaaataagacttacagaaacggggcaaaagcttggaacggacacaatctccactgaacacgagtgcatctgagcaaggcacatacccgagtaattgatcactcaaa

SEQ ID NO: 109799 - DNA, 424 bp, Glycine max
  Clone ID: PAT_MRT3847_70161C.1
ggttgtctgaggctgtctttttcacacagcgcgaccgtcgttcttaatctcgccggaaaattgccctacgctggccggaatctccaaattttccgatttgaaatccgaattgtgattctgtttttccttttctttttgccagtgtttgagtctttagaaacagccaaaaataaaaaaagaatttgcttttcttctttttatcctggagtgagattgcaaggaaagcaatgcggagagaggagatgaaatttttgaaaagaaatctcgagatcccttatttctgaattcctagtgttatatacctcttgcaagattcaatttttcttcttctccgtctttctttttcaaaagtttcctatgagaaggttgttaaattttgtgaagaatagagattttggagttttttgtgctggggagttggtgt

SEQ ID NO: 109800 - DNA, 466 bp, Glycine max
  Clone ID: PAT_MRT3847_70162C.1
caatgccattgcacatttgtagactttattgcgcttcaaaaagagtcaatgtcaatccattttagatctgcccaaaaataaaaaacaattcccgtatctagagttcatctgactaacggtgtctagcgatcgaacttgatcaataaagtgttatcctccatccaaacagggcttcccaagaacttaatattatgggagtgaaagctaaccctcgaccattttttctcacttgaaaccacataatgataacaaggcttttccatttataaatgaagctcgaatcatatcgaataattaataacagatccggatgtacctaatttagccctgaaaaatgggaaatacttaaactaaagtatcctattgtaaatattccctcctgactcgacagcctgagcaacagtgtccgagccatttgatgacgggtgactagtagataaagcaattggcatccgaggaggcgaat

SEQ ID NO: 109801 - DNA, 387 bp, Glycine max
  Clone ID: PAT_MRT3847_70163C.1
ggctcgaggcaagggccttataccaaaactatcggtctgcttaacagagctaatacagatagcgactagaccttataagatttgatctatatccataatactggaaggctacttccagttttatggggtatgcctaaaacatttgattgcatcaacccatgcttaacatgggctggcgccgactaccgagctcttccaccccgctattcatttcggaccgaaacctgcacgcgtacctactctccctactgcgagactaactacagcatggcgtagacatcgctatcactactgcctgtgaaagagaggtatacgatcacaatcttccaaactatacaagccgtaagcataaagagaaagcgcctgcagagcctacagagtgaggtt

SEQ ID NO: 109802 - DNA, 259 bp, Glycine max
  Clone ID: PAT_MRT3847_70164C.1
ctgcaagaagatgaagttgaggatcacaacggccaatggctaaattgctgtcatgatagctgcacatcacctgattctcctaattttgcatgccttaggcgacatgttagttagggagcactagagaccatttgtggacagatctccaaaactgagcagtttatgagctgtaaccatcggtgcccgtagatgcactgcagctgataatgacgcgaccaactcaactatctgaattgggtattggatcacttgtccatga

SEQ ID NO: 109803 - DNA, 236 bp, Glycine max
  Clone ID: PAT_MRT3847_70165C.1
ggtccgaacaaaaagcagctggatttaaaacaccttaaatactggcaacaatgggcccaaatcatgcacttacggaggccctattatattaaaggaggccggatacatagagtccacgatgacacctgcactattcaaaacgaaattttcatgcacacagagaccgatcttttcatggcaaaatcaaaagttgtgttcccataatgagccttgctgaaaaaatacttgaaataggc

SEQ ID NO: 109804 - DNA, 436 bp, Glycine max
  Clone ID: PAT_MRT3847_70166C.1
agaccacacctcgatgggcattgctaatcgaaggaggatctggtgcgcttgtgatagttgtcgaggggctatcgcgctgtggcggtagcagcatgattctgctctgtctcccagagccagactgccactctcgtatatgctgcaactgcgttttctgagcgcaaccgactgtctatccatccatcatctcatacatcccacacgtcttccgacaccggccagacagctcacatcattttctttcctgtctaccacccgaagcgtttaaaattctggcaacgaatttctgaaagcgcgacaataccctcaaacgcaatacagcgcaatccattcatctcagcgtttttctcatatagactacactatacacgggccgcgtttataccacacctgatcactcatcattgcatccatttaaaccgagtttttgtcattt

SEQ ID NO: 109805 - DNA, 757 bp, Glycine max
  Clone ID: PAT_MRT3847_70167C.1
cttgcttgctgcctgcgtgccgcagtggctttttcccctcctcctaaatggcagttgtcaaaaacaccaagtgttattacagtgcaaggatcataaatctcccatgtgtattgctcattccattttggactaaaattgtcaagaattgttctggttctgacccatttttggccatacttggcaacacaatatgcatccgtggtgccgcggccatccctcatcttcattgggaggagtccttgtgctcctaagatccctacttcaagcaccccaataggctgcttccatagctgtctagctgttggtctttggtcacttgagtacaaagtggactcatcaaggacatggtatccaccttcaagggaaattcttaggtgaatcctgcttgaaaacttaagctcatttctcctatcagcttccatcattccaaaaccaaacttctcaagattgaaccagcgtgaatgaacaggcctgtggtctagccgcttctcaaagagggtcagtggcaagattatcttcccaagtacttcatctcttgaagggtgcacgcgatcctccacagtgattgtcaactgctcctcaaatggttcagctgccacaaataccaaatcttcattccaaagtggtgtgggttgtcctagttggacatatcttggtcctcaacacttggctccccatctgagccttgacaaaaacctctggcagccggtttctgtcacttcgtatcacatcttgtgcttcaatggcattcaccctg

SEQ ID NO: 109806 - DNA, 300 bp, Glycine max
  unsure (1)..(300): unsure at all n locations
  Clone ID: PAT_MRT3847_70168C.1
cgcttattctcagacaccagaatacagtctggntgttttttcttagggatattcgcagcaccccttccacnnactccgtttcgggtgttntaagcttcgatttgatccgagcgtttttncctcgtgatcgccatatttatattttgttcttcaaattannagtctttggtcaccggagaaatgagcttataacttcgccaggcaatgactatgatggggctctacgactntgcttactagctttcctggctcatctgaaaggcagttgtcgcaatcctatcgtccctcctcatagttctc

SEQ ID NO: 109807 - DNA, 467 bp, Glycine max
  Clone ID: PAT_MRT3847_70169C.1
taaacgaagaagatagtaaacacacaccctctgagtcactatagaacgagagatggacatggctttcactatatccagatctgactctggtttgaaagataaagagaagaaggtgtgtgcagcatcataaggtatggtatcgagccagatttgtcatcgtgaaaagcatcttctctcaaaccatggacaaacatgcgatccttccacacatgacgcaaagaacgtttaaaaacagatccgaaaccgtttttgaacctcttatacggaccccataaaccaacaacaacaccaccactgggcaagaacaatatgggcttcaactggacgactctttctcttttccttaactcatgaattaccccccagcttcccctttataaataccaagcctagatcactacttatgccgctaagaccctttgaattccaccttccattggtatttaaaaaaaggggggttttttttt

SEQ ID NO: 109808 - DNA, 434 bp, Glycine max
  Clone ID: PAT_MRT3847_7016C.1
tatgtcattgatttcttggattgtcaattacaacataccaattgcctatttataggctcaagtcaccaacctctcaatggtggtgaatgtttctacattactttagatctttctagagttttcatgatagattagtatcatgatagttctagattcttctatcttatacatatacttatagttctagattgttctaccatattctatagttctaggatattctactattttcatacatattatatttaagaatattctagaaatttgtagcaatttcaacactcctccttgatgcaaatttctgtgactccgagcatagctcgtaattcttcaaatcttggtcttggcaaagccttcgtgaatatgtctgcaatttgatcttctgttctgcagtagtcgagtttgatctctttagttgcttcagcttctctgat

SEQ ID NO: 109809 - DNA, 1141 bp, Glycine max
  Clone ID: PAT_MRT3847_70170C.1
ccacgctggaaaacaaaaaaatgaagggaagcaagaggcccatccacgccgtcaccacatgggttcggcgccaaccgcccaagatgaaggcctttctcgcggtgctgtccggcctggcagccctgctcttcctcagaatcttcgttcacgaccacgacagcctcttcgtcgccgccgagcttgtccatgcgttaggaatctccgtcctcatttacaaactcaccagggaaaaaacctgtgccgggctttcgcttaagtcgcaggagctctttcgcttgtttcgcaggagctgacggctatgtttctgggtgttagactttattgcagttttgtgatggaatatgatatacacaccctactcgatatggcaaccttggccaccaccctctgggttatttatatgatacgtttcaaattgaaacctagttatatggatgataaggacaaccttgcaatatactatgtggtaataccttgtgctgtgctgtccttgttaattcatccaacaacccggcatcatccacttaataggattctctgggcattttgtgtttatcttgaagctgtttctgttctccctcagctgcgggtcatgcagaacactaagattgttgaaccattcacagcacactatgtttttgctcttggagttgcaaggttcttgagttgtgcacattgggtcctccaggtattagatactcgtggacgtctactgactgcattgggttatggattgtggccttctatggttcttctatcagaaattgtccaaactttcattctggcagatttttgctactactacgtcaagagtcttgttgggggacaacttgttcttcgacttccttcaggagtggtctaacttaaacattcaagtaggacgttcctttagcatgcagcactcggtaagtcagagtagctagttgatctttgacgtgttatgtatctatctgcggtcagagtgaacagagttgagaatgtactatacatgtaacatcgtgaaattttaatttatcttttgatcagttcaagtttgtgttggtagttagacagataacaaatatattaaatgatcctttggatacgagcgcaaatgccagttgacaattgatgttaaaagaaatcaattataacaaaaaaa

SEQ ID NO: 109810 - DNA, 492 bp, Glycine max
  Clone ID: PAT_MRT3847_70171C.1
gtttttgcccttggagttgcaaggtcccagaggcgagtcatgcagaacgcgaaggtattagatactcgtggacatctactgactgcattgggttatggattgtggccttttatggttcttctatcagaaattgtgcaaactttcattctggcagatttttgctactactacgtcaagagtcttgttgggggacaacttgttcttcgacttccttcaggagtggtgtaacttaacattcaagtaggacgttcctttaacatgcagcactcaaggaagtcagagtagctagttaatcttttgatatgttatgtatctatctgcggtcattgagtgaacagttctcaactgcggtctaacttcctaaaattttaatttatcttttgatcagttcgggttagtattggtagttagcagatatcaaaatatcaaatgatcctttggatacgagcaaatgccagttgacaattgatgttaaaagaaatcaattataac

SEQ ID NO: 109811 - DNA, 836 bp, Glycine max
  Clone ID: PAT_MRT3847_70172C.1
ccacgcgtccggtgcccacgcgtccgtacgacagaaggggatcgtttctctatctaacacgatatagtaacaccaccatctccattatagtagactcaacacacactcttaacacccaacgaagctcgtgaacaagataagaaacaaacaaaccaacgaggctctctctctctctcattcattattgatttcgagtgaagagagagattcgagatttgcgattccgcaatggcttcttcttccacgacaatgcggttctccgcggcctccaccggcgccgcggcggcgcttcctcgccggagctccgtcgccggattcatcggcgtcgcggccagatcctccgccaaatcgaggctccgcttcatcggaaggaacgcgaacttgagcctccggatgaggaggatgagctctttctccgtcgtgaagtgcgtctccggaagcgaggccaaggtgcaggataccgtggccaaacaacaagaagctacaacctctctcagctccttcacgccagatgcttcatctattgcctcaagtattaaataccatgcagagttcactccattgttttctccagagaattttgatctaccacaggcttttcttgcaactgcacaaagtgttcgagattctctcattataaactggaatgctacctatgattactatgagaaactgaatgttaagcaggcatattacctttcgatggaatttttgcagggtagagcattattaaatgcaataggcaatctggagctaactggtccctatgctgaggctttgagcaagctcgggcacatgtttcttatgtggcataccaggagccagatgcttgactt

SEQ ID NO: 109812 - DNA, 491 bp, Glycine max
  Clone ID: PAT_MRT3847_70173C.1
ctgagtttcctaagttatattggtctccatgtgctacacagtgcattaatttgatgttggatgacattatgaaattagaggaagtaagtgagattgtgtcacttgcttcaaaaattaccaagtatatttacaatcattattattctttatatttgatgagaaaatatacaggtggaaaagatatacttggtccagctccaactcagtctgccactaatttcattgccttgcaaagtatattggctcataaagatgcactaagagccatggtaacatctagagattggacaagctcagcttatgccaaagaatctaaggcaaaaaaaaattgtggaacaaatcttagactccaggttttggaaaaaatgtgctgatattgtgaagctcacagagccattggttcacgtcttacaaattgttgacagtaaagataaacctgccatgggttttctttaccaagctatgtataaagccaaagaggagatgattag

SEQ ID NO: 109813 - DNA, 833 bp, Glycine max
  unsure (1)..(833): unsure at all n locations
  Clone ID: PAT_MRT3847_70174C.1
cggtgcagtaacaccaccatctctattataggagtcaagaaaaacacacactaacacccaacaaagctcgtgaacaatattagaaagaaagaacaacgctctctctttcttcttcttctctctcacattggttattgatctcagtgaagagagagatttgcgattcgcaatggcctcttccgcgacaatgcggttctccgcgacctccaccggagccgaggcggctcttcctcgccgcaactccgtcgccggattcatcggcgtcgcggcgagatcctccgccaaatcgaggctccgcttcatcggaaggaacgcgaacttgagcctccggaggaggatgagctctttccccgttgtgaagtgcgtctctggaagtgaggccaaggcgcaggatccagtggcaaaacaacaagaagctacaacctctctcagctccttctcgccagatgcttcatctattgcctcaagtattaaataccatgcagagttcactccattgttttctccagagaattttgatcttcctcaggcttttcttgcaactgcacaaagtgttcgagatgctctcattataaactggaatgctacctatgattactatgagaagctgaatgttaagcaggcatattacctttcgatggaatttttgcagggtagagcactattaaatgcaataggaaatctagagttaactggtccccatgctgaggctntgagcaagctcgggcataaattagaaaatgtggcataccnagagccagatgctgcacttggaaatggtggtcttgggcgtcttgcttcatgtttctggaactctttggccaccttgacta

SEQ ID NO: 109814 - DNA, 470 bp, Glycine max
  Clone ID: PAT_MRT3847_70175C.1
ggggtattggtttttttgttttttttttttttttttttttttttttttttttgtttgttttttttgtctttgcacggggggaaaatccattgggctcccccagaaaacacccttttttttttgtaaagggaccaaaaccctggaaaactttttcctgaaaaaaccctgggaaaagccccaaaagacgtgccctgtgtacccgaacaaaaaaaaccgggttttttaaggggggccccttttttatccaaaaatgccttggctttttggaccaggggggaaattctaaaggggcgcctggaaaacgagaagaatatccgctttgggaaaaaacccaaaactcagggggggaagatttttgtaaaaaaaacttcccgggggggccactttgggcaggagtttgatttttttacaaaaaaaaagctaggggggcagaatccccccccgaagaggacaaaaaaggggtttttccc

SEQ ID NO: 109815 - DNA, 238 bp, Glycine max
  Clone ID: PAT_MRT3847_70176C.1
gctcgagtcaggatttagatttggtatttgaccattcacactaataatgaggctggtactcctctatgaagttctctaccacctcctgatcctggcccttgcacactgcgcttagctttggcaaattatgcagatctcttgaatcccccacgcaagctgtgcttctcgttcaggcttctttagtggctctggctgcacatacttcggaacccagtgaagcggatagattaacattcct

SEQ ID NO: 109816 - DNA, 286 bp, Glycine max
  unsure (1)..(286): unsure at all n locations
  Clone ID: PAT_MRT3847_70177C.1
cncncacacactcactcnccttctctctcctattgcggctagggtntgggtnttncagtttcagcctctccattccttgcaaccttcttctnctctttgatctctgatggagacgttccgtgtttagtagcaagggttanttgaggccttgtggtntgnaaacgtacggtgtcgttttggagttgggaaaacaaataattntgatagatggtcaaccacgaanccttttganttgttgggtgacgacgctgagganccgtctnagntcancgccgccganaactca

SEQ ID NO: 109817 - DNA, 365 bp, Glycine max
  unsure (1)..(365): unsure at all n locations
  Clone ID: PAT_MRT3847_70178C.1
aaacataaaggttattcttttgtcaacagccaaacttgagcttcaaatgctcaacttgtttaattcatttacatccaactggatgaatcgttctaatcgattccatgtaccaatgttccaaggaaatgcttcaagcaaggggggggcggattttttttttttttccacaaaacagggggcaaacatcccaacagggggggggcaagcaccaccaagaaggaaggcacgggacgganaaannaaccnannaagccaacaagacaaagagaacacccaaaagccaagganaanaaggcccanncaaaaggaagnanacaaagagncagcccaaggaggagnaagaccnaagncaaanggcaagagaa

SEQ ID NO: 109818 - DNA, 417 bp, Glycine max
  Clone ID: PAT_MRT3847_70179C.1
ttggctgctagaagacgacagaaggggaaccctcattcattttctctttctctctgtgaacacaaaccctaacaagaagaagaaagagcgatgatgcgttggtagatcgtgatctggtgcgggcgcgatcattgtaggatcggtgcgttcgaatttcgcaatgacgtttgggagttgagtgaaggaatcgctattatgtctgaattggtggcccgtacgggccggcatcagcagcggtacgagaacggttaccgtcttgtttccggggaggttgggagaatgacgaaactgttgagcaggcagctgtaagggaagctgtagaagaagcaggagttcgaggagacataatggattttcttggacactacgagtttaggagtaagacccatcaagatgagtttagtccagaaggtttat

SEQ ID NO: 109819 - DNA, 333 bp, Glycine max
  Clone ID: PAT_MRT3847_7017C.1
aattcggctcgagctacttcccaacattgttcagagttcattatctgtcatttacaaccctcaagccggtagcgtgacaaacgcatccagccatgactttccagccctattgggctgaaacctacagctgagatttgatctattcggaagaatgcactgctcgtgccacactacaacctgaacgcgaaccgcatgatatacgcattgaaaggacgggcaatgatacacggtgcgctatccacgaagagagcaggtcggatgagagcggcaagggggacctgtgcggatcgaaccacaaaactttgtggtggatgctggagcacatagtgacaa

SEQ ID NO: 109820 - DNA, 172 bp, Glycine max
  Clone ID: PAT_MRT3847_70180C.1
aattcggctcgagctgcatacgagtgtgtgagcatgctgcgcaggaatgtatcgcgacgcgggggttatctgggatgcatggctaaccatggctacgaacacggcttgaacagcattgtatgcaagaggtgtgtgattgaacacactatgaagatgtcaacacaaagcacac

SEQ ID NO: 109821 - DNA, 976 bp, Glycine max
  Clone ID: PAT_MRT3847_70181C.1
ggccttgtccattttctctttctctctgtgaacacaaaccctaacaagaagaagaaagagcgatgatgcgttggtagatcgtgatctggtgcgggcgcgatcattgtaggatcggtgcgttcgaatttcgcaatgacgtttgggagttgagtgaaggaatcgctattatgtctgaattggtggcccgtacgggccggcatcagcagcggtacgagaacggttaccgtcttgtttccgggtgtgttccatttagatataaaagttctaatgattgtggagaccctagttctgagaagattgttgaagtgcttatgattaattcaccaagcggacctggtcttttgtttccaaagggaggttgggagaatgacgaaactgttgagcaggcagctgtaagggaagctgtagaagaagcaggagttcgaggagacataatggattttcttggacactacgagtttaggagtaagacccatcaagatgagtttagtccagaaggtttatgtaaagcagcaatgtttgctttatttgttaaggaggaacttgagttatggcctgaacaaagtaccagaaataggagatggctagatgtttcggaggcacttggaagcctccggcatgcatggatgagggacgccctggaatgcttctgtaaatggcaagaggataagttggcgaatggaacgaaagaataagatggatttgctgactaattacatttagtgcattgtatctttgtggtaaaaacacttattttggggttggtaccattactttaggacagttaactctaaatcagaattgcatagtagttattgtttcaaatctggattgatctctgatttgtttttcttaattcagagtatataattcataacattggttttagttgagacttgagatgcttgttctcgttgtttgaattgttatctattcatattcatggttagtgcttactccgttaccttgaaatatt

SEQ ID NO: 109822 - DNA, 255 bp, Glycine max
  Clone ID: PAT_MRT3847_70182C.1
tttttaccccacaaaaaggatctagtaattcgtcaacaaaaagaatacatgccttccaagatgccaaaccttccaagcatcaacaccctatgtagtagggctgctcttaacggaggacgctacaaactagaataaagctacagaaatggcagcttaggcaccatatgccgcccaattattagactcatcagcctctaaacacagaaacaggatgggcctatcctgaaactgcaaccacttgcacctatgtaaaca

SEQ ID NO: 109823 - DNA, 415 bp, Glycine max
  Clone ID: PAT_MRT3847_70183C.1
aagcggccaagcacaccttcaccgcctccaggctcagcaaccctccctccgctccccgggcaccaagcagaagaccgaaaagaccaccgacaaaatagagaaatcagacggagccaaagacgccggagccggcggaacaggcgccgccgccgccgcagggaccggaccccggaaatgtggcaaaggaggacccgactaagataattactgataataggcaaaccaggggggctaacactgccagggaggagagtctcaagaaagaggaggaagcaggaaagctcaaatatgtatgccaatcaaacgaaggtgtagaagaacataaggttaggtagataaggaaagaaaaacacaaaagctaggcaacatccaaagaagcccaaggaggacaatgaccgaaaagatacggaaagga

SEQ ID NO: 109824 - DNA, 2082 bp, Glycine max
  Clone ID: PAT_MRT3847_70184C.1
gcgagaattcccatgccgacctaggagtcagcaaggattgcgttctgcctgttgttccttggtaatcgtgagtggtactattcccgaatagcagcaagcaaggcaaggcgtgtgtccgagcagagcaggagtgaaggagaaaaggacccttgtccgtccagtccttattctcttttctcctccctccctcacgcaaccgccaattcctgaaccctaagctagcgccatggctgtcgtttcgcgaagtgcgacgacctatacgcgccactacttaatacgacacgagtttgataggaaaacgaaaacctgcgttgccaataatagtttgtgttactctgctaagaaggctcctccaccgcagaggattgttggtggccgtagagtgattgttgctgcaagccctcccaccgaagacgctgtagttgccactgaccctctcacgaagcaggatctcgtcgattatcttgcctccggttgcaagcccaaggataaatggagaataggtactgaacatgagaagttatggttttgagattggaagcttgcgtcctatgaagtatgaccaaatagcagaattgctgaatggcattgctgagaggtttgactgggataaagtaatggaaggtgataaaattattggactcaaacaggggaagcagagcatatcattggagcctggtggtcagtttgaacttagtggagctcctcttgaaaccttgcatcagacttgtgctgaagttaattcccacctttatcaggttaaagctgttgctgaggaaatgggaattggatttttggggattggtttccagccaaagtggggaatcaaagacatacctataatgccaaagggaagatacgacatcatgaggaactacatgcctaaagttggctctcttgggcttgacatgatgttcaggacatgcactgtgcaggtcaatctggactttagttctgaagctgacatgatcaagaaatttcgtgcaggccttgctttgcagccgatagcaacggctctttttgcaaattcaccctttaaagagggaaagccaaatggttttgtcagtatgagaagccatatttggactgatactgataaggaccgcacaggcatgctgccttttgtttttgatgactcttttgggtttgagcaatatgttgattatgcctcttgatgttcctatgtattatgtctttcggaaacacagatatatcgactgcactggaaagaccttcagggactttttggctggaagactgccttgtatccctggtgaattaccaactctcaatgattgggaaaatcacttgacaactatatttgctttaccagcgtttagggtagagttattgaacgatgaagctgatggagggccttggagaagattgtgtgctttaccagcattttgggtagggttattgtacgatgaactttctctaaaaagtgttttggatatgacagctgattggactccagaagaaagacaaatgttaaggaataaggttcctgtaactggtctgaagacaccattccgagacggtttgctgaagcatgttgctgaagatgttctaaagttggcaaaggatggcttggagagaagaggcttcaaggaatcgggatttttgaatgaggttgccgaggtggttagaacaggtgtcactccagctgagaggcttttggaattgtatcatggaaagtgggagcaatccgtagatcatgtgtttgaggaattgctttattaaggtagtattgtctttcaaatgtctgtggaagattaagtgtaatcctttggttatagttctggttgtctctcatttgagcttcatttagatataggaaataatataaatgtaatttttgccttgaggcttctcatatacctttcttggaaaacatgatctgatcaagctgacattcaatgtcacaaatttgaaaatccatcaatataatctttttaataagagtgtcaatagattaaatgtttgtggtaggcacaaatgctgcttgaataaacactgttttttctttatttctagactcggactcattcagtcaccattttttaaaattctttttgtact

SEQ ID NO: 109825 - DNA, 745 bp, Glycine max
  unsure (1)..(745): unsure at all n locations
  Clone ID: PAT_MRT3847_70185C.1
tcgtggtcgcgtggtcggacgcgtggggtagtattcattctaatagcaaaccaaggtgggtgtgtccgagcagagcaggagcgaaggagaaaaagaccctcactctgttttttcttctttccttcctcaaccctaagcaagcggcatggttgtcttttcgcgaagtgcgacgacgacgacgacgacgacgacgacctatacgcgccacaacttaatacgacaaacgaaaacctgcgttggcaataataatagtttgtgttactctgctactaagaaggctcctccgcagaggattcttggtggtgcacgtggcagtagagtgattcttgctgccagccctcccaccgaagacgctctagttgccactgaccctctcaccaagcaggatcttgtcgattatcttgcctctggttgcaagcccaaggataaatggagaataggtactgaacatgagaagtttggttttgagtttggaaccttgcgtcctatgaagtatgaccaaatagcagaattgctgaatggcattgctgagagatttgactgggataaagtaatggaaggtgacaaaattattggactcaaacaggggaagcagagcatatcattggagcctggtggtcagtttgaacttagtggagctcctcttgaaaccttgcatcagacttgtgctgaagttaatttgcacctttatcangttaaagctgttgccgaggaaatgggaattggatttttggggattggtttc

SEQ ID NO: 109826 - DNA, 400 bp, Glycine max
  Clone ID: PAT_MRT3847_70186C.1
cttggctggaagacttccttgtattcctggtgaattaccaactctcaatgattgggaaaatcacttgacaactatatttcctgaggtcaggctgaagagatatttggagatgagaggtgctgatggagggccttggagaaggttatgtgctttaccagcattttgggtagggttattgtacgatgaagtttctctacaaagtgttttggatatgacagctgattggactccagaagaaagacaaatgctaaggaataaggttcctgtaactggtttgaagacaccattccgagacggtttgctgaagcatgttgctgaagatgttctaaagttggcaaaggatggcttggaaagaagaggcttcaaggaatcaggatttttgaatgaggttggcgaggtg

SEQ ID NO: 109827 - DNA, 317 bp, Glycine max
  Clone ID: PAT_MRT3847_70187C.1
agggcgaatctactagcggggataggatagtagggttcactgacataacaggaacagatcatacaccccaaaaagaagaggataataaatggtgtttgaatgagatattatggatcaacggaccacctatatataactaaaccagaatgcgttgatccttgatggaaaccccaacgcgagaggagcggagtacctataattccgaggaaggttaccagaatagctacggccggttccttaacaataaccattgctataaaaatggccactgattatgaaagagagactctaagggtttcctcgttggttcacgccct

SEQ ID NO: 109828 - DNA, 856 bp, Glycine max
  Clone ID: PAT_MRT3847_70188C.1
actcgagccgattcggctcgagtttcacgaagccatggctcaaacagtgttgttcttgtcttctagcactgtccctggctctgctaactattccatagatctgaagaaagactctttgatccatcttcagaatcaaggattaaggcccaaaatttctcatctcttcttcattccactaccttcagcttcttattcattttcttcttcttcatctcgcacatttattacagctttggccttcttcaaaacaaagactcccagcaaggttgtgaagtccaagccaaagcctaaggttgaagatgccatttttggctcttctggtgggtttggttttactaaggtgaacgaactctttgttggtcgtgttgccatgctcggtttttctgcaccatcgttgggtgaagcaattactggcaaaggaatcatagcacaacttaatctggaacctgcaatgcccatatatgaagcacttctacttttcacactactaggagccattggagcacttgtttaccgtggcagatttctttatgaccttcccactgaactcaataagacagtcattcctccaggcaaaggactcagtgaaggccaaggaggtaattagctctcacaaatatttcccacatttctaacttccatgaacattataggagaaagatgataagaagatataatgaattgaactcatcatataagttaaaattaacttttgtatttaattttttatatttttttttcaatttttaacttttccaaaaattaaagtgtgtaaactgattttaacttatagataggtttaatatgttttacttttttttttattttcttctcttataaatgtcaacggcgaaaa

SEQ ID NO: 109829 - DNA, 151 bp, Glycine max
  Clone ID: PAT_MRT3847_70189C.1
gactgtagtctgacaaggccgaaaatttcaataattaaacgctcgcaaaataacagatttgtgtattgtctcggaagtgtcaataataaaggttttcactgtatttagcttgcttgactataagacgatccctttattattgacaccgccg

SEQ ID NO: 109830 - DNA, 448 bp, Glycine max
  Clone ID: PAT_MRT3847_7018C.1
gcgatgggcatctctcgggacagctggctcaagcgccgcaaaaccgggggcaagacaaagccctaccacaagaagcggaagtatgagttggggcgcccagctgccaacaccaagattggcccccgccgcatccacgcagtccgcgtgcggggaggtaacaagaaataccgtgccctgaggttggacgtggggaatttctcctggggctcagagtgttgtactcgtaaaacaaggatcatcgatgttgtctacaatgcatctaattgcgagctggttcgttccaagaccctggtgaagaattgcatcgtgctcatcgactgcacgccgtaccgacagtggtacgagtcccactatgcgctgcccctgggccgcaagaagggagccaagctgactcctgaggaagaagagattttaaacaaaaaacgatctaaaaaaattcagaagaaat

SEQ ID NO: 109831 - DNA, 1219 bp, Glycine max
  Clone ID: PAT_MRT3847_70190C.1
tacggctgcgagaagacgacagaaggggacacctctttctccttctccccagttctcaaaccttacctagtattttcgtttctgaacccaattaattaagcacacaaggaccataacatacctatacctcaatatcacaagtcttatggaggcagagcgagacaagtacaagatgatcaactttgaagaaaccgagttacgactcggcctcccactcagtggaaacgagacgctcaaaaccacttgcagcactgggaagagggttttttcggatactgccgtggatttgaagcttaacctttcctcaacctcaaacagtgcttcttctgacctgactaaagagaagaacatcactgctgctgcacctcctgctaacgacccagcaaagccacctgcaaaggcacaagtggtggggtggccaccagtgaggtctttcagaaagaacattgttcaaaggagtaacaacaatgagggcgaaaaagccgccacaagtagtagcaacaatgtgaacacgggagcagctttcgtgaaggtgagcatggatggtgctccttatttacgcaaggtggatttgaagttgtacaagagctaccaagagttgttggatgcgctggctaaaatgttcagttcattcaccattgacaagtgtggatcccaaggcatgaaagacttcatgaacgagagcaaattgattgatcttctcaacggctctgattacgtaccaacctatgaagacaaagatgctgactggatgctcgttggtgacgtaccgtgggaaatgttcgtggaatcatgcaagcgcctgcgtataatgaaaggatctgaggcaatcgggctagcaccaagagcagtggaaaagtgcaagaacagaagctagagtcaaatttgtaaattccactttcgacaacaatctgctctatctgttgctcttgggcgtccacggaaagcattaatgctaatttctcgagcaaggggtagtctaatataggagccaagttgttacataatgtgtcggtaccatttcttagaaataattttcttgtatatgtattgtgtattttatatatgtgagaaaatatataatttggaaattagggacaagaaataatgaagtatgttttatatatgtgagcccgtttttgtttctaagtacaaaacgttacgttgtctatcgttggtgtgcttgtctaataagaataatgtctacgtttatagctgt

SEQ ID NO: 109832 - DNA, 154 bp, Glycine max
  Clone ID: PAT_MRT3847_70191C.1
gaggaagcaagggactggctgaatagtgttagaagtgagagtgacacaacaaagttggctgtgctgtgggataacattagagaaatttagagaagtatgctactggaacttatctgataataagagaagtagtctgaagatgttcttagctaag

SEQ ID NO: 109833 - DNA, 349 bp, Glycine max
  Clone ID: PAT_MRT3847_70192C.1
gggaaaaaaaaaaaacattttaaatttttttgggcctttaaaaaaaccggggtgggggcccaaacatgggaatttcaaatttttctttgaaaagaagggccccccacagggggccaaaaattgggggggccaaaatgcgtttcccttccccctttgtctttcaaatttttacaacccctttggctcgggcctaatttttttttctccccaaagaaataatgtgagcggggtgttttttttaatccccccactttttttgcagaccagccctttttttctggttgtagaaaataaaaaataccctttgggggtccccggggccgaatttccagctttccgtcccggggct

SEQ ID NO: 109834 - DNA, 464 bp, Glycine max
  Clone ID: PAT_MRT3847_70193C.1
cagatattgaagaaatattactgactggttgtaaaagcttgactgaagtttactcctctggattcctcaacaagctgaattttttatgtttaaatcaatgtgttgagcttaggagtttgagtattccgagcaatattctatggagatcatcaggattaattcttgtttctggctgtgacaagcttgaaacgttttcaatgagtaatagaaccgaagtggttcaattatccggttgctcacaccatgatacatttccgactgggaaaggatcgtattgtcaggaatatcccagagtttggctcggaggtattgtcgaaggtggattagagtgttcacacgcgggaccttcccgagtcatgcgtacttttaaccccgttgttaatatagacagacatgaagttgaagacaaagaagtggagaaagccttaaacttattatacttggacatattagactcgacaata

SEQ ID NO: 109835 - DNA, 624 bp, Glycine max
  Clone ID: PAT_MRT3847_70194C.1
tgaagacattgctgcttcttacaatgggtctatatggaaagatggtgagtcggcacaagggtcatcagatagcctttgtaccattgaaattaaggatgcacttcttccaccttggattatttgtggtatatgtgcattgatggcctctgaaggaagaagctttgaggcaagttttgtgacggaacctagctcaattggcttgaatgttgccttaaaatcaacttgtgaaaagtcggaatctaaagctgccggcagtgaaagcttacaagaccaaggaagtacttttggcattccagaagttgtagtcacttctcgactgtgttcatgttcattaaaaggcgtaaggtacagtgatgaatcttatacagcatcgctatcccctgtatgatcttataaacaacttatattcatcacattgatggctaatttatttaaatgccaactggtcccttgaccctccagaaaattaaaatcaaggaatgaccttgtgagggaacattgttggcaaccgagaatgtgtgttttaagcgattctagcaattgatgcattttgagcatttcattcaagattacaaaactatgaccttgtgaggggaaataaatcaattacgaaatgtcgaactc

SEQ ID NO: 109836 - DNA, 745 bp, Glycine max
  Clone ID: PAT_MRT3847_70195C.1
tttccggttggacgcattgcaacgcgacgcgcgcaatttagccacggatctttttaaggcaaaaacggtgcaggacgaactggcggaggcgctggagggcacgctacgcgaaaacaaatcgttggcccaagagatcaaagacctgaccgatcagctcagcgagggaggccgatcagtgcacgagctgcagaagatcgtacgccgacttgaggtggagaaagaagagattcatcacgcgctggacgaggcggaggcggtgttggaagcggtggagagcaaagtgttgcgagcccaagtcgaggtgtcccaaatccgatcggagatcgaaaagcgcatccaagagaaggaggaggagttcgagaacacgcgcaaaaaccaccaacgggcgttggaaagcatgcaggcgacgctggaggcggaaagccggggcaagcaagaagcactgcgcatcaagaagaagttggagagcgacatcaacgagttggagatcgcattggaccacgcgaacaaagcgtacgcggacgcacagaagacgatcaagaagcaccaggaacagatccgcgagttgcagctgcaagtggaggacgaacaacgccagcgggacgagctgagagagcagttcctgaacagcgaaaagcgcaaccagattctccagagcgagaagaggagttgatgcaccaggccgaacaggcggagagggcacgccgtgcggcggaggccgatttgatcgaactgcgcgaagcag

SEQ ID NO: 109837 - DNA, 467 bp, Glycine max
  unsure (1)..(467): unsure at all n locations
  Clone ID: PAT_MRT3847_70196C.1
ctctcgcgtttgtccaattgtgactttatcacgagaaactttaagcttatgtctaatgtcttgcgggtggctcctgaggacaaggctagtatatggtcacaacgttcattatcgtttctgtgtaagtattctgtcaaaatgcaatgaatgccttatgctatgacaatgctcntcaagatgtcgtctacgagtaatctgtatgttgccacatgaccagaggacgctcgccaattgtgaaggaaagctctctctcgtattgaatggctgcaaaaagctgatgtgcctaccatagcacagattgaagagttccattcgatgcagaagatgatgaatgctcctgagtcaaatgataatattgatctactggtgagcattgatatattgggtatacaaggagcattgtaagctattctcaacacgatagtttttgatgataagcttgcgatgcctaacacacaataattctt

SEQ ID NO: 109838 - DNA, 410 bp, Glycine max
  Clone ID: PAT_MRT3847_70197C.1
attgaatcttatttaatttacatgcttacatatattcttttttttttttatattcttttttttttttaaaacaaaaaaaaaccatgggcggcccgaattttttaaaccaccaaaagaaaaaaatgttttgacccccatggctaaaggggcaaccccccagccccttgctttatttattcccccccccccccccatttataacgccctccaaaaattgggaagaccgaaacactggggggggcaaaattttctggcctctccaatttttgagggggggggccccccccccccctcccggaaatttcaccaaacaaaaattcggggatgctttaaaattaggggcggcaatagctggggcacttgaaatttgaaaaaaaacaaaaaacccccctcttttttttttccggggg

SEQ ID NO: 109839 - DNA, 2717 bp, Glycine max
  Clone ID: PAT_MRT3847_70198C.1
ttatctccaattgcaacatactaagtgggttggctggtttagatctgagcaacagcttttaattttctacttgcttgaattttattggaagccatggattgttcatcatggattaacacttccttggatctcaacattaatccccgcagagttcatgaagaagttcccgtaagtatagaaataaagatcgaataatattatatcattcttcttgcgagcactccctgaagctcttacgggaaatgctttcattcagaacatatatagtttgatatgggagttattcattcattgtcgtgtgttgatttcagaaggaggtagaaagcgagcttttctctttgggaatgaccaagtttaacgtggaagaagagtctactagtgacttggaggaggaactgaagcgggtgactgcagaaaacaagaagttggccgaaatgctctcagtggtgtgtgagaactacaacactttgagaaaccatttgatggaatgcatgaggaaaaatggtgaaaaggaggtcagcccaacatcaaagaaaagaaagtctgaaagcagcaacaacaacaacagtaatttgatgggaactaacaatggaaactcagagagcagttctactgatgaagagtcttgcaagaaaccaagggaggaaaccatcaaagcaaaaatttcaagagtttatgtcaggactgaatcatctgatactagccttattgtgaaagatggataccaatggaggaaatatggacaaaaggtgaccagagataacccttacccaagagcatatttcaagtgctcttttgctccaagctgccctgtcaaaaagaaggtaaatatatataatcaaccaagtgctaactagtaactaggaaatggtttggtttggttactcacatgttagtagggaaatggatctcaagctaagtttgttttgtttttggtttggttattcaggtgcaaagaagtgtggatgatcaatctgttctggttgctacttatgaaggggagcacaatcatcctcagttttcttcccagatggaagcaacatcaggttctggccgtagtgtgacccttggttcagtgccctgtaccgcatctctcagcacttcaacaccaacacttgttacccttgacttgacaaaatctcagggaagcaacgattccaagagcacaaagcctaaaggagattcacctaaagtacctcaggttttggtggaacagatggctacttctttgaccacggatcctaattttagagcagcacttgttgctgccatctcaggaagattgttgcacaataattaaatggaattttggtgaagtgttgctaatttagtgtcaattgtttaagtattccataaaatagagatcattctttagagcaaggggtctctctatgtaaatacaacatggaaggctgggacatatttgatcctttaaagtggaaataaagttccactaaggatgacatgttgagctgattaaacaacagaaaatcaagctctgcaccaccctctgcctcatcatgatggtaaagatttagcaagtcttttttggctaatatatctaggatacctcaaattaaatttcatagtaggttgtagcacacattctcggaaagatctttcataaagtgcatctctacggcaatttaatttctcccttttcttctctcactactctctctggcaagccaactctatatctagtcctagttttagaatttcatttcagaaattatattatacattgatcaagtattataagtgtatggaatgtaacttagagcaaggggtctctctatgtaaatacaacatggaaggctgggacatatttgatcctttaaagtggaaataaagttccactaaggatgacatgtagatctgattaaacatcagaaaatcaagctcctgcaccaccctctgcctcatcatgatggtaaaggcttagcaagtcttttttggctaatatatttaggctacctcaaattaaatttcatagtaggttgtagcacacattctcggaaagatctttcataaagtgcatctcttcggcaatttaatttctcccttttcttctctcactactctctctggcaagccaactctatatctagtcctagttttagaatttcatttcagaaattatattatacattgatcaagtattataagtgatggaatgtaactcaaaacatggaaaaatgaaaaaagggggtccgcaaaaaaaaaaaaaaaaaaaaaaaaaaaaaaaaaaaaaaaaaaaaaaaaaaaaaaaaaaaaaaaaaaaaaaaaaaaaaaaaaaaaaaaaaaaaaaaaaaaaaaaaggggggggcccccaattagggacctctcccccccggaattaaattcgggccgggaccttgggggggacccatttttcctttaaggggggcgtttaaaacttgggggaaaaaagggcaaaagttgttccctggggaaaatggttttccgttaaaattcccccaaaaaataaaaccggaaaccaaaaagggaaaacccggggggccctaagggggggccaacccccctttattggggtggcccccatggccccttttcaagggggaaaacctgtgggcccacttgtttaaaaaaatggcccaccccccgggaaaaggggttttgctttttggcccccgggggggttttttttttacccagggaaagggcaaaaagttgttggcctttcccccccggcc

SEQ ID NO: 109840 - DNA, 244 bp, Glycine max
  Clone ID: PAT_MRT3847_70199C.1
aaaaaagaacctgttaaaaaagtaaggggaaaggcagcttcaacaccaacaagactcctgtgacccaaaaccctaacgaatgtgaacactgagacccatccccccggtggttctgttttaggagacccaacccacgggaagacccgaaaagggggaaaaattgcccgggaagacccccccccactcaagttgtgaaagaaatgcactcctcgacccctgggaggaaaaggaaagtcccgcccgg

SEQ ID NO: 109841 - DNA, 168 bp, Glycine max
  Clone ID: PAT_MRT3847_7019C.1
atgattgggaatgtggattttcattcgttcgggcgtttgtttaattcaataatggaaaacatggcatgacccctttggtgagaatgctctgcctattcgcaaattaccacaccttttgttatagccgtaaatgatgtgggaagtgtgtgttcctttgaaaaacaaaaa

SEQ ID NO: 109842 - DNA, 365 bp, Glycine max
  Clone ID: PAT_MRT3847_701C.1
gctgcctcgaattgctatggcttgcttcgaaacgctctggtatgatgcgagcggctggccctgaacctgagcgtggtcttgctccgctcatacaactaaccaccctaatggctatcttatgaaagggagaggagcaagctgcagatgacgtagccgatgccgtcgacaccaacaaccacgatgactccgacgactgcaacgacaccgggatcggcccgcacagctgacaacgtttggaggagcgtcttacatcctgggagcaactccgccacaaagaccatcggtgctcagatgtttgacaaaccactatccaacactcccactgtctatgacttgctgtacagaggggagaccagaagccggca

SEQ ID NO: 109843 - DNA, 256 bp, Glycine max
  Clone ID: PAT_MRT3847_70200C.1
agtcccatgtttctctgttcttcgttccacaaacgtagaaaagaagaacgaaaaacgaaaaacaaaagcaccccatttgattttctccgcaatctgaaaaatgggtcgtcgccaaaacgactcagatttcggtagattcgcgattctcgtcctcttcctgaaaagttgaatcttctgcttcgcggtataacttttccttaactgtgtccttcgggccaacaacggatctctggcttcaattgatgattatgttggg

SEQ ID NO: 109844 - DNA, 2899 bp, Glycine max
  Clone ID: PAT_MRT3847_70201C.1
acgacataacggtgagaagtcaaaaaatggtcatttgttaatcttgtggatgctaaattttgtgttataaattactgcatatacattccatgtaaagtgtaattcctgctgtgttgaatacttcaatatatatatgtgaataaaagaagctggatgatatgtatagaatcctatttcacggtctactttgctgtgtgattttatatataatctttaaactttcattatcagttctgattttacatatagccaagttcaacttatccacaaagaaacatcgcggttccctcgcatcagcatctttcgtaattttcttcactgctatttaccattgccacactctcattctcgatggcggcgaagatttcattggcaattggtttgagaactctcttcactgttttgggacttctcatgcttgctatctttctttacactgtcttcaccgatggtcttccgtttcgcaaagaacttctcacaccgtggatggcagcaactttgattgatttctatatcaacgttgtagctttggcggtctggattgcttacaaggaatcaaacttaatcagctcaattctgtggattgttttgcttgtctgccttggaagcatcactacatctgcctatattgttgtgcaatttctgaagctgtcatctcaagaatcttcacaggatcctatgtattatgttctattgcggaatccaaataagaacggcacagcacctcaaagaaagcatcatctatcgagactctaagaataattttcagcattttgggtgtagcgagcggcaagttccgagttcttgcactccttggaccaattcctcgttttgacattcattcccagaaaacttttccacacaccaaattccaaatatacctccaattcccattccttcacaaaaaacacaacacaaacatgaagactcccacctctgccaaaattggattccaattttctctgtcttttccttcattattggtatgctcggtcacaagcaggatgtgggacccaccagaactcaaacgggttgcttattgcgcagcatcagcgggaccaacaacaactacaagtgatctcaggggattgtgctaccaagaagatgttgcccaaggatgcagtgagcgaattgcagaaaacccatgaagccattcaagctttagataaacaagtttcgatgcttcagatggaactagcagcagctaggagttctcgtgagagtgggatctcggattctaattcttcaaccaccacttctggggaaggtgctccaaagaacaaagcttttatggtgattggcttatacacagattcacataaacacagctttcagtagcaggaagaggcgtgattccgttagagagacttggatgcctcaaggtgaacaacttctccaattggagcgggagaagggaattgttatcagattcatgattggtcacagtgcaacttccaacagcattctagatcgagctattgattcagaagaagctcagcacaaagacttccttcgcctagaacatcttgaagggtatcatgagctgtctgcaaagacaaagattttcttttccactgctgtttcaatgtgggatgctgatttctatgtcaaggtggatgatgatgtccatgtcaatttaggtgtcctggcaacaacccttgctcgtcatctatcaaaacccagggtctacattgggtgtatgaaatctggacctgtcctttctagaaaggatgtcaaataccatgaacctgagttttggaagtttggagaagaggggaacaaatacttccgacatgcaactgggcagatatatgcaatctcaaaggatttggccacttacatttccatcaacaagccgattttgcataaatatgctaatgaagatgtctcgcttggtgcatggttcattggtcttgaagttgagcatattgatgaccgcaatatgtgttgtggaactcctccagactgtgagtggaaggcacaggccggtaacgtatgtgttgcatcatttgattggagctgcagtggaatttgcaagtcagtggagaagattaaatatgtccactcaaagtgtggtgaaggagatgaagctgtttggagtgctttattttagattgtttcaaagggagatggttttttctggttcggagagggactgattatttaattgcagctgggacaaagtcaattttcagatttgagatgaagcaaatagatataacatgaaaagatctcgtaactgttcaaaactggttaagcaaggctggttgatcaatttttgtggaagctgaagttggcaattgcatggatgtggatctgagtatatagatatattgactataccttccaagcctgttctattcttagtgtgggaggtatgataactattcttggtgttattgtaacaaagtctgttctagttttgtaattccttttatatgctatttttttttcatagttggggtgagattggttattatgccctttgtaacgagaaaaacaatgtatttatagttttgctaacgcgttaaatatgatcacactattttgatgtaataaaaggactaaatttaaaagattctggcttacactttacaaatgtccatagagaacctctgaattctttcctgaatcatcacccctcttccgtggaccatttttctctttctatctccccttggcccccaaaaacaaaaaaacaaaaaaaatgattccttgcattcacatgtcttgcctttaacatattcctttcccgtgccagggctgaacagatggattccatacagggtttcatattcagcttggaacttttgtgtacactcttattacccattgttcttctttccctatagagcttataacatcctaaattctttatacttttttattttaacattat

SEQ ID NO: 109845 - DNA, 1773 bp, Glycine max
  unsure (1)..(1773): unsure at all n locations
  Clone ID: PAT_MRT3847_70202C.1
ctgcattgcgttgctagttcccacgcgtccggttcttgcactcgttagaccaattcctcgtcttgacaacttttccacgcacaccttcatcttccaatcctccaccacaaacatgaagactcgtacctcgaccaaaatctctgcaacgtggattccaattttctctgtcttttccttcattattggtatgctcgtcacaagcaggatgtgggacccaccggaatcaaacgggttgcttactgcgcagcatcagcgggaccaacaacagctacaagtgatctcaggggattgtgcaaccaagaagatgcagcccaaggatgcagtgagcgaattgcagaaaacccatgaagccattcagcatgccagagctttagataaacaagtttcgatgcttcagatggaactagcagcagctaggagttctcgtgaaagtgggatctcggattcaaatgcttcaaccaccacttctggggaaggtgctccaaggaagaaggcttttatagtgattggcataaacacagctttcagtagcaggaagaggcgtgattccgttagagagacttggatgcctcaaggtgaacaacttcttcaattggaacgggagaagggaattgttatcagattcatgattggtcacagtgcaacttccaacagcattctagatcgagctattgactcagaagaagctcagcacanagacttccttcgcctagaacatgctgaagggtatcatgaattgtctgcaaagacaaaaacattcttttctacagcagttgcaaaatgggatgctgagttctatgtcaaagtggatgatgatgtccatgttaatttaggtgtacttgcaacaacccttgctcgtcatcgttccaaaccaagggtctatgttggatgtatgaaatctggacctgttctttctcgaaaggatgttaaatatcatgaacctgagttttggaagtttggagaagaggggaacaaatatttccgacatgcaactgggcagatatatgcaatctctaaggatctagccacctacatttccattaaccagccaattttgcacaaatatgccaatgaagatgtgtcacttggtgcatggttcataggtctggaagttgaacatatagatgaccgcagtatgtgctgtgggactcctccaatggatagtgaaaattcttgactgtgagtggaaggcgcaggccggtaacatatgtgttgcatcatttgattggagctgcagtggaatctgtaagtcagtggagaagattaaatatgtccactcaaagtgtggtgaaggaaatggagcagtttggagtgctttattttagattgtttttaaaagggagatggttttttctggttgggagaggatataattgcagctgggacaaagacaaagacagttttcagatttgagattgagcaaataggtataacatggaagatctcgtaaactattcaaagctgtggaagctgaagttggcaattgcatggatgtggatttgaggataccttccagtctgttctgttttgtttttagtctgggaggtatgacaactattctcggtgttatgtaacaaagtctgttctatttttgtaattctttttttatacgccgtttttgttcttagttgggtcgagatcgattattatgccctttgtaatgaaaaacaatgtattcatagttctgctaatatgttaagtgtgattactattttgatgtaattaaaggacaaactttagaagcggtagatattcaagtttgattattgcttt

SEQ ID NO: 109846 - DNA, 605 bp, Glycine max
  Clone ID: PAT_MRT3847_70203C.1
ctcttctagtgtttctgaaagcgcatcaatgaagatgaaggttctatgcagctttggcggtaaaatattgccacggcctagtgatggaaagcggctctatgttgggggtgaaacgcgtattattagtataagacgggacatacgttttcatgagcttatgcttaaaacatcatccatctataatgaaactcatgtgataaagtatcagctccctggagaagatcttgatgcattggtttcagtatcttctgatgaggatctgcggaatatgatggaggaatgtcatgatctacaaggcggccgagaatcaaataagcttaggatttttctgttatctatgaatgatttggatgatactcagttcggtataggtagcatggatggtgattctgaaattcagtatgtcgttgctgttaatggtatgggcatgggttcaagaaacaactcaatccttcgtggtgaaagtggctctactaataacttacatgaattgaatggacacaataatgagagggagaccaacagagttctcatggacacatttggtgttagcagttcatccttgactgacaatgtttaaccatcactggctattcaatcttcac

SEQ ID NO: 109847 - DNA, 276 bp, Glycine max
  Clone ID: PAT_MRT3847_70204C.1
gacaaagagttttaggtttaatgacccctgcggcactctccaaagtggcagagctaaaagtcatagaccagattgatactagtatcataggcgaattcgtgatgattgaccgacattataaggacagtgaagtctgccttagtgaagaagatcgtgaatgcataaaaccctccatcatgaatctttatacgtgaggtatacatgtagctctgaaaggcttacacgtaaccgcataccactaccaagaatgagcccaatgtgcatctaagaattgtg

SEQ ID NO: 109848 - DNA, 454 bp, Glycine max
  Clone ID: PAT_MRT3847_70205C.1
aagccgaaacggttgtgatttttcattaaagatcaactggtgaacaatttcggtgggtaaacaaaacaaaggaaaaaattaattctgcctttaaactccgctttatcttatttgagggggggaataacaaattttttttaagaaaaatcttcaattggggcaaggggctactgttttgcaaaacgaggaccctgtacctacaccaagcctttctggtggttttaaaagcatttcctgggtgcaatggaaggaccacactcattatactgtgccttggaaatccacatttgtgggaaagtgctgtgagaatccaatattgagcccccaatccagacactggtctttctttttgggggagcaaccaccttgatctttatgctgcttggggccaaagcaacgatttccttgctcattctgtcagaaatatcgggggacatagtcgaagcatcactga

SEQ ID NO: 109849 - DNA, 626 bp, Glycine max
  Clone ID: PAT_MRT3847_70206C.1
aattcggcaccagaacacatgaggggcatttcctataattcacacttcacacacatacacacacaacaataatacggtgtcgtttcatccacttatattcttttccaaaaaaaaaaaagctaaccctagctttttccccctttcgcctttagccgcgtttttccgatctcgattgctttcctctctctctctctcttgattcctcccccaatcttaacgccacctctctaatcgattccgcctctcgctagctcttgattttctgcgccgatcgatcccaatttttcccaggtcggtgcgctggatccgtttttagggtttccgtcgcggatctgtttttcccgatacgggatctggtaggggacattttttatttgatttgggttctgggtctttgtcgtctcgtcccgttttttgcgattttgggttaattattttcgaatcgtgtttgatttgggttcgatccttctgaaacttggtttgggttgttagatctcgcgtcgggttattcgattcgggacggattctaatatttggccatcgctctcggtggatttgaaaagatctagggctacgcgtcaatgaaattgaggctttagttgcttcgttggattactttggagaaa

SEQ ID NO: 109850 - DNA, 255 bp, Glycine max
  Clone ID: PAT_MRT3847_70207C.1
ctgtggcagaatgtcgtgtgctgcagaagctgggagcagacgctgttggcatgagtacagtaccagaagttatcgttgcacggcactgtggacttcgagtcttggcttctcactcatcactaacaaggtcatcatggattatgaaagcctggagaaggccaaccatgaagaagtcttagcagctggcaaacaagctgcacagaaattggaacagtttgtctccattcttatggccagcattccactccctgacaa

SEQ ID NO: 109851 - DNA, 982 bp, Glycine max
  Clone ID: PAT_MRT3847_70208C.1
ataaatcctaatttttaactattttgcatttccattcaaagattcctttccctctttgaaattcgggtgtttttaagagcccccaattctgttgattcgcaattcaaattattcgtctcgctctcaatagagaagaaaaaaaaaactgcgtttttcaaatcggctgacacatagtaaagaatcatattaatgtcgtcaagaacattgaggagaagactctatcatggggatgttgatggcaaaaggcaggagcatttggagacttcgggattggattctttgagtgagcccttgctggcagacgatgattatattgagaataagaagatatgtactcttgaagatctatgggatgatgagaagaagaaggcgcagtttcattggacattcatattctcaaaccttattgtgcaatgggctcagtggttagcaaatttggtattaggatctggatctattcttgggcgtcttttatcttttccttctgctgcactaaatatgcaaaacaataggatgtttcctccatctctaagccctctgcaggaagaaagactaagaaatctacgacaacggcttgaagttccctttgatggttctaaagcagagcaccaagacgcacttaaacaattgtggaaattggcttacccggacagggagcttccttcacttaaatcagacctttggaaggaaatgggatggcaaggttctgacccttcaacagattttaggggtggaggatttatttcattagagaatctcatcttctttgcgatgaagtatcctattttcccaaatatacactcatttctctgacggagaggctatgcaagctataccctcatttctctggtgtgagcattactttccagttaaaggattctcattttgtgcagtcttcaacttttcattaaacttttctgtaaattcctcttcttgctgtctctcatcttgactactctcaacaactatttcgtttccgatg

SEQ ID NO: 109852 - DNA, 369 bp, Glycine max
  Clone ID: PAT_MRT3847_70209C.1
cggcaaccgctacatcgagaagcgcatcaacgtccgcatcgagcacgtccgccactcccgctcgcgtgaggagttccttgtccgcgtcaaggagaacgccgccaggaggaaggccgccaaggccgagggcaagagcgtccagctcaagaggcagcccgctctgcccagggaggccaggaccgtcagcatgaatgacaacatcccggagaccatcactcccatcccgtacgagaccacgatctaaagaggtgaaaaggttggagggagtggtcgaaagtgggtcggatacaagatgggcatggctctggcgccggttacttaaggacattatgctttaatcctggaaaaaataaagattctggattcccc

SEQ ID NO: 109853 - DNA, 164 bp, Glycine max
  Clone ID: PAT_MRT3847_7020C.1
atgtaccaatttctttgggggaaaaacactgtttctaaaacaggagacctactcttcttaatgggtgggcctcccaaacctattctatataacaccaaaatgggaagcgccccgcgttttttaacggcgttggacacacatgagaaaccccttggcctatggaa

SEQ ID NO: 109854 - DNA, 1819 bp, Glycine max
  Clone ID: PAT_MRT3847_70210C.1
aaaaggatcaatattttagcttttatttttttggagttacaaattgaattggtaccacctatttagctttaataataattagtccgcatgataacatactcaatgcagcaagctaccatcgctgtcccaaataataggcaagaaataacaatagctcaaagagatgctacatatgcctaagcaaaactgataggcatcagtgtaactgatctgagtgccttttcttcttttcagcaaggaatggtttgaacaacatcaataatccaagtgcttgcattcttgtcaaggaaattctcttctgagcgcgtgttgactattgtgtgttcaccaccattgaaatcaccagttaatttacagctgctttctgatgtgtcgtgtccttccgctgttgtgtgtttcctgctgacattctacacgctcgattcttccgattggtggtctgcttgttctggtttcaccacgctgacgtacggctgcgagaagacgacagaagggggggaattgggagtttcattttcattaatttttatttctccccttttctcaatgcttttcttaatgttgaatccttcacaaatcgtcaagagttagcccacccagaacaacaacgcgtttcagctggccacacacattcttaatttttttggctggcctatagtaaaaactcatatcaatgtcctcaagaacgttgaggagaagactccatcatggggatgttgatggcaaaaggcaggagcatttggagacttcgggattagattcgttgagtgagcccttgctggcagatgatgattatattgagaataagaagatatgtactcttgaagatctatgggatgatgagaggaagaaggcccagtttcattggacattcatattctcaaacctcattgcacaatgggcacagtggttagcaaatgttgtactaggatctggatctattcttgggcgtcttctatcttttccttctgctgctttaaacatgcaaaacaataggatgcttcctccatctctaagccctctgcaggaagacaggctaagaaacctacggcaacggcttgaagtcccctttgatggttctaaagcagagcaccaagatgcacttaaattattgtggaaattggcttaccctgacagggagcttccttcgcttaaatcagacctttggaaggaaatgggatggcaaggttcagacccttcaacagattttaggggtggaggatttatttcattagagaatctcatcttctttgcgatgaagtatcctgattcattccagcgattattgcataaacaagatggaaccagagctgagtgggaatatccatttgcagtagctggaatcaatatttcttttatgttagcacagatgctggatcttcaagcagggcttccatcttcttcgtctggaattcattttctcaaattgcttgaagaggatgaaatggcatttgatatccttttttgtgtagcctttcaaatgatggatgctcagtggctagccaagcgtgcgacatatatggaatttaatgatgttttgaagtccacaagaacgcagttagagcgtgagcttgctcttgaagacatttccagcgtgaaagatttacctgcttacaacatgttgagatgatttgacgattgcctttcagttcaacatttctctttgttttgttttttttctcttttggcagagaatgttacatgaaatgtatctataaagcatttgtcattttatctctataaagaaacgtgaaaatcaagtgatagtgggatcgcaaatatcagatcaatcttttctgctgatttccatcagctttgt

SEQ ID NO: 109855 - DNA, 1909 bp, Glycine max
  Clone ID: PAT_MRT3847_70211C.1
ccaatttaacacaggattataaatttctttttcatggaaaagaaaattggaagtttcattttcgttcaattatttctccccttttcttaaaatcgaattgaatcgaatccttcacaagtcaagagttagcacacccaaaagaacgcgtttcagctggccacactgttgatttggctgacacatagtaaagaatcatattaatgtcgtcaagaacattgaggagaagactctatcatggggatgttgatggcaaaaggcagcgagcatttggagacttcgggattggattctttgagtgagcccttgctggcagacgatgattatattgagaataagaagatatgtactcttgaagatctatgggatgatgagaacgaagaaggcgcattttcattggacattcatattctcaaaccttattgtgcaatgggctcagtggttagcaaatttcgtattagcgatttggatctattctttggcgtcttttattttttacttctgcagcactaaatatgcaaaacaatatgattattcttctatctctaagccctcttcaggaagaaagaataaaaaatttacgacaacggacatgaaggtctcattgatggtacaaaagcagagcaccaagacgcacttaaaccaattgtaggaaattggcttagcccagacagggagcttccttcacttaaatcagacctttggaaggaaataggatggcaagggttctggacccttgcaacaggattttaggggttggaggatttttatttcattagagaatcatcatcttctttagcgatgaagtatgcctgattcattccagcgattattgcataaacaagatggaaccagagctgagtgggaatacccaatttgcagtagctggaatcaatatttcttttatgttagcacagatgctggatcttcaagcagggcttccatcttctttgtccggaattcgttttctcaaattgcttgaagaagatgaaatggcatttgatatccttttttgtgttgcctttcaaatgatggatgctcagtggctagcaaagcgtgcgtcatatatggaatttaatgatgttttgagatccacaagaacgcagttagagcgtgagcttggtcttgaagacatcttcagcgtgaaagatttacctgcttacaacatgttgagatgattgacaattgcctttcagttcaacatttctcttcctttttttttttttgtttcttttggcggagaatgttacatgaaatgtatctaaagcatttgtcattttatctctatatagaaacgtgaaaatcaaatatcagatcaatctttctgcttcgtaatatatcgtttgtattagctggaatataaatatctgttatgttagcacaaaaactggatattcaagcaggacttccagattcttcgtctggaattcaattttatgcaattgcgtacacagcatcaaccatccatatgataccattttttttaagcctttcaaatgattgatgcacagtggccagtcacttgatccacttatatagattttaattcttttttgtacttcctctccaacaagttttgtcttgagcttgcttctgaaaacatttccagcgtgaaagatttacctgcttacaacatgttgagatgatttgacgattgcctttcagttcaacatttctctttgttttgttttttttctcttttggcagagaatgttacatgaaatgtatctataaagcatttgtcattttatctctataaagaaacgtgaaaatcaagtgatagtgggatcgcaaatatcagatcaatcttttctgctgatttccatcagctttgtatttaagcgtgtcttagcatttaggaaattcttcataaaatttgtcgtcgcaataattaccataaaaaaaaagaaaa

SEQ ID NO: 109856 - DNA, 215 bp, Glycine max
  unsure (1)..(215): unsure at all n locations
  Clone ID: PAT_MRT3847_70212C.1
aaaagacgggggagaaaaaaaaaattcaaaacataattttactttttttgttctaacaacactaaaacacggcttgtttattttaaaacgtacgcgacacnaaagaaaacatttaatcaactcttgaatttcgtcatcaaaccaaacaaccatttctctaattatcttcttaatgttatcacccaaacaccaaaataaaaactagttaatctaaa

SEQ ID NO: 109857 - DNA, 325 bp, Glycine max
  Clone ID: PAT_MRT3847_70213C.1
tttttatttgtttttttttttaaagggggggagattattaagaaaatttcatttccatttgtgtgctttccagaccacattgagcgatattggacagtactccctctaaagcatccccaagactgctggtacttatcgcttgcaataaccagcagggaggcggaaccacacgacctccaacttccccgagagggagctgcccccaaaattgaatcccccccgggaaactaaatcggcccaaatcaaaagaaacaccagcccttggtggagtgagcaattcgaactgtcctaacaatggcttgtttcccctgcaacaaggaagctc

SEQ ID NO: 109858 - DNA, 1814 bp, Glycine max
  Clone ID: PAT_MRT3847_70214C.1
cttccaccgaggttagctcgtcccaattgatttgtgacatccttccgtccgcccacgcgtccgtacggctgcgagcatcatcatcctcatccaccttcgttagatttccccctcaacattttttgtttttctctccatcccaattatcgccacctcctctttcttcaaatttcaatctcagaggatgggtggtgaggaattgtgtttgatggagaactcagggaaagggaagaggctgtggaagaaggtgaagtaccagctggtggagtaccactccttgcccggttatttgagagacaacgagtacattctcggtcactatcgatccgaatggcccatcaggcaggttttgttgagcgcattcaccatccacaacgaaactctcaacgtttggacgcatttgatcgggttcttcatatttctggcattgaccatatacactgccatgaatcttaattcgctacagcagtttcctgacatgctcaagaaggccgacctgcacaaattacaatcagaaatcttgacgtgtctcccttccatgcctgatttgcacatactcagggagggaatctcaagttggcatattaaagaatatctgtacaattgtttgccacatagtgtaaaagatgacttggcgaacataatagcaccactcatgattagaccaattacaaggtggccttttttcgcatttttagggggtgccatgttttgcttgctagctagcagtatttgccatctcctctcttgtcactctgcacgcatggcatacattatgctcaggctcgactatgctggaattgcagccctgatatctacctctttctatcctccagtatattactcttttatgtgtgacccatttttctgcaacctttacttgggatttatcactgtattgggcatctccaccatcttgttttctctactcccagtgttccaaaatccagaattccgcaccatccgagcatctctcttctttggaatgggtttatctggcgcagcacctattctgcacaagctttatctattttggggccagcctgaagtgtttcacacgaccggttacgagattctgatgggtgttctctatggaatcggagcactggtttatgccactaggattccagaacgatggatgcctgggaaatttgacattgccggacacagtcaccaattgtttcatatattggtggtggctggggcatacgctcattatcgggcagggttagtttatctcaggtggcgtgaccttcaaggttgttgatttgatatgcatctatgaacgaacagtggttgaatactctgctgttatgtaactagtaagtatgtgctagtatacactcctccaactgatgtgaatttgtgattccggtaggggatgtttatgcagccatagggattatgtacgcacttagaacccttagcacacaagtcactagtcagcaataaaaattttatttggtctatcgtgacatactagaaacatttttcttctgcctgcatgtatcttgttattcaagttgtattattagccttgtgttttgctctggaagtcgggatactattttggaagccgaagtggcttctcaagattatagtcccaagggttgccctctcattcctgcaacaaaattgtgtattttttatttttaattaaaaatcatgtggatgttatgcaaataaaaatcaaaatcatcaaaaaaaaaaaaaaaaaaaaaaaaaaaaacaaaaaaagaaaaaaaaaaaaaaaagaagatgaagaattaagagaagagggactttaagtgattgaaaatagaggggcgatgtgg

SEQ ID NO: 109859 - DNA, 937 bp, Glycine max
  Clone ID: PAT_MRT3847_70215C.1
ggctcgaggaatcttcctaatcctaatcgcttattaacgtcgaggttacttgtccgtctaaccaactcaacatttcgtcatcatcctcatccaccttcgttagatttccccctcaacattttttgtttttctctccatcccaattatcgccacctcctctttcttcaaatttcaatctcagaggatgggtggtgaggaattgtgtttgatggagaactcagggaaatggaagaggctgtggaagaaggtgaagtaccagctggtggagtaccactccttgcccggttatttgagagacaacgagtacattctcggtcactatcgatccgaatggcccatcaggcaggttttgttgagcgcattcaccatccacaacgaaactctcaacgtttggacgcatttgatcgggttcttcatatttctggcattgaccatatacactgccatgaatcttaattcgctacagcagtttcctgacatgctcaagaaggccgacctgcacaaattacaatcagaaatcttgacgtgtctcccttccatgcctgatttgcacatactcagggagggaatctcaagttggcatattaaagaatatctgtacaattgtttgccagtaagattttccagtagcaatcatactgatgcatgtgttctgcatagtgtaaaagatgacttggcgaacataatagcaccactcatgattagaccaattacaaggtggccttttttcgcatttttagggggtgccatgttttgcttgctagctagcagtatttgccatctcctctcttgtcactctgcacgcatggcatacattatgctcaggctcgactatgctggaattgcagccctgatatctacctctttctatcctccagtatattactcttttatgtgttacccatttttctgtaacctatacttgggatttatcact

SEQ ID NO: 109860 - DNA, 733 bp, Glycine max
  Clone ID: PAT_MRT3847_70216C.1
cccacgcgtccgcccacgcgtccgtacggctgcgagaagacgacagaagggcattgtactgatttgaaagtgcggtttggaataaactcaaagttttttgatagtgctggccggccacgattgagttttgtggttgatccatcaccaagtctatgtaatgttcttgatgcatgtgaccgtgtagcacagaagttaaccgtggattctggtagcagctctgattggaggcctgttgttattaggaaagaaggcttcttcaactatcctactatcagattacacatacctactgcagtagtggcagacattgctatttatgccacggaaatatatcaaagagaatcatctggaacagtgcaaagacttctcttcagcaagtttgatgctgcagaacttggttcgttgttcatgcctgggacatttgttgatgccttcttatccttagatccatatgattatcagcagaatgcagggattaaattagttagcaaaaaattgatcattcatggcaaatagaaggaagttgagaattaagtataggttagttattacatgcgaaggttgatagattaaatattggttatgctgtaaagttgattccatttcatgtttgtagttcaattgatgtcctcactgatgtcctcaactccatctagacctacaggatgaatttcctctcctgtggcaaaaaaagaataaataagaattagaaaaagaacatggaattattgat

SEQ ID NO: 109861 - DNA, 474 bp, Glycine max
  unsure (1)..(474): unsure at all n locations
  Clone ID: PAT_MRT3847_70217C.1
acgaggggaaaagagnnnccgagaaaaatagaagagaaacttaacgcaaaagaggtagaaagaatgcatcttcaattgaaatcgaaggttgtaaaagataaaacataatattaaagccacacccttggcagttttccaccggtgtcagaaagcatcaaaaagccatccggaaaagggggatgctaagattgataaatggaggtagcttaaaatcaagagaaagtgaggttcaatacgtcagtgggtgtgtaagatctatttgttcagacttcagaggaaatgtttatggctacaactcaagtcacattatgatattttagtttagactttagtctgcaacagggtaaaaattatctagtaatataggactataggagtatatgaacaatgtgagaaggaagaggaaggagtaaagcatcagttactgataataaaatttcttgtgagaaataatattgtacaagtataatatgt

SEQ ID NO: 109862 - DNA, 599 bp, Glycine max
  unsure (1)..(599): unsure at all n locations
  Clone ID: PAT_MRT3847_70218C.1
taccgattccgttccaaggaaaggtttccccgtcatcactgtatgacgtcctccttctttggggggggggggggggcaaatgttaatcaggggcttgcttagggatagtctagagggatacctagaagatttgtgaatacttgataaaaggtggaaggtcttcagccttatgattttttgctttagagtaacaaatatgggatgagtgtaaatacgaggaatgttgatttgaggattgtatttttgtgggggggcggtgttttagtggggttggggggctgggttgggatcgggtggcgtttagggtgtcagttgaaggttgcgtggatcgatgtgcgctttcccgtcatcgtatgatggcgttgccaggaccagattgtagatattaaaaaataaaagttacctgaggggatctagctcatcgtagagtgtggtgagacgcgtattgaaaggtaaggtatcccttcgtcggggataatggtgcatgcccaaaatttgcctcggatttaatggaagtcttggctattatagtttttgggtcttctgcctcgaagangcaacaacgtttctatcggtttggtttaatactcagtctttgg

SEQ ID NO: 109863 - DNA, 1874 bp, Glycine max
  Clone ID: PAT_MRT3847_70219C.1
cccacgcgttcgtccacgcgtccgcccacgcgtccgtttgaattccaatgggtgaagagcgatccgagatagtgttcttcgatgtggagaccagcgttccgacccgggcggggcagggttttgcgcttctggaattcggcgccattttggtttgccccaggacgctcaccgagctccgcgattactccactctggtccgcccagccaacctctccgtcatcacccccttgtccgagcgctgccaaggcatcaacgccgagactgtctccgcgtcccctacctccgccgacattgctcaccccgtttacgagctcctccacggttcctctcctcacccctctccctctctctccctctactgtactacatcattcgctctggattttgactgtttcgggaggatttgggcgtcgcatatcatcatattattcgactgtgttcggataagagatgcgcatgctgagatccatcagcgaccgcctgatcctaagttgaccattcactcgcgggttttgttaacgctaatgatttgtagaggacctcgtgacatgaatatggtggctcttgctacacaaattctaggtggtggcctgacacacagaggctttgtggaggtttgaataaatatggaagagttcaaatactgtgagtcaatgcttttcttgtagactcacttcccatagatattctctgcaaatagctgggtttaacaacatgctacttcaagaagccgcagtaatgggaaatctccatcacagtggggcttattaaatattaataaagattctgtattatcatctcctgcaactgaatccaaagacaaaaatcgtccaataatttcttttgcattgagcagcccaaaagggaatgtctcgaatattgcagatcctaacatggatcaatcagatccttttaacttgagcactcttgaggctgaaataaaaagagaatccattaagtcagatgtcgccttggaggaaaaacccatgcaagagtcaactgatttggcttcctcatcttctgtatctcagccttgcagcagctctattgctgttttggaacctgatggaatatgtataccttctattgatgcatctcttgttccatcttttcgtggcagtcaaagaatagagttactgcatgaaggtttcctgtttcagcttcattgtactgatttgaaagtgcggtttggaataaactcaaagttttttgatagtgctggccggccacgattgagttttgtggttgatccatcaccaagtctatgtaatgttcttgatgcatgtgaccgtgtagcacagaagttaaccgtggattctggtagcagctctgattggaggcctgttgttattaggaaagaaggcttcttcaactatcctactgtcagattacacatacctactgcagtagtggcagacattgctatttatgccacggaaatatatcaaagagaatcatctggaacagtgcaaagacttctcttcagtaagtttgatgctgcagaacttggttccttgttcatgcctgggacatttgttgatgccgtcttctccttagatccgtatgattatcagcagaatgcagggattaaattagttgccaaaaaattgatcattcatagcaaatagaaggaaattgataattaagtataggttagttattacatgctaaggttgatagattaaatattggttatgctgtaaagttagttccatttcatgtttgtagttcaattgatgttcatacctttaaattttctggttaaaaaaaactcactgatttcctcaactccatctagaactacaggatgaatttcctctcctgtggcaaaaatgaataagtaagaattaagaatagatcatggatcttttgat

SEQ ID NO: 109864 - DNA, 401 bp, Glycine max
  Clone ID: PAT_MRT3847_7021C.1
acaaggaggagtggtgtctgtagataggaatatcttattatgtgatgagctttgctacacagattgtctatttctattaccaaaatgcttaacgcttaatattagatataactcactggactcacacggttgccatgagagtgtcttggacccgacgacgccgagcaggggggaaaaaaaggctttcttaacccctgtgggcataaccctgtccgatgatccgtacctcaaggggacactccttaaagagaatatcctatgctattattccataaaagaaacgctaagctaggcgatattaaacgggagaagactctggatctttctctcagtgagcactcaacgatggttgagtacacatgggctcaacattacccaagggcctaatcaagaccagtgct

SEQ ID NO: 109865 - DNA, 519 bp, Glycine max
  Clone ID: PAT_MRT3847_70220C.1
aagcatgcaatatacatgtattatcggttgaatatacgaaatcaaattagtcacatgtaggttgtattatccacttgtaaatgtaggccaataaattttttattttggagacactcattgaatcaacatttggaatcttggttgctgatttgaacacttttgttagaatccaaaaatttgctccagatggggtgtttctgccacaccatagtcatttcttcaattgggataccctttgtttcaggtaataatttgtagataaatatggtcattatcaccacaaaacaaccaaagaagatgaacaagccaaacttcatgtgacaaagcattgtggtgaagaattgtgctacaataaaagtgctgatcatgttgacacaaacagtgacactttgagctgcaggtcgaatctccagaggaaaaatttcacttggtaccaaccatccaagtggaccccaagaccaagcataaccagaaacatatacacatatgacaccaacaactacacttgcataccacttt

SEQ ID NO: 109866 - DNA, 424 bp, Glycine max
  Clone ID: PAT_MRT3847_70221C.1
tgattggcgggttaagaatgctaccaaagaggacttccaaagatttgctaaggcccaattagatgtttttgggcgagctacatttgggtgggcttattgggctctcaaaaatgccaacaagtattggaatttggagtggatgatcgagaatggttacgttaaaatttagaaacttccagtttcttcttaggatctatatgattcaattctctgccataatctatcctctgtgatctctccttaacaattatgattataggcatgccaaactttagagctttgactttctttaccgcagaaagtaaataacaaagttgtaaaattttcaattagcgaagaagattaaaaataatttcataagaaaaaaagaagattaaaaataatggaacgtatcgtctatgttaacttaatagataatatatta

SEQ ID NO: 109867 - DNA, 479 bp, Glycine max
  Clone ID: PAT_MRT3847_70222C.1
tctctctctctgtctgtgtcccggtctgagcagagaggaagacaacagtcaatcaaaaaccgagaaccccacaaactcacagtcttagggcgtaggggggtccaaacactctacaattttaaaaactctctctttctctctatttccgtgtgtttgtgtttgtgtttgtctgtgcctgtctgtctctctctaaccccatctatctaaaaagaaagaaagaaatggggacgagggagatagtgttgttggaagagcaaaagagaagatgggtcgaaaagaaataaagaaaaaacaaaagtaaagctggtgagagtgatccccacctaatggaactatcagatttgcaaaacaagaagcagagcagcagcagcagcagcacaggtgctactcatcaacaacaacaacaacaacaacaatcctcttctacccatcttgttgtgccttccccttccaattcttccgcatccctcatcgacgcc

SEQ ID NO: 109868 - DNA, 428 bp, Glycine max
  Clone ID: PAT_MRT3847_70223C.1
gggaaccaaacccaagttttaaccttaaggccccccaccgccccaacccaaaaagggaaaaatttccccccttttgcccttttcccctttttaaaaacccccccttaaaaaagggggggggggtggcccaaaactttgccccttattcattcccccaggggcaacattaaaaggggggggggaaaacccccccccttttcatcccccaaaaaatgaaaattttggcggtggggcttgcccaaggtcccctaatttttaaatttaccccttcccaaaaaggggtttaaaagggaccccgggtgggggttttaaaaaaaaccccgcaaaatccttaaaaattttcccacccttaaaaaaggcccttttaaaccccccccccctttaaaaccactgccctgggggggcataatatttgcccccccaccccc

SEQ ID NO: 109869 - DNA, 149 bp, Glycine max
  unsure (1)..(149): unsure at all n locations
  Clone ID: PAT_MRT3847_70224C.1
ttaganatgntgtcatctancggngcngccaggtatatggcaacaccatcacangtctccgagtntccntcgcagcacancacggtnacatgtcactctctctcngatcggatacnatctatgnttaggnngnggtaaaagcttatncg

SEQ ID NO: 109870 - DNA, 303 bp, Glycine max
  Clone ID: PAT_MRT3847_70225C.1
atgggcacaactaacacaagacgtgttttttaaagggttaaatcccaactgaaattgtttgtttccattgccaactgcaatccaattccaaaagggaaaagctttcatttggtagcatgaacaaccatttttcaaagtagttaatttttggcttattggatggatatatacccctcctcatcctataataacataaaaaaggggaccccggttgctactttacagggaacccttttttttgcagcattggatggcattataaaccatttcctcaagtccatacttggacacaaaacctgcatt

SEQ ID NO: 109871 - DNA, 522 bp, Glycine max
  Clone ID: PAT_MRT3847_70226C.1
cctaattttatgtcaatttctattgcccaaagctctcgtaccctcactctaaaactctcgctattgtgaactttgttgctgcgtttgccactctgtcgttcccctctccgtgatggcaccttgtgtgacaaggtcttttgcttccttctcatgagaaatgcaaaatgggatctgagatttgaggggttttaatctgtttaaagatataagaagtgcaaaatgagatttgagatctgagatctctcaaactctattcaaatttgagatatgaaacccgttttggtgtgaagatgcactcacaggggtgtgatgcgctgaacgtgcggtgcatgaaggtcgtagtgaagacattaaaggtatgtgttgtgacactcagatttgagatatgaaacccgtttttgttgtagatggaaaccatactgctagaagatgacaatgttgcaaaagcacttcttagctttatttcagagtcctgtgttctgactcctcaaatgttataacaaggtatgtgttgctaaatat

SEQ ID NO: 109872 - DNA, 377 bp, Glycine max
  Clone ID: PAT_MRT3847_70227C.1
ccaggaaggtttcccgtcatcactgtatgacgtcctccttctttgggggggggggggggatagtagggatatataaagggtagggtagagtacctgagaacggctaggatattaccgaatgaccgcctgatacaacaaaatttatgcggggcgaggaatagtaaatggtaaatataatatataagaattgcctggagggattgaaatagtgtgtgaggtacagagaaaataaacgagcggaaggcaaattaaatgaggaaccagtgaacaataccatggtagattagttaaaacacgtgtgtcgtacgttaaaatatcgatagcgattggaacagggcgatagaacgtgtgcgggcgcagtagttttgatgggcaag

SEQ ID NO: 109873 - DNA, 463 bp, Glycine max
  Clone ID: PAT_MRT3847_70228C.1
acaaaaattccaatacattttgaaataacgaatcgctcaatattggttatacatggtaaagatatttgaacaagagggggggcacagaaagagagatggtgagggtggaaatagaaaaaaaaaaaaaaaaggaataacgtgtcagaaggccacactaatgaccaatgttgctatatacctggaatacaacaagggtcatacttatgatcattgggtctaactagtgtgatacaatacaatcccatctccatgaagctacatttacaagtttacactgatctttccgctgctagtagaatcaatttgtcaagtgatgttttgctctcaacatggttgatatttgaagtttctaccagtatggtatccattctgaatatttggtgacgtattctcatgagttggaataatcgtggaagttgaagttagaggatgagacaaggtgcgaccactctttccctgaaat

SEQ ID NO: 109874 - DNA, 506 bp, Glycine max
  Clone ID: PAT_MRT3847_70229C.1
ggctcgagctgaagagagaatggagaaaggtgttagtgtatgggatgatatatatcgtaatgctggaaaatctgagaaactgaagtttgaagtcaatgagagggatgaaggggagcttgagagaacaggacaatctctgagcattttatgagatatacaatggtgcatgagtgtggccatttttacaccatggttctctctatcgtgggttaagcctttctagaagagcgcagagacaaacttctgatgatgtggatgcagatggtcgcttgcctcttttgaatgacacatattatcgggacattctctgtgaaatgggaggaatgtttgcaattgcaaatagggaggatagcattcacaggaggccttggattgggtttcaatcatggcgtgctgctggttggaaggttgcattgtcagcgatagcctaaaatgtcctggacgaggacatgcaagagaattttagagggagatgaatatactattggggactttggacatggatc

SEQ ID NO: 109875 - DNA, 133 bp, Glycine max
  Clone ID: PAT_MRT3847_7022C.1
gtcaataagaaagagcagaaatccaaaagagaaaaacgtgactcttggcccaactattatacataacaaacatcgctttagcagcgctcacatattagcctcctttaataataccttcattcatatcactaat

SEQ ID NO: 109876 - DNA, 451 bp, Glycine max
  Clone ID: PAT_MRT3847_70230C.1
cggccgctcaggcggcgggcggattctcatattctcctcgttccctcctcccataacctccattctactcatcatcattctcatcgagatcacagaatggtgggagcaaagtcattactcccacatacagcacatataccttgcgaagctgtcggagcaggcggagcggtacgatcatatggccgaaggtcatggataatgctcagcagcgacgcatgacggcgccttccggtcgccgtgtgcatcgtgaacctactctctcagcactacattgactgaatcgctcctagtccatgcctgctaataatcctgtggtttctcactcaaaatgctgatgataacaccaaaaaattctattgggagctctgtgctcatgagtacctttatatgatatatgatatgaatccttgcttgcaactcatcgaataccgccagcgatacctattatata

SEQ ID NO: 109877 - DNA, 258 bp, Glycine max
  Clone ID: PAT_MRT3847_70231C.1
gaacttttcgtcaaaccctaccgacccatcatcggatcacgacgaatcttcacctggggtgtccccccaaaacgacgccgttaagggctcggtcacgcccaggaacgaattggtcgctttctgcgagaaaatggacggtgtaggattgatgaattacgtcaatgacaactttcaggatagggcaaggattcaggcggagttcccggcgcgtttcgacacgcgccggacgccggcgcgatggttctgggagctttggag

SEQ ID NO: 109878 - DNA, 344 bp, Glycine max
  Clone ID: PAT_MRT3847_70232C.1
ctcactacccggcggccgccctttctttactaacttttttcacttattttttttcttattgaatattaggggttcttttggggtttgtgatttatcgcccccccagaataccaacttatttgcgggggggaacaaaaaaaaggcccaacctaaacacaacccccgcccccatgtttcacaaaaccacatactttgaggaggcaattctgctattaccacaccccctagaaaacaatggaaatttccctggccccccccacttcaaaaaaaaaaccgcccatgaacaaaacccatctaaagccacaaacaaagctgggaaccatgataccacgccaggggaaaaa

SEQ ID NO: 109879 - DNA, 493 bp, Glycine max
  Clone ID: PAT_MRT3847_70233C.1
ctcgagccgattcggctcgaggaagcaaccacgcatagcgcacacccaaatttcaattcccataattcaaaacgacgatccctctcaggattaaacgacaactaatcatcttcccaatcaccgcaccgccacctcgtgatggcggcaccaccacctcctcctccttcgacgccgtcgtttttgtcgccgacgcagaggtacgcggcgggcgcattgttcggcctggcacttcacgaggcccacctcaaccaaaccaacccgttaccgttacccgcttcggaggactcgctctctgaggaacaacgaaccagcagtagcagtggctccagcagcgactccgtttcggaagacccggatctttgggtccacagcaattcgggtttgcttcgccccggttttaagtttctagatattgattccgctgcgcggtcttgactggaggaaaccgctggttcttcttccctacgcatcatgtgggacccgtcaaattgat

SEQ ID NO: 109880 - DNA, 1373 bp, Glycine max
  Clone ID: PAT_MRT3847_70234C.1
ggagataaactagtacacgctgtgcaagcgaaactaaaaccaagcgaaggggaaaaagggagatcggagagacagagagatcagtcccgagagagatggggagatggtaagttcgatgcgcggagggcgcgttttgagcgcgtaccgggcgcttctgaaagcggcgcggaaatcattttccggcgacaccatgatgctgaaggaatcagcgttggaagtgaggaacaagttcgaggaaaacaagagcgtgagctcccaggcggagatccagaagcttctcctagaggctgaagaggcctcccatttcatcaccaccatgatcgtccaggcgcaactcaatcccgattctggcacctacttggtgaagccgggtaaagagcatgctggggcaacgcttgaacttccctcggaagaaattattcggaaatcaggataagacaggagagaagaggttagaacaaagtgtttcctcttctagtttttttttttcctgtttaggatcaataagtagtgttgacagtgattttatgggggtgtttgaattgttctgcttagattcctttatgtggttgtagctttgttttttttttgctcccaatcctatgtttcctttcaaatctatctagcagagtggacaggatataaatcttaccggtaaaagtatatgataccctttttttgttgtatgattacataatgtatcccaactgtttttgtttaatttgccttcagcagaatttcaaattagtttagataagtttgctgtccctttagtttatattcatttcgattttggtccttataaaataacacactgacacatatcaacggggtaaggggtgtggatccttgtagtgtcttatcactaagggtgtattttttttccctctgggaccaaactgttatgaaaaaacaatgacaaccctaataagtagaaactacagggattaaaatctaatgggtgaaaatatagggactgacaccttaaagattgggagctgatactgaaatgagagaaaatatttgtactgataaatttgattataacaaaaactacaacaactctataaataccaaaaaaagctcaagtgggtgaaaatatagggactggtacattaaagatagggagccgaaactgaaatgagaaaatatttgtatgatacatttgtttaagacaaaaactgcaacaattctatacataccaaagctcaaatgggtgaaaacatttgggattaaattgatatttaaacctttcaaatttaaggctaggttagactttccttctgcatggcagtttgaggctttaaggtggcatagctaagatcccacgtgtatttgatgtagcactgatctccacggtgccttgatacatt

SEQ ID NO: 109881 - DNA, 953 bp, Glycine max
  Clone ID: PAT_MRT3847_70235C.1
ccacgcgtccggtcagtcttccacgtgctcctggggagtctctccctcttttctctgtctttgaatttggatttgcatggaagccatgaaaggagcaagagttggcgtgggcgaggaccacgacatgcctgacggtatgcaatgcagcgaccacccttacagaaacaaccctggcgggatctgcgccttctgcctccaagacaaactcggcaagcttgtttcctcttctttccctctccctatccttcctccttcttccccttctttcagatcccacctcccaccctcttccctcacccccgctgcctcctcagctcccgctccttcttcttcctcttcctcctccctccccatcaacaaccccaccgattatcaatactaccctcgcagaactcgcctcccttttctcttgcccaagaagaagaagaagaagcccccttcagcaacctccgataatatcgttctcaagcgcagcaaatccaccgccactccccgaaggaaccactccttggtcgtcgacgacgatgacgacgacgagtttgccattgggggttttagtcccaggaagagaaacggcttttggtcttttctctatctctcttccaaatcatccaaaaaactcaactccaagagcttcagagaccacaaccctccaaggatctctaccattaactcagctccgggaagttctagttctgtcaagcttaaagataagcgttgctctggttcttctctcaagactgacattgttgtcgaacaagataacactaacagtcccaacaccgcttctgcctctgcttcttcttttgagcgcaaggtttcgagatctagatctgttgggtgtggcagcagaagcttctctggggacttcttcgagagaatctctactgggtttggagattgcactctcaggagggtggaatctcagcgtgaaggtaagcctaaggggattg

SEQ ID NO: 109882 - DNA, 1205 bp, Glycine max
  Clone ID: PAT_MRT3847_70236C.1
tagaggtcgccgacgtgaaggtgatgtccagaagagagatctgagagaagcagagctgaagaggtgaagtgaagatgatgtccggaaaatatacgtcgattgacgcgcagcagcttcagggatctgttcctgccgttccagattcacgacccgccaccgtcaatttcgcagattcaaatcttcagacttttcctccttctggagctcagggcaagatcaccgctgcttccgggcctcctcgtgacgctgatgattcattttcaaaacctgtatctggttctgatgaaccgcagcagggtggttggtttcagacttttacaattgctgcttacaaaccatactttgatgttgacacttcagatgttctagagaggattatcgactcactatttccatttagaggatctttcaatgaaaaaactgctaccaaccctgatttgtatggtccattctggatttgcactaccttgatatttgtagcggcatctattggcacctttgtgacatatatagcgcacaagctaaagagcaaagaatgggattatgacataaatctggtgacttggtctgctggtttgttttatggctatgttaccattgttcctctttgcctgtatgtaatcctcaaatatttctctgcaccggctggccttgtgcaactattctgtctgtatgggtattccctgtttgtctttattccagccctgtgtatgtccgttgtgccactggatatatttagatgggtggttgcaggtgtggcagggttcatgtcagcaacatttgtggcactgaacctccgggcacatatcaaatcagcaggtgaaaggtggttcttgattgttgctggcatttttctgttgcagctggctctagctgtggtactaaagctttacctcttcactgtatcagtttaagaggaaactggacagtatggatgaaatatatacagaatgaaggtatagctttttggcattgtaggttttcatggatacaatttgtagctgaagcatgattcacagattaaaccatcgtgtattcattcttttgttgcaatatagaggcgaataacttgtgatcatcataaaagcacttgtctttgacgttgttaatgcaagttataatgcaggcttctgtgattcttttgttacgtttgtgaattaaagcttcaatgattaattgttgggggtgagttttgaaaaaaaaaa

SEQ ID NO: 109883 - DNA, 693 bp, Glycine max
  Clone ID: PAT_MRT3847_70237C.1
taagctttaattcgcaaaagaagcaaagaccaactagtgttaattttgcaatggaatctcaaacactatatgagaaagaagaagaagcactagtgttgaaaacaacaaaagtggtagagtatttggtgccaaagatgtcaattgagcttctgtgcaagtttccagacaactctgcctatgactttgactactctcagagcacaatctggtcccctttgcttccaagaccttacagtcctatggatttggatcttatcactccaaagaagctttcctatgacatgggtttgggagctaaatgcagtgtcaagaaggtgggttctaagcttaggaagaagttcactgcctctgccttcaatctcaaccttgatttcataaaaaagaatagcaagagtaagaacaagaagttgccttctgatttctctccaacaccctttaaaggtgcttgcaaccccatcttgaacaagcgatgggcaagagcactgaaagctgcctcaaaacagtttaagaaatggaaggtgaagaggagagaccccattgcccatgtgatgctacccagattgtgattgttttattttttatttttaaatatttgttgtattggtgttgttattactttatttgtaattttggcatttttcattcagtaactgcatttctcattgtttatcgcattaaatggcctatggaagt

SEQ ID NO: 109884 - DNA, 1271 bp, Glycine max
  Clone ID: PAT_MRT3847_70238C.1
ttttattttttttttttttttttttttttattcttaatcaaatatatatattgatcaacctaaccaaataattacatcactctgtcgttgacccttcctaaaactatgcacagaagtacaactgtgttttaagaaaaacgtgttgaaggcaagtaaatatacaactcagacatcaacatgcacctgttaagtgctaaccttttctttgaacaccctgtcacagaaatctgagcactattggtatctgaagggtgagagattacgcctgaaggctttagaactgaatgcagagaaggaaaaccacaacaactgctatcgaaaaagatcagggaatgaccacattatgaaccttgcgaaaatgtcagaatccagaaattcaatatgtgcagcccgacctattatagagtccagattcttgccttgggtagatgcatcaaagttgacatcacagcgcatgaagactcgatgttgcatggagttggcacggatttggtccaaacaagcattcaacatctctaggaacagtttacccttctttgaagtgtcacgtgaagcagcctggcatgattcaattctagcagaatggtaaggcacataaccatcctggggggaagatagcagaataatattcctaaaatgttccaaggtcttctgcttacacagtttatagagaaatgtattttggaaatctggatcatctgtgaaagtaagttgatgaatgcactgtgtgccttttagcttcttcaaaaaccacaatccagaattaaacaacgagtttgaactataaagataccctaagtgtggaccagatactgaaacatatgtatgtaggtggcatagaaatggctccattatgctatctgctatcgctgttcttataatgagattaccaattgaatgtccaacaaaacttagcctaatatctcccagactcccatatcttgatgctttgtccattttgcttttaagaaaagcaataacttccttagctagcctatgtcccatctctctgaagtctccaaatgttttatcttcattagcctcggacatcagaaattctactttgggatctatcaaaagccattgattccggacaagtcgtagatctagatgatgcccctgaaatccatgtacaaagacaacaatcttcaacacacgagcattactttgtgttgcaaatttcttgcctatagtgtcagagctgaggccaattggtaagccatctgaatctatactcccaatatgtctcagtaatgaatttgcctcgagcc

SEQ ID NO: 109885 - DNA, 483 bp, Glycine max
  unsure (1)..(483): unsure at all n locations
  Clone ID: PAT_MRT3847_70239C.1
tgttctcggctgtggcctcgcaaatcatggtggcgggtttcgtctccggccacgctcactctgctgctgctgacttgctccttcctcactctcattcttctagctctccacattctctccactccccatgccaatgccaactcctccgtttctcgcaacactcacatcgaagctgaagaagacgaccaggtagcgttgcggatggaagtaatattcctggnagcccacagcttttctctatcatacctttctgaccaaggaggaatgtgaatatctaattaatattgccacaccacacatgcaaaaatcaacagttgctgataatcaatctggacagagtgtagtccacgacgtacggaaaagcactggtgcttttctggacagaggacaagatgaaattgtgaggaatattgagaagagaatagctgatgttacttttatacccatagagaatggtgaaccaatttatgttatccattatga

SEQ ID NO: 109886 - DNA, 931 bp, Glycine max
  Clone ID: PAT_MRT3847_7023C.1
cagcattattccgttgtcttccttctccgttgctcactctctttctctctctctctctggaattctaacctagatcaaagataacggtgctgtgagaaaagcgtgagagagaaggagagagccaaaaattcacaaagcatccgaggaacacgtgaattccgacatgtaacggtcgaaagttgtaacccacgacgacgaatttggatctgtcgtttacaaccattgccgatctccgccttaaacgacgcttcactgaaaccaccagactcttcctcctcaccgttacaacttcacagcttctgtgtagtgttctacttttcccgttactgtcagaagaccgttgaacaacgaggttttgaagtggttttctttcttcagctgcctgatgaggaattgatttgttgatctccgaggttgttgttctaatttatcgagcatggataaggtttcatcagactgtccgtacccgggatgcttcttttgtgtcatgaaggaagggaatccaagcaagcgcagagcaagtgtactgaaattctttagagaacttccgtgtcaagatgatgatggtcaggttctccctatcagtggcctttggaacactgctatggcacacccaaatgacccggagttcctagagctaggaatatttgaatgcatgtctgctctcatatggaagggactgaagaacaggcgctggctttctcatgaccaaaatatatatattccttattatgcagctcatatcatcggttcctacacaatgaatatggaagaatttgcagaaagtgccgtgcatgctggggtcattcctcttttggtcgagcttttacgaggtagattaacttgggttgagcagaggggggcgggtagagcattgggacactttggtactatgccaccccttttccagccatagcagggcatggggaaa

SEQ ID NO: 109887 - DNA, 368 bp, Glycine max
  Clone ID: PAT_MRT3847_70240C.1
gggatgaaccgcctttattttgcccacaaaccatgacatgccactggggctggtggtaaggtgaaaggaacccgaacttaatcacgactttcgtccattggcctgaaatggacacggcgagaagaaaaacgatctgtttggaaacaagactgtgacgtcaactctcacatttctcttcagataggacagtcactcaaacctgatcccatctctgatgtccacattatggggaatgaaatctctctacttgtggatgtgtaaaacctttgctgagccggatgaattgacacttatcgactagaatgcctccagatatcctgaaaaagttccgccagctgataaagcccgttttaggtgacaatgaggaa

SEQ ID NO: 109888 - DNA, 1500 bp, Glycine max
  unsure (1)..(1500): unsure at all n locations
  Clone ID: PAT_MRT3847_70241C.1
gacaaagaacaaaaacaaaaagcattttgagagtttgtgggttgccttgccttgcttcgctgtggtttcgccggccggccttgcttcgctgggggcccgccggccggtctgccttcgactcctcccgctctcgcgcccgctctcgccccctctctctctgtctctctctctggctaaacttgacttgctttgttgtggttttgggggttgtcttcccttccttcgttgtcgtttcgccggccaaaacacaacctttgttgccgttttagtgtctgctttggacacctctctctctctccctcagtttgatttgataattcgagatgaacgaccttctcactgattcatttgttggcgaggctagtaatggccagccttctagacaaagtgatattgaaatgggacaggttccgagaagcaactccgatatgggaatggaagcttttaataaacagatccatgaggctgataaacaaatcgataagctttccgtgctacttcaaaagctaaaggaagctaatgaggaatccaaagctgtcacaaaagcatctttcatgaaagctatcaagaagaggatggagaaagatattgatgaagttggaaagattgcacatggtgtcaaaacaaaaatagatgctataagctgatagaaactatacactagaccaatatcgtgaggttgtggagagaagagttattacagttacgggaactaggccagatgatgagacaattgatcgcctgatagaaactggaaacagtgagcaaatcttccagagagcaattctagaagcaggccgaggacaggtagtaaacacagtataagaaattcaggagagacatgatgctgtaaaagaatttgacaaaaaactgctcgattaacacccgagcgaccgtgtcttggcactcttggtggatgcccggggagacatcttgctctacatggaaagtcaggtcaacaatgtagtcgatcatgtccagagagggacatctgcacttcaaaatgctaagaaactccagaagaactctcgaaaatggatgtgcattgccatcattatactgttgataatagtagctatcatagttgtgggtgttctcaaaccttggaagagtagctagggtgcttgagtgtggcccctttaccttttgtccataatcataagagttgacttggttgggaaagcatatgcaatttatgcatgtgtgtcaacgggacatcttagagaaggatttttttttaagcttttattttgtatgattgagatgcttgttttgtgtggtgttactgatttctgactgtacattggcgtgcctcacgataaaaattcatattctttgtagccttcaaaagtttatcagggtttcatatttccttgtactattctataatattctatgaaactgttttttatgttatttgcttgttgcaaatcttgcattgatgttcttggaaagaaagtaccttcttctcaaanaaaaaaaaagaaaaaaaaaaaatat

SEQ ID NO: 109889 - DNA, 604 bp, Glycine max
  Clone ID: PAT_MRT3847_70242C.1
aggcaaatagtggaggcatatggcctatcgattcatgatctagcagtgaacataggacaaaagatggctgaatctcttgacctagttgttgctgatttcgaggactggctattcgagtttaaatttaacaaatataacttcaccccagaagcaatagggtccactggagttccaatacacacagactcaggcttcctaaccattctcaaagatgatgaaaacgttggtggtcttgaagtgattaagagttctggctcttttgtgtcaatccctcctttcccaggaaccttcctagtcaatcgagtaagcgaacaaggtttttgtgacggaggcgattgataatggtgagttcggccaagaaatcatcagtgcttttcatcttatctctggagaacatcttaacggccacttgaagattctccttgggaagaagtgtccctctataaacgacgccgtatccaccctgtccaagcttatgcttgtcatcgaaattatttgtcgctttcttcagctcctgatacctaaactctctgggagttccaggtagactctttagggttcccaaaatctgagactcattttcccttttcttctttcgtatcca

SEQ ID NO: 109890 - DNA, 871 bp, Glycine max
  Clone ID: PAT_MRT3847_70243C.1
cacgcgtccggcctcgcctcgccgtggtttcgccggccgaagacgacaacaattgttgccgttttaagtgtctgctttggacacctctctctctctctctctctctctctctctctctctgtctctctctctctctctcagtttgatttgataattcgagatgaacgaccttctcactgattcatttgttggtgaggctagtaatggccagcctgcaagacaaagtgatgttgaaatgggacaagttcctagaagcaactctgatatgggaatggaagcttttaataagcagatacatgaggctgataaacaaatcgataagctgtctgtgctacttcaaaagctaaaggaagctaatgaggaatcgaaagctgtcacaaaagcatctgccatgaaagctatcaagaagaggatggaaaaagatattgatgaagttggaaagattgcacatggtgtcaaaacaaaaatagaggctataagcagagataacctatccaatagacaaaagccctggatgtgagaagggaacaggtattgacagagcaagaatgaatatgacaaatgccttgactaaaaaattcaaggatctcatgacagagttccagactcttagacaaagaatacaagacgaatatcgtgaggttgtggagagaagagttattacagttacgggaactaggccagatgatgagacaattgatcgcctgatagaaactggaaacagtgagcaaatcttccagagagcaattctagaagcaggccgaggacaggtagtaaacacagtagaagaaattaggagagacatgatgctgtaaaagaaattgagaaaaaacttcttgatttacaccagatttaccttgacatggcagtc

SEQ ID NO: 109891 - DNA, 407 bp, Glycine max
  Clone ID: PAT_MRT3847_70244C.1
aatgtttctactttcctagtacacgctggtatcttgaagaaggatcatatcaagagtgatggcgtgtgagcgacactagtctcaagagctatgcctagtgtctctgactatgtcttaggcataatagatacataaactaacaacgatctgtaaactgggaaattcagatctgttctaatggtgaactatgtcatgtggcattacgtgtaagacaccatctaacggataaacgatcaaaaccttcacctccgtaacatcactgtttacgtaactcaatcccgtactggctgccgccgactacgcggtccacgtcagcgtttatcagctgaaccctgttattgctcatggtgtacacggccaccttaccaaaaaacctgcagatattgcgctggtgaccagcgttacat

SEQ ID NO: 109892 - DNA, 206 bp, Glycine max
  Clone ID: PAT_MRT3847_70245C.1
ttaaaaagctcaaaagacttcattaaaactggagtgaaagcctccagaaacacccaggaaaaaccgggagaacccaggttggagacacaccccagaccttgacatcaaaatataaaaagctccctccaaaacaggtgggcaggagccctaatacagaggagcctctcgtggccatccaaaatagaaaggggaactaaaagcacatc

SEQ ID NO: 109893 - DNA, 644 bp, Glycine max
  unsure (1)..(644): unsure at all n locations
  Clone ID: PAT_MRT3847_70246C.1
ccacgcgtccgcttacgcttctcttcttcttcctcctctcgccgccatgtctatggagaccatgcgctccgttctcaagaaatactttaggttttcggattttcggccttatcagagagaagttattgagaaaattatcgagaaaagggattgtttggtagtcatggctactggtagtggaaagtccttgtggtacctcctttggttgttaaaaagactgggatagttgtgagccctctgatatctttgatgcgagaccaggtgatggctttgaaacaacggggcatcaaagctgaatatcttgggagtgctcagaaggatttcactgtgcactctaaagctgaacatggtcaatttgacattctgttcatgactcctgagaaggcatgcacagttcctagcagtttctggtccaatttactaaaggctggaattagtctttttgctgttgatgaagcccattgcatatcagaatggggacatgattttagggtggaatacaagcatttagacaagttacgtgaggttntgctagatgttccttttgttgggtctaactgcactgctactgaaaaggttcaatatgacatcatncgttccctaaagctgattatccttttgntacgattggttcagttgatcgc

SEQ ID NO: 109894 - DNA, 352 bp, Glycine max
  Clone ID: PAT_MRT3847_70247C.1
cccattcgtccgttcacgcgtgcgcggacgcgagggcaaccaggcaagctatgagcccgatggcaaaaacgataaacagtctatgcggaggagatgacaatttgttgctagaaaggacacacctgcttgtgactggaaggacaaggacggtatgtggtgagaaagaagttcggagagcagtatgtggaaccctttatggatattcgctgacaattatcctgaatggtattggaaatgagatgctaattaaactttgtttggaaaaactactgcgccaggcttaagttccaggtatggctggacaaaccttgaaaaagtgggtccacttgcgtgtgtgtggtgagaataacct

SEQ ID NO: 109895 - DNA, 563 bp, Glycine max
  Clone ID: PAT_MRT3847_70248C.1
cactctttcattgatacacaagtcaagaaatattattatttgcttatcatgacttatgcatgatccatatatgcaacctcaaactctcttaagtttctacctgtttaagcagaaagaaaagactagtggcagttgggttggctataacaagtgaaagtggacaaaacaatggaaagataaccctttatgttgtcctctcttgcatgatggctgccatgggaggtgttatctttggttatgacattggaataacaggtggggtgacctcaatggagccatttctgaagaagttcttccacaaagtgtaccttaagatgaaattagctgatgacaaagtcagcaactactgtgtatttgatagccaactattgacctctttcacattctctctttatgttgctggtcttgttacttccttttttgcttcttatatcaccaaagccttcggtcgcaagccatccatcgtagtcggaggtgctgcatttcttgccggaacaggactaggaggtgcagcttttaatgtgtacatgctgatagttggtagacttttgcttggagttggg

SEQ ID NO: 109896 - DNA, 454 bp, Glycine max
  Clone ID: PAT_MRT3847_70249C.1
gcagcttcgttctatttggagcttcagatttcattcattagtgaagaactgctgaaaggcaaggtcactgagcttactggagtttgcaagagacttgatgatgaaagtgcagggaaaggcttggtgattgaacaaatgatagaaagaatcggtttactggaaaaggaaattagaggactgaaggggcagctatctgcatacactccaacaattacttctttgaaagaggattttgcatctctagagcacacttactttcttttgaccaataaaacttttgccgtaggcaacatataacagaaggatgtagtgactgagatttgtctccaagaagcaaatagctatcgaagtttaaaaggaaatgaaagcaccttaacaccagatggggttacagatttgctgagcatgcagacaaggattagagcagttgaaaagttaatgatggaagaacttg

SEQ ID NO: 109897 - DNA, 784 bp, Glycine max
  Clone ID: PAT_MRT3847_7024C.1
ctgtggggggccccgtggtgctggagggctttgtgcgctctcctgcgagtggccagggtgggggcgctgttttctgggttcctcggggtcgctggactcttctctcactttgacttccccgcaacattgagtcccttgaggtacaaggctgtagctggaatagggtccctgaaaccaagcatttgaggaatctttccatatccaacagtgcagggagagtgtatatggttgattttggaaatctttcagctctggagtatctgtgtatgagaggaatccagtggtgctgggatgccatttgcaaaatgctgagattggcaagtaaggtgaaacacctctatatgaaggttgaattcactggggactatgatgcacttcaaccctttccagagattgattttgttgacttcttcaacagccatcaaaagctacaaaagtttgatattcatggagccatgtttgcagctctatgccagaagaacagtctcaaacatgtggattcaggattcgggattccgtttttggaggaggttgtgatcacagtgaggtcacctcttaatgctgaacagaaaatgagtactcttgaatcattgctgaagtacgggaaaaatcttaggagaatggttataaagattcttgagatgaagagctgccatagtagtgctgatgatttttttgacgagatttgccggttcagatatatgaatcatagcatagttcgaatagaataaagctgagaggttattactattattatttcttgatgccttcttagtttcagaca

SEQ ID NO: 109898 - DNA, 413 bp, Glycine max
  Clone ID: PAT_MRT3847_70250C.1
gggaaggctttttttatttttttttttttttttttttttttctcttttaccatttatattatgctaaaccacgatttcaaattttaattccgttggtggggaaaaaaaaagaacccaacacaaagggcaagcaaattttaaattcctccttgggggggggggcaagcaaaaaaaaacaaaaatggggaaaaagctaaaccaggaggggggaaggggggggcaactacaacaaaaaaaaactggggggggggcttgaaaaacaaaaatacctgcaccccggggggggcccaggggcccccccgggaacaccaggcccggcccccaaagggatcccgttcttcgtaaaagagaccacttaaagaggggggctaactaggggcaaaaactgccccgggggaaaaagtgttttgccg

SEQ ID NO: 109899 - DNA, 224 bp, Glycine max
  unsure (1)..(224): unsure at all n locations
  Clone ID: PAT_MRT3847_70251C.1
cctagggtctcttggnaccgatctagatcccagagtacttgacaccggaagtccccggagactatggttatgaacccattggtcttagcaagaagccagaagatttttccaaatatcaggcatttgaattgattcacgccagatgggcaaatgctggtgctgctggattcatcatttccgaggccttcaacaaatatgggacaaaatgcggtcctgaagttgtt

SEQ ID NO: 109900 - DNA, 280 bp, Glycine max
  Clone ID: PAT_MRT3847_70252C.1
tgctgtaccgacgtgcgttccgccagagagtctccgtatgaaccggcaagtgcgtctcctcggtggcgccgaagtcgatctttcgttgcattccgtgaatcccggcccgcgacgccggtgcgatcgtcagtacttctgctggtgctcctcgacgcctccgtcgccgtcaccgttgtatttggggttagtgttgcaggatgagaaggcctggaggaagcttcctccaccgcctctgatcgtggaaagagagttacaagtaggcgcgggtgacgtcaaggag

SEQ ID NO: 109901 - DNA, 559 bp, Glycine max
  Clone ID: PAT_MRT3847_70253C.1
ttttacgcgtgggtcgccatctcttcttcctttatgttggttatttgttatcatttcgatttcattttcgcaacttcttttgcaattgctgttacaaaatcaataaatctgtcaaattttctacccaaagttccaaacttgctctcgttttcatcaaaaaccactccgaattctggtgggtccgcaccagtttgactgatcgttcgttcatcgcagcgtaatctgcaagcgagcgatgaagggtgtgggaggatatcacgattggccctattactcttcgccggcttcaaatttatcagcttttgcggcgccgtttagtgtgaatccctacacttccagtgaggcttcgtctcagttcatggattcagccgaatccgcataaactgtgcccccaattcactttcagccctacgggtacgatttcttttcgagccccgttagacaattggattccagtgcgcaattccctcatctgggtttgccttcttatcccgcaaggtcaagccttgttgaagcccaaccctactatgcgtcttctgcaattcacgatcactctttt

SEQ ID NO: 109902 - DNA, 145 bp, Glycine max
  Clone ID: PAT_MRT3847_70254C.1
ggggtgggaaataagaacttttgcggctaaatttatttaagatttaagatatcttatacattgaaactgtgatgtgaaggggccatccttacagcgggcggatcttgtgatacaacactttgaacccatgtgagacagactaaca

SEQ ID NO: 109903 - DNA, 296 bp, Glycine max
  Clone ID: PAT_MRT3847_70255C.1
cacaaacgggattcacgcaacaactacatatgaataatacagcctctttgctccctctccactttgtgccttcaccatctcatacctacctggccggcgacagttcgtgctcacactatagggatcacctcacaccagtggcacatttctatagttccagttatatatgaatgggccgttaatataaatcattcacctgcaatagacattgccctctcacttttgtgctacctccctgtgtgcccgatattgggacttaactattctttatatctccatttcatactctttttatc

SEQ ID NO: 109904 - DNA, 427 bp, Glycine max
  Clone ID: PAT_MRT3847_70256C.1
ccccgcagtccgtttcttcctcgtccgggtatgctgatagaatgcacgatgtccacattgaatatgatgcacgcacacttcctactgatgggaagtcgtatgagggtaagcatgttggtgaatcacaaacaaattgctggctagcatgatgctgggcacataccgaagactggcacatgacgaaattatgccatatagtgcacgcaattgtacaacctcaaagggcgagaaaaaaactcaggcctcatgcttgctgagggcatgtggcagctataaaaatcatacttgatagaatcgcaagtcctgactgctacataattggcgccatgctctaagttgatggatcataccaatgctgaaaaagcaggatctacctatgtatgaagcgcccttcagaggcgactggcccatatgagagattacattt

SEQ ID NO: 109905 - DNA, 243 bp, Glycine max
  Clone ID: PAT_MRT3847_70257C.1
attccctcctccttcctttgcctctttcgcttttgctttctaggttttttttttttttcctggcccttcccctgtgtcaatggcgggaaaaggagggaaggggcttttggccggaaaaaccagggcagcgaacaaggacaaagccagggttaaaaaaaggcttgtctctggttcaccccgtgctgggatccatttccctgggggccgtatccataggcatttgaaccaaagggtgcaagcaaa

SEQ ID NO: 109906 - DNA, 153 bp, Glycine max
  Clone ID: PAT_MRT3847_70258C.1
ggctcgagcacatctacatcttacttattttacaatcataattgcaactcacgatattagggtattggttcctttgaaccataaacaacacctatcaacctttactacagtattaactattacatatctaatttttgcaaaaacattgaaaaa

SEQ ID NO: 109907 - DNA, 329 bp, Glycine max
  Clone ID: PAT_MRT3847_70259C.1
acttcgcattcgatgaagagtactttgacttcttgcctgtggaggctgatcgtcaagagggagtctctcacattgttgaactgtaacctgcggtctatgttacactgactacataaactaattcttctgaaactgccaaagtatggcaactgtatctaccttgtgacaaaattcctagagtcttgactacaactgattagagattggaacgtacagaccatcctggatatagatcctttctcttggtggaattcaaaaatatgcacctgccatgatgcccgtctatgaaaaaattcgtcctaaggttgtacacgacatgattgatgaat

SEQ ID NO: 109908 - DNA, 230 bp, Glycine max
  Clone ID: PAT_MRT3847_7025C.1
cagcggacgccctagtggtttttttttcttgaagatctctaaaggttcctaccgatgatcgtaattaaaggcgagggggaaagattgcttccgacggtggaggctccactgagaagagatttggcatgatatccccaaaaatgcctgggaagacctgcataagctcccgatgggttcactgtgaacaccaccttgtggcaatcttgctccctgaaattgcagtaaaagtt

SEQ ID NO: 109909 - DNA, 502 bp, Glycine max
  Clone ID: PAT_MRT3847_70260C.1
ggctcgagaacaaatactaaatgctgctatcacaattcacaagaaaatgtgttttggaatggcaagggggttgtcagttcatcatatatatgggcaataccgtgtggctgcatcattttattaatgatcatcatgatcatcgatcaaggatatgacgaactccctcctatccgattgggcctttcatctgtacctacagcaagaggctgctgcttcttcatctaattatcatcatgatgatgatcatcatgatgctgatctcaaaacggcatccagcaccaacatacatgctactctacatgctgacctccaagactaccatgctatctttaagaccaaccttaatctcgcatgcactgatcgcgctatgactcggggatctctggtcacatcttcaaacccttacagtggaccacaagcctttaattatcctgaagttgcatcgcatgctaccttaaaaggatctggtccttttggaaatgatgatccctctaacttacat

SEQ ID NO: 109910 - DNA, 548 bp, Glycine max
  Clone ID: PAT_MRT3847_70261C.1
gccaaaacgccgtcgtctcgctcctcacctcctccccttccctcctcctcgaccccaccttcctcaaaaccttccaatcacacttccctgaaatccaatcccgcttccccaaaatctccccgtcaaccctagtcaaccttcttctctgctcccgtaagttcgatctaaaccccctcgacctcccccgcaaactcgacctcctcaaaacccgcttcgcgttctccgccgccaccgtggcgaaggtcctggaagggtttcccgacgttcttataacaagcgagactgagattactaatgtagttgattttctagtggaattcggaatccccggggatgaaattgatcttgttgttggattgtttcctagggttttgggaattggagttgaggacaggctgaggccgttggttcgcgaaattaaggagttagggtttacaaaccgcgagctgaggagagaaatctcgagggatccgaagattctggggatggaaattggtgaattctcgcggtgtctgaggctgttggagagtcttaaatgcagggaagcg

SEQ ID NO: 109911 - DNA, 476 bp, Glycine max
  Clone ID: PAT_MRT3847_70262C.1
gattgagactatacggatgcactcgtgaattgctgaatagtcataagagaccatccccaaccctggatatgatcttgatgacggcaggagtaggatgctacgttaccatcacttactgataagttgccatggctgaactctgtgccctgcaaacacgtgcagggctaagatcagcagctttatttcgatgccctatgaaggttacaatttagatagagattgactataccttaaagagtgagaccaccgtgtagagatgtgctacttgcataacgaaatatatactcgcgagaacaatggactgaaactcattggcgagatgctagaacacaaaactaagtcggcatatacaacctgaatcgagacacacttatagacctcttgtttcaagttgatcttaactggctctagattctgggaaaagattctttgctatttttatttaattataaagatggctgctaacgtgactcaac

SEQ ID NO: 109912 - DNA, 1145 bp, Glycine max
  Clone ID: PAT_MRT3847_70263C.1
aaccttataaataacaagctataagtaggaaaatgaggtcatatttttaatctctatagatataataaaattttattttaaattttcctttttttattatttttaatccttataattttttttgacaagtgtataacaccttgcttttgtttttcggaaagttaatttaattcaaaattcttctattttattggatgataatatgctagatatacgtattctgctctcaagccattaaggagacaagaatgtaacagcaaatagcgttatttttatgtacatacctttcaagaacaagatactattttccaatggtcaaatgaatctcttgaattcagcaagagtgtcacgagaaatataaataatcctgcatgaatgagaacaaaagagagcagagtaaaacaaacaagctatctatctgccccctcccccttttctctttcagctgttccctttgcctccaaagcaatgaactatgaagaaaaaaatataatacacatataaagaacccacacccagaacccacacaaataatttgtagttatgaatttcaatatacatcatttacatggaaattagaaggtcagaagaatcattggactgggaaggaatttcgagagtgaagaacattaaattccttgaatcaatggttagtagcatttagcttgttgcaaagaaatcacctgcatttgtcaattaatttcctttacagcaattccaagagggagacaagcataaaataaaatagtagtcatcaaccttcctcagagaagtcaaatacatcaccaagcatgtcatcattatcaccatcttcgtcagatttccccctgccacagggactgctacaatccacatcagtaataacctctgttgattcatgacagtcaactgatgctttacaataaccttcttgaaaatattgctcaaagtctggtgagtcacgtattgactcctcacaagttacattcatattcaaatcacagccacttaagcttgaattgaaactgtcaccggctttttcatgttttgatgattttacctttgcatttgcaccatcaacaaatgtcttttcagctaagccaggtaccatcaactttgaatggaaaattgcagcatcttctgacaacttctctttagttccatgt

SEQ ID NO: 109913 - DNA, 343 bp, Glycine max
  Clone ID: PAT_MRT3847_70264C.1
ggggggaaaaaattaaaggatcccctttttcagaaaaaaggggaaataattcacccccctccccccaccaaaaaaacaagttgcctccttacatgtttttgccaaaccaaaaaacattttttaaaaacttttaaggaagttggaaaacaaaattaaaacttttttgtcttacccttgcaaaaaactttgttaaaaggtttcctatttccacatggagggttcccgaaaagccgggggcacccctatttaaaatggacccttacttaaagggaaaaaaaagtttccaaccagggcccgggaaatatctttaaaacaaggggggccccacgtggggggaaaattt

SEQ ID NO: 109914 - DNA, 446 bp, Glycine max
  Clone ID: PAT_MRT3847_70265C.1
cccattcgtccgctcacatctcctgggaccacgcgacgacattccgagtgctccgtctagcagccagagcagacacgagccgcttccgacccgagctcggcctactgtatgctcccaccttagctggtcggctgcagtgccggcgaagcccaccatcatgcctcaggatgcactaaacagcttccgctgtcttctcgacaagatacctgactggatcgctggtctggatgccatactggacaatgcgacacagcgccagaccgagcttatgtccgccaaccagcctgccgacttcgatcgaacgcttgtgcgaaagtcttccaggtcatcatcgctgaggtcgaaaagaagcaagcatgacgatatgccggaacaaacgctcctaccagagacgatcaaccaaatggccacgcctgtaccgactgtacttcgtccacagctaccac

SEQ ID NO: 109915 - DNA, 244 bp, Glycine max
  Clone ID: PAT_MRT3847_70266C.1
ggctcctcggtctagcatcaaggacacccaaaaccttttccaggctctttgatctacttatactacaacccccactaatctcaggatcattaatctctatatcatctataccgtattcaccactttcatccagattatttacataacgtgtattaaatcatttccatttaactccttcctatcaggaatactttcttatagtaaaactactattcttactatttatctcagaatccaagtaaat

SEQ ID NO: 109916 - DNA, 504 bp, Glycine max
  Clone ID: PAT_MRT3847_70267C.1
tctacgcgtccgcccacgcgtacgccaaaatggggaaattgaagtggcggaggggctgatggagtggaacaccgcgacgaaagagatcgaggagtcgaagacgttcagaggggccatgggaatgctgctgagcataggaaacgcactgaacggcactgacataaaagccttccaattggactatctgagccgtgcgtcagaggcgaaagaccccgcgcacaaatatccgttgacgcaccacttgtccgagtacatgatcgaccattactcggactggacagatttgtacggctaacttggctcagtgtcgagagagtacacggttcgacttcgattcggtgtttgacaatttgaagaaaatggatacggactgtaaagcatgctgtgactatgtggccaagatatcgcccaaggacaacaacagttcgacgaagaacagagtgaacgcttttcttgctgaagtggcctaacgaatacatcgcgatgaacacgtacagaggacga

SEQ ID NO: 109917 - DNA, 530 bp, Glycine max
  Clone ID: PAT_MRT3847_70268C.1
gatagtgattgcagttccagacagtgtcgaagaagaagaagaagaagatggcattgggtgttcctgctcttcccctgacatacgtggctcacgttctggcacttgttgccagcatcttggtcgtgctctgggtcctcaattttaggggtggcttggcttgggattctgataacaaggccctcatcttcaatgcagctattataagctacaaagcattacccctgaagaaggaagtgaagaaattgatacaccttgttttccatgccatcgcattaatacttggaatagttggaatttatactgccttcaagtatcacaatgaaagtgggattgccaatctctacagcttgcattcatggcttggaattggggttattgtcctttatggcattcagtggatatatgggtttgtgatctttttcttccctggtgggactcccgacattaggcgcgcctcacttccatggcatgcgctattcgggctgtttgtatttgtcttggctgtgggcactgctgctcttgggtttctg

SEQ ID NO: 109918 - DNA, 763 bp, Glycine max
  Clone ID: PAT_MRT3847_70269C.1
ttacggctggcgagaagacgacagaaggggacgagaaatgagtagaaaacaaatgaaatggaaacggtgttgtaagaaagagatttggagaggtttgactttttgagagttggaagatctcatcctctctatattcctcttctcgtctcagagagaaagagaaccagaaaagaccaaagcaacaacatcaccagacaatacaaacgcagatagatcactttgacgccaccctgaatcttgatacctttgaccgcaacaaaattcttaattgatcactgggtatgtttttgatcgtgcaccttgtgggccagtaatcgttcaaaacgtgaacaagtcttacttttgattccgaattcctcttatcacttgatgcttaagtttgctgctttcaccaattgttctaggattaccaagttgatcaaggagaccctcacttagagagccatgtcaagggaatgaagcttggattggaggagaactaatggggtgtgtgattagccgagaagtgtcatcgggaatagtctccgaggtgaaggaggagaagaatttgagtgttgggtccaacaagaaagttgatgaagcgtccacaagcggagctgatgagaacgcggtagtcgctcagaatggtgagaaggataaggaagagaatggtggcggtgatgatcgcgttctgcggccgaagggtgaaagaagaagatcaaagccaaatccaaggttaagtcatccaccaaagcatttgcacggggagcaagtagcatctggc

SEQ ID NO: 109919 - DNA, 539 bp, Glycine max
  Clone ID: PAT_MRT3847_7026C.1
cactacggagttgagattttagcgcatcatacacaagattgggtccgggtacctaagtaataacaagtgatattgtgaaattatcgtaatcagacccaagttgaaatgagatcagaacaaaacttaaatatatctatcaactgccttgatttgcccaaaaaagaacgagatgggctgagacctgtgatggtgatagccgtcaaaaaaattgctttaacacagaagggcctgagggcctagatggagatggaaaattatttggaacaccttcttgatgcccccacaagataaacatgccagtgctttcacacgaaaatgcatcatggagctgcaatgcatcttcctcgagtgccattggaattcaagtctcaggtgcactactttaagctggtgaacatttgaacattaatatgcaatcctttcaagattttcggagacagttatcattctaggcctgacttcagggtctacctcagtgcattgtaatgctacatgaaacacagccagtacctctttcttggcatgcacttcatggagca

SEQ ID NO: 109920 - DNA, 1068 bp, Glycine max
  unsure (1)..(1068): unsure at all n locations
  Clone ID: PAT_MRT3847_70270C.1
gttccacacaagcaccttcacataaaattcaagtatcgaagaagaagatggctttaggtgttcctgctcttccgttgacatacgtggctcacgttctggcagttgttgccagcgtcttggtcgtggtctgggtcgtcaatttcaggggtggcttggcttgggattctgataacaagtccctcatcttcaacattcatccagttcttattgttattggcttactagttcatgggggtgaagctattataagttacaaagcttttcccctaaagaaggaagtgaagaaattgatacaccttgttttccatgccatcgcattaatacttggaatagttggaatttatactgccttcaagtttcacaatgaaagtgggattgccaatctctacagcttgcattcatggcttggaattggggttattgtcctttatggcattcagacattagacgcgcctcacttccttggcacgcgctatttgggctgtttgtatttgtcttggctgtgggcactgctgctcttgggtttttggagaagctcactttccttgagaactcaggattggacaaatatggttctgaggctttgcttgtcaacttcactgctattatcacagtcttatttggtgcctttgttgtgttatctgctctagctgatgctcccccagcccctgccgcagatgactatgaagccatatagacacttctgtttgtaagtttgtctcatttttactttatggaataatctcatgtctgctataagtttatattgggagtcggaagaaggaaataatttattgtttgtattcttggacataaagctcgtaattaatcatcaatttcaatatattaaccctaaaatgtgaaattagtcgttgggttataatcagtttttttagctttcaacttttccttgatcagcagtagagatttagctcatataacttgtgaaccgaacattgaaaattcagtctatcttgtaattttattccttcactttcgcttttgtctcgcttcnnnaaaaaaaaaaaaaaaaaaaaaaaaaaaaaaaaaaaaaaaaaaaaaaaaaaa

SEQ ID NO: 109921 - DNA, 1029 bp, Glycine max
  Clone ID: PAT_MRT3847_70271C.1
cagaaatgcggtatgatttgtggacacgtggcgagaatcgagcggataaggaaaaagatctggaaggtcaaaacgatgggggacgctagcaataatcttttatagtgattgcagttccagacagtgtcgaagaagaagaagaagaagatggcattgggtgttcctgctcttcccctgacatacgtggctcacgttctggcacttgttgccagcatcttggtcgtgctctgggtcctcaattttaggggtggcttggcttgggattctgataacaaggccctcatcttcaatcttcatccagttcttattgtcattggcttactagtccttgggggtgaagctattataagctacaaagcattacccctgaagaaggaagtgaagaaattgatacaccttgttttccatgccatcgcattaatacttggaatagttggaatttatactgccttcaagtatcacaatgaaagtgggattgccaatctctacagcttgcattcatggcttggaattggggttattgtcctttatggcattcagtggatatatgggtttgtgatctttttcttccctggtgggactcccgacattaggcgcgcctcacttccatggcatgcgctattcgggctgtttgtatttgtcttggctgtgggcactgctgctcttgggtttctggagaagctcactttccttgagaactcaggattggacaaatatggttctgaggctttgcttgtcaacttcactgctattatcacagtcttatttggtgcctttgttgtgttatctgctctagctgatgctcccccagcccctgccgcagatgactatgaagccatatagacacttctgtttgtaagtttgtctcatttttactttatggaataatctcatgtctgctataagtttatattgggagtcggaagaaggaaataatttattgtttgtattcttggacataaagctcgtaattaatcatcaatttcaatatattacccctaaaaaaaaaaaaaaaaaaaaaaccccaaa

SEQ ID NO: 109922 - DNA, 1056 bp, Glycine max
  Clone ID: PAT_MRT3847_70272C.1
ggctcgagtttactttgtattctcccatttgtcttggagtctacctggcttttttatgggacttggtatcggtgtttgatttgcttgtaatgttaaacgtaaagataagaaggtagatttgttgctggcaatgaagctacttgagaaatcaactgattcggttcctcttatttttctcgttaccgatggggctgttgaagatgagagagatatatgcaattttgtgaaaagctatgtctcaagtgggcaatcgtttcgaacacctcgcatatatacttttggcataggtttatattgtaatcactacttcctgcaaatgctagcacaaattgggaggggccactatgattctgctcatgatttacattcaattgactttagaatgcaaagactattcagttcagcttcatcagttatggtagctgatataacaatcaaaagtttagaaggtcttgattcacttgagttattcccaactcatatacaagacatatcatttgaaagtccgttgatcttatcaggaagatacagtggaacttttcctgaattagttaaagtccctggtactttggcaaataagactaactttgtagtaggccttaaagtgaaagaggaaaaggatatgcagctcagtaatgtaatatctccctcctaaggcttaatttacaacgtattcatcatatctggttgtgaattaacccgtcttagcaaatgggaactgaatattaccatgcaactcatatgcatagctcctcctacataggatcatatccccatgtgcaatgttgtgctgctgttggcttccctaattacttccattgttccctcaaccctttattttggttgggaaggcaatcggtgcattaaaagtgcatggttttttactcattctttcgcaaaagtatgtaacatttaaatctgtaaatcaaattttaaacccttgagagttgagacattcatctgtcaaaacctagaccggttttgtattataggttttttccttggacatgtggcatgtatttcaaatcaatgagataaaaggttttcaagtttccc

SEQ ID NO: 109923 - DNA, 1353 bp, Glycine max
  Clone ID: PAT_MRT3847_70273C.1
gaagaagatggctttaggtgttcctgctcttccgttgacatacgtggctcacgttctggcagttgttgccagcgtcttggtcgtggtctgggtcgtcaatttcaggggtggcttggcttgggattctgataacaagtccctcatcttcaacattcatccagttcttattgttattggcttactagttcatgggggtgaagctattataagttacaaagcttttcccctaaagaaggaagtgaagaaattgatacaccttgttttccatgccatcgcattaatacttggaatagttggaatttatactgccttcaagtttcacaatgaaagtgggattgccaatctctacagcttgcattcatggcttggaattggggttattgtcctttatggcattcaggtaaacaaaccactgtataagactaaactaaactatcctataaatgtagtataccttgaagacatgatatgattatggttaagtttataatttcagtttaagcaccagatatagagtctatggtgcaagctatagattgaaaatgtggactttgcttatctccaaatgaaattcaattatctactaacattgtgttggttccctgaagtggatatatgggtttgtgatctttttcttccctggtgggactccagacattagacgcgcctcacttccttggcacgcgctatttgggctgtttgtatttgtcttggctgtgggcactgctgctcttgggtttctggagaagctcactttccttgagaactcaggattggacaaatatggttctgaggctttgcttgtcaacttcactgccattatcacaatcttatttggtgcctttgttgtgttatctgctctagctgatgctcccccagcccctgcagcagatgactatgaagccatatagacacttgtaagtttgtatcatatttttattttatggaataatctcatgtctgctataaaagtttgtattgggagttggaggaaggaaataatttgttgtttgtattcttggatctaaagcttgtatttaatcatcaatttcaatatattaaccctaaaatgtgaaatttaaaaaaaaaaaaaaaaaaaaaaaaaaaaaaaaaaaaaaaaaaaaaaaaaaaaaaaaaaaaaaagggaaaaaaaaaaaaaaaaaaaaacaaaaaaaggaaaaaaccgaacatataaaaaaaaaaaataaaaaaatttccataaaaaatggggcataacaccactctaaagaaaaatttataatgcaattccaatttcacttcaaaatatgaacacagaaacataaatataaaaaaacgggggttgactaaaaaagatagctaaattataataaa

SEQ ID NO: 109924 - DNA, 249 bp, Glycine max
  Clone ID: PAT_MRT3847_70274C.1
ggctgcgagaagacgacagaagggggttcgtgcatttatatttggaaattagtaatgcaattggtttagaaaagtttgaggctcttcatgagattgtaacatggccgtccatggtcgtccttaatgtaaggtatacggacagaatgtttatggattctctggccgtcgaaccaagtatctaaacgtgtttctatactcaatgcttcaatatctcgctagcttgattttgtttctgaagtcaaatggttg

SEQ ID NO: 109925 - DNA, 290 bp, Glycine max
  Clone ID: PAT_MRT3847_70275C.1
atataatacaacatcatccaaacagacgtgcccgagaacatctatacactagtagaatcgcaacaagctaaagacacgaacctctcacataaaggattacctttacacctttgactaagcaaaatctaactcaactcctaaaaacgcacactctactaacaataatcattgatgagatccaaaaccactgaacaaaataactgataaggatattacaactaaaccagcatgctcacctacatacaatacaaaactatgaactagacttttatacatcaaccgcattcaaa

SEQ ID NO: 109926 - DNA, 254 bp, Glycine max
  unsure (1)..(254): unsure at all n locations
  Clone ID: PAT_MRT3847_70276C.1
gcattgcatncctcttgatttgtagtttgtnttgtgctttagataaaagttctgccaaatcaagaggggnttnaagancancagngtgtgtttagcancaatgggtaagttcctttgncggccnatgatcttggcatcttgccatngccatactcaaacagcnccaggcgnnaatgacnangagccacgtgtatgacaacaagagcaatnggagtngaaggtnccagnnntnccaaggcnagnnaatgnncgng

SEQ ID NO: 109927 - DNA, 501 bp, Glycine max
  Clone ID: PAT_MRT3847_70277C.1
aagaaattcacttcagaaagtgataattaacaagatgctggagctaccaaaagttgcctcgtaaagtaggtcttactcagaagccaacaacaataagtaatggcatcagcagaagggaaggctccttatacagctaattgttttactcaagatttccggattcccctgagttctctggatcatccgtcatcagtttcaaaaaaattagtatctgattgggttcctaataattctattaatgatcaaattctttctaattcagtttttgtaccccataatctgaattctgataagctaccagaaatgaaatggtggctacatgtgaaaagtgacttgggggatgaagcaattatacatgtcaacagctgaattcctacgagtctgaacttggttccttctatgctgaattttctaatggcagtgccaagagtgggggagatcaattggtcaaagactttggattttctctctaatatttgaaagggctaatttatatgtaga

SEQ ID NO: 109928 - DNA, 498 bp, Glycine max
  Clone ID: PAT_MRT3847_70278C.1
accagaaataatggacagtgagatatattttacgtttaaaaatataagaaaagcatgaacattggacactctacactgactacacatctacagaaacaggcacaagagctgaaggaagtaaatgaatatcccatcagttctttccacctaatctgtatcaaccaatacctatatgtacttgaaaaacttctttccctctggcatctttgcttcctaagccccagattcccgtctgaagaaagcgtaatatgactttgagatcctctttgttgcaactcttttcagtgttattattactttgctagaattgttttttactaaagcattaaagcgttagtaagtgatcattatcgtggctcaattgttgcaagcctcgttgaactgaaaggcttcttgtcactctaccgatgtacacttgaacaatccaacctaaatctggttcaaacaaacaaaagcataattcaaatattcaataatcaaatcttcaaaaaaaaaaaa

SEQ ID NO: 109929 - DNA, 361 bp, Glycine max
  unsure (1)..(361): unsure at all n locations
  Clone ID: PAT_MRT3847_70279C.1
gtcttaactggagatnggatcacacttatacaaaattctccaattagccactcgctgagagccgctgcttggaagaaaggctgcctaacggccaagactgcgatgcctgggaatgcagcagccaaaaggagcgattgggcctcattggtacaagtgtttttaacaaacagcaacagtacagagcattttgatgcatgtaagtggacaaaatcggaaccacattcctgggaattgatcttcccaatcgaggcacgcggccctaacaatggctccgaaatgcggagctctgagtgggcaaatcaaacttcatggcatttgagtttccttattgacaatcccaaacagtctacaagttttgata

SEQ ID NO: 109930 - DNA, 381 bp, Glycine max
  Clone ID: PAT_MRT3847_7027C.1
attattaaattacccaatattgatcggaaaaaagccattatgggagagccttgctcacgacagagtagaaaggtctttgttgtttcgagacagaaggtctgttccggctattagcagaagaaggccaacaaaattgaaggtgggggcacaaagatgctctgattaaacattcaatcattggccaaccaggggtgggccaatctccactccggagggaggaacagggttttttggagggggtggatccaatggaacggattttctttgttgcacagtcgaaaggtgatatgaaggagctctctattattagccaggaatgagttgaaaatggcctagtattgagcctcttgactcatgatagataactcaggggggctggcc

SEQ ID NO: 109931 - DNA, 259 bp, Glycine max
  Clone ID: PAT_MRT3847_70280C.1
acggtgacagttgtgactcgttctttaccgacattatcttctttttctgtctgatgagtgtcggttttctgggtaacctgcgaaggtcgaactgcagctgtaacatgttagttgatgacgcgcctgtccgtgcggcaacggatcaaggagctgctagatggacgctgactagagctacaccgaatcaacacttcaccgagacactggtcatgggaatgtgtccacgataaggctcaattccatagagctgacataagtg

SEQ ID NO: 109932 - DNA, 156 bp, Glycine max
  Clone ID: PAT_MRT3847_70281C.1
cccacgcgttcgcccacgcgtgcgggaagatcagcttgagtaccttgaggagcgtcgcttgacggatctgatcaagaagcattctgagttcattagctacccaatttgtctttgcattgagaaaactactgagaacgagatctctgacgatgagga

SEQ ID NO: 109933 - DNA, 346 bp, Glycine max
  unsure (1)..(346): unsure at all n locations
  Clone ID: PAT_MRT3847_70282C.1
ctaatccccacccttttttttttttttttttttttcacaanttaccaaaagggggtaggtccttactaaaatacatcccctaactgaaataactgaaaccttaaaaacctaataaccaaaactatttatttttctccaaatattaagaccaacaactactatcctacaccattcaatctcctttcttaataaaccatcgcccattggataatccaactcgtgcacccagcatattaccacaaatcacattttccagtaccatccactgcaactttgacagaatatctaaccaccaatatcttttttaaaccacacaatatcttgccatacaacaaccattcattaa

SEQ ID NO: 109934 - DNA, 179 bp, Glycine max
  Clone ID: PAT_MRT3847_70283C.1
ccaaggatccgtgtcacgagaagatcgttgtcttaagaacttaggtgagagcgccgggcgtgggagtgggcgttaacaggaagcacgacaccgcgtagggtacagttataggcgcgtaccgttccggaagttaccggtcctaaatcgttgcatgcccgaatagtgaggcagtggcaata

SEQ ID NO: 109935 - DNA, 406 bp, Glycine max
  Clone ID: PAT_MRT3847_70284C.1
taagcttcgattggctcgagattcatttgatactgtgacatgttcccttgattatactttgttaaagtagacctgtccatcatggatctggctgccagcagccatgctgcagaccattgatgacagtccctgcttgttgagtctctgctctcagactagagcaatcacaggacactggtgtgtggaagtgccctgtcacatcatttcaaggttgcaatcccaaaatgtctttatataatttgatttcactgtatggtaaagttttgataaaatttggccagtttttacagaagaaattatttctttgctcatttagtcctgtatatttagaaatatgtaaaactggattttttttttttaaggtactatgtgaccaaagttcattttttcctcctaaggtctaaat

SEQ ID NO: 109936 - DNA, 227 bp, Glycine max
  unsure (1)..(227): unsure at all n locations
  Clone ID: PAT_MRT3847_70285C.1
aaaagaccaccgaagggggggcaacagaaaagaaaaaaaacancaggggcggggcgngaaaggacgcgccacgaacggaaccagaaacgaanncaaggcagccacgcacagacgagcccaagcagagggaggaacgacaacgaaaagnancaaccccacaacgaagagaaggccacgcagccagaacaaaaaaggccaccaccggncacaagaacagggacaacaaa

SEQ ID NO: 109937 - DNA, 765 bp, Glycine max
  unsure (1)..(765): unsure at all n locations
  Clone ID: PAT_MRT3847_70286C.1
ggctcgaggagagactcagggagagaatggagagtagcgaggaagaagatgatttcccttccattgagagcatcattccccagtccaaggttgactctctctatcagtctcacaccgaaaaggggatcaggaagctttgctgtgagctcctagatttaaaggattctgtggagaacttgtgcggcaatatgcactccaagttcttggctttcttgaggatatccgaagaggctgtggaagtaaagcatgaattgattgagctgcaaaagcatatctcagcacaaggtattcttgttcaggatttaatgactggtgtctgccgtgaattggaagagtggaatcaatcaagcaacgatgttgctgaaattcagcaagaacctgaactacctgaactccttgagcctttaccaaatgagagaaatgaccagaaaatattattcttggaaaccatcgatgtacttttggctgagcataagtttgaagaagcattagaagcattagatgctgaagaaataaattctgcagagttgaagggctcagggaataactcttcagatgatgtttccttgtacaagtcttccttgttggaaaggaaggcaatgcttgaagaccagctggctggaattgctgaacaaccttctgttagtttccctgagctgaaaacagccttaaatggtttaataaaacttggaaaaggtcctctagcacatcaactatggctgaagntntatcagtctcacctccagaagagaatggaggctttgc

SEQ ID NO: 109938 - DNA, 1021 bp, Glycine max
  Clone ID: PAT_MRT3847_70287C.1
cttcttctattgcgacccatttttccaatccacaatcgtgggagtgagcgaacaactacaaagggatattagatactattgtgatgagtgcgtgcgattcattgtgtttgtgtagtagtgagtgactttgggttgggtttcgtctcaactcaacaaacgtcgtcgttctcccatttccaatctttctccaatggcttcttctgcttccttaatcaactcgttgacttgctcttcgcctgcacccactcagcactgtttcgccttcacccgcaccaccgccaccgctaccgccacgtcactgagacaattcaacagccaccgtccgcccccactcaccacgaggatctcctcgtcgccttccaccgttgtctgcaaagctgtctccgttaagccccaaaccgaaaccgaaggtctcaacattgctgacgatgtcacacagctcatagggaaaacgccgatggtttacctcaacaatatcgtgaagggttctgtggccaatattgctgcgaagcttgagattatggagccctgttgtagtgtcaaggacaggattggttttagtatgataaatgatgctgagcagagaggagctataacacctgggaagagtatattggtggaacctactagtgggaacacaggaattggtcttgcctttatagcagcttcaagaggatataagctaattttgacaatgcctgcttcaatgagtttagaaagacgggttcttttgaaagcatttggggccgagcttgttttgactgatgcagcaaagggcatgaatggagcagtacaaaaagctgaagaaattttaaaaagtacccccaattcatacatgcttcaacaatttgataatccttcaaatcctaaggttcattatgagacaactggcccggagaaatgggaatatactagaggaaacaccgacactttatttgtaggatctggaaccggcggaactgtttttggagctggccatttactaaaacccaaaatgccaaaaccccaggctattggagta

SEQ ID NO: 109939 - DNA, 450 bp, Glycine max
  Clone ID: PAT_MRT3847_70288C.1
ctctagccgataggcctcagggccgtcacccacgcgtccggcggcggctgctgccatggtggctggcggccggtaagggtctgagtggatctcctgccaggccagagcgccttcgggggccgcggcgggaggccaggagtttgcagccagggcgccgggtttgtggtctgcagtgtcgtgaggctgaagtgcagcatgtctagactgggagccctgggtggtgcccgtgccgggctgggactgttgctgggtaccgccgccggccttggattcctgtgcctcctttacagccagcgatggaaacggacccagcgtcatggccgcagccagagcctgcccaactccctggactatacgcagacttcagatcccggacgccacgtgatgctcctgcgggctgtcccaggtggggctggagatgcctcagtgctgcccagccttccacgggaa

SEQ ID NO: 109940 - DNA, 189 bp, Glycine max
  Clone ID: PAT_MRT3847_70289C.1
ttctactctttgaaagaatatgatttaggacattctggagattatagattaacagctgatattgatcgagaaagattccctgggcctcaaggttatgagccacatgatcacatgcgggagccatatgcttgggagccgcataagaagccctcatcccatttaagcaagacgactcatcgcagatctgac

SEQ ID NO: 109941 - DNA, 328 bp, Glycine max
  Clone ID: PAT_MRT3847_7028C.1
gagcttattagtcggcggccgccctacaaaccaaaggggggaattttaaagagcaattgcgggatttccccgcaagcaacataaatattgtagccctttttaccaacgcaaaatatcatggggaacaactggcggggttacaaaaacaacggctttccaaaagacacacacgactaaagtaagttgccccaaaaattgtaaccgaaaacccctcaaggacgttcggagcccccttttcaggattcggcagggcgaacacaatgaaaggttcacggaagtgctttgatttcctggaaggcactggagctcctaactggaatggaactgc

SEQ ID NO: 109942 - DNA, 365 bp, Glycine max
  Clone ID: PAT_MRT3847_70290C.1
aaactcaaatgctctccggcaagatattattataagcatgaggttgagcacaataaagaaatatcaacacttattgtcatatgtaatcctcagaggatcattcatgagaggagactaacacaggcatattatgctgaagattcttgtcatcatcatctttatggggagagggccattcctgtttacgacgaagactaccagtgaaggttgtaaagaaaccaccaaacccctattttgttgaaccaggtaacatactccatatccggatcttggcgggagttcatgtgcaaaagtgggaactcatttcggggagtttttggacccccccgtaggaaataagcctgtgcccctgcaacaagaatagg

SEQ ID NO: 109943 - DNA, 252 bp, Glycine max
  Clone ID: PAT_MRT3847_70291C.1
ggatgatcatggaagttggaagccaaatattttaaattggcatcttgtagaattggcgatcctcttgtgtcatggatcctttgagtctttcttctgtttcagaacaggccagggagaacaatgtaaaaataagttcttgcttccaagaaagcctgcaaggcaaccaaatccaatcatatacaggaaattgcgtcgagggtcagctgcagggagatttccagagaaacaaattgagtaccctacaaataagga

SEQ ID NO: 109944 - DNA, 284 bp, Glycine max
  Clone ID: PAT_MRT3847_70292C.1
actttctcaaaagggtatcaaatattactacaaagaatagtactttagaaacaaaagtcctcttcttctccaaatgaaccccgttcacaaaaagattccttttctcatccacaatggcaaacccattttttaatccctcattgctgttcagtacatttatgatgtttggaatgacaaaaatcccctttttgccttctgacccttatccaaaaacttaaactaaaattcttaacttaatattcttcataaaaagataatatcatccttctaacgaaaaatttttt

SEQ ID NO: 109945 - DNA, 291 bp, Glycine max
  Clone ID: PAT_MRT3847_70293C.1
ctaactgttcctatcccctctgccttcaattttgccactgactgggtgttaaagggaaaaaaatattactaaaaagtagaacaaaatcccaaatacgcagtcagtggcaaaattgaaggcagaggggataggaacagttagcgcgaaccgtgatgttggcacaggtgcgcgtattatagcattagagcttgttgataccactggtgcaggtgatgcattcattgcagctgttatctatgctattagtgccaagtttacaccagagacaatgctattctttgctgctaatgt

SEQ ID NO: 109946 - DNA, 251 bp, Glycine max
  unsure (1)..(251): unsure at all n locations
  Clone ID: PAT_MRT3847_70294C.1
gtgtcaatgccacgtgtgactgccacatgtcaatgccacttgtcaacgtctaagtggttccctgtaaatgtttcattttttgtaggtaaaattgtagttttgttcccctagttttactccaatttcgattttggttaattcgcacatttggtcccccagttttataaatccctttataaattcagccaaatttcattacgggagaaatggtatttcaatttccaaacaaaatnccatggtnatananggnc

SEQ ID NO: 109947 - DNA, 833 bp, Glycine max
  unsure (1)..(833): unsure at all n locations
  Clone ID: PAT_MRT3847_70295C.1
ggctcgagctctctctctctctctgcaacgctccgaatggccaacaacaccgaagaacaacaaaacaactcaataagatcatcgatcatggagtggaagcagatgcacccacttcaccaaatcgcggaaacccccacccacaagctcctcctgaagcaatggctgaaggaagaagaactcatcaacaaccgcatagcgttaaaagagacccaaatagattcaacccgcaaagagatcaccaccctctacatcttcttcttcctcttccactccaccaccctcatgctcctcttcaactcctcgtcaccctcttcctgtcacagatcgtgggtcccttcgctgtgctctctgttattctcgctgggcctaatatgggccttgcgttacaagagcgacgtggaggcccacgtggagaagatgctgcagcgggagaaggaggacaaagggttgctggggaagtgcgtggaggagttgaagaagaaagggttggagtttgatttgctgaaggaggttgatgcgttgaggagggccaagagtttgagggtggagaacaaagaggttaggaagtggtcttccagggactttgtttctttgttcttcttctctatggcttgcttctctcttgctctcatgagggtcatcttgtgcacttaggatttgcgattggtactaatatgtacttaacttgttactatttgtttggttttggattgagatttttggtatgtatcaattattaattattactatttattgatgcagaatgtactgttctgcttttatttgtgtaatttcagaatactaaatnnaataaagtanngnnnnnnnnnana

SEQ ID NO: 109948 - DNA, 154 bp, Glycine max
  unsure (1)..(154): unsure at all n locations
  Clone ID: PAT_MRT3847_70296C.1
tcacgancacgacaccaaatattctcnctgcgtcgtctnngtctgcgccctaaccanattcaatctcaaactcttnctcatcaanatccaaggctcgttcntgaaaccctaattcgatntaccnccncntcagnagcngagngancnatgtggg

SEQ ID NO: 109949 - DNA, 708 bp, Glycine max
  Clone ID: PAT_MRT3847_70297C.1
ccacgcgtccggattcgcgcgcctcaagacggttcttgactcagtcgacagccggttggatcaagcccgagaaatagatcgggttcgtgacaacgaacgtgctcggctacgggcagaaatggatcacgactgtgatcggtggagggctctcgagagaaagaacgcccaaatgcgattgaaagttaatgaactaaatttaaaaaagaggggacctcttattaagtttaagtgaaaaaaacaacagatattgactttttttttatcttccattgctaatgtaaggaaatgagacgactctttcttgaactatataataaaaagatcttctcctccacaccaatcacgagtttttctctattcctctcgtatattgtcgtaacgctcttaatactaggttttgaaaaagactttttatgtcatttctatttaggtttgatttggatctctttgttgttttcttttctttccgcgcctttttttcgaaatgagaaagaagatggtacactcgaattgtattatttaagtgcttattgcttgccaaagatcctacttctacaattggtaggtcactgggttattcaaataagttgtgttttctgtggttttcccatgttacaacttctgtaccaattcggtcgatccggaatggattggttaaacattttattaagggagcctggtctttactcttctgggggggattcattc

SEQ ID NO: 109950 - DNA, 774 bp, Glycine max
  Clone ID: PAT_MRT3847_70298C.1
gtgctctctccaccctctattatattataaacattttgccataacataactaaaaacttcaaaaggcagggtcatcttcagcttctctcactttgatgcaacctttaaattagtccaatttcaattattcaaagacagtcccacccacttcccatctttctctcttcttttctgtgcagttgaggaaaaaaaactatgctccaatccaacaacaagcaaagaagcttctcctcacttttcttctttatcttttctctctaagccttttgttctctctacttcattcatgatgagtttgtgttcctccaaaggaacctgttctggtgacaccaatgcacacgtttcctcttctactgttggaaattactcttctgacaaaaaaaggcacaacaacaaattcataacctttttgagaaaaaccatgtgggagtatgctttggcatgtgttggtgttgttccttgtggcggcaataacgaccttaacggtcaaaggaagacaactttggagcacaacaaggcgtggttgctggcggattctggagccgaattggcgagtgctgaccctcgatcggttcactcgtctttcaggttcagcttctgctctcaggttgaggttgagtccttcaacatgagctattctgcttctgctgccgctgctgcaacctttttgatggtgaatttggactatgagtctcaagtgaaggagttgaaatggaggagaatacagtcactggagaaaagcttgtctccggtggccaacactttgatcaggtt

SEQ ID NO: 109951 - DNA, 584 bp, Glycine max
  unsure (1)..(584): unsure at all n locations
  Clone ID: PAT_MRT3847_70299C.1
aagctcggaattcggctcgagtgagtccatacgcaatgcaattatagttcttcaagatatcggggcattgtcaaatgatgaaaaactcacccaactaggggagaagcttggttctcttcctgttcacccattaatatgcaggatgcttttttttgctatattgatgaactgccttgatccagctttaactcttgcatgtgcatctgattatagagatccatttacacttccaatgttacctgaagaaaagaagagagcttcagctgccaaatatgagcttgcttctttatatgggggttgtagtgatcagtttgccatattggctgcatttgaatgctggaataatgcaaagaaaatgggtctagaagcacggttttgttctcagtattttgtgtcttcaagcaccatgaatatgttatcaggcatgcgcaggcaacttcaagcagaactaattcgacttgggtttattcatgaagacgtttcaggttacagtgtgaatacacatgaccctggtgtgctcaatgcanttttggtagcaggttcgtatccaagggttgcgaggtttcttacaaatataagtgtga

SEQ ID NO: 109952 - DNA, 773 bp, Glycine max
  unsure (1)..(773): unsure at all n locations
  Clone ID: PAT_MRT3847_7029C.1
cttgatgcctgcgaaaagggaaacataaggtaacttaaataaacaaataaataaaatcatacataaatgaatttctccgtttgaatttatgaaagtttatctacaagacaacaactaaaacaacaagacaaggaaggaggaagcacatctatctaagagtcctggtaataaccttcaaaggatcagtgtacacaaccttacccttgcatatgcaaagaggttgtttcgggattcaaactcatgaccaactagtccccaaagcgcaactttactgctgcgccagggcttgcaatcaagcacattacaattatgaagtgaagaaaactttcagataaagtaatccacactagttactagaaggtacaaattacacaactagagttcaatactagaaacactaaaccaacaaacggagtacaaccatcacacccattgtccactggcattacctttgcaaactcgccaatggatttatgtcacagtcacaccaataaaaacagagaattagtagtttcagagcattttttgctctgttcagagtttaacaacgagatgcctgtatgaagtatgaacaattcttttaaacgcaataatccttctaaaatattcagcaggctataataacctataaatgaattattatgtatatgtaaatataccaaatcagcatgtcaaggtataaacaaaaaagataaagcgagagaattacctgatccttaatttcttctcctgctttcctagtgaacaatgcctncgactcaagcaccgggtaa

SEQ ID NO: 109953 - DNA, 401 bp, Glycine max
  unsure (1)..(401): unsure at all n locations
  Clone ID: PAT_MRT3847_702C.1
agcaatggttgttagcgcgtcggaacctgtttccctgagtggttgtttgggtaggcatccccccccccccccccccccccccccccggcggccccccgggccccccccccccccccccccccccccccccgccccnaaccaaaaaaactcgacccttccccgacagtaaattttaccccatccccataacgaagcctccaatccccatctaaaggcctaaactccccgttctatacaaatccatttccctataaaccatacgtaatagagctcccaacccccatttatttttttttccccccccaaagtccaattggcccccgaattgtcccccctatacagccggggaaaaagtacccccggtaaaattttaccgttttgcccaaggtccgaaactcccc

SEQ ID NO: 109954 - DNA, 250 bp, Glycine max
  Clone ID: PAT_MRT3847_70300C.1
catgacttctctttacatctgatacagtctctttcttttctggcttttctcttgtttgataattgatatgccacttctaatctttggtagtattgtagttaaaaaccattggcaaggacataacatattaacattagagtgcaagaagtagggcttcaatctgaaggagaataagatcatgagaaagatattcagcagtgataacttcaaaggagaaaatcagaattcgtcagaggccaaaaaggaaagt

SEQ ID NO: 109955 - DNA, 291 bp, Glycine max
  Clone ID: PAT_MRT3847_70301C.1
aggtaaactacaaagttggcatgctggtggacaggagcgattgaggacaataactagtagctactatcggggggcacatgggatcattattgtttatgacgtgacaaatgaagattgctgcagatgatgggaagggatggctgagggaaatagaccgctatggccgtgatgatgttgacaaactgtgggatggaaacaggggtgatctgacaggagagggagtggtgggatgtgacacagttctggaagggggggatcagatgggggtaccttggatggggaacgggggcg

SEQ ID NO: 109956 - DNA, 176 bp, Glycine max
  Clone ID: PAT_MRT3847_70302C.1
cctgtacctacgctgagagcagtaatcgcgttcttctctctcgtgacagacgacaccactcaccgtctgtagcaccatttatgctcatgcttcgaccgctgaacatggctgggtgaataatagttgatgtgggcgactacaaggggactggccttaagaacaacactgttgcctca

SEQ ID NO: 109957 - DNA, 162 bp, Glycine max
  Clone ID: PAT_MRT3847_70303C.1
taacaaaccaaacattaacactaaatcatttacattcccaaccttttatattatacttgcaaatcctcacggacctttcaaaaatccgccaggtagactctcaacacctccacatctattaccacattttctcataacaaaatccatcatttcaaaacatat

SEQ ID NO: 109958 - DNA, 483 bp, Glycine max
  Clone ID: PAT_MRT3847_70304C.1
caattgcatataatttcttttaaaactaaagaagtgcaaattatgggacttgaattctggaactaatatacttaacagtggaagttagtgccacaagaccaataagtatctcattcaatttgaaataacaagtaaatgccatatcaaatgaagaatccaacctttatatttttgttcatcattttcagataacgtccagtgccagtaacggtgccaccagttccaatcccagctaccaatacatcaacattacccatggtatcctcccatatctctggccctgtagtttcgaagtggatctgtaatttgtgcatataagtcttaataacatgtaacttaatttatattgcaatttctattttcaatgatgcactaaataattcaaaacagtgattgataaagtgaaggtcttataggagatgcattgagacttaacctttgtattagtcatgttatcatactgccgaaacatgtacgcattgg

SEQ ID NO: 109959 - DNA, 412 bp, Glycine max
  Clone ID: PAT_MRT3847_70305C.1
caggatggttaacaagaccatttaatagcccgtgctatgcactatcagaaattggagcagccctatgctccatgcaaaaactgggattacttcctgaatttacgttgaatgcacctaaactgaaataggacctttgacattgaataatcaatctgtgcatgacaatacaatgcccattttacaagctttcaccaacttaaaaactcccccctaaagacattaaagccttacaacttatggaaacaagtttcccaacgtatctccaaggcttgcacttatagagatgatccaacccttgtaacttgggagggaaagcagcaaaaatcgtagactgacccggatctgcaaggcgaccaacgaggatgtcaatgggaccaaggcctgggtaaaagcgctagaaccatgcccccat

SEQ ID NO: 109960 - DNA, 482 bp, Glycine max
  Clone ID: PAT_MRT3847_70306C.1
aaacgaggcatggcatcattattagttgcagtgccaccaaacacttgagaatgttgatcactgagtggcgtcgccgaggcgtggaacaatgatggacgattagtgaggtaaccaaattccttagagaaatgaaccctttctggaaaattaagcttagctttggttcctttgaatctgagagctgcttcatcgtaagcgagtgcagctgcctcagcagtttcaaaggttcccagccaaactctcgctgctttctttgggtctcgaatctccgatgcccacttcccccacggtcgttgtctcactcctctatagtgccttcttacgtttccttcacatacacacacacatgtccatacatttcaacaaaacaatttgctcccatctttgttacactattttttatttttttttaacaagttatgatatttagacatccatttttctcaaacatctatctgatactaatcatttctctttaaaaa

SEQ ID NO: 109961 - DNA, 822 bp, Glycine max
  Clone ID: PAT_MRT3847_70307C.1
ctttttctgagcaaaacattcaccttttggaattattaggttatctttgcatccgattttcaatggagaccccatcatccaccagaagagtaacaagatcacaggctttgtctgcttccaatgatgccctcatcacagtttccagaaagattgaagattctgaaaagaacgcatcaaagtcaaaatcaagggtgcaacaacaagaccaatccgcactaatagacataacaaatgattccccaatcgtgggacttgcgaatggggtaattcttggtaccccattggcgaagcagagaggaagcagaataaagaacacgccagggtctggggaagccttgctgaggggtcaagtgaagacccttttgcttaaagtggaagaggagattgaactttccaagttctcgcttgaaagcacggaacttgttgcaccaatgcccgtgaatacgcctcaaattcagaatctttctggtttggcttcggttaccaccccttctgttgttctccaacaaccactaattcctcaggtggtgaatcatgtatttgatggttctgaatctgaaaagagtgtgataagcagatcccttttatttgacttctcagagaaatctcaactttcgaatgcatcagaagaatgtttctctgagctgagttatgaggaagtagtacaagctgaaagggaaattaggagctgcttcatagaagatgatgatgcttctatgagttctatctggtcaatgcaggtcaatgcaagcacccatgatgaagatgatgaggaaatagctgaagatgaagaaggttgttattctgaaaatgttgaagaaa

SEQ ID NO: 109962 - DNA, 302 bp, Glycine max
  Clone ID: PAT_MRT3847_70308C.1
gaacattgaaaggcgtgattgattaaaatgagcataattgacgtgctaacggggtcactcggagaaatacgcaaacatagcaactttgtcaagggggattcctgtaatcaggcttctgtagcccccaaaaaagtattagaggatagagatggcgagctcaatttagatgagttaacaaaagatatgctaaagcaaaaatgaaatgtcattgataaagggggtatttccgaagatacatgctgagtgctaacggtgaataataatatcgttagtacctgtgtttagatacggataacaactac

SEQ ID NO: 109963 - DNA, 325 bp, Glycine max
  Clone ID: PAT_MRT3847_70309C.1
ttttattatctaacaaattaatgggttgggtattttatataatagggatatacaaatgaacgttgataacaataaatgaaaatctgttaaatttatacattaaaactatattaaaatgacagctatcacccgtattaccttaacttcatcaacgccttcaaggaatactatgaaaacctcaaagttaaatatcaaattgactctttgttttacagaaacaaaaatatacatttaatcttttacgatcaaaacgtttaaactcaaaatagtaaataatgaaatacttgaaacacttattcacattaatacatgaatacaactactt

SEQ ID NO: 109964 - DNA, 350 bp, Glycine max
  Clone ID: PAT_MRT3847_7030C.1
attagcttcacaacctcatacgcatggcaatgccataatcatggcgcgtggcacctctcactaaaagctctctctctctctttctctctctcatactctgaaaattcatctttctttgttagcctgcccccattgaaagttttggcctttgctatcatgaattcatgatcctttcatcgaattgatatacctctttctctctctacaacaaggtgctatgtttctacttctcttacagtggtgaactttacctatttctcttccactctctactgtttcaccaccaacaattaggtacctcaatcacattctactctctattggtcaatttccatcatcactttttctct

SEQ ID NO: 109965 - DNA, 686 bp, Glycine max
  unsure (1)..(686): unsure at all n locations
  Clone ID: PAT_MRT3847_70310C.1
tggtaccgcctgtcaggtacccggtccggnaattcccggngtcgacccacgcgtccgcggacgcgtgggtcgtgcctgtgcaactaaggtttggacatcaaagcaagcatacacatgttcattgatatcatatacaattcaacaaccaacaacggttaacattaagatcctgtgtctccgacaacacaactaagccttaacgactcaatttcattagcattagcgtctcgcaatacgcaggtcgcatatcttactcgctgcctagtactagcgcactttcattttgccgcttctctgttttcaacaaacgacaacaacctacattgccgtttcaaatcactatttatccccgaggcacaaagagagggagacatcatggtttcttctaatggactagctactacacaacctcttttttcttttggattgatttctgatgttcaatatgctgacattcctgatggtcgctcattccttggtgttccacggtattataagcatagtattcttgtgttgcggagagcggttaaagaatggaacactcatcagaagcataagtttgctattaattttggagatattgttgatgggttttgtcccaaagatcaatctcttggtactataaagaaactagtggacgaatttgagatgttcaggggaggacctgtgcatcatattattggcaa

SEQ ID NO: 109966 - DNA, 684 bp, Glycine max
  Clone ID: PAT_MRT3847_70311C.1
agagatgaatatgattatgagatggaagggagtaccttctttggcttcttcctaagtcctaaccttgacgaggccaattccattcattttgatgtgtctctgttttcaacaaacgttcacaacaacacatttcgccgtttcaaatcactacttaacaccggggcacatagagagagagagacatcatggtctcttctaatggactagctacgagtcagccacttttttcttttggattgatttctgatgtccaatatgctgacattcctgatggccgttcattccttggtgttccacggtattatagacacagtcttctcatattgcagagagcagttaaagaatggaactctcatcagaggcacaagtttgtgattaattttggagatattgttgatgggttttgtcccaaagatcaatctcttgatactgtaaagaaagttgttgatgaatttgagatgttcacaggaggacctgtgtatcatatgattggcaatcactgcctatacaatcttcctcgcagcaagttactttcattactgaagatccatactcttgatggccgcgcatactatgatttctcgccagtgcctgaatatagatttgttgttctggatgcctatgacatcagtgccattggttggcctcaagatcatccaaaaacactggaggcccttgaaatcc

SEQ ID NO: 109967 - DNA, 1713 bp, Glycine max
  Clone ID: PAT_MRT3847_70312C.1
ccacgcgtccggcatacacatgttcattgatatcatatacaattcaacaaccaacaacggttaacattaagagtatgtgttccttgactaagtaaatccaggatctaaatcttaattgatccttggtattgaataaatcttatcagaaaaatattcatttgtctgcacttacggtctccatgacctcaaaattagatctctttactagtgattttgacttttggttctattattaccgacagtcctgtgtctccgacaacacaactaagccttaacgactcaatttcattagcattagcgtctcgcaatacgcaggtcgcaaaccggactcgctgcctagtactagcgcactttcattttgccgcttctctgttttcaacaaacgacaacaacctacatttcgccgtttcaaatcactatttatccccgaggcacaaagagagggagacatcatggtttcttctaatggactagctactacacagcctcttttttcttttggattgatttctgatgtccaatatgctgacattcctgatggccgctcattccttggtgttccacggtattataagcatagtattctcatgttgcggagagcagttaaagaatggaacactcatcagaagcatatgtttgcaattaatgacggagatattgttgatgggttttgtcccaaagatcaatctcttggtactataaagaaagtagttgatgaatttgagatgttcacaggaggacctgtgtatcatatgattggcaatcactgcctatacaatcttcctcgcagcaagttactttcattactgaagatccatactcttgatggccgtgcatactatgatttctcgccagtgcctgaatatagatttgttgttctggatgcctatgacatcagtgccattggttggcctcaagatcatccaaaaacactggaggccttgaaaatcctaagggagaagaatccaaatgaagataagaacagtccaacaaatttggagggtcctgaacgaaggtttgtaatgtttaatggagctgttggaaaggaacaggtcgaatggttagatggtgttctcttggagtcaacaaacttgaaacagaaggtggttgtctgctgccatctgcctctacatcctggtgcggcaactgaagagacactgttgtggaattacgatgaagtaatgaatttgatacacagatacaattgcgttaaggtctgtcttgcagggcatgatcataaaggcggatactctattgattctcatgggatacaccatagagtttttgaagctgctttggaatgccctcctggtacggatgcatttggatacattgatgtctatgatgacaggatatcacttgttggaactgacagaatgaaaagtacagagatggattttactcccccaagttaatttgtatgacaggatgtcttcacgtttgtaaaattacctattattttttcactaatgtttgaaatagtacctatcatcttgttctagtcctacctacagggaagtttgtatttaaagttggaataacttaaattgagttggtactgttcatgaatcaaccaatttgtgcttaacatgttccttcctcttcgttttgagagaggcaacgatgcaacatgcagcactacttatacttgttttgcgtctggattgtgattgatctagtaaaattgttacacaactttgcttccttgcttga

SEQ ID NO: 109968 - DNA, 327 bp, Glycine max
  Clone ID: PAT_MRT3847_70313C.1
caagtggggccttatgtcacacaacaaatgaagacatttgaagctctgcatagactttttaataggggccttgagcttttatggacacggtttatgtcactatacccaatcatagctgctcgtgaaatgtactaatttctgatttatgactatcattctggattgggaatataatcgtatgtgtatgcgatctatctgccctgtagctctctaaaaatatatgctttctactgtcatatatgccccttaaatagaattggtaatatatcagcttactgaatactattatgaaaattaatattttcacgagttcccatcatatatttg

SEQ ID NO: 109969 - DNA, 415 bp, Glycine max
  Clone ID: PAT_MRT3847_70314C.1
atttacaccaaggaggcctaccctgttagtgtaaatgattcagttctgaaggatgagaaaaaggggtaggcctccttggtgtccctccatggcggatcaactctgaacccattggccacttcatacaaacttaggtccaacagtttcggtggtggtggggagagagtggactccgtataacttgaatcatcatgactgcctctatacatcccttctgccttggctccattgttgagctttcatgcatagacataacaaagtcaaatgctaaaggctcacccagcaagcgagacatatattgaaaaggctttgatggaggaagaagctgatccatcattaaaggagaaacacatggaaaattgagtgacgaatgtagtctacgaatatgaatttcttgattaaccaattacatatc

SEQ ID NO: 109970 - DNA, 681 bp, Glycine max
  unsure (1)..(681): unsure at all n locations
  Clone ID: PAT_MRT3847_70315C.1
gggacccacgcggccggtgcctcagacacgggttctgaagatgagagatgatgggcgggagactccagaacctcctgctgaacctcaaagagcggggaacatgcttcangggtgtagaagtgttgatgagtttgagagagttaacaagagagatgaaggggcatacggggggtggtataggggtaggggtaaaaagagtggggaaagggtggcattaaagaaggggaagatggagaaggaaaaagaaggcttcccactgacttctcttaggggaataaacattcttctttcttttcaccacccatccataggtgatgtgaaagaagtagtggtaggaaggagccttgataggattttcatggggggtgggtatatgggacatggccttaaaggagtaatggaggcgatgaagcaaccttttanccagagtgaggtgaagtggttggtgatccagcttttagaaggtgggaaggatcttcatgacaactgggtgcgttatagggggttaaagacttcaaacctggttctaaataataggggtgagctaaaaatttgtgattntgggttggctccgcaggatgggagtcctttaaaggatatacgcatctggggggtactctttggacagggggcctgagcttttttggggggaaacagggttaacaggcattggcttggggg

SEQ ID NO: 109971 - DNA, 517 bp, Glycine max
  Clone ID: PAT_MRT3847_70316C.1
cccacgcgtccgcggctgcgagaagacggaggaaggggataaaaattcaaaataataaagtattcaaatatcatcatccattcctctaaccctctttcaaccttcacagatctcactagccataccacaaatcattcattctccttccctttctaaacccctttttccaaatcaaggagcaacgggacctgctgaagatgactccaggattatagtctttagggtgttttttttttctttatgtttttgctgactatggcttatgatgccattatggactatgttttttctattctgctttagttgtttttgttatctcttatttagcaatagctagttagttggtggaactttgaagtggttaatttgcacttttgcttgaagctgactatagcttgttggtcgtgttgctgactttttttttttgttttgatgatgactccttggcatgcaccattggtgtatcaccccttatgaaatgacatgattattaatgaactctatatttctgtttgat

SEQ ID NO: 109972 - DNA, 563 bp, Glycine max
  Clone ID: PAT_MRT3847_70317C.1
aaacactctctctctctctctctctctctctctctctttctctctttctttctttcttttttttctctgatgcgtttctacaaaaacacaaccttttaactgttttttcttcttctttgcttgctccttatttcttccttcgccgaatcctagaatgtcctcgtcggggttccctggcggcggtggtgcgtcggagtttttcgccggggtaggtggtttcggcggcagatccattccggcgaccagcatgaacaaccccaacgccgccgcctccgccaccaacaacaacctccaccctctctaccgaacccaacaacaacaacaacaacaacaacaacagaacctccccgcaatgtttctagatccttcctcgcagatcgcccaacggcaaacaccaaccctaatcggtaaacgtaccctaaccgaattccaagcctacaaccaaaccaacaacaacccaaaccacgtgctctccaacctgctgcttcgtaccgttaagccccgtaccactttctcccataaccatatggacttttccgttcctgaaattgcaagccaaaacc

SEQ ID NO: 109973 - DNA, 411 bp, Glycine max
  Clone ID: PAT_MRT3847_70318C.1
gtccgagcagctggtgacatatatctcgtgcactcaaagcgtgcgacagaccagaccagaatgcctctcaactactccaaatgggacaaccttgagctgtcggatgattccgacatcgaggagcacccaaatgtcgacaagaagagcatgatccgatggaagcagcgcgacatccacgagaagcgggagcagcgaaaattgcaaatcgcaaagctgcactctgagatcgctctcaacgctgtccttcgacctcgaatccagaccgttctggacggcacgcgctcaaagggtctggaccactaccgcgccgttcagcgccgtgtgaaagagtcgccatcggacgagaagcctaacaccggcgcgcctaaccagcccacttacgacatgatgcttgctcagcttctcggggat

SEQ ID NO: 109974 - DNA, 268 bp, Glycine max
  Clone ID: PAT_MRT3847_70319C.1
tccatggattgttgaagagaatagaagcaacgtagcagcaacgggtttaattattctgctcttctttaatatttttctctctagaacactagtaaaatgtgtttactttattgatctagtgccaacgtgtactttctattgataaattgatgattcaagtttattagacatgacgacgaggcagacacagtcaaagggccggcgatctagagggcccaagcttacgtacacttgcatgcgaactgatagctcttctatagggtaacct

SEQ ID NO: 109975 - DNA, 731 bp, Glycine max
  unsure (1)..(731): unsure at all n locations
  Clone ID: PAT_MRT3847_7031C.1
gactttttagtggccgccgtgattgcctttgacgattactggggcgaagaagagagtgggtatttaaccaaccgggaacgtcgcgattacgccgattacattgagcggttcttagccggcgctagctacaccagcctctttttaacgctgccgccaatggacgaggaaacccgtagttatttccgcctttgctttttggcgatgctcaactactacgatttctatgaagccctgcaagaagagcaggtggccaacgaccgcttcgctagcttcattaactcacttgaggagcacgactttgatcgcgaaatggagatcaacaccgcccagattattcctaattaccggcaaatccttggcgattcaaagcgagccggtcaatacttgaagaattcccgtcgcgaagacgcccgcatcttagcggaccgaaagatcggtcaactctttgatatgatgcaagaaatgctacgccgcaccaaaaaggaggaattctaatgccctgcaccacaattttggttggtaaagacgccagtctcgatcacgccccgttaatcgcccgtcaagaagattacggtaacgcctttaacccccagtcctttcgggtaattttaccccaggaccaaccccgccactacgcttctaagaccaccaacttcatctgtgatttaccgggaaacccgttacgctacacgtncactcctgacgtcgatagtagcgccggtggtctttgc

SEQ ID NO: 109976 - DNA, 162 bp, Glycine max
  unsure (1)..(162): unsure at all n locations
  Clone ID: PAT_MRT3847_70320C.1
ctcgagccgaatccactcgaggtagtatcaacagatagaatgtctgcgcttgataaaaatatcaagaaccctaagccactcaccgatggagaagccgtcggcaccttcactagacaccgtcgccgccgncgccgccttcaccagagaccgcagctttttttt

SEQ ID NO: 109977 - DNA, 239 bp, Glycine max
  Clone ID: PAT_MRT3847_70321C.1
accaagaccacaaaatccgcgtctggaaaacaaccgaccaacccggtaataataataacaaccccaactactacaaatgcgtcgcctcgcttcccacgctccacgaccggttctccaaactcttctcctccgagaactacgtcgagattcgccgccacaagaagcgcacgtgggtgcatcacgtggacaccgtctccgccctcgcactttcccaagacgggtctcttctctactctgcg

SEQ ID NO: 109978 - DNA, 394 bp, Glycine max
  Clone ID: PAT_MRT3847_70322C.1
ggacagaattaattatttacgcggatacggtacaataaacgggtgcatgccgataaaaaagggacaccacctgctagctatagagaggttacgctgtaacgatttgtctaactcggatatagagactagggatactgagttttcaagagggtaggttttgtgagaactgtgggctacaccagaatggacggcgacaagtgtgcgtctaacttggagtatatacttgtgcgatggtttgaaagaatggagcatgaggctctatatgagcgagttgctgccacagagacggcggctgagaaaaaatatatgatgcaggcttgctcgagaactggcgcgcctgaatgagcacttccggctctgggttcgggacatgcttacccaggtctgtaaccta

SEQ ID NO: 109979 - DNA, 379 bp, Glycine max
  Clone ID: PAT_MRT3847_70323C.1
gaagacgacagaagggtatccttcaatatgatcagcctagatttagggatcaatggacctacccacaaccacaaagatgcatgtaacgaattcaaaagattctttatcatatcagtcaatactgaattcaagagttgaatagcaaaccttaaggcagtagttcattattagtgcttctaaaatctaaactaactacaagtgaagaaaaggttgataaaaagatctcttagaatttggtcttatggcctatctcatcttattaaggcaggctgcaattgaggcagcccccaaagaagccatagctaaggcaggctgggggtgactgcaattaaggtggcttccaacaagatccatggtcatagcaacaaaaataagcaat

SEQ ID NO: 109980 - DNA, 511 bp, Glycine max
  Clone ID: PAT_MRT3847_70324C.1
gtttttctttttcttttctttttttctttttcttttttcttttttttttttttatttaaaaaaaacaagttcttataatttattggtgggacaaaagggccagcctttgtctcaatacaaccttacaaaattactggaactggatgcaaactggaaaaaaagcccaggtttttaatttattccgcccacccccccgggattttaaaatgatgatttttgaggccccccagttttaaccccggaaaaggggtaaaaaaaagggcgccgggccccaaaattaaaaaccccctttttccttatagccccgggggggggagtttcatgggaagcaaccctccctactatactgattaccaggggggcctggggggcaagccatggggcaaaacccaatgggccccttacatggggggcttgggggggaattccaagggggccaagggctataactggccccgggggttcctttaaaagccggattattaggggtctgggaaccccccgtcacccc

SEQ ID NO: 109981 - DNA, 263 bp, Glycine max
  Clone ID: PAT_MRT3847_70325C.1
tcgtgaaccccaggggaaagcgacggagcgggggggcaagggaaagcagaggacggggaccaacaggaacagaaagaaaggaaccaccaggaacaaacggagacacaggcaacccagggacgcggcgaagacggaagcgacaacagcaaagcgcaacggaagacacgcgacggggacacaacacgaagggacaaacaccaacactacaggggcaggacagcaccaccaggggaagggccacaaagggcagagagacgagaccg

SEQ ID NO: 109982 - DNA, 241 bp, Glycine max
  Clone ID: PAT_MRT3847_70326C.1
acctccctttgttaaaagaaagcctccaagatcctcacttcttgattaattagagatttctttttttttacggtgaggaattgcttacaaggatgtatactcgaatactttgtattctttttttcttttcaaatctttataaggtgcgggcaacaaggaacattttaaagaatatctccctaatgtaagcttttatgagtgcggccttttgcctccgattaaaaaaaaatttaattttttt

SEQ ID NO: 109983 - DNA, 391 bp, Glycine max
  Clone ID: PAT_MRT3847_70327C.1
ggcaaggattgttgtttggaaaccttcactcttggcggttgttctttttccaaccatatagtttaaaacttactaatgtttaagtttcttgttaagtaaatgcatgtaaaaaaactcaatatcctatttagttaggcgctatataattattttttgcaaaaattccatttgaagaactattaaagcaacttatggaacaagctttaagatgaatttttttatgacatcttttgataaatatgtataatactaacctcatttcagtcatcaatatatgtccaatacacacaagtatgcattttaattagtagattgagttaatgtcattggcataactatccaatgtgaatgactttatgtctaattgattggagtactaggtggcataacc

SEQ ID NO: 109984 - DNA, 470 bp, Glycine max
  Clone ID: PAT_MRT3847_70328C.1
gtgaagccgtggctaaagtatatctctgtaattcttatgctacgttaggcaggtagagagcatgcatctggtagacatccaggctgggacagaggtgctaactcaacacataatcgcgttggaatctggtcactgggatatgggctactgttactggacagtaacatggtgctgggactaccattagctgtcaagctcatctgccactgtttccaatcactcgatgaaactgtgcggcattgacttgccatcgtactgaacatgatgccaagtgaacatcgacatacagtggaagagagcgtgttgcctaggatgtaaatgatgtactgataggtgggaaacatgccgatggcaattaaggacgacaggcttatggttcaatcatacaatacggggaggcaactagacaagctgagactgctgtaaatgacacgtactagtgacttctggaggtggaagtactggaggta

SEQ ID NO: 109985 - DNA, 118 bp, Glycine max
  Clone ID: PAT_MRT3847_70329C.1
ggcagcatcatcgtgtcttacatgatcgtagcgcaaatgctctaaatgaaattggaaccaagaagcataagtttttgggcgcctaatactactgggcttgggcaacaattccacttat

SEQ ID NO: 109986 - DNA, 168 bp, Glycine max
  Clone ID: PAT_MRT3847_7032C.1
tcgctggccgtcctttttttttttttttttttctccaaaacagttaccaaggggggactggggccttgcttacaacagtttacctcactctcttagttcccaccataccatgttgttgtaggcttagatcactgaaatgaggtactcaccatactgtaagaccaccac

SEQ ID NO: 109987 - DNA, 381 bp, Glycine max
  Clone ID: PAT_MRT3847_70330C.1
gtcctggattgggtctttgctgatggtccacctaagaaggcagttgtctatgataagaatcgtaaacaagattgccatgccattgtccctggggctatacctgatgaacagtattgggttgaggaagagcagctgatatacagaaaatttcaggaggagaggaggttaagagaggatgcgatacgtgcaaaggctgaaaaaacagcacaaatgaaagctgaaacaaaggaaagaactttgaaaggatttttgctttctcaaaagcatattgtattcactgaccctctcgatgttcaagcaaggagtacagtgacaatattttataacccgtccaacacaaatcttaatggaaaacctgatgtttggtatatatgtacattt

SEQ ID NO: 109988 - DNA, 266 bp, Glycine max
  unsure (1)..(266): unsure at all n locations
  Clone ID: PAT_MRT3847_70331C.1
acaaccaccacaantttnnttcttatttaaaaaacaactcttaaacctagtnctgttcattttaaagcttgcaactccaaaaacaaatactttatccaaccaatttctcactccttccaaatattccacctttaaatggctctatcaacttttttaatcacatttttactccaattattctttttttcatacacttttccaccactaattacatatacattctttcatttaaccctttataatttcaactcatccacaaattattt

SEQ ID NO: 109989 - DNA, 504 bp, Glycine max
  Clone ID: PAT_MRT3847_70332C.1
cctcttatacctgagtcctcaattcttccttaatttgaggcctcaattcttccctaatctggccagtcatgttttccctaagccttgcaacaacttcatctaattgttgttggctgatggacgtggacgagctgctgcatgtccttgatgcccttccgtagtactgagtaatagtgacacctgagcctgttgcccgaacgcgacccccatggtcaggtcgtccaatggcagtgttcagtatgtcttgccgaccatggggtacaaacgaatcctgcgttacctgctcttctaaggagtctattttatctgcaatttcctgtgcagagtcagatgtcatattgccaacagccctggtccgagcaaccttccacttaacatgcctttttattggggatgggggttcatcaacacttgctggattttcactcaacaatgcttactcttgtatcctttgtcgtttctggtctaacaatttctttctaagcaaatcatatgccccacgtg

SEQ ID NO: 109990 - DNA, 275 bp, Glycine max
  Clone ID: PAT_MRT3847_70333C.1
atggggttggattcctttttggaaggaaaaaagggaaaggaaaagggggaacaaaaccatttaaggagggaaaaaactgaaaggaaaatttttaaagacacaaggaacggcccgggaaacccccccgggaaaatgtaggcggaccgggggaaccaaccgggaatccgaacagagcccggggaagggacccacatatccctatggggggggaaatagaaatcgggaaaaaatagcgcaaaacataccacccgggagaaaaaggtgtacggccaggg

SEQ ID NO: 109991 - DNA, 368 bp, Glycine max
  Clone ID: PAT_MRT3847_70334C.1
acacatagttttattcatttgaaaatggggtgggggagtgcccctaagttaacggttgcgcgggaggaccaagaaaatcaaaccggtacctgacgggggcccctaattccatagagggaggggttgacccgggaaaaaaagaacggacacaggtgggcccccgagggaaactgataggggggcacaataaaacacggcatacgagccggaaaaataaatgcgctggggcaaaggggggctaaggagtgaactcacccacaaaaacggcggggagctcacagcggaaaaccgggggggccaaccgggggggccacctcaataaaggacgggccaacacccggggagaggcggaacgcgaaaagggcgcc

SEQ ID NO: 109992 - DNA, 319 bp, Glycine max
  Clone ID: PAT_MRT3847_70335C.1
atgaactcggggcaagtcagtgtctgatgaactgggaaaccttgaggcaagcgatctacaacgttggttgcgggtatctgtggactgaacaggccaatgatcatcccagttgactccaccatcggcagtcactcaggggacattcaacattctgtctattgcatcgaactctgatggacatatgtgcaaatgctcctggtgatgatgaggatgcatatgatgcccatactgactccgtcagtggtgacattcaacttcctcgaggatcacccatttggtatttgcatgacatgagggggcaatgttgtacacacatgaa

SEQ ID NO: 109993 - DNA, 420 bp, Glycine max
  unsure (1)..(420): unsure at all n locations
  Clone ID: PAT_MRT3847_70336C.1
cccacgcatgctcacacacagaccgttaagcatgctcacaataagaacggacacctatcttgcaatatgtatggcaacatctctggaccgatatatcccaggccctatgaacnntttctactgaccaacctactcttgctataggtgaagaaactacactcgatataaggggaggctgcacactctatgccacgccattagacttggctgaggcccgactcttatcattggaagaggctgaccatcaatactgggaagctgaagacgatggagatgcagcttgtcatgctagtggagctgcattaaggggcccagtagctttgatgcaaacagcccttgtaccatagagggacgctctagatgacacagacactgacgctgaagatgatccacccactgcctgcggtcttttcttgcctc

SEQ ID NO: 109994 - DNA, 422 bp, Glycine max
  Clone ID: PAT_MRT3847_70337C.1
tttacctaagttgaggaggagagatatttcaaaatatatctgctactactgcgcattatcctatacatgcctaacctgcctagtaatggggcatttgacactgaactcaattagcaggggcacggcgatgattgtcaacataatttataacaaggaacttcgtccaatatgtaaatctttgcctgcccataagggtacatgtaaaaaaataacccgagctcaggtgaatggaacaccgaactccttttgaatgactaatatggcggctacgagccatattcaaattcttgcactagttgcccatttgattttgaactccgttgactggtcgagcttgctgaaggcgcgacactgcatattgcacatcacttgctgatatttggcgggggagaacaactctcattcttgatgacctctgttgc

SEQ ID NO: 109995 - DNA, 1579 bp, Glycine max
  Clone ID: PAT_MRT3847_70338C.1
gcacgagaatcaaattgtatgatatttttttattttattttatttttacaataaatgtcgtaccaattataatttctaattggttaacagtacaaaaaatttacactgataatacattgaaattaaactcttactattattgtcaattacacttcaattttctatccaaaatggactggaaaataaacctatgacataagatttgtcaattacatggtattctcatcatgaattttctaagtctcttgcaacatgttgtgacccttgagcagatccgttagctcttgtccccttgaatgattttaaactaatcaaccgagcaaaggcactctttgatctggtcattattggacctccacttttctccttcagatcatcagataacgatcttacaagatcgttgaagcgtcgcttgaaggttgggaaccttgacatggatttggtgattccttgcagtcttctggccaatgcctccagttctgcacgtttgacgtccgattcagttgcagggccaacgctagactttttcagtctctctgcatcaccacccaagagaactaatttgcagaggtagtcctcttctgaggcagaaagattttcagctttgatttgctccttaatgatcaaaaggggattaacgaaccagtcaaaaaatgtctcccttggtctgtttgtgatagttagttcagtttcatcactaatcattataccaacggaatttaattttgcagagcgcaagagtccctggactaagcaatatgctggcaaaccaatactaatgactctactcccattaccagatttggcttcttctatgtcttttcttgtaattataccttcagaaaccaatttttctccaacatggaaacattccttgaataaggcatccaacagctcaaatgatttcaactcagcaatgttgttgttcttcattgaagatgtgcgagaaggagcctttcggaaggagctgggtcttaatacggaatttgaattagaagttctttgtgatgtatcaacctcttttcgaaactgaggcctagggaagcaggatccttccggcatgtcaagaatatcattgctgtattcatcataaatggccaaagctgcaacaacgtacgaaaggccaaacaagaaagaagactcctgataagcaacaacgcctgcataggcaccaagaaagaaacttgctaacatggatgccaaaattgccccagcaacagccaatggccacaaaaggatagcaagacccgcaaaaggtacacatatggtctccaggaaagggccttcacggccaataaggtcatgaaacaatcgatgccaccccttaaatagcatgtatggacccttgcatagggcaacaaatgatataactggcacatcgacaatgattccaataactgaagctattaaagcaccaggaatataaagtagcctgatctcatagtattttgcatctggaggtcctttttgtcgcaggtcatccataaccgagaagtatgaatggaaacaaacatcttttacatccctgacaaccatgcagctcttttcaacagtgctccatgtaccatcaatgaaacag

SEQ ID NO: 109996 - DNA, 863 bp, Glycine max
  Clone ID: PAT_MRT3847_70339C.1
acactatcatctaaaaaaattaacatatatgatatatttattttatttttacaataactgtcataccaattataatttccaattggttaacagtacaaaaaaattttacaccgataatacattgaaatcaaaactcttaactatattgtcaataacacctcaattttctatccaaaatggactggagattacacctatgacataagatttgtaaattacatggtattctcatcatgaattttctaagtcttttgcaacatgttgtgacccttgagcagatccgttagctcttgtccccttgaaggattttaaactaatcagccgagcaaaggcactctttgatctggtcattattggacctccatgtatctccgtcagatcatcggataacgatcttacaagatcgtcgaagcgtcgcttgaaggttgggaaccttgacatggatttggtgattccttgcagccttctagccaatgcctcaagttccgcacgtttgacctcggattctggtgcagggccaacgctagaatttttcagtctgtctgcatcaccactcaagagaactaatttgcagaggtagtcctcttctgagacagaaagattttcagctttgatttgctccttaatgatcaaaaggggattaacgaaccagtcaaaaaatgtctcccttggtctgtttgaggtagttagttcagtttcatcactaatcattataccaacggaatttaattttgcagagcgcaagagtccctggactaagcaatatgctggcaaaccaatactaataactctactcccgttaccagaattggcttcttttatgtcttttcttgtaattataccttcagaaaccaacacgagcc

SEQ ID NO: 109997 - DNA, 572 bp, Glycine max
  Clone ID: PAT_MRT3847_7033C.1
ggtgggtgccccgaagggatactgcactgcgtgaggtctactcttcttttatcttaaccaatcggctggcttttggttgggtaccttccgtgggtcggtcttataatgttcgccccccgccagccacaaactggatggattgaagccagcctacgggctggggcacgccctgcgtccgtccgttgggagggttaccctccccagactctgtgttctgtcggtccggggccgatgtttataacacttattgtgtgctagttcctatcctgttgtctggcttaggctgtgcttgccttgtttgaccgcccggatcctacacctcccccgagtggtcgtgcccggctccactttggcaacaccttctgtgccccatttcctttccttgtgcctggcttgcccgtcgcctgccttgagtgccctcgctcccccatctcctcccccttctcccccggggcggcttccccttgccgagttcttctccacccccattcttgtcaaagttccatatttgcccgtcttcttatataagttctctctcacccttatctcaaccctcttcacccccgttgggg

SEQ ID NO: 109998 - DNA, 599 bp, Glycine max
  Clone ID: PAT_MRT3847_70340C.1
caagccttcgttagggtgccaaaagaccaacgaaaggggaagcctggttctccaattacgtctttgaagagaaagagtaattggaaaatggcttcaaagagtgtttcagctgttgccctaattctggtctccctcaacctccttttcttctccatggttagctccaaccccctaatgacccctgcccttgtctcatcaataatatctaacaaaaagtgccccgaattacatgtttgcgccactattttgcctccccatcacaagccagacaagggttgctgccccctcatcgccggtcttattgatcttgaagccgccgtgtgcctctgcgccgtactcaagctcgacctcggtggaatcatctccattccccttgacattttcgtcaacctgctattaaacatgtgtggacgcaaatcgaccacctacacttgcaactgagaactgaatatgtatgacatgtatccaccatgttctgttgtgttaattagttcgtatcatggtctttgtttatcgtcttgttagtgaaagttgtttaataaattaattgtgtcctttgttcgggaagtgattccaagttattaagttgcttattgttt

SEQ ID NO: 109999 - DNA, 423 bp, Glycine max
  Clone ID: PAT_MRT3847_70341C.1
tgcattcaaaatgttagttaattttattagcttatcatttaattgttgacaactcttaaaattgcctatatactagagttatgtctaaaattattgcatttattttctttgatattttaggtctacactagtttgcttttttaatctcttagtgctattgaatctttgatgagtacatacattggcattgatatttctttgttcaggatgcatgacagtgtgacatatgtggttctaaatctggaaggggatttggtaagtatattggaaattaaaatattgagtcctatatggtttgagaaaacccttttttttttatcttcatttcctgttctcataaataattacagaaatgtcactttgtttcctgtttccaaagatttgtgtaagaaactataaattggagattttttggttccacta

SEQ ID NO: 110000 - DNA, 279 bp, Glycine max
  Clone ID: PAT_MRT3847_70342C.1
atggcacttcctccttttgttcatgtatttggagctaaagaacttgaagttgaaggaagaacttttgctcttattccaatgctacaagaagaaactggaagccttgatccttatcttccttacactgatgataaatgtccactcatgcatctcccagatattagaactaatttcatttgcaaagattacgcccacattttcaaagcaaccatatatagtgacggcaacaagttcgcaacttggatgaatagggttcaactggtttatggagacttgtag

SEQ ID NO: 110001 - DNA, 532 bp, Glycine max
  Clone ID: PAT_MRT3847_70343C.1
aaaaaaaaaaattttggtggggaaaaaaaaaaaacccccgaagaaaaaaaaaacttggggttttttaaacaaaaaggaaaaaaagcccttgggggggggcctttaggacggaattaaaccaaaggcccccccttaaaaaactcagaaaaagccagggcaatcaaccccaaaaaagaaaatccccctttccaaagttttggattgggggaaaaaaaccctttggaataaaacccccccctgaccccttggaaaaggggaaaaaaggaagcagggggagggcccccctttgcccccaaaaaccagggggggcccccatgggatttttgtttaaaaacaccttgcccttggggtacttccacgggcatgggagccaaaaacccaattggggccaaccttcctttgatcctttaaggggggggcccccggaaggccaacacaaaaaaaaacttagggcccacctttgggaaaagaaaaaaaaccgggtggggcttgggttcaaaggagggggggggggaaacggggggtgcaggcc

SEQ ID NO: 110002 - DNA, 502 bp, Glycine max
  Clone ID: PAT_MRT3847_70344C.1
agtacttgttgagagtagctgcttggaagaaaggctgtttaatggttaagattgtgatgtttgggaatgcagcagtcaaaaggagtgattgggccttattggtacaagtggtttttaacaaacattaatcattacaatgtatttttgacgccttttaagtggacaaaatctggaaccacattccctgggaaatggatctttcccaataggaggttgtgtggtcctaacaatgggtcttgaattgtgggagtcttgatgtgcgcaaatcaaacttcatggcactttgagttctccttattgacaatcctcaaacagtcttacagtttttcgacattcttcttgggaatttccccaagatttttgaaattgcttggtaatactttttatgccaagttttttttgttccacaaggcttctgtcacatctttttgaaaatgcggaatcctctgaatgaacgggaatatgtttttctttcgcctgttcgtttgttaattctataaat

SEQ ID NO: 110003 - DNA, 253 bp, Glycine max
  Clone ID: PAT_MRT3847_70345C.1
ggggaagcgtgttcattgcgccatgtaaatcccgcccttttcccgattctcggtcgcatctcactgcttttggctggtcattactttttgatcgagtcttatgtttgtcggaagagttcaatcaaatgagtttaaccatgattgatctggggatttcctttatgaggttggtcacgagccctgatgcattcagagcatctattttcggatggctggtaactggatcattttgactaatggcctggatatatgc

SEQ ID NO: 110004 - DNA, 507 bp, Glycine max
  Clone ID: PAT_MRT3847_70346C.1
aaaaataaaaattaaaaatttaatttaaaaccccaaatttatttcttaacggggggccccttcacccaaaaaacccccaaggaaaagggaaaaaggggggggccctaacaaaaaaggctagcccccaaccaaccaaaccggggataaaaaacccgaatataaaaaaggaaccccccgggggaaggcccttgctaaagggaaacccctttttgggcccccccccccctctaaatgggttttgcccaaaatcaaaagctttatggacccggtttcgaacatcgactgggggccccattccataaacccaccctggggggaccaaaaggcccacccaaaaggggcccgaaaaaacccacccaagggggctggggcaaacctttggggggcttccttaaaccccccttttatgctccacgccccagtccacccccctacaaaactcaaagcattgggggaaaaaacccccctaaaatcgggggcccggtcatttcttatgaagccaaaatt

SEQ ID NO: 110005 - DNA, 960 bp, Glycine max
  unsure (1)..(960): unsure at all n locations
  Clone ID: PAT_MRT3847_70347C.1
catgtacactgtaagaatcaataattattttatcaaattcaaggagaaaaaaaaattatcacaacagcttacgcaaaaagaaatatggttctctctgtgttacactttagaatgaagttcattttcaactgtatacaaaggatttactgctaaaataacagaatgttatgaacctatggttatttccctctgcattttcttttcgtgagcatcggcctcaatcatcatgtctgctgcatccttattcacctttaatttggaaagagcaaccgcttgcatgtgaaaaaatgtcttgggtcagtcaacatagacatgttgagcttgtatagcatctctagagcagcagcatccatttggacgccaaagaaatggaaaagattactgaacatgtatgaagacgtattcaatgtaacatttgaaacttgctcataaagaacttctatctttacaagttagtacctcatcactccctttgccatctttgtaattagtcatcaatcaaatctgatgaatagcaataagttcgtatgagaacaagcattgggcattggagaacaaggatgtagagtggtaagaggtgcttcctcaagattgggcagagttgaagtgcagcacgtattctagaagataaagtgtgcatatcctaattatacctaactgtttgattttgaaaaaatttgctaggagaaacccctggattcaacttggggctgatcttgcagaatttgatgnaatgaggcggcttattctttgcagccaggcgttgacctcaaggggaaataagtgaaagaatgagaatatctgatgnccgcttgaaaggggatcatagnnctggacccganngaagaaaaatgcgtgtanngtctcagaatgagannagaagaaatnntagtagccctattcatnngaggctggcncanntgctcnntagtgggtgccctttaatgcnnctgaatatga

SEQ ID NO: 110006 - DNA, 273 bp, Glycine max
  Clone ID: PAT_MRT3847_70348C.1
gccgaactgagacatcgtgcaagggctgctcgcaataagcaggactagtgttttgttgtgggattttgatggcttaaactctgaaggagttcatgtcaatggcaacgtaatcatatgttttacaagagttttgtttttcctttttttttaattttttttttcagatttagtacttgttatttccagttatgtttgtgtacactattaacgggatttttttcctctccttttattaaaggagatgagaatttaacaaagtgctaattagattgt

SEQ ID NO: 110007 - DNA, 344 bp, Glycine max
  Clone ID: PAT_MRT3847_70349C.1
gttctagatcgcgagcggcgcccttacgtttgtattatttatttgttcattacaacaagggctcggtgtttatttttttgcttttcaagacagagctagatgactctaattgaacgctggctatgacttttgaaccacatataagagaggcaatgacaaacatttcagagaagcatcaagcactattaaggagggggacaatgcactgtgagattgaagaagtatcaaaagagtgcttatctaacccagtgcaagtgaacgtgtgtaattaagaatagccacacaccgcagatttcacacactctcgcgaaaatatctgaaaaagagaagattgatcggattct

SEQ ID NO: 110008 - DNA, 221 bp, Glycine max
  Clone ID: PAT_MRT3847_7034C.1
ggctcgagaacaaataccagggagccaccaaccatggctttcaagctctgtgacacatgcagatgggacactgataccttgttctggcggcccgacgcggtctttctctggggggcctgtgactttaaggttcatgccgccaacaagctcgcatcgcgccacccacacgttttgctctgtgaggtgtgcaaacaggcgcccacgcatgtgatctggaaagc

SEQ ID NO: 110009 - DNA, 238 bp, Glycine max
  unsure (1)..(238): unsure at all n locations
  Clone ID: PAT_MRT3847_70350C.1
ccaccgcacncnccacaaaaacgcacccagcaccancnncaacaaccacggaaccaggaagaacgcanggccaaccncnctttttatttnggcgggggcggnncccgcaggaacacacgcncnacaaccacancccaanccnnccggcggcgacaccgaccacagaggngngggngnngggggcaaaggcagcacgcaanacgnnnggaagggancacagaaagaannnccgcgggag

SEQ ID NO: 110010 - DNA, 232 bp, Glycine max
  Clone ID: PAT_MRT3847_70351C.1
cttccgcttcttgttattctatggcaagcccaaacaagttcatcttggcttaaacttttttttcattcgaggggctttgtggctctttaacaattcaacttctgtcatgttagaagccacttaggttaacttgtaccgtccttctatcttaaaagaccccctaatcaggcgtttcaccaacttaccgttatcccttaaattgaaacctttttaaccccagtacattccctcc

SEQ ID NO: 110011 - DNA, 608 bp, Glycine max
  unsure (1)..(608): unsure at all n locations
  Clone ID: PAT_MRT3847_70352C.1
ggctcgagtcagaagcttcattatggctactcaaccgttacccttctcatcagcttcttctatagtaccaagtagtaacaatcctcacaatgatgagctacgcttcttgagcgacccgaaattcgagcgccatggcgaaatcttgttgctggtttttgttcttcttttcagtgtctttcttctggtaattgctatgttgatgtacttgaagagaattcggagtaacctccaacagaatgaagggtccaaattggaggcttagctggtgtatatcatcttatggtagatactgcagtctccaactgggatagaagttgcaagctattcaactctcactgaattgctgggttggtgctccaacactcgattgatttctaagagaaatgtaatttaatacaattctattagatattttattttaatgtgtgattagttttgttttaaatttaattttgatttacttttatttaaagcaactttaatagtaactntatctgcataggggcactcaagtaattntggtattttgccacatattaatctccaaagatatcaccttgttcgtccttctngatgagaatttgattgggtgtacctacacgaggaga

SEQ ID NO: 110012 - DNA, 334 bp, Glycine max
  Clone ID: PAT_MRT3847_70353C.1
gccgatgccaaaagactacagaagggggcccaataactaccttacgggggagcaacatctatggtggataatagggacaacttaacactgtttcctttattcacccccaaagtttttccgccgactgcattccattaaggaatctaacccgattactacagtttcacatatttatttaagctaaccctctagatatcgaggcctacaaaataaactttggataaccgaaaagaatattgagggcgatcttatttggttgacacgctcaccagtatatttgattagggaaacatttgatctctatataaaaactagatgatcgacctacatatac

SEQ ID NO: 110013 - DNA, 375 bp, Glycine max
  Clone ID: PAT_MRT3847_70354C.1
gagggcgtcagagggagagaggctcttgggctagatctggatgaacagctactagttgtgagatggggctttaatgctaagcctgatgaagcatgtccagattgcggttgctcattcatgcgaagacgtgataacgagtggatccctggtactgacactgtggactgatgtggaaggtgaggacatgaactacacgcaacagattgtcgtaggtgctagaccaaggagatggcgagccagggactacgagcccgtatagatgggggctaagaatatagtgaactccgacactaaggaacgtgagagcgttacgattgagctccgatacctcacggtactgcggatggaagatcagtcgctacatgatgacagacg

SEQ ID NO: 110014 - DNA, 438 bp, Glycine max
  Clone ID: PAT_MRT3847_70355C.1
gagccatatatcatggggtactatttggtattcgttggtgtgttcttgtggtgtgccatggctagtcacattaatggactagccatgatggatggaaagttaatgagttcctcggcaaataattatgactatggagatgctcttggcaaagccatcttgttttttgaaggacaacgctcggggaacttgcccgccacccaaagagtgaagtggaggggagactccgctctctctgatggcaaacttcaaaacgtggatttgattggaggatattacgatgctggagataacgtcaagtttggatggccaatggcatttacaactagcttattgagttgggctgctgtagagtacgagagtgagatatcttcggtgaaccagcttggttacctccacagtgctattcattggggcgcagactttatactgagagcccac

SEQ ID NO: 110015 - DNA, 352 bp, Glycine max
  Clone ID: PAT_MRT3847_70356C.1
ggggacaaagaacccgacaaaattttcattgggtgaaaaggggcaccttgccttaccaaaaaaatatttgtgtgtaaacggggaaaaggcaaaaaaaacaccgctaacagattggtgaaacaaccttcgacccttgaatgaaacaggaccctgcctggaaccccccattttttcacttccacctagccagacatcccttggggggggggataaacttcaccacagtctaagcttgagggtttaaaaacttgagggggcttacaacttcccaggggaaatcaggggtaacccttccaaaggggccataaacagctgggttgaggaacctatggccaccccttttaagggccaa

SEQ ID NO: 110016 - DNA, 319 bp, Glycine max
  Clone ID: PAT_MRT3847_70357C.1
gataacacagactcacacaaagagttacaagagaaatcatcatgggatcatcaccaactatgtatgcgtagttacctattgttgcaacttccaacatctactcaagggtggtcatgtttaacatcaataacaatacttctaggtttgttgtacaggcatcagattagcctgcagcagctgcatccgcctgcgccacatccccatttgaagctgaagcttaatcacaaccacgacctattggcatcaccataggtgctaatgtgaagattcatatgaaagaatcatactggtacaaacgcaccggttcagtggttgctgt

SEQ ID NO: 110017 - DNA, 209 bp, Glycine max
  Clone ID: PAT_MRT3847_70358C.1
tctacatagcatcatcctgcaccaccatgctatatattataaaactacgcagttttgttaggatcttaaaaaacactccgctaacagccagatggcctcttccgacagtaacatgctactaaagaatgatgcagtttatgagatgctcccactcggagttgcccatgctgactctgttgatgaagacccagattgactttaagaacagc

SEQ ID NO: 110018 - DNA, 215 bp, Glycine max
  unsure (1)..(215): unsure at all n locations
  Clone ID: PAT_MRT3847_70359C.1
ggaggacgantcttgntcnatttcatgnaagttcacaatgtctaancacaagaganacgaagtcgntccattacgaaccttgaggtcccagtgggacagttagctangcaaattgcggagnagtcatcangcatttttggggcaaacactgagaannatcccanngangcctgccaagctgtnatgactagaagcaggnngnctntgtnatctga

SEQ ID NO: 110019 - DNA, 371 bp, Glycine max
  Clone ID: PAT_MRT3847_7035C.1
cgagatcactcgaaacatcctttttaaaatgaaggtacttcttaacggccaggttacaaacatggtaggatggcaatgccatgcgtacgatatgttccctctcctaatgaacactgtctattgtgcccgcactcctgaggtgaaatgcgcaagttgtaggcttgctgtggaatcacacaacatctttggtctctataccattcctgaagagtgcgttgtagcaacaaatgtatacatccatttcgaacaatatatatcatactccataacagttaaccaacaagcttactcttatgccagatacctctaatttcattctaatgacacatatttgttcatttaatattcactcttctctttaatattttatt

SEQ ID NO: 110020 - DNA, 195 bp, Glycine max
  Clone ID: PAT_MRT3847_70360C.1
cgcagtttcttcgtttctctctctctctctctcttcagaagagcagatagacataacccattcagattaagagagagcaatcaattccaatcacaatggcaaatgcgactcaccgatgaacagatctctgagttcaaggaggccttcagtttgcgcgataaggatggagatggttgcatagggaaaaaggatttg

SEQ ID NO: 110021 - DNA, 280 bp, Glycine max
  Clone ID: PAT_MRT3847_70361C.1
aaaatggggtaaggtgttcagtgttctgtttctaccacatcttcatacgaggttctcactcccattgccagattccatgtttttggggtgtgagggatgtgaaatggattaaagttcggtgctttttgtagttttctgggtgcccatttgcatagttttgtgttttcgtctcatttgtgtggtcggtggagttggggtagttcatcaagttcgtttcacttggcaagttcttgatctcttgacgtgattttgaattgtgggcgttgctggagcaagaaat

SEQ ID NO: 110022 - DNA, 805 bp, Glycine max
  unsure (1)..(805): unsure at all n locations
  Clone ID: PAT_MRT3847_70362C.1
cttgcatgcctgcatttgaataactgtggnttctgtatattacattaatgaggactttcaaaaaaccttgatgttgcagccacaatcactgttgcagatcgttttttaaaaccttcggtgtgatatgttgataggatcttaatgtattatcaatgtactaagagttggatttgagattcatgcatacattggaagtgataaaatacttagttgcttcttgttgaactatattgctgcttgctcttgctatttggactctctcatatttataaaatactaatactgatactgatactgtttttttttttttttgttcttttcttggtgcagtgaggatactggcaagagaaggtctcaaagaattaaagattttaaagatgttgagaaggcgttgcatattccattccaagacaggattataacttgcaggccgaattggaagttagttttggttattattgtattgggaaccttagttacaattttccatcctccagctgtttataatactgatcatctatcaaactctttatcacggtatgtctgtttttctttttccatgctttcacatgttgcatcattgtattttagctttggtagtttcctgttatcatatagagaaattataattgtacaacaaattgtacttttctagaaaatgaagttttctcatggattcccaacacagcaatgtgcatcaatgccttattagaatggagaattaatttacaattattaatttgtatctgtctatgtaatatgtatacatcccttcaaagattatgtcttgtcttcttgaaatgct

SEQ ID NO: 110023 - DNA, 269 bp, Glycine max
  Clone ID: PAT_MRT3847_70363C.1
acgagcacaaacacaaacactttcaaaccaaccaacccccaaacaaccaacaaccatcacaatggagtccatcaagcagggtgccaactacatcgctgagaccgttcagcaggccaccgccggtgcttccaaggagaccaacaaggaggtcgccaaggacagcaacgcctccatcggcactcgtgccaccgctgccaaggatgctctgtccgacaaggctaacgagaagtcccacgagggcaaggccgaggtccacaaggaggctgcca

SEQ ID NO: 110024 - DNA, 1003 bp, Glycine max
  Clone ID: PAT_MRT3847_70364C.1
aagagaagaaacccattattttctcagtaagtgcacatgcacatacaatgcattaatattcctcatattgcgtacccttcttcaattccacttgagttattctgtgttgcatgatctatatataaataaaaagatgggaaatagtattcgtgatgctttcaataattctcgaattccttgtgatatagagctcgggagatctgccaccatggagttgtccacaaagacgaggaagaagttcggtgatgatggaggattttgggaagattggtatgtcacatacaccgtacatggccaaacttgttccctctgcttagtaagagattatgacaaacacgataatctcaataaggttttcttcggataaactcgacacaatccatcccgtggacgaagacaaacagaacggttgatgcacgggacgatgttgtggacaccaaggtttacttggatggcaatgcaaaccagaggaatgatcttattgttttggagtgcaagaaaaatagcacggatcatgatgaagagactaatgtggtcactgtggcacactattttgctgatagtagaggaagagcttttaacatagatgatgaattaggtattggcctttcggttgtggcaaaggttcgtgtatccaatggccaattaaatataacggtggagggtcctgagcacccccctgcatctgcattattttgcatgtttgatcaagtcaataaaacagggttttggaagcctcccatgtgccctcattgtgcccaacccagattttttgcctttgctcctgcagcatgattttgcaggaaccctaaatgcatgtttaagttgtgtcagcatcccccctcctagttagtgctttgtaccctttgtttttttaagtttcctttttttgccaataatagatagattccaaaagaggaaattaaaaagggtttttttttaaagtgccccatccagaaatttggagttgtggtaataatactcataaaattttgtggttttt

SEQ ID NO: 110025 - DNA, 211 bp, Glycine max
  Clone ID: PAT_MRT3847_70365C.1
tcctcgcgtccgaaaaaaaaaaaaaaaaaaaaagaaggaatataaaaaaatagatggtgttctaggacactttagcggtaactaagttgccctccctttcgtgctcttgttccccctggggtgcctggtttcccttgggggtccttctgttgggccttgtttccctggctggtccgctgcgctccttgggttcccttgtttgccccctttt

SEQ ID NO: 110026 - DNA, 700 bp, Glycine max
  Clone ID: PAT_MRT3847_70366C.1
gtcgctctggaaccattcaattgtgggatcgaatgagcggattgtgtgaaagacgctttcagcacccagaaggagtggtcacaaaaatgcagtggctgccatgtgggaatcagttcgtaagtggaagtgcagacaagtctctcgttctatggaacgcaagcgaaggctccactgcgtaccaatggagtggccgaagagtgctggatatcgctgtgcacccacacgatagcaaggtgttcgtgctgacatcagggtacgagattcgcgtgtacgacatcaccctcaaatcggaccagctgttcctgcaagccgaacatcttgtgtcgtgtctaagcatatccccgtctggaaagttcctacttgtgaactttgtcaaacaagagcaaatcgcgtgtgtggagattgtgactggttttgtgatagccaagtaccgcgggtttcgcgagcaacgatacattcttcgtccatgttttggaggtgaccacagcgagcttgttctctctggaagtgaagatggtgcagtgtatttgtggcagcgcgacagcggtaagcaagtgggcaagcttgatggacactcaagtgttgtaaatgtagtagtgcgccatccaattcattccaacgtgattgccagcgcaagcgacgacaagacggtgcgcttgtggtcactcaagtcactggagtaaacaaggctctaagagtg

SEQ ID NO: 110027 - DNA, 515 bp, Glycine max
  unsure (1)..(515): unsure at all n locations
  Clone ID: PAT_MRT3847_70367C.1
aggtaaattggaggangctgtccaactatggcacaaaggcactctcaaaattagtgtccgtatgtnggccttaccatagaatgacagcaggagcatatagtctcttggctgtagtgttgtaccatactggagatttcaaccaggcaactatctatcagcaaaaggcactagatattaatgaaagagagcttggactggaccatcctgatacgatgaaaagttatggagatcttgctgttttctattatcgactccaacatacagagttggctttaaagtatgttaatcgtgctttgtatcttctgcacttaacctgtggaccatcacatccaaacacggctgccacctacattaatgttgcaatgatggaagaaggattggggaatgtccatgttgctctcagataccttcatgaggctttaaaatgtaacaaaagattacttggagctgatcatatacagacggctgcaagctatcatgcaatagctattggtctttctttgatggaagcatac

SEQ ID NO: 110028 - DNA, 420 bp, Glycine max
  Clone ID: PAT_MRT3847_70368C.1
acattttacttattaggagctgtaatatcagataaaagattaaagtatctggatccaaattccttggcttggaatttcttggtggaccacaaagagtagataataaccgggtggtgcaagaacgggtgaacccggtgtggtaacctcaatctcatacgttggtgttggtcctcccacaatatttgtcacgttgatagggtccaacaccagcatcctctgattcatcgagaacgagtgcgtgttaaatgggggggccgaaaccgtcacccgcaccaaactccgaaccaacgacccacccgccacttggacccgaaccttcaccttcttaccatacgtaactttcgttcgggctttactctcaggaaacacaattcttggacgcacatcatcgtacccactttccaaatatggaggataaaa

SEQ ID NO: 110029 - DNA, 217 bp, Glycine max
  Clone ID: PAT_MRT3847_70369C.1
taatgactatgatatacatagtggttaatgaaaggaacaagagaatattgaattgtatgccacatcattagcaaccaaagtataatttaatattctcttgttcctttcattaatgactatgatatacatagtggttgtgttggtcaatgtgccattgtacatgtctttcatcatagaacattttgttgatcaatgcacaagtctttgatcatttggt

SEQ ID NO: 110030 - DNA, 461 bp, Glycine max
  Clone ID: PAT_MRT3847_7036C.1
ctgtgttctgtttatctatccagatttttcgatttcttaacggtagcatgttctcacgccttcgtcaaccttctgcgttttgccacactcattaatctataatcttgaggcttcgattcaccacagaccctgaattttgaattgctcttaaacttcaaacttcccacttttttgtttttgtttttgtcgtttggatttggtgttttcaagatcatggggtggtacagaaggggaaagctcgctcttgatcattttcgtagattggcttcaagggttacccctcaaaatccaatttttcagcgtggtgcgaggatttgctcatctgggtatttggattcaggttctaaagtagctagctttaatgggttctcttctttttgttcaacttctcagagattaggcacacggggtgttgttggagttaacaggaactttcacaattcggttctttttggggctaa

SEQ ID NO: 110031 - DNA, 202 bp, Glycine max
  Clone ID: PAT_MRT3847_70370C.1
cgcaaacatgtataccgacacaactcacgtgctcgcttatgcctaaaataccttcgatcgcgtaatcggtctctgatacttgaccaaaaccgtatactctcgcggcgtccatgtcacccttctggtcgcaccctactactaagccttacttacaaaaaactattgcccatttttccaaacgctattcctccccgaacctcag

SEQ ID NO: 110032 - DNA, 438 bp, Glycine max
  Clone ID: PAT_MRT3847_70371C.1
aaaagccatatgtaatggattggaatttggggaggggtggctttttctttttcaatggatatttcttttctcgacccatttataattacaaaaagttgtctttcctttggggcaacaaattatgacctttgggtacattttgaagcattaggggtgctttttataccacccaacaatccttttctaatgcatatggaaattaaacgacttcattcatagccttgcatgcttcctgagtttggctccagcggcttttgcattatctgggacaggcatgttgcacagtaaagtaacccttgatgaagaaatcaaagttttcttttgtttggttgaaggatcaagcttccataatctcacttcccatacctgaatgggtttgccaacatttaaaggggtgggtttagcaaagaccaagtcaccaagcacagcacttttcaa

SEQ ID NO: 110033 - DNA, 372 bp, Glycine max
  Clone ID: PAT_MRT3847_70372C.1
ggggggaaacccaaaccttttatttaaaaaaaaaagttataaaaaaagtttttacggggaagccaaagttttttttggaaaacaaaaaaaaatttcaaagggaaaaaagggggcccccccccggggcctaacgggggaaaacagaatattaaagttggcaaaagttaggggaaaatggcttgaaaggcttaaaaggtcccttttccggaaaaacccccccccgaaacccccaaattccttaaaatcccaaagcttttttccccgggggctttggccccagccctttaatttcaatttaaaaaaattttctacgggaaagggggggggaggaacccccccccccccggagaaaaaggaacccccacccttccg

SEQ ID NO: 110034 - DNA, 287 bp, Glycine max
  unsure (1)..(287): unsure at all n locations
  Clone ID: PAT_MRT3847_70373C.1
tcgannntncagcaatggtgtacgtcaaggngcagaaatcacaagcctagttcaagannnancaagtcaagttcaagannanaagagcnnggcanaaccgattaccgtggncaggattcggttgatnaatcagganaagaacagatntgncactccgaaanaccgatttgtggntcgctttagcnacaaggacattgttgcacanaatnatatctgcnagcattgcccggcgatttagttcntngctacagnagattcacatgagctgcctacgatangggnttnaa

SEQ ID NO: 110035 - DNA, 794 bp, Glycine max
  unsure (1)..(794): unsure at all n locations
  Clone ID: PAT_MRT3847_70374C.1
ccacgcgtccgcaaaacgatcacacgcttttaaaacttgttcttttcttccttccttctctctgttcctcacatcagattctttttcttttcttttatttctctctgcaaatcagattgtgcaatgtcgatgagcttcttggtctgtgatcagggatatcattcttaataaaaacaacaaccacactttctccgtttctcgtggttcatgctatggcggcagaggcggctttgttcttttctgtggcatcagtggtggaggacgtgcttcagcagcacggtcctcgcctcaaagatcttgatttggaatctaggaaagccgaagaagctgcatcaagaagatatgaagcggcggggtggttgagaaaaatggtgggagttgttgcagccaaagatttaccagcagaaccctctgaggaagagtttaggcttggtttgaggagtgggattattctctgtaatgttattaataaagttcaatccggggcggtacccaaggttgtggagagtcctgttgattctgcattgatccctgatggggcaccattaaccgcatatcagtattttgaaaacgtgaggaattttctggtggctgtccaagaaattggaattcctatctttgaggcatctgatctggaacaggaggaaaatcatctaggattgcaattgcgtgttggccctgaattcttacagtgaatggaaaatgagcggntcaatggtggtgtgaaatttggtggaatctcaacccactgtgacttcaaaatctttgtgagaaaaaattcggatccatttact

SEQ ID NO: 110036 - DNA, 287 bp, Glycine max
  Clone ID: PAT_MRT3847_70375C.1
aataaacatgattttttatagatgacaatcattagacatcatgtcctggcatgatttgggacaatatttttcctagagcattatgaaaatgggtaacatatccaaattctaagagatacataggatacatatgatgagcgatatgatatgtgatgcgctgcatcatgctagaagaactgaagtgctttatgatgcgcgtcatggtgcgtgacacgtcagagcataaattctatttataaaggtgcaccactgatagaaccgaccgtgagtctttacttgcggctgga

SEQ ID NO: 110037 - DNA, 488 bp, Glycine max
  Clone ID: PAT_MRT3847_70376C.1
ttgggggggggggggggggggggggggggggggggggggggggggaataacaaaaatataaaagtaatgcgggactgagtgtgccgggtggccggttaaaatgcgaaggggcaaaagaagaggacaacggtagggatacaaaagaaggggtttaatatctggatgagcacatggggaaaaatggaagaatgcaagcgagaaaatgaagctagccttgatcgatcatggggagggggactttgaggcggatagggcaaagtgtcgagtaataacaaatagcttaagggaaagttttatataaaagggaagggctacataatccagtgagaaggcctccgtaaatatttgcagtagggattttcaaaataaaggatggaaattcactgtactagcacaaggaaggcaacgaagtgtattgatgagggtagggacgctaatggtagttggaacgaggcaacgagcacatattttagtgagtggaattatgg

SEQ ID NO: 110038 - DNA, 149 bp, Glycine max
  Clone ID: PAT_MRT3847_70377C.1
aaaactgcatcatcctccaaagccgctccgccagtaccggctcggcccacccatccctgcggctgcccaaaacaccgaacgggtcgcagaagacgacacacggtgcctacccttactatattagagggctctcgtatactgccatacct

SEQ ID NO: 110039 - DNA, 398 bp, Glycine max
  Clone ID: PAT_MRT3847_70378C.1
gtgtctttggagattttttttttgtgtgtttgttgggataatgactgtggtttggtgtgttttttttttctttgctgtggaaaaaaaaaggtttggttggcttttgggagaaaaagaggatggtttatttccccggccccccaaaaaatccctccccactagccggggaccaagaatttttccccggggggccctaggccttacaggtggacccaattgccaaaaaaggtggggggaccttattcttccccccagggagaaaattttttttatttttggggcccctagaacccttttgtccccagggtggaagggggggaaatatcaaccctccccaaaacaggtgtagtgggcccacccgggcccaccaaacccggggtgtagtggggggtggcccc

SEQ ID NO: 110040 - DNA, 362 bp, Glycine max
  Clone ID: PAT_MRT3847_70379C.1
gggactcattgttctactcccaggttttttacaaaagcaaaatggtcaatattgtgtgcattgttgctggatatgtggggggtcctactatggcagtcattgcacttaagtgcccatccattgaagttgctgatgttgatatctctaaatcccgtattgcagcctgtaacagtgaccaccttcctatctatgaacctgtctcttgatggtgtagtgaagcaataccgaggcaagaactctatacttcagcactgatgttgaaaatcatgtcttggaggctgacataatgtttgtctctgtcaacaccccaaccaaaactcacgatcttggagctgttaaagcagcacatttgacatattggg

SEQ ID NO: 110041 - DNA, 174 bp, Glycine max
  Clone ID: PAT_MRT3847_7037C.1
ctctctgtgtgcgcacttccggtgttcgatgcttctgcttcgccggacagttctgcgacggatccaactgtcaattttccggcatggactccgatgattcctcactcggatccatagctcatcacagactgcagaccactttttggttattcttgttccttgctcaacagatcc

SEQ ID NO: 110042 - DNA, 187 bp, Glycine max
  Clone ID: PAT_MRT3847_70380C.1
cttctcaaagaagcctttcaaggaagcttctcaaggaagcctcacgagaaagcttgtcaaggaagctgtcttggtaaaagtgccctcctacattcgttaaccgttgggatcgtctcgaaatttagtctgaaagttcagaggacagatgtccacgatctgaccgttgcgatctgtgatatgtcttcgg

SEQ ID NO: 110043 - DNA, 352 bp, Glycine max
  Clone ID: PAT_MRT3847_70381C.1
gggacgcgttcgtccacgcgtccgtacggctgctagaagacgacagatgggttcggctgcgagaatactacagaagggttcgtttgctagaagactacagaatggtacggctgctagaagacgacagaagggtacggctgcgagaagactacagaagggtactgctgctagaagacgacagaagggtacggctgctagaagactacagaagggtactgctgctagaagacgacagatgggtactgctgcgagaagactacagaagggtacggttgatagaagaccacataagggtactgtttctataagactactgaatgtttcggttttattaagtctacagatagggttt

SEQ ID NO: 110044 - DNA, 412 bp, Glycine max
  unsure (1)..(412): unsure at all n locations
  Clone ID: PAT_MRT3847_70382C.1
ccccaacctactcctttgtagttacaatttcattttagcgttttttttctactcaaaattagaattagaattacaacctcggtaaaatagaattactgggtatgtgtgtgctacttgcaactttgagaactcttgtgatttttcttcccataaggtatttgtgaaaatgctgtaatgaggaaaattgttggatagggttttgtttgtatttctgttgttgcttgttaaatattgtatgagtagagtatgactctgtgttttcacttacatggatggcttangaatggtggaactttgttggaagagtggtttttaataattgatttggtaacatangtttgnggtgggttatggttatggtctagccaaggggaaaggaagaaatccgganaacatgctcttatatatgtgc

SEQ ID NO: 110045 - DNA, 380 bp, Glycine max
  Clone ID: PAT_MRT3847_70383C.1
cggctcgagctcgagccgaatcggctcgagacctttttggatggcatttcattgcactgagaaatgagattgggcagaaatcatataaccttcgtgaaagaacaccatttatgtgcgaaaaaggatccgctactgattctttataaatgcgctgcccttgtgagtgccactaaaaccgctatactcacttaagggagcattatgacgacgcacaatgaatctaggtctttataagttgactgccgctatgatctccactaaaggtggcgtgcgttctttttttcagtcaaaactataacattttacatgcctctcttatgtgtgctcaaataggcgggttggtttcctttattaataaaactgaaccttatttttaaaga

SEQ ID NO: 110046 - DNA, 987 bp, Glycine max
  Clone ID: PAT_MRT3847_70384C.1
ctaaatatgcgtaccttatccaagttgaattgtgatccatgggcatatactatggttgtccttcttctcctccacacaccgtgagggctggctggtcagaaatgagaatggcttcagcattgtccctgcatctctcaacccctttctcccaactccaccctagtctcaaacctaaaaaactccatgatttccccactctctccctctccaaacctcgaaaactcagcgtgaactccgtggacatctccaaagaagacacgcccgtgaaacccgaatcggagctggagaacttggggccgcggcggctggaggagaagttcgcggttctgaacactggaatctacgagtgccgctcctgcggctataaatacgacgaggcagtgggcgacccttcctatcccttaccgcccggctatcagttcgagaagcttccggatgattggcgctgccccacttgtggggccgcccagagtttcttccagagcaagagcgttcagatcgctgggtttgctcagaaccagcaatatgggcttggtggcaattctctcacttcgggtcagaagactattcttatatacggcactttgttgctcttctttgcgctctttttgagtggctacttcctccaatagtctgtttctaactattcatcctattaggtaacctattctattctatgtatctgcaagttctactttcaatgctttatttgttgctatgtatctacgtagtcactagtcatcccaagaaacctggaaggtgcctctggttgttgaaagtggaaactaggctagccgaagcttttcttgctttgctaaatcatggatgagttatacaaatcttaatatttcttatctctctctctctctctttttttttcctatgtttttcttacctttactgttatctttttgtatctcttgtgattgtaaaaatattggtggaatttgttgaataaaaagcaatttctcgttatagattatccct

SEQ ID NO: 110047 - DNA, 283 bp, Glycine max
  Clone ID: PAT_MRT3847_70385C.1
ggctactctagcaaccttggctgctgttcaatctactacgatcaatggccttgctggaagatccttctctggaactaagctctctttcaagccctctcgccacagtgccaaatccaagaacttcacgagtggagctcgggtaacataatatggagactagagtgagttctttgatttttaggatctgggctacactacagggcagtgggactagtatggctcatatgcaccttcacccctctaaccttttctaagcaatttctccaagacattagctgcttca

SEQ ID NO: 110048 - DNA, 738 bp, Glycine max
  unsure (1)..(738): unsure at all n locations
  Clone ID: PAT_MRT3847_70386C.1
aacaactgcaactattacntcattgtctaaaaaaccttctctcaccaaaacttacaacaacaacaaaaaaagaagaaaattttagaacaatggaggcatcaaagatgaagtttttcttggttttggtggtttccgtgttggcgatggcagcaactggggtttcagctgctgaggcacctgccccaggtccttcatccgatgccaccaccctctttgtgcccactgcttttgcttctctctttgttcttgcatttggctttctcttctaattttccaacaaccctttggttatttgttacatatataatgtgcagaggtggtggttgtgttttgtgtttcgttcttcacttttttttccaactcaacttgagaagtggttggttggtcactactctcttgtgagtagaagggttttttttttttttgaggatgcattgaattggagatttggagtgaggaaagatgacaagtagataacactatataggatcattttgttgggtttttcttcttcttcgttttctatattattatcatcatcattcttattcttatgtaacaaattcattattaattattcctcattgtactttttttatgggttgtgacaatgtaatcttattgtgatttgtttggttcccctcgtttgacttgcttttatggttaagcttcttttttattagtagtactttttttgtgagtaatagtcaagggtgcacagtttagcgttgttctttc

SEQ ID NO: 110049 - DNA, 439 bp, Glycine max
  Clone ID: PAT_MRT3847_70387C.1
ccacagaacaaaaaaaattttttttttcccccccggaaagaaaaaaaaaatcccgacgccgggcccgtcgcgtttgggttttcccccccccgccttgatttttttctgtgcgcggccctgccataccataaagggattggctccgccccatggggtggaggaaaatgccgttccgctttccctcgcgacgcgaatgccatgctttgattaatggaacacccccccgcgcggggcggggcggtttttggacggtcctccttttcctttcttagttacttgattcgctgggccggtcggttggggtgagcggagtggtttcactcaacggcggggcggcggttctgctctccaccaggggatggcgcaacccagaacatgtcatctaagcgccaggccagcgccaggccccgaaccaaggccgggccgctggcgttttttt

SEQ ID NO: 110050 - DNA, 413 bp, Glycine max
  Clone ID: PAT_MRT3847_70388C.1
atggattcgcaggtgttgcttggtgttgcactttcatccgtgggtggtttcagcacttccatcggtgcactggtcgtaatccttagtaaagctgggagtttgaaggtgcttggactgttacagggttttgctgctggtttgatgctgagtatatcattctttgatctgactcataatgccttgaactcacttggcttcctgagaggcaacctttggttttttgctggtgtcatattctttgctgttgttgccaaatttataccagaaccaacagttgctcctccaacttcagatgaaaagaaagttgggaaacaaggaaacaaagacatcatgaaaaggcgtcgccgtcaagttttaatcagtggagttgttacagccataggtataagtttgcataattttcagaaggaatg

SEQ ID NO: 110051 - DNA, 445 bp, Glycine max
  Clone ID: PAT_MRT3847_70389C.1
ctgaccgaattcctatttataggtgagacgactgcataagatgcattacttgtggcgaatgagtctcctatattattatagatgataacagatcgccctgagtctgatggtgagacatgcattgctactactatgataatcgaacatgaagcgttaatgatccattaggatgtcttgaggtctttgccattgtgtattctatggagagtgcctgctagaccatctgactctaggtggaactcttggagacatcattacgcttccctcctttacaccaagaactccagcaaactctattctaagtccattcttcctacctccatacataatcccactcacctcattgagactgtccaaatcagatacccatcgaaaagatgctgccatgcttgtgaacgaaattgcacttccaccgataccactgctacctccattatagagaatt

SEQ ID NO: 110052 - DNA, 386 bp, Glycine max
  Clone ID: PAT_MRT3847_7038C.1
gtttctcgtggggaaattttgatcaaccgggatcacaggatgccgcaccttaaaaccggaaacaaatgcattcgatgcttgatttcaagaatctctaaatttcttcctactattttgtgtgcgattgattaagggaaagaaaattactctctgagctggccacagacttcgtgaatcattctcttttccactgttagtcaatttgctgaacactctcctatttgatataggacttcgagtcagattgaaactttctctgtctcttgctcagttctatgttcaatctcaagatcaagctggtgaaagcttgcattagtgcatccactctactatttggtgtaggacttcgtgggtagacgttcctatttctcttctttctttcactc

SEQ ID NO: 110053 - DNA, 693 bp, Glycine max
  Clone ID: PAT_MRT3847_70390C.1
gctttatttgaatccctctctctcctttccaaatggccagcgttgaggtaattcaaacacacagttaaaattcgttgtttataattttgcctttctttgtacatttctttattagtccacgtgtgtagtagtagtagtagtttatatggttcctacatgcacacggtgaaactcaacactttagtaactgatcgaatataaccgtttcttcattttcttactttgctttttattcattattgatcaaagaatcagtttgttttttattacgtgcgatctagcaagttatatttacgttgcatttgcgatcgtactagctagtcttatccgcacttcgattttaatttctttttcggttttcccgatctatactatctttgtttttgttgctgcggtgtttgataaccatcattatatacgaaccataaatcatatattattgcggtcaaccacttaaagtacacgaaatttgaggggatcaacgagtttcatagctttcttgatcattggtcaattgaatatggatcacgaaccattttccagttgatcaatatctgaaatattcatcggtttgtggaattggattacgattagcagttctatgtggacctcgttctttgttcttgtttatataatcacaggtgcatcatcagaagcaaaaatgattgatcaatttattacgtaaactttttt

SEQ ID NO: 110054 - DNA, 569 bp, Glycine max
  Clone ID: PAT_MRT3847_70391C.1
ggctcgaggtttgtaagtactgagtacacacacgaagccaaagccaatccaataaacaacactgttcattattatcatcatctgcacaaaacccgcaacaactctcagtcagagacccgtgaatcttcttgaattccaattcgttaccacgaaaaatgaacgttcccacgagaaaacgccgcaagaagaacgaagaaggatcaagatcaatccagaagaataatactcagaagaaagaacttaatagcatactcacttcgctcttgttcgttgatgcaaaagagaaaaagaaggaagacatgctcgatggttactacagcgaggtggaagaatccaataaccccaaaaagagaaagaaactcgccggcgccggcggtaattcagtgagccaccggcgagtttgggtgaaggagcgttccggagcgtggtgggaggagtgtaacaaacccgaatttccggaacaagagttcaaaaaggcgttcagaatgggaaggctcacttttgaagcgatatgccaggagctgaattcggtgatagcgaaggaagacacgacgctgagaaccgccatt

SEQ ID NO: 110055 - DNA, 410 bp, Glycine max
  Clone ID: PAT_MRT3847_70392C.1
ggctcgaggagttggggagtcgaaattgtgagcacagttatcactttcagtgtataaaacaatgggttgcacaaaaaaatttctgcccagtatgtaagcaacaagttgcggctcgacactgagtgactcaacccttctgtttttttggacagcttccattctcatccataaatttgtgtatagtttttcatatccaatacaagcaagagttttcattctttgctgtcaattatcatttcatctttcaaaattcctgcatcctctgcgaggaatcggcaattatatgttatcgagtaaaggtttatattcgggctgagacctttgcatattatacgcaagagttgccttgcttaagagcagttattattatttttttgttttgggtttttaatgaagttgtgtctgtgacg

SEQ ID NO: 110056 - DNA, 1974 bp, Glycine max
  Clone ID: PAT_MRT3847_70393C.1
agatttcatgcccccaagtccaagtccaagtcccattctcttctctctctctctgagcaatgcctgtcacaaacacaacaacaccaactgtggcagaacacatcaaatggagaagacccagaaaccaattcaaccaccatcagcaccccatttcagaaaccgatccaaaccctcaaatcccttccattatccaatccactaggtgcaagtctaccatttcctccttgctcctctccactttctccaacaacacctcctccaacaatgacactcccaccaccttcaatgccactgcccatagcaagaaaaaaagcaacttttctgcatcaaccttcagagggttggggtgcaccgccggagcgtcgcagcaggtgtcggtgccggcggtgattcgctcctccgccgtccaatccaagtcccattgtcttcactctctctctgtctatttcctgccacaaccatacctgccacaaacacaacagcacccaccgtatcaggacacctcaaaattggaaagcaaagaaaacaagtaaaaagaagcacaagagaagcagcagcagcagcaagcacaaaactttccatcccctaggtgcggttctaccaattccagcgtgcgtgtattttcaagctgtttcgtccgtccctctcaacagtttctcctgcaccacccttcaataccgctgctgattgcaggaagaaaacaagcattttgtctcttctgcaagagggaaaattgatgtggataagatcactcacagggagcgatcatcgtatgtgggaaggcgcactgaaaccttcacttttctggacagtactgatcctgacattttcacaccacgctctgcctctgactcttatggaactgcaacatactatcgtcatgttagagatccttcctctgatggttttgctgagataatgatgcttcaagggagtctactaatgggtggacaactaaattcacatgatcatttcaaagactggagacttgatgttgataacatgtcctatgagcaattgctagagcttggtgagagaattggtcatgtgaacactgggcttaaggaagatgagatgggacggaacataaggaagactaggcttcaattttgggatgatacatcaaagcaccaagtagataaagagtgcagcatttgtcaggaggagtatgaagcaggaaatgagttggggaggctaaattgtgaacacatctatcactttcagtgtataaaacaatgggctgcacaaaaaaatttctgcccagtatgtaagcaacaagttgcggctcgacactgagtgacacaaccctactactgtttagcttccattctcatccataaatttgtgtatagttttccatatccaatacaagcaagaattttcattctctgctgtcaatcatcatttcatgtttcaaaattcctgcatcctctgcgagaagtcggcaattatatgttattgagtaaaggttttttattcgggctgagacctttgcatattatacgcaagatttgtcttgcctaagagcagttattttttattttcttttgggtttttaatgaagttgtgtctgtgacatagtagggtgttcttatttggaatgcttgtcctcaactatacccattttggatcctatggtgataagtttttgttggctgttgctacttgcttgtcaattatcatttcatctttcaaaattcctgcatcctctgcgaggaatcggcaattatatgttatcgagtaaaggtttatattcgggctgagacctttgcatattatacgcaagagttgccttgcttaagagcagttattattatttttttgttttgggtttttaatgaagttgtgtctgtgacgaagtagggtgttcttatttggaatgcttgtcctcaactatgcctatccattttgaatcctatggtgatagtttttgttggctgttgcaatatctatattatgtaacttgtttatggg

SEQ ID NO: 110057 - DNA, 243 bp, Glycine max
  Clone ID: PAT_MRT3847_70394C.1
ataaatatatattgctgattagaattgagtttgttgatccttagaaatgtagtaaattagtaattctgaaaggatcaagttgttacctaggtttattctaacaagttttgttttcaaccttttgattgtcttccatagttccattttttctctctctttttttttttatttgaaatgtaattgccattactcatttgtatagactcacgtgcctctctttgtcatattgttctctatataatt

SEQ ID NO: 110058 - DNA, 1429 bp, Glycine max
  Clone ID: PAT_MRT3847_70395C.1
cacaagttttcttgaaccatgtgcagtttctttacctagtggactcatgtaattttaatgagcacaaggaccttcccgaagacaaaaatgacaaccaacatggacggacttttgccaaagatctttttgtgactcttctcaatctttcactggcatatctgtccttgatctttctgagaatagaatagcaggatggctttctgactttaacagaagatttttgagtggttcacatatgtcttttggaaatggaaagtccttgaaactgttgcgtgtactcaatctgagggaaaacaatttaggaaaagatgatgtagaaagtcttagatatgctcttcaacatgtgcctaacttggaggagctggacatcagtggcaattcaattgaagatgaaggaatcaggaatttaattccctattttgttggagcatctgaaacgtgtcctcacataacttgtttgaaattagagaactgtgatctgtcctgtgttggagtgaataatctcctacataacctttctactttcaaaggaccattaaagtctctttctattgctgagaattaccttggcagacaagtagttgaagcattgggaaatttttttcacaccccaatcgaagtacttgacattgcaggcattggattgggttctgacggttttcaagagcttcaaagtctaataaaagaggagattaagctggtgaaaattaatataaggctccacaactagttgatgtgaatgcagcctgtaatcttatgccaatagaatcactggccatcatctgctgtgcattaaagtttgcaaaaggtaatgttcagcaagtggacttgacaggacatatatgggactataagccagagcatgtttccccttacgctgaatttgtacataatggattacctatattggttcttccatcaccatcagtctctgctgctcctcacgaccatgatccttagaattaaaattttgtgcgatttcaatttatgttgcatggcatatgcagttaatagttctctttgtttcttccttcctttatcattatgtatgttagcatagtttcatacataatgcttgcaaacattttattggctgtacagcaaagttagagaagggaaatttaacttgtgttcatattgatcaatttttcttttgtgtgtttcaagcaatgtgtttttttaacctctatttttggggttgtttttcttcctagtttcccttgtgttttgtaatttaatgtagtttgtagttcattagatgctgtgcaacagaacatggacaatctggtgtatcaactatgaagatgcaacgaaaatacttgtttggggttacttttgtatgaacagttgtcatagtggttcggaaatctactgttcatttctattggaaaaaaaaaaaaaaaaaaggccgtccagtctacaggatgcc

SEQ ID NO: 110059 - DNA, 628 bp, Glycine max
  unsure (1)..(628): unsure at all n locations
  Clone ID: PAT_MRT3847_70396C.1
ggaaaaaaatgatcaatatgtacaaaagttaaatttcccttccctaactttgtagtacaatgaaccatcaaggcatgatggatcagccaataatttttttgcaagcattatgcatgaaactatgctagcatacatagtgataaaggaagaaacaaaaacacctattaattgcatatgccatgcaacataaattgaaatcgcacaaattctaattctaaggatcatggtcgtgaggtgcagcagaggctgatgatgatggaagaatcaatataggtaatccattatgtacaaattcagtgtaaggggaaacatgctctggcttatagtcccatatatgtcctgtcaagtccacttgctgaacattaccttttgcaaactttaacgcggagcagatgatggccagtgattctattggcataagattactggctgcattcacatcaactagttgtggagcctgggacaagagtttagacaaaaatttggcagttgcaatcccaccacgatttttgcttatattaattntcaccagcttaaccttctcttttattagactttgaagctcttgaaaccgtaagaacccaatccaatgccctgcatgtcaagtacttcgattggggtgctaaaa

SEQ ID NO: 110060 - DNA, 424 bp, Glycine max
  Clone ID: PAT_MRT3847_70397C.1
cgctgacgtgcactctatttatgcagctcacttacccacataccttccaagttttgctccacaaccgcttctggaatcgctacctcaatggaaagctccacctgtggtacacgcgatggcgtagcttcttattgaaacactttgtgctgccaaccattttgctgatcggacggacatactgacataatggcggcaacataatctaatcaaatcttcagatgtcggatctcggtactttgttgcctcccttggtgggaaagatttcactatggtgatagagaaagaagcggactattgtggcgatataactataggcccctacctggatctttatgaccttgtcgcggtgacaacaatcgcttgcactgaccatgggatacgctcaaagactcccaactttacgatcttaggcgatatggacacg

SEQ ID NO: 110061 - DNA, 369 bp, Glycine max
  Clone ID: PAT_MRT3847_70398C.1
aaaaccccgcccgccccttttgggggggaattcttttaagggcccggccctcttttccttttaaggctttttttcgggaaagaacaaaaaaggccggcccctaggttcttaaattcccttcctaacgggggttagttttcatttccttgggggggctcaaccccccaggtcataccgcgggccttttcaggccccaataactagggggggggtaagttttttgggggggggccccccaacccccttctccgcgggggagagaaatcttccctaactttttggcccccccaatcttccccccacggggggggcacttttttcccttcccccttggccccccgctcttggggggtttcaaactcttcaaat

SEQ ID NO: 110062 - DNA, 200 bp, Glycine max
  Clone ID: PAT_MRT3847_70399C.1
aaaggaaaaacaatataattttatttatgggggagggtgaacgaatcataataacattgatataaagcaaacaaagagggatataaacattgaatagaaactttttattcttaaaagtcaatggaaccattcgtgccttttactaaacaccaggcttcaaataggcccgattctatatcagctctctggagatacttgga

SEQ ID NO: 110063 - DNA, 424 bp, Glycine max
  unsure (1)..(424): unsure at all n locations
  Clone ID: PAT_MRT3847_7039C.1
ntgctaaaagctttagctantaagaaanaattacgncaggacgagagcggggattggtctagagggggataatggaactaggcttggataaaatctgacgaccgaggcggtaatgagggggggaagtattatgatagggatattaaaacccccccataagataatattgagaagatatgtgtcaatggtaatacaaacaaaagaacgtgttaacaatgaagatagtgatatactaatatgcatgtcgtacatgctatagaagccagatgtcaaatgataaactatatggtcacacaaaaatggacaaggatacagaaaatatactttggcttagaggtaatacaatggtatcgagacctgtagagcatagaatatacaagcacaattagttgctgtttaaggaaaaaacatttatgaacataag

SEQ ID NO: 110064 - DNA, 223 bp, Glycine max
  Clone ID: PAT_MRT3847_703C.1
gcttcttagagacaccaacagcttttcccttactgtcagtaattttggtgtgttgaccatggacacgaatgcctcagtgttgcctaaaaccacggtggtttctgattctctagagtctctcataatcattcttgatcctctttataagagcattactatcatcttgagatattttgacatttctgtaattcttctttctggtaaataaccagtcttgtgattt

SEQ ID NO: 110065 - DNA, 386 bp, Glycine max
  Clone ID: PAT_MRT3847_70400C.1
ctgccataaaggaagaagagaaaattagaaaaagctaagaattcaaaatttttcagataagaaagaaaaaaaggagtgccgaagctgacgatagtttaaagtttaaacttagacctgcacccttaattaaaattaaaaaatttaaactaggtactctaaataacgtgtctaaagtctggcccacaatgctggtgatgatgatggatcaagaactcatccccaccgttggatacgccgaaaattgaactttgactcatcaattgctggtgctgctgtcgctgcagctccttctgccgcctcagctccaaaaccttccgatgcgaattcgaatgcttcgttgacatgaacgttggactcgccgccggtcggtactccggcaccagcct

SEQ ID NO: 110066 - DNA, 281 bp, Glycine max
  Clone ID: PAT_MRT3847_70401C.1
ggaggcctatgcataactctgactttccatatttatgcgaccctctttaccgcaaggagctccatacccattttgcctgaacattgcctgcgctggggaatgagcaaatacgccaatgacgattcacacctttaaacaatagtagcaacatcatcaacattcttttattcagacaacactgttgttataacccatgtttatccaaccctgacctccttgctgctccttacattgaaccatctacaatctaaaatatgactgatccatcttatcaaagtact

SEQ ID NO: 110067 - DNA, 187 bp, Glycine max
  Clone ID: PAT_MRT3847_70402C.1
tcacgaccttggcgatatctcccctggtggatttagatcttgcctacacaacaacatcaccgtgtgatctgtcaactctgctttgcatgaggcaggcgccaaggtatgaattattattctaggaaatcccaatgatggagttcttacaaaaatgccattcgtaccaacaaaatactataagccatcc

SEQ ID NO: 110068 - DNA, 201 bp, Glycine max
  Clone ID: PAT_MRT3847_70403C.1
ggtacgtgttaccctgcactggttcttctgtttcgctgcccaatcaaaaatcacctagttaacttcttctgtgaattcctttttctgaaatgaagttagaaattcttgtaatcaaaagagaaatagagaaagatggagctgtggaacagagcccgaggctttgcggaagaagcagcgaaacgatcacagtaactgtcgttg

SEQ ID NO: 110069 - DNA, 272 bp, Glycine max
  Clone ID: PAT_MRT3847_70404C.1
tcggtttacaggtgggattcctgaaaatacacgcattgcattggcctgcgctatgaatagttcttgtagggggcgtgccaggtctgacacttacactatctgctctcaagactgcgagtcatggactcctgctgtggcaaaaccgatgactagtggaatttatccacacccgtgtgctgatgcatggagcttggaatccatgagagcgaccggcgtacactagagaatcactggcgttactggagggactgccaccccaatgcatggtggtc

SEQ ID NO: 110070 - DNA, 250 bp, Glycine max
  Clone ID: PAT_MRT3847_70405C.1
cgacccactcgtccgagcccgtcaagcatggctattggtgcatgagaaaaccacgaggggtctcgagtacgaactcagggacactgttcaggccgactttcaacggtctcgagatctatctggccgacgttgagactccctggctaaacgtctgtctgaccgagctcttaccgttccagagcttcaagggggcccgcatcacctgctgcctccacatgaccatatataccgggcgtctcattgagaccct

SEQ ID NO: 110071 - DNA, 479 bp, Glycine max
  Clone ID: PAT_MRT3847_70406C.1
acgcggacgcgtgggcggctgcgagaagacgacagaaggggatagaaagagaaaatgaagtcggtgggtagggttggcggaggagaatcagagcaacgtggacattttcagatgccactgcactatccaaggtacacacaggctgactatgaaacaatgcctgagtggaggcttgattctttgctcaaagagtacggcttaccaatcattggagatcttcatcaaaagagaaactttgccatcggagcctttctttggcctcactgaacctcctttgtttgtaatcatcatcactaattaagcttattatctactatttttgtgtgatttggcagtgcggtacatattttcatttcttcgtttcagagatatatatgtaagaaactatttgtgtggcctgctccacttttttctttcttattttggcgtgcacataatggtatgatgataactttttttatgcccaaaacacaccaaac

SEQ ID NO: 110072 - DNA, 655 bp, Glycine max
  Clone ID: PAT_MRT3847_70407C.1
gggccccgccactgggggtttcttaagtatgatgtgccaagaggaacgaaaatattcatcgtgtaaattatagtagaacgtagaaatatcataatttttttctcctaataaaattatttttatttttaattctaagttctttaaccaatcttatggctccgtttttttgccattgagaaaataagcattgataaatctttcttaatttgaaataggaaataatttatgataaatgcaaactttgaatttttaattgagaagactcgattttgaattttcagtctcgtctgtttttttttttttggtaaaacgaggaatcgttgcgattcttgtgtgaaattagtgagagtttgttcaatgcacgggttctaattttttgtttaattgttgcagtttggctgctctctgctgctgctgtctgttggatgcgtgcttctgagaggaaaaaaggttgctttgcacaaattggatttgaaactgtgttttgactttgaatatcgtcgttagtttttattattctatgttgatttacatttcgtggatatgaaatattgcttcgaaaaatatgttctgtttcatttacaggattcttgacttactgtatttcttgtgttttgtttaaattggcgaattattataaaaaccctctaatatc

SEQ ID NO: 110073 - DNA, 595 bp, Glycine max
  Clone ID: PAT_MRT3847_70408C.1
aatagctttcctcctctctatatttccgctttcacttcttctctctcaccctccaactatgagttactacaaccagcagcagccacccgtcggtgttcctcctccccaaggttacccaccgccggaatcttacggaaaggacgcgtaccctccgccagggtaccctccacagggaggataccctccgcaggcgtatccagcacaggggtaccctccaccctacgcgcctcctcagtacgctcagcctccgccgcaacaacaccagaattcatctggcccgggttgcttagaaggatgtttggctgctctctgctgctgttgcctgttggatgcctgcttctgagaaagaaaagagaggttgctttgcacaaattggatttgaaactgtgttttgactttgaacatgaccattatcgctcttagtttttattattttctatgttgatttacatttcgtggatatgaaatattgttctgcttcattaacaggaggattcgtggctttttgtttttcttgtgtttttgtttatattggcgattgatacaaaaaataaaaaccctctaatagcgcactaatctgcattataattttttc

SEQ ID NO: 110074 - DNA, 361 bp, Glycine max
  Clone ID: PAT_MRT3847_70409C.1
ttctctatcaacaacctatgcaaggcttcttattaaactcaacattataaaaacctttggtttacatatttagggtatgccggagtattatccaatccaccttcccttttaacgataccaaaaatatccttctcgaatccaatatctcattcattgtcctttccttaccttacatttgcccaatttataaatgaattccaactttaatttctatttcaatctccccatctgatccaacccttccaaatctcttaactaccacaaaaaccccaaaccaacttcctcctattcctctgcccaacctccattgacccacctacccgaccccactcaaaccactccctttcccgtgtgcccccct

SEQ ID NO: 110075 - DNA, 626 bp, Glycine max
  unsure (1)..(626): unsure at all n locations
  Clone ID: PAT_MRT3847_7040C.1
tacttctcatacgcagccattcagatgcggttctttcccatgtatcatgaaatagtgcaatggataaggtatgaagggaagattaaggatcctgagttntgtgctatggtgcggctgaaatcattgcagccaacaactgttggttcaacagcacgcttagctgctaagtctcaccacgctagagacaaatgttaaccgtagagctgagatattttgacaaattaaccgtccaagcttttagttttgtgtatggcttcctgaaaatctgatttttgtctttgcctacggtcatggaattgcttgctgggtcctctaaaccagaagaatgttgtctaaatccccttccatggtgattgcatggtgcaaggaccaatatttggcactgatgctggaaagaaaaatacaactgtatatctgtttcggtcagttggtgctgcaaagcattcatttactcttgtatcatagtagttactagttactgtatagagacgcaataattctttgtaggattggatagagctgcttggtgttgtagaaaagagttatactattactgagaagttcttttttttttgtaatcatcttataaatcttaatataaggaataacatcagcttcatacctat

SEQ ID NO: 110076 - DNA, 229 bp, Glycine max
  Clone ID: PAT_MRT3847_70410C.1
tgcccaagtgtgaagactgtcagagcctggtgaagcctgatatcgtcttttttggtgagagcctcccagcgcgtttcttctcttgtatgcagtcagacttcctgaaggtggacctcctcctggtcatgggtacctccttgcaggtgcagccctttgcctccctacatcagcaaggcacccctctccacccctcgcctgctcatcaacaaggagaaagctggccagtcgg

SEQ ID NO: 110077 - DNA, 1547 bp, Glycine max
  Clone ID: PAT_MRT3847_70411C.1
aagattttaaaaaaaattttatattcagaaaccaaggaggaggagaaagtatgatccgtagaagctttgaattttcagtctcgtcttttttttttttttttttggtaaaacgagaaagctttgtgattattgtgtgaaatgagtagagttcgttcaacgcagggacgcgtgggcggctgcgagaaagaaggggatagaaagagaaatgaagtcggtgggtagggttggcggaggagaatcagagcaacgtggacattttcagatgccactgcactatccaaggtacacacaggctgactatgaaacaatgcctgagtggaggcttgattctttgctcaaagagtacggcttaccaatcattggagatcttcatcaaaagagaaactttgccatcggagcctttctttggcctcactgaacctcctttgtttgtaatcatcatcactaattaagcttattatctactatttttgtgtgatttggcagtgcggtacaaaatgcgccctcaagatcccacagggagtcccacccaggacctcaatatatttccgctttcacttcttctctctcaccctccaactatgagttactacaaccagcagcagccacccgtacggctttcctcggttataaccttcaaggtggaaagaaaaaccgacccactatcccaattccaataaataccttcctctctatattttcgcacaataccctctcacccttcaacgatgagttactacaatcagcagcaaccacccgtcggtgttcctcctccccaaggttacccaccgccggattcttacggaaaggacgcgtaccctccgccagggtacccgccgcaaggaggataccctccgcaggcgtatccagcacaggggtaccctccaccctacgcgcctcctcagtacgctcagcctccgccgcaacaacaccagaattcatctggcccaggttgcttagaaggatggtaagtctctctctctctctctctctctgcatatttctgagtgaaggtgttcgtggcaactcagatcgggattcactcgattgattgcggttgcgattacgggtgcaccatcatctatggtgcgcccgcccgcggctgatcattgattagctgtagttgcgttgtttcactgctgtcatctgacgcgacacgcgcgcacgatactcgaagtggatgtcatctttttttttcgccgggccccgccacttgcgggtttcttaagtatgatgtgccaagaggaacgaaaatattcatcgtgtaaattatagtagaacgtagaaatatcataatttttttctcctaataaaattatttttatttttaattctaagttctttaaccaatcttatggctccgtttctttgccattgagaaaataagcattgataaatctttcttaatttgaaataggaaataatttatgatatgacttttttttaattgagagactcgatttggctgctctctgctgctgctgtctgttggatgcgtgcttctgagaggagaagaggttgctttgcacaaattggatttgaaactg

SEQ ID NO: 110078 - DNA, 551 bp, Glycine max
  Clone ID: PAT_MRT3847_70412C.1
catagtggtactagtgattaatgaaggagaagcaaacattgaacttgttggcattaaagaacaacaacagaggcagcaacaggaagagcaacctcgttcatatccacaacactgaggaagacatccaagtcccgaagctgagggtttttctctggggtaatctcaaacaacttgccaagcttgttggaatagatggggtcgcggcttctcaagttgaaaggtttatcttcagaagaaatggttttccttgaactagatttggcatgtttgctcagttcccgaatttgtttcttttggtatcaatgccgagaacaaccagaggaacttccttgcaggttcgaaagacaatgtgataagccagatacctagtcaagtgcaggagcttgcgttccctgggtcttcaattttgagggctttttactgaataagtatgtagtactaaaatgtatgctgtaatagctcatagtgagcgaggaaagtatcgggctatttaactatgacttgagctccatctatgaattaattaatcagcatatgatgcttttgtttat

SEQ ID NO: 110079 - DNA, 259 bp, Glycine max
  Clone ID: PAT_MRT3847_70413C.1
gtacaattcagattcacccgccctgatgctaaggaaaccctgacgtatgtactagatggcagggcactgggggtcaggctgaaggctgagcaacacctctctgccctccctccctttgtcccatctcccagcgacttccaatattcatgtgtctgagaattgtgtccctcttcaggttccctcttggtgcctaacctggattagtaatgtgcattcaggtgaattttcagctgaggctctgagaactggtactctcagt

SEQ ID NO: 110080 - DNA, 998 bp, Glycine max
  Clone ID: PAT_MRT3847_70414C.1
ccacgcgtccggaaaagaaggctttcttacaaccctctctttctctctctctgtctgtgagctcctatctctcttcaatggaggtagtggagcttgcaagatagacccagaattcacacggcgcgattgtattttttcgtgctgttcagaataattgcagagatgaagaaagaaaacagtgttatgctgaaagctggggagctccctggtcgattgactcgtgctcgagctgctgctgctcttcgtgcatatggacagctaccccctttgaaagagagagcacagcaaaatcagaatcagttatccagagtcaattcaaaaagagcagtttctgataatacatgtcttcagcgtaaaaggaaggctgttcttcaggaagttactaatgtttgccgtgaaaatgcatacaagggttgtttcaactcaactaaaattcaggctaagaaaagcaagctggctaaggctggtcaaattaatgtgtccaaagtggctccttctgttactgttgactccaaagcaaaggaaacagcattgcaatcggaagatactatgtgctcaattaatttggaaaacaatgaatttctacgactgagtgctaatgattgtagattgcctgaaagtcagatgtctggaatatctgctcatcctttgatttctcagaagaaagacaagaaagataaccttccaaaacttttgactgcattgaaggatccagacatcactaatatagatgatgatgatcttgaagatcctcaatcttgcagcctctatgctgctgatatctacgacaccatgcgtgttgctgagcttgcaagaaggcctcatccgaactttatggagacagtgcagcgagatattactcaaagcatgcgtggaatactggttgactggcttgtagaggtttctgaggaatacaaattggttacaaacactctttacctcacttgtgttttctaataaaattgaattccttccccccaaaaatttacatttcgaaa

SEQ ID NO: 110081 - DNA, 645 bp, Glycine max
  Clone ID: PAT_MRT3847_70415C.1
aactgtagggaagttaaaaggatggatttgataaattttgaattagattataatgatgatccaaaaacaaaccattaatccatttatgatacaaccatctatgacctgtttaaccaaaaaccatctaatccatctattttaagtgttttatatttcattttcaaaaaataataaaataaagttcaatatttatatacattcttacactcaaaaaccatactcgtcccttaatgacttatgcccaaccaatgagctttagactactagatccaaaggattgcaaaatatgttagatgattcataatccatccaataagaaatggtgactaatccagccaattcattaagctttactttcataattagacggattgattggatttataccttgatggattggatggttagtggataaatggattgaattgccaccctattgaactatggacagtgaacctatctatccaaccttttgttaaaaaatttaacttctatttagaatgaatgggagaaagaaagattaaactctagaccatatagtcatagaggaacattctgaaaagcttaagctatcagtgcacaggaggaatgatttatatttaatctaagacaataaataagttttataacacatgctttggaaat

SEQ ID NO: 110082 - DNA, 337 bp, Glycine max
  Clone ID: PAT_MRT3847_70416C.1
cattggaaacagagccgagcttaccggagaactcgcgcgtgctcttggaggtgctaaagaaactaccaatcttatgggagtgacttgttgaggacgtgaacaccttcttcaatgccctgcgtgataaccttctagcattagggatgccaatgggtgcgctatactgcgatgcactactgccgagggtatggatttataagaaacgctagtgccttccgctgttggagatgttgctcttcaacaaattttgaattgcgtggcagatgatactagagagacgaacgcaattggtgaatctgcgaaattagctcatgatgatgattcatagcccccactt

SEQ ID NO: 110083 - DNA, 249 bp, Glycine max
  unsure (1)..(249): unsure at all n locations
  Clone ID: PAT_MRT3847_70417C.1
ccacttaatcgtcttcttccaggttctccctaactctgcaaccttcgcgaatcaccgtcttctgtgaatccaattgacaccactgttgtcttagcctttngtgtttactatgatctttcctccatagatngtttgtccggggaaaagaaggaccttcatgttgtagaattgtcctcttctcatgagccatcagaacctactggagctaataaggatattggaactagcgaacttactccagaagttagt

SEQ ID NO: 110084 - DNA, 255 bp, Glycine max
  Clone ID: PAT_MRT3847_70418C.1
ggataataataaaaacactcgtgccgcaccttcgtcttccccaatggctctttccacacgccattttggaagcccttttctttattacatagaatcctttggctattggaaccagtaaaccctaataattccaatcaaccttggcaattctttgaatccgaataatcttttcggccaaaacacaagtggggttttttggatttaatggttaaggggtgatagcagggttcaatctgggtttccaaaggcaaaata

SEQ ID NO: 110085 - DNA, 245 bp, Glycine max
  Clone ID: PAT_MRT3847_70419C.1
gtcagctcaggagtttataatctgagagatgtcagatcttgaggctcccttgcgtcctaagacgtacaaggtttgggtggactatgtcgttcagtttcgatctatccttgttatggacgtggtcgttcccatctccttcgccatttgtttccgtgcgtacgttgggggtgtaagatctgagcggaggtcctatgatgctcgtcggatcgaacatgatgatagtgtgatgagggctatcgaacgcc

SEQ ID NO: 110086 - DNA, 612 bp, Glycine max
  unsure (1)..(612): unsure at all n locations
  Clone ID: PAT_MRT3847_7041C.1
cccgcgtccggttgggggacgaatgtcgataaccaccccaagtccccaacccattcaaaacaaaacgcaacacacaccgcagatctaagtttctgctacgagaatcgaagccgtggttggtggcggttcagatctgagtttctgcttctcagccactctcaatccttttcgtgggcggtggcggtgcagatccgaggctcgcgacatggagtattggaagctctgttactgtttatcaatgccttgatgaaggggatattgctgttttgcaatcttatgcggatgaggataagaatgagtctttttacaccgtgggttgggcatgcaatgttgacgggaccccacttgttgtggctggaggactcaatggggtaatccgagtcattgatgctggcagtgagaagatacataagagttttgttggccatggagactccataaatgaagtcaaagctcaaatattaaatccatcactcgtggtatcggcaagcaaagatgaatctattcggttatggaatgctcatactggaatatgcattntgatatttgctggaggcgggggacatcgtaatgaagtcttaagtgttgattttcatccatcggatatgtatc

SEQ ID NO: 110087 - DNA, 488 bp, Glycine max
  Clone ID: PAT_MRT3847_70420C.1
tcgggatatattgcagctcatgccaaacttgagaggagagacttttctagtgaggaagaaaaggatgcagagctgtttgccctgtctggcagtgaggatggcatgctcgctgatgtctatgctgatgctcccttagtgtaatgtgcttttttacctcttatagaattgtgtaattctaggatttatcagattctttcaagaactcttctattattcccttattacatttggtgggaaacttttcatcactttggggttgaaatagaaggaatattagaaggaccaaaaaaagcatgttgttagcgactgtgttatgatcagctttgattctaatgaatcatcaattttttccggtaattattttgtacttttagggtttgtaaaggaggaaccgttgcacttttatcagccataacaacaatccaggaaaaggagcaagaaggatgtcaaatttttttttttttttgctagagtgagtttgcaatgag

SEQ ID NO: 110088 - DNA, 135 bp, Glycine max
  unsure (1)..(135): unsure at all n locations
  Clone ID: PAT_MRT3847_70421C.1
cttgagttgatcccagtatgtattnncaatantttaantctatgcnnactaaatttatggctacngaatnttgtcatgtaatgcacntnattgnccnggcagtncanttagntattaagcttgctgtanatttag

SEQ ID NO: 110089 - DNA, 418 bp, Glycine max
  Clone ID: PAT_MRT3847_70422C.1
attttgtatttttttttttttttttttttctctttttttttttcattttttccattgggatcatttggggggttttttatcgacgatgacccctactaaaacattaaccccaaaaaaaccaacacctgcggaaacggaccccgagtagggtacaccctgcatcaacccctgggcgaagaggacggacagccagacaccaaagggaccacggcagcaaaacaaggaaacaagaactccaaaaaacggaacaggaatcgaccacgcaccacgaactgaccgaaatcgataaaacctacaaaaagggacccgctccttccctaacaaaaggggtggcgggaaccccccccctggcccggggccccgaccttctttctttgtgcctcagaacagacttcttaaagaaaggcccccccccccc

SEQ ID NO: 110090 - DNA, 378 bp, Glycine max
  Clone ID: PAT_MRT3847_70423C.1
ttttcacctatatttttcaaccagtttctacacaccctatatttcccttttatattcgatctatttataaacaatttgaccaatataattaccttcttctccctcaactactcacctctatattcaaatcaaacccacaacattcatttaatatcaaaatccatcataacatcacttcttcaattccaaatattaatctccaatattacatagcttaactattattatctcattttatattgcataaatcatcttattcctctcaacttcatcaacttatttcattataacttgtctctataactgactattttaaattattacttacacttattacaaatacaatttaacctaacataccatactactcaaatactt

SEQ ID NO: 110091 - DNA, 173 bp, Glycine max
  Clone ID: PAT_MRT3847_70424C.1
tgtcctaaagggtagggaaatcacacattagagagctgtgcaagaattattactgcaggagtccatttatcgctgaaaaattacgtaagcaaataaaatacatgttttatggactcattcattccaaaaaccggaaatcaaacttattgggtgattttaataccatttgtggg

SEQ ID NO: 110092 - DNA, 450 bp, Glycine max
  Clone ID: PAT_MRT3847_70425C.1
ccgccctagcgagagcattgccttgtattattataatattctttctaactatatgtatttttatacagcattggcctactagggaaacgctccatctcccaccctcctggctggccccgtccacccggctgttccggtccccgtttcctctaccgctgctcgttgtatgcttccggtggtggaaatccacacgcctagcatgtctgatcagcactacgaacctagctgcagctgggccttatatggatctcactgccgggccttttaactgattaggcgcctaaatctgactgttctgctgactatagtctctcctacgcagacccgtatcctttcctatctcctggggccagtgctgaactttgaacactcttgaatgcatctatcgcttgtgcctgcacatatccgacatctctccgcggtttagatgctactaggactgtactgctg

SEQ ID NO: 110093 - DNA, 142 bp, Glycine max
  Clone ID: PAT_MRT3847_70426C.1
agcatatactattgtttttgatcccgacaataggagagtgggggagagtatcagagaagtgggatccggagaacagttggttggtcagggtgataagcgagggggtgagcttgaccaggcggccattgagagaggcctgtgg

SEQ ID NO: 110094 - DNA, 317 bp, Glycine max
  Clone ID: PAT_MRT3847_70427C.1
cttcttagacaggtagcaccatggcgaccacgaagtacgaacacactgtgcctgaatggtgtgacccacccgagggatacgcctcccaaaaagcctaaaccaggctgtggttgaactgaacagagacctggatgaccccaacacagacttgcctatacgcccatcagattgctagtgaacaactcggagaggggcaccacgcgaggctcccctgcagactactagacggactcgggtcttatgaacagcgtctaactgaccggcctaacgatgggatccatcggagggcactccatgttgagaaggcaccccctggc

SEQ ID NO: 110095 - DNA, 176 bp, Glycine max
  Clone ID: PAT_MRT3847_70428C.1
ggggttcgggcgatacttgcatcccacttttttcaatctttgctttttacgtgatggcaaaaactcgtgaaagaattaaccttttactcggaaaggcgcaaacccccccgcacatgttaaaaaaaacacccaccctaaagtacccgagagctttattgttcccccccccgttgaaa

SEQ ID NO: 110096 - DNA, 2087 bp, Glycine max
  Clone ID: PAT_MRT3847_70429C.1
ggagtccccgcgtgcgcccaaaaccctacccttctcagttgcagagccatgtctcactccgacagcagcaagaagaagaagcagcagcagcgtagcaagcacgaaggaggaggaggagaggaagaatcgaaagacgaaggcgggttgatgatcaagccgcagagcttcactcccccaatcgacacctcccaatggcccatcctcctcaaaaactatgagcgtctcaatgtccgcaccggccactacacccccatcccctccggctactcccccttgaagcgccccctcgccgagtacctcaaatacggcgtcctcaacctcgacaagcccgccaacccttcctcccacgaggtcgtcgcctggatcaagcgcctcctccgcgtcgaaaagaccggccactccggcaccctcgaccccaaggtcaccggcaacctcatcgtctgcatcgaccgcgccactcgcctcgtcaagtcccagcagggcgccggcaaggagtacgtctgcatcgcccgcctccactccgacgtccccgacgtctccaaggtcgcccgcgccctcgaaaccctcaccggcgccgtcttccagcgtccccccttgatctccgccgtcaagcgccagctccggattcggaccatctacgaaagtaagctccttgagtatgaccctgataggcacttggttgttttctggatttcctgtgaggctggtacctatgttaggactatgtgtgtgcacttaggcttgcttcttggtgtgggtagccacatgcaggagcttaggagggttaggtccgggatcatgggggagaaggataacatggtcagcatgcatgatgtcatggatgctcagtgggtttatgataattatagggatgagacttatttgaggagggttgttatgcccttggagattctcttgactagctataagaggcttgttgttaaggactctgctgtcaatgctatttgttatggtgctaagttcatgattcctgggttgcttaggtttgagaatgatattgatgttggggaggaggttgtgcttatgactaccaagggtgaggctattgctcttgggattgctgagatgactactgctgttatggccacttgtgatcatggggttgtggccaagatcaagagggtggtcatggatagggatacttatcccaggaagtggggcttgggcccgagggcgtccatgaagaagaggcttattagtgaagggaagctcgataagcatgggaagcccaatgagaagaccccccaggagtggcttaggaatttggttttgccaactggtggggatagtgtgattgctggcttggctgctgcgccggaacctgaggatgacaagattcagaagaaggagggagatggggaagggaagaagagaaagaagcatgaaagcacagatagccccgttgctgttcctgctaagaaggtgaaagtggatgaagtggaagaggttgaaaagcaagaaaaggtgaaggtgaagaaggtagatgaagagactgtggaggttgaagttgagaagaaggagaagaagaagaaaaagaagaaggataaggagaacagcgaagcagcctcttcggatgaggagaaaactgagaagaagaagaagaagcacaagaataaggttgaagatagttcgccagagttagacaagtctgagaagaaaaagaagaagaagaaagacaaagaagctgctgctgctactgctgaaattagcaatggaaaggaggatgacagtaatgctgataagagtgaaaagaagaagaacaagaaaaagaaaaacaaagatgctgacgaagaatagaggaaggcatatttttgtgtttggttaagtggactcgttatgtattatgcctatttcttgatcatttataatttcgctttgtttactttgttgtttttttaacattttggtagctttttcttgtgcttttttttctctttagttttccccccaacaactatgcttctgaaaacgtgtagtatgcctttgacggtctttttagcgtttaaaagatctcctacaattgctcaggtttatgcgcccttgtatttttattgcttcaaaaaaaa

SEQ ID NO: 110097 - DNA, 284 bp, Glycine max
  Clone ID: PAT_MRT3847_7042C.1
cgtcgcttaagatacgactataacaacagcctatcgcattggactatatatatcatcggataggctctacgattcagaaacatacatatatattcacacaaatatccatttatatatacatatatatagtgctatatggcaatgaccacggtggtgcatgtcttgagcatgtatgcagtgatgaatgcaagtgcctctgatgccactcgcttattgctgcacaaaattgctacaggtaacgtgtacagagagaagattgatagatactcacttgagaatggact

SEQ ID NO: 110098 - DNA, 425 bp, Glycine max
  Clone ID: PAT_MRT3847_70430C.1
accaggtgatgtagatccaggctgaaaatggaaatatcaaaatttaattattgggcagttatatactaacttggtgtttttagaaaggaagagtgaatatttctttacctcacatgcatggacaattggacatcattacaaccgcacaagagcttctcattgagagtgcccacggcttgaagactgaaatgatcctcctccttcactcctatgcacaacaatccccaaatgaatgagtccgaagtttatgctttagcaacaaaagttagaggcataaaagaaatatatgcctaagtcctgccttgtaataatcaacagcaacgtaattggccccgtgacaggtctgtagcatgtcaataagaccaccagaattatttacaaatgttatcggcttaagtggagcagatagaagatagtgtaccacc

SEQ ID NO: 110099 - DNA, 311 bp, Glycine max
  unsure (1)..(311): unsure at all n locations
  Clone ID: PAT_MRT3847_70431C.1
atgttcaaggttcctaggcattttcgttattttttttccgaacttatgctanatgtaggtggacatctggttatgatgaaagagaatgattatcatcatgatgactactaagatgacgatggtcctctttaaacaaatccataggggagagtataaaagtacattatagtgaaagtgaaggtcttatttactgtacaaggggatacacattccattaagcatttttctgggggtcaaaaaactgtattctcccttacacttattattgccatacatttatttaatccttttcccttttatatattttatta

SEQ ID NO: 110100 - DNA, 716 bp, Glycine max
  Clone ID: PAT_MRT3847_70432C.1
ggtccggaattccccggtcgacccacgcgtccgaaaatggccaatgagatcgcaagattaaaggaagaagcagatatgatgaagcttaacaattcaagtgatggcctcgcatctatgtctccgggtgcaagaaattcaaggatatatgcccttgaaaaaatgattgctacttcttctacaacattgctgtcaatggcatctcagttgtcagaggcagaagagcgggaacggattttcagtggcaagggacgttggaaccaagtccgttcccttcctgaagccaagaatttgatgaatcatttgttcaatctggcatcttcctccaggtgtttattgcgagataaagaagttacctgcagagagaagggcatggaaataagagatctaaaagaaaaagtagtaaggttgagctgttcacttcgacagttggaaatgcagaagtctgaacttattcatcagttgaaattgctgagtgcaaagagatattcagaatctttgggtggttttggtgtatcccgacataaatggaggacataagtatgacttgcgcaagatggaaaatcgggcgatctacaattttactggaggatatggatttatctgtatccgatacagaatcagatgattatgttgcagatgcaactgatgatgaaatgggtcgcttcagaaaaaatacacgttaggaaaaggaaatctagaagcagacatgtaagcat

SEQ ID NO: 110101 - DNA, 282 bp, Glycine max
  unsure (1)..(282): unsure at all n locations
  Clone ID: PAT_MRT3847_70433C.1
gggcgcgaggctaagactttctaatggtcatgttttatcgttcattatattttttttaacccgctgagctnganttcggcatgtttaatgttttcatggggaggtgggcattacttttcttaacgtatgtcataatccatcttaaaaggtctccgaactgagtttccaaaagggggaagaaatagctaatgcatctcatgaatctctggtttctgatgctaaatggctatgtataagccccaaatctgctcttcttttcaccatcttaaggatggccttcct

SEQ ID NO: 110102 - DNA, 497 bp, Glycine max
  Clone ID: PAT_MRT3847_70434C.1
tttttttttttttttttttttttttttttttttttttttttttttttttttttttttttttttttttttttttttttggggacccaaacccaaatggaaaaaaaaaagcccgcgagaggaaaacccggttccaaggccataacccaagaagctcaaaccccctacctgaggggaaccctaaacgcaagcaaaacgaaataaatttaaaaacccaggtttgccccaacctttttttcccccaaagggggtttttaatttgtacccatttgaagggggcaaacccccccaatttcggctttttccctaaaaaaaaaaaccacagggtcccaaaaaaaaccctatgggcccactggcccgtaattggggccaaaaaagggcccccaataaagcccaaaaaaaggggtaaaagctccccaatcaggcccaaaattttttgggccaaaaaccccccaaaaggcaacccccctttggttaaccaccgggacttaagggttttg

SEQ ID NO: 110103 - DNA, 1514 bp, Glycine max
  Clone ID: PAT_MRT3847_70435C.1
ctcgtacggctgcgagaagacgacagaaggggacccaacaacttaatttattttgtaacgccaaacgtccatccaaaattgcgttcctaaatcgccgctaccgaacacagccgtagacttttaattcattccgctgcgtttctttctctgcacttcaaagttcaaaccctagcgaagcatccactgtcgccgtcgcacactcgcacgccgctcacaggtttatgggctacgctgatgtcctgaatttgttgttggccgtggtggtttggtgcactgcttacgttactgttgtagttctcgcttcctttcgagccgtttgcactttctgaaaccttgcaatttcattgataacatgggttatgcacagcttgtcataggtcctgctggtagtggcaagtccacgtattgctcaagtttgtatgaacactgtgttgctgcacggcgatcgatacatgttgtgaatcttgaccctgctgctgaaaattttgactatcctgttgcgatggatataagggaactcatttccctagatgatgttatggaggaacttggattgggtcctaatggtggtcttgtctactgcatggaacaccttgaagataacctagatgattggctcactgaggaactggacaattatttagatgatgattacttggttttcgactgccctggtcagatagaactatattcacatgtcccagtgcttaagaattttgtggaacatttgaaacggaaaaattttagtgtttgtgctgtttacttacttgattcacagttcatgacagacgtgaccaagtttataagtggatgcatggcatgtctttctgcgatggttcaacttgaactacctcatgttaatatcctctcaaagatggaccttgtgactaaaaagaaggatcttgaagattttttggatccagagcccacctttttattgtctgaattgaatcaacggatgggtcctcagtatgcaaagctgaataaggctttgattgaattggtaaataactatagcatggtgagttttataccattagacttaaggaaggaaaaaagtatacaatatgtactggcccaaattgacaactgcattcaatatggagaagatgcagatgtgaaggttaaggattttgaccctgaggatgatgagtagccaatccccttctgcaacactgcttggtataattgaaagttctgcttaacttcgacattatggtgtaccaagctgaagttgttaatatgtagtatctcattagattgttttaatgtgaattgaggaagttgaacatttatacagtttatcctctaaatgggatgaaaaattggctagcttgatcattctcttgccattactgcttcctttctgggaattttatgactttggtcgcaagagtaaaaatctgatggcaaagtagacaatgcaagaatgagaaggatgaatttgtatgatgaaaatattgactgagcctgtttgaccaccaggctagttgagtttttgtgagcatgacact

SEQ ID NO: 110104 - DNA, 303 bp, Glycine max
  Clone ID: PAT_MRT3847_70436C.1
gctgaatactgggatttcaaggtctcgaatatggcgcaccattacatagaacattcaacagctaactgtatggaatcaaatggcaacagtgagaacaccattgaattttgagtttagcaagcaaagcttgtgccagttgtatagagacctgataaggggaggaatattagtggacaaaactggagattgactcacagttatacaaaagtgcgcaatgaatcaactattgagagttgctggttggcataaaggcatgctaatgggcaagatagtgatgtgtgtacaatgcccagtgaaaatgag

SEQ ID NO: 110105 - DNA, 1155 bp, Glycine max
  Clone ID: PAT_MRT3847_70437C.1
ggctcgagaacgaggaaaaaaaaaatatggaaaagaaacaagattaagaattggggtttgaagaagccggtggtgtctccttgcttgttctcgatcgatcttgttattgtaaaatataataacttttttatatcgtgatcaagatgcgccgagggagagccaccgccgccgtcgtggatccgacggcggagcaggcgaaggagacgcggttccgcggcgtcaggaagcggccgtgggggcgattcgcggcggagattcgagatccgtggaagaagcagcgcgtgtggctggggacgttcgattccgccgaggatgccgcgcgggcttacgacaaggctgcccgatccttccgcgggcccaaggccaagaccaatttcccctccttccccggcccgacggaccaccactcctcgcagcagattccgccgctctaccaggcccacgggctttccaccaagttcgagcccgcccaggtgaaccggcccaccaccagcggcatgagcagcaccgtggagtccttcagcgggcctagggttcccccctcctcctcctcctctcgcaagccccttgtggttgttaaccctatcatccctctcgacgacgacgacgacgattgccacagcgattgcgactcttcttcctccgtcgtcgacgaccaggactgcgtcctcacctcctccttccggcaaccgcttcccttcgatctaaacctcccgccgcccgatgccgcctacgacgacgacgacgacgacgtccccgccaccgcgctgtgcctctgatgaagaagagcctcttctcggtataatcataattttcttgttgttgttgttgttgttgttgttgactatctctggtttaattaattgaagttgttagattgtgttatggtgttgtagagtaatattataatataggcatggagatggatggatggatggaaggttgtgttgttgtaagttatttggatccatagcattggacctcatctggaaaactggttgctgcttctgctttcttcatggatctgcttcttacccttacccttaccccccaattagaacttactctctttttcttacttttctgtacaaaaatcatggcaatcagatcatagaataaattacattctaatcaattactctttccctgcttgct

SEQ ID NO: 110106 - DNA, 189 bp, Glycine max
  Clone ID: PAT_MRT3847_70438C.1
aggggagcttaatttcattcatgaaacatagcaattggttaattcaccgggattaatcctagtactatctaagactccagcactgaactgacttttattccaaagctaatgcatcaggatattctcttgacgctaccgaaagaacttactgaccaaattatataggtaatattagggggacttgcggcc

SEQ ID NO: 110107 - DNA, 469 bp, Glycine max
  Clone ID: PAT_MRT3847_70439C.1
atcacacatggcttctactgctattatggatgattgacctgagcctacctcattcgttcttaaactacctgaactggcataactatcatccattctgaatcgaatcttttactatagggaatgataacacaactagatctgacattagtaccaacatgcactacaactctgctggctcgtggtgtcaactgaatcttaagtgactagggcatgctcctacaataattaggagatgaatggtactgctagggcaacattgctgatgatgcatagtatgcacttgctgtatacgaagacagctgctgctataattgcactactactagtccgcatacaaaatcaggatgatgccatgaatagtggtcgggcctctgagacatacaatacaataattgcttgtggcgatgcatcaacaaacgatgctgctgagatccctctttagctactgacactgctatatgtttcatat

SEQ ID NO: 110108 - DNA, 225 bp, Glycine max
  Clone ID: PAT_MRT3847_7043C.1
aaaaaatcttccccctcctccctctttcgcttcttcccctttcccctctttctaatctttcttacgcacagaggcttcttaattttggcatatttttatattcttaactactctttgtttatttcttcatgttcttttcgcagatccaaaacaaaacgcatagtatatatgcaacaaataattacactgttccaacgtgaaaacatgtttccactaagaagaaga

SEQ ID NO: 110109 - DNA, 515 bp, Glycine max
  unsure (1)..(515): unsure at all n locations
  Clone ID: PAT_MRT3847_70440C.1
cggtcgcgtgggcggacgcgtgggcggacgcgtgggcggacgcgtgggctttgttaggcaatacaacatttattacgcatactcaaagtagcttcgaagttcgtatttttattggcatatcatggagaataataatcagtcgttttggcaattcagtgaccagctgaggttacaggcatctaatttggcgaacctttctctaaacgattcgatttggagcaacagttacatctccaagaggcgtgatgaaaggattaattttgacatcaaagttgggggtgagatcaactctttcaagtcaaaggagccagcttgtgattacaatgaaaacatgaatggatctcttcttgccgtgccttacaacaacaataacattttgggtgttggtggagttggtctcaatggaggcttcaacaaaggaatttactccaagcctggttttgccaatcttaacaacaatattaaccttgatatcaatnctaagggacacaagttcaaggatgaagatgagcttt

SEQ ID NO: 110110 - DNA, 603 bp, Glycine max
  Clone ID: PAT_MRT3847_70441C.1
attcccggtcgaccacggctccccctgaacctgctctgaatccaattcttcttcttcttgttctctgtttaaggcaatacaacatttactactcatactcaaagtagcttagtgttttgtttagcatatcatggagaataataatcagtcgttttggcaattcagtgaccagctgaggttacaggcatccaatttggcgaacctttctctaaacgattcgatttggagcaacaattacatctccaagaggcgtgatgaaaggattaattttgacatcaaagtggggggtgagatcaactctttcaagtcaaaggatccagcttgtgattacaacgataacgtgaatggatctcttcttgccatgccttacaacaacaacaacaacaacaacattattttgggtgttggtggagttggtctcaatggacacaagggaatttactctgtctcaacaacaatatttctcaatatcaatagttggtctcaatggaggcttcaacaagggaatttactccaagcctgcctttgccaatctcaacaacaatattaatctcaatatcaatcctaagggacacaagggcaagggttgaagatgagcttttt

SEQ ID NO: 110111 - DNA, 320 bp, Glycine max
  Clone ID: PAT_MRT3847_70442C.1
acgcgccggccggaattcccggtcgccacgcgtcgctagttctaatcgagcgggaggcttcaatttccaattaggtttcgcttaagaccaattaccatgggagtcttcacctttgcgtcgaaatccggcccaatggacccagcaacattcgcgacatcagctcgcactcactacactaaagaagctcggcaccgtctcgcgtgattctcgggggcagcctcttttccggtctctactcgtggttcaggatagggggggctgatcgtggagggcgtgtctgtcactgacctcagtgtgtgtgactgatctgtgactatctg

SEQ ID NO: 110112 - DNA, 954 bp, Glycine max
  Clone ID: PAT_MRT3847_70443C.1
ggtttttacaagctaaaaaatatgctgcccatttatgtcaaagtgttctgatggcctccacgtctaacgatgttgtatcagaaaaccactacaaaattcacaagccatgacataattagtaacgatagctaatattaattaacaaatattaaccatactaacaatttaaatttgtgttagtaaatgtaccctgttccattcatccttcaaaccgctagtaactatacaccacatctaatgcatcacataatatccacactcgtagcctccggtttgaacatgactctaaagtcaacatgcaaaatatgttcaacattgaaaccatagaaagttacaaatgtgttcattcgtaacatgtattgattaaatttttactaacctttgtttcaatccaccgaggtgcaacttcatcaagcatacctttggatgtattggttattgccttcattgaacttgttacaataataacaaaaactattaatgaaaattaaaatccttggcatatattgtttgaaagttgtacactaaatcaaataagattcttaataaaacttgttaattgcaacttttatgttaacatcaggcttcttccgcaacgaacaaaaccaaacaacaatgttttcccttggacatagaacaacgagttgccaatgtgccctaaagtcgacaaatataattaggtacttgaagatgaaattatgtttagaatgttctacaacaatttaacttactgattcaaatatgctcctaagtaaagttatcgttgcgactccttgacccatgtttcaatgtaatgttgacattgttgacgtctatccttagcattgtgtatagactgaggctcaaggaaaccatacattgaatcattacctttgcttgtactatagtcatccataaacctgttgtgaacatttgacataaatattgttaaccgattacattgaaacaaaattc

SEQ ID NO: 110113 - DNA, 364 bp, Glycine max
  unsure (1)..(364): unsure at all n locations
  Clone ID: PAT_MRT3847_70444C.1
ttttntttttttttttttttttttttggggttaattaataattaatattaaaaaaacaatggcccattttccaggaaaaatcttttttttttacccaggggcttcaaaaacaaaaacccccattttgtgtggaattttccagttatttttaccctttttaacaccagagaaataacggggtccttcaacattttatatttaaaaccaatttctcaaatgccatgacatgccccacctttttaaccaaatttcccaaaaggccctgtcttattggagcgaaaatccaacccatgttaaccttttcaaattcctgggacccaaaccctcttatctattttggggggtagaacccgccaaatgggca

SEQ ID NO: 110114 - DNA, 282 bp, Glycine max
  Clone ID: PAT_MRT3847_70445C.1
ttttaattagaacaccgaaagataatcgttcatattattattcaggacaaagtctttattcttacattattacttttattaaccataacatggtggtagatgtcttgcttcattataaataagcttatcttaaaaagtctagcgatcttggctcatcatgcattggcaaagaagagggggtcagcacatttgactccatgcgagtgccccgatgaggtgcttaacccaacccttgaccttgagagattggacaccacccggttatcttccaactgacgggcc

SEQ ID NO: 110115 - DNA, 311 bp, Glycine max
  Clone ID: PAT_MRT3847_70446C.1
ggctcgagctaaagccgaatgggctcgaatgtggacagcatatcaagcttgtttttctaaaggaaggcactattgccttctactactcggcaaacagtgaccattggtgtcgcctcatgagagaaacgaacaacgttgccaatagtgactgagactgttagtatactatatacaactagaacaactgacgactactactactactgttgctacttaacctaaccttacctacaggaggcttacatagatagagattgacattgcacttggggactatttctttgttgactctccaacactcatgcatgccg

SEQ ID NO: 110116 - DNA, 613 bp, Glycine max
  Clone ID: PAT_MRT3847_70447C.1
atttttttttagtagatatgaaactgattaaggaatattgatgaattctgcatgttatacacataaaagtaaaacaataaattaagcagcttattttatgatgaatgctgcattttacagaagaagaaaaaactaaaataacgaatcagcttattttataatgacatttactactgcatcacggaaatctataatttgcgtcccttggatacaagagaaggtatgctctgctcgtttctgaagaagtttagaggatcaacgttggtcttcactcttgccaatctgttgaagttgttcttgaaatacttaaggccccaaacgctggcttggctgtagctagtgtagcccttgttattatttaccccaatgtcaaggtctctataattcaaatatgcagccctaggagactttgaaacataagtttccatataactatacattcttctaatccagtttatgtgcctttgtgcttcctcatccccttcctcttgccaagacaccccatactgaatatggaatatgtttccagctctatgtgggaatggaatttcggattccgaaatctcatccatcctagaaccataaggagtgaattgaacaaaagaagattgac

SEQ ID NO: 110117 - DNA, 360 bp, Glycine max
  unsure (1)..(360): unsure at all n locations
  Clone ID: PAT_MRT3847_70448C.1
tttttctctcaacgcggttattattattgatcaaaaggacaatggtacattgattcgatttgattcgaaaattctcatacnnnncaccacaaaaagctctgaggaccctggaatgaggcgcatcaggatcacccctcatggctctctctcgccacatttcagcggccctcattaacgtttcctccgccgcttccatctgctccggcagccagccaattacaccgacacctcttccaaaatcccggggcttgtcggaggctcgagtaatcagtgtttcgtagaattcaaaaactctatctccgacaagggcgatgccttgtggagtaaaaaggactcactggtatcctttttatctttccc

SEQ ID NO: 110118 - DNA, 348 bp, Glycine max
  Clone ID: PAT_MRT3847_70449C.1
ggaaggtcgcaaatgcgttggctgcatagggcttccgattgacgaggctaagaggggcagtttggggaaatgctcgcggcttttgaagagattgctcaatcatttagaggttaggcaagtgatgaaggcggagaggttctgtgaagtgaaccagcttccgccggagtacgtttgtgtcaatgggaacgaacttggttctgaggaacttgtcacgttgcagagttgagctaatcctcccaagaatttgaaacccgggaactattggtatgataaggtctctggcttttgtgggaaggaaggacagatgccctgcaaacattttaataccaatttcacttttgtgggtcc

SEQ ID NO: 110119 - DNA, 247 bp, Glycine max
  Clone ID: PAT_MRT3847_7044C.1
aagagctttgagctctattgaaggaatcggagaccaagtcttgtgaggtagatgatctgtctcgtctcccttgttaagcccctcagaatctggggtggtaaagaaactaaaaatgtgaacctctttactaattgtgatcatgctttgagctgaaacgagtgacccctgcaagctctgttgaagagaacagagaccaagctttgtcaagaagatgatttgtatggatcacaaaatggagaactgagca

SEQ ID NO: 110120 - DNA, 328 bp, Glycine max
  Clone ID: PAT_MRT3847_70450C.1
tttgcttttccctgaggcacttctcaatggggagagggtatgcctttttatctacggagaggagctgcggcaaagacagactttataatgaatctgccccatgcttcattttcattggggctattttatgatgctgatcattaccgtaaaacttctactaggactgctgcttgcattaaacgaccaccctattgctacctatcattcttaacaagaccacaccacaccatcaattaaatggattttacccacaaactggaacctctacgacagatatacgcacgtgttgaattcgaatgctaacaccaggaagttattacaggtaggt

SEQ ID NO: 110121 - DNA, 278 bp, Glycine max
  Clone ID: PAT_MRT3847_70451C.1
ctcgaacaaaaacaacaatacatcaatcacaaaaaacttgcttggtctgactaaagaaagttatcaaagccaaacaaatacggagctttacccaattttcttgctgctgaattttacactgttcaatcttcaaaatcacatttttctcgatcttcaccttttgggatgctatctttctttttcctccttcttcttcttgtttttttttcactgttgaatctaaaaacccttgctggtttacgctaaggatgcaatctttggttgtcccacaacgccat

SEQ ID NO: 110122 - DNA, 2091 bp, Glycine max
  Clone ID: PAT_MRT3847_70452C.1
gcggctgcctgctgtcgccagttcgcgctctctctccctcacactggctgcggcccctgcactggatgttggaaatcaacaaatcttatcaatctctctttctctctgcggcacctcttgttaaaaatttgttcatttgaccgtgaaaatcaacaaaaacttatcaatctctctttttctctttctctctccggcacctcttgttaaaaaattgttcttttcaccgaaacccgtaaagggtcctgagctagcttcttctccatccatggtcctgatttttttcttcctcttgttttcagcttctatatgcaaaagggggtggaccaaatgctgcaaaatatttataatgtagttactcactaaccacctaagccatgaaaaccaaaatttttcccacttgggtattctgcgaaaattggtgcatttgtttatccctctagtttgccctggttggatctgcatttggtgtgcaggaactttggcaaaaaggttgaactttgatggttaattttgagaggcttcaagtgtgagccacatgaagaacttgaagtggcacaagcaaatttccaacagtggcaacaagttggggagaaggctttcgcttggggagtataaccgtgcagtgtcatggtctaagtatttggtgtcaccaggggctgagataaagggtgaaggagaagaggaatggagtgcagatatgtctcagttgctcattggatccaaatttgcctctggaaggcacagcagaatctatagaggggtttacaagcagaaggatgtggcaattaagctgattagtcaacctgaggaggatgaggacttggctgcttttcttgagaagcaattcacttctgaggtgtccttgctcctcagattaggccacccaaatatcattacttttattgctgcttgcaagaaacctcctgtgttttgcataattactgaatatttggctggaggttctctgggaaaattcctgcatcaccaacaaccaaatatacttccactcaagcttgttctgaagttagccctcgacattgcgcgggggatgaaataccttcattctcaagggattcttcatagggatctcaaatcagaaaatctccttttgggggaagatatgtgtgtaaaagtagcagattttggtatctcatgcttagaatctcagtgtggcagtgcaaaaggattcaccggaacataccgttggatggcgcccgaaatgatcaaagaaaagcatcataccaaaaaagtagatgtgtatagttttggcatagttctatgggagcttttgacaggaaagactccatttgacaatatgacaccagaacaggcagcatatgcagtttcgcacaagaatgcaagacctccattgccatctgagtgtccatgggcatttagtgatctcatcaatagatgctggtcaagcaaccctgatgaaaggcctcattttgatgagatagtgtccattttggagtactacaccgaatcacttcagcaagatccagagtttttctcaacttacaaaccgagtcctagtagtagtaacacaattctggggtgcttccccaaatgcaatgctcgccataaatttggtgcatgcaaagcttagcaatatagaaatatgctacttgtcaagcaatagatgcatgcttctcaattgtgtgacttgaagatggaaacatgggcatgcataattatctatgtaaagttgttattattattcctcacaccctttcattttataatttcaacccgctatgttgagtatgttcatgaactattttggccgctattgtttacactgtcaaaattgaatattttagtatacatagttacatatgcatacatatgtttgtatgttcgttttcattatctactttaatactactattactatgtctgtatgcatgcacttgactatgtaacccattttgatggttaatgtgccccgaatctttctcaagcgtgttggcgttgtgggcaacaattattctctgtctatgatctttacagagcatgtggttgtgtttgtgattatgatagccttgcttatccaagctaggcacctcaattgcaacattgaattacgat

SEQ ID NO: 110123 - DNA, 435 bp, Glycine max
  Clone ID: PAT_MRT3847_70453C.1
ttcaacttcttgtgattgatctcaactctagaaaccgacagttttggaaaggagctggcatctgcatatattcttgagactccactctccataatcttttgtgcttgctgctcgtgatgatgttctgtattgggttcgatctgttgcttatgaaattggttgtgtagcatcgattatgatgatcagacaaaaatagtggtattagaggtaggtcctcatttgttttaactggttattataggagtggtcagtgttggtgcaagaccatagatctgatctgtacaacctttaccagtaaatggtattgatgtacttttaagttctgttctaccggatggagattttaactcttctggcattaaaggaatatttatgcttgctcgtgatgtgcagccaatcgtgctttatgacaaggaacgacaacttgcatgactt

SEQ ID NO: 110124 - DNA, 143 bp, Glycine max
  Clone ID: PAT_MRT3847_70454C.1
ttcggaatcggactcttcatacatcctctattatttctttccaacaataattccctgttcctcagtttacccaacatacacaacacctacgattcaagtctcccaaaacacacataactaggaacccgctccttccttaacct

SEQ ID NO: 110125 - DNA, 599 bp, Glycine max
  unsure (1)..(599): unsure at all n locations
  Clone ID: PAT_MRT3847_70455C.1
ctcccttcatttcgaattttcatatatcacattcccttcactttctattctttcttcttcttcacttcaagacagcaaaatgaacgatcttatgaccaaatccttcaccagctacgtggacctgaagaaggctgcaatgaaagaagatgttgatttggaagctggtgttgttgtttcttctgctactcctcgcaacgtggaacttacctcttccacaacacacttggacaccgacatgggtctcttcctcgaagaggctgagaaggtgaaggctgagatggggtccctccgtgacatcctcggccgcctccagcaggccaacgaggagagcaagtccttgcacaagcccgaggccctcaaggtgctccgggcccggatcaatgcggacattgtcgctgtgctcaagaaggcccgggcgatccgggcccagctagaggagatggaccgcgccaatgctgccaacaggcgcctctccggcctcaaggaggggacgcccgcgatctaccggaccccgattgcagtcaccaatgggctcaggaagaagctgaaagagctcatgatggagtttcaagggctgnacgcagagatgatgagtgagt

SEQ ID NO: 110126 - DNA, 1109 bp, Glycine max
  Clone ID: PAT_MRT3847_70456C.1
gctacctgctcgtaggccgccgcgtcgtctttttttttttttttttttttttttttttttttggttccaaattacacggtgcagtaaccattattaggaaataattgagaaacacatgaaggaccaaagtctactacataaccaaacttgaccccaaagatgcttatctaaagccccacactatgttgtgctatcctccaattcatctcatctacaatccccacgatctccacaacccttttgctctcacctctttaatcacactgaatcatacatcaatcaaaatcttttccttcacacaacaagatccaagtatgtttagatccatgactactcggagagggtatgaaagattaggtaaagaatctgccaccactgcacttttgcatgaggggttcaagaggagcacaagtttgccttcttggggatccaattcttcaagaaaaatggctcttggttccacctatggagaaatcaatctaaagagaaaccccacaaagaagggtaataatagtgacaagaagagtcacccacttctcagcttcttggctcttcgtaggaaaaagaaaacaacagcaaggcctgaatttgcaaggtatcttgagtacctcaaggaaggaggcatgtgggatttgaattccaataaacctgtgatgtattacaaatgatcatagcaagtttgcttcgggtttgaatgcaaaattaatttgttggcatattaatacgttaagagtttatatagtactactactatttgattcttaattatgtccaattactttgacaagatgtagagtatgttgacttttgctattaattaatcattcaattaaatattttgcaaacatcaaaagttcatctaacctttttcgataggttttagtaatataattaaagaatcaaataaacagactttatttcccaatggaaaaaaaaaaaagtcgtcgctcttgaaaatctgcaagatatgaaattacaggaaattaatttaggtatcagaggggcatggaaactttcgcttcaaactagataaattttatagtatttttttcttcccaaatttgcaagcctctcatcacctgggtaaggacaattatgatatgctcaaa

SEQ ID NO: 110127 - DNA, 531 bp, Glycine max
  Clone ID: PAT_MRT3847_70457C.1
tacggctgcgagaagacgacagaagggtgcataattagctagtggccttatttctagctactagggcttgggtttatggaataaaaacatacatcacgacatgacttgaaatttcaaaattaattgctgacagccctgtgctcaaatctgcatgttctagtcaatacttatttagctttaaactgcactagtagactagagcctggctctatgtatatttagctcaagaccttatgcagcatgtttattcaacttaggcattgaaggtttaaagtttatgatggatggcttgacagaacatgagtcccactatgcatttatgacaccttttatgatgatctgaaccaagacattttctcttgagcagcatatattaataaggaatgtgctgaatcagtatctagttgcgcaggttcttgaaaatgatgaaaccaatggatctgtccttgggcagcgtgctctgctatatgacagtgtgggaaaagtcagacttggtgctgaagaccttaagactgtgctgaagattgatcc

SEQ ID NO: 110128 - DNA, 1989 bp, Glycine max
  Clone ID: PAT_MRT3847_70458C.1
actcaccaactcaacatcatgtcaaataccaatgaaagcaactactggcgcattttcttcttcgtcttcgtctcctctttctcaatttcgatttctcaattctcaattctcaatctcaaggtgaaatgatgcactcagtggcaataattacttttggatgctggagataaggcgtgatgggcggttgctgttgttgttgttcttctaaggagactgtgttgagcgctccacctgcgtactactattatccaagagcatcagaagagcatgttcctctatcttctcacccgggtgctgcttctgctttctctgggcggctattggttgatactaatctagatacttcatctcctgatacttatagacctcctcctgctcctatccctttcaatgttaccttaggtaccactcaaactccacctgcggctcaagaaattcgtagtgacaagaataatacttccttgccttctacaaattctaatgcaattcaagaaccagttgctagagacattcatgggacctcagctaagttggaagagccgaaggaatccgagtgcaaagttcagactgatctggagctagattctgcaaagggttccgaaattgaacttgctaagtcggggaaacctatagatttagtggaagaggaagatgcatgcccaatctggctcgagctcgagccgaatcggctcgagccggacccggatcaaagaaaatttagttaactgaagtgaacggttgagatgtggggaagaatgacgaaagcgaatcaagtaggggggttttgcatgtatatgctgatgaaggtgaaatgatgctctcagcggcaataattacttttggacgctggacataaggcgtgatgggcggttgctgttgttgttgttgttctgctaaggagactgtgttgagcgctccacctgcgtactattattatccaagagcatcagaagagcatgttcctctatcatctcaccagggtgctgcttctgctttctctgggcggctcttggttgatactaatctagatacttcatctcctgatacttatagacctccccctgctcctatccctttcaatgttaccttgggtaccactcaaactccacctgcggctcaagaaattcgtagtgacaagaataatacttccttgcattctacaaattctaatgcaattcaagaaccagttgctggagacaatcatgggacctcggctaagttggaagagctgaaggaatcagactgcaaagttcagaccgatctagagctagattctgcaaagggttccgaaattgaacttgcaaagtcggggaaacctatagatgtagtagaagaggaagatacatgcccaatctgtttagaagaatatgatgcagagaatccaaaactcgcaacaaattgtgaccatcattttcaccttgcgtgcattctggaatggatggaaagaagtgagacttgccctgtgtgcgatcaggatttggttttcgaccctcccattgaataagacatcaacgtgggagttcaaatatactgcgtagtgtttgagaagcaaggttacaaagtcatgagtttgatatgatagcaacccgagcttatggctgtattttgattgtttcgttttccgagttttctgggtttattccattttttactcagtcccctgcgttgcagcatacaggaaattaaaggaaatattctctgtttatagttttatcaattagaatgttttaaagtgatagctggatactacaagcgaaaacagctggcgatatgatttttcgaatagattgtaagacttttgttacattgtcaaagaatggtaggatgttctcactctggtggtactgctttcatcttatatatatgtatagggtgggaataggagcaattcttgtttgagttattactttcaataacttttttgtatatattaaatttcaataatctagtagttgcatattttgatattatctctatttcatgcacacc

SEQ ID NO: 110129 - DNA, 487 bp, Glycine max
  Clone ID: PAT_MRT3847_70459C.1
cttctcctcggtttgggttttacccgagccagaccgtgcccgcttcgtacccgcctccgaacccagagttttcctcctctactaaacatttgaagagccagagtcagaattcgctgactccagcaaatggggcccacgatgcgaaggagctccacatgtttgtatggagctccagcgcctcgccagtgtcggagaacgccggactcaacgtcttcggcaacacggaactcggaacctcccaacagcctgaccagggtggtgctaaagagattaggatgttggtggctgataatcatgcacacttgcaaaatggggaagccaacaacaaaggtggtttggaggccggacttgatgtggaagagttcaagtttccggtaaatgggggagaacaagtggaggaagaaaaagagaaagaaaaagaagggctcaataatggactcaacaagttgggctcaagctccacggcagagctccacccgaaagccgc

SEQ ID NO: 110130 - DNA, 223 bp, Glycine max
  unsure (1)..(223): unsure at all n locations
  Clone ID: PAT_MRT3847_7045C.1
cagtgatactctcaaacaaagttttttgtcagcctttgagatactactcgatattatatttgacaattgcttgctgcaggtcttcatgcttccatacaatttaaaaaataaaaatncntncactgtgctngatcttgcannnaagncgcaaccgtancgcctggcattacggtggtatcattttatggagttagcagattctgtatttttgtttatcctgtct

SEQ ID NO: 110131 - DNA, 101 bp, Glycine max
  Clone ID: PAT_MRT3847_70460C.1
gtatgcactagtggaactgtgtgcacccgcagaggttcggattgggttcgcactggactgcaaatgacgagccacggttcggattcggtctctaacccaaa

SEQ ID NO: 110132 - DNA, 267 bp, Glycine max
  Clone ID: PAT_MRT3847_70461C.1
ggatattactctttttgttcaaaaactttatctgccacctcttctaagggatctttgtttttgatgttatgacagagccctcgaacccccgcataagctgttgaacaaaaagagtaatatcctttccaacaataggaatcgatttgatgctacttccaataacatagccatctgtaacaggtacaacagcttatgcgggggttcgagggttcttgcataacatggaaaaggaagtttcctcttaagaggtggggggtaaaggttttt

SEQ ID NO: 110133 - DNA, 325 bp, Glycine max
  Clone ID: PAT_MRT3847_70462C.1
aaaaaagccccttttatttaacccccaaaaatggaaatgggaaaaaaaaaatatttttcacccctcaacaaaaaaaggttcccttttaaaaaaaacggggccccaaaggggcccgaaaaaacaccttatcccaaatttgaattttaacccaggggcaaacccccctgaaacaaacttgggaggggctttttcacccaaacaaatttatgccccaaaacacaagggggggaaggggccaaaattttttattaatacttccaaggggccccatgtcctttttaaacaacccaaaaacgaaaacccgaaaggtctttttaaacccccc

SEQ ID NO: 110134 - DNA, 493 bp, Glycine max
  Clone ID: PAT_MRT3847_70463C.1
ctcatgataaatgtttgaaacagtatacaaaacatagatttaacatttcatatactacataaactcacaacaatcaatatcaaactttacatatctaaaaacttatatattcttcgacatatatataaattattccttcttcttctcaacagcttcattctctttctcttggtcatcgctatattcaaagacagccttgatctcattctggaacaaagcgcacaacataacagcaccagtgcaaccaggaactaagaacagaagagcaggttgagcatgattgaagatagtcatagcatagaaggtagcaatgataccaagagcatatcctaccaagcaggaatagaaataagtggtcttgaccatcttgaagtccaacttttcaacttgtccttgtaattggttaacgatagtcttgtgtacatcatacttcaagcaaagggcaacaaagacaccaggaataacgatatctcctagtcccaacatagagaac

SEQ ID NO: 110135 - DNA, 407 bp, Glycine max
  Clone ID: PAT_MRT3847_70464C.1
ggggcaaaatgaacagttgggaacccctaaaaaattgtccaaaaaaccccgcctttttttttttaaaattaacaatcaaagggcccttcaaggggaaaaaaaaagtccccctcggaaattttcccgggaaaaaattccaaaggcaaaaggggggaaactaaatatccaattccaattcaaagggaaaaatggggtgggttggaaaactttttttacaaacccggggttcccccttttccttttcccgcttttgggaaagcctttaaaaaacaccctttgtttaaaattggggacaattcaacaaatcaaagtaaggggggggtacataaactaacccactccgggtggggggcccggcaatttgagggaggcaaaaaccccccctggttgtttttcactggcaaaaa

SEQ ID NO: 110136 - DNA, 666 bp, Glycine max
  Clone ID: PAT_MRT3847_70465C.1
gcatatgaccaagaaatacttcttttcttcaactgtggtccatatccagcagataatgctagctgtcggaaaatttctggccatgtcaacagatttaagtgcttgtgccaatttcgtatgtcaaaaccccatgcatacgcgcctgccacaatctctggatggccacctccagtgttagcagcaccattttgattcgctcctaatcctgtagaaggtgtccttgcaacatcttcaatgtcctttattatcaccttaagaagagaaacatgtatctcacccaacaatcttgagtcatagtcatgaaatgcttgaacaaactcatctagagtaaaagaccataactctagaacatcagcaaagttgatcaaaaatctccaaaccatgagaagattgccaacattgttttctgagttgatccagggtttgattgcaaatggttttcttagctttacactctttggtgggaaaacacacaatgaatccctaaatgactcaatgtgttgcagagtatcaaaatcaagatggacaatagaggaaaaccccttgcttgaggcagccaactccatcatttccagctgttcatcctcaataagttccatagattccttggccattctacgagcagttgccttctcaagagcagctttccttctctctgcttctctc

SEQ ID NO: 110137 - DNA, 217 bp, Glycine max
  Clone ID: PAT_MRT3847_70466C.1
tgttgaatcagctctcggtgaaatcctccggcggtgaaacggattcattctgcttcaggccgaatgagttggtcgatctgacgaatatgtgcagagatctgaggcacatggtgcccgagatattggaggtggaggcggatccgatcggaggaccgaggattcaagaggcgtttattaagtctctacgtttttaagagcgctgttcgagatgggtcac

SEQ ID NO: 110138 - DNA, 334 bp, Glycine max
  Clone ID: PAT_MRT3847_70467C.1
ctcaattctaaagaggggtgagaaagacaaagagaggttgggctatgctttacaatatcaactaacctactgaataacctagcacaacatctggactacatctcacttacttacttacactcatcctcgcattggcgtgcgcctaatgcaaatgctgcgatgacatctcgtgactacaagactgaactctcttaccacagacctaagtggggatcctatgcctaaatgcccatacttgacgaacagtaaagagcctactaacttctcatcctcctcacctactgatttacgtcatgccagatctcggagctagaggctcaagctgtgaacatag

SEQ ID NO: 110139 - DNA, 741 bp, Glycine max
  Clone ID: PAT_MRT3847_70468C.1
acccttggtgctacccttttctgagcagcttctcttctttgccacccttgtgtggaggcacttatttggcagcaaaaatggtgggaattcaccctcaatgaagaagccttacattcctgactacaaactagcttttgagcacttttgtgtgcatgctgcaagcaagaccattcttgatgagcttcaaaggaacttggaactgagtgacaagaacatcgaagcgtctagaatgacgctgcatcgctttggcaacacctctagcagcagcatttggtatgagttggcttacatggaagcaaaagagagtgttagaagaggagaccgtgtttggcaactcgcatttggctctggcttcaagtgcaacagtgtggtttggcgcgccatgcgccgagtcaccaagccttctaggaacccttggcttgattgcatcaacagatatcctgcacctctcaacaactgaagcagaatttgacggcactagtgttatgaatcttattatcagtgagggtatggttaggatcaataagggtagtactaatttggtcttcaaaaatgttacatctgttttctgtttctttctcatttaattattcctggcttgaaattctatacttttaattcctcattaggcatatggatgcctccttgtttaatttctctgtttcttcataggatgattgatatcaaagttcatggatggctattacctatagtcaatgctacttgtctcatgttttattt

SEQ ID NO: 110140 - DNA, 2097 bp, Glycine max
  Clone ID: PAT_MRT3847_70469C.1
tacggctgcgagaagacgacagaagggggagtatcaacaagaatactcataataatatagtggctagcatagagctagtaataatattaatattgttaagctagctctaagccatggctaatgaacgtgatctgttctcggcggagattgtgaaccgtggaattgaatcgtcaggaccaaacgctgggtcgttgacgttttcggtgagggtgagaaggcgcttaccggattttcttcaatcggtgaaccttaagtacgtgaaattgggttaccattatctgataaaccatggcatatacttgttcaccataccggttcttctcgtggtgtttagtgctgaggttggaagcctcagcaaagaggacctatggaagaagctttgggaagacgcgcgttacgaccttgctacggttcttgcttcctttggggtcttcgttttcaccttgtctgtctacttcatgtcgaggccacgtcccatttacctcattgattttgcatgttataaacccgatgatgaactcaaggtgtcaagggagcagttaatggaggtggcaaggaaatcaggcaagttcgacgaagcaagtctagagttccagaagaggatgctaatgtcctccggaatcggcgatgaaacctatataccgaaggccgtcatcgcctccaccgagaacaccgcaacgatgaaagagggtcgggccgaggcctccatggtaatgttcggagccctcgacgagctcttcgagaaaacccgcgtccgaccaaaggacgtgggtgtcctagtagtaaactgcagcatcttcaaccctacaccatcgctctcagcaatgatcataaaccactacaagatgagagggaacattctgagctacaacctcggaggaatgggttgcagcgccgggatcattggtgtggacctggccaaggacattcttcaggcgaacccaaataactacgcggtggtggtgagcacggagatggtggggtacaactggtaccaggggaaggataggtctatgcttatcccgaatagcttcttccgcatggggtgttccgcggttctgctttccaaccgtcgaagggactatagccgcgcaaagtaccgccttgaacacattgttcgcacgcataagggtgccgatgaccgcagcttcaggtgtgtgtaccaagaggaagatgagcaaaaactaaagggactaaagatcagcaaagacttaattgaaattggtggtgatgctctaaaaaccaacatcaccacactaggacccttggtgctacccttttctgagcagcttctcttctttagcacccttgtgtggaggcacttatttggcagcaaaaatgatgggaattcaccctcaatgaagaagccatacattcctgactacaaactggcttttgagcacttttgtgttcatgctgcaagcaagaccattcttgatgagcttcaaaggaacttagaactgagtgacaagaacatcgaagcatctaggatgacactgcaccgctttggcaacacctctagcagcagcatttggtatgagttggcttacatggaagcaaaagagagtgtgagaagaggagaccgcgtttggcaactcgcatttggctcaggcttcaagtgcaacagcgtggtttggcgcgccatgcgccgagttaccaagccttctaggaacccttggcttgattgcatcaacagatatcctgcacctctcaacaactgaagcaaaattctaaggcactagtattatgaatctatcagtgaggtcatgtgaaagctatggttaggatcaataagggtagttctaagttggtctttaaaatgttacagctgctttctgtttctttctcattttattattcctggcttgaaattctatacttttaattcctcattaggcatatggttgcctccttgtttaatttctctgtctcttcataggatgattgatatcaaagttgatggatggctattacctatagtcaatgctacactacatgtctcatattttatttagtttagttgctctgcctcaactgcttaggtgggcttatattatactatgaactatgaattatagatgaaccaacttgctagct

SEQ ID NO: 110141 - DNA, 361 bp, Glycine max
  Clone ID: PAT_MRT3847_7046C.1
agtttcccgtcatcactgtatgacgtcctccttctttgggggggggggggggattaaataggctagaagagaggcagcggagtagtggagataaggacccgtgtaaacaggaagaacgtggagtgaatggctcgattaaaaaccttgtggaactaatttgattatgttaagatggggtaacttgataagcggcgaatcgcgcagaaaaagtgtatgtgattggaattgcagggtgcgatcaacgtgggcagcgtaaacgtagtattcgtacagcgtggtcgaacgatatttggtgtagcagcagttttcagaggacaggacttaccacgaatagtaaaagtgcccggttatatacaaaggt

SEQ ID NO: 110142 - DNA, 312 bp, Glycine max
  Clone ID: PAT_MRT3847_70470C.1
aaaaaaacaaaatttttttttttttaacttccaattgtacaggagggaaagaaccccgcccccttggcgaaagggggggatttttttttttgaaagccggccccttggaaaggggcccctaaaaacaaataacgggttctttcttttttttttaaaaagcagactctatggccccttctttttttttttctgcaaaagactggccaatttgcaggtttgtccaacttttccaccttcttcttggttttttttaggaagccccaaagctgtgctgtttgggggcttaagggggaaccaaggtttggctcccca

SEQ ID NO: 110143 - DNA, 1233 bp, Glycine max
  Clone ID: PAT_MRT3847_70471C.1
cccacgcgtccgcccacgcgtccgcccacgcgtccgcccacgcgtccgacggctgcgagaagacgacaggaggggacataaacgctccctttcccttttccttcctttgggttgtgttttgtgttttgttttgtgtgttttgtgttgggttggattggattggattgtgttgggttggattgtgttgtgtgttccatacaactccaactagtcagagattcttgtctgggctacattgcactttgcaccccaaaaagtgaaaggaagagaggcataaacaccccaaaaaatggagagagctctcactaaagtcagcagcttgaaggtggggttggggagttcatggatctccaagaaggccaaggaggagttctctaacatctctgaagacatctctagtttctcaaataccgttgaagaaaaggcgaaatggatcttcaacaaattaaaaggtaagccacagaaaagcctaccggatctcctccgagattacaatttgccaccaggtctatttccacagaacataatctgttatgagtttgatgaaaccaagggcaagctgattgtctacttgccatcagcatgtgaggtcagcttcaaggactcctctgtgctgcgatacgcaacccgagtcaaaggggttctcacaaggggaaagctttcggcgatagatggaatgaaaacaaaggttcttgtgtgggttaaggtgacaaatgtggcagttgaaggttacaagtctgataagttgtggtttactgctggtgtaaagaagtcaaggacaaaggatgcatatgatacaccttgtggtgctgtcagagtatcagaattctgagttcacaaaatgttggttatttatgtcatcactatcattgatatggaatagatagtctacgttgttggaaatgttacacaatagctgtataagttaggatcctcttctccatatttatctattaatattggatgcattcctgttttggtcattcattgtctcattgaacatgattaatttggcaagctcaaatggaactctgatgatgctatacaagttgaaacaatgtattcttttgccccatggttacatgtagaggattaatgatttggagggtctgtttggtgaacagaggtttcagaagtaaggtttagttttaagctaaatgattattttggttcccccctatgtttaaaaaaagaaaaaaaaaaaaaaaaaactcgagactagttctctctctc

SEQ ID NO: 110144 - DNA, 286 bp, Glycine max
  unsure (1)..(286): unsure at all n locations
  Clone ID: PAT_MRT3847_70472C.1
gnagtgaagacngnaactcgganttcngtccagantcagnagggatgatccaacgngattaatgatgccccggcanctactccngtncanntatgcggctcagnntatgcgnnttntgcaagactgtgggtttctgaatctntnttccaagtacattgcaccttnggggatgccatttntccanatgnnctcctcnggatgttcncccagttgcagcactnnctcacaatacatagccnacacatgatntnatttatgatgtatntngtgaaggtggtattangtc

SEQ ID NO: 110145 - DNA, 428 bp, Glycine max
  Clone ID: PAT_MRT3847_70473C.1
ccccaggagcctgaccacggacaaggggctgcaccatctccacctacacaggggccacccaaggctggagctatccaggctgacggagctgcgctttctactgagaataagaatgcactgtcaagccaggagatcccaagaacggttgccgcgcatcctactccacagcaacatccccctgttgcaggacccaccttaatcccacatctacagcctgatgtattcctccctggaatattttgttttcgtacacccccggaaccagcgcgatatgagaccctctttgtccgagacagggctacatgctcaagctccagcttctggaatgatggtccctctactgccagaggcaccatatgattcctccacctgctcctggcggcattgaagagaccgcaacgtcctcctgggcactcctccaaacctcc

SEQ ID NO: 110146 - DNA, 507 bp, Glycine max
  Clone ID: PAT_MRT3847_70474C.1
gctgcgagaagacgacagaagggggaacaaacctatgttttacacatgtaagaatgagaaacacctatctctattttaaactcggttctcccttctcaactttctggcgtgttaacatcaaggggtgtctcaaatcttgatctttatcatccatccttcgctcagagaagcttctaaagaggaatagtatgttcgttgaagatagtgggaaaaatcatgtcaatttcaagaactcaaatggggtgtctcttggtgctcatactaatattattaagcagttcttgtttaaaccatggagcattaggtgctagatatgggaaaaaagtggagcatacacacaagtttagagtatggtggaaaagctttagccatgaaacagctcgaggctcttataagacagttaataaagaagtaccttcctctcctgaccccttacacaacaggtaggtagttatttcaattgactgtatcctctctccttacagagcttctcgtgggatgagtgac

SEQ ID NO: 110147 - DNA, 524 bp, Glycine max
  Clone ID: PAT_MRT3847_70475C.1
gtttaacataagcacaaactgtttagtttttctgcaaacgttgtgcttaaaaccagtctcattggtaccatatataaagaaaggtcattctttcttcccattataagataaattctcaggcattctctcaaactactctgaatctttgagatttttcattgcacacttctcttgttcactgcaagtaccaccatgccgtcactgggggtgcaacttactattcaagataatcatgtggcgatggagaatggcatgctaaaagtcaccttatcaaatcctgagggaattgtgactggaatacagtataatgacatagacaacttgcttgaagttttgaatgacgaatctaatagagggtattgggaccttgtttggagctcaccaacaagtacaggaacaagtggcacatttgatgtcatcaagggaacaactttcaaagttatggttgaaaatgaggaccaagttgagttatccttcaccaggacgtgtgacgtttctctcgagggcaagttggttcctttaaa

SEQ ID NO: 110148 - DNA, 408 bp, Glycine max
  Clone ID: PAT_MRT3847_70476C.1
ggctcgagcaaggtttgctcgtaaattgctgtcgctgatgcagcattcgtatcattgaaaggctatgcagctgcaagctctttggcctttcttctcttatcattctctgcaaggaaaaaaaaacttagatatagacattttacctatgttctcctatcaaaatcttagattgattgcattttacccatgttattggtttatagaaaccattattgcatgaatcatcgaggtgggatatccaattctgattagagaataataccgaaagtacatacgatattgcatctaagttttgtactttttgaaaattccaaggactcacgttaagcaaattatgaaacatatttcaattctcactggtacaagattgaattgatagatatgttgcttggtctttctgggggatga

SEQ ID NO: 110149 - DNA, 347 bp, Glycine max
  Clone ID: PAT_MRT3847_70477C.1
atagattatatttttttttacatcattagatctgaattatgaataatgcactgtgctgcattaatacaatccgaaggctttaaaaatgtcaacaccttaacccctgatgaacacccccttgatacttcagcgatacaaagaacttctaacaggttctttaatgtttattacgcccttttaaaatgtaaatacgacctggagggcatgcggcatggcctacgtgacactctgctctctgacacattcttacccatggctgctatcgtaacacggacccacactgctactattgctggcgccattatacattggactatcgtcatgttcacggacgtacttgccaattc

SEQ ID NO: 110150 - DNA, 469 bp, Glycine max
  Clone ID: PAT_MRT3847_70478C.1
tagctcgagccgcttttatcgtttctcactatatatccacacgcaacaactaggggggctatgcatattgaatattctgtctgactcagaaattccacaatcaataaggtgaaattaattgccacttctttgatctcgtgtccttttttctgatataacagatcaagctagctgaagaagctggaaatggttccaaggtcactagtaccaccacctcctccacttcccaaattctcaagaccaaaagcagaagagagtgtcacaaaccgagaaattgccaagttttggaggcaaaagaggatcgtggaggaggaccacctccttgctgctatcaaagctgcagctagactccgtgcacgcactctcacggagcaagagtaccagaggttcgagttgtccctgaagaccgataatgacaatgatgaaacccagaaagagatggtgagatggattgtagggaaaaatgttt

SEQ ID NO: 110151 - DNA, 271 bp, Glycine max
  Clone ID: PAT_MRT3847_70479C.1
ggtggtgaaggtgtgtgtgccaccctatgaatcccccgacagggtcctggggtgtctgatgcaaaatgaaattgagggaggcacagaccctgtcgatccttttaagggctagagtaaggaacctgcttaccttactctgcatccataaggatcccttcgtgtcattcaagaccgtgattatactctctatgaatctcgtgcactacctccttccttagctgacaagtatcaagaccaagggactgacttattgggaaagacaactgaagaa

SEQ ID NO: 110152 - DNA, 543 bp, Glycine max
  Clone ID: PAT_MRT3847_7047C.1
aggggcaaaagaaacacgaatagcgagatggatcacactccttatacatttttgacatccatgacacgcagtactgctgtctttggagaacaacgcccttaggggtgtataagagccactcctggtggcctccccttcggaactaactgctaatcccccatgcacggcctggctatacagaaaaggggcacttgttgtcatctactccatgggcgcgctgaaggatatataacgcaccgtcctgcctatacaacgccggaaaacacgtcttggggacgccgcccgcggggcctccaacgaccgtcttgaccctatggaacccattcgcgttcttttgcttggctgagggagacatggaaagagagcacctaatctagggattacttcgtccctcgcccctgctccctagaaaaaccatcgagaagacccaccttttggatgcgggtccactcccgatcgaaacgtggggtggcacggctcacgcatagtccagcattttctgggtccccgcacactttctctgcctggaacccttaagagaaa

SEQ ID NO: 110153 - DNA, 370 bp, Glycine max
  Clone ID: PAT_MRT3847_70480C.1
tccacccggacggagacaaataggataagctctcccactctacgatcaggcttaggaggaaacggatagacttaaatatttttttgctgactttgactctcttattggcactgtgccggatcgtcgaacaaagcggtctaatatgaaactcactagaaccacagtgcaagggaccattctgcgaattgacttttgggacaacaggctgactgagaaaacaattagaacttgcggagatttgcacatcacgcatggtaattacacaatgactactcagttgagcacagttgtaccgcatgacattacggggcatgtgtagacctgggcgatcaacagtcttccatgggtgctcactgctgaaaataaatac

SEQ ID NO: 110154 - DNA, 127 bp, Glycine max
  Clone ID: PAT_MRT3847_70481C.1
gacacttgttttggggcaagcattgctatgtgtcaatgaaatttcggccgatctcctcgtggcgaaggcattctgtgatttataaccaatctatacctacgaacgcgcgtatgatattaacaccctt

SEQ ID NO: 110155 - DNA, 404 bp, Glycine max
  Clone ID: PAT_MRT3847_70482C.1
atacgaatcttttaagtgcaaaacattacacatatcctcaactagaaccaatgtttcttagcagaaagcaacaaacaccttcaaagactattattattcacgagttaatttaaattgtttcttcggagagatgaaaaaaataactcacgagaggaggaaccgaaagggttcagtgttgttcggcaaagaggtggcgaaggcgagaagcgaagaggccggtggggtcatgagaagcttcccgaaggaggtcgttcttgatgttgttgatgcggtcggtgagggaatcgtgctcgaccctgagggcgtggatatcttcttggaggccgtggattttgtacttctggctcaaagatcgcatgctcaatagaaggatacccgtcatggcgaagaattgaatgaagctg

SEQ ID NO: 110156 - DNA, 177 bp, Glycine max
  unsure (1)..(177): unsure at all n locations
  Clone ID: PAT_MRT3847_70483C.1
tgcttctggtggagactgaaggatcataccacagttcagcaaaaanacacaaacactggatattcatgtgggtcagtcatattcatttttggttacaatggatcaaaatggccagcatgattactatattgttgcnagtccctnggtttngtaaattcatcgngggccggggnaatc

SEQ ID NO: 110157 - DNA, 202 bp, Glycine max
  Clone ID: PAT_MRT3847_70484C.1
gaccgtattccttacgctctctcagtcacaaacacacactgacttaacacacatcaggaggagacatgggtgagcagaccttcatggcgatgaggcctgatcgcgtccagagaggcctgagtggcgagatcattgccacccttgccgaagaaaggtttctacgtgagaggtttggaacttgttactgtcgaccgtccttttg

SEQ ID NO: 110158 - DNA, 907 bp, Glycine max
  Clone ID: PAT_MRT3847_70485C.1
cttcagcatgatgcacatggggtttaacaacttctctgggaagttccctccagagattgcaagtattcccattgtggtgctaaacatcacaagtaaccagttttcaggtgaaatccccgaagaaattggcaacttgaagtgtttgatgaatcttgacttgtcttgcaacaacttctctgggacgtttccaacaagtttgaacaacttgacagagcttacgaagttcaacatctcatacaaccccctaatatccggtgtgggtccatcaacacgacagtttgctacctttgagcaaaattcatatttaggcaacccccttttgatccttcccgagtttatcgataacgttaccaatcatacaaacaccacctctcccaaagagcataaaaagtccacaagactgtctgtgtttttggtgtgtatagttataacactggtttttgcagtattcgggcttcttacgatcctagtctgtgtatcggtgaaaagcccttcagaggaaccaagatacctcttgagggatacaaaacaatggcatgattccagcagctccggatcctcatcatggatgtctgacacagttaaggttatccgtctgaacaagacagttttcacacatgccgacattctgaaagcaactagcagcttctcagaggacagagttataggaaaaggagggtttggaacagtgtacaagggagtgttttcagatggcagacaagtggcagtgaagaagcttcaaagggaaggtcttgagggtgagaaggaattcaaggctgaaatggaggttctgagtggtcatggctttggttggccacatccaaacctggtcacactctacggttggtgcctaaatggttcagagaagatactgatttatgagtacatagaaggtggaagcttggag

SEQ ID NO: 110159 - DNA, 638 bp, Glycine max
  Clone ID: PAT_MRT3847_70486C.1
atcccggaagagagaacacgaatgtgtgttactgccactacggctcaatgattatatatgaacacaggaagaagcactgaaaaactttcctttgggtgaacaccttttaagggactctttaacattgaaggtttggctttgttgctcattggctgttttagtacaatccatcaagagaatgaattgaaaaatgatattcatacactggttgggtgcctactgcctagtgtatctcctggccaagaattagagactaatttcttgaggtatggggatccaaccaagggcctgatttctcaacatatgttttttcatacacaaactcgagaatcgaactcctaatcagatgcttaatagacatgattatctatcaatcataccacacaccatgttgactcactggttaggtgtataaattatgttctttgaaaactttaatttgctgaatagacaatgtcaaaggtttttcaaatactccaaagtctgctagattctgttgtgttgtgcctcttcagtcttcagtctttgtattgatgttgaggttatgttcttgaatttttgaatatgtacttcagtacttatggtcgtaataggtacgccaacatgactttatattcatttctcactctatttgagac

SEQ ID NO: 110160 - DNA, 178 bp, Glycine max
  unsure (1)..(178): unsure at all n locations
  Clone ID: PAT_MRT3847_70487C.1
ccgtaacggaagggccggcccaggcgtccgnacacttaaagggtttgggaggagggatttcttaaaggttgttgttaggcggcgcgcgtttgtttacattggccccccctcctctggaacatacccttggttccaaaagttaaggcaggggcttgtggcctatgcattggccattggg

SEQ ID NO: 110161 - DNA, 175 bp, Glycine max
  Clone ID: PAT_MRT3847_70488C.1
caaacctcgctgcatgtttcaaaacagccccgccaattttgtttttagagacaaaaggcccggaacgttgccttttttttttccaaaagtctggggactaaagaacgccctttttctcttgggcaatggaggccacaggaaccggggctggggcttttttttttaacacaaatgg

SEQ ID NO: 110162 - DNA, 481 bp, Glycine max
  Clone ID: PAT_MRT3847_70489C.1
ttttgttattgatgtatctgatggaacatcagacataaattctgaggatggttgtttaaaatctgtacgcaatgactatgatgagcatgaaggagatgatgatttttatatttcagaagttcttaaggagaatgtgaatggtagcatggttgatgatgaagtggaagctgactttgaggatgatatagagggaagtgatgtccatatagaaggagaaacaaataacagttctcttcttcttggcatgaatgggtctgtcacctctcatattttgcaaacaaaagatacaaagaaagcaacccatgtgacttctggagaaaataaatggatccaagttcgcaagggaaccaaagtaattgtccaagttgtcaaagaggaccttggtacaaagggtcccactctgactgcttatcctaaactaaagagtagattctgggttctgattgcatgttgtgataaaattggagtctctaaaaagatt

SEQ ID NO: 110163 - DNA, 447 bp, Glycine max
  Clone ID: PAT_MRT3847_7048C.1
ccttcgcgtcctaaatttctgcctactactttgtgtgcgattgcttaagggactgaaaaccactctctgtgctggccacagacttcgtgaatcactctctgttccactgttagtcaatctgctgaacactctacgatttgatgtaggacttcgagtcagattgaaacttcttctgtctcttgctcagttctctgttcaagctgaagatcaagctggtgaaatcttggactagtactcccactctactatctggtgtaggaactcgtgggtagacttccttatttctactctttctttcactctgttcctctcactgatccgcagtggcgttcaaagaggacctcttggacaaacactcgggcgttggcgcaaatgattgcttcggtaaacaactgtggagacaacaggcccactgagacaacaattgatacttgcatagatgtggac

SEQ ID NO: 110164 - DNA, 360 bp, Glycine max
  Clone ID: PAT_MRT3847_70490C.1
caaacaatattttattttgattcttcttactatttttctggggggacatcattgttttgtatttttttattcttaaaaacacaaaacaaaatgttccctaagtaatatataaagggtctcaacatgtaaagcaccgcatggtctctaaattaaaattacataaagcacagcttgtccttgtataaaaccctactcctccatgtcatgggctatatgatctactggctaacgaaaccaatccgaggaaaatttacgattttatataatatcaaccagtgtaatatggcacatcacttgtgcgagacaagaacacccttcttaaacgtagcacatcaccatcactgtaaaaagcttaacttg

SEQ ID NO: 110165 - DNA, 559 bp, Glycine max
  unsure (1)..(559): unsure at all n locations
  Clone ID: PAT_MRT3847_70491C.1
cagagattctaagcttgtaatatctgcagaaagcattaactatggacataaaattctacaaggcattcaaaatgacaacaaaaacatgaaaaaatcactggaagacctaattactaagaatgaatttgataaaaaactacttactaatggtattccaccaactgatattaaaatcacatttaacaatattgaatctttagaaaattttaaagaaaccttagaaaaatgggtcatacttcctcttcgaaaacctaaattatttaacaaaaaacatctaaccaagccttacagaggaatattactttttaacccccctaacacaaaaaaaacaatacttacaaagtctgtgacaactgaagctaaaccaaattctattaacatttcagtatccagcattacatccaagtaatgtagtaaagaagaaaaatatgtcaaancagtcttttctctaaccatcgaaattactccaagtatgattgttattaatgagagtaataatatattacaaggacatcaaaatcctacttaacatgaatctatacgtgaggtgaataatcaa

SEQ ID NO: 110166 - DNA, 211 bp, Glycine max
  Clone ID: PAT_MRT3847_70492C.1
atcccaaattggtgaacaggatgcagaattcccagtcagagatgagaaaaactttgcctctgagaaacctcaatgtcaacagatgcagatatgtcaattggagcaagaaagtactcatgctacgtctgaatgtgcatcagaaatccatgcagatgagccatcatcattttattcctttccacagtcatctagattcgtaaacaatgctgca

SEQ ID NO: 110167 - DNA, 583 bp, Glycine max
  unsure (1)..(583): unsure at all n locations
  Clone ID: PAT_MRT3847_70493C.1
tanaggtataaagaatctcttccaaggttaatatgtgggtctaaccaaagtataatatatagcacattaaagttcataatactttataataaaaagtggacgcttgcatgagtacataaaatatttatacattatatttccactagccatcaatcatgtcgtaatacctgttgaggtgattcagtagactcgaagccgtgtcttattctttatggtttttataagcatatgacatttttctttttggaattatttattagtccaaattcttgcttgcataagattaactcactgcagcttgtgaagaattaaatttagttaccataaatgattttgcattaatattttttttcctttttgatatataaagatgttcttaaaatgattttttttctcgttttccaaagatgggcaacgagggtgtacgtgaacaacgatgaggcctgttatcacggaagaaaggtaggagaaaatgcataataaataacgtttataaaattgctgaatttgtttaccttatcctagaagaggagaattagtttcatctcttctgcaaaataactcatggaagatgaatnttttt

SEQ ID NO: 110168 - DNA, 154 bp, Glycine max
  unsure (1)..(154): unsure at all n locations
  Clone ID: PAT_MRT3847_70494C.1
ctgaacgggaccgagaccagacacggttnggggcacagttaaggtggtagcagtagcatngttaggccatatctcctttnnttctctgccttgtnttgaggtaaaactcacaaanatnataactttnatctgaggaagcaatggcatggagagg

SEQ ID NO: 110169 - DNA, 149 bp, Glycine max
  Clone ID: PAT_MRT3847_70495C.1
tacggctgttaaaagacgggggaaaggtccggctgcgataagacaacacactggctgggaattgcattgataggaatgcccattattgacaaagaagggggtatttaacattctaacattaacaacttcgccattggctgaagtgttga

SEQ ID NO: 110170 - DNA, 716 bp, Glycine max
  unsure (1)..(716): unsure at all n locations
  Clone ID: PAT_MRT3847_70496C.1
gctcgagcggctcgagccgcagttagtcgatcaaagcatttagacatttacggagggtgaaaccccccataaacccttaacccccgaagtaagaagtactgagaagtcgcaggtatggatacacacagagacataaacacaaacacttggaatgcaatggaaccctgagaccgagaggagaagaagaagaagaacattcccattccaattccattgatccatgatgctcccactcaaacatgtaaccaaacaccgtctcagatccaaatccttcatctcctccattctcgacccgtgctctgaccatgctccatacacttgatctagcatcatcatcttcctcagcctcaacttccttttttatctcccaaaacgacgtcgcctcctccttcaagacgtggttcgcgtcggcgcggcagcagcagctccccttcgaccccctcctgaaccgcatccaccaaatcctctcctcccccgacgacgaggatttctccgacgagctctccgccctccgcctgcccttatcggagcgcctcgtcctccgcgtactctgtcacggcgccgcccgccgcgacattctaccctgcctcaagttcttcgactgggccggccgccagccccacttncaccacacccgcgccaccttagatctgcatcttcaaaatcctcgcccgcgccgacctcaagcccctcgtactcgaattcctcgacgcctt

SEQ ID NO: 110171 - DNA, 304 bp, Glycine max
  unsure (1)..(304): unsure at all n locations
  Clone ID: PAT_MRT3847_70497C.1
gcacgaggaagagagcagacaattttattttatcaaatcttatcttatccagattttatttcatgtagattttatttcgtccaaattttattttatttcgtttatgggcttagactgaaaatagatttgtaagctttggggttgagaacctatataacagcaccagagttttagtttagggagttttttgaaaggagaataattttagggttttgcaattccagcttttattattgttcatgcacactggtcatgtagaataaaatttgttttctgcanaaaaaaaaaaaaaaaaaaaaaaaaa

SEQ ID NO: 110172 - DNA, 1011 bp, Glycine max
  Clone ID: PAT_MRT3847_70498C.1
aaggggacaaagcacaaaagtaacagagtaacctggaagatgagttttctcgcgggaaggttagctgggaaagaagctgcgtactttttccaggaatccaaacaagccgtgggaaaattagcccaaaaaaaccctcttcccaagaccaacaacaacaaccttaactttcacgaaggatatgatcatgcggatgtacttcccgaggttctaaggcactctcttccttccaaagtgtttagaaatgatgaagccacctctttttccttctctgcctccaaatgggtccttcattccgaccccaaaacccaatcttccgtatcccctgatgctctcaatcctctgcgtgcttatctttccctgccccaagtcacctttggccccaaaaggtggcaactgcctgaagcagcaaacacggtttcagcctcaacagctaatgaatcgcgtctagacagatatgccacccatgttaacccggagaagttgaaagctgcaggtgaagggcttgcacatgttggaaaggcgtttgctgttgccactgcatttgtatttggtggtgctgcattggtatttggtatggtggcctccaagttagagctgcagaatatgagtgacatcaaaactaagggaaaagactatgttgagccaaaactagagaatatcaaagagcaatttgttcccttaaagatatgggctgagaatatgtcaaggaagtggcatgtggaaagggacgatgttaagcagaagactatcataaaggagctttcaaaaatttggggtgaaaaaagaacagattgagatctacaattttatttgttttcctcttactttagttgctttggaaatagtggcatggacatccaaacatagataatttggatgcagtatgcctctggcggttcttgtggctctgtaaatgttgaagcatgcaggagagtaaaaataatgcaaaatagtgtgtatgtcaataattaagatagtaataaattggggaatgtggttgttttggttaaa

SEQ ID NO: 110173 - DNA, 1673 bp, Glycine max
  Clone ID: PAT_MRT3847_70499C.1
cccctacaactataaatagtttttcatgtaatcaataaactcatgtcaaatatacaactagagtttcaaaaacttatttctcattctaaaattctctctctgaactcactctgttaactattttcctgcctccactgatttctttggttcttttttccaactttctatacaactaaaaggggcacaaacatttcccatacaaaattacaaggatgataatgggaacctattcacaactaaaacatcactaggaagtttaacaacttctatggggccatcaaggaaatatcatgacaaaaccaatttggtaaccattttcctacttataggatgattggtagccaaatagaatgcccgtgcaattgaaaattaccatgcacactggaattgttctctacactcgttccataatatgaattgaaacaggccaaccaaatgctgaatgggtctgacgtgctaagttgcactttttgcttcaagtggataatgataaagatccaacattaactgaaaatacagaaccacactgactttgtgattctaatctatgtagtcaaacgaatttttttccctttcttttcgctaccttctgtacaacttttaaatagtggcgcaaacatttgcatagaaaagtacaatgcgggtggtgatcgatccgattgacaagactccaaacacaacaccaccaatcaattgaagaaactttaaaatgccactagagaaaaataagatgactaatccaatcactatcaaaagtttggcaatccccacctctcttttaagttttatcagtccatctcccttcttcgttcttcataataccttagcaaatgttggaggactccaggatcagctactctacatggttccaagaccagctgtttgtacttggtactaactcatctactccagcagctttggtaaaatatatgcaaaaaaatcattaagcatcagccacagccacaggcacaggtgacagaaaaaatagctccaaggttgtctaggactccttttgggtgctttccttggcagtggatcgggcagcctggaactgaatgacatactgtttttgcagctctttaagcttgtcaagcagttcggggaacgttggccggcaagctggatcactatgccagcagctctcaattatagaagcccaccgtggatcaacattttttggaatctctagccgttgatcggggttcatctacagatgcaagcaatcgtgcattgagttcagagtatcccaaggtatcttttcagttgcaatttcccataatatcactccaaagctgtaaacgtcagatttctcatcagagggttcattacgaagaacttccggtgccatccattgaggcgtgccccttcctgtcttagttgtgagatatgtttcatgcttaagacgtgaaagaccaaaatcaccgaccttcacagtccagttcttatcaactagaatatttgatgacttcaaatctctgtggatgataggtgggttacaatgatgaagataatttacacctcgtgcaatatccaaggccatatgaactcgccgtctccagtcaagtttagatgtgtttctgtgtaacaatgcacaagcttccactgaagtcataaaatacaaatgaacctcgagcccccataaagagaataatgtttggatgacgaagtctttt

SEQ ID NO: 110174 - DNA, 488 bp, Glycine max
  Clone ID: PAT_MRT3847_7049C.1
caaggaccattgctgataatctgtgtccaaaatacaacgagcaatacacttgggaggtttttgatcatgccacggttcttactgttggtgtctttgacaacagccagctcggggaaaagggtaatggttcttcaaaggacttgaaaattgggaaggtcagaattcgcatctctacactggaaacaggaaggatttacactcactcatatccattgttggttcttcacccaaccggggttaagaagatgggtgaacttcacttggcaatacggttttcatgcacttctttagcaaacatgctttacctatactcacgaccactgctgccaaaaatgcactacgtaaggcctttctctgtgacgcagctagacatgctgcgtcaccaagcaatgaacatagtggcggctagactcggccgagcagagccaccacttcgcaaggaagtggtggaatacatgtcagatgtggactctcaccttttgagcatg

SEQ ID NO: 110175 - DNA, 303 bp, Glycine max
  Clone ID: PAT_MRT3847_704C.1
gtattagtttgtttgtttcctatttttgttacttttatttgtcagaagcttacttggttgaggacaaaacttcaccccttagtaaatgcccaggatggataaaagagggtcttaagtaacaaggcggatactgattaaagataaaattggacaggagggttttacctctcggttttttgttgctgcagctactgaaccggatgagggtactgcaaaaaaatttggggttactgagcccacgcaaatgctggggaaggacattccgcgtctaatgcgcctgagggacctcccttgatctaagga

SEQ ID NO: 110176 - DNA, 320 bp, Glycine max
  Clone ID: PAT_MRT3847_70500C.1
aaatctgggcccctaccctatttaaaaccaaaggcctttattcaatacttgggtcaaaacatgggctcaaaaggtcattggtttggggcctctaagaaatataaatcttatggaatacaagaagaagctttaaacccaggaaaactggaattaaataccaagatttccttttttatcaaacaaaatacttaggcaaactttggcccacatttggtgaatacattcaaaaggggtaaatttttttaaaaagcttttaagaaaccgtttccactgttggaaaaaaaatttgcaagacaattactttttatccaacgattttt

SEQ ID NO: 110177 - DNA, 495 bp, Glycine max
  Clone ID: PAT_MRT3847_70501C.1
actctcctgcatgcttcaacatttacagagccacaagaaccgccagaggcatactgcatccaaattatctatgtttggatgtccatgccactatttccaaagcaactaaagtaagaggaaaacaaataaaattggagatccctagctgttcttttttcaccccaaatttttgaaagctcctttatgatagtcttctgcccaccatcgtccctttccacatgccacttccttgacatattctcagcctgcaaatccaagttttgagttaggcttatgaattgaaacattcagaagattaaagaaatacagtttaaaacttgcccatatctttaagggaacaaattgctctttgatattctctagttttggctcaacatagtcttttcccttagttttgatgtcactcatattctgcagctctaacttggaggccaccataccaaataccaatgcagcaccaccaaatacaaatgcagtggcaacagcaaacgcctt

SEQ ID NO: 110178 - DNA, 526 bp, Glycine max
  Clone ID: PAT_MRT3847_70502C.1
gttcgaggcgccgccgccgctgcagccgccggagccgagatgcctaaaggaggtagaaagggaggccataaaggccgagtgaggcagtatacaagccctgaggagatcgatgcccagctacaggctgagaagcagaaggccaacgaagaagatgaacaagaagaaggtggagatggggcttcgggtgaccccaaaaaggagaagaaatctctagactcagatgagagtgaagatgaagatgatgactaccagcaaaagcgaaaaggtgtggaagggctcattgacattgagaaccccaaccgggtggcacagacgactaagaaggtgacacaactggatctggatgggccaaaggaactttcaaggagagaacgagaagaaatagagaagcagaaagcaaaagagcgctacatgaaaatgcatttggctgggaagacggagcaggccaaggctgatctcgcccggctggcaatcatccggaaacagcgggaggaagcagcaagaaagaaagaagaagagaggaaag

SEQ ID NO: 110179 - DNA, 723 bp, Glycine max
  Clone ID: PAT_MRT3847_70503C.1
ggtggctgtagtttagtggtaagttaaacctcgtaaatcaccaaattaagaatcacattaagcaatttcattccacaaattaaccccaacccattccaaattttcgatccaagatgaacaatagcaccaacaacaaggggaacaacggttttgacccaagtgagttcacatatggagtagcttttgtaattggcttgatcttcttacttgtcagcatagctttggcatgtgtgcgtctgcgcatggctcgtggtcctaacatgctgaacattttggctggtattccaccatctcgccatgcaagatcatcagaagaagacaactcagctgaacaagggcttcatcacattgacaaaagttttgagaggtatccaaagctgctatactctcaagtagagaagggttcaagttcatcaagtgttgtttcttctagttgctccatatgcttaggtgactacaaagaaagtgacacgttgaggttgcttccacactgtgaccatcttttccatcttgcttgtgttgatccttggcttaggttgcattcaacttgtcccatatgtagaaaatcatctattcatgcttagtattggggatcacatctctcctttgttgttgtagaagatttgttatattagttaaatcagtatatatatatatataaggttgtaacttaggaagattaattaaccatatatttgatcgatcaattgttctgctgaattg

SEQ ID NO: 110180 - DNA, 530 bp, Glycine max
  Clone ID: PAT_MRT3847_70504C.1
acccattgaatggactgcatcggccaatagattactgagtaaggggatcgatattctgtgttgcgagcatcctaatttggatggttggattaccaagcacgatattagcatgatgtgagaaatgataaacagcctttgtggtggtgatgaaaaatagatgcgtgaaaggacacacctgctgccggcttggagcacacggatggcaatacgtatgaatgatgatcgtagagtggaatgtgcaatccatactggatttccgatcacagctatttgctatagcatcattaatgagatgctcattagatatagctatgcaaaattactgagccaggcaaaagctccatgtatgttgttacagaccttcaaaaatggtgattctttgcgtgtgtatggggatgataacttaagtagggctcatgaatatgtcaagccttactgtagtggttctaaatcgaaaagctatgtagctcgtcatagatacaccattactgatggcattgacaaaactagtgcaactttgcaatttagaa

SEQ ID NO: 110181 - DNA, 432 bp, Glycine max
  Clone ID: PAT_MRT3847_70505C.1
cccacgcgtccgcccacgcgtccgcccacgcgtccgcccacgcgtccgcccacgcgtgcgtctgtctctctctgcggcaactaaaaaacttaaccctcatttcaatcgcagaaaccgatccaaacacgaatgcaacacacactctcttcgtgactcagatcctgtgccgattcgatcggagagaaagctagctagatatagcttatagggaatggaattcacaagatgaagttctatgtatctgcaaaggggataaagagagtcgtcgctggaaaaggatccgccaagaccactgctcctgcctacaccgttgccgctcgccggatttccaaccggatggtggtggtgctcggaatcgtattgctgctcagctttgtgagagtggcggttttggtgcttgaatcttctgcggtgtgctccacctttgattgc

SEQ ID NO: 110182 - DNA, 106 bp, Glycine max
  Clone ID: PAT_MRT3847_70506C.1
ggaattcgattcatacacattccctaactttcgagttctctcaggtcgcgcggtgctctactgtctcggcgccggtgccttcgcgtcttgagactgttcgtccatt

SEQ ID NO: 110183 - DNA, 175 bp, Glycine max
  Clone ID: PAT_MRT3847_70507C.1
caaaacaaatctcaacccaacagaggtggcctgcaatttcctaaataaatgttttgaaactttaccagccgaaaacagacggttacagaaggagcttcaaaaccttaaaccactgaaactggctcaacctctgtccatgcctataccgtcggcaacactcaccatttgcccctct

SEQ ID NO: 110184 - DNA, 401 bp, Glycine max
  Clone ID: PAT_MRT3847_70508C.1
gtgaaaagatacaagaatcaattactcttttgtcgtatacaaattgtgtcaggataaagaggcagagaatttctatttcattacgtaatctgtttaattttggttgcttgaaataaggcagatcttgaatttcaaaatgcctaaagttagaagattgaagtccccgtatactgattgtaatagaccatatccttacccatccaactccaaaaacattgagctgcataaacctatgaatttgttggcatcagctgatgaaatgaaagaatgggagcaggctacatgcactatctgcatggaaacccctcataatggtgttcttttgaaatgttctttctatgagaagggttgaattccttacatgtgcaataccagttaccgacactctaactgacttgacc

SEQ ID NO: 110185 - DNA, 270 bp, Glycine max
  Clone ID: PAT_MRT3847_70509C.1
gaacaattcttttattttttccctatctttatcaccttacttacagatctttaacgatatataaaaatggacccaaacgcgggggaaggaaagtctatacaatctggcaaaagaaaacgaaatggaagggggtgcccgttattatcacaacgaattgcttgatgaagaaaaaaatccggggtcaatttttttttatgaggaccccgacctttgactttttataaaatgaacctgacctacaataattgggggcaaatacgaacccccctc

SEQ ID NO: 110186 - DNA, 394 bp, Glycine max
  unsure (1)..(394): unsure at all n locations
  Clone ID: PAT_MRT3847_7050C.1
atcgtttcaagcagtagacactctcaatggaaagctactatgtggatgtgatgatgttcatacatgcgtgcctggatcaacatcagaagcttgctctcaatcataggaaaaatcatagtaacaagaccaaccatctggaaataattcaggcattagattgttgtcaattttcagttgttaaaaccattattgcttgtcatgatcttgttggtaaggatttctaatccaaggcagcattaattagaacatccattacattgacgaaatgaccttggtattaaattcaagagcagtgctatttcgtatgaaaaagtatttattttattggctatttgtgattaaaaaaatattactagtaatttgacagaaatcncggntnnnanaaaaaaaaaaa

SEQ ID NO: 110187 - DNA, 544 bp, Glycine max
  Clone ID: PAT_MRT3847_70510C.1
gcaagatcagaaatatttaagaacatgctagagtgcgatgaatgcaaggcagcaccaagtaacgccataactatacccgatttgaaccatgaagaactagagtctctccttgagtttctgtacagtgggacattgaatgtggaaaaattggagaaacatgtctacgctttgtcacaagcagctgataagtatgtgattccacatttgctgaaacacttcgaaagatatatgctgagttctataagcacttccaatggtcttgaggcactaggaattgcggatacttgttccaacctcaaagtgaaggagccaaccttgaactttttagttaaaaacattgagcacatggtgtcctcacctaaatttgaagcttttgtccataggagcccacatcttaatgtggagctagttgcaagggcgtttgtgaatggtgccaaataatcaaaattgtctccaccaatgttttttcctttttcaatttaataatgtatttatccaagcctataaacataataatataattcatgccttgttctcttcaaaa

SEQ ID NO: 110188 - DNA, 498 bp, Glycine max
  Clone ID: PAT_MRT3847_70511C.1
cctaaatcagggataatccagccttctaacatatatttattgcgtcactactgtgtgccaggggtgagtggaacagtatggacagtctctactctcatggagttgagtgtctagtgagaagaacaaacattagaataagtaaatggaaactcccatgccttgttcatctcatgtgatatttattgcagtcacccaccctttggtttgaaacctcttttcttaataatgtgttgcaagacattcccatgagggtacttgagttagagcaaagttgagatcgctctgagttgtacacatttctctatgttccagccgtctctccaccccttcccacaacagactgttgccacagacggttgcatcagggcaataccagtgggaattgctgaaggaaccgaggcattgggacctcagtttggaagacctgtactgtctcacctctgtatctccttgtcttttcatggatgtgtattaaataaaggagtgttagatgctggg

SEQ ID NO: 110189 - DNA, 107 bp, Glycine max
  Clone ID: PAT_MRT3847_70512C.1
ggctcgaggggaggccgtgactcacttatgcaccttctttctttcgagccactcttctcagtccaaaacagctttctcgatctgtcatctgaagaagagaggagcat

SEQ ID NO: 110190 - DNA, 436 bp, Glycine max
  Clone ID: PAT_MRT3847_70513C.1
tattataataatttttctcattttataagcaaccaatctctggggccagttatttaaacattaaccttcccaaaatcaaactcctggtttttgaactttaacttacctctgaccccctcataatattaaaaatttactttcaattattttccctcttttaaaccaaaacaatcttcattatccccaaatatatttaaaaccacaatagtacccccttctcgacaaaaaaaaacatattcgtcccagcctacatctccttaaaccttcattacataatttccctttcccaaacattaaaaaaccttttcaacaaatcaatcccttcacatttacttacaacccggcgtatgagacaatccaaccaaaccaacaccttttcccccctggatttcaccctcagaattatttacatgaaccactccaacattttcccttt

SEQ ID NO: 110191 - DNA, 153 bp, Glycine max
  Clone ID: PAT_MRT3847_70514C.1
ggtactccatcatttccttggtcctcctccttctcctcattccggtctccaaccttcaaaggcactttctttcctttccaatgagcttccaataatctcacgccttgcaatcgtagttgcaccctccaaactccttcccgtttccttcatctg

SEQ ID NO: 110192 - DNA, 319 bp, Glycine max
  Clone ID: PAT_MRT3847_70515C.1
gtgcgtcagctgggaattaggctcgtggcggacaaaccatttctgacaaattaggagtacgcattattatgggggtttttgttgcgatgctgactaaaaattaacgagccaatgcacttggtgacagcaggaacgttgaggaaaggctcagagatgaccagaatgaagaggaaaatactcccagtaatgatgatgaaatgaggggcatgaaagatgatgatgggcagatggtgcaaatgacgggaaaccagtatgtggtgaacgacaagcctacaatatgtgaatggacccaacacatattggcttatggccaatgctg

SEQ ID NO: 110193 - DNA, 152 bp, Glycine max
  Clone ID: PAT_MRT3847_70516C.1
ggaagaagtccattcaaaattgcctgctgtaactgtacaaggtgaatctgatcaaaacttacagcaacaaacacttgatgatgatgaatcagaagcaatcaataatgccaagagatgcataccagaaaaagaacttgatagaatagtccact

SEQ ID NO: 110194 - DNA, 405 bp, Glycine max
  Clone ID: PAT_MRT3847_70517C.1
aaaaaaaaaaaggccgaaaaaatgcacgacttataaataacagttgccacacgaaaacaaaataaatttctcataaattaaactgggtcatctttgaagaatgatttaaaagaacagcggcttttttagatcaaaacagaaaaacccccctcctccatcctcaattaaaacatttatctaaaaattggggaagttgcagatcaaatcaaggggggtggtgagcattaatggtgccagcatcaacaaaaacctttttctttttagccatttaaatggcctggtcaaccattattttgacaagctgttcaaacccaaccttgggctttcaaccaagcacctttttgggcttggaagacgcccctttgaggttatcgaccttggtggggcgaaaggaccttttgtcaa

SEQ ID NO: 110195 - DNA, 314 bp, Glycine max
  Clone ID: PAT_MRT3847_70518C.1
caagacctgctaccgtatatttctcattgctcatgcacgtgttcaacttccttggctacgcaccaacctcctacacagggctccacaagatggtgggcctggacgctcaccactgcctgcctcatgttcttcgcatatctcaagaactgattctttatatgaatcctattgctgctgtgcctatcaaccctagctctgctctacctaaaggacatgcaagaggaagcacacaccttggatgacgccacgcaaccctcacgcttctttcaggttttcaaggctctgaaagagctgatgacaccgacgcagatact

SEQ ID NO: 110196 - DNA, 130 bp, Glycine max
  Clone ID: PAT_MRT3847_70519C.1
gcaacacttatactgtcaaatgttggagatagcaaacgtttgcaactgtgtaagtctaagcctaattctaataagctgaaggttatggttaaatcaagacgttgctctacgacacacactttgtgtcaga

SEQ ID NO: 110197 - DNA, 369 bp, Glycine max
  unsure (1)..(369): unsure at all n locations
  Clone ID: PAT_MRT3847_7051C.1
ataatagaaaagatattccttttatgaccagagcgaagaaagtctccacatctattataactacccttccatgaagtttatgtatacgatactaaatctatataagcttacaagtttcttttagtggaggctacataatccagctatttgtcgtagggcaaagcaccaccaactcgagcacagccaacatagcaccgccgccatagcacacccacacatagcaacgcagctcatgcacaccaacacacacccaccaccatatgctagcaccacccatttgcttattaccattgactaccttccattgtttgtaaaatctggatgcatatggggcacctcnaggagacaaaagttagtggcatgaacata

SEQ ID NO: 110198 - DNA, 178 bp, Glycine max
  Clone ID: PAT_MRT3847_70520C.1
gctcacgtaatctcctcattcaattctctaaaagagatctttttctgctcttcgacgatagaaaggtcaatgttgggttctcgaacaatatcagcataacaccttcaggatacttcgccggcaagcattccttaagagctggaaccgtaaatgatgtatcgaacgtatgcacctaagg

SEQ ID NO: 110199 - DNA, 244 bp, Glycine max
  Clone ID: PAT_MRT3847_70521C.1
cgagaagatgagaaagtgggaggaacatcctaggactgaagagtgaggtatttctcatgtcttgttagatgattcttatttgttatacttacatgttttccacctcttgggtgattggtattgcattgaaatggatccaattttgttttggtagaatggagaacaatttaattggggggttattgtttttcttgcttgggttaatggaaaaggaaatatataatatactacatcttctattgat

SEQ ID NO: 110200 - DNA, 458 bp, Glycine max
  unsure (1)..(458): unsure at all n locations
  Clone ID: PAT_MRT3847_70522C.1
gtgactttttttttttttttttttttttttttttcttttttttttttttttttttttttaactttattttttcggactaaaggttgacaggcttgctggtggaaaaaagcctgcctgcctggaaaagcctccgcgcggttgagaaggcctttggcggcgaagaaggtaccgttggaaggcaggggcggagacaatctgaacaagatggccatgaggagcgagaaaacaaacaagatcgacatattcaaggtgctgaagggggaacatcctgacgtcgggcatcaagcgcggccttggggaccaggagcagcttcctcaactatgtgttcgggaagcttgcgcaggaggcagggcgtctggggagggataacaagaggccgaccaattcgacgtggagatccaaaccgntggccggctgctgctgcccggggaacttgccatgcgcgctgtttcggtgg

SEQ ID NO: 110201 - DNA, 201 bp, Glycine max
  unsure (1)..(201): unsure at all n locations
  Clone ID: PAT_MRT3847_70523C.1
agaaaggcaagaattgatcgttgaaaatgcagggaggaaagaaagcgggagagtccattaaggaaacagctacaaacattggtgcttctgccaaggctggcatggagaagaccanggccactgtccangagcaggcagaanatgacagcnngtganccgntgcaaagntgggcaccccaaagcaggaggcaaatgancccg

SEQ ID NO: 110202 - DNA, 340 bp, Glycine max
  Clone ID: PAT_MRT3847_70524C.1
ccagcgtccctggctgtcatcggtgatcacgaggtgtcggggaggagttgtttgatctccaaatattgaatgaggatggagtattctttctggtttgcaaatcatttcaactttctcacatgaagaatcatactccttctctacattagtagattagagatgggtttatatgagcacttccatggttttcagtggggggctcatcttcttgacggtgaccctgcttatattcctggctgctacagcagcatcattctcaagggtgtgattgagtgtgaccatgaagaaactgatgggatggatacccgtaaacttcaagaagagttttcacagctaggga

SEQ ID NO: 110203 - DNA, 493 bp, Glycine max
  Clone ID: PAT_MRT3847_70525C.1
ctactagtcggggcgcccttttttctcttttatttttttttttttccaccaaaacaaggggaaggcaggggaaatgttttttaaattttttaattacaaggacaacgcaaccacataacaatgaccctcaaactaccccataactcacgtcttttacgggtaaggatccacccgcgtttgcatccgttatccataccaccaacttgataaacacgaatttaccataacacccttggtcattcgtttaaaacttgtgagcttttccctttcaccccggatcgccttgcgatctgctctttccccatcccttgaagtaacccccacgcgggctgttccggataacggtgggtcccgcatagtattttcccgcccgactcttgaaccctgtgagccccaccccccgtctgtacgatatacaccggttttgttggggggcataaacttctccgcctgtgggggggcgttattaaccaccgcccgtgacggttctacc

SEQ ID NO: 110204 - DNA, 258 bp, Glycine max
  Clone ID: PAT_MRT3847_70526C.1
cgcgtatatacgctctgtattcgtctcgagacggctgcgagtagacgacattagggatctggaaacctctctaaccaattgatcatgaaaacatattcatcttttgcagtaggcttatctcctgaatgatcatagtcagaagtagtgtttgagtaggaaaagcccaccctagcaggggattccaagaacagcacatttgccactgcattatgaatgcacaattgtatgttcaatctgtcatgtttcacaagtgcatca

SEQ ID NO: 110205 - DNA, 1128 bp, Glycine max
  unsure (1)..(1128): unsure at all n locations
  Clone ID: PAT_MRT3847_70527C.1
ttagcaataaaaacctcttcctcagtttgttgttcccccacctattcccctgatcacctatgctagcatcctggtcttgttcaatgctcatatcagcctccattttctgatattctggacaggaaaataatttccgagttgatggaagcaaattgtttataattggcacctttggcttatcacaaatgaaactcattattgtcttcaatttggcttgaatgataatcatttggcttgaattgaggaattatgagcaataacttatcattgtctttgattctacattgttttttatttatatacctgattgtttgtatgctttatctgattatcacatgttcttaggcatgcatctaaatttatggattctgataataggacattgttttgttcatatttattcccgccgtgcattacggctgcgagaggaagacgcagaaggaaggcatttcattagcagcgttaaagaagagagaagaaaaatgcgaaagttcgatccatggcccgttttcttcaagcgcgagtggaaacgcaactggcccttcctcgttggattcgcagtcaccggagctctaatcaccaaactttcccttggccttaccgaggaagatgctaagaattccaaattcgttaaggcgcacaaaaggtgatttctgaatcgtgacatctgcctggctttgcactttatgttaggtttgtcaagattactttgcttgtcttgattttatggattgtaataacagaagagagatgctctagatagtctctttaagtctgtatcccatgttcttattttcagttttggttgtttacctaaatctggttgaaaaaaaaccacaatagttaataatttctgatttgagttacttgacttgattttatggattgtaataacagaagagagatgctctagatagtctctccaagtctgtatcccatgttcttattttcagttttggaggttgtttacctaaatctggttgagagaatccacaataagttagtaatttctgatttaaaaagttatttccttcattgttaatacttatccttgagtttctcgtgttatgcatccagcataatcttgaggaaaatcgatgtctttaatggtgtnaaaaanaaaaaaaa

SEQ ID NO: 110206 - DNA, 375 bp, Glycine max
  Clone ID: PAT_MRT3847_70528C.1
accacgcgtccgaccacgcgttcgcccacgcgtccgtccacgcgtccgggaaattaatactagatcggtaagcagtctgcagcacatatctaacttgagtgtggcctgcacttcacaatgagagcccctgtcgttcgacgcatttcagaatgcttcgataagccccagctccccaaccaagtttcagaccagatctgcagtctaacacattgggatattgctatgttgcctaccaactatatccagaagggtctactcttcaagaagcctgcagcaactctagttgatcaacaccatttcatggagaatctgtaggagaagctcaaacactctctatctctcaccctcttgcattgctatcctttggctgctcgc

SEQ ID NO: 110207 - DNA, 179 bp, Glycine max
  unsure (1)..(179): unsure at all n locations
  Clone ID: PAT_MRT3847_70529C.1
ttctcgcaccccctgatttattcccccccacccccggngcaaaacaagagagctcaaatttccgaactggcgcacattgcagcggacggaaaaatgggaaaaccaaaaaatgaccccaaaacaaatgtccttgggctaaatccgacaggcaaaaacttgtaaggcgagctcggattaaa

SEQ ID NO: 110208 - DNA, 336 bp, Glycine max
  Clone ID: PAT_MRT3847_7052C.1
ctcaagcctaccactaaaccgctgctcacacaatcagagccacgttcttcatatctgtcagtgccataactcactcactatcttcttctctgatattaccaatggcatctactgcatcagcgatggccatgatcaacgcctaatgcttgaccccaaatgctacgaatctgaccaagctatcaccttctgaaccctacattcatatcaaccttgcaaagggcctcatagtctcacccgaaagcactgaacattgccctgcgacagcattcgcatgagcaatattcacaaccctatggacctgcgactccgcatgcgatgatcaacgtatctgcgaca

SEQ ID NO: 110209 - DNA, 142 bp, Glycine max
  Clone ID: PAT_MRT3847_70530C.1
cgcacacaaagttaatcttttgacacatccaactgcaaagacccttggagaatgggctggcttgtgaaacattgattcacacgcagaggctcgcaaggtaactggtttttcatgtgtgaatgtcaaggacctcggggaggaa

SEQ ID NO: 110210 - DNA, 462 bp, Glycine max
  Clone ID: PAT_MRT3847_70531C.1
gaaattaatactagatctctaagcagtctgcaacacaaatctaacttgtgtgtggcctgcacttcagaatgagtgcccctgccgttcgacgcatttcagaatgttttgttaagccccagctccccaaccaagtttcaaaccagatctgcaatttaacacattgggatattgctatgttgtctaccaactatatccagaagggtctactcttcaagaagcctgcaacaactcttgttgatcaacaccatttcatggagaatctgttggagaagctcaaacactctctttctctcaccctcttccatttctatcctttggctggtcgccttgtcacccaccaaacccatgaccctccctcttattctgtttccgttgattgcaaaaacagtgatggagctagattcatttatgccacttttgacatcactatatctgacatactcgcccccattgacgtcccac

SEQ ID NO: 110211 - DNA, 238 bp, Glycine max
  unsure (1)..(238): unsure at all n locations
  Clone ID: PAT_MRT3847_70532C.1
tttttttacctaatttattatataattanngaaacgaaggttgcggaaatgtatctcatcacatctgttcaagcaactaggaacgaaactgcattcaatttatcacattacattggataacatacagaacacgggcaggtttgaatttcattggacaatatggaggttctgagaaacacctttaaaaaactgcatccttaaaaaagcttttacttggttaaaagacacgaccctcttt

SEQ ID NO: 110212 - DNA, 479 bp, Glycine max
  Clone ID: PAT_MRT3847_70533C.1
acggctgcgagaagacgacagaaggggctctgaataccataatggagttgagagaaaaggagagagaagagaaaactgagattgagaaatcttgtattatttagcccaactgaaaaagttgttaaaagactttatatagacagttatgttaactgtcaactaactctaacaaacctgagttagttaacatacaaaagaaagagaactcactactaaccatagtgaggatctagaatacaacagaaagagtaaaaaacacaagaagcaaagtatgctcttatactgatcaacactccatatattggatggaccttacccacctcccttaatccacttctggacacttttttatttgtctgattaaaagtcttgcttttacttactgacaaatctatatccatcattttgttatgacccttcacataggattgagtcagagtgatccttcattaaatcaagatttaaacaaagaggcaaac

SEQ ID NO: 110213 - DNA, 219 bp, Glycine max
  Clone ID: PAT_MRT3847_70534C.1
cccacgcgtcccgccacgcgtccgaaaaaaactcttatctatgcctatgtctctgtctctgtcaccgtgcctgcgttaatttcttcaaatggcttgatcctgctcctattttccttcccttttctacgccaaaaccaaaccctttttttttcatttccaataattcctttaaccctgcaattccaatgtccaacctcttccttttttcccctcaccacc

SEQ ID NO: 110214 - DNA, 277 bp, Glycine max
  unsure (1)..(277): unsure at all n locations
  Clone ID: PAT_MRT3847_70535C.1
atcctctgtaacttcaaaacatacacctctttctctctgtttctcttcactctcacctctccctccctcttcaactaaacangggcantggaaaacnagaanacggtgtcnnagnaatcnagnccnagaaccngnngattcntggngnnnggagggcntnatgnggaggncantaggnggcaacngtggttnaagccantgcngaaagagagcttcttngttcantgcaagttgcatgctgattctcacaagagcgaatgcaacatgtattgcttgg

SEQ ID NO: 110215 - DNA, 221 bp, Glycine max
  Clone ID: PAT_MRT3847_70536C.1
atcggctgcgagaagacgacagaagggctacctcttaattactcattatactctttttacttaagggagtaaacccttgaagcccctcttcctttctgaaaatgtccttttggaaataacatgtacatattcccaaaatatatacatgaagatagttgacattgtaaagacttattacatcctcatatttgttagtttatttatgttctaacattagtgtt

SEQ ID NO: 110216 - DNA, 370 bp, Glycine max
  Clone ID: PAT_MRT3847_70537C.1
agatgcgggtccaaaggcttactgggatactcggcaactcacgatcgacgaggtggaacaggctatccagcggacggccaatatgacgtgaatcacacctgaggtactaaaagcccaccctaggaccttggcttctctccgcatgagcacagcgcctcccaatgcttgggaccgtgtggtcaggctttcgcacggcagcaagtaatcgcgtgacacgagggataagggaaagctcccaccccggataaagggggacgtgctccacacgcattatacgtagatgtgcgccgttctcacggatattctggacttggaccttgtgtacatgtgcctcactggagaatcagcagattcgcgccatcgtgaacta

SEQ ID NO: 110217 - DNA, 229 bp, Glycine max
  unsure (1)..(229): unsure at all n locations
  Clone ID: PAT_MRT3847_70538C.1
gttctaagatccgcgnaactncncccgccaccctaagtggaagcttcgttcacnccccnggaanttaaatttcccggacccgggtnacntggcaggcgtnaccaanctttccctntagtggagtncgtnattaggagctttggncgttaaattccatggtnccatagctgtttncnctgtgtgnaanattgttnatnncgcttccacaattccaacaacaacatancna

SEQ ID NO: 110218 - DNA, 702 bp, Glycine max
  Clone ID: PAT_MRT3847_70539C.1
tctttctctctctctctctctctctctctctctctctgttctttattctgctcatcatatgatttcgttttgtcaaatctgagcatcgaattcaaacaaacacggttactcctcaattcccattcaatcattcattcatgttttctttttgctctgctaagtgccatcactcgtttttgatttcatttccaacaacgccaatttcatattgccttgtcttgtgatcattctctagtatttagcatacctgcagaaggttcttatgtctccccctttggtttgagctctcagattactcactactcagtaatcaaaatctttgttgttagctttaggttttttctgatttggctctgtgacctatgaatcggtgtttgtttgtttgtttaaattgaaatgcaatgaggaagcgccccgaccaaatggaaaaaggggcagcagcaaagaaccagaattcccgcatttgctttttggcatccctttctgccttcttctggtttttgctcctttacttccattttgtggtccttgcaggagataatagcaatagaaagattagttataataatcaagttgatcttgatcactcaaccctatcaacaacacctgtttctgttagttatgaacctcccccaacccaataagtgcaagcccctcctagaaagattggcttccctgacaccgacactgacaccctacacg

SEQ ID NO: 110219 - DNA, 1539 bp, Glycine max
  unsure (1)..(1539): unsure at all n locations
  Clone ID: PAT_MRT3847_7053C.1
gctaaatccaatttgaatggagacgatttgattataaatcactctgctcccccaggaccggagccatggagggcatggggtgcagctacatccggagtcccgggtcgacccacgcgtccggttcctcagctgttcctcaatcctcaaattcaaatgtaatatgtagaccaaattccaaaattcaagctgaagccaaaagcccacagttatctggccattcaccaatgacacaatcatttaataatccaattcactttggtcttccatcaccatttaatatttccagctatccaattggatcaactggtagcagtcaaggtttttctcctgcaattgaacccttatactctccagttgaaaatatgtcacatgactttagacatgaagaacaagagctttttgaagaccactgttatatacctgatcctgtatccttgcttggtcctgtttctgagtcacttgataattttcaattgaactcgggaagtggctttttgaaggaattatatactccttcctctaccgctttaaaaaactcagctgctagctctgacatcaatcaaacatctcaaattgagtctgcattgtcccgagcacagtttattgtccactaatcgattaccaagtatttcacaaacccagtatatgcttgtatttcctttggataatgcagctgcaaatgacaaattgacatggcaggtgtggaatactttgccactcggtcaagaaggtttagatactctacagttgcaaaatatttcacaggtattcagacatgaagaacaagcgcacttggaagacccctgttatatccctgatccggtatccttgcttggtcctgtctctgaggctctcgttatttccagtatccattctgcacaacattttgttcttcctaatggtcagagtggtgggaccttcagcccagttactggttcaaatggttatgatccttggtcacagggtgctttatttccatcgttgtcaggtggacttaaagctcaggagagtgctactcagaatgaaatgatatatgcgagtcagagtgggtctgctagcaaccatgtgcacgagtgttctaaggctaacagttggaccaaaaatgaatggcctgtaaaaactactgtggaaggcttagggaagtcatctgttgcaaggccccataatggcagtcaacatccaacctcagatgtacagtcattttggtcatttgattaaaaagtgggcattagataaagttgatagattaacaccatttcccgctaccattcgtaatagtctcttattcgggatgagtttcagatactggggacattcagtcttcttactggttcaaatggttatgatccttggtcacagggtgctttatttccaccgttgtcaggtggacttaaagctcaggtgcgtgcggctcagaacgagaggtgtcacgccagtcgaagtgggtctgctagcaaccacatgctcgagtgttctccggctaacagntggtccagaaatgaatggcctgtaaaaggtgctgtagaaggcttagggaag

SEQ ID NO: 110220 - DNA, 336 bp, Glycine max
  Clone ID: PAT_MRT3847_70540C.1
tgtttttttttccgagaacgttctattatgctaagacaataaagggggggctatgataaatacccatctgatcactttgtatgcgcaaggatccacctctttgtcggtgcacaaccatattatatgccatcttttgtgctccttttcttgtgatccctggtggaaccttagacactaactcttccttaaacctaaaaaacaccggttgggtgtgtgtgcaccttaccatgaaggggatgaaaccaagagcccgcttcaacgcagctgccccttaaacggctaaatggatctcttaaacggggaaggagggaagggatatatgcctcttcaataaat

SEQ ID NO: 110221 - DNA, 128 bp, Glycine max
  Clone ID: PAT_MRT3847_70541C.1
cacggctgcgacaagaccacagaagggatcactggtgccccccacgataacaacatcatgctgtgccaatgctgtcatatctcggtctgatgatactccatgggatcgacgcacattcaacttgacac

SEQ ID NO: 110222 - DNA, 360 bp, Glycine max
  Clone ID: PAT_MRT3847_70542C.1
gtttttacaatccttcaaaaatcttcttactgtgcgggtgtatagtgatgatgactgaataagtgatcatgaatatgtaaagccttactaaaatggctgtaaaaagaaacgctatctaactaggcataacatcaccattactgatggtgttgacaaagctcgggctacttcataatttagaaagtgcgcatattgggatcttatcaagagaaactttaaacagcagtctaatgttttgtgggtggctccttaagacacggcgagtccatggtcacaacttcattatgcaatacgatataatctataaatccaggaatctaatcatggcaacatcttaaaagtgctcactagaattggttt

SEQ ID NO: 110223 - DNA, 542 bp, Glycine max
  Clone ID: PAT_MRT3847_70543C.1
cccgcgtccggattcgttagagctggaagctacctaaacactatagagttgagacactgtaatgaggaaggggacaagaggatgccggtctgcttattgatctctgtctggaaaaggcgaggggcctgctatcggaatcgatttgggaacgacgtactctagcgtcggcgggtggcaacaccaccctgtgtgaaatcataggcaacgatcatggcaacagaactaccccatcctacgaggctttcaccgacacaaaacggttgatctgcgatgcggataacaaccaggccgctatgaacccaaccaacaccaggcttgatgctaaccgtttaaggggaaagcgttaatcctatgcatcgggacaaggagacatgaacttgagggcggtcaaggagagttctggacccgctgagaaacctatggttgcggtgaactacaaggggggggagaaacagagatccgcggaacacatatcctgcatggctcttatgaagatgcaggggattgcggaggcgtatctaggttccaccataaataatgcg

SEQ ID NO: 110224 - DNA, 437 bp, Glycine max
  Clone ID: PAT_MRT3847_70544C.1
gaaaactcatgaataatatatgtattttaaaattttaatgttaaatattcatgacatgatttaataatcaatctttgattataggtccatgtatgtttaaagttggcattaaattttgagataaacctctaataatgaccggaaaacaacactaaaaacggtgaaatttgttgcatattgtctttaatccataccctttgtgagataaaaggctagtgcagcggggctccaagttggatggatagtctttataagtgcaacaataccagttatgtgggggcatggcatatggaagttcctgactcaatgttgaagttaaggggatgtaaatctgactcatcttcatttgcagcatcagataccaaacgggcagaaaaagcgggtgaccaagccgccagaatattaaccccaggagcagcaatatcaggcttcaacac

SEQ ID NO: 110225 - DNA, 189 bp, Glycine max
  Clone ID: PAT_MRT3847_70545C.1
attggggtggagcggcatccacaatattagatatgtgttcactgtgtgattgtataggggaatgccatgccatgggaaattagaagatcaaatttgggcaagtgattaagatggaatgcggctaagcaatggctttcgctgatagacaaacagatgggagaacatcttgagcaagacgaactgatcttg

SEQ ID NO: 110226 - DNA, 206 bp, Glycine max
  Clone ID: PAT_MRT3847_70546C.1
gcagcagtcaacacgctttgtagtcagatttgaaagagcattggaaaagccatgcagctcactgtgtagtcctaccttatccagcccaaggacacatcgatcctatgctggagttctccaatcgtttgctccagagatgtgggagcgcaactctgggaaggaaatgaattcatgtggggcagcatgagaatcgaaaacttcactta

SEQ ID NO: 110227 - DNA, 208 bp, Glycine max
  unsure (1)..(208): unsure at all n locations
  Clone ID: PAT_MRT3847_70547C.1
tggtgtcaaattctgcgaggccgtgtggttcaaggccggtgcacagatcttctcagagggaggccttgactacttgcgcaacacagacctgatgcatgctcagagcatactcgctatctgggctgctcatgatgagctcatggcgattgtagaaggctacagagttggctgaggaccacactgtgaacgactngacacaatctaccct

SEQ ID NO: 110228 - DNA, 413 bp, Glycine max
  unsure (1)..(413): unsure at all n locations
  Clone ID: PAT_MRT3847_70548C.1
cgtcgaacaggatatgataccggaaatgtgngcagcaaccatacctcacaatatatgaccgatttttcctgttaatctatagattcaatataatattcaaatcaagaccagactgtcttcaacttgtctgataaacgatttgaaattatgccgcacctttcaaggggtgggatcctttacatcgtctatgttcgtgaaggagagtgccttagaaactcctctgtaaagttttcaacggaaacaagagaaaactaatcagctttgtccaatcatcatttgatattgttatgtatctttaaatataagttctattcactctgcatattgattttatgtataaagctattcaattgaacacttatcatcgggagtaaagtactggcgtcgcttattatcaagttggcatccaaata

SEQ ID NO: 110229 - DNA, 424 bp, Glycine max
  Clone ID: PAT_MRT3847_70549C.1
atacataatactttaaaataatacaaagaaaaaaaaaacatcaaggcaataaaatttatgtcaatgtgcctatctgttgcagccttgacattaagagattggtacaaggggggaagaaatacatcatctcaacaagaactgttttctaagcagttccaaagatgaaaaataagaacctgtcaatttataacttgcttcacatcacatgcatcacggtcaccgactagtgttcttatgacacattgggcagtttgtgtacatgtgaaatattacaagtccaaaatgattttaaaaaaggggactgtaaacaacaaatgaatgatctacactagcgtttgctctatctggtgatactcaagattgcgaagaacaattctggcgaagatttttgcttcaagtggggcagttgctgctgcggctgcac

SEQ ID NO: 110230 - DNA, 327 bp, Glycine max
  Clone ID: PAT_MRT3847_7054C.1
ggctcgagtgtagttggaaagagggcttgccggcgaaagtgtcatatcatcgaaagatgtggttatggtactctttgagactgctattctaactactgagctcagccttgatgatcccaacactttctgtaacaggactcacaggatgctgaagctcggactgagcattgatgaagaggctgctgaagcacatgctgacatgcctactgtggaggacgccgatgctgatgccgatgctgacggtagcaagatggaagcagctgatactgtctaacttaattactgatctgccatggagcaccgagaaacaatgattgtggaacagtc

SEQ ID NO: 110231 - DNA, 308 bp, Glycine max
  unsure (1)..(308): unsure at all n locations
  Clone ID: PAT_MRT3847_70550C.1
cgcatgcacgcgtacgtaagctcggaattnggctcgagctnnnactnncnncnnctngtgtnntnnttntgggctntgtcccggtnngcngcncagcannatcnnggttgnatcgnagaggannntggtgtcctaatgcngttnggtaatnacttnnnatgacgncgtgncgnnngatgattgtnacaacgcnagncnnnccataagcgtantganatcntggnnntntacaagcnnggtcattctcngatnctgttgcngttcntncttgagnatncttnatgttgnggacannntacgtnttaccn

SEQ ID NO: 110232 - DNA, 3576 bp, Glycine max
  Clone ID: PAT_MRT3847_70551C.1
ccttgatgagaaggaaaggtttagggatctgagggctcagaagagtcttaacaccataagacctagctcagaggaagtgaggacttattttaggaaggaggaggttctcaggtactcaattcctgacagagccttttcatatactgcagctgatggtaaaaaatctattgtggcacccttgagaagatgtggtggtaagccaacatcaaaagcccgagaccattttatgttgaaacgtgatcgaccaccacatgttacaattctttgtcttgtaagagatgctgcagctagattacctggaagtattggcactagagcagatgtttgtactttaattcgagattctcaatatattgttgaagatgtttctgatgcacaaattaaccaagtagttagtggagccttggatagattgcattatgaacgtgatccttgtgtacaatttgatggggaaaggaaactgtgggtttacttgcatagagaaagagaagaagaagattttgaggatgatggcacttcatccacaaagaaatggaagaggcagaaaaaggatgctgcagatcaatctgatcaaggaacagtaactgttgcttgtcctggaactggggagcaaagcggatatgatttgtgctcagatctcaatgtggatccaccaccatgcattgatgatgataagggaatggaacctttgtctactgatacaaggccaaatgcagaggcacatgttgatgtcaatcgagcttctgaagaaggcaatgtttgtgatggtaattcaatggcttgggaggctcttgatttaaatcctactcgagagttatgccaagaaaattcaacaaacgaagattttgatgaagaatcctttgggagagaaaggcccgttggactattaagtgcaagcttgttgtgaagaattcttcaggtagttatttacctcattttggcattattttgattgtatattgctctttttgccgtttggctacttgttatctaaaatatcatagcacctttgtttattgcacattgtcactaattattttaaagaaaagtcttaaaatttaaaatttctcaaaattttaaattctctcatcacgccctagaaaattattacaaaatcttttaaaatccaaaagatttttttaaacaaaaataatcttttaaaatcttagtccaatacaaccatctaaatgtatttagcactttatttaaatcattacatcattagaagggggtcactatcatccatatcattcatctgaagtccatcaacgttggttacagtgggcttctgttcgcgtctttgtatataagataacgtgttcttgtttttcccagggcagcataccattgtgggacgaatggtgccatccaaatgacatcaccagcctgaactgggtaccaactatcacccaaacgataaatgccttgcccttccagtagcagcaaaccatgctggttataatggacctccttcacattaagaaattctccaggttgaaaatccattatgtggatattgaagtcatatgccaaagataaaaatagaggctgggatggttagttcagaaatggataattctgaattgcatcttactgatatgggtacagcagatatagaactgggaatcaagcaacagaaaaagacttttactaagattattcaaatcgtgaagactttattttccttttctatatacataatcttttagtagtccacaagcatctgattatacttagtgctgtgtatagtttattaatggggaaacccatagacgagatgaacaaaatcccgtaacgcacggcaaattccgctcattatactagtcaaattgatgcatatttttaccaatgggaccatgtgcggttaggtacctcttcagcatataagaatgctacctgtgccgccttaaaaattggtgcaccttgcattcttgggtcacaagagtcacagaaagcttaggacgcaggtgttcttaaagtatttaccaaaccaacagcacccttaggagcaaagggttggaagtaactcgcagttcatgaaaaatctacctgaagttggtcatggactggcacagttattcataattcacctgactatgataccactgagaaggtgacatctcctgaagcttggggtcttccacataagatgcttatcaagatggttgattcatttgccaatgggtcgaaatatggtcaggtaacaattccacaatagtaacaggtttatcacattcaattgaatgttcaaaatttggaggaaaataagcataagaatcaaccttcagtagttggctaacaccagcagcattagtgagggtgacagcaccttggagcacaaagataaatctctccacaccaggcaggggtagtcctgattttgatttttctttcaacttagctaggtacattacaaagtgtgaacccatttctggtgaaattaaatatgcgcctgacgtgtcgatccaatcaggcaatgggccatatacatgactttctggtgataccaaagcatgattactcttataaacactgcgtgtgaatccaggcaaatcttgaaggtggataggtgagagagtggggttatccactttccaataaagaggctttgatttcgattccgaaggagcagagcaaaacccttcttcagcaaatgcatacttaaacaaacccagaacaaggagaaggacaaagatgctcctcatttttcagatgagaaaacgagaaactgttttggactgagaagagtggctcaaatgaaagtaggtggataagtgtgtcacggactcacactcaaactagctgcgggtcaatctgatcaaggaacagtaactgttgcttgtcctggaactggggagcaaagcggatatgatttgtgctcagatctcaatgtggatccaccaccatgcattgatgatgataagggaatggaacctttgtctactgatacaaggccaaatgcagaggcacatgttgatgtcaatcgagcttctgaagaaggcaatgtttgtgatggtaattcaatggcttgggaggctcttgatttaaatcctactcgagagttatgccaagaaaattcaacaaacgaagattttgatgaagaatcctttgggagagaaaggcccgttggactattaagtgcaagcttgttgtgaatatttctttaggcttttggtccatgggcactcgagttcggtcatgcttgttgtagctgtgccacctttgtatattgatttgatctcgaagaatagaatagaatgtgatcttgttgaagatcataaaatttggttagtttaggtggatgttttaacgactttacatcccataaataataccttttgagttgaaatttctaatgatctgtagcttcttgtgcgatgtggcgttgttgtattgcatcgcaaaattctgtagatatggcttaattaagacaatgatgtcagtaaatccaataaatctgttcacccaaatgaacaggacaaaatattaattacactcacaaggaaaaacagaagacgttattggtcaaaaaaaaaaaaaaaaaaaaaaaaaaaaaaaaaaaaaaaaaaaaaaaaa

SEQ ID NO: 110233 - DNA, 584 bp, Glycine max
  Clone ID: PAT_MRT3847_70552C.1
gaactagtcattcattaacaagatttttttttctctcttctattttctggagacaatgccattgatccaagtatccaactagttgtgcaccttgtttttcaatctatttacagacaacaagcattcaagattgagcactatttcgtttttcttgaaaacatgcacaaacacagaaagggctatgaaaccatgatccaaacatgcactattcgcacactaatatctaccccaatatcttcaattctcatacaattacacaaatgcagggtaaacaagaaaaaagaaatagttccaaactcaaggctaaaacctactagtctccatttattcatccgctacttctctctagtgaattctgaggggggagggttaagtttgcaattagccaaccacttccacagccacagataaagactcatgttcatgtcgccctcccaaggcattccccgcatgatgactggttcctgcagctacagctacaggtccagaaatagttgtatgctcaagcaaagattgtctgaaccataaacaactatagggatctgatgcaatgcactcttttttaggcctttcgccaccaaacg

SEQ ID NO: 110234 - DNA, 232 bp, Glycine max
  Clone ID: PAT_MRT3847_70553C.1
ggctacataaccttgggggctgcagggttggacgactggaaaagcaaagggccaaaatgcctaatttttcacaccaaaaatccacaaatgattcaaaaattcaaaagccttaacaaaatttcttaacgatgacctgggcgaaaaacacgtcctcactgggacaaaaattttgggtaaacgatccactccaatctttggatctccccccctggactaattaattaagccccca

SEQ ID NO: 110235 - DNA, 347 bp, Glycine max
  Clone ID: PAT_MRT3847_70554C.1
attatgaacaattttttccttaatagcattggaagatgaggttgttgaggtcacatgcctggggggaaaaaataaaagaactttttttcacaaaagggggggaaaaaaaaacttaaaggaaccccggccaggcacagttttaattggggaaaacatggggtttttaaccgcccacccaaaagggggggggaaaaaaccaggttttggggggggtagtaatttgaacccttcatatttttaaaaagtagcttattagcccaagcctttttttaatcccggttttgagataacttaccaccccggggggaaacaaaaaaaaacaatttttcaaaaaaagggaccctttt

SEQ ID NO: 110236 - DNA, 306 bp, Glycine max
  Clone ID: PAT_MRT3847_70555C.1
gacactccggcttctcttatgtttaattcatgcgatcaatttccatgttgtgactttatcttccaggccggttcaaatatgccagactgaaaaaactctcacttttaaaattatttcaatgtttcaagaataatgcattcctatatctttcttcaacatgattactaactcatcatttctatttctagcaatttcaatcaacttatattatattacgtattctctcctactaatatctcctgaatacattactaaatactcaaacatcacatatataatctactcaccaaccataaataaatcata

SEQ ID NO: 110237 - DNA, 1895 bp, Glycine max
  Clone ID: PAT_MRT3847_70556C.1
cctacgcgttcggggtattagtaaagaagagaaatacatgctgcggaggattggcttgatgatgaagcccttcctgttactaggtagacgaggggtttttgatggaacggttgaaaatatgcatcttcattggaagtatcgggaacttgtgaagataatatgtaatggaagcctggaagaagtccatcagatagctctgaccttagaggcagaaagtggtggaatattagtggcagtagagagagtgagaaagggatttgcaatcattgtgtatcgtggaaagaattatagtgtccctgtttgtttgaggcctcaaacgcttttaaataaaaggcaagctttgaagcgttctatagaggcacagcgccgtgagtcattgaaacttcgtattttgacgctagataaggaaataaatgaattgaagcttcaaattgttgaagatgaggaggctaacagtaagcaaatggctgaagcgtcgagacttgacatggctacagacgaacatgaagcttgttcaaatttcataaattggcattctcctaaagaagcttctggtgacaatcaacaagcaatacaggaggagccagttgagctgattgatagtggtggagctcatcaaggtgaaccagaaaattccataagttggaattcttctatagaagcttccattgacaatcaacaagcaatacaggagcatcctgttgagctgattgatggtggtgcaactcatcaagatgaaccagaatcctggcctagtttgattcataaagaaacacagtcggatgaagtgagtgattctgtgactgataccgagcttcacatctctaatagaaagggaatggaatcatcgaactcattgtcaaaaaatgatcgtgaaccattagctccagtgatatatatgagtttgccttctaggtctgtgcatctttcaaccaaagagagacttcttctgcggaagcaagccctaaagataaagcaacctgtccttgccataggaaagagcaatattgtgtccggtgttgtgcaaacaattaaagctcactttgaaaagcaccctcttgctgtagttaatgtcaaaggaagggcaaaagggacctcagttcaggagttggtgttcaagctagagcaagaaacaggtgcccttctagtctctcgggagcctagcaatatcatactttacaggggttggccatcagagagacgtagccgccctgcaatgcatgttaataaagtgagaaatgaggaagggacagagcccagtgtctcccctgcctatgcacacaggatcaggatcaggaacaggaacaggaaaataagaataagtatgatagggaaaagaagaatagatagaacaggctcaaggccaaattttaattttaggagagattctacccccatctttagcactagttcgtaacatcatacttcagcactgtgaactcagagagaagtaatttggggtgacatgggaacattgaaattttttagtgggaagaacaccaaacaggaactggaaaagaaagaagaaagacagcaaagagcctttactaattttgaagcctttcttcactcctcaagtgcccagtttttgtttctctgggactgaacttacatgtctagtaatatcttcctggtacttaagacaaggtcatcatgttttccctaccaagcaccttgtttcttaacactcaaggttatcaactcatcatgcacgatatgcttgaatcatatttgagcagaaagtaatttagatacaggcatacagcatacggataccagcggaagaagaagaaaaaattgtattacaacaaaacatttaaatggaaaagaataccacatgtttgaatgtttagaaaggaaaaaaataaaataataaagttgtctttgttgattat

SEQ ID NO: 110238 - DNA, 473 bp, Glycine max
  Clone ID: PAT_MRT3847_70557C.1
gcgagaagacgacagaagggtcaccctgtctatactatctcatggcatttaaaattaactcggtcagatctaatgaacaaagaacttaaatcagaacaagcaagcacgtgatgattctaatcaactacgactcagatttcatgtaatcctaaaatttgcgataaaggcgtcatgatccaattgagttagctccattcttaagcacacattagtagaatcaaaatcatataacaccagaataatgcagatcaatcaaaggaaaataaaagagcacactcacgaaaactaaagagagagataatcatatggaacgaacgaaaattgcatgaaataagaacaatctaacctgctgacgctggatctataagcaccgatcagctgagagaggatgacaaaaactggaccttcaaaagctatcgtaaaattcgtctttcgctctcttctctggattataaaactataactaaaaggat

SEQ ID NO: 110239 - DNA, 483 bp, Glycine max
  unsure (1)..(483): unsure at all n locations
  Clone ID: PAT_MRT3847_70558C.1
tttacgcgtgggttgcaacaaaaaaatgagcgagggaattgaagctgcacaaccttctcctgctcatgagcagattcagcaacaatccgttgataggcaaagcgaggataacgagcatcaaccgtcagatgtttcacaagcacctcagcaattgtttgatgcgcgtcttccgtttccacctcatcaaatgcgtgctggatttcatcctcgttttccaccatttccaccgaatggcatggggggaccaccaatgcgggcaccttttcgtccgcctccaaatttctcgcagcaacccggaggcactcaacctgataacttcccaccgtttttcaacagtcctgctcacagaatgggagcgcctggtgggccagcacctccccgtggaccaccgcatatgaacatgggcgtgcctcgttcaccttttccaccgaacttcgggccgncgacaggattcagtaccttcgcagggatggcaggaccacc

SEQ ID NO: 110240 - DNA, 377 bp, Glycine max
  Clone ID: PAT_MRT3847_70559C.1
ttcccgttcgacccactcatccgtgcactcacacatcctaccatccacaaaatcttcttctcgatttcaccatactaactcctggaacctcactgacacttttcatatgagagcggtcaaaacccccctactcttattctaaaaccaaatcttctcaaccaacatctctaactaacatatccccatccaccctacttcctttctacccatcataaattaattattcacattaccttacactacctcaccaacagttccaatatcaaaacacactgaaacttcttacaaatcccaaactctaccattttatcacccaactatctccactaccccatcctctacccattaatctaatagaacacttcaaaattcatcac

SEQ ID NO: 110241 - DNA, 268 bp, Glycine max
  unsure (1)..(268): unsure at all n locations
  Clone ID: PAT_MRT3847_7055C.1
gcangcacgtnagcncngaattcggctcgggntcgngccgtncgccggaggacactngnncatatcncaacnctangccatgcagcaggtactncgacgntcnanatntanctgggntgggnntncnatanngcaactgcacactcctcgcnangaaagcnctctgtntncnggtgnnctngagataccannancacgtgacaatcgagagatctacgnnnctcnatcntngtactacgngaactngngnctggctcagcagtggtaa

SEQ ID NO: 110242 - DNA, 598 bp, Glycine max
  Clone ID: PAT_MRT3847_70560C.1
ccttcaaatcttctcagcatatatattacttgaaaataaaaccaaaaaccatagtcatctctttaaagaacaacctccaacggctaaaagaaaaagaacaccacaatgataaattgacttaactagctaaattataggttcttaaaaaaattaagaccacataacttatccagccttcaaatacacatcaaaatgatatggcaaattgctagctcaacggcgactgcaaggtagcaaaacccatgacagttgatacattagtgctagcagttgttgagtgggagcctcttagtcttcttgtaatagcgagcaagtcggtggattctgctctcaacaagaatcaacctgaacttggagtccttgtccttcctgttcctctcaagatgcttcctaattgaaactgccttcttaatcaaatggtacagatcctctggaatttcaggcgcaagtccgtgagctttgaggatgcgaaggattttgctgccagtgacgctattgacctgagcaataccgtgagaatctctgagaatgacaccaatctgagacggggtcaaacctttcttcgcaaacttgcagatattttcttcgacatcttgcg

SEQ ID NO: 110243 - DNA, 955 bp, Glycine max
  unsure (1)..(955): unsure at all n locations
  Clone ID: PAT_MRT3847_70561C.1
gaaaacttagtgtctgtatggattacattttaagaagtggaatttgattgaacttgactttatgaactcaagttcagttacaagtaatagttttcctttggaaaccaattgaatgcataagaatgcataataaagaatacgacccttcaaatcttctcaacaattatattattaaaaccaaaaaccacagccatctctgacaacctccaacagctaaaataaaaagaacaccacattgataaattgacttaactagtatctttcccagtctaaaaataggttcttaacaaaactaaagaccacatcacctatccagctttcaaataaacatcaaaatgatatggaaaactgctagctcaacagaggctgcaaggtagcaaaacccatgaaagttgatacattctctaagcaaccagagtgctcgcagttgttgattcatacttccagactggtgggagcttcttggtcttcttgtagtagcgagcaagtcggtggattctgctctcaacaagaatcaacctgaacttggagtccttgtccttcctgttcctctcaagatgcttcctaattgaaactgccttcttaatcaaatggtaaagatcctctggaatttcaggcgcaagcccgtgagctttgaggatgcgaaggattttgctgccagtgacgctgttgacctgagcaataccgtgagaatctcgaagaatgacaccaatctgagacggggtcaaacccttcttcgcaaacttgcagatattttcttccacatcttgcgaagagatcttgagccagctagggggtgtccttttgtagggcaaagcagaagaggatatacccttaccgcggctgtgcatacgacccatggctggtggatgtcactcgcttgaagctgtggttcttcttattagggttgcgactaggacgctctcttctgtccgcacgcgtggccccagactcn

SEQ ID NO: 110244 - DNA, 928 bp, Glycine max
  Clone ID: PAT_MRT3847_70562C.1
ttttaaaatttttttataggggagaaagaaagagagtttttaatttttaaagaatacgatccttcaaatcttctcagcatatatattacttgaaaataaaaccaaaaaccatagtcatctctttaaagaacaacctccaacggctaaaagaaaaagaacaccacaatgataaattgacttaactagctaaattataggttcttaaaaaaattaagaccacataacttatccagccttcaaatacacatcaaaatgatatggcaaattgctagctcaacggcgactgcaaggtagcaaaacccatgaaagttgatacattctctaagcaaccagagtgctagcagttgttgattcgtacttccagactggtgggagcttcttagtcttcttgtaatagcgagcaagtcggtggattctgctctcaacaagaatcaacctgaacttggagtccttgtccttcctgttcctctcaagatgcttcctaattgaaactgccttcttaatcaaatggtacagatcctctggaatttcaggcgcaagtccgtgagctttgaggatgcgaaggattttgctgccagtgacgctattgacctgagcaataccgtgagaatctctgagaatgacaccaatctgagacggggtcaaacctttcttcgcaaacttgcagatattttcttcgacatcttgcgaagagatcttgagccagctaggaggtgtccttttgtagggcaaagcagaagaggatatacccttaccgcggctgtgcatacgacccatggctggtggctgtcactcgcttgaagctgcgcttcttctgattagggttgcgactacgacgctcttttgcacactccaccactctcttcgtgcgcttcttcttcttctcgctccctccttccttcgagatcttattctccgaacgcgtggg

SEQ ID NO: 110245 - DNA, 687 bp, Glycine max
  Clone ID: PAT_MRT3847_70563C.1
caaatcttctcagcatatatattactttgaaaataaaacttcaatttcaaatcttcatatattacttgaaaataaaaccaaaaaccatagtcatttttttaaaggacaacctccaacgggtaaaagaaaaagaacaccacattgataaattgacttaactagctaaattattaaccataggttcttaaaaaaattaagccacataacctatccagccttcaaataaacatcaaaatgatatggcaaattgctagctcaacggggactgcaaggtagcaaaacccatgaaagttgatacattctctaagcaaccagagggctagcagttgttgattcgcacttccagactggggggagcttctttcttcttggatagcgagcaaggcgggggattctgctctcaacaaaaatcaacctgaacttggccttggccttcctcctctccttcctattgaaactgccttcttaataaggggtgcaaaattcacaagtcattaatagcacgaaagggacagtgcacatggataaaaaaaaaaagtgacaaggttggcattcaaattacaaatgcacaaagacttcagcaaaacatcatacacatgtgcacttagaacaaaaaatacataactaccagtgaaatcaatataatttaatttagaagatcatcatatgtaacatatccaaataata

SEQ ID NO: 110246 - DNA, 257 bp, Glycine max
  Clone ID: PAT_MRT3847_70564C.1
gtttaagaagcacattgtgggagcaactaaatacccgctctctaagattaaggggttccaggtttttgatggggagagcatgaatgatgatgcttgcttggtctttgcatactacaaggatggtgctgctgatccaacattcttatacttcgcatatgccttaaaggaggttaagagctaattgacataatgtaccaagatatctactcttattctacctaggttcttatatttaagttttgtcctaagttacttaa

SEQ ID NO: 110247 - DNA, 740 bp, Glycine max
  Clone ID: PAT_MRT3847_70565C.1
ccacgcgtccgatttgatttataatatcaagataatttgtccttttttttggataattaagtaaggaaaagtgtaatgagttttataaataacagcttttcttaaactattttgcatgttctaggttgtgtgaaggaggagagctgttagacagaatattatcaagaggagggaagtacacagaggaagatgcaaaagctgtcctgagacaaatactgaatgtagttgccttttgccatttacagggtgttgtgcatcgtgatcttaaacctgagaacttcttgttcgcatccaaggatgagagctcaaagctgaaggccatagactttgggttgtcagattttgttaaactagatgaaagacttaatgatattgttggcagtgcatactacgtggctcccgaagttctacatagagcttacagtacagaggctgatgtctggagtattggagtgattgcatatattttattatgtggtagccgtcccttttgggcccgaaccgagtctggtatctttcgtgcggtattgaaagctgacccaatttttgatgaacctccttggccttctctgtcagatgaggcaaccaattttgttaagcgattactaaataaagatcccacggaaagaatgtctgcagcacaggcgtttaagtcatccatggattagaaacaaggatgtaaaattacctctggatattctattattcaagctcatgaaggcatatatgtgttcctcatc

SEQ ID NO: 110248 - DNA, 1066 bp, Glycine max
  Clone ID: PAT_MRT3847_70566C.1
tggcaatggagatggttaaggggccggggactcgaggctcgcccacgcgtccgtacggctgcgagaagacgacagaaggggagagtggtggagtgtgcagaagagcgtcgcagtcgcaaccctaatcagaagaagcgcagcttcaagcgagtgacagccaccagccatgggtcgtatgcacagccgcggtaagggtatatcctcttctgctttgccctacaaaaggacacctcctagctggctcaagatctcttcgcaagatgtcgaagaaaatatctgcaagtttgcgaagaaaggtttgaccccgtctcagattggtgtcattctcagagattctcacggtattgctcaggtcaatagcgtcactggcagcaaaatccttcgcatcctcaaagctcacggacttgcgcctgaaattccagaggacctgtaccatttgattaagaaggcagtttcaattaggaagcatcttgagaggaacaggaaggacaaggactccaagttcaggttgattcttgttgagagcagaatccaccgacttgctcgctattacaagaagactaagaagctcccaccagtctggaagtacgaatcaacaactgctagcactctggttgcttagagaatgtatcaactttcatgggttttgctaccttgcagtcgccgttgagctagcaatttgcgatatcattttgatgtttatttgaaggctgggataggttatgtggcttaattttgttaagaacctatggtttgactgggaaagataatttaactagttaagtcaatttatcaatgttggtgttctttttcttttagccgttggaggttgtcttttaaagagatgactatggtttttggttttaattttctagttaatatatatgcttagaagatttgaatgagagaatttattaatgtgagatgatttttgtttttggctttggagtaagacgttttatattatgacgagagtttttggaattaaattaaaaaaaaatataagattaaaaatttttaacaaaaaaaaaaaaaaacaatattgggcgctctagaggatccaagc

SEQ ID NO: 110249 - DNA, 826 bp, Glycine max
  Clone ID: PAT_MRT3847_70567C.1
gagagtggtggggtgtgcagaagagcgtcgcagttgtgaccctaatcagaagaagcgcagcttcttgcgagtgacagccaccagccatgggtcgtatgcacagccgcggtgaggggatatcctcttctgctttgccctacaaaagggacacctcctagctggctcaagatctcttcgcaagatgtcgaagaaaatatctgctagtttgcgaagaaaggtttgaccccgtctcagattggtgtcattctcagagattctcacggtattgctcaggtcaatagcgtcactggcagcaaaatccttcgcattctcaaagctcacggtcttgcgcctgaaatttcagagggactgtaccattgatcaagaaggcagtttcaattaggaagcatcttgagaggaacaggaaggacaaggactccaagttcaggttgattcttgttgagagcagaatccaccgacttgctcgctactacaagaagaccaagaagctccccccagtctggaagtatgaatcaacaactgcgagcactttggttgcttaaagaatgtatcaactttcatgggttttgctaccttgcagcctctgttgagctagcagttttccatatcattttgatgtttatttgaaaactggataggtgatgtggtctttagttttgttaacaccctatttttagactgggaaagatactagttaagtcaatttatcaatgtggtgttctttttattttagctgttggaggttgtcaaaaatggctgtggtttttggttttaataatataattgttgagaaaaaaaaaaaaaaaaaaaaaaaaaaaaaaaacac

SEQ ID NO: 110250 - DNA, 488 bp, Glycine max
  Clone ID: PAT_MRT3847_70568C.1
gggatccccaacgggttaagttttgttttttttgggggttgcccaagggcttggggccctttttttcccgtttttttttttgaaagggccttccgggaaaaaacgggaaaacttcccaggggttaagagggggttttttaacctcccctttgggaagggggtttccccccgtccccaaaaaagggggtgaaaaataggggtaatttttttccctggggtggaaaaagggggaacttttttgttgtttaaagccccccggggggttttccccgggcctaaatttttggggttttggggggtcacatagccttcccaggggcctttaaagggcctttgaattggaaaccagttccggccccgggggttcccccgggattttcgggccgggccctggggggggcccaatttttcctttaggggggcgtattaaagcttgggggaataatgggcataggtgtttcctgggggaaattggtttccgctcccaa

SEQ ID NO: 110251 - DNA, 530 bp, Glycine max
  Clone ID: PAT_MRT3847_70569C.1
tttgtttttttttttttttttttttttttttttttttttttgtggttttttggttttttttttttttttttttgggaaaaaaaaggtaataagcgccagggggtaaatacccccccagatttgggggcaacgaaaaagcctttttgggggccgcttggaatttgtgtgggccccgaaaaaaaagacaggtttgtgtaaacccaagggggaaaaagggggggcgaaaaaaaaaaaggggcaaaaaaaaaaaaggaaaaaaactgggccgaaatgcaaaggtgacgaccggggaatgcaaccgaaaagctttcatagggggtgaccgaaaaaaaggccctggggcggggatttaaaacatgggcacggggaaaaccccggggggacccaatggaatcagcggggaatggagaccgcctttcccagtggggacaaaactgaaaagggcctcacagacatggctttcagaaagatggcccccccaaaggggaatggggcccccctgggaaggggccttaggcccgggggggggg

SEQ ID NO: 110252 - DNA, 453 bp, Glycine max
  Clone ID: PAT_MRT3847_7056C.1
aaaaaggggaagggctttttaaaattatggaaaaaattcaggggtcccttagggccccaaaccaaacccaaataaaaccttccagtaaaaacccattactaagggcgggggacggaaaaggaaaaaaaaattatttttttagggggcaccccctactcaaaggaggacaaaaagcccctgaaaatcgggccgaaaaaaaaaaaaaattccagaggggggttcccaaaaggggtactaaacagaaatttccccttggagggattcccgagcaattttaagggccccccccagggggggggcatttaaaaggtgggtttaaaaaaaaaaagggtgactttgggcaagtttaggcgggagttaaaattcctcagggcccccattttaaaaaaaaactcctttcagcttcccaaattcaacccagaggggaaatattttaggaccaaaattcccaat

SEQ ID NO: 110253 - DNA, 410 bp, Glycine max
  Clone ID: PAT_MRT3847_70570C.1
cgcgtcagcccaagcgtccgcccacgcgtccggtctttttctttgccgtgattattctaatttcagatctatatttgtttggttgactttgtttctggcgtcctagttgcgttctcgattaggtttgtgtttgcgattctggtttaactaatgccagggaaaattggtcaccgtcactaattgtcataacttgttgggaattagcgtctatcgagtcggtgatggttcagacttcagaatgatatgaggatgcagttgtgttaaaactaggggatgaaacttactgttgttaaaaattttaagatgatgttgctgattagctattgtgttggcttgaaatttcttatcttatggttttagttaggatggccaaatagataaaacaatatgtaggaagtaattaagttttt

SEQ ID NO: 110254 - DNA, 454 bp, Glycine max
  Clone ID: PAT_MRT3847_70571C.1
gaagctcggaattcggctcgagaagaaatgcaagtgaggataagcatgcacatgttaatgatggagctaattttgataaaggacggaaacaagacaagtttgggaaagatgtcaagtacagcaattcacatgctcgacttggagaacaggaacaagaggaatggcttaataatgagaagctttctatagaaagtaaaaggagagaatcaccatttttgacaagaagggataagtttaaaaaagagtttatgagaagaattattccttgggagatgataaacatttcctgggacacatttccttatcacattcatgagaataccaaaaatcttctggtggaatgtgctgcttcccatttgagacataataagcttgcttcatcttttggcagtcgcctctcatcttcaagtgggagaatattgcttcagagcattcctggaactgagctgtatcg

SEQ ID NO: 110255 - DNA, 455 bp, Glycine max
  Clone ID: PAT_MRT3847_70572C.1
gggtaattatcatcacgccaatttactttctccttttctttttgagataaaaaaatgtgacgtaaagttgacttaagtaatataatggaaagcaattatatgttttttgtaattacttttttcggcatatatatatataaaggcatggctttatcgtacatgaaggctctgcttattccggacatattgagatccagaattcataaaatcaaattcttattgaaaactaaaaagtggattcagaaggatctcaaaatgtttacaactatttacatctgcaatctacagtcaaattgaacataataaaataaaaatttaattagttcgactactttaattactactcttttaatttaggatgaaatatgtgatggaggcttaacttggatattaaagactagaatgagacctttagcaaagctttcggaaggaaatttgctagatatttggataga

SEQ ID NO: 110256 - DNA, 397 bp, Glycine max
  unsure (1)..(397): unsure at all n locations
  Clone ID: PAT_MRT3847_70573C.1
tcggctcngagatcctacactatgnccgatttcccctttttctctgctgcttaactgttanaaataacattttactcagtacttatctttctggcgttgcatgatgaatgacacgtcttttcagcttgcagaatctctctgtatgtatagaaatgcctgagacacgcaaatcgttttgggggtatcgaatacctaggatttgaaaaacttacatatgtacccattcaggtatgttgttgcctgttggtcgttcttaccatttgttgctgaagttgatagttttcttttctttctttttttagttgatattgatgaaagataaaacacctgttgtagacttgtagttcaacatcaggagattgaggattttttaattgcaagagacagttaaatagct

SEQ ID NO: 110257 - DNA, 540 bp, Glycine max
  Clone ID: PAT_MRT3847_70574C.1
atagggggcaagccttcaggatctgcagtcataatatctggggatggaacaacaactgtctcccattattatagaaactctacacaaccctgccggtttgatttaccctatgatgctgggaaagtgctagatgcttctatccttccttctgcagatgattatgaagaaggtgcatgggttgtattaacagagaaagcaggaatatgggcaataccagagaaagctgttatacttggaggagtggaacctcctgagagaagcttatctcgtaaaggcagttcaaatgaaagatctgcacaagaagagataagaaatcttacatttgcaggtaattttgctcctagaagggctagctctgaagcatggaatgctggagacaaacagaggacggttttgagtgggattgcacgtcgaactgcactagatgaagaatcagaagctttattgaataatcttttcaatgactttttatcatctggccaaattgataggtctcttgaaaagctagaaacatctggttcatttgaaagggatggggaa

SEQ ID NO: 110258 - DNA, 135 bp, Glycine max
  Clone ID: PAT_MRT3847_70575C.1
agaagaaaaatatttactaataatattattgacaaattaatgaatagctttgcttcaatcacttttatttacacaataaattgaagcaaagctattcattaattgactaataatattattgacaaatctcgagcc

SEQ ID NO: 110259 - DNA, 375 bp, Glycine max
  unsure (1)..(375): unsure at all n locations
  Clone ID: PAT_MRT3847_70576C.1
ggcaataaggatccctagaattattctcatgtgcagttactataattactttaattagaactgcatatttatatactttctagtaataagcataatgtacaagaacagaaaacatttttctgtatcttggtatcagaaagaattacggtcaattttttctcctttcctaaaaccctagactcctcaaaaccaaataagctgtaatggcttaagaagcaaagattgtacctgtctcaagttagaatgttagctctgagtcatccaatatcaacatcatacccttaattgaacgacagaaactttaatgtatggtcaaagatgatgaaggttcatgctgcgtgcttgaataaactnggccacttgaatggaaaaact

SEQ ID NO: 110260 - DNA, 277 bp, Glycine max
  Clone ID: PAT_MRT3847_70577C.1
cggaaccctaatcaaacttccactcgccttccgatctgaaccctgacctagtcacgcgctgatttcatatcgcgggacgaaccctcaccttaatttcaccctggtcactgatttatggctacttataatgccaagcttgaacgtgtaataccaaccatacttattcttgaggatgaaggcgtattcacctctgctaatgaccacggtgtaatgaaccatagccataagttatgcgtgactattaatgggctgaatataaaccgcacatcgcagtcaa

SEQ ID NO: 110261 - DNA, 198 bp, Glycine max
  Clone ID: PAT_MRT3847_70578C.1
tcccacgcgtccgtacggctgcgagaagacgacagaagggtacggctgcgagaagacgacagaagggggagctggctgctcctgtggatttattgaagtctgcagcgaacgcatccaagcagaatactggggaaacggccgaaatcaagaagttaggaggtttaaccctaaaggggtctgctgattccttgagcaatt

SEQ ID NO: 110262 - DNA, 420 bp, Glycine max
  Clone ID: PAT_MRT3847_70579C.1
gattgtgtaattttcattatgtattttacaatcaccatatttcaatctgctataggctattacaaaattgaaatccaaatgtttgaaaatgtgaagagtttccattagttgctcaagttgtcaagttattagaaagaatattgtggtttactccgtataatttgtgcaattgatccttagagatggataaacttgttcctatttggttgctgtgttacagtttgaagatgatgacagaaggtgtcacatggaactcaaatatttattcgagataaaaaagaaaagctagtccggtttttctgacaccatgtttttatatatcctcccaaaatccttaattatatttctgaacatgtgttatggatgctacagctttgtatttgtttcctaatacacacacaggggatggactccgttttg

SEQ ID NO: 110263 - DNA, 409 bp, Glycine max
  Clone ID: PAT_MRT3847_7057C.1
cttgtttttgagaagtctattactattacacaagaatgaagagctctctctttcaccttctattcgcgattcttttaggactctcccattttgcgatgccttaaagcagtcccagttacaagaactgaaagccttatgcaagaacccaaagttcttcatcatgcactggataatatgcacaaccacaaggtatgtccaaatttgatgccctatatataagacatcactaaataagttgattgatttaaaaaaaaaatgattagcaatcacaaccacatttatgactgtaattgcggatgcatcagtcacattaagacacatgcatgatgtaattcatggttctaaattgcgcgcgggttcatcacaatccttgacattgctagaaattgtaggaaatgtggctgatgat

SEQ ID NO: 110264 - DNA, 1272 bp, Glycine max
  Clone ID: PAT_MRT3847_70580C.1
aagaaagtgcaacaagattggagcatattgcagaataaccttcctgaggaaatctatgtacgagtttatgaagatagaatggatctcttgagagcagttattgtagggccatacggaaccccttaccaagatggactctttttctttgattttcaccttccgccagaataccctgatgttccaccgtcagcatactatcattctggtggttggcggattaaccctaatttgtatgaagaagggaaggtttgccttagccttctaaatacatggacaggcagaggaaatgaagtatgggatcctaaatcttctagcatccttcaagtcctagtttcactgcaaggcttagtactcaactctaagccttacttcaatgaagctgggtatgataagcaggttggaacagccgaaggagagaaaaattcattgtcatacaatgagaatacctttttacttaactgcaagactatgatgtatcttatgaggaaaccccccaaggattttgaagtgctcatcaaagaacattttaggaggcggggtcataacatccttaaggcttgtgatgcatatatgaaaggttacttgattggctcgctgactagagatgcctctgtaagtgaaaagagcagtcagaattcaacctctgtgggtttcaagttgatgttagccaagatagtgccaaagcttttcttgtcactaagtgaggttggagctgattgcgaggaatttaagcatctgaaagatttgtagcgaagttatatggtgatacatcacttcatttctcaaattaaagccaactttggtctgctgtctctgccctaaggagcttgaaggaacagaatttggtgggatttattgacattgaaagaagcaaccactgacagagcaagccggatatacttttgattttggttacctgaagtggggaggctatgttggttactaacttgtatgctgtttacctttttccttattttttatttcttttatatctggggattaactctgtgccatggcatcctgcgatccttgtagccagtttcacttagtgtgaaataaggcttctgttattttattctctggggacagggtgcgagtcggggttggattttcacaggtatttgaaagggttaggttgtcttgcattgattgatttaccttctgtttctgaagaatacgatgaattgaatataattggacaatcacttcctgcgcccccctcccccttctcttatagtataatggatatttcatatttttgctttgtgtcaa

SEQ ID NO: 110265 - DNA, 611 bp, Glycine max
  Clone ID: PAT_MRT3847_70581C.1
ggctcgagcttaactttgtactagtagtgggaaaggctaaaaatttagctgatcacaatgttatttatttggttctgcttattctcctacatgacctcaacttccacttcactagacagtttagcagtgagtcaatccattcgagacggcgagactttggtttcagcaggtggaattactgaacttggtttcttcatccctggaaattcagcaagacgatacttgggtatatggttcagaaatgtatcccctttcacagtggtgtgggtggctaaccgaaatacacctcttgacaataaatcaggagttctcaaactcaatgaaaatgggattcttgtgcttctcaatgctacaaacagcaccatttggtcatcatccaacatatcaagcaaaacagagaatgatccaattgctcgtctcttggattcgggaaattttgtagtgaaaaatggggagcaaactaacgagaacggtgtattgtggcagagttttgatcatccaagtgatatattgatcccaggaatgaagattggagggaacttggaaactggtgaagataggttcataacatcttggaaaagtgctgatgatccagccgtgggagaatatac

SEQ ID NO: 110266 - DNA, 1606 bp, Glycine max
  Clone ID: PAT_MRT3847_70582C.1
tttctttgcaattgatgctgataattcaggcaataagaatgaaaggtatgatgaggttgtttcagaagcaactgaaactctggaagcaagtgcggcactttgtagcttgggaaatgaagatgctcctgcaactgcaagttgtgataatgacacttgcagtttgaaacattttgacataactaaagatccatcggaccactattttattggtgcaaatggacagagtaacaaccggaaatggttcaagaaagtgcaacaagattggagcatattgcagaataaccttcctgaggaaatctatgtacgagtttatgaagatagaatggatctcttgagagcagttattgtagggccatacggaaccccttaccaagatggactctttttctttgattttcaccttccgccagaataccctgatgttccaccgtcagcatactatcattctggtggttggcggattaaccctaatttgtatgaggaagggaaggtttgccttagccttctaaatacatggacaggcagaggaaatgaagtatgggatccaaaatcttctagcatccttcaagtcctagtttcactgcaaggcttagtactcaactctaagccttacttcaatgaagctgggtatgataagcaggttggaacagctgaaggagagaaaaattcattgtcatacaatgagaatacctttttacttaactgcaagactatgatgtatcttatgaggaaaccacccaaggattttggagtgctcatcatagaacattttaggaggcggggtcataacatccttaaggcttgtgatgcatatatgaaaggttacttgattggctcgctgactagagatgcctctgtaagtgaaaagagcagtcagaattcaacctctgtgggtttcaagttgatgttagccaagatagtgccaaagcttttcttgtcactaagtgaggttggagctgattgcgaggaatttaagcatctgaaagatttgtagcgaagttatatggtgatacatcacttcatttctcaaattaaagccaactttggtctgctatctctgacccaaggtaccaacaagtgtaaaggttctcatatagtgtcaatgttttgatttctactatttgtaccctttaatttctcttgtttaaaagatcaattcacttctaggagcttgaaggaacataatttggtgggatttattgacatcgagagaagcaaccactgacagtgcaagctggatatacttttgattttggtcgcctgaagtggggaggcaatgttggttactaacttgtatgctgtttaccttttttcttaatttttgtttcttttataactggggattaactgagcgcaatggcatcgtgtgatccttgtagccaatttcacttgatgtgaaataaggcttttgtcgttgttttatatctggggacagggtgggaatcggggttggattttcgctggtatttgaaagggtttggtcttgcattgattgatttaccttctgtttcccaagaatacgatgaattgaatataattggacaatcacttcctgggcccccttccccccttctgttatagtataatggatacttcatatttgtgc

SEQ ID NO: 110267 - DNA, 206 bp, Glycine max
  Clone ID: PAT_MRT3847_70583C.1
acataagggggtcccctactaccacgaccaagctccttcttaacacaacatcttttctaacaggagtgaggaatgctctcagaaggctctgcaagaaagaaatcctccattgttggtgtcaatatcagtgaatgggacctcttaaggacaaaaatacagcccatccctaataataataatcctcgtatctctacaaaaacactcaa

SEQ ID NO: 110268 - DNA, 534 bp, Glycine max
  Clone ID: PAT_MRT3847_70584C.1
ctttatattgcgaccacatacggctgggatgcaatcagactcgacagcgggtttttgggccccgacatcggctagataagattgggtctcccttgattatcagatcttgttgcaagtacgccttattcttggctacatattcggcgagtagctgccgaagtcaagcttgctctaacaagagatttctaccagatgataacactaaacattccagttttcgtattaccggtctcgggggacggagcctggagccgtttccagacggacatggccgacacactagagactggattccccacggtagaaatcaaggtcttggcttcgatgatggagtctctagctgcatcgtgcggattcgaggccggcttcgcaatccaatgacagtttcgttctgtatctgccctgcagcctattagctaatgcttctccaatgttttctcaccaacaaggcttgcaagtttggatccccgcaccagagcccaacccccacaaccgcgaatagcaattggaaccttcaatggcgttccgcggaca

SEQ ID NO: 110269 - DNA, 268 bp, Glycine max
  Clone ID: PAT_MRT3847_70585C.1
aaacctaactttttcacgacagaaagaaaaatacaggatttgagtattaaatctaggtgcgtccatttattattggaacacaacaacctggttctaaggcctaagattttttttttcctttattttattaaaggcttgtttttggaagggttttttaaagcccaccaaaaacaaatggcaaagggccgaatatatattaggtaaacagccttccagttggtcctaattggcccttgtgatcttgtgattacacctatgcaaccaattt

SEQ ID NO: 110270 - DNA, 343 bp, Glycine max
  Clone ID: PAT_MRT3847_70586C.1
gacccttgaagcacaacgcaaatacgctttttcgaactaactacgagacaatgaaacggtgaattatagaagacaaaaggcacgccctaagtggcttaacaaatccctacaaaggggccatcatgaaggattatccgaaaaccgctttataattgatgtaaatcgctcactaccccattggagctttacattacatcaggctccgagaggaataagcactgacatggtgcaggttaagcccctatatgtagcagcctgcccgaatagacattatacatgataacgggagggtgcacccacccaccagacatccaacaatagcctgtaacgatcactctgtaca

SEQ ID NO: 110271 - DNA, 266 bp, Glycine max
  unsure (1)..(266): unsure at all n locations
  Clone ID: PAT_MRT3847_70587C.1
attgaaatattnnataagcncttggggaagttangngtttanaantgtattttggccaatattatgtcgaganatttgaaccgnccgtgcngttccagantttgaattgaanagtgatctnttggtggcaggaacagggcgatggnaaactttgtnnttgtctcatggtgataatggtcggattgggggaaacatgataangncatggngtnaggttagntagaagtaganttgaattgaagaatcactccagatcagnatatcnt

SEQ ID NO: 110272 - DNA, 586 bp, Glycine max
  unsure (1)..(586): unsure at all n locations
  Clone ID: PAT_MRT3847_70588C.1
ggctcgagcggctcgagtttagaataaaaaattttttatattttaggttgatttcagttttttaagaaaataaatcaaaatgatgttgtattaagaattttttgttgactcgctataaattgtttttttttctctcgatttttttatttggtttctcggtttttcagttcattgacctttcttcaggccaattttgtgtcttatttgaaccgatcacctgaccgattttccagtccaaccggccagttcggtctgattttggaacacaagtatattgcattatagaggatcatgtgagcttactcatcctcttgaaggacttggtctgagggattttagatcatggttttacttctttacttggctattattattgtgatggactgtgtgccctaaacataagataaccatagtattaatttgttattctatcaattgatggntctgcttttatgtattggttttcaggatttgcattttagacacgttctggactcttccatccttggtgagatgaaaggatctggngtagaaacaattcctcgatggccattggtcgttttcttagctggaggaatgggatgct

SEQ ID NO: 110273 - DNA, 304 bp, Glycine max
  unsure (1)..(304): unsure at all n locations
  Clone ID: PAT_MRT3847_70589C.1
tcncgctggtttaggggggttttcgtggccatgtgctgtgttttttggtgcctctggctgtgcctttggtgttggatgtcccttcttgtgttgtgttggaggtggcttctccggtgtctctcagctggtcggtggtggtggggatcctgttattggtcacgttggtgngtgccctgtttttttttctttccggggtgggtcttctgctgctgttgttaagtctcgcttgtgcattgagtttcacgcgggcggaggttgcaaatttggtggctcttgttcctttgcccatggtgagtgggtgctg

SEQ ID NO: 110274 - DNA, 652 bp, Glycine max
  Clone ID: PAT_MRT3847_7058C.1
gcttggaagaacctcactgaagaattaaggagagaaaaatcaacatcaaagttataacgatgaagcccattgacgataaacaagagacagtgacgatcagagcggtgagccacgacgaggaagggagaaagagggtggaaaaaatagagctcaacactcacaacatccacactataaagtacgtcgagaagaagctcatcaacaagggtgtgcagcgcaaggaccgccacccagccgacggcatcagaatcggccggccaccgccaaagtccggccacggcggcaaattcacgtgggagggcccggctagcgtggaggataacgagctcatgacggagccggcggccatggacgaaggagaccccaactacttggactgggaagagagaggagaagagacgtcggagttggtcgttggggaggttgaagtggccaaggttgctgaggaacacgatggggttgctagagttgaagttgatcctcgcttgcgtgttatcatgtctgatctatgttaattaatcttgtttaagtgtgggtggcttttcatgtggacttttacttcaaattgtaaatttgtaatagtacatcaaacgagtgtgatgtggaagttgttcttcttccaaaataaaatttgcagacttttcccttctgt

SEQ ID NO: 110275 - DNA, 333 bp, Glycine max
  Clone ID: PAT_MRT3847_70590C.1
tcgaagacgcgtttttggtttcttgggcaaaaaaacgagaagaatttgatagcgcagtggctgaatttaacaaggaagtggaatcatggcgaatttagaccaaactgatgatgaatcagagtttgatgatttaagccacccttatttaacttaataagatggatctgtattaaatgaaactactatgtactaaaactttgacattcacgaattatcagcttttttctgtccttgctgatactcataattgtctgagtgccataaggcaaatacatttggcgctttcaaatgtttaatatggcaaattgggtattgggaaaaaaaataaaggca

SEQ ID NO: 110276 - DNA, 2424 bp, Glycine max
  Clone ID: PAT_MRT3847_70591C.1
aagagtgattctatcaataagcaaaccccttattttctgtgagatgcatttagagattcataccaataatagacaagccaatctatacatgtgggatataattgctctattacatttggatgtttcgatgaacactaatcagacttgtaataattttattggcaaggctccatcctcctgtgccgcacacgcgttttcacaattggagaattgcagtgagtgagatgagttcagcggatcatgactccgacccccccacccgactccgcttgcctcctctctcaccgagcctcttcgattccgcaccaccggagctctctcacggatcctccgcccgaccctcctccgacccctccagtcccaccagcagcggttacgccgctcaaaggggcggcagcagcaccgccacaagcgtctcccaggtcgatgacgtcctccaccacgaaattcaacagatcaccatccacgattcccaaccctcctctcactcctcctggcttcccggaaaacgacacggcgatgaggttgatgcttccatttcatggaggaaaaggacgaagcatttttttgttctgagtcattctggcaaaccaatatattctaggtttggagacgaacacaagcttgctggtttttcagcaacttagcaagcaagcattttcctttctggagaatggggcagcccatttcaaattggtcagggcttgaaaggataatgggggtgaccatgtcaaattggtgatggatggaaagcatcaggtggtttttcttgtaaaaggaccaatttacttggtctgcatcagctgcacagaagagccttatgagtcactaagggggcagttggagcttattcatggtcagatgattgttatactaacaaagtcagtaaacagatgttttgagaagaatccgaagtttgatatgacacccttgcttggtggaacagacattgtcttctcttcactaatccactcttttagttggaatccagctacatttcttcatgcctacacttgtctacctcttgcatatgcaaccaggcaagctgctggtgctatcttgcaagacgttgctgattctggtgttctgtttgctattctgatgtgcagacacaaggtaatcagtctagttggtgctcagaaagcctctcttcatccagatgatatgctgctcctggccaactttgttatgtcatcagaatcctttaggacttcagaagcattttctcccgtgtgcttgccaagatacaatggtttggcatttttgtatgcttatatccacttttttgatgatgacacatacttgatgttgctgaccactagttctgatgcattttaccatcttaaggattgcaggattcgtattgaaacggtacttttgaagtcaaatgtccttagtgaagttcagagatccttgctagatggtgggatgcatgttgaggatgtaccgcccttacctagttctggatcatctcctcatttgagccagcataggcttccatcagattctcctgaaagggaacctaattgtcacattggtggtgttgctgggttgtggcatttcatatatcgcagcatttatctggatcaatatatatcttcagagttctcatcaccgattaacactcctaagcagcagaaaagactgtatagagcttaccagaaactttttgcatccatgcatgataaaggaattgggccacacaaaacccagtttagaagggatgaaaactacgttctgctctgttgggtaacacaggattttgagctttatgctgcatttgatccccttgcagacaaggccttggcaataaagacgtgcaatcgggtgtgtcagtgggtaaaagatgtggaaaatgaaatatttttgctgggagctagccccttttcatggtgattttcaatcaattactgtaaacatgcgagagtgtttatttaataaaatttctatagaatttaatctttcctgttttttttcctcgttatgttctattaagaaagtatctgatggaaaatctttgtattagtgtttacagcagaactgcagtttgcttgtaactattcaaatactattagtgctgtagtttataggtcatgtttggataaatttatccatacgtaacttataggagaagaaaataagaaagccaaataatacttcttggataagttaaaataaacttgatacacttgattttttagaagttttttttcatttaacttctataaaagttagagtgcataagttgttaatttcaatatattttactttcttattttcttctcttataaatatttatgaagtttatccaaacaaggccatagactggttggttggtgtggtggctccagtgggctatttttgagggatgatgtttcatctaaagctcattatgttaaaaaaattatatctgattccattgat

SEQ ID NO: 110277 - DNA, 567 bp, Glycine max
  Clone ID: PAT_MRT3847_70592C.1
ctctctctctctctctctctctctctctctcgtggctcgagtggagaattgcagtgagtgagatgagttcagcggatcatgactccgaccctcccatccgactccacttgcctcctctctcaccgagcctcttcgattccgaaccaccggagctctctcacggatcctccgcccgaccctcctccgacccctccagtcccaccagcagcggttacgccgctgaaaggggcggcagcagcaccgccacaagcgtctcccaggtcgatgacgtcctccaccacgaaattcaagagatcaccatccacgattcccaaccttcctctcactcctcctggcttcccggaaaacgacacggcgatgaggatgatgcttccatttcatggaggaaaaggaagaagcatttttttgttctgagtcattctggccaaccaatatattctaggtatggagacgaacacaagcttgctggtttttcagaacctttgcaagcaatcattttcctttggggagaatgggggtgaccatgtcaaattggggagggctggaaagcatcaagtgggttttctt

SEQ ID NO: 110278 - DNA, 434 bp, Glycine max
  unsure (1)..(434): unsure at all n locations
  Clone ID: PAT_MRT3847_70593C.1
cgaagcncggaattcggctcgagattttatcctagatgggtagctaaaattcttcacagtattcctgtcttcttctttcttgttatgcccttcacgcatggtaggacacattcttggtcagcagcattgtgtgattttataaaaggatttttgttccatgctgttgggattatatttgcagttgttgttcctgttgcattttctatgctgagattactgttctcttctcagacaatgaattggtttgctcatccatacttggctttcgcgatgtttataccttgtgcacttgttggacttttaattccaagaattatctggagacactttcctctttctcaagatatttccattgtcaagatatcaaaagaggcactatctgatgaagcaaggttctggggagcattggggttctatgccgtattaactttggc

SEQ ID NO: 110279 - DNA, 942 bp, Glycine max
  unsure (1)..(942): unsure at all n locations
  Clone ID: PAT_MRT3847_70594C.1
gcaaagcaccagcgtccagcgactcaaatctctctctctctctcttcatgatcttcacaatcgaagaattgcagtgagtgagatgagttcagcggatcatgactccgaccctcccatccgactcgacttgcctccgctctcaccgagcctcttcgattccgaaccaccatcggagctccaacaacaatccaacggatccgccgcccgaccctcctcctacccctccagccccactagtagcggttacgccgccgaaaggggcagtagcagcaccgcctcaagcatctcccaggtcgatgacgtcctccaccacgaaattcaagagatcaccatccacgattcccaacctcaacctccctctcactcctcctggcttcccggaaaacgacacgccgatgaggatgatgcttccatttcatggaggaaaaggaagaagcatttttttgttctgagtaattctggcaaaccaatatattctaggtatggagacgaacacaagcttgctggtttttcagcaactttgcaagcaatcatttcctttgtggagaagggnggtgaccatgtcaaattagtgagggctggaaagatcaggtgggtntttcttgtaaaaggaccaatttacttggtctgcatcagctgcacagaagagccttatgagtcactaagggggcagttggagctttattatggccagatgattgttatactaaccaagtcagtaaacagatgttttgagaagaatccgaagtttgatatgacacccttgcttggtggaacagacattgtcttctcttcactaatccactcttttagttggaatccagctacatttcttcatgcctacacttgtctacctcttgcatatgcaatcaggcaagctgctggtgctatcttgcaagacgttgttgattctggtgtcctgtttgcttttctgatttgcaa

SEQ ID NO: 110280 - DNA, 572 bp, Glycine max
  Clone ID: PAT_MRT3847_70595C.1
cccacgcgtccgcacacacctaccgtcattgatctgtattcagtcaagagtcggatactgaagcatgctggtgatttggttgctgctgctgcatttgcagatgaggctaggtgtatggatcttgccgatcgttatgttaatagtgaatgtgttaagcgcatgctgcaggctgatcaggtggctttggcagaaaaaaactgctgtgttgttcacaaaagatggtgatcaacacaacaacctgcatgatatgcagtgcatgtggtatgagcttgccggtgctgaaagctattttcgccaaggtaatcttggaatggctctcaagaaatttctgtccgtggagaagcattatgcagatattacagaagatcaatttgattttcattcatactgcttaaggaaaatgacattgcatacatatgttgaaatgcttaaatttcaagaccaattgcattcacatgcatactttcataaagcagctgctggagcaatcagatgttatatcgaattgcatgattctcctccaaagttgacaacagaggaagataatgatctgtctaagttgcttccttctc

SEQ ID NO: 110281 - DNA, 978 bp, Glycine max
  Clone ID: PAT_MRT3847_70596C.1
accacaaggtttgggtgctcctttctggatgttgggaagagaataagccattcacaaggatgatggtttttgagtatgctccaaatggaaccctatttgagcatctacacattagagaagcagaacaactagactggggaatgagaatgaggatagctatgggaatagcctactgtctggagcacttgcatcagctgacaccacccattgcctacagaaacatactatcttcctctatatacctgactgaagattacgcagctaaattatcagaccttagtttctggactgatatagtctccacaaagaagggttctgaagccccacagctgttggaaactccttcagcatatataaaggccaatgtttacagctttggagtactattgttcgaattaattactggaagaattccctttgctgtggagaatggcttatttgaagattgggcagcggaatatatgaaggggcaaccattgaaagacttggtggacacaagcctgaactctttgcaagcaaatgaaattgaaaaatgggaagaagtgatcaaaagctgtgtacatccagatccagaaaaaaggccaactatgagagaggttactgctaagttgaaggaaatcactgccatggggccggacggagcaactccgaaagcatctcctctttggtgggcagaaatagaaatcatgcccagtgacttaagttcagacgttaaaccatgactccatgtgaaaaaatctatcttttgggataataatctgagcaactactctgaatttggagtttgatgccatttttttttttaaaaatcttcttagttatgctttagattcttcttttttttaagctaactgaagtggatggatggaagaaacagcttttgtcttagtagagcaatttaattttgtaaatagttgaggaatgaatttgtttttgtgcttttataaatgaatattactttttttgagtgtggaaaaa

SEQ ID NO: 110282 - DNA, 357 bp, Glycine max
  Clone ID: PAT_MRT3847_70597C.1
ctgacgcgtgcgggaatggattgagagaggacacgagtgaatggatggactggcactccaaggcatggtgaataggttacagaccattggggtggaggctttcaagagtgcaaaactaggaactgttgcacactaatacaacaaaatccaattgggatctagaggagagtgggggaacggaatataggctagggaactgttaaaagtgtgaaaagaatgaatgtttctataaggggaggagatggggcctaaaatgctcatgttatgaatatgtcacaagctgttactttacagaggatatatattgatggaaatgtacaaaatgaagaccacatgatggggaattgctacattaaa

SEQ ID NO: 110283 - DNA, 288 bp, Glycine max
  Clone ID: PAT_MRT3847_70598C.1
caaacgggaaaatcttcttcccaaataaaataaaatcaactccccccgtttttaacagggccagggaacaatttgggggttatacatatccccatttttttcttgaattaaaacctttttcccaaattattgccccccacaattttttcttgccagtttttaaaacagcatttttttttacacttttgaaggggactgatcccacccccccggttaataaaatttgttcttggccacttgcttaacactaaaaaagtttccgggccccctgaaataaaaaacaacaaa

SEQ ID NO: 110284 - DNA, 636 bp, Glycine max
  Clone ID: PAT_MRT3847_70599C.1
gcttcatattccattaccttctgcctatactcttccaactcctcctcaagttcttgcttctctttctcccttttcatcatcaactcattcaaaagctgcaaagcttcctgatcatactctgattgttcttccatcatcctctggtattgcaacgcttccatctgcattgctgccttttcttcctgtagtcttgtaatcattgccattgtctggttggcagctactgctgatgcacttctctcttcttctagttcttgatatacagcacttagagcccttctttcagtttttaaagccgtttttagcaggttgattgttaataccgggtcgccacattctacctcacttgcaacactcccatccacagagtcatctgctactgattctcttttatgcaggtaatgcaggccatctacagatctaggagtcttaggaagtttcttttcttttacttcatatgactctgaacacttggatgattcatggcttggttcttcatccaatttctcaactgctattggtttctcaatcatcttaacatacctcgggtcatttgcaccccgtttatctggccagagattattcttggccaatgaattcatcaaaggcatttgaagcctcagtatcatcttcact

SEQ ID NO: 110285 - DNA, 380 bp, Glycine max
  unsure (1)..(380): unsure at all n locations
  Clone ID: PAT_MRT3847_7059C.1
cggctcgagcagtgacataattttgcatttgggtcacaatttgcccgaaatttaacgcgcatttcccgtagttgggtttgtcctacgttggtgtgtcccacaagtgcacagtgtccatcacttcctgttcctggtttctataaatactcaaacccattcttcctcattccttgcttattttaatttttctagctttgcttaggttctgttttgcagacagagagagagagagagagtgtgtttcagaatttagagagagaattttattttgtttttttggttatcttttttggnnnctcttacagcgtttttgtaggtactgaaggaagaaagttttggcagaataactttgttggggagaataaaattcaagccaggcg

SEQ ID NO: 110286 - DNA, 244 bp, Glycine max
  Clone ID: PAT_MRT3847_705C.1
acgcccacgcttccatgctatttactagacacgtttttcataaccaacatttcgagattgttctgacgaacatacatgtgcatcactgttactgaacttaccctgatatacttatatagagtgcacatggacactccaaactaattatgagataattcattatccagcaacatttgcatccataataacattcccatcatactgctaagaatcatcagaacactcctattcctacgcctacttt

SEQ ID NO: 110287 - DNA, 214 bp, Glycine max
  Clone ID: PAT_MRT3847_70600C.1
cacgtattgactcctgtcgctgagccttacaacagtgtattgtccactgatgctcctcttgagcacactaatgtggctgtcatgctcgacgatgaagcgttgatagacatgctgatgcgttcagtggacattgagaggccaagctataccagccttaatcgaatagttccttcggtgatatcatcactgaatgcgtccctgacgtttgatggag

SEQ ID NO: 110288 - DNA, 1588 bp, Glycine max
  Clone ID: PAT_MRT3847_70601C.1
gtgaatccacttcttagagtgagaaaaagcctctctgagagagaagataaatagcttgggaagtctctatcctcaagcttgagtaagtctctctgagagagaagataaatagcttgggaagtctttatcctcaagcttgagtgagccaccgtagagtgagtcaatccaagtagagagcctctctgagagagaagataaatagcttgggaagtctgtatcctcaagcttgagtaagcctctctaagagagaagataaatagcttgagaagtctctatcctcaagcttgagtgagccatcatagggtgactcaatccaagtagagagcctctctgagagagaagataaattgcttgggaagtctctatcctcaagcttgagtgagccaccgtagaatgagtcaatccaagtagagagcctctctgagagagaagataaatagcttgggaagtctttatcctcaagcttgagtgagccaccatagagtgagcgatccaagtagagagcctctctgagagagaagataaatagcttgggaagtttctatcctcaaggaatccccttttgagttagaaagacctctttgagagagaagataaatagcttgggaagtctctatcctcaagcttgagtgaaccaccatagagtgagtcaattttgtaaacacatccttgtaaccctactatcactttgtatagtggaagaatctccatattggagaattataatcgtgtgctcccattactacctttaattactaagtgcctatcttaacttcacgaagcgggaaagtccgtgttttcccaacattgccaacataaaaatcctttgcagagcaatgaacttctatatcttctccaccttgacacacatccatctcttcattcactttctctttccctagaatgtttggctctttaacttcacaattctcatgaattttgcattcactaggagatagagttgtccttgagttaatcatctcatttggcacactgagtttgtcattctcttttggtttgtgtccactaggagacctaatgatgtttgcctccaatgttaccacaccattatgctctttggttttgcattgctgaggatgtttacgcttcagcttctccacatctttgcatgagattatgacatacttgtgaccaagcagcaaatgctcttcaggccttagcactgagtgatgaggagccatgctcttgcaacacacatcccgggatacttcactgtcaacttggatgccggaaatgcatcttgtagtccaccctgatgaatcaccctttacatataaatcctttgatctcaaaccaaagtcagggattgtcttggttcctctcactttgctctttcttcttggatttttatccactaggcctaacgagtgaacaacacgcttcagcatagctttcaactttttttttttttggattgacaaatgtaagtttgctagtttttgttataaatgtcagttgacatagcgttcaacttaaagttgtgcaatccaaatgtttcatcctcgccataatgttgccaaggaatgaatgagcatgagaaagtgaaatactgcttaaacttcaaaaa

SEQ ID NO: 110289 - DNA, 238 bp, Glycine max
  Clone ID: PAT_MRT3847_70602C.1
caccaaaatcattgcagcctcctctggttctatgaaagctgatgaagttgctcagaaagctttggatggtataaaatgtggcaattttattgtttcttgcaatttcgagggaattgcactatctctagcaactgcaggtttatcccctcagagatctttcttaatggcatttctaagaagttcattgtagtttcgttaagctagaaaagaaatatacggatagaaatgcattaagatt

SEQ ID NO: 110290 - DNA, 552 bp, Glycine max
  Clone ID: PAT_MRT3847_70603C.1
gactttaacgggccaaaccaaattcaaagtgccagtgcgacggtttcgttcaatgctaatcagctaatttgctcactaattaccccaaataacaaaactgccccctgcatctcccaacaatggccaccaaatgccttccgctcgaacttctgtacgaaattgtgcctctcatccctgccgaaaatgccacaccgaatgcgctctcgtcctgtcggctgctgcacaaacttttgctgccacgtgtcatcaaatggaaagagataatgagtgaaaataccggcttccaaaagcaacttcttgaaatggtaaaggccctccatgaaaaagtcgccgtcattgaaaaaagcgtcgccatcattgaaaaaaacgtcgccgtcattgaaaaaaaagccaccgtcattgaaaaaaatgtcaccgtcattgaaaaagatgtcaccgtcattgaaaaaaatgtcaccgtcattgaaaaagaagtcaccgtcattaaaaaaacaatcggcatatagggaagaaacgacgggcgttgttgaacaacaatttcacatccgggag

SEQ ID NO: 110291 - DNA, 307 bp, Glycine max
  Clone ID: PAT_MRT3847_70604C.1
gctccacaaagaagattgaggtacgaaaaattcaatgatactgaccccttcttaatacacatgaagttggatagaagcgagcccattttctaattatatcagagtgctgaggcaataccacggctaggctgcgaactgtaggcaggactgatcaattcttctctgcatcaacgattagtatacgtaaaacaggcccctacgtttaaatcgtcacgggcgatgctaacttgggtgcgaagcgcataccctggctgtaaccaatatggatcctctggaacatgatgcaaacttgggactggagctggga

SEQ ID NO: 110292 - DNA, 686 bp, Glycine max
  Clone ID: PAT_MRT3847_70605C.1
gggatcgggtcccccacacggccacttatcaccacgaaccggtctttgacaccgaccggaccgagtcatccaagaccaacgccgaactggagcccctcttagtggccgacccggacagtggtgcccgccacatggaggtcacctaccaggagatggttaccgagccgacctctaagacggcctaccaacacttcttcgcccacctactggcgacccctagcgacggggcggtcctctttcactgcaccgccggtaaggaccggaccggggtcggcgccttcttgttgctctcggccctcggcgtcgatgccaagacgatcgaacaagattacctgctgactaaccaggtcaacgaggcctttgtcaacgaactgctgcagcgctttgcttccgccggcaaaaacaagacttacgtccataacttccggtcactagccaccgtttcgccccgctacctcaacgccaccaagcaggccatcgctacccattacggcacggttaacgactttttaaccaccggcctggggctcagtgctggcgacctggccgacctcaaacaactctacctcgtttaatagaaggaagttttttcatgcgcatttccgttcccctgactaaagaagggctcctcgccgatcaatatgggtaagttcgccccggccagcgatatgctagccgatcacccg

SEQ ID NO: 110293 - DNA, 200 bp, Glycine max
  Clone ID: PAT_MRT3847_70606C.1
tgcctacctccatatcttctatgatttattctctccttatacctctcattcctcttttctcccccatccttttcatgcccctcgcttctccatgacaacttaaagtttcactacttctgtgtattcttctcaaactctcctatttttcctttctcattttcttcatcctttcttgattttcataattcattcttctcatt

SEQ ID NO: 110294 - DNA, 397 bp, Glycine max
  Clone ID: PAT_MRT3847_70607C.1
gtctcacttcaagggcaagtaccatgatgagcttattgtcaacgctgcttacattggcacccctggaaaggctattcttgctgctgatgagtcaacagggacacttgccaagcctttggccagcatcagtgtagagaatgttgaatccaacatgtgtgctcttagggacctgcttttcaccgctcccgtttctcttaaatatcaggggggggggggcgtctttaaccacactctctaccacagcacagctgcaggaaagcccctttgcggaaggctctgaaggaggcttccccccctccctcccatcacggtttcccacgggcaccccccacgtttgtccgcccccactcgcacaaccacccctccggctctagatgccctcggacaccggtccccc

SEQ ID NO: 110295 - DNA, 244 bp, Glycine max
  Clone ID: PAT_MRT3847_70608C.1
ggcgcgaggggagaattcggctcgagaaacacccgatcctaacagaggagagagtttattctaacacggtgctaatttagacactttagatacgactccattgagccccgcctccgggggaacagcaccaccaccctcactatgggcaccgacaccggcggatctaaatacatctccgtattcgtagcggacccaagactgcaccacgatttcttgcccacgccgaaccagctcttgaagaacc

SEQ ID NO: 110296 - DNA, 384 bp, Glycine max
  unsure (1)..(384): unsure at all n locations
  Clone ID: PAT_MRT3847_70609C.1
ttttaagaggaattgaaccagggattggattctgagtagtcccctcttgatagtgaaaagacaatccaacaggtagtccagtttttatagaaacaatcaatgatacctaccaaacttctcttttcttcctcaactaataatctnccattcctagttcataggatccaagaggtcctatatttgtagatgagtcctaagttttggcatggcatttatagctatttcatgggaaaggatgagagtcaattccctatctagagaaaatctagactttcacaaatggcaagcacaagaagcatgattcttctgcctagttttcataccctttggcagagaagagctgcctccataagtctgtctggaccaggtggcccatttagtttt

SEQ ID NO: 110297 - DNA, 205 bp, Glycine max
  Clone ID: PAT_MRT3847_7060C.1
cggtactgctgctacaatacaacataaggatgaagaccgttctcgtcatctcgacgtcttcatcttcattaccattcataaacagtaatttggttgggagaacatcaggatctcttctctcaatgggtgtattgattgaataatatttctttctttaggttttatgttttgggttatctcacaatttaagatcaacttacataac

SEQ ID NO: 110298 - DNA, 580 bp, Glycine max
  Clone ID: PAT_MRT3847_70610C.1
cccacgcgtccgcccacgcgtccgcccacgcgtccgcccacgcgtccgtacggctgcgagaagacgacagaaggggacaacatagccgctgcatctaaacctactcggtctcaccaccctccgtttttcaaactctccatccttttcactcattaataaaccatgataggtccctttggtccaccatgaacatcaagcagaagaattgaactatctcgcagctggccataaccatgaacaagcctagagccttcatgcatggcaaaatactagttaacagttacatacacaagaagtgtatattagaccactgtaaatcagcttactaaacatatatatctctggcaatcattcacatggaaatctaataatcacttccttgaatgtaactgttaatgcttgtgatgatgccagaaacaaaagagatgctgacaagcagtcaacagcacgtaatgtcgattctaggtatctatgctttattatatatttttaattttttcttcttttggttttactgtgaattattgaaatgaaaaaatatatatataaagtagatggtgctacgtcaggattacctccc

SEQ ID NO: 110299 - DNA, 116 bp, Glycine max
  Clone ID: PAT_MRT3847_70611C.1
gcgtccaacccgcagcgacgacgacagaaggggagacagtgtggatcccacgatcacgactgatgggagccaacccacattgcacaacgtggagcactgatcaacagcagctttgc

SEQ ID NO: 110300 - DNA, 357 bp, Glycine max
  Clone ID: PAT_MRT3847_70612C.1
cactccaaggagcacccaagacggcgagagacgggattctcaggctccagactatttggagctggggaagacggcggaagagctgtcgacgacgcggcacccgcgtttatcagccattacgccaggccgaattttgagtttgctacacgcgggggaggcctcgttcccggacgactaccagtatacgtggagggagagggagagcatcctgcggtacgcggcgggcagacaggtcgcgcagggcgtggatgaaccgctggcgctcgtccctgcgccgtcgattgttggagacgagatctggctcctgagaggatgcccggcaccggttgtgctgcgtcgggacactagaacggtaga

SEQ ID NO: 110301 - DNA, 204 bp, Glycine max
  Clone ID: PAT_MRT3847_70613C.1
aacccaaaaatataaacaaaacaagacgcaacacgaaggactagctatcctcagttcgtgtgattaaccatcatagagctcgattttgctttatcacaagtaagacacatcactgaggcacaacacacaccagggggcgaacttccaggataagaagccgtgcagggcataacctaaaatctctacaattacgcactacgcagt

SEQ ID NO: 110302 - DNA, 644 bp, Glycine max
  Clone ID: PAT_MRT3847_70614C.1
tatagcagcagggcggagcagagtggcacccatccgcgacgggcacatgtgtagcggcgcagttttgggtcgcggcggagcggtgcgggttgcagagcggttttttgcgccgctacttcgaagcactggtggttctgagtgggttcggtggttctgttttgtggtgcttcttctactttgttcttcccagagagagagggaagagagagggagggagagagagagagagggctctatgttgcggcgcggtttcaatatatcattaggggattcagcaaaaaaaaaacatatataccactagggttggcttatgtagaggcaaacaatattaatatataataataatgctaataattaaatattacagaaataatattaaataaatataataatatcataattttatagtattaaaaacttgtgtatatatatatatatatatatatatatatatttgttttaaagtttaacatatctagttaaattgtggccaaacaatattaatatataataataatgttgataattaaatattgtaaaaatagttttgaatgaatataacaatatcctaattttgtgatattaaaaacttacatatgtatatttatatttttggtttaaagtttaacatatttagttaaatg

SEQ ID NO: 110303 - DNA, 671 bp, Glycine max
  Clone ID: PAT_MRT3847_70615C.1
gaccccacgcgtccgcaaataacaattaaccacacgactcacgacccagtaaccgggttctgcaaatttcgccacttgcagatgaaaagttccaaactttccactccaatccccggttaaatcctaaccccttgttcctttcactggttcttagaactactaggaccttgccaccaccatggctgccaaaaaggcatgtgagacattctcaaagtcattgattgaggaagtgaatagatggggttgcttgaagcagacaggggtgagtctcaggtacatgatggaattcgggtccaaacccactaacaagaatttgctgatctctgcccagtttcttcacaaggaacttgccatcagaattgccagaagggccgttgaacttgagaatcttccctatggtttgtctcaaaaacctgctgttctgaaggttagggattggtatgtggattctttccgtgatgtcagagccttccctgacatcaagaatgtgaatgatgaaagagagttcactgaaatgattaaggccatcaaagtgaggcacaacaatgtggtacccacaatggccatgggagttcagcaattgaagaaaggtatggatccaaagattgtttatgaagatcttgttgagattcatcagtttcttgaccgcttctacatgtcaagaattggaa

SEQ ID NO: 110304 - DNA, 171 bp, Glycine max
  Clone ID: PAT_MRT3847_70616C.1
ctttgttcaagacaagaataaaggaagaatacaagtgatatcttcatttgttcaagacaagaataaaggaagatatcacttgtattacttcgattgggttgcttgatttcttttagagaggattctttgtgatgcttttgccaaaaaaaaaaaaaaaggggggcccgcgga

SEQ ID NO: 110305 - DNA, 741 bp, Glycine max
  Clone ID: PAT_MRT3847_70617C.1
gcaaatttcgccacttgcagatgaaaagttccaaactttccactccaatccccggttaaatcctaaccccttgttcctttcactgtaagcattcctcaatttgacaattttctcctctctccacaaaatgatgtgtgtgccactttctctctcctcaattggggtgtgaaagtttccacctttttctttctttctttctttctttctttccattatctatgttagttttgcattgtttgttgtttggcttgcaatcttgttgcatgctggtgttggtgttggtgtcccaattcactctcaaatttcagggttcttagaactactaggaccttgccaccaccatggctgccaaaaaggcatgtgagacattctcaaagtcattgattgaggaagtgaatagatggggttgcttgaagcagacaggggtgagtctcaggtacatgatggaattcgggtccaaacccactaacaagaatttgctgatctctgcccagtttcttcacaaggaacttgccatcagaattgccagaagggccgttgaacttgagaatcttccctatggtttgtctcaaaaacctgctgttctgaaggttagggattggtatgtggattctttccgtgatgtcagagccttccctgacatcaagaatgtgaatgatgaaagagagttcactgaattgatttaagccatcaaagtgaggcacaacaatgtggtacccacaatggccatgggagttcagc

SEQ ID NO: 110306 - DNA, 851 bp, Glycine max
  unsure (1)..(851): unsure at all n locations
  Clone ID: PAT_MRT3847_70618C.1
gaaataattttggaaggttatcttatcgattactattcttgcactttctctcaaccgacttcctatttgcgggcaagaggagctcgggctgagattggcgagtttgttgagtatgacttagataatgaagatgaggattggctttttgagtttaatgaagagaggaacattttgacacctgaaatgtttgagagtcttcttttcaagttggaggtattggatcataaagctcgtgaaagagctggacttataacacctacacttggttcaccaattcctgtgcaactacggcttgatactgctattgaggccttacaagcacagggcttcaagtattcaattatccagtccatatatgattattggaaagagaagcgagaacggtggcaaaagccggttttgcgacgtttgcagccgcctccaccggttaacgacaccaacccgtataatgtctttcggccaagggagaaggcccacagacttcacacaagacggatgcaaaggagagaaaacaacgtgcagtcatttgaaaagctccgccaggtcaggcgcaaccttgaccaagctaaaagcttgttggaagcattgatcaagagggaagagaaaaaaagagaagtaatggagagtgaagttatgctgcagaggatgcaaatgaagtacaagcatgaaaccgagtttttggaagacaacatagcactctctggatttactcccttcacttccaagtttgtttccagtgaagaggaatatttcgattcagatgatgtcatgataaaccgtcttccccgcacacggtctactgcagtacagtattngccttctcatgaaaccacgttccatggtttcctgcg

SEQ ID NO: 110307 - DNA, 322 bp, Glycine max
  Clone ID: PAT_MRT3847_70619C.1
tttttatcccaaatatttccaagtgctttatattccaattagggggtaaaataagttcttcctaaaatccttattccttgtatcatcaacacactggtattcttctatcgtgcctctaacaaggacactggagcttcattttgtgaacatgctccaacacttctcaaagaagattctagctgaattggatactgaattgttcctgtgtagaacccaggatggcttggatcaggcaacatcttttcaccattcatcattaaaaccacagaggacatgttgggtctattttctggtggctggtgcacacatagcacacccacat

SEQ ID NO: 110308 - DNA, 258 bp, Glycine max
  Clone ID: PAT_MRT3847_7061C.1
tgttaattggtaaagatacatgtatttgatgtcctgcccaagaaagagaatccaaccccaggagccctgtcaaatggtgattcaacatagattctacatcttggaaccaagccaattttggagcagctttgtgataatgaaaccaaccagcaaaaagcattaaggctgcaaagaccaatgcaccaattgcggtacaatagagttgtaattcactagttattccagatgctctccaaatctgaaaaaaaccggaggtta

SEQ ID NO: 110309 - DNA, 1919 bp, Glycine max
  Clone ID: PAT_MRT3847_70620C.1
gcgacgcgggggaagaaagagggcaaacccagtgcaaacgaggggccaaaacaaaagtgggctaaaaggtctagaaaatgatcgtgggggtttttctccgcgtagaaaatagtcactcaaattcgactcaaattccccaaattggagaaaccacaactctcctccctgccagggattgcaaagaagggttggctccagaaaactcaaagcagggaaatggctggagaaataattattgagtggaaattagttgggtgtctttctggacgcgaccactcctccaccttcacaagacccccctcctcgtcgcggccaagaagggctctgatgatgatgcgccagcttcttctacccgccgtacttaatgattacgtggtgttgctgtttgtgtttaagagggagcgcaacatcctggcaccaaataggtttctgttatacctactcctcagcttgttgttgtggatagatataaatgtgagagtttttgttattaatttcaattcatttactgtttatttgccagtgattgtagctcgggctgtgattggcgagtttgttggacttaaataatgaaatgaaggataggatttgctattttaatgtagtgaggaacggattgacttctcaattgattgagttacttgtcttcttttcgagtagagaggtattggatattcatgtgagagaacgagttagaactgttacacttagaccacgttccactgctttacagtctgaccctttacatgaacccaacattcccgtggttcctgccgctagcacaaagcaagagttttggaggagatatgtcccacatggatggcctcataaactggatccaaccctggtctactatgtttgcagcagcctccaccacttaacgacaccaacccgtataatgtctttcggccaagggagaaggcccacagacttcacacaagaaggatgcaaaggagagaaaacaacgtgcagtcatttgaaaagctccgccaggtcaggcgcaaccttgaccaagctaaaagcttgttggaagcgttgatcaagagggaagagaaaaaaagagaagtaatggagagtgaagttatgctgcagaggatgcaaatgaagtacaagcatgaaaccgagtttttggaagacaacatagcactctctggatttactcccttcacttccaagtttgtttccagtgaagaggaatatttcgattcagatgatgtcatgataaaccgtcttccccgcacacggtctactgcagtacagtatttgccttctcatgaaaccaacgttcccatggttcctgccgttagtacaaagcaagagttcaggaggagatatgtcccacatggatggcctcataaactggatccacttgagccagttttattgttcaccaaacctctacttccagataagttggccatggcaggcatcatgccaccagattcaatcacaccaaatggtggggtgtcaccaccgccatatagatttcgtggaagaatgggtagaggtggccgtataatatttgaccgatggaatccacttatgcaaacaccaattgattgtggtaattcttattatatgccgccaaaaccacgaccttcaacatgtaactaatttgtgtgtgcaatctgtggtgctaaattggtatctatcctgttggttagaatttaattgataacctaatcattaggaaggtacaatgttgcgaagggaacttgtaaacatgatttaggcctgtaagttttttttttcctcttcttttctaggtacaaggccattaagtatttttcattggggtagtaaaagctagatgcattttgtattgatatattttcgagtttcctctgccttagctcatgcaatgggttcacactttttatgtagaaaataaataaaataaagtttcttccaaagaacca

SEQ ID NO: 110310 - DNA, 1188 bp, Glycine max
  Clone ID: PAT_MRT3847_70621C.1
ggctcgagagtttttgtaccaaaccttacctcttcttctctcatcatattaatttccactgattccatcttcactttctcccttcgttgggggttaaatccatagccacaacttcccttttgcttctttcattcatttctacggccaccaaactcaatcatagtttatggaagctgtagaggcaaaagcttcatctgggtatggcaagcctccatgggtatttagaggcagtgcctggtatcaactccatcttgtgaaggcagagaaagctcgagcttacattccaaaagaattcaaattggttgaagcttttggatacactcttggtggtttctttctagcaagttatgaggacagtccagttggtgtctttgatgagcttgttgtaattgcaggacttgtatggaaccgcccaacatcctgcgcatgggcaacgagggtgtacgtgaacaacgatgaggcctgttatcacggaagaaaggaggtgggacttccaagtcagatggctaggttttccaagacaattacagcaatctcaagacaacagagggagataaagagtggatttcttaatcggattggaattggtgccaagtactctactccaaaggatcccctgaatgttcaagtaaccaaaatcaaatgtcttgatgcagaagacacttgtaatattaatatcagtctcaccagtcctgtgtctgctttgggcattggccactggatgggcccaacaacgagaatgtcacttccaagttttagtggagctacagagtataatcctaacctcctcaaatactcttgccagattgaatgcagggtgcaagcattgaagcccttgaaggtttcaggagcattcccttcaacaaatgatgacactgaactgtcattagaagattatggaagcagtagccatgtagctaaagatcacaaaaatgatgcacagaatttcagcacttgtgtgatgttatcaaaacccatattagcgctcaagtttaatcaaatgatgatgcaggttgaagctccccttgtgctttcccaatgctcaaattctttagaaactacagttagttctgttccataggcaatatttgttaggggataagtgtgtatgctgaatacttaatccatcatgtaatcagttccagttctaataatgaagtatcagtagagttatattaaaaaaaaaaa

SEQ ID NO: 110311 - DNA, 1596 bp, Glycine max
  unsure (1)..(1596): unsure at all n locations
  Clone ID: PAT_MRT3847_70622C.1
ttcgtttttggggaagaaagagggcaacgcagatgaaacgaaggtagaaaaacaaaattgacaaaaaagttcgatcatattagggttagggtttttctacgcatcgaatagtcactcaaattcgactcaaattccccaaattggagaaacctcaacattactgccttgctagggatagaaagaaggggtggcatcaaaagactcaaagcagtggaaatgctgggagaataaatagttgagtggaaatgagtaggtgttgtctttcaggcctcgaccacttgacattcataagaagctccccattgtcaagtccatcaaggactttgatgatgatgaggcaccagcttctactacccggaattcacaattactgcgtgctgttcctgagatcgaaaatgaggtacctcaaactcccagcaagaaattggcttctgaaatacctactcctcagtttgttgttgtggatacatatgaaagggactatcttgcactttcttcttgcactttttctcaaccgacttcctatttgcgggcaagaggaactcgggctgagattggcgagtttgttgagtatgacttagataatgaagatgaggattggcttttcgagtttaatgaagagaggaagattttgacacctgaaacgtttgagagtcttcttttcaagttgggaggtattggatcataaagctcgtgaaagagctggacttataacacctacacttggttcacncattcctgtgctactacggcttgatactgctattgaggccttacaagcacagggcttcaagtattcaattatccagtccatatatgattattggaaagagaagtttttgggggcagcgagaacggtggcaaaagcctgttctgcgacgtttgcagccgcctccaccagttaacgacaccaacccgtataatgtctttcggccaagggagaaggcccacagacttcacacaagaaggatgcaaaggagagaaaacaacgtgcagtcatttgaaaagctccgccaggtcaggcgcaaccttgaccaagctaaaagcttgttggaagcgttgatcaagagggaagagaaaaaaagagaagtaatggagagtgaagttatgctgcggttgatgagtatgaagtacatgcaggagaccgagattttggattccagcatagcactctctggatttatttgacttcaaacttcgtgattgtttccttgactggatagggtgtactcttctatagcggttatacgttcttcactagaggcaagggcaacaatgaagaggtacataagttaacatctataggaaaatgtttggtatgaatttttgggctgcttctcacactctggaactttctcacgaattgaagtttgccatgtcttgctgcagacagttgcagaatcaaacaaggcttgagtttggtataacatctgctaagaagttgccctacttgacttcagctctctctagttgtgatttttatctttgtaataatgagactagttttagtagcaatatatggtttgaaatatttggataatttctgacaagcactaggtatcttttggaattttttaaataaagaaaattgtcaac

SEQ ID NO: 110312 - DNA, 314 bp, Glycine max
  Clone ID: PAT_MRT3847_70623C.1
actattaatgccttccaaagccgaaaaccccaagatagaggtatgaacacaactatcgaaagatacctgtcaagataggtcacaaggagaccttttgctctatcacagcccggagcggcagatgggagaaaggggggacatcggcgctacaaatcacccactcacccactcgacgagaaactggaggtgaccttcaaagcaaatattcgaccatgggtgaccctttaaaaaagaacctccctaggcaagatatatagaactctatggccgactcctaccggggagttagcctatcttcccagcaccaatccaag

SEQ ID NO: 110313 - DNA, 173 bp, Glycine max
  unsure (1)..(173): unsure at all n locations
  Clone ID: PAT_MRT3847_70624C.1
ggaagatgtaagggttggagcaactaagttctcagaaanggnaaccaattggtacagnagnttcanggggannanggtaacaaggaacaaccccaagaacnttggttnaagcttggtnantnaanntcatggnccttctaaagagctggaattgcngagtttgtggcccattt

SEQ ID NO: 110314 - DNA, 346 bp, Glycine max
  Clone ID: PAT_MRT3847_70625C.1
tttttgagcaaaagcaccttggtcaaccggggtcagtatgcatctaaaaaaatatattccctgacagcttattaggccaaagaatttgtggaattacaagtggcggatgcttattacaaagggaatgaatttgttgaatatgaataggatgaaagagcaaatgctgcatgcaatgcattcccaatgggaaacacattttatttaatgaaaaagtaaggtctaagagcatgatgatatggatccactctattcgttgagcgtgcccacaagaacaaaagacgcgagggcgttccgccaagtaaaatgtataaacttcactccctgtggaaaaggggggctaaaatat

SEQ ID NO: 110315 - DNA, 387 bp, Glycine max
  Clone ID: PAT_MRT3847_70626C.1
cccgggctcaaccaagccttaataacggttgcaaaaagacaacagaaggggtctgttaacaggcttcgctatcatttttcggagcaatctgcttctgcatcaaggaaggacatcttgttcttcactatcaactagtatgttgtcaggtgaagatggtgtcactgcagttcaaccagctgctgctgctgctatcataccagacgaactagtggatatcatgactgtcttacatcttgtgatcagaacatcgctggattatggtgggttgtctcgtcgtcatcatggtggtgcaataattaatgagcatcatgctgcacaccgctgtcttcctgcagaatactgtgaccatgctgacgatgttcaactgaataacgccctttgtgcaca

SEQ ID NO: 110316 - DNA, 596 bp, Glycine max
  Clone ID: PAT_MRT3847_70627C.1
ttctttctcaatcaaatttcagtgcaattgatgaaggggatccatacctagcctttcaaaatcgagattattcttgggagtacgttttccagcatatagttttcttaaattgtaggcatgcagtttgacaatgagaagtatgtggaaactgatccttgcatcaagtggcactccaaagggtacatatacgctattttttgtgacttaatagcaaaggactttgaagttggttgtgaggtaaagctggttgctcccacatcattgtggggtttggatacatacactcagatgcacagagcgcttatctatggatttgagctttcatggatgaatctcgcctgtgaggattattgtggaaatccctcctgcacatttaactcttccagtcagatgcttgaatgctcctccctccgcgtctgccgcaatttcgtggtgggatggcagtaccttactcaatgtgggatatggtccaagctgcaatcatatgcagtagaagccggtactaatgtcttaagaggattgtttgaaattataagaggaccaaacccagaacttgaacataaattagatgcgtatgtctcactatttgttatctt

SEQ ID NO: 110317 - DNA, 175 bp, Glycine max
  unsure (1)..(175): unsure at all n locations
  Clone ID: PAT_MRT3847_70628C.1
atcaggtagcagttttggggacagangctctggcaagaactatggtgatgccggtgcttcagagccaatgctgccagtnaatatggtggangatcaggtggcantttngggacagcagctctgtnnacaactatggtgnggtggtggttataatggancggaacgagttacccag

SEQ ID NO: 110318 - DNA, 491 bp, Glycine max
  Clone ID: PAT_MRT3847_70629C.1
cccacgcgtccgcccacgcgtccgtacggctgcgagaagacgacagaaggggacacgagtaaactggcacatatcttcccttttccttccttcctctcccaaaatcaaaacccctctcctgtgttgttgtgagagaaaaacacagagacagagacagagggtagtagttgagttgagcgagtggggggaagtagcgaagaatgagtatgttgaaaggaggtgaaatgggtggagaaggagggagagaaggggattgggagtgcagcagttgcaacaacaggaactacgccttcagatcattctgcaacagatgcaagcaaccccgcctcctcgtcgattccaaaacccccgctgattccaagtggctcccccgtatcggcgattggatctgcaccggttgccctaccaccattgaagagagatgcgtgcgcactaacaacaattatgcatcaagagagaagtgcaagaagtgcggacaaccaaaggaggta

SEQ ID NO: 110319 - DNA, 191 bp, Glycine max
  Clone ID: PAT_MRT3847_7062C.1
aatccctcagaagcaaaatacatgctccataccacgatccgagactttaattttttactgttgctatcactgatcgttgattagtacaacttaagttaattttggtgcaaaaccaacctggtgaaggcattcttttttgcttctaaaattgcatttggtgaccaattaagtcgttggtctttcgctttctg

SEQ ID NO: 110320 - DNA, 204 bp, Glycine max
  Clone ID: PAT_MRT3847_70630C.1
aggaaattgattggataactgccacgggggctgtcatacagaaagtcagatcagacacttcaatgacaataaccgaggataacacaaaggtatgtggatttggagggtggtttgatgtacattttcggggaagaagtgaaggatccagctgaacaagggctggcgtcaactacagagctcagtgtcccggtatttaacacactg

SEQ ID NO: 110321 - DNA, 637 bp, Glycine max
  Clone ID: PAT_MRT3847_70631C.1
ggctcgaggtagaaaatggtaaattggatgaaaggaaactcgccaaatcagttatttcaaggaccaattacaaattttggaaacgctttgcaaaagagtttgaagggattgatcatatgtggaaggaaaagaaaatacataagttagctgaatgtctaacaaatattttagtgcactatgacttctcgtggcagatatcccacaatgagtataaaaggacaacaatgatttcaatgccacgtgatcctattagtgtggccaaaaggagaaggataagtgcacaaaaaagggaagaaaggcgtaagaacgatgaagaacctcccgaacgcacagcattactcatagcaactaaaactggaattgtagaaattgttgaaaaattccttgatgtgaatcccgaggctattttccatgtcactgagaataaccagaatatattgaccatggctgttaagtatcgccaaaagaaaattgttcgaatcatacagagaaaaggtgcaattgaatcattggttggtcaaatctcagacaaaggtcgtactattttgcatgaagttgcaaggatggattactacaaaggggaacacttagctggagtggcattccaactacaagatgagctgcgttggtatgataa

SEQ ID NO: 110322 - DNA, 436 bp, Glycine max
  Clone ID: PAT_MRT3847_70632C.1
gcgtcctggtcaccctccacagggaccaagctgccccgagcaacaaggcccacgttgaagaggatgtcagactagagatggctttgaggaaactttttactctctcatgtctcacgagaacctcgctcgcccttgacatgctgacttgtacgccccacccgctggacacattaacaccctcaacagcttcacccgttgcgatcctacggcattaggactcactgcccaatatggtgtactatacaggagtggaatttactgtgcacattggaacttgcacgcgaacagtgtgatctatgtcactcgaggtaatggaccagttagagaggtgaactgccaaggtaatgcaccgtttgatggtgctctaccgaggggacaatagctagtgtagcctcgtagctttgcggtggctgcgctgggggagaacactgacttg

SEQ ID NO: 110323 - DNA, 471 bp, Glycine max
  Clone ID: PAT_MRT3847_70633C.1
tttcgttcacgcgtccggtccaacatcttgcttaccgggacgatttctgagtcgggtcaatttgatacttcccctgcggcgaagtctcagaacaacttttggactatgtggagttcctctgggtccgtgtggtttggagccggcaaacaatggaaatgcgcaacatatgaagtctcacaggaggcaggcttgtctggcggggagtgtggccatggggatgttgtatcccctttttggcctatttggtttgatcattattgccatagagaccagtatgtggaggactacgaaggacgctgcttctcgagccctatggtgacgggtatttcccatttgggtcccgccaatgtgagctggaagcacaccagtacttgggaagctttttagcataagcctttgcaacattagacaagccggttcggaagcttacctttgggggccttgttttctcttccaatggttttcacaacg

SEQ ID NO: 110324 - DNA, 262 bp, Glycine max
  unsure (1)..(262): unsure at all n locations
  Clone ID: PAT_MRT3847_70634C.1
cncacatggnggtggttntggnggcggccaaggaggtggagcaggtggagggtatggtgctggtgccgagcatggtggtggatatggcggtggtgaaggaggtggagcaggtcgagggtatgntgcanctngagaacatggtggtggttatngtggtggtcaaggaggacgaagtggaggaggntatggtgctgntggagatcatggtgctgctggctatgntggtgnagcttgangtgnagctcgtngaggctatggtgcc

SEQ ID NO: 110325 - DNA, 245 bp, Glycine max
  Clone ID: PAT_MRT3847_70635C.1
ggctgaggctgatctgtgacgatggctattctatattgcttctttgtctattttgggacgtttctttgaaagtctctttcccgatcctttcgcaacatttacataacatgcaacatttccaagaaatgccttgtgctttgctatcccgatgacaatgcatggtctttactgcactgtgagtgttgactgagagggcataggggaaatactggctgatgttaggggatgcagatgggcaggaaata

SEQ ID NO: 110326 - DNA, 303 bp, Glycine max
  Clone ID: PAT_MRT3847_70636C.1
tctttgcaccagggcacacaccaacaccagggggggaatctggaaggcaaaagggcagaaggccaaccgaggaagagcacggaaggatgccccacgcggcccataacgagaatgagccccaagagaaagaggggcaggagggaaaaccaccctgcgaaaagaaacatcgctcaagacaggaaaaaagggcctagacacaagcacaaagaggcagcggaaaaactgtcaaagacgacacacagggagcgggcacacactctgcagaagagaccgccgaaaaggaagagcaacaaaaaccccaaa

SEQ ID NO: 110327 - DNA, 773 bp, Glycine max
  Clone ID: PAT_MRT3847_70637C.1
gaaagacaagaatttacaggtttcttcacactggggggtgaaaataaaacaatgaattgtaagtttctgcaacaacaatcaagattgggatttggaaagttccaacttctaagagctctttacttctcggacaccatcattcctggacttcaaattcctccatagatatcccccgctggccatgtcaacgaatacccagaatccattctgaatcatctgaaacgaaagcaacaattctagtcaggatcaaaatctagaaaatcaagaatgatggtgaattgtataaagaatatggaactgagggcaccttgatgaaattgaaatgatccttgttggaggaggctttgttttctctgtcttgggtggtgaaatcaatctctggtgaggaagtcatggtggtccatgcaatataggcggccaacatggtggagaaaaagatcaggatgaacctaagaggacacatgtcttgcaaggcaacaaagaactgaatttgcagtgataggaagtcaggaagcaagagagaatattgagaacaacccgagcagcaagtaaagaattgtttgtgctttgagtatgtggaggttgagttgtttatatatgacaatcttgttgtatcaatgaatgaatgagtaaaagcgaggaaaggcacgctgcgttgtctgtgtcttcgtgactttttccttgagaaccagtgatgtttacattgtcaaatgttccctttgtgcatattggactttttacaaccttgggataaagaaaaaaatatctaaacc

SEQ ID NO: 110328 - DNA, 613 bp, Glycine max
  Clone ID: PAT_MRT3847_70638C.1
aaaagaaccatcagaccaaatgcaaagaagcttagtgcgctgttcatgtcaaggcatgagatggactgggatacatttgcaagtaaggttaaagcatgtcaaagaggattcatgggagagccagatgagatgagacctggacgaggagagtttcatgaatatccaagtacatgtgtgtgtgagaaaccattcatggatgatcttagccaagacggattccggccccctaaactcgcagccaacaacgtgacagtgaatggaggaggaaatgaagaaagtgtacgaaagcgaagtgggagaatggccagcacgtgataaagatgagtgagtttggaccagcgtcaggaagaagaccagacaattgttaatggcaagaaatgctctatggcaacgcctccatgttaaattctgatttggcaactatcatgttggtgctaatttaattagtcacggccatgatgaaaatcctcttcattcacatcggggaatgactactcagattcatgtatagggcaaaacgtaagagacatcgacgcattacaaatgttgataatagatatgtttgaattagaattataggtgattttattttgcgacaaaattcttcagaaaa

SEQ ID NO: 110329 - DNA, 318 bp, Glycine max
  unsure (1)..(318): unsure at all n locations
  Clone ID: PAT_MRT3847_70639C.1
agttgatgaagngtagtaagntnggaattnngatngagttggantntnnntagtgaggntngatataaggtaagagttaganngnnananngatgtnttagatgntatnannaagnatttggaaatagggtnatannaggaatggtnagaggaaaaaaggnagnaatgggttttatgngagttgagtggtaaaaggnnnntatttggnnntgannttnnananaaagtagnatnttagangttttggananattnnatgtnatagnagagnttnanaananatnatatnttnattnnnnnnnnnnnnnnnnnnnnnta

SEQ ID NO: 110330 - DNA, 251 bp, Glycine max
  Clone ID: PAT_MRT3847_7063C.1
tcggctcgagctcaattcccgaaaatttttccgtttagcttcttcatcttctatgtgactgtgattaccaattcaattgcttcaactaagcctctgtctttcacagtgtaaaaacaaaagtgcttttttcggttggttcttgattcttccctttcactctactcaaatgcttagctgaacctgacccaactcgttatttcaacatttgcgtttgaatttgggccactttcattttcccctctattggtata

SEQ ID NO: 110331 - DNA, 377 bp, Glycine max
  Clone ID: PAT_MRT3847_70640C.1
tcctaaggtagacgttccctctcgttttgttggcttagttttggagaattgtccttgtgcaaatcatagccatctcatattgggagatccttcgccagttgtgttctatcctataagtagttcagaagtccgttgtcttgttgatgttcctggtcagaaagttccatccatttccaatggtgaaatggcaaagtatttgaagacagtgatagctccacagattcctcttgagcttcatgacgctttcatagccgcagtggacaaaggcaacataaggacaatgcgaaacagaagcaagccagcagcttcttatcctactcctggagcccagcttgatggagatgcattcaacatggggtggaatgaccggggcatta

SEQ ID NO: 110332 - DNA, 277 bp, Glycine max
  Clone ID: PAT_MRT3847_70641C.1
cttggcagctaatgggctcttaccaagtttaaacacaaaatttatcataacaaaaatactactaatataactactgtttccatgtcccatgatcccctctcttcctccccaccctgaaaaaaatgagttcctattttttctgggagagggggggattgattagaaaaaaatgtagtgtgttccatttaaaattttggcatatggcattttctaacttaggaagccacaatgttcttggcccatcatgacattgggtagcattaactgtaagttttgt

SEQ ID NO: 110333 - DNA, 379 bp, Glycine max
  Clone ID: PAT_MRT3847_70642C.1
gcctatcagacacatcgcctttggaaggcctgaaaaggctactcacccaaacactttgatggcggtgttggctgattacatctctaccttgatcctcgagttcgccggtacaggtttcggcttcttttactacactttgagataccccggatgctgcactttgttgagtcgtatatccgtttacatggcccatgctttcgacctcttcgtctccgcctacggcggatccgacatctccggcggtctcgtcatccccgtcaacagcgttcgttccttatttggcgttaatatcctctagtttttagaattatctccgactatttccatctcttctcgttcgctcggtctatctctggcttgtttgttaatttgttttctg

SEQ ID NO: 110334 - DNA, 482 bp, Glycine max
  Clone ID: PAT_MRT3847_70643C.1
ctgacattgacactcgcacttatacatctttggggtattactactgatttgttatcggacatttgattttttattctaattttttacttttctattttctaattataattttttcttcccaatatattataaagtgcacgctgatatgtaaaaggttttacatatgaatgattaatttacaaaaccaagtgatttatgaactaagtcagagcaaatatattgcttctattgctttgctattttgtgatgaattgttgatcaatagcaacagtgtgtcttcctttataagtaaaaggttattgcagattgcaatcccatattatttatgtgaatgataaatttaaaataaacctgatatttaaaaagaactattatgaaaaaaaaaactttgattcttttttagttgtctatttgttctggttgattgatctctcattgaattttttagcccctttttatgtctgtgtatataaaaatgtttc

SEQ ID NO: 110335 - DNA, 624 bp, Glycine max
  unsure (1)..(624): unsure at all n locations
  Clone ID: PAT_MRT3847_70644C.1
ggctcgagatccgatcagattcttaagtcaatggttttgatttgagggttgcttcaaagcacacaaagtaagcttcttggaaccctagttttcttggttctctcagcctaggttgattttctcgagaaaagaaaatttctttgtgtgatgggtacggtggaggctcgatcaaaggagccatctgggtgttcatcgccttctccagagaatgacaagaatgagctcagggaagctctgtgtgctttgaaaaatggggcttcagaaaacggggttggtttctctggccatgggaaccaaggttctggtgatggtggggttgttgaaatggggaagagcagggtctctgagaccaaggtttccgatgagaagggttttgaggggagggaactggaggatggttgcgtaggtctggcttgattctgagatgaatggggtctcctcttttgttgaaaatgagagagagtggtaggaacttaaatgtttcctatggaggcgagactgggagtgctgggaaggtgaactctgagggtgggtcttttgagggttgagtggaaggaggaggaagagatgggaagaaaattggaggccagggatgatccanatgggaaaaccgggactgcagat

SEQ ID NO: 110336 - DNA, 597 bp, Glycine max
  Clone ID: PAT_MRT3847_70645C.1
ccgacaaaccccaaaaaaaaccgaccaagaacagattttagagaaaggtggtaaggcccaactttgttattatgttattacccagcacaaaaaggtggtaatcttccattaacaggagaacaaacggagcaaagttttgcaaaacctgaaggttaatagcccacataaacggcggcattaacaatgtaacaatcatcattcttgtcacccattttttttacaagtcccccattggggcatataaaaccaccttccacaacttcaacattaaaaatttttccatagggaaatactgacttcactttttaaatatccaaggaattctggggggaaggaggaacccctagtttaatcgggaatttcatttgatcaaaactgacaccaggaatggaccctttggggaaagcggggtttgaattaaaagagattgcatccctgcaggccctaattgttgcaaccgttatgtcctgtccatgtggatcggacccgacacccatttccacgaacaagagcttaattagaggggaggaggacccttaactcttttcacttccttggaccacttccatagctggggaaattccacaaagttgaaac

SEQ ID NO: 110337 - DNA, 442 bp, Glycine max
  Clone ID: PAT_MRT3847_70646C.1
acggctgcgagaacccacagaaggggggatgtgttagaaaactaaaccctaacacgttcaattctgaaaaaagaataggtcacaatccctttctgtggctctctgatctgcaaacacattccaagagaacgtccttgttgttgcgcccaatctgtgttgcatttctcttttgcagagaggaggggaagtctttattagggagattcttcttaggacgatgaaaatcaccgagaggatcgcaaagctggccgcaccaagattaactctacactccgttatcgtgataggagattcaaataggaccgtgatcttgactgcttgactcaccaggtctgtgggctgtcatcggtctgtcaaaccaacaccacctaccgagaccatgtgctatgcacatgcaacgcgtaagcccttagagaggagtgcaaagcgataaatactttta

SEQ ID NO: 110338 - DNA, 290 bp, Glycine max
  Clone ID: PAT_MRT3847_70647C.1
ctcgagccgcacggttggatttgaagtttcagagtctagaaaagcagaaattgaaggttttgaatagaaatcagcaacgactttccctatggctggaacatcatggttggtggacaaaagtagaattgcaaccaaaataaaatgtgcatcaggagcttgtgatcatggaaaggttatatggaaaagcaatcctaccaaggcttgcccaaattgtcaacatgctattgacaacggtgatgtagcacaagagtggcctggcttgccaaaaggtgtcaaatttgatccatctg

SEQ ID NO: 110339 - DNA, 199 bp, Glycine max
  Clone ID: PAT_MRT3847_70648C.1
agaggcctcgtgccgaattagagcttaaaactagttgcatgttccgtcctagtatcactgctctgccgtagcgtagcatcttactggctgttctttccttctccaattttatgaataaagagcccaatgtgattttaataagagaatgttgaaacagtttgtaactttctttgtataatcaaggggtctagttcaattg

SEQ ID NO: 110340 - DNA, 729 bp, Glycine max
  Clone ID: PAT_MRT3847_70649C.1
aacgataacaatcatcattcactaaatttgaataaccaaaaaataaagatttagcatatatatggtaccagcaactcaatgagaaccaataaaagtctaagaaaggatgagaaaaataaagagacaataaataagacacactgaataaaacataaatatttcatcatgcgaaacaaaacaaaataagatgtcatttaatcctgtcctcatcctcatttccatctcttcacaaattcgtcaatgtctctaaattatcatactccagaacagtttttcccaaatatttaaacagggaattagtatatgtaatattaaccgtcttttcttcatctagagtttgtatagagttctgaagtaaaaaccgcactacacaatttacttcttcatcagatataaaatcgaatgaatcacgttttaccacaagggactctaaattaacaaagccaggaggttgaattctcactgagtcaagaacttcaagaccctttcgaataaaactaatggtatccgccgaaagtatcatttcctttatattagtgaccagttgcagccaacttaagtgttctgaagaatcctcattataaccagaagcatctacatatactttttcaagaaaagaaagattgcatgtgggaggagtatttattcctacaaaagtcatctttgatagttagcaaactaagttttggagtagaaaggacaattgtatcagcatcttccatggcatta

SEQ ID NO: 110341 - DNA, 255 bp, Glycine max
  Clone ID: PAT_MRT3847_7064C.1
gggttttgctgtcagtagctcaaagtatggtgtagaaatggcctcctccctccatcctgggaagtcccagtcccatcctggtgtgagaatcaaccaggctttcctgctctacctgagataaccaactccctcccgtaatcaggaagccaaatgtcaccttcccaaagaaattttattttcacgtagctgaagtgcaaaacatagatgaccatttttaataagcacaatcaaatttttaaccacagaatgtctaca

SEQ ID NO: 110342 - DNA, 1002 bp, Glycine max
  unsure (1)..(1002): unsure at all n locations
  Clone ID: PAT_MRT3847_70650C.1
ggaattcggcacgaggctttgtcatgctgaataggtgagatcatggttgttgaggaggaaaagtaatatgaaccttggccattacaagacattagacatgcaatagctaaattaccaaatatatgatataactgctacactccgctttagaatacaatgaaagcaagtgaaggagttctgttcccaatttggaaaatagatggtgaagtcctgggaattattcgtagagaaattctaattatacaataaatttatattacttttataacagagaaagacagaagtaagataagaagaaagagaaagtgtgagataagatgagtgtgatgaaaaagataaaaataaataaataaattgttgtatgaatttgttttatgaataggatatccttttgtttaaatataggatatgagatcatcaaattttaacaatatctcttcgattttgacaatttttccggattcaagaaacgttgacataacaactaccttttttatttattaataaaattataaagcaataggggtcttagtacctaggattctgaacagtgccatatgttccatccatccatttaggataatgtttgctaaaaggatctatcacctagtagatgtgtatattaattattaatatttaatgatgcgtgtgagagaactttgatttgattcatgtcattgtgtatcaaattcgatcagttgtagtatgttgtttattaataatgaaaaataagattgctaaaatataagtggagtatttaattttactaataaaaaattgtaattgtaacaataggctcccctttgagctgtatttctctgtgtgctagctttcgtttcattggtttggtttcacctaattcattgactgcctaaactttcgtatcaaaccgaacgcanaatcgtggcatgcagatggcagttcttatattacaaatggtgcacatgcaacgttacagttgtaatccatattaattgatattgatagagatcagtttgcttg

SEQ ID NO: 110343 - DNA, 596 bp, Glycine max
  Clone ID: PAT_MRT3847_70651C.1
cagtagtcggtatcataggaaacatcatagcgggctgcctcttcttgtctcccgtgccaacttttgtccgaatatggaagaaaggatcagtggagcagtactcagcagtgccatacctagccacattgatgaattgcatggtatggaccctttatggcctccccatggtgcaccctcacagcttgctggtggtgaccatcaacggtgcagggtgtgtcattgagatcatctatgtcaccctcttcttgctctactccgaccgtaccaagaggctcaaggtcttcctttggctcttcttagaactcgtcttcatcgccgttctaaccttcgtcacattcactctcatccattccgtcaagaagcgctctgccgtcgtcggaaccatttgcatgctcttcaatgttgccatgtatgcttcacccttgtcagtcatgaaactagtcatcacgaccaaaagtgttgaatacatgccgtttttcctctctctagcatcctttgggaatggcgtgtcttggactacttatgctctcatcccttttgatccattcattgctataccaaacgggattgggacaacattgtctgtggctcaacta

SEQ ID NO: 110344 - DNA, 148 bp, Glycine max
  unsure (1)..(148): unsure at all n locations
  Clone ID: PAT_MRT3847_70652C.1
cacactattgagtttgatatttcttctattttctctgtattgtctctcattgactgtgcgtgcagtagattggaagttngtncatagaatttaccttcaaaggttttggtgggttcctgaaggctgatagnatgatagatgnttaatg

SEQ ID NO: 110345 - DNA, 689 bp, Glycine max
  Clone ID: PAT_MRT3847_70653C.1
gcaacatcaattgaaatcaagaattgtttaaattgatgtaaaaaccagtattctttgacaactacaatcactcatcacaaaacaataggctttcaggagccagccctacacatgaattggacactataaaccaaattaaaagtaagaaaatatttgcttgaatagcttctttttttcttcttcgtcattttcatgaaaaaggaagaatgcaactacacttattgaactgtgttgcacatgccagggtttctaacacaccaaagtggctgaataggctcagcacctattcctctacttaccattctgcttctccattcattcaatctatctgtggcctctgcatatctcttcatacccttttcaaccctatttcctgaccataatgactcagccaacgcagaagttcttggccaaattcttccatccaaaacagtagaatcagcttgttctgtccaaagtgccacttccccacccaaaaccaactttgcttcttcctcactcaacccatatgctatgtcataattgtatatggtttgccatgtcttgaaaggtccacaccaagagccaccgttgtctttgttatccccattttgctgatcatagatactattattccctacaaagtcaccatggccacaatccagatagtagaagtctgatgacgacacaatggtgcgataccccgagaa

SEQ ID NO: 110346 - DNA, 762 bp, Glycine max
  Clone ID: PAT_MRT3847_70654C.1
cgcaaattgttttcttttgctgtcactgttgccgaatccctcactttctcactcctcagcaccattcaatctctttcctctactggcaataagcataacaacagaaagctattacccttacacagcacaagatggaacatgtgatgcatccaaggcaaatgacctagctgtatcaattgatggccatgagaatgtacctggtaacgatgaaaatgcattgctcaaagctgttgccaaccaacctgtttctgtagccattgatgccgggggatctgatttccagttctactccgagggagtatttactggtgattgtagcacggagctaaatcatggtgtggcgattgtggggtatggagcaactgttgatgggactagttactggatagtgaggaactcttggggaccagaatggggagaactgggttacatcagaatgcaaaggaacatatctaaaaaggagggactttgtggcatagctatgttggcttcctacccaatcaaaaactcctccaataatccaacaggaccctcatcatctcctaaagatgaactttgaatgcttaccacaaaatcaaactctaatcacccttggttgttgttttctattagcatctcagattctatgccagtgtatccatcaacatatttatgcttattacatcacaaagaaataaatatttcaagttggtttgagtgatagcaatttctcatgtaatctcctttctgtggccaagaatttcatgcaaaatgataactttt

SEQ ID NO: 110347 - DNA, 596 bp, Glycine max
  unsure (1)..(596): unsure at all n locations
  Clone ID: PAT_MRT3847_70655C.1
catagatcatagccaaagtttaaatattcacatggatcaacccaactttggaaagctgacttccttgcatttctatgcatggtccaagggtctaaagactggaatgtattatcttcgatcgcgagctgcagccgatgctattaagttcaccgttgacacctctgctctcaaagaaaaatccaatgtagagtatgatgataatacaaaaatggcacagatggtgtgctctttaacaaaccgtgaagagtgcttagcttgtgggagttgaaatgtttcaaaagtattgggttgtgtagggctgtgcagatttatttgaactgacctgtaattgaagaggcggacggtcaaagatggtcaaagataacagcaccgttggtttggcttaatggaagggtttgtaacccgtagccgagtaatgtgtaaccccaacaaatatggagaaaaaaaatgtcaaatttgttaatattttgagaatatgaaaataatgttttaaaaaattcaataatttgcatttatattaattgtntttnaaaaaagaaacnccaaaaaaaaaaacaccaccccctctaaaaaaaaatttaacaacataaatccct

SEQ ID NO: 110348 - DNA, 384 bp, Glycine max
  unsure (1)..(384): unsure at all n locations
  Clone ID: PAT_MRT3847_70656C.1
gaaaaaccggccgaccgacgcgtacggacacgcntacaattttcatcatcttcttcttttttgacatcaatcatcaccacttccgccgctttttttgacaagatcgaattgccttttacaaaaattgaacctccaaagaaagaccctctttcccaactgactctacctccttgttaacccttttaccccaccgacaacgaacttctcgttcaacatctgtgccccaaagtcgctagccaccatttctctcttacaatcattacccaaattgacttgtacaaattcaacccaccaaatcttacaattaaaaccaatttcaatgaaaaaaaatagtacttttttagccccaaacacatgaaattccccaaccgtttttcacccaac

SEQ ID NO: 110349 - DNA, 2615 bp, Glycine max
  Clone ID: PAT_MRT3847_70657C.1
gattcctaatacaaacatggcaatgaagaagctcttgtgggttgtcctgtctctatctttggttcttggagtggccaatagctttgattttcacgacaaggatttggcgtccgaggaaagcttttgggacttgtacgagagatggaggagtcaccacacggtttcgcgaagcctcggtgacaagcacaagcggtttaacgtgtttaaagcaaatgtgatgcatgtccataacactaacaagatggataagccttacaagctgaaactaaacaagtttgctgacatgaccaaccatgaatttaggagtacctatgctggctcaaaggttaatcaccacagaatgttccaaggcacgccacgtgggaacgggaccttcatgtatgagaaggttggtagtgttcctccttctgtggattggaggaagaatggtgctgtcactggtgtaaaagatcaaggccaatgtggtagttgttgggcgttttcaactgttgtagctgttgaaggcattaaccaaatcaagacaaataagctagtctccttgtctgaacaagagctggtggactgtgacaccaaaaaaaatgcaggatgcaatggtgggttaatggaatctgcttttgccctagtcaagtcaaagggaggcaatgcgaatgtccctgctaacgacgaaaatgcattgctcaaagctgttggcacccaacctgtcgctgtagccatagatgctgggggatctgattttcaattctactattgtttattttcactttctcttcttttctcactctctctctctctaacttggggatgaagatgagaatttgtggagctgcatttatctccctcagcttctccatcacgtacttttcccttgtagattttcatttctagtccatctccagtcatgcagtagccaagccactacgtccaatatcacgcttttagtgtcagcttcctcttctctcttcacttctgctataaaccaatttctgtgggcttgcactttccctttcttttgtccttagagtggtctctagctttgattttcacaacaaggatttggactccgatgcatgactgtgggacttgtacgagacatggagaagacaccccgcggtttcgagaaccacttggtgacaagcacaatgggttcatcccttccacagggtccaagcgatgacatacgatgcataggcccataacacgccgcattatgtataagcccctttaaggtgaatctaattacgtttgcagacatgacccctgatgaaatcaggagtacatatgctttacaaaaagttagttatatcataaatgctcctgagatggatgtgcgtcgagggaacaccaaccacttcagatgtggcaggagtttgatatggtcttaagtaactttgtgggtattagagtggacttgacgggttctggtaacacggtatatcacagcactccacaatagactgaggagtgaagttggaagagagtagatatcaacattttatcacaaaacaacgagaggacagaaatccaccattaaaagtaataaaaagaatagtctcaactgggtgaacaaaaatgagtgcttctacgctacacacttcctagaagatccaaagatttgccagtgatagataagcggtatctagggaaaagttctagtaccagtgaaaacgcagcctactcataagattgtccagtaatagattctggactgagataaattatgtgaagaacgtagaagttgtttctgaattatttgcggataattagacagtaagaatcgacgacttaatttcctaccttcgcaaatctattcaattaaagtggtgtcctttgacgttccagggctggtgagtgagtaacagagtaatttcgaggaattgttaactggagattgtatggcggagttaaatcatggtgtggcgattgtggggtatggagcaactgttgatgggactagttactggatagtgaggaactcttggggaccagaatggggagaacagggttacatcagaatgcaaaggaacatatctaaaaaggagggactttgtggcatagctatgttggcttcctacccaatcaaaaactcctccaataatccaacaggaccttcatcatctcctaaagatgaactttgaagtttgaatgcttcccacaaaatcatactctaattagctttggttgttgttttctattagtatctcagattcaatgccagtgtatccatcaatatatttatgcttattacatcccaaagaaataaatattttatatgttccactttttaccgatttcggtaaaaaaatagaatcaaatcgcaccatctctgtaataagtgaatgcccttttttctcccgaagttgtcggaattattcgtaataagatattggctacaattgaaaaggttttatcaataaaattttcatttatccgagatctaggcataggtaaaaatccattctataatttaatgaattatcgtgtgagaaataaatcccacaaataaaggaattgtacaatacagtgcgaaataacgtaaaaacggacccttcaatttaatccaatttgtttatcctaagaccccgtaggaggttttttttatggtttgagtgatagcg

SEQ ID NO: 110350 - DNA, 666 bp, Glycine max
  Clone ID: PAT_MRT3847_70658C.1
ggctcgagcattgattcaggtgtgttcgtggggcagaaatagggtgaaggctgtggaggctggagctgtgccggttctggtggagcttcttctcgaatgcaacgagagaaaaccgatagaaatggtgctggttttgttggagattttatgtcagagtgctgacgggagggcggggctgttggcccacgcggcgggggtggtgatcgtggcgaagaagattctgagggtttcaacgatggcgaacgatagggcggcgaagattctgctttcggtgtgcagattttcccccacccacggcttggtgcaggagatgctgcagcttggggtggtggcgaagctgtgtttggtgctgcaagtggatagtgggaacaaagcgaaagagaaggctagggagattctgaaattgcatgctagggcttggaggaactcgccttgcatacctcacaatttgcttgcttcgtttccaatgagttcctgaaagaaaagaaaaacgactttcttttgttcgagacacatttcgatactaagtgtaattgttactttggctgaaaatttcagatcttgattcgtggacgttgtgggaaactacttccttatgcgaggcctagtttgcggtgaaaggaaaccccaattaaatcacagttttgagttttcaatttccaagct

SEQ ID NO: 110351 - DNA, 349 bp, Glycine max
  unsure (1)..(349): unsure at all n locations
  Clone ID: PAT_MRT3847_70659C.1
gaactaggctggggcccccctcactttaactttaagagatttcttgtttcnccccaaggaccaggcccagggggagggaattgacatgcttccccagcatattaaaatcccaaaaaaagctctctcaaatattccacggcccataacatttacacagaattgtttcactattaccactaccaccaatgagaccccggcagcatggcctcgagacaaaacgcacaatgaaagaaaaacagaatccagaggcatatcaaactaagtgctaaccgggttcgttactctctggagctggggacgtccagtactcttttactgctaccagaaactgcaggcgatcataaggccc

SEQ ID NO: 110352 - DNA, 554 bp, Glycine max
  Clone ID: PAT_MRT3847_7065C.1
cgttacgggtggactgggccaggtgtaactttgggtattgtatacatcacattggagtcaaattttaataaagactttaaaaatattgacttaaaaaaacaagtcatcaatatgggtaagtttctaaccactttctccatcaaataatttatttattatgtgttcaacatatttattactcattggtttgtcttttgccataggatatgagatgaggaaaccatgatttgaggcaaagttgctcacaatgcgatcaaagtttccacgagaagaaaattggttagaccaaatttccaagagaaaatggactcaggcctatgatgaaggaaaacggtatggacatatgactactaaccttgccgaatatatgaattttgttttgaaaggagcctgagcattgcctattattgtcatagtcaaggaaacatttaataaaataaatgactcatttgttactaatggcatgaaaatcatgaatatgataaaggcgggacataggtactctgaagaggtatatgtcatgatgcaagaaaattgacacgttactaccttgc

SEQ ID NO: 110353 - DNA, 250 bp, Glycine max
  Clone ID: PAT_MRT3847_70660C.1
cggagaagtatcagatctggagcaggacaatagcgatgggagcgatcgcgtgtgtacagctgagccgagcggcatcagcagatgacgtcgatgtgctctctgacgacaagttcgagaaggaagttggtcaggacagaggagctctcgtggagttctatgctccttggtgtggacactgcaaaaagcttgctccagaatatgaaaagcttggtagcagcttcaagaaagccaaatctgttttaatcggcaa

SEQ ID NO: 110354 - DNA, 426 bp, Glycine max
  Clone ID: PAT_MRT3847_70661C.1
ccccttccttaactttgaaatcctgttcgggcttatggagggagaggcgaattggacctagcttatgctgacttccgcaaccgatagacagagaatattcttccatgggctgcaagcggattctataggaacttatggacctctagaaagaccctacaacctattgcattgccgcgtcccgtaggggatcatatgtttcattggcaagtaactaaaatggatccgccttatatcccttatgtggaaggtgactatctagatactattcattatgctccagattatgcattgaatccacccaatgggggcagtggaaccccttatgctgggtataataattgacaggcaatccagcgggatcatacttgatattatagatgctatatgcttgaagacgaagttttaattttgtgcacatgacatatg

SEQ ID NO: 110355 - DNA, 310 bp, Glycine max
  Clone ID: PAT_MRT3847_70662C.1
aaggggaaagggggaaaaatacccttgcctaattacaggtaaatgaattttaaccgttcacaaaactgatacacaaagtttttttttttgctaatagggcctacacaagtttgtaattccccaacaataatttaaacctgttcaagcaattttccattcgcttttgaagcagtcattttttttttttttgggtgccgacttaaacttatgcccatacttgttgatacatataaacagagattattttggagtttcaccagcaggcccgtgttttgggttcaaaaaaggttgaagagctttaactaccatg

SEQ ID NO: 110356 - DNA, 498 bp, Glycine max
  Clone ID: PAT_MRT3847_70663C.1
cttgggggggggggggggggggggggggggtgtaaggccgctaggagaggacaagcgcgtaggggtccgggcataactggggaatgataagtaaaatatatatatagtcggacgtagtggcgaacgctcgcaaaagcggcctagtatcatatgtgtagcacggggttaacaacaggaaggaagacacaaatatgggctgggatgcgggggctagacgaatggggctatagacggtgtattcaggtccacaggttgtgggtggcggaataaagttataagggggtgggcggaaggtttcaactaagcggaaggttgtgattactaggccgtgcgggtttattggtctcggcgcgaaaatcttcatcacgccggttcaagaacgccacgacaaaattcctccgcgtggttcttcgctcctcttcttactcgtagagtcgagagtcttggtcttcatccagttcatactcgtgtcgatctcgggtccactggcagcaacgt

SEQ ID NO: 110357 - DNA, 258 bp, Glycine max
  Clone ID: PAT_MRT3847_70664C.1
gccagtggaccttatttggctaaacaagtatttaaggttggattaaaaattaaaaaaatcaaaacaaccagttcataccctcagttttctgaaccagctggtctattgtttttaatctgtgcttctattggactcttccctgcagtgggcattcttccattttctccaattcccctcctgcttctcctttcttacatatgcagctcatcacttccattaggccatctttcttttggtagcataaacatgtgctatgag

SEQ ID NO: 110358 - DNA, 320 bp, Glycine max
  Clone ID: PAT_MRT3847_70665C.1
aattcggctcgagcactgaggcagattctttgtaaatgtttggatgtcaatccaggaaaccggccagatgtggtggatgtaaggaaatgcattcagaatatgttagtcaaaccgcaatttgattttctgggcaacttggaggtcacgataagtagggactacacaggaatctgcttggttctaggggagttgtgtttgttgcctaagcaaagttctaatgaactgattgaacatgagttgtgggagccagaaattggtggtcaaccaaatgttgttcaagatggcaaaggcaaatctgatgaggactttgctctggctta

SEQ ID NO: 110359 - DNA, 220 bp, Glycine max
  Clone ID: PAT_MRT3847_70666C.1
catccaggcccgatcatgtccgatggtacgcagagataaattatggtcattttgcgccttgtgtcaaccaagaggagcgaattcgacagtatcaggatgatgttggtcgttcagtgctgatcattttcaaaatttttgcaagttccgctggcggggaaattgaccgaccgaatggtgtttcgctcgaacgaaatagtgtcttatctttactttcctttta

SEQ ID NO: 110360 - DNA, 265 bp, Glycine max
  unsure (1)..(265): unsure at all n locations
  Clone ID: PAT_MRT3847_70667C.1
ctcgaaccgaatcgnntcgantattcattcattgncttaatgtnaacnatgtcttnctcnttcnccanccntttcttcatcctacctctcaatagnccttttctcagtttgttgcttagcagcatctnaagctnccatcagcaaatcacacncctatattccttcncattaagtaagaccccgcaacaaatntgtactacacttcagtggcattggaactcctaggcacaactttgtatttagtcattgatcttctgtnaaactt

SEQ ID NO: 110361 - DNA, 1998 bp, Glycine max
  Clone ID: PAT_MRT3847_70668C.1
atggaagcttcatcacctcactctctggccctgcagaacccctctgcttacctgtcatgctttcttatcctcttgatcattcttttcccaacccacgcacgtgccgacctccccggcacgtgggagcttctcgtcccggacgccggcatcgcctcccatgcacaccgccgtcacgcggttcaacacggatggtcctcctcgaccgcaccaacataggcccgtcccgaaaactcctcccaaaaggccactcaccggtcggacaaaaacgacgccgtcctgaagctcgactgctacgcccactccgtccacctcgaccttgccaccaaccaaatccgccctttaaaaatcctcaccgacacctggtgctcctccggccagttcctccccgacggcgccctccctccagaccggcggcgacctcgacggcctcaaaaagatccgcaaattctccccgtgcgacgacgcttcgtgtgattgggaagagctcaacgacgtcgtattggccgagggccgatggtacgccaccaaccagatcctccctgacggttctgtcatcataatcggcggacgcggctccaacactgtcgaattcttcccacccaaacaaaacgtcgccgtttcgttccctttcttatccgaaacggaagacacgcaaatggataacctttacccctacgtccaccttctcccaaacggtcacctttttgttttcgctaacacaagatcggtcatgtacgatttcaaccgccacgtcatcgttaaggaataccctaaattacacggtggcccgagaaactacccttccgcagggtcatcagcaatgttagctttagaaggagattattctaaagctgagattgtggtttgtggaggtgcgaaatacggagcgtttttgctgcggagtactgacaccccggcgcatggtagctgtgggcgcattttagcgatggaagagaaaccgagatgggaaatggaagacatgccgtatgggaggattatgggggatatggtgatgcttccgaccggcgacgttttggttattaatggagcgatgtcggggactcagggttttgagatggctagtgatccgtgtttgaacccggttctttaccggcccgaccaaccggtcgggttgcggttcatggttttgaaccccgggactgttccgaggatgtaccacgctacagcgaatctgttgcctgatgcgagggttttgcttgccgggagtaacccccatgttctgtaccggttcgatgacgtggagtttccgaccgaattgcggcttgaggcgttttcgcccgagtatttgtctgcagaccgggcgaatcttagaccggttattgaggaggtgccccaaacagtgcgttttgggggcaagtttgatgtggtggtttcggttgatttgcctgtggtggggattgtggaagtaaacttggcaagcgcgccttttgccacgcactcgttctctcagggtcaacgtttggtcaaactgacggtttcctctgccgtgcctgacggcagtgacgggaggtaccggattggagtaacggctccgccgagtggggcggtggcgccgccgggttactacatggcgttcgcagtgaaccagggagtacccagcattgcaaagtggatacacgtgtcataagtcgtaactgtgaagtaacgaagtctctttgatgcattttggaaattgaaattgtatttaaatttatttattttctttttttggggggcaagtgggggattaaaaatttaaaattgagattcttcaattgttaataggaattggggactgggaagtcggtaagtgtgactggtgaattgcaaattcattttttttaagccccacaaccagaaggggaaatgcaaatgatgttttaatgggaatttcgcaatgcatggatgattgatttaatagaatttataatattgtatggtgctagtactatatgattttaattagatggatttgtatgaggtggttatatcccgccc

SEQ ID NO: 110362 - DNA, 342 bp, Glycine max
  Clone ID: PAT_MRT3847_70669C.1
gcattcagagagagtgccgacaatgagctcaagggaatccgatatgagtgtgatgagccacttgtgtgcattgactataggtgcactgctgtgtgctaaaccgttgactactagttgacgcatggccatgggagatgacatggagaacgtgattgcttggtatgacaatgaatggagctactaccaaagggttgctgaattcgctgacattggtgtcaacaaatggaactgagatccaaacaaattgtcattggtaattaaaatatcatgtatgtaccatgacattgaaaatacggatgcttactactactaacactacgacactagtggcttaaactttat

SEQ ID NO: 110363 - DNA, 323 bp, Glycine max
  Clone ID: PAT_MRT3847_7066C.1
caaaagaaggaaaccttggttattccttttaaaaataagaccataagggggcttaaaaggggtgaaccaagggcaaagatttccccctggccaggatttttccaattggggggggggcgggggggcaaattttaaggccggggggggcattaacggcccctttctctcgggcgggtggttggggtttttttccccacaaaactgaacccttggcctttttggtctaaaaccgggggggggttgttggcagggaatgccccgttgaccctttcaacttaaggaacccccattttacataatcgcccgggaacaggttttgtttt

SEQ ID NO: 110364 - DNA, 733 bp, Glycine max
  Clone ID: PAT_MRT3847_70670C.1
ccaatccccacttcgccctctctctctcactctcaccatggagaacctctcatactttctcttccttctctttctcttcgcaacccacgcacgtgccgacctccccggtacgtgggagcttctcgtcccggacgccggcatcgcttccatgcacacggcggtgacacgcttcaacacggtggtcctcctcgaccgaaccaacataggcccatcccgaaaactcctcccgaaaggccactgccgctccgacaaaaacgacgccgtcctgaagctcgactgctacgcccactccgtccacctcgacctcgccaccaaccaaatccgccctctgaaaatcctcaccgacacctggtgttcctccggccagttcctccccgacggcaccctcctccagaccggcggcgaccttgacggcctaaaaaagatccgcaaattctccccttgtgatgtgtcgtcgtcgagctctttgcattctccttgcgattgggaagagctcgacgacatcgaattggctgagggccggtggtacgcgaccaaccagatcctcccggacggatcggttatcataatcggcggacgcggctccaacacagtcgaattcttcccacccaaacgaaacgggcgccgtttctttccctttcttatccgaaaccggagacacgcaaatggataacctttaccccttacgtccaccttctaccaaacggtcaccttttttgttttcgctaacacg

SEQ ID NO: 110365 - DNA, 930 bp, Glycine max
  Clone ID: PAT_MRT3847_70671C.1
gtccggtacctcaatggcatgccctcatgtcagtggaattgctgctctcattcgctcggttcacccgagatggagccctgcagccatcaaatctgcaatcatgacaacggccgaggtgactgaccacaccggaaggccaatactcgatgaagaccaaccagcgggagttttcgacatgggagccggacatgtgaatccacaaagagcattgaaccctggattggtgtatgacattaggccagatgactacatcacccatctttgcagccttggatacacaaagtcagaaatattcagcatcacacatagaaatgtgagttgcaatgcaatcatgaagatgaatagaggcttcagccttaactatccctcattctcagtaatttttaagggtggggtgaggagaaagatgttcagcaggagactaacaaatgtgggaagtgctaactccatctactcaatggaggttaaggcacctgaaggagtaaaagtgatagtgaaaccaaagaggttggtatttaagcaagtgaatcaaagcttgagttatagggtgtggtttatatcaagaaaaagggttaaaagaggtgatgatttggtgaactatgcagaagggagtttgacatgggtgcactcacaaaatggttcctacagggttaaaagcccggtagcagtgccttggaagtcaaagtagtgtggagaagggtagtagataattaagtttgtcttggggcgtttttttattatgattattggttcaatagctttatttatgattgcagaattcatactgaacgagttttagtagagaaaactcgattaggaatcttatgagtaagcccatttataaatgctaaataaattggttgtgccatgctttagtcagaactctctgctttatgtatcacattcattcattaacacgtaaattttccc

SEQ ID NO: 110366 - DNA, 158 bp, Glycine max
  Clone ID: PAT_MRT3847_70672C.1
gaccatctgggtgacatagacttcaagattgctggaactcgaaaaggagttacggctattcaattggatataaaaccagcagggattcctctggatatcgtatgtgaatgtttagaacctgcacacaaagctcgtccccaaattcttgctcacatgga

SEQ ID NO: 110367 - DNA, 391 bp, Glycine max
  Clone ID: PAT_MRT3847_70673C.1
caatatggttggagaacacttgttctatgtcatttgcctcgattgatcagaggacaccacttttttccgtgcacgagccaatggaaggaacacgcaccaaaaacacccccgttttaaaataaaaaaaacgcgggggaaaaaaaacaaaaatctggggggggggggggggtttttatttgtcctaaaaaaaaagggccccccgcaaacgggggcaaaaaaaaagccggaaggaaaggggggggcccccccttgaaaaaaaacgcacgccgagccaaaaaaaaagactgggaggaaaccgcccaaaaagaaaaaaagggggggaaaaaaaaaaaaaaaaaatgtttttcactttttcggggaggacggcaacaccctcgggtgggtaaacttt

SEQ ID NO: 110368 - DNA, 528 bp, Glycine max
  Clone ID: PAT_MRT3847_70674C.1
ttgctatcttgcactttgtgggatgattattgcttgcagtttttgaagttcttagatgattatgaaggtgatggcccaattacagttctattgagccattgtaggatcaaggaagcgcagggtatatcctcatcttgaatttattgatttctctgtttatgctattgcatgttatggttctgttttttaaatgatttaggatcttatcccgcatcgatcaacaattctttcaaggcttcaaagttaattattaaccagcccatgatggagattcaagaattcaatgaacggtattttttgtatgtgttatgcaatatatgttgatcattttttgtcttatttttgttgttcattgtatatttgtaggcttgcagagttgggcattgaggcccggtcaggttttaaatcccatggtgaagggagtacacaactttcaggttctatccaattatcatcaaaagaatcattctttggcaaggctgaggcaaagactattgctgacattaacaccatctctgaaataatgat

SEQ ID NO: 110369 - DNA, 356 bp, Glycine max
  Clone ID: PAT_MRT3847_70675C.1
cgcgttgctatccgctcgcgctccttttctttctctgtttttaacgtcaaagaataacacttggttctccgccacctgaccttacaaactgaaccttgggagcaaagctatggaatttactaaaaaaatatccacattaccccttgtgccctttatcacataaacttattaaccccactacgatcttatgactatcatcggaccgtatccaaaccgcaaataatatattgggttgtcggggcggtgatcatcgatgcgccctgataattgatccacaccctgtgatacacaattggtggtagagtactctcgggccagatgggtaaactggatggcctcacctacaaaggggacgg

SEQ ID NO: 110370 - DNA, 1584 bp, Glycine max
  Clone ID: PAT_MRT3847_70676C.1
cattccgccccggttctctgccagcggccctcctggcgtctcccaagcgtcggtttcttggatctttcaaaattgctcttgctattgcaactctctgcttttgacccccagagagctgagtaccatgctcaccaaccattgtgtctagtccctgaggaagtttatctataaatttggcagcattagcaagttctgctgcagctctgatttcttcatcagttgcaccatccttgccataggcaatattctctttaatgctacaagtaaagagaactggttcctggctgactaggccaattttctgtctgaatccctttcagttgaaattctttcaggttgatactatcaataagaactgcacctgcctgtggatcataaaatctctctatcaaactaacaactgtggatttcccactcccactttctcctaccaaagctgcagtagtgccacttggtattgaaagagaaaatccattgaatatcagttcatcaagtctagtaggataactaaagcaaacctccctaagctctatatcttcacgaatgtcatcaagctgccgaccagtaatgtcataagcatcaatctctggcttccttttaattgtttcaaacatcttaaaggctgcagcttgtccagcagcaaaagcactcaagcttggagatgcctgcccaagagacaaggagccagtcaatacagccataattactgtcacaacctctcctcctgtgtatccttcctctattaccattttttgcaccaaaccatgtagcccaactattgctgcagttaaaaacaaaatagagagaaccaaaccccaaaccagaagctagtggcccttgcactccagccttgtaagctttggttaaggactgattataattagctatagcttgcttctccccagtgaatgaagcaacctgcgttggacaagtaaaagtcatttatagatcctgcaatatcaaaaggaccaagtccggagttctttttttgtcagtgtgcatacagttcggatagaaccaattgtctgctcagccacagttgctgctatagaataagcttcttgtcccctggatgatgcttttgaaataacctggcctagcacagcaccaaccaacgcaagaggtggaatacaagatagcattacaacagttagaagccatcccttgatgaatgctactgcaaaagatccaatgaaagttgctatgaactgcaagaattgtcccacctgaaatgaaatagcaaaatttagcttaaacacgatgacaatgaattttttcttttaacaaacaagatgacaatgatttaagacttgtatggtggtttgttattaccttctcacccatggcatcttgaataagaacagtatcacctgacatccttccaacaacctctccagttctagtttccttatcaaagaaggtgacatcttgcctcaaaattgttttaaggtataaacctctaattcttgtggcttgtctctccccagtgaccatccagcaagtcaactctggtacatagaaaaaaggtttcttttggggtcaaaaagagccaaactaatgagttagataaaaactatcaggctg

SEQ ID NO: 110371 - DNA, 421 bp, Glycine max
  Clone ID: PAT_MRT3847_70677C.1
gttccttgtttttttcttttcctacctaactcatattaacaaggttaaagtatcgtttaaaaaattcatgttccaaaatggggggggggactaaaacattaaagcaaatgctactttaaacaagaaatagagatgttttacaaaaaaaattaggggaatactttgtttccggcccaactattactacaaacctctcccggacaaaaaaagaggccttgttagccaaagcaaaaacttttttaaatgggtgggcgggacactatcattcaaatttttttggggggaaaaaaagggggttgtgtccttaagacccccccttttgggaaggctgacagggcgcaaaaaaaagagcccgccccaggggttccccccaggggaggctccaaaagaataattttggggggcgcacggcccacctttt

SEQ ID NO: 110372 - DNA, 256 bp, Glycine max
  Clone ID: PAT_MRT3847_70678C.1
aaatctcgtcgagaagtttttgaaatgttgtcacaccttcttctagttctatgcccaactcttcccttgtgtttgttgtccttcttcagatatcgtacaacggtcaacaatccaccacttccaccacatctcataggccttcccataatacggaatcttcatcagctagacattccatcgcttcaataacagctatggcatctctcaaataaataaggtcctttactttcccttcaatttgaattaaggcccccca

SEQ ID NO: 110373 - DNA, 245 bp, Glycine max
  Clone ID: PAT_MRT3847_70679C.1
gaaaaatatcgttaacctgcttttatttttattttttaaaaacaccaagccgggccacattgaaatttggaaaatgaacagcaggggccagtgattaatagattaacacaaacgccatcctagaggtgcagtattagccctattaaaacgtaacaggaacagttgaagcttctcatggaaaaggaatgtcgctttcagtgtccaaaaaatatttctaaagggcaattggaacgcaatttgcgtac

SEQ ID NO: 110374 - DNA, 311 bp, Glycine max
  Clone ID: PAT_MRT3847_7067C.1
ggtttactgtctcactcactccgaccaaaacgggcctgcctaccgcagtggggcggatcgctgttgctgctctaggaagactacaccaaaggaattcaagactggcttcattcggatcgagctcgacgacgttcgacgggaagcaattggagaaagagaacatttgatgaaaagaactgcgaggacaaaatttctcaaaatcaagttccgcaacgattgcctctggccttgaaggctgtcagccctcgatttttggagtccaggagatccacttcagattgccacatcagtaagatgcatcaaaaatgccg

SEQ ID NO: 110375 - DNA, 161 bp, Glycine max
  Clone ID: PAT_MRT3847_70680C.1
cggattcgcatcgtgattctaacgttcacttccatttgcattttctttgctgcgatgcgaatatgctttctccacatccgcccttatacaaatgctagctggtgacagatactgagtaccgatctattttttctcctttttgacaatttctcaagttacca

SEQ ID NO: 110376 - DNA, 729 bp, Glycine max
  Clone ID: PAT_MRT3847_70681C.1
ggctcgagattcataatactggtcggaaaaaaaagtattatcctagtttcccctagttcaaatacaccccatgtcatgaaaattcccaccctcttcaataaggcatatacatcatgaagaggtgtgctattagcaatttgcaaacatcttaatttgttgaagcttcccattcctagctagggtcagtctcaattgttgaatcgtcatggaacgcaaggggaaaaagcctgttaagatgtccgtgcctcaatttggagggtgggaacacaagcccgcgggagtgcctactgactactctatggtgttcaaccaagctcgtgaaaaaaagaagactcaaatgaatgatttgactgaagtcaaacgtctaagtcttgggaatgaaagggatgccctaaaacccaatcatcgtcgtgggcatggtcaaggacatgggcatgggcatgggcatgggcatggacatggacatggacatgggcatgggcttgatcatgaagatcctcccgttatgaaaaagcctgttaagatgtccgtgcctcaatttggagggtgggaacacatgcccgcgggagtgcctactgactactcgatggggttcaaccaagcttgtgaaagaatgatgactcaaatgaatgaatcgactgaagtcaaacgtgtacgtcttggcaatgaaagggatgccctaaaacccaatcatcgacgtgggcatggtcatgacatgggcatgggcat

SEQ ID NO: 110377 - DNA, 591 bp, Glycine max
  Clone ID: PAT_MRT3847_70682C.1
ggctcgagggcgaagacacgttcttctctcaagtgctgaaaaaaaggtaccattgtccatttctcgatccgtaaattttgttgtgcgttttcgttattttcgcgcatgttctgtaccgatcttttgtttcgcatcgtgaatattattcggaactctcttcttcgtttttctttgctcgaacaatttcggattttctggtctgaatttttctcttttcattataaccgaatattagagttccttcaaccatcttttggagatgttgatcaccgactgccacgaatcaattgcatgataattaaattaattgatgataatggacttgtcctttattgatcttgatcccttggaatcaaaccagttccgtacactttggttcggagagaaacaacaacaacaataataatgataataatttcacggttatgattatgagtgaatagtcctgatgaaataagccgaatcacttttaatttaatttagtactgaaaattattttgtaaagattcaaaatagttgatggagtaataacattaatattttgatctaaaagaatggagccatggtcttcaaaattgttgctacttttgc

SEQ ID NO: 110378 - DNA, 270 bp, Glycine max
  unsure (1)..(270): unsure at all n locations
  Clone ID: PAT_MRT3847_70683C.1
acttctgctacttcctactccaaccgcacttctgctccgcaattatcatgggcaaggtcaagatcggaatcaacggatttggaagaattggccgtttggtagccagantggctctgcagagagacgntgnngaactcgttgccgttaacgaccctttcatcaccagccgattacatgncatacatgtttaaatacgacagngntcatgggnnctggaagcancangangtcaccgntanggacgagangacctnctnntnggnganangc

SEQ ID NO: 110379 - DNA, 259 bp, Glycine max
  Clone ID: PAT_MRT3847_70684C.1
cgaatgctttggctgctgccaaggaagctgaagcattagcagaggctcgtgcgaacaatgaagcaagaactgagctagagagtcgtctgagagaagctgaggaacgtgaatctatgctagtccaggcacttgaagaattgaggcaaacattaagtagaaaggaacaacaggcagttttcaaagaagacatgcttcgcagagacattgaggatcttcaaaaacgttaccaggcaagtgaaagacgggtgaggaactgatt

SEQ ID NO: 110380 - DNA, 440 bp, Glycine max
  Clone ID: PAT_MRT3847_70685C.1
ggcggcaccagaaatccaattagaaaacaggggttcatggaaactgtttgtctgtaacggtttaaaatcctacatgggatactaatcctttgaagtatgagataagcctggaagcaaagaaagcagataataaactgttttaattgataatcgcagtataaatagactactaaagaccatgttcaaaaggaaacccaataaattacaaagaaagggaaaattttaatcaactcgtatgtttactttgtaacgcttttctttttcaaaacggtgttttattgtgtacttaactaatcaatcattatatctgcatgtacttgttttggttaacagcttatagcttccatttgtgcaagtctgtctcagcctctcatgtggttaacagtgtttcggtattggagttgcatgttgtaacctgaaccttctacttgagtctgaaa

SEQ ID NO: 110381 - DNA, 235 bp, Glycine max
  unsure (1)..(235): unsure at all n locations
  Clone ID: PAT_MRT3847_70686C.1
agcatatttncttccaaacgcactttctccncntctctctgtcgtagttactatcatcnaattcaatatgctgcagaggctctcttcnactactactcgctcnncgtccgtctctgcctngctgcgctacggtggcggcgcacttcgccgggacgtgcttgcncccatttcctctcctcacttagctaaggtaggtgaaaatgacagcaaagcagctagatggtttctatatgag

SEQ ID NO: 110382 - DNA, 458 bp, Glycine max
  unsure (1)..(458): unsure at all n locations
  Clone ID: PAT_MRT3847_70687C.1
ggctggaggcgtatcaaaggttaaaacatatgtgccttatttaatcattgcattatcttcacctgtcaacgaactcattgggtgtttttctcacacactcatagttcctcccaatttaccattctnatatactataaattatttaacaatctattaaaccatgtataaaaaccaatctcatcaatattgttgttttaatatcttaaataatttctcttaatattacaaccaaacactccatactgaatttcatttacttctgtaactccattcatatcctaatatcatttattcctattataacaaatccacattgccatcatatcataataccacattgtcctttttttactaatactcaacacctactgataaatttaatgtccatataattacaacacatcaccttatttttccaatctatcctccactactttataaaatccttctaaacatat

SEQ ID NO: 110383 - DNA, 196 bp, Glycine max
  Clone ID: PAT_MRT3847_70688C.1
gcttggtcccaagggaagaaatgatgtaatagagagcaagtatggctcgtcgaaaatagttaacgacggtgacagtgtaactaaagaggctgagttggaggataccaatgagaatattggtgcagagtaggcgagacaagaggctgacaatacacacgacttgactggcgattcattcacgacctctgttgttctg

SEQ ID NO: 110384 - DNA, 1201 bp, Glycine max
  Clone ID: PAT_MRT3847_70689C.1
caaattatagcctgagtctttgtgtgtacaagttccaccaaagccaccccaaattcttcctcatcaaatcaacacatagcaaactaacgatccaaactctttcatttgcaacatcaaaatgagtgaagatggcattgactacggcggaattgtgacggcggttatagcagctgctgcggtggtcaccatagtcagatgtttatttgctgccatggttgccatagccagatgtttatatgccgcaatgatcgccatagccagaagtttatatggcaacactaagcgacaacaagagtcattcgatgagcacgaagaaactgaggatgacgaagaatctgaggaggcagacaatgggaaatggaagaaacctgagagtggttgggtgaagctgaatgtggatggttcacgtattcatgaagaacccgcctctgcgggttgtggtggggttataagggacgaatggggaacatggtgcgtgggctttgatcagaaattggaccccaacatttgtcgacaagcccattatacagagttacaagctattctaacgggcctgaaggtggctcgggaggacatgatcaatgtggaaaaactggttgtggagtcagacagtgagcccgcggtgaacatggtgaagagtaggcttgggtacaagtatcatcgtccagagtataaggttgttcaagacataaataggcttcttaaagatcctaagtggctagcgaggttggattatgttcctaggaaagctaatcgagtcgctaattacctcgccaagcgtgtttgtaaatcgtcttctcctcatgatcatcatcatttcagcaagtatccttgtcccccggattacgattgtgaaaagattttcttggaggataacaattgacggggtgtgtcaacttttactcgttttgttataaaaatatgaaaagcaatagcatgagaatatgagatcatggattttgaaaggacccaatggaagccaatttattatgtctttttgggttgtcttttgggaagtacgtatgtgtatgtatgggtttggttttatatatgtagtatcctgatcaagtttctatttgttttttcttctttgttgagatattgtaatgtactgatgctatcctttcaccaacttgaatgtacaagtgatcttgttactgatcctatcctttgttgaatcaatgaagaattatattgtatt

SEQ ID NO: 110385 - DNA, 382 bp, Glycine max
  Clone ID: PAT_MRT3847_7068C.1
ctcccggttttacctggccctcaactgcaaactgtatgcgtgacggtcatctgctcatgttgtttgtgtgtagcagtatatagttaatatttttttggataactaaccatgttgttagctatataccctatatatatgcaaagcatatccctaaagcatatagctgtgtggtttagtattctgttttgttgcttcaattggtgatcctaatgatatcttgaggcttttctcttttacggttgtattggtgtttcttctgttgtgttcttctttggtagttttgtggctttgctctcatgttttgtaagagacatacatcgctcaatgagtttgtctacttgaccaagattttaaaagtgccaactaactggcatttgcctac

SEQ ID NO: 110386 - DNA, 510 bp, Glycine max
  Clone ID: PAT_MRT3847_70690C.1
tcacggtcccgtcctcaaggagagcaagaatcagggcatgagtgaagagcaagaatgggatctgtcggatgtgaagcctcatgaatttgtacggtatggattgagttgcctggagatgttggctggtcttggtgactcttgtgccaaagaaactcgtgaaagaatcagggttatggttgctggaggtgatggtacagttggttgggtattaggatgtctaacagaacttcgtgcacagggtcgggagccagttcccccagtggggatcgtaccactggggacgggcaatgacctgtctaggagttttcattggggtggggtcatttccgtttgcatggaggtctgcaattaagagaactctacaaagggctagtaatgggactgttaaccgcttggatagttggcgagtttcactttcaatgccagaaggtacacctgtggacctacctcattgtttgaagcatacacaagagttctgtcttgatcatggctttgaaattgatggagaac

SEQ ID NO: 110387 - DNA, 455 bp, Glycine max
  Clone ID: PAT_MRT3847_70691C.1
ggtacttgtaggcgaaccaaacggcccattgggagacccagaaaaaccggaccggggatggccatagttccaacctgtgcgaaagtgggagccggtaacaatttcccacaaaatgggaaccggaagcaccggggggaaaacctgaagcgcctaaagagtcgaaccaactaacataacccgcagcaaaaatcactgacccctgggcggccagaaaaccagttaagccacctggattgacgaagcggccaacccccctttacaggcgggaagcctattgggccccatggatgaaaaaaactgcaccagcgcgacggaaaacagatgattgccctgcccccccgggggctgatatttttaccagaagcagggcacgctggtttgtccccttaagcgaaaagcccaaaaaaaggtgcccaacggcgggcacgcccgagagccccaaaacgggaaaaccc

SEQ ID NO: 110388 - DNA, 279 bp, Glycine max
  Clone ID: PAT_MRT3847_70692C.1
cgcaaactgactttacagcacacaacactctaatcctattttctacattacaaactttatctattgcgcgtgggtcttctttcatacagggtgcggactcccaccatccatctataatagtcactctcatataaacaatatcaataatctccccataccacaacagcctcaatccatatctcactcacctccttaacagttccaaactcacagccctaaaaccacacagaacagaaactctactttaacaaacatcaatattaccctactaaacattac

SEQ ID NO: 110389 - DNA, 848 bp, Glycine max
  Clone ID: PAT_MRT3847_70693C.1
agaagtaactcattgtgtaattgattgatataataaagatacagtgatagtgtgtaagtgctctatttatagagcttatttctatcaaagctacttactcttaacacaatcaaaccaatcttggataagccattgggttagtgatacgaaatttaaataattgatcgtaagttcaaatctcattgtcattgttgggactacaaacgaaactcacataaaccgtcttttgttagaagttgaagagaggtttaggctacagcaccaaaggaattccccccttgattgaagctattcccacttgactggaagtaagaaactgctgcccaaatcacacgcaggaccagaattgcagcaaatacagtacctccaagagtgcagatgatctcaagaagtgctttgacaacagaaagtgaagcaagtagcagagtcccatcaacggcaaaagaaacgagctggggcgatattacagtgggcaaaacagagcgagacgctttctttgccctcttagacacttttttaaacatgctctgcaagaatctgatcaacaaatccacgctactctctgcatcgtcctcgtcatcactttcgtcttcaactccatcgtactcatcaaaacccgcttcatccatcgcgtatcccccacccgagctattcagcttgccatggcaattggtgattattggctttaaacgacggttgtggtagaatccggaatgaaagggttggatagaaaagggagcattgtttgaagagaagtggcgatgcttggaggagtgtgaagggcgcgtgagattgattaatgctgttgttgttgcagtagctcctgccattggagacagaacatggag

SEQ ID NO: 110390 - DNA, 1909 bp, Glycine max
  Clone ID: PAT_MRT3847_70694C.1
acgaacgcgtccgcatattttcagaccgaactcaacactcgcagcaccgccatgagtgccgccacttcctccaccctctccaccgtcaccgatgccaatcttcactccagatttcattctcgtcttgttccattcactcatcatttctcactttctcaacccaaacggatttcttcaatcagatgccaatcaattaataccgataagaagaaatcaagtagaaatctgctggacaatgcaagtaacctcctcacggacttattaagtggtggaagtatagggtctatgcccatagctgaaggtgcagtctcagatctgcttggtcgacctctctttttctcactgtatgattggttcttggagcatggtgcggtgtataaacttgcctttggaccaaaagcatttgttgttgtatcagatcccatagttgctagacatattctgcgagaaaatgcattttcttatgacaagggagtacttgctgatatccttgaaccaataatgggcaaaggactcataccagcagaccttgatacttggaagcaaaggagaagagtcattgctccggctttccataactcatacttggaagctatggttaaaatattcacaacttgttcagaaagaacaatattgaagtttaataagcttcttgaaggagagggttatgatggacctgactcaattgaattggatcttgaggcagagttttctagtttggctcttgatattattgggcttggtgtgttcaactatgactttggttctgtcaccaaagaatctccagttattaaggcagtctatggcactctttttgaagctgaacacagatccactttctacattccatattggaaaattccattggcaaggtggatagtcccaaggcaaagaaagtttcaggatgacctaaaggtcatcaatacttgtcttgatggacttatcagaaatgcaaaagagagcagacaggaaacagatgttgagaaattgcagcagagggattacttaaatttgaaggatgcaagtcttctgcgtttcctggttgatatgcggggagctgatgttgatgatcgtcagttgagggatgatttaatgacaatgcttattgccggtcatgaaacaacggctgcagttcttacttgggcagttttcctcctagctcaaaatcctagcaaaatgaagaaggctcaagcagaggtagatttggtgctgggtacggggaggccaacttttgaatcacttaaggaattgcagtacattagattgattgttgtggaggctcttcgtttatacccccaaccacctttgctgattagacgttcactcaaatctgatgttttaccaggtgggcacaaaggtgaaaaagatggttatgcaattcctgctgggactgatgtcttcatttctgtatataatctccatagatctccatatttttgggaccgccctgatgacttcgaaccagagagatttcttgtgcaaaacaagaatgaagaaattgaaggatgggctggtcttgatccatctcgaagtcccggagccttgtatccgaacgaggttatatcggattttgcattcttaccttttggtggcggaccacgaaaatgtgttggggaccaatttgctctgatggagtccactgtagcgttgactatgctgctccagaattttgacgtggaactaaaagggacccctgaatcggtggaactagttactggggcaactattcataccaaaaatggaatgtggtgcagattgaagaagagatctaatttacgttgacatatgtactgtggccatttttcttatacagaataatgtatattattattctttgagaataatatgaataaattcctagactcctctaaaaaaaaaaaaaaaaaaaaaaaaaaaaaaaaaaaaaaaa

SEQ ID NO: 110391 - DNA, 357 bp, Glycine max
  Clone ID: PAT_MRT3847_70695C.1
gtcgagaacaaactacatgtttttttttaaaggggggggaatacttttgtaaaacattatgagttcgccatcctatttttaacaaggtttatttacagtgcattacatatttgatgttcagatatttcataatttagaattacttgaagcgttttccttaggggcccttccactaataacatattttacctttggagggtttgttttttaaaatgactcccgggagaagagcagcttattgtagttggggacatgtgtcaaactttctggaatattccaattcttggagtgactaattgctaccacaagatggttcagtttgggtgccttattcatattaacagggttgtttttttt

SEQ ID NO: 110392 - DNA, 995 bp, Glycine max
  Clone ID: PAT_MRT3847_70696C.1
gtgttgtacctcttgatgttgattttttagagtcaaaatgcactaaccatgttgcaggaagtacatatacttctaacttgctttatgagttacaggttgaggaaccttcttcttctcctaccctggttcctcccactgttcagccaccacccacaccagagttgaagcccttaccagcaaacctcaagtatgcttacttggaggacaaggaaaaatttccagtgatcatctatacttcccttgctgctgagcaagaggagaagatacttttagaggatggagctaagcaagtgaggcacccacagcagcgactcaaccccgtcattctagatgtggtgaaaaagaaggttaccaagctcttacaagctggaatcatctaccccatttctgacaaccagtgggtgagtccagtccaagtggttcctaagaagacaagcctcacagtgatcaagaatgagaaggatgagcttatccccacaagagtgcaaaacagctggcgagtctacattgattataagaggctgaaccaggcaaccagaaaagatcattttcccctgcctttcattgatcaaatgcttgagcacttggcagggttttataggcactttattaaggactttagcaaagtggcccttccactatccaatctactgcaaaagaaggtggagtttggttttaatggctggtgcaaagaggcttttgattgcctcaagtgtgcattgactaccacccctatcattcaggcacctgattggacagccccatttgagctgatgtgtgacgcatccaattatgcattgggtgttgtccttgctcaaaagattgacaagctgcctcgggtgatctactacgcttccagacctttggatgctgcccaagcaaatttcactgccgcagagaagcagttattagcgatagtgtttggtcttgagaaatttccttcatatcttattggtcatcatgctattgtttatactgaccatgcagcttattaa

SEQ ID NO: 110393 - DNA, 958 bp, Glycine max
  Clone ID: PAT_MRT3847_70697C.1
gaaacaaataaatcaaagaaaagaaaaggaaaaaaaacaaaaaataaaaacacaaacaaagaagagagcaaaatgaagagtgcgatttgtgggagaatcctctctcccaaccacgtcttcaaaccaggggacacacattcaatttgtaaaggaccatactccaatctttgtgtacccatggttgtattggcaacagggcctggtataggaggtggggtgctggaaaagccagttattgaaaaagtcacccctggccgtgagtctgaatttgatttaaagaaatcacggaaatcggcaccgccctatcgtgtaatattgcacaacgacaactttaataaacgggaatacgtggtccaagtgctgatgaaggtcatccctggaatgacccttgataatgcagttaatatcatgcaagaagcacactacaatggattgtcagtggtgatcatctgtgaccaagccgatgctgaagatcattgcatgcagctaagaggcaatgggttgctcagttcaattgaacctgcaagtggaggttgctgatggcaagtttcactttaaatctcactggcttttatgctattgaaaggtgagatggaactattagcaggtgtacataagttccccctcttgaaggctttagagaaaccaaaaaagaaaaaatatatcttgtgtaaaaacttggccttatgtatgaacaaaaaacctatgattaagacatgtgatagttgtgattttgaataaagaagcgcacaacatattaaagctaatagctgatgaaatgattgatgtatgtggaaaacatagagattagatcaacataataccacagcactgtcatgttacttgataacaataggatctaaatctacatgtggaaagcatataaaatttagatcctctcattatttaaaaaaaaaaaaaaaaactcgagactagttctctcctggggccaaattcc

SEQ ID NO: 110394 - DNA, 155 bp, Glycine max
  Clone ID: PAT_MRT3847_70698C.1
tagagctgcctagaataacctggtgcataaacaagaattggaaaaaacaccggagggtgggtctaatgaaaatctttggatagggacctacccctgccttttaatgagatcgaagcctttagtcttacatgatagtgtactgagtagagccatcc

SEQ ID NO: 110395 - DNA, 560 bp, Glycine max
  Clone ID: PAT_MRT3847_70699C.1
atcgaatcgaatcgaatcgaaaggaaagtgcagaatggatgacatgccgttgccggcgctctttgagcaagcccgcaagatccacgccgcagccaccgattccggcgccgaccaggaggttgtgaagaaggggtgcgaggctctgcatagatgcgaggacatggtcaataatctaggtttgttctctcccaacgagaccaaagaagatatcagcaccacgaatctcaaatacattctggttcgtatgtttgagtttagttacttttacttttaattaacgccattattttatataatcaaggaaaatgaataccaccatgaacctatttaggtcgtgtttggaagagttaaataggtgtttttacttcatagcaatagagccatcgttggagaaattatttttaactcggacactccatcaaaacatgtcatgtcgtgtcgtgtgaggcagtaatgtgcagttaggttaaagttatgatgcttttagaagtgaacttgaaccatacttgttcatgctgaaaatttgtattcaacaaatccaaactggaggaaatggttgt

SEQ ID NO: 110396 - DNA, 655 bp, Glycine max
  Clone ID: PAT_MRT3847_7069C.1
tctgtctcttaggaaatcgagaaaatcaaggtggtcatgtgttctgccctcggtgaatgcatattgtgaaattcatgagggatattgctttgtcaacagcacattttgtttggtcaaggcgggtgctgtttctccccttattcaattattggaagatactgagagagaagtagttgaagctgctttgcatgccctctcaactcttttgcaagatgaaatctgggaaggtggtgtcaattccattgccaagttgtcgggtgtgcaggctattataaaaagtctacaagttgaggatgcaaaggttcaagaaaaagcaatatggatgttggagagaatattcaaggttgcagaacatagattaaaatatggagaatctgctcaggtggttcttattgatcttgcccagaaaagtgattctagattgaagtcaacagttgcaaaagttttagctgagctggagctcttgcaatctcaatcaagttacttctgaaaccagtctttctctatgagaaacactggcagtgattttgttttgatatccattcatttgtattattttggtgtacatgctttcttcttttggatgagccacatagtgccattctagtatatgtaatttataagaaatagtaaaagtttggcaatgtatcaagtt

SEQ ID NO: 110397 - DNA, 209 bp, Glycine max
  Clone ID: PAT_MRT3847_706C.1
cccggtccgacccacccttccgccaaagttgcagcagatccccaaggaaaaatttaaccagtttaaaggaccaaaacctggcgctggggaccattgatttgcccaatgtttccattgtgagtgaacttaggatgttaaaattgtgaaacctttgtctttaaccgaaaaatttttaaaaggatccttttttgaaaaattgttaccattgc

SEQ ID NO: 110398 - DNA, 408 bp, Glycine max
  unsure (1)..(408): unsure at all n locations
  Clone ID: PAT_MRT3847_70700C.1
ttttcggtatgaagaaaanctntaaganggcacaaggggagtacattgctcctgagaagattgaaaacgtatatgccaaatgcaaatttgtggcgcaatgctttgtatatggcgatagcctaaatgcttctttggtagctgttgtctctgtggatcatgataacttgaaagcatgggctgcttcagaaggaataatggtagtataaactttaagcttgctctaatctttattccgctttgtcatgcatgtactaaaaagttcgtctagacagcggctaaaagagaaaacttagttctactgtatgtttcaaaacttgaaatgtatttttgaatctgattactctaagtgtacaatatagattggaaaataagcatgataaagacttgctactaattttgtgaaaacaa

SEQ ID NO: 110399 - DNA, 348 bp, Glycine max
  Clone ID: PAT_MRT3847_70701C.1
cccacgcgtccgacaacgcatacggtggatgaccgacaaaaagaagaaacgttgtggcaaattgcatggttagtgcatcactacgaacagcggacccggacctaacaatgaaccctaccatcccaaagctggaaagggaacacatagtgagtgcgttattcaaaaccgagtatttggcgagcgtgtagcgctgagcagagataggaatgtagtggtggccatggactgtcgcgaaggaagcataattactctgagaggggctatgcgacaatctgctgcgacactgtgacatactctacataccccacatcaagccttacggaggaagtgcattccgagatctactct

SEQ ID NO: 110400 - DNA, 177 bp, Glycine max
  Clone ID: PAT_MRT3847_70702C.1
gtaattgcaggatccatccaaagtcccttgtctttgctggacgttatataggcgatgatgacatttgagcaatcggcggtgctataaacatgatcgacacaaatgcagcaaccactggacccagcacgcacagaaccgttgatctaaaccaacaatacagggaatcagctgcatact

SEQ ID NO: 110401 - DNA, 512 bp, Glycine max
  Clone ID: PAT_MRT3847_70703C.1
acaaacattataatttctattacatacattttgtagctaggatgagcaagttactactcattcgtgttgctgggttcgtggcaacctttgtcaccatggtgatgatgatggtgcccaaaaacgtgagtgcccaaaacataggtgatgacatcgtcacacaagacttcttcaacagcataatcagtcaggctgatgatggttgtgcagggaagaacttctactcacgagatgctttccttaatgctcacaattcctacaatgagtttggtaggcttggtaatcaggatgactccaagcgtgaggttatttttgctacatagaagagattaacggtgcatcaggggactactgtgacgagagcaacaccgagtacccatgtgcccctaacaaagcgtactatgggcgtggaccaatccaactatcatggaacttcaactacggaccagcagggcagagcatcggatttgatggattgaacgctccagagacggtggccaatgaccctgttgtgt

SEQ ID NO: 110402 - DNA, 1058 bp, Glycine max
  Clone ID: PAT_MRT3847_70704C.1
cggctcgagcaaagtcctagctagcattaacactataaatagacctccgttttgctctcaatcccgagaccaccctgtctatcaaacattataatttctattacatacattttgtagctaggatgagcaagttactactcattcgtgttgctgggttcgtggcaacctttgtcaccatggtgatgatgatggtgcccaaaaacgtgagtgcccaaaacataggtgatgacatcgtcacacaagacttcttcaacagcataatcagtcaggctgatgatggttgtgcagggaagaacttctactcacgagatgctttccttaatgctcacaattcctacaatgagtttggtaggcttggtaatcaggatgactccaagcgtgaggttgcagctgctttcgcccatttcacccatgaaacaggacatttttgctacatagaagagattaacggtgcatcaggggactactgtgacgagagcaacaccgagtacccatgtgcccctaacaaagcgtactatgggcgtggaccaatccaactatcatggaacttcaactacggaccagcagggcagagcatcggatttgatggattgaacgctccagagacggtggccaatgaccctgttgtgtccttcaagacagccttgtggtactggatggaacatgtgcgtcctgtcatcaaccagggttttggtgcaaccattagagctatcaatggccgacttgaatgtgatggtgcaaaccctagtactgttcaggctcgtgttaattactacacccagtattgttcacaacttggtgtttcccctggtgacaatcttacttgctaatttatcagtatagatggttccatatgatgacatcatacattcatacggtatatcttaacatatatcagaaaataaaccattcaaggcttacagccttattttgattattaatgtaattactacttttgggaatattgtatctgattaccatcgatattgtgcatccaatattgaataaaaatacgttatttctgtgataaaaaaaaaaaaaaaaacaaaaaatttcaa

SEQ ID NO: 110403 - DNA, 171 bp, Glycine max
  Clone ID: PAT_MRT3847_70705C.1
ttaagataattaatatacagtatggatgttacgtagaatatgagcctctatgtctaagtgagaaacacccgttgctgtataagttagggggacaataattgtattgcttctatactcaatagatctgttgattttaatttgttaatcacctcatccaaaagataaaaatct

SEQ ID NO: 110404 - DNA, 334 bp, Glycine max
  Clone ID: PAT_MRT3847_70706C.1
atctctagcaaaaacttatcatctagatctgagttatatcctgtcgaatgtagggttacctaaatggagcaacacataaattatgaattaggagcctcataccaatggttctgttctggatgtatgttttgctaagcagacctcatagatttgtctttcgacattcgaaaatggaaaagcgtggtttaataaggaccatattaaattttacatccatttgattcgagcgtgcactgtgtgaccgtatagcctggtgttacattgtcaaagaaagtacgcgttgacacttggttttcgctcggatcagtatgaatataaacattgtactggaaag

SEQ ID NO: 110405 - DNA, 341 bp, Glycine max
  Clone ID: PAT_MRT3847_70707C.1
aatttgtttcctatagaaatgtattaccttctaggttagatttggatcgggaggggtctattattgggcggcaaacaattctttttatataatacaatcttgcctaacttgtaaagttacttatgtagcctatcatttctgtactataactatactacgtgacgctctttaaacaaacttaaagaaggctttaaaactgggcttttagttatttactgttattgtttacctcgaaacgacctgtacttgtatatcagtgacatattgggcgtaaaaccttcgagttgttccaaggctcaacctttaaatgactgatctttacttatctgaggctagtaaga

SEQ ID NO: 110406 - DNA, 450 bp, Glycine max
  unsure (1)..(450): unsure at all n locations
  Clone ID: PAT_MRT3847_70708C.1
gctttcatttccattggtgtgttgtaaattccgtggagtagcagcactatgagaaaagaaaatagtaagaggtctgtagcatcattcttttagttaaaatattgtggtatttgatatcatttaagtttttttatacactacatactccagacatggctacacggcgatggtaaaagacgaactgaagggaaatgtttcccatccgaatggcttatatttacttaagtttgtacttcgacaaaatagatctttgtaacgaaaagaagattgtcaaatactttttaagcctgagctggtggtctcagtaggaaaaaggggntttggttgctgatcagctcattacatcaatgatgatgatgcagtaactctaactcataaagggctcttggtttaaaaatgcaaaagtggtaacagtaaagctatctgatcaatgttcattctcaacagatc

SEQ ID NO: 110407 - DNA, 192 bp, Glycine max
  Clone ID: PAT_MRT3847_70709C.1
cttgaaggaaactagtagtatttttcaaggtttctcgcgtgacgtgcattttgcgagaaagggttctttggaaaattttccaagaaaacatagtgttctacacttttaactagtcaaccatggagaatgttaaaataagccataagaggtctcaatttttttattaattataggtggataatgttactcttt

SEQ ID NO: 110408 - DNA, 375 bp, Glycine max
  Clone ID: PAT_MRT3847_7070C.1
tcccacgcgtccggtcacttctgattcatggaaaaggaagattcaactgctctaaatccccaagcgtaagcactgatgtttgtgacacatcaaaccctcaatgctctccctttgtacaaactgtgatcccgggaaaaacataccgactcagaattgctagcttgactgctttatcagcacttagcttcaaaattgaggtaatcaaatgttctctttagataaacttctttgtaaacccttaaggtaaaagaaacttaatgaaaaagtttctataacttaaaggtcaacttacacttcaacttttaaagttctggcatgtaacttctttcaaagagtgaggtattatgagtttgatttttaaggttatgaccaaat

SEQ ID NO: 110409 - DNA, 352 bp, Glycine max
  Clone ID: PAT_MRT3847_70710C.1
tactggttgcaggaggacaacaaaaggggggagggtttgatgaggatttatacgggtacctaactctgtcactccgccgttgaccatggtgcttagggtgcagagaccggacacaaagatctctattgacagtatatatattggccatacatggcgccaatagaagctccggagagcgccaacatgaccggcgggaaaaataatagggggagccaggggggagataagattgacaacgaagacgtggagtggcaccacacctctggtcaaaggcaaggggacgctaatgacacaggtggtcacaccaatgagggagacagattgtacagtgatgatctacagtaccctaaat

SEQ ID NO: 110410 - DNA, 257 bp, Glycine max
  Clone ID: PAT_MRT3847_70711C.1
atttcagggaatctaataacgtcctgcaccaaggtgaaagatgttttgtctgccaactggatggatcaatattcgctttatgacccgaccgtgactatagaatggtcgaaacctgactgcaaacactgtgaaacacaaaaccagaaatgtaaatggaagaatagtaccaaagttgaaactgaatgtttcgtttgctcaacaaacacgaccccacatcaactattgtactcattgctgcaggaggaatagttggtttg

SEQ ID NO: 110411 - DNA, 522 bp, Glycine max
  Clone ID: PAT_MRT3847_70712C.1
ggaggcggtggtgatggtgttgtgtggggcaatgctcacccctccaaatccaaagtcgtcggagaatattcttattagtattaattaattaataataatgagacgagtgcttggcttcttattcttgttctgtaagtttgcaacttttttcctttcattcattattcttctcttgccttgagttgaggatgggcaatgtgaacgtgactcctgaagaagaagaagtttctgcaagtgcaagggcaaccgatgagaacgccatgcctcagtctcctgccacctctcctacggctatccatttccccctcatattcgctcctcaggttccggtggttccgctacaaagacctgatgagatgcatgttccaagttgttcctggatggacacaacttcagggtatgaagatgtgtaccgtgaagtaggaattccaacagtgattacttggagttatgatggaaaggaagtagctgtggagggatcgtgggataatcggaaaacatgaatgcccctggagagatcat

SEQ ID NO: 110412 - DNA, 418 bp, Glycine max
  Clone ID: PAT_MRT3847_70713C.1
gttatgtttttattttatatttttggattaggtaatagtcattcattcaccaatcaccacatcagccccactaaaattttcatttttttgccaaccttttttcttcctgcgttgtggaccccaacccgtactactacctccaattccaaaagcctcatttctcctgtatttatctcacattaccatgagtgccaaaccaaaacacaatcatggacttacctgaagtctcatccttcattcatcatagagagaactagaaagtagaaaccacacaacttcttcaggaccttcacaaacatagagaaaggaagagagaaactcagatactaagaggggatgggtaactataggttcaaattatcagatataatccccaatgcctggttttacaaactcaaggacatgggaaaaacaagaa

SEQ ID NO: 110413 - DNA, 230 bp, Glycine max
  Clone ID: PAT_MRT3847_70714C.1
ctcgagccggtttatctactagggctctgcataaaacttcatttgacaagttcttgcctccacccctcccttcctcaactgaggagagggccaagtcaaccctggggcccacacgaagtcgtttctcggatttgctccagtctctttgtaaagccaggcaggagagtgggcccatcccacagatacacacccgtcaagcactcttgggcccctccagagcctaaagctgc

SEQ ID NO: 110414 - DNA, 270 bp, Glycine max
  Clone ID: PAT_MRT3847_70715C.1
aaaccccccactcgaccatctcactatttttcggccgcccgtttcgggttgcggggggggtttttttttaaaaaccacgacacttccgtaacataaatactttctcttcctatacaaaccccttttcaaaccaaaacctcgctcagcttttggattctataaaaccttcatcggaaaattaatttttttacaacacttaactttcctttgggggggggaccccataagactaacaaaacacctttccaccaaacccacagaaaaacaggg

SEQ ID NO: 110415 - DNA, 437 bp, Glycine max
  Clone ID: PAT_MRT3847_70716C.1
ggctcgaggcgaatatgacattttttaataatagtaagatattttccttaacaaaaaatgtcatattcgcatacaaactactcatgatacgacattctttgttaaggaaaatatctttctattattaaggccccacccaacctacgactttgaagtcctcttgataaatactccacgtggcgtgatatatagatgcagatgatttgtatttgcatcacacataatctttactgggggcggcccccatacataaggtcgataccccggaaaataatttcggaaccggaccccgggggcaccccaccttgcgtcaatctgtttcgattataaccttacgcaaacattgcacaggttttgcccctggggaaacaatttacccgccaccattccgcccctacttacgatccgaaaatttaaggggtccccccccgggcccc

SEQ ID NO: 110416 - DNA, 200 bp, Glycine max
  Clone ID: PAT_MRT3847_70717C.1
ggagccagcgcgtgaccaggaaggcgattttgagttggtataggctatagtgtctgattgattgcatgtgctctgtctttttattctactctatgatccgggtgcctgagtggctggaacatttttattattccgcattagtataatggcttgtagtttgcattgtgacacgaaatgatataaactgcactttacgcaca

SEQ ID NO: 110417 - DNA, 215 bp, Glycine max
  Clone ID: PAT_MRT3847_70718C.1
tcgggatgcggctcgaggcgatatctcaggttacaaacagaagaattgcagtgagtgcacaagtatacacactcaatgattgtttactgctcaagagagaagatggataagagatatgtcctttgtccctaagagaaagtccaagcaaagtccacatcagaagaactctacaagacacaaccagcacacctaccacagttttccccacaagtcca

SEQ ID NO: 110418 - DNA, 292 bp, Glycine max
  Clone ID: PAT_MRT3847_70719C.1
tggggggttttttaagcaccatgaacattttaactcgcaataaaccaaacctgctattaatttcacgaggtagataagacaaacggacttcgaaccatatatatgacggttctccaagagctcgatccaaacagaccttccttgaacgaggacaaagtccaggaaataaaaactcggaagccaagttaaatactactctttggcaaccgacgtttatttggagttactgagaccttaactccactgggagctgccacaacgggagagtgcgctgaaagatcctcttcaccaa

SEQ ID NO: 110419 - DNA, 699 bp, Glycine max
  Clone ID: PAT_MRT3847_7071C.1
aatggatggatccggattttccacgcgtccgaaattttgcacagcccttgccctaaactgtggaatggaaaaagggtgacagtgatactgtgtcatcacacacacatgatgaacgagtttaggtattcatgcaagagcgctcaccaaactcttcaatggatcaacgaaattatacacttcctcacgccttactcttccttaatcaatgctcacgtcgttaatttcttcaaggataggctatgggagaatgttgacgccgaatggatcgaatgcctgcgccgagaatctgttcaaaatcttcttctcataccttctggtgcagtacaggatcaatggccaacttctttgaaggagttcatcctaaaaataaggtctatggtattttgtcaagaacaagcagatataaacatggcattacctggcctgcagacaatttcacttaacactgttcttgcccagggcatgaatgtaaagaaaaaacatgaagttgaaattctttctgctgttacaaatacagttgcaaacagtatcagagctgatgccattcttgatgttggtgctggtcagggttatcttgcacaagtacttgcctttcaatatcagcatcctgtaatcgctattgatgcatgttcgcatcatgggaggggtactgatgcacgggcagaacgaattaaaaatactatacatcacagatgataa

SEQ ID NO: 110420 - DNA, 114 bp, Glycine max
  Clone ID: PAT_MRT3847_70720C.1
gtttggtggagcttccaagacaatgtggatgcgggagcttatgcgcttgttcttgagattgcacttcatgattctgcgggtgaaaaagttgatgctactggaggccaaattcat

SEQ ID NO: 110421 - DNA, 482 bp, Glycine max
  Clone ID: PAT_MRT3847_70721C.1
aaaaaaaaaaaaaaaattggggtttttcatttggaaaaaccattccaaccaaattttggaggaaaattggatttggtcccttcaaagggggaaccccatttcttattttccctccccttggaaaaccccagggggctggcggtgggtggtttttatgcccccttctccccaaagggcccggttttttggggggggaaaacccccagttttggtggcctccccccggaccccgggaaaaccggcaaaaaagggggattttgggggtttttttaaaaaccccaagcggtttgggggaaaaaacccttcctttggggcaggtaccggccccagggaaatcccctttaggggcacctttccaaaaaccttttttagcctaacccagggctggtttttccaacccaggctgggataacctggacccccccttaaaatattttttccccttttaaaagcaaacctggtggggcccttgaccggaaaaa

SEQ ID NO: 110422 - DNA, 352 bp, Glycine max
  Clone ID: PAT_MRT3847_70722C.1
tctaaagacctcataatttttttcaatcaatcagaccatcttgaagggggtgttgttaatattataaagaatacaaccccaaaaataaaataattatcttaaatctttttgtacaacttttattattgaatggagaaaatactataaattgcttcaatttttatttaaatgtaaatcacatgtaccttatatttaattgaatttttgtattcaatgctcttgtaatactttacataacagctccattattatttgcattacaattatctgctatgattgtactaaaatttttccgaatccatcaaacatcttccttatacattaattattcaaccacttccacattcaacct

SEQ ID NO: 110423 - DNA, 719 bp, Glycine max
  Clone ID: PAT_MRT3847_70723C.1
gggggtttgtctctcttcatgaaacaaacagaacagagcactctgcttctctttctctccacttcccaccatgccccgccccggttccaaaccttacgattgcgtcaaaagagcttggcacagtgaaatacaccaacccatcagaggaactctcattcaagaaattttcagggttgtcaacgagatacatgggtcttctactaagaagaacaaagagtaccaagagaagctacccgttgttgtgctcagggcagaggaaattatttactctaaagccaattccgaggctgaatacatggaccttacaacacttttggaaagaacaaatgatgctattgatacaataattcgacgtgatgagcatacagaaactggagagtatttgcgcccttgcatcgaagctgctctaagtttgggttgctccttaacaaaagccacaaggagtcaacgcaacaaccaacgatgttacttaagtcgcagcactgaagaggttccaaaactttcttatggcacgttgcataataccgcaaatacgaaggatcataataacacaaggtctcaatgtgtgtccgagaatgtaccttcagctagtaaaaagcaatgcgtggaacaccaaccgccaccaaaattgttttcagtttatcctctgtactatgggaacaacaacaacatccaacttggcaattcacaacatcatcatgggttcaaagtatcacatg

SEQ ID NO: 110424 - DNA, 997 bp, Glycine max
  Clone ID: PAT_MRT3847_70724C.1
aaagaaaagatggaaaccatttccaaatttccctgttcacatcaacctgtaagatccattagtttccctcctagggtacaccccgtttctcaaagagttgaagcacttctaaaccacctaaaacctcatcattctcagcctatctcaatcactacttgtttagaagctgagacaattcagagcgacttagttgtgcttgctgagttgtacaactgcatggaagaacttttccattctccacaaaccaaacaaactcttctacgctaccaagatggaaaactagtagaagaagcattacgtggctcagtcacattgctagacgcatgtgagtctgcaagggatttgttattggttcttaaggaacacatgcaaacccttcattcagccgtgcgtagaagaaagggagattcaaacattgaaagcatcatttctgcttatgaaagcttcaagaagaaggcaaagaagacaattgctaaacaacttggacaattaaagagaatgaagaataaggctaattccttttctttattggatcaagatcaacagctagtgtttttggctagagttataaaagaagcaagcaccatcaccatctctatattacattctctattagtatttatgtccatgccaacatttggaacaaaagggtcttccctgatctcaaagttgaagccaacggttttgttttcttccctgaaagaacagaagaacacaaatggggttgcagatctcaacaatgttctgtgctctctccttagaagagagaaaaacggtgattccagtggtgaatttcaaagggcactaacagtgttagagacattgaatgttaatattggtggtcttgagggtggattagattgcatatttagatgtttagtcaaaaatagagtgtcgtttttgaatatgctggctcattaaatgaatggagcaaaaatacatatcctctgtaaatgtaaaatctccataaatcagtacatgtttgaacaacagcatc

SEQ ID NO: 110425 - DNA, 304 bp, Glycine max
  Clone ID: PAT_MRT3847_70725C.1
agttacccttacagtgatggcaacaacacgaacagtagcagtccgactatcactccctcatcacgtgttcatattctacattcattccatattaatgcttaggatacgtctaatacgcatcgtaacttgaccttgaattgacctacacatcatgcacacatcataacaagatgaaatcgcgatgaaacagaattagttctatctgagaaagatctccgtttcactatcgcatcataactccttaacttaaatctcacagagatagcaaccaaccacgaactcgtacattacgctcaccatacaa

SEQ ID NO: 110426 - DNA, 259 bp, Glycine max
  Clone ID: PAT_MRT3847_70726C.1
tcatttccattttatatgaacattgttgcctacttatttcttgaaaaagtggaattggaattccccgaagaatgcctatcccatttcctttggctttgagatcggccttactagaaaacatataattccaaatcatatatgaacattgatgcctacttatttctttaagaagtggaattggaatttcccgtagggatcctctacagtcgacctggaggcatgcaaccttgtctctccctttaccgaggttaaattgcct

SEQ ID NO: 110427 - DNA, 145 bp, Glycine max
  Clone ID: PAT_MRT3847_70727C.1
gttttccctacccggcatttccccaaccaggccggcaacggtgaccctccccagaactggccactcctgacgggggattgggaggctccccgtagcggcacagtaacccttgcaagtgtcctagttacgcccattttgacttcca

SEQ ID NO: 110428 - DNA, 1938 bp, Glycine max
  unsure (1)..(1938): unsure at all n locations
  Clone ID: PAT_MRT3847_70728C.1
gagcatgcatgtgaagctgctgcctctgttgagtctaataatttaaagtcaaaacctgaagctgaccgcgtgaatgttgagaaactggctgataaagacccacctgttccaaacgattctaaacatttagttgatctattcagcttcttgcctgagttgattgcttctgtaaaaaaggctgcattagaagatgccgaggaattgaaagctgcagctgatgagcctgccaattctcagaatcacaattcagataccaaagatgaaacaacaaatgaagtagaaccaacgaatgctcatggtgatttagaattggactctgaaaatgaccatgtagatactaataaaattgagtctacaagggctgaggaagaagcatttgctaatggattgcagactattaacaatgatgatttggaggagatccgtgagcttggttctggaacctatggagctgtttatcatgggaaatggaaaggttctgacgttgccattaagagaataaaagccagttgttttgctggaaggccatctgaaagagcaagattgatcacagatttctggaaggaggcgttgatgttgagttcattgcatcatccaaatgttgtctccttttatggcattgttcgtgatggccccgatggttctttagcaacagtcacagagttcatgattaatggatctttgaaacagttcttgcataagaaagatagaacaatagatcgtcgtaagaggctcattatagccatggatgctgcatttgggatggagtatttgcatggaaaaaaacattgttcattttgatttgaaatgtgagaatctattggtcaatatgagagatcctcaacggcctatctgcaagattggtgatttgggtttatcaaaggttaaacagcacactctagtgtctggtggagtacgggggactttgccatggatggctcctgagctacttagtgggaaaagcaatatggtgtcagagaagattgatgtctactcattcggtatagtcctgtgagtatttcccacatggaatgaaccctatgctgatatgcattgtgcttcaataataggaggaattgtgaacaacactttacgtcctcaaatcccaacttggtgtgatcctgagtggaaatctctaatggaaagttgttgggcttctgatcctgtagaaagaccatctttttcagaaatttccaagaagctgaggagtatggctgcttcaatgaatttgaaatagtcaattgatcttgaataagttaattgaccttctcccgttgtatgtagcctagaattggtaaaagggaaataaggtgaagaatggttcttccagttcaaggcacctaccaacaagcttagctttaaaaagggaaaaaataatttaaaggagtgttcaagcttatccaagcttgtatcgtaatatcatgccttggtttagtctaaaaatgttttttgtaatgttgcctttaatggtattttccttggtgcagttacttgcactatagcatggattctctcccagaagcagcttggtgttctgaagaaagctacatatatcactcttttttgaagttttacacgtgatcagggtgatgacaactatagctgtggctttaccatcacaaatgaaccgtgccttctggagagatgtgtacataaaatcaaccaacgacatgcctcctgtgctttcacatgggaaggataatgatgaattgtgcttcccattttgatggaacaaattcaatttatcatcgatattttgtttgaattgctttatcatattgatataccatattcttttttttttttgaaaggagatagaccatattctaaatggcatgatgaatgtgcatacttaaagatgtgtttaagctctcgaagctgtataaataaaggtaatttttccattaaataaacaggaaattcccccccccccnaaaa

SEQ ID NO: 110429 - DNA, 794 bp, Glycine max
  Clone ID: PAT_MRT3847_70729C.1
ctacggctgcgagaagacgacagaaggggaatgacgagccgtaagaaatttggaattccttggcctgaatgcaacgacggtctgtcctacgacgacgtcgttcgagcctctgatgccggggcgacactcatagagttttactccaccaagtacaagagttctgctcccttacaaggttggttgcagcgaataaaaagtgggcagataacagttgatggaggagttgttactgattctaacacagtcctcagagttggatcaaagctaatctatcatagacttccatggaaggagccagatgcaccgcacatgatcgacgtcttatatgaagatgatgacatgattgctctaaataaaccgtctggcctgcaagttttgcctggaggtctctaccagcaaaggacaattttaacacagcttcaatgggaagccaacaatcagggtacctgtgaaatgcacaaaaggctgcatcctgttcccgtacatcgcctagggaggggaacttcaggaattttattatgtgcgagacaaaactagccagagctcgtcttgcatctcattttgctgacggaacttctcacgttggaggaaaaagagatacaaagcaggaacttgggaagattgcaaagatgtaccgagctcttgtgagtgggatagttgagaatgacaaggtgactattaatcaaccaattggaatagtaaaatatcctggtgttgctaaagggttatacgttgcttctgaatcaggaaaaccagcactcagtgtagtggacattctagagacgaacatacaa

SEQ ID NO: 110430 - DNA, 548 bp, Glycine max
  Clone ID: PAT_MRT3847_7072C.1
tgactagtttagggtgtgccacaccaaatccgcaacagatatacacgacgtcatcaactttatcggagctgcaccaaatctgcactaactttgtcaccatcacgactagaacaaacactgcgatgggttcacgtttaacgctccaaaatcctcatcttcatggtacgctcgcaccaaatctacaatgacaccgagttcgttgaagcctagatctacgacactagattcctcaagatctacatttgtttcaattccttattgtttttctttatttgtttatgtatttattttccctactcgctctttggtggaactttatgtttgtgtttatttgacgttgttgcgtttgttgatttcacgcagtaagttatcgattgcaaagtttttattgacaatgtgtagtttgagtgcctaggggattctattttgcctaggaggatccttgtgatatttttttttctccagatttctagtgttcacagagtttaacaggttttggagtcgggaaatgctatgaatttcagtgtgaaaatgttcgtctccaccat

SEQ ID NO: 110431 - DNA, 441 bp, Glycine max
  Clone ID: PAT_MRT3847_70730C.1
cttggcctgaatgcaacgacggtctgtcctacgacgacgtcgttcgagcctctgatgccggggcgacagggatagagttttactccaccaagtgcgagagttctgctcccttacaaggttggttgcagcgaataaaaagtgggcaggtttgatcatcgatgaatctgaaatagttgactacgtggaatatatcatctgaatggctgtcattaattagtgtgtcatctacagataacagttgatggaggagttgttactgattctaacacagtcctcagagttggatcaaagctaatctatcatagacttccatggaaggagccagatgcaccgcacatgatcgacgtcttatatgaagatgatgacatgattgctctaaataaaccgtctgcctgcaagttttgcctggaggtctctaccagcaaaggacaattttaacac

SEQ ID NO: 110432 - DNA, 512 bp, Glycine max
  unsure (1)..(512): unsure at all n locations
  Clone ID: PAT_MRT3847_70731C.1
ggaggacgcccttttcttttttattaataaaaataatatttcttttttactctgtacgaactattaacagggggttggctcaaacaattacttatctctttcaacacagatcgaatattctccagtatacactttgaaaccttacaacgtgatgatcctattatgcgtatatcatcctctactttactaatggaaggcgcttgtccagttgcctattttattaccgctcaaaaattgtctccgccaaaagcactaataggaccattttgtcactcctttgccacgactaaagtttgtcatccttttggcaatcagaatcttcaactggatctcttcacgaaacctttcgtcctctagtgaagagaaaaccacttccctatagattaaactttgaaagccccacagctctgtaagaatgactggaaggcatttccaataagccaagttccttcaatggttcccaacctattatctccctagttgntatacctaggaggaggcgccacataacc

SEQ ID NO: 110433 - DNA, 578 bp, Glycine max
  Clone ID: PAT_MRT3847_70732C.1
gtgtccgtgagcacagtgcggaattaatttcgacgagctcactcttacgtgcggccgcccttttttttttttttttttttttttttttttacagtaagaattcttattatttattatgaatgaagacgtaaaaaaaatcaaaagaattacgaagactatttgaaaattgaaagaatgagcactggtcaaagtcacctggtccccgaagggaagaaaaatcaatcctcttgtgaaacattcctctaggaacggtgggtgtgacattgcagaagtttctaatcgaacgtgtctcgcgcactactgctaaaaaaactccttcgctgtgataaaagcaaaagagtggtgtcaatttcttttaacgttgtttccccataatttcttccataaccaatcttctaaatctgtttacggtgagaaagcacaaatagatatgctcttcaagttcttccaacatatccaaaaagttagattcgttgtcctgaaattccttcacaacccgcttcaatatttcacacttacagtaattcttcacacaaatatcagcaacctgtctccaatgttcaacctcatcatctaac

SEQ ID NO: 110434 - DNA, 425 bp, Glycine max
  Clone ID: PAT_MRT3847_70733C.1
attacaaaatggaaaacatatatgtaaaaagaaaaggccaccaccaaaggtgatacctacaatactcctatatatagtttattgctagttaattggtagaaggggaaaaatgagcaagcaaacagtaacaacaacacgtacaataatccctttgaaaaactatagatgcaaattcttggttatgtattaagggataactcaattgaataagcaaatggcagagttattataaatcttcttatatatgtttatgattcctaagaagtaaaaaaaacttctttgcttatgcttttctagtcaatgatatagtaatattgttgaacttagtttgctccttagacataccatcagccaagaggttttggtagcgactaaaaacctcttcaataatattttccgccaattgggtaactaggataggttct

SEQ ID NO: 110435 - DNA, 301 bp, Glycine max
  unsure (1)..(301): unsure at all n locations
  Clone ID: PAT_MRT3847_70734C.1
gccagntggatttttatcccactttcgtgtttaattaagagctcatgttgctttaatttctgtactgttccttgttacctagtttgatctgcacgtgacaactatgcttaattagcactgattacctaggggtcgcaattcgaatatccttgtcttgtaacatcattagcatcgacctgcaatgctagcagctggaatgctttccctttggtatagcttctctgttatgttcatcgcactggactgatgcacttccctttgactcggttacatggaatagagcgcatgttttttatttgat

SEQ ID NO: 110436 - DNA, 211 bp, Glycine max
  Clone ID: PAT_MRT3847_70735C.1
acccccttctcctgtgatccccccttctgtgagtgactactactacagctgtggtgatactgctacttgtcgctctatcttcactgtctaaaatgctcgcttagaacggggttcctgtcctctcgagggggccacccgctccccagagctcttctccatctgttccatctactatgccttctcttgtttttatgcctcacctaggctccaa

SEQ ID NO: 110437 - DNA, 763 bp, Glycine max
  Clone ID: PAT_MRT3847_70736C.1
cagaatcacctgcacaggcacaagaagatgaagtgagtaaagtgggaactaagaaggacatatttttgagattaaactatgaagaagtcattactgcttgggcaagtcaaggttctccatggactaatgggaccccacctaagttcttcaactctgatgattgctggctagacttcttttttcttatagtatcatagccggtctcttatctagctaaaggaggaaggttgtgttacgtcatcagtagccaacgtaaaattcgttgatatacctcaaatccattcatagtggggttgtgttatgccttcggtaaacaataatgtcaaattcgtcgatatacctaaaatcactcatagtctcatatctggctaaaggagaaaggttgtgttacgtcttcagtaaccaatgtaaaattcgtctatatatacctaacatgaatcactcaaaagaaagctattgttttttattttaaaaaaagtctcaacaagaatgcagctactcaattgtattgtatagggttcgaatggtgggaatgcaatgcttatggggcagtggaaggcatgcagatgggggaagggaagcaagagtgtcaaggtaccgagagaagagaagaacgcgttattgcaagagttgaagtaaagttgaacgcggagtgaaagatttgaacacccctgtgttggataggtgccgaatgagcggaatcatcaatgctgtttggcgggattgatcatcaaagtgatcaaataaatggttaacttttcca

SEQ ID NO: 110438 - DNA, 479 bp, Glycine max
  Clone ID: PAT_MRT3847_70737C.1
gggaacttggtcggggcacaagctgcggcgaacatgggttggaaagagagtgcagtatgcttgttttcgctggggatggtgcattacttggtgctgtttgttacgctctatcagcgcttgtccggtggagatcgccttccggtgttgttgaggccggttttcttcttgttctttgcagcacctagtgtggcaagcttggcttgggaatccattgttggcacctttgatactgcttccaagatgctcttctttctctccctattcctcttcacgtcactgatttgcaggccaaccctgttcaggagatctatgagaaggttcaatgttgcttggtgggcttattcctttcctattacagcacttgctctggtttcagcggattatgcacaggaagtcaaaggaacattttcgcacatcctattgctctttctgttagccctttcagttcttgtctcccttgctctaacgttgttcactct

SEQ ID NO: 110439 - DNA, 400 bp, Glycine max
  Clone ID: PAT_MRT3847_70738C.1
ggggggagcaaaaccttcatttttgttttccaaaatatgcccctcctcaatcttattagaaaattctaaaactataaagggctgttgggccttaaaacctccttataaattaagatgggcccaaactgcaaaagcttgacccagtttgaaggctgtcaaaaagctcccaaactaggcatggcagattctccaacatcaaaatttgggaaaaaaacattctacccttttttttttgggaaaacatcaaaataaattgatccccaccttcagaaggcctcatcgactcattgggatgcttaccaatagggcccacaacaaaataggagcacaaactttttctccaaatgacaggttggaaaccccaggggtggaacagcagggcaaaaaaaatacgccccaa

SEQ ID NO: 110440 - DNA, 380 bp, Glycine max
  Clone ID: PAT_MRT3847_70739C.1
cccacattaaattttggggggcatttttaaataaaggggggctttaacaacacaccactccttaaaccatcaatattccaccaaaaactgtcctgccaacctacaacaaaaacactgaacaaaaaatcttcaacaaatacaccagccccatatgaatattgtcacactgaccaacatcccttccagagaggggaacttatattaactccaatcccaatcaaacctcttttacctaaagcccatttcatgcctcttaaaccaccatcctttgaacttttgtgagccccattaccaccggaaccacaccctaagccaggccttccatcaggaccacccccaaaagaaggaactaattcagcaggagcatcaccattgtcacc

SEQ ID NO: 110441 - DNA, 456 bp, Glycine max
  Clone ID: PAT_MRT3847_7073C.1
ggaggaaactggacaaaaaaatatccaagtcaaaacgaaaacaaaaacagccacatcatcaataaaggaacaaacaactattcgggatataaaaaaatggcttgtcccacccctttgaattttaactttgcctgggactccccgacccagggttaaactcgaaagaccccaaagccaacagcacccccgacaaaaacaagtcctttggggatagcagcaatcgggaatatctcaccagcagggttgcccggggaaaaaaaaccccctccttttcctttcccattggagggagcggctttcacggagcccacaaccttaacaaagcacttttaagggctcaaaggacccccaaaaaaacaaccccatgggtagccttaagccccccaaaggaatttatgcctctcacgggaaccactcttttttgggtcttgctaggggagcccacgagggctccgg

SEQ ID NO: 110442 - DNA, 484 bp, Glycine max
  Clone ID: PAT_MRT3847_70740C.1
cacaaaaaaagaacacgaaactggagcaaaaagcaacactcgcctgtgctgtttctcttattctcgtaccgggcgctgccctacgcggggctgctgatgtctccaccaacaacagcggaagcgacaacagtgaaagcaacgacagcggtcaagtttcgacccatactaaagccgtgcaagccgtgtgccaaaactccgacgacaagaagttttgctccgacactttaagctccgtcaacacctcggacccaacggcttacgttaaaaccgttttgaaaaaaacgatggacggcgtcatcaaagccttcaacctcagcgacacactcaccgtcgaacacagcaagaccaactcctccgtcaagatggccctggaggactgcaaggacttgttagacttccccatcgacgaattgcaagcctcgcaagtcctagtcaaagacaacaacgtctacaacatcaacgacggcgtgtgcgacctcaaaaa

SEQ ID NO: 110443 - DNA, 1161 bp, Glycine max
  Clone ID: PAT_MRT3847_70741C.1
tggaatatggaagttacgactacaggcatatgctgagtgacggtcctccaaattcgtttcattgcatggatagtacaggcatgaagaaaataactgtagagaagtgtacaggcatgaagaccataattccatcctgtgtgctatttcagtttttagctgaattgattgtgttcagttgtcatacactgctaaatattataaggccatcaacaaccacaagtttaccaaaactccgcattttaaggataaggggatgtaatgagctagaggaaatttgcggaagcagtaatgagggtgatggagcagtactggatgagattgcttttatgaaattggaggaattgacattgaacaacttaccgaggctcacaagcttttgccagggaagttacgacttcaggtttccatcactacaaatagtacgtttggaaaattgtccaatgatggagactttttgtcagggaaatataaccacaccaagcctcacaaaggtggaatatgaaagttacgacttcaggcatacgagtgaagatcatcggcgtatgctgagtgacggtcgtccgcatatgatgagacaatataattggtatggcgaccttaatactactgttagaacagttttcactaaaaagtatcgagacatggagaaactggttatcagacgagacaactgtaattggaagttcatatggcctaatcaagtgactccaaattcctttcctaacttgacgcaaattgacatttcttcctgtgaaggccagtatgtctttcccatccatgtagccaaagtgcttcggaagctccaagttcttgaaataagctgctgtaccatagagaatattgttgaagaaagtgatagtacttgtgatatgacggttgtttatcttcaagtacggtattgtcataatatgatgaccatagtcccatcctctgttcagttttattctttagatgaattgcatgtgaccaagtgtagaggactagtaaatattataatgccatcaacaatcgcaaacttaccaaatctccgcattctaagtataaagtactgttttgagctagaggaaatttatggaagcaataatgagagtgatgaaccactgggcgagattgcttttatgaaattggaggaattgacattgaaatccttacggagtctca

SEQ ID NO: 110444 - DNA, 210 bp, Glycine max
  unsure (1)..(210): unsure at all n locations
  Clone ID: PAT_MRT3847_70742C.1
attttgtcaagggttagagtatctttncagattcttacactgatcaactttaattcattactctagcccaggggacttatcactctgtgtatcatcataatgtttataatgtaatttcccatctaaaataaaacatttcttgtttattgattactttctcatctacattaatcctcatattgtggcatcatgctactcttccattacatt

SEQ ID NO: 110445 - DNA, 707 bp, Glycine max
  Clone ID: PAT_MRT3847_70743C.1
tcgcgatctagaactagcttcttgccagggtgttaacttggtttggcttggtaagctgacctacatctacaatcactcaaagcctataagcagtattatatatattgggaatattttgttttatcattgtcgtccaaagttcattaataatatttaggaagttcgtgtcacatttccaaagtcacactttgaaaatgtaataaggagatctatatgtttaagctgttcaaaggataaccctatctaaagcaatttttaataataatcgttttagcaccaaaacattgaccctaacccttggtggagcaactaggacttacaaggtgcatgcctatgtatacaacacaatatttgaaattaccgaaatcgtttccagttgtcgactgcgtactataatatgtatcccatcttagaagtatagaaaaccactcttttgacttttgttaaatcaaagataaaagtcatcatgaatttctcattctactgaatcgagtctcgacacataatcacagataaatggattttaaccattgagaatcatactttgtaaaccttttcaaataacagaggttgagataaatgcataatgggagagttaatttcttatatagagtgattagtagaatctcgtttaaagaatgcttacgttatatccactatacttagaatgagtcatgagaaataaccaatgaaatcttcttgacatg

SEQ ID NO: 110446 - DNA, 825 bp, Glycine max
  Clone ID: PAT_MRT3847_70744C.1
gtaccgcctgcaggttacccggtccggaaattcccgggttcgactagggtttgatttcgttgttcgattccgaaccaataatgcgacgcgaacgttaatggagaaagaaggagatgcattagtggatcctctcgccagctattggggactttccctctttcctcaaccatctctcccaccctccaaaccctacaactcagaccaagatcttcacatcatccacactcacctcagatccatggccttgcggagtcctgcgaaactgatgcagcaggccaaatccatagtggatggtaaccctcaactgttcaacactgaaaatttgaacgatccaacttctcagaatactaatgttgccgaagaggatggagaatttcgtcgaaacccgagaccagggttagggcttaaacgtccacgcttctctatgaagccaactaaaaagccatctgttgagagtttgctaccaactctggaccttgatagcctcaaggatccggcagacttcttcatggctcatgagcgcttggaaaatgcaaaaagagaaatacagaagcagctgggtggagcctcatttgagtcggatcaggataaggcagccgctagaccacgacaacgtcgaccgggccttttggggaatgatcaattgtcaatcaagtacaagcatcggtatccaaaagaaacctcagatgatgttctgtcctctcaagagacactagggtctcggagtctcgtcctgtgaccgagaacactgacaaaggtgaatcttgtatggcatcattggaaaaagaagtaatagattcatctggtactgaagggaacaactcg

SEQ ID NO: 110447 - DNA, 363 bp, Glycine max
  Clone ID: PAT_MRT3847_70745C.1
ggctcgagacggtgaatgacgatcccatgcccgcagaataacgattagctgccgaagagggaacggacacggggcggcatttaaacgggccctcccaagaggaagacgccgaaagctcaaccaatgagcctactgctggtgaccgaaaggcactttttgaaccaataccttcctggccacagcaatagcttcatgagcctagtgcatcacttgcaagccatttgattactccatctgactacatggagcaacgtctagagctagcaactcgaggagcagatttgccaccgacagagactgatgtaactggaagagaagaggctgattctagagctggtgttcctgttgaaggtggcaatcgtg

SEQ ID NO: 110448 - DNA, 235 bp, Glycine max
  Clone ID: PAT_MRT3847_70746C.1
cacgagaggaatatggatatatatagtgtctccaactcttggggccgtggctggaacatgggtatacaacaccattaggtacacggacaagccactgcgtgagatcaccaagagtacctctttccttaaaggagtagggcgtagtggtagctctaggtgatttatttaaccaaattatgctacaaattaaggtgtattcatgtgttattttcagaggagtaacataatttggcaa

SEQ ID NO: 110449 - DNA, 623 bp, Glycine max
  Clone ID: PAT_MRT3847_70747C.1
ggctggaaggattccattgtgactttacaaaccacaaaggcattgcctttgtggtcagaggacttagcaatttcaagcagatgcattgaggcaattgcctcaaaggccttaagccacccctcaaaggtgagtttgtcacacagccattcccggagattgaggaatgatgtgtcttcatacaacgaaaccgaaagcctgagacacaaatcaacaagcaagggatggtgggctgaggatttagcagatttgagcatagacttgtattggagaaccatgatggctatcaaatctggtggcaagacaccctcaaatctcattggtgatgcattgaaaatttatgcatctagatggctaccaaatataaggaagaatgtgcataatgtcaagagggagactgaatcagactcagattcagattctgctagtgaagtgaattcaaagcataggctgcttttggaatcaatagtgagcttgcttccagcagagaaagggtgctgtttcttgcagcttccttcttaagctcttgaaggctgctaatattctcaatgcctctgcttcttctaaagtggaattggccacaagagtaggacttcaattggaggaagcaacggttaacgatcttc

SEQ ID NO: 110450 - DNA, 497 bp, Glycine max
  Clone ID: PAT_MRT3847_70748C.1
agagactaaaaaaggtgaggaggaatgcttatgagatttttattgaaggatttgtggctacgaacatggggttgacgaaaataaaaaaagggctgaaaacgctatataataaacttaaattcaaaaagatagataaatagaacgaaaataataaagattcaacaatttataagaataatccaatgattactgaaacaaccatttacaattcaatcgataaattcagtaaatcgttcattgaaaaaaaaaaaattaaataatcttactgctaaatgaaatgcttttataaaaataattcaaaaaattaaaaagatgcttgttatttcataaacaaatattctttcaaacaaaacaacgtatgatagtaaaaggcttcaattccaaaatataaaattgctgatattacaaagaacaagaaatgctcgcttaactcttaaataacattcttttttaaaatttttcatgaaaacgatctacataaatatatttctatatat

SEQ ID NO: 110451 - DNA, 506 bp, Glycine max
  Clone ID: PAT_MRT3847_70749C.1
gatcagtggtttatctttatcctgttcagattcgaacattttggaatacaaaacttgtttcttcttggcaacgccttttgttccccttaaaccattttctttcttcctttcattagttttcgagctgtactatcaataattccaaggatttgtaataaaatagggtgggaaagtttagcaagttgctattggttgtcaaatcacggaagatcaatgatccttgaagcaaattaaatgctaattggaaagatgatcaaggaatttcatatagtttagttgtttttaactgaaggctttgataatagaaacccaatcctccaccacttctcagtcaggactcaaagaaaggaacaacataaatatgcagttccataaggagtacctggatttgattttggtcccatccgggttgctgatcatgtttgtttatcacctcttcctgctttgcaaatatgtcaatcagcctcacactacagtcatgggatttgaggacaatgacaagagaa

SEQ ID NO: 110452 - DNA, 510 bp, Glycine max
  Clone ID: PAT_MRT3847_7074C.1
cacactctcttaaccaatccggggatttcgccctctgcaaacgcctctcttccattctgcacaaagtaatggggttttcgaaggaacagcttcttgcacgattgaaggagcttcttattaatttttcccagtatgagcatccggctattttgacagtggaggaaggggaaaagtatgttggacatttggggggtggagtgagtaaaaatttgtttttgaaggacaagaaacagcggttttatcttgtttctgctttaaaggataccaaagtggatataaaagtgttatctcagcggcttggattacgaaaaggaggtctaagaatggtgccttcagaggctttaggtgaaatacttcacgtgtccttgcgttgtgtcactccatttgcagtggagaatgaatctgcacaagatgtttcactgttattggatcaagggttcaagactcaggaattctgcttcttgcatccgctatcacatgacatgaccatatctatcaactctaatgatc

SEQ ID NO: 110453 - DNA, 4272 bp, Glycine max
  Clone ID: PAT_MRT3847_70750C.1
taatattcgtggaagtcatgtggcctactgtcctgttgttcattcatttgctattgtgacatccaattctggtttcattaatatgggcaaaacatggaagattactgtttctgcgttgatgtcttggatgtggaatcagtcttcaccgctagatgcccgtttgtgcggccttctttgcttatctccagagcgaatatgtgtatccacgagacaagcgccgcgaattcgtttccggcttcactggaagtgccggctgagcatttatattttttttgtctctagtaaggagactgagaaaacagaactatacaaaatggaagatacactttctgcgttgaggtccttgatgctttctcagtctcaaacacttgatgcctttgtacttccttttaaatatgatgcagcagaatattgatatattatatatgctgtgcatagtaatttgaaggaataaccattcccaatgatatctaaaatctagattacagtattatggatacggaagacactaaaattacgctgaaccatctttaagttatttaacttttcaactccaaacacagctcatgcacctacaggttcagtggctttcttcagccatgcattttcaacttcatccaaatatggcgccagaatattcctacatgtggcgtgataggagttcagccaatttatctcctcgggacttagaaggttcaggtcaatcaacttcgtctgatatggtgcccaggtaatgtgttcaaaagataagtaacctctatcaccaaaattgaaagttgtatcagcctccttgacaataagcacattctccaatcttatcccaaactctccatcctcatagtaaccaggttcatctgtaacagtcattgaagattgcaatggtacatttcgagcctgaggtctgaaactgattaagtgaggtccttcatgaacattcagataggacccaattccatgaccagtaccatgtcgataatcaagaccatccttccacaaaggaattcgggcaagaatatcaagagaatgcccatttgtcccattgggaaaacaagtatttccaagaaaaatgtgaccctttaagacgagctgcttgactctctttctactgagaagaatgctttacctaaaacaaatgttcgtgaaatttctgatgtaccttctaattatgcgactcctgaatcaaaaacataagaaaattctaatgaccttatagaagttgatccaggtttaagttgttattcaatgtatgctaaattgaaccctaataaagaaataatgtgtcaaacaaatttgattctagggtaagttttaaataaatcggtggaattgcatagatgaaaaaaggcatatctttttgattttctaactacttttcatttttttaaagggggtaattagttttcttttgaaaatcgtacacattttagggacatttttttgcatgattaaatgcatgaagacttaggttggtattggatgagattaaaaatggatattattaaggttcaacaagaagttttgaaatcatttagcaacaatgaaaatagatgtagtgttgctgaggaaggttcggtttatttatagatctatttaattcgttaagcaagaaaaaattttgcaaatgcttggcatcatctatcaagatattatccttgaaaagcttgaatgtactctgtagatggaacatcaggtctaatacgcacagttcctgatggtagtctaatttcatccgtattagtgtattatgcactagtagtaacaggctacaaagctgattgaagtgatatttttcttgatggacctactgggaaagctgttgttattgttgacagaattgagttttcaatggagggaacgcattttctatgatgggagattgatggaattgggtctgatcgctgcttcaagcgagatccaagcctgctctagacgacacccgaagctacaaagatccaattcgaagcatcagtggtgacaatgactacgttgaagacttttctcccccgttatggtgcagtttgggtatcaacatcatagcactttgaggtttattggtgtggttgttaagtgttcgacagatacaatttttgtcttcacttgtaaaggcagatgagttagtgtcaagctaaaaatattagaacgggcaatgactcagtgtcggaatccttagcggccttagtttccacagctggacggtgtattgtgtaccccgagaaggagaatgggtgttggtgctatacacatcgctatgtcctagccctgccaaaaatcagctgcaggagggagcattcgccaatcacaccagatacggctatggtagacaaagtggcagtaggagggaggagactgagaaaacagaagaaaacaaaatggaagacacagtttctgcgttgaggtctttgatggtttctcactctccgccgctggatgccttagtggtgccctctgaagattatcacctgagcgaatatgtgtctgcacgagacaagcgccgcgaattcgtttccggcttcactggaagtgccggcttggcacttataacaaagaaagaagcactgctgtggacggatggacggtattttttgcaggctgagaaagaacttagtgctgggtggaagctaatgcgaattggtgaagatcctgctgtagatatctggatggccgataatttgccaaaagaagcatccgttggggttgatccctggtgcatttcaattgatactgctcaaagatgggagcgtgcttttgccgaaaaacagcagaagctggttccaacctcaaaaaatttggtggatgaagtttggataaatcgcccaccggcagagataaatgctgttattgtacatcctgtgaaatttgcaggtcgctctgttgcagataagttgaaagatttgagaaaaaagcttgtacatgagcaaacccgtgggattattttcacagcacttgatgaagttgcatggttgtataatattcgtggaagtgatgtggcctactgtcctgttgttcatgcatttgctattgtgacatccaattctgctttcatttatgtggacaaacaaaaggtttctgttgaggtacaaactcatttagtggagaatggaattgaaattcaagagtatacagccgtaagctctgatgcgacattgcttgcaactgatgagctagatgctgtatctactgccaaggctgctttagccgaaacagaggccagaaaaattcccagtgaaattgataagagtgtaaatggtgaacatcaagcagaagaaaatagtaatgacctcatatgggctgatccagtttcatgctgttatgcactgtatgcaaagttgaaccccgatacagttctcttgcagcaatcacctttagcccttgcaaaagctttaaagaactcggtggagttggatgggttaaaaaaggcacatattcgggatggtgcagcagttgtgcaatatcttgtctggctggataagaagatgcaggatatttatggagcttctggttactttttggagaaggattctgtgaaaaaggagaaacatttgcaatctttgaaattgactgaggtgactgtaagtgaccagcttgaaggttttcgagcatcaaaagaggtagagctaactgaacaattaagtatatatttggatatgcttttcttagaaaaaattttgctcaagaaaaaaaagtggtgattccaaagattttggcttctgaaataggcagtggggaataaccattttcagctttcctagaaggctgatattttaaagttgttaaagtttttctttatagaaaagaactttcattaagaagacaatatttagttattagacattgcagaggtggcattacctgtaatttaggtatttttgttttaaaattgattatcttaagttgtcaggaaaagactaaattatgcacaattttgttcctatagtgtgctgtttgattggaatagattcattaggattgatcagaacagttacgggtatttcctggaattctaacttaaaatgttcatctcccttgcctttgatactttttcaaaattttgttttatagacttattattctttatgatcctccctagaatctaatcatccattgtatgcttaagtagtgaatgacctttccagatgttgcgtacagtgtttctgtagattctgcatataaggtggatttaaaatgttttgacctgtttgatatgttatatgtacaaatgctgcgatgttaaggaaggatcacattttttctttgcaacttcatcaggccaat

SEQ ID NO: 110454 - DNA, 1242 bp, Glycine max
  Clone ID: PAT_MRT3847_70751C.1
cccacgcgtccgaggagactgagaaaacagaactatacaaaatggaagatacactttctgcgttgaggtctttgatgctttctcagtctccaccgcttgatgccttagttgttccttctgaagattatcaccagagcgaatatgtgtccgcacgagacaagcgccgcgaattcgtttccggcttcactggaagtgccggcttggcacttataacaaagaatgaagcactgctgtggacggatggacgatattttttgcaggctgagcaagaacttagtgctcagtggaagcttatgcgtattggtgaagatcctgctgtagatatctggatggccgataatttgccaaaagaggcatccattggggttgacccttggtgcatttcagtattagtgggtcatcatttttaggtacaagatccatcttatttataaacaatattagggaaaagtaaaagagctgatgcatgcagtgatgccgtgcggatagacaatttaacgttgtacacgccctcaaatatgatgcagcagaatattgatatattatatatgctgtgcatagtaatttgaaggaataaccattcccaatgatatctaaaatctagattacagtattatggatacggaagacactaaaattacgctgaaccatctttaagttatttaacttttcaactccaaacacagctcatgcacctacaggttcagtggctttcttcagccatgcattttcaacttcatccaaatatggcgccagaatattcctacatgtggcgtgataggagttcagccaatttatctcctcgggacttagaaggttcaggtcaatcaacttcgtctgatatggtgcccaggtaatgtgttcaaaagataagtaacctctatcaccaaaattgaaagttgtatcagcctccttgacaataagcacattctccaatcttatcccaaactctccatcctcatagtaaccaggttcatctgtaacagtcattgaagattgcaatggtacatttcgagcctgtggtctgaaactgattaagtgaggtccttcatgaacattcgaataggacccaattccatgacaaatgggcattctcttgatattcttgctcgaattcctttgtggaaggatggtcttgattatcgacatggtactggtcatggaactcggtcctatttgcatgttcatgtcgataatcaagaccatcctttgtggaagcccacgcgtccgcccacgcgtccg

SEQ ID NO: 110455 - DNA, 787 bp, Glycine max
  Clone ID: PAT_MRT3847_70752C.1
gtactagtggttcatcatttttaggtacaagatccatcttatttataaacaatattagggaaaagaaaaagagctgatgcacgcagtgatgccgtacggatagacaatttaacgttgtacacgccctcaaatatgatgcagcagaatattgatattacagtaaaaggatacggaagacactaaaattacgctgaaccaacgtaagttattaacttttcaaatccaaacacagctcatgcacctacgggttcagtggcttttttcagccatgcattttcaacttcattcaaatatggcgctagaatatctctgcatgtggagtgatacgagttcagccaatctatctcctcaggacatagaaggttcaggtcaatcaacttggtctgatatggtgcccaggtaatgtgttcaaaagataagtaacctctatcaccaaaattgaaatttgtaccagcctctttgacaataagcacattctccaatcttatcccaaactctccatcctcatagtaaccaggttcatctgtaacagtcatggaagattgcaatggtacatttcgagcctgtggtctgaaactgattaagtgaggtccttcatgaacattcaaataggacccaattccatgacaaatgggcattctcttgatattcttgctcgaattcctttgtggaaggatggtcttgattatcgacatggtactggtcatggaattgggtcctatttgaatgttcatgtcgataatcaagaccatcctttgggaagcccacgcgtccgcccacgcgtccg

SEQ ID NO: 110456 - DNA, 601 bp, Glycine max
  Clone ID: PAT_MRT3847_70753C.1
aaaagtgcatttcatagcttaaagcatgatgtactgccatatctagtccggagccaactggttagttgttaaaggtttttgcagagataggctagggaatgttgtacttttaaggattctaaccttgttcatattttctaaacgagagttagaaatcagaagtattattaaatggcataccacaagcagaagaaaacagaactgaaaaggttatttctcaaagcaatcaacaaatgctatctcaaatactcgctaatgcatctgaaccaacctttcatctacgacatgcactgggtccttatggttctacttttgatcgaagaacccacaaatgctgtgtgtatattgctggaagcagcaaatactgtgctcgcttaaattctatacaagcatacactgacattaaccgtgatgtgagttagttaatgttatgatctttatcaggcacttgctattgccttaaattttttctttgggtatacttctggttgcttgagcgttattcattttttactgtgacaggtgataggagaggctagtcgcattatcagggtattccttctctactctaaacaacattatccatcaatctggaggcatg

SEQ ID NO: 110457 - DNA, 1885 bp, Glycine max
  unsure (1)..(1885): unsure at all n locations
  Clone ID: PAT_MRT3847_70754C.1
aacgaattggccatgttgatagcaaggttgtacaccgggtgccatgacataatatctctcctcatcatcaccctctcatcattcatctccctatataagactttcctattcctccttcttcctcattctccattttcacactctctcatccgattcgggtcgggtttgtgttatcggaaccttcaccggaaaattctcagtcgacgtagcgaaaatggcggtatccctagcgatgaggctcgtgcggcggcgatcgccaccgcttctctggcggcgcagcttttctatgtcggcagtggacgccgaaaaggaagtcgtggtcgtgccggagcttccaccgttcgattactccccgccgccatatgtgggccccaccgctgaggagattctggcgaagcgcagagagtatcttagtccttccatcttgcattcatacaagaaccccgtgaacatagtggagggtaagaagcagtacctgttcgacgagaaggggagaaggtacgtggatgcattcggagggattgctacggtgtgctgcgggcactgtcaccatgatgtggtggaggccatagtcaaccaaaccaagaagttgcagcactccactgttctctaccttaaccatgtcatcaccgattgtgctcaagctgtggcctccaaactttcccaggatctcaaggtggtgtttttcacaaactctggaacagaagcanacgaatttggccatgtgataggcaaggtgtccaacgggtgccatgacaatatatctctaaggaatgcttaccatggtaatgcaactgggacaatggcagccacagctcaaagcatctggaaatttaatgtagtgcagagtggcgttcatcatgcagtaaatccagacccttatagaggcattttcggttctgatggagagaagtatgcaagagatgtccaagatatcattaactttggaacttctggaaatgttgcagccttcatatctgaagccatacagggagtggggggtatcattgaattggctcctggttacttgccagttgtgtacaatgccattaaaaaagcaggaggactttttattgctgatgaggttcaggctggctttggtcgcactggtagccatttctggggatttgaggcccacaatgttgttcctgacatagtcacaatagctaagggcattggaaatggcattccccttggtgctgttgtaactactccagagattgcagaggtcttaacccgccggagctacttcaacacctttggtggcaaccctgtttgcactgctgcagggttggctgttttgaaagtaatagagaaagagcagcttcaacagaacgcgtttgtggttggatcccatttgaaagaaaggctcactgccctcaaggacaaatatgaattaattggtgatgtcagaggaagaggcctgatgctaggagttgaacttgtcactgatcgtgaacttaaaactccagcaaaaaatgaaacattgcatgtaatggaccaaatgaaagaactaggagtacttattggtaagggtggttactatggaaatgtcttcagaattacacctcccttgtgtttcaccaaagaagatgcagactttgtagcagacgcaatggacttgaccttgtctagaatgtgaagcttatagccaagatcctggctttaataaaagtttattatatcataagagaaattgtattatgtcatgttcataactggtaaaatttacatagatgcagacttttatagctaaacacgaatctactatgatcgtgggatatgcatgagccaacaagtcgttgtctcttgttttgttgtttatctcttttcatggcattttatttgcttaatatcgttttcactggtgcctatcatttcccat

SEQ ID NO: 110458 - DNA, 1084 bp, Glycine max
  Clone ID: PAT_MRT3847_70755C.1
gtggagaatggaattgaaattcgagagtatacagctgtaagctctgatacgacattgcttgcaactgatgagcttgattctgtatctaccgccaaggttgctttagctgaaacagaggtccgaaaaattcccagcgaaattgataagagtgtaaatggtgaacatcaagcagaagaaaatagtaatgacctcatatgggctgatccagtttcatgctgttatgcactgtatgcaaagttgaaccccgatacagttctcttgcagcaatcacctttagcccttgcaaaagctttaacgatcttggtggagttggatgggctatatgaggcacatattcgggatggtgcagcagttgtgcaatatcttgtctggctggataagaagatgcaggatatttatggagcttctggttactttttggagaaggattctgtgaaaaaggagaaacatttgcaatctttgaaattgactgaggtgactgtaagtgaccagcttgaaggttttcgagcatcaaaagagcatttcaaaggattgagtttccccactatttcttcagttggctcaaatgcagctataattcactatcttccaaaggcagaaacatgtgctgaacttgatccagacaaaatttatctttttgattctggagcccagtatctagatggaacaacagatattacacgaacagttcattttggtaaaccttcgactcacgaaaaagcgtgttatacagcagtcctaaagggtcacattgctcttggaaatgctagatttcccaatgggacaaatgggcattctcttgatattcttgcccgaattcctttgtggaaggatggtcttgattatcgacatggtactggtcatggaattgggtcctatctgaatgttcatgaaggacctcacttaatcagtttcagacctcaggctcgaaatgtaccattgcaatcttcaatgactgttacagatgaacctggttactatgaggatggagagtttgggataagattggagaatgtgcttattgtcaaggaggctgatacaactttcaattttggtgatagagggtacttatcttttgaacaca

SEQ ID NO: 110459 - DNA, 423 bp, Glycine max
  Clone ID: PAT_MRT3847_70756C.1
tttggggttttttttttttttttttttttccaaaacaaaagtacaataaacttttttctctatctatctttcactttcactttaatcaaacaaaataaaatacatcatatgggttttttctccttactattatctttcctctcatccaagttccaaacataccaagctcaaagtagtttttacacaagaaaaacaaaactctcaccccccccatcatgaatgaagggtcagacccaaaagtccattatatcattttctcgacctttgaatattttcatcctttgatggcggaggggaggtaggaaaaaagtaacccgcctgataagatgaaaaaacaagttgggccggaacaggaacaacccccccccccagtccgggccaggctgaaaaaaattccatcccagggggggcccctttgaaaaa

SEQ ID NO: 110460 - DNA, 386 bp, Glycine max
  Clone ID: PAT_MRT3847_70757C.1
gccatacatccggctacgcggccgtagaagatataaagctacatagacgtatataagctttaatatactgattgatagtgttaaatgagggtcatgaaactaatcggcctcatgctacgaacgctctgttccaacacctagttacccaggggactccctttagaataagaaaccgaaatctgcacatgtgatatagctttaagactctctggcattgcacactataacagtattgcaaaggtatggttaatgacacttgccctgtatcctactaattaaggtcaggcacggcctttctaacattcatttgacctgcaaatctgattaatgaactctgtcaagttcatatatatgaatcacctttcaatcgtttccgatgagcggga

SEQ ID NO: 110461 - DNA, 248 bp, Glycine max
  Clone ID: PAT_MRT3847_70758C.1
gaaacagaattagaataatcccttgcgaaaaagcaaaaccctaaaccctcgcttgcactgttctgggtcctcctccgatctgatctcatcggcaatggcttccgcgtggagcagaatcgcgcagtcaacatcaatttcgtccatcagatcatccagcaaatccaacattcgcgcttcatcttcggtctccaaagcagcttcctcctcgtcgcctcgtcggcaaaccgtagtgaccaggatttcggggg

SEQ ID NO: 110462 - DNA, 1977 bp, Glycine max
  Clone ID: PAT_MRT3847_70759C.1
ggctcgagtttccacactctcatcagattcgggtcgggttagcgttatcggataacttcgcccataaattctctgtttacggggcgaaaatgacagtattcttagccacgaggctcgtgtttcggagatccccgccgcttctctggcggcgcagcttttctcgggcggcggtagaggccgaaaaggacactgttgccgtgccgtcgcttccgttgttcgattactctccgcctccgtatgcggggcccaccgctgacgagattctggcaaagcgcagggagtatctgagtccttccatcttgcacttctacaagaatcccgtgaacatagtggagggtaagaagcagtacctgtttgacgagaaggggagaaggtacgtggatgcgtttggagggattgctacggtgtgctgcgggcactgtcaccctgatgtggtcgaagccatagtcaaccaaaccaaaaagttgcagcactccacagttctctaccttaacaacgccatcgccgatttcgctcaagctttgacttccaagcttcccggtaatctcaaggtggtgtttttcacaaactctggaacagaagcaaacgaattggcgatactgattgcaaggttatacacagggtgtcatgacataatatctctaaggaatgcttatcatggtaatgcagctgggacaatgggagctacagctcaaagcatctggaaatttaatgtagtacagagtggtgttcatcatgcagtaaatccagacccttatagaggcattttcggttctgatggagagaagtatgcaagagatgtacaagatatcattaacttcggaacttctggaaatgttgcagccttcatttctgaagccatacagggagtggggggtatcattgaattggctcctggttacttgccagctgtgtacaataccatcaaaaaagcaggaggacttttcattgctgatgaggttcaggctggctttggtcgcactggtagccatttctggggatttgaggcccacaatgttgttcctgacatagtgacaatggctaagggcattggaaatggcattccccttggtgctgttgtaactactcctgagatcgcagaggtcttaacccgccggagctactttaacacatttggtggcaaccctgtttgtactgctgcagggttggctgttttaaaagtaatagagaaagagcagcttcaacaaaacgcgtttgtggttggatcctatttgaaagaaaggctcactgccctcaaggacaaatatgaattaattggtgatgtgaggggaagaggcctaatgctaggagttgaacttgtcactgatcgtgaacttaaaattccagcaaaaggtgaaacgctgcatgtaatggaccaaatgaaagaattaggagtacttattggtaagggtggttactatggaaatgtcttcagaattacacccccgttgtgtttcaccaaagaagatgcagactttgtagcagacgcaatggacttgaccttgtctagaatgtgaagctgagccaagatcctagctttaataaaagtctattatatcataaatgaaactgtattatctcatctccatagctggtaaaaattacatagatgcagacttatatagctaaaatagcagaccaatctactgtgatcttaggctatgcatgagccaacaactcgttgtctcttgtttgatgtttatctttccaaatgaatgagccaacaactcgttgtctcttgctttgtcgtttatcttttctcgtagcatgttattagcttaatatctttttcactattgcctatcatttcccatgaccccatctctatttacttattattgccaaaactgataatttggcaattggaagtttctagcaaataacagcacattcttcatagaaaaaaaaagttatttcgtttgctttggccagcttctattataaagtatgccccagccccacgacatgggtagagct

SEQ ID NO: 110463 - DNA, 498 bp, Glycine max
  Clone ID: PAT_MRT3847_7075C.1
ctttggccgcacttatgatcgctagctatgctcagctcactcctaatgattatgccatagtttgccctagagcgtagccaatcatatagtcaatcattatgcacgcactcattctcgaataacgcattggtacatccttgctgcgtttgcatttacatgactgctatgctaatggctgagaaggactagtgctactagatcacacaactttcttgttgagagataagactgcacttccatgctgtaaaccagttagaggattattggcggttgatgacatcagagcaacacgggacaaagctggcaatctggctgcataaccattggcacatatcttagctagtgcagctggagagcttgaagtatattggggtcggacaatatacacacccaaaggtgcttactatgactatgcactattgcacgccaggatgcagtaagtgccaatctctctagaccattacgcaacttcccacagctacttgctaaataccaagc

SEQ ID NO: 110464 - DNA, 332 bp, Glycine max
  unsure (1)..(332): unsure at all n locations
  Clone ID: PAT_MRT3847_70760C.1
tnnnnnnccgcccaaatttaagtcccatattaggtgggggcttcacttaaatttcaggtcccttatttaaggtttattggcctttgcacaccagggccaaccaacttcggattgccaattatttttggggagggaccttttaccgggccggccttggggggccttgggtagggggggcttttaaatattaaaaggctttggaggatttttagggggcctgggaaccgggggttgcttaaccttggggttcaaggccggggctttaaaactcttcaattttgggcccgtccttgaccttaagggaaatggttgaaggccaacttttcctttgg

SEQ ID NO: 110465 - DNA, 386 bp, Glycine max
  Clone ID: PAT_MRT3847_70761C.1
gatagcagcaacatacagagcattgggttcagctgcttaagttcaatccatgggtattgctttcatcctcagaaccaaagatgtcgaacacatacggcaactgcgactgacgctgacaagactatctgcaccaaaggaaacagctatggtgttattgtcgagacggataagagttacatcgagaccgttgtcatggaagttccaccagctgagcatgatgcgaagtgcaaatttggcactcactgcacttgcacggactgcacctgttgccattaaggaataattacgacaatgtcactgccacatgtttggcactacacatctcctaataatgtaatcttcgtacgaataaatctgtgtgctgtaaccctaaatgcacacgctca

SEQ ID NO: 110466 - DNA, 461 bp, Glycine max
  Clone ID: PAT_MRT3847_70762C.1
cgcattgcccgtgcatccacgatgcacatctacccttcacataaccttaaaaccctattccacagaattaggctaggtgtgaacacattattccttagggcacactgcacattgcacaaccttcagcgtctttttctttttttatcactggcctggttgaaccatgttatttctattatctccctaactgttggctggtcaattttgcaagcaatatctgataattctttaaaattactgatctacttattggtggacatgataattaacctatataagtttaattactctagcttatgttacattgcattctatactctactagggacttacattactggtattgaacaaatctaatttccttaacggatacacttcacgttgatggcatatgaggataattctgcttatgcctgccaccaaatcctttagactatgtgtcaataacagaaacctataac

SEQ ID NO: 110467 - DNA, 447 bp, Glycine max
  Clone ID: PAT_MRT3847_70763C.1
gcttgagcaatgctttgagacgatatggtgtatgactactgggttagttatgctgtcactaccctgtgccaatttaatttgaacctgtgggatacctttggtcaacgactcaatgtttgtatgtggaagcatggtttttcggggacatagatttacagtctagtttgtgggtctaagaatgttgaggatagctagtgttgtgttgctagtaaggaggtggtaaacgctgcctgtcgatacatgatagtagctgattcagaaacctcatcttctggtttctacctcgaagatatttgttttatggatttaggaaaatatttatttaggttatagttgtagctgcagcagaaatttgtacaggaaattctcgtgttacagacgtgctctgtaatataaaaacgaggttttcggatataggagggtaaatgccttgatagggagtcgttt

SEQ ID NO: 110468 - DNA, 787 bp, Glycine max
  Clone ID: PAT_MRT3847_70764C.1
ctaccgccctcaatagttggagtcactcactcagatctgactcttgcagagtcttggtttgcatctgacacatctactgggtaccttgaagatgctattgcaggttggggtatttggtgcaagcaacacaacataccatcctattctcaagatcaaaagaaaagccaatatttggttgatcaggaggacttattgccaacattttcttcaacttcccaaatccttcatgaccataaaaacttcagcactgccactagggacctatcatcatcacaaaatgatacacatgcagctgcaatcaagcatgattcttctcagaggagctatgcatctacagagtccgatgaaaggggtcattggaagagaatagcttatccatttgagttggtgaagcctggaggagttgaaggggaaacaaccctcaaagatataaatcaccagatgctgatgagtccatcaaagccaattccacaccctgtgggagattctctcactcattcatgcatttcaaatcgtgcttttggaatttcaggtaaagcagtggcagctcttactaggattcacactcagggtagaggctccatcaccattataaggaccaagggttgaagtgaagtgaagtgaaagctcactattgtataatagtatctctctttggattttgtgttatactcctcctagtgatggcttgatatagtttataccatagtttgaaaaaaagaatgttctcataaacaaaaaaaaagggtggttaccgaggcatgatgctaatttgaaattttgaagg

SEQ ID NO: 110469 - DNA, 398 bp, Glycine max
  Clone ID: PAT_MRT3847_70765C.1
gtccaccactattccaggggggactaaaagaaatacccccttttctccccgcggagggcatgggagaggaccttcatcgagctagaggtcaactttgcatgtatctgcccctggagagtgcacctccctgccttataagcaagacgcactttacatcatagacaacattggcaatgccttctttgccactgacatcatgctgacacgctgcgacgcttatttatgactaccaccactacctttttggtgctgatcccatgagtaccggcctacggagcatctgtacgccccatagattgaatgtttgctcaacttagccatttaattccatgaggctgcttttgactccttatagaagtgtgaccggcttgttagtgctcaacttgcttctgttgtgg

SEQ ID NO: 110470 - DNA, 189 bp, Glycine max
  unsure (1)..(189): unsure at all n locations
  Clone ID: PAT_MRT3847_70766C.1
ctccangatgaatcaaatgagaatgccctagatccaggtgctccttttgatccagtatagtgcccagttagttcttgagagaaactaatnagtgggangantgaatgtatcagaatncactagaagnaantgtgcatggtgctnatagtgncatntannnntnntaggtnggtgggcgngntganagtg

SEQ ID NO: 110471 - DNA, 305 bp, Glycine max
  Clone ID: PAT_MRT3847_70767C.1
aagtaggaaagggtgactttctgcctgttaatttcattgcatgaaagaactctgtagttggatttgtgttgcttgcacaccttcatgccgtgttcaaaggatcagctgtagcaaaccctggcgcatgtacagggggaattctgtgctcttccttgtacgagagacagatacccggaccctaacattcttttgttttataaaattacaaaagttggtgggaaccaccatatacaatatcatcattttgttctcaaacaatcgaatttaatttaaagatccccaaaaaaaaaaaaaaaagggcggtc

SEQ ID NO: 110472 - DNA, 173 bp, Glycine max
  Clone ID: PAT_MRT3847_70768C.1
actcattcttctattgaattgttggctcatcaagtatcccaattaatttcatgatgagactctgtgtgcacgtgtgtgcatgttaatttttattttctttatatttgccaatatttctttattatattatttaattacttaagcattactaatatttaccattcttatataaa

SEQ ID NO: 110473 - DNA, 379 bp, Glycine max
  Clone ID: PAT_MRT3847_70769C.1
aaacaaaaagcagctcctcaactttttttatgaaagtggggctttttgttttttaaacaaatgtttttcccccttcccataattttggggggggatactactagccctagaacttgttttggagtttaatggcaaaaccaaaaaagtgtttatgttgttttggggaaacaagggtaacattttttttagtcctttctttaaaaggcttgctgccctgaaagttaaagattcaacctttgaattggcttttttcaacaaggaattattcccttgtttgtttttgaccaataaaaagaaaaaggggtgtgggcctccaaggacaggatttttaatgttttttttggtcaaagcataaattaacctttttttcacattcttt

SEQ ID NO: 110474 - DNA, 424 bp, Glycine max
  Clone ID: PAT_MRT3847_7076C.1
gcttcccaaaccctattattaccataatttccattatcaacacctaagatgcttcaagatcaacctcccaaaatggactactagtactagagcttggtctgctgcccctggggtcgacctcaacactctcgaatttgccatttccaaggtgttagtttagcaccaaatgtctattatgattttcacaccaagggaaagacagtgatgctgttaaagaggcacttaatcagcttagtgaagttggttgggccaagaaatggagttctcagccatatgtttcatgtcgtacggtcagtctccaattaaaaatgtggcaaagtgacaactaaacattaagctctcatcaaccattcttggacataacatccatcatgtatacctgtccagtgcttccactactcattcatatgtaaactaattcatc

SEQ ID NO: 110475 - DNA, 2492 bp, Glycine max
  Clone ID: PAT_MRT3847_70770C.1
ggctcgaggaattgaattccagagagaggttcctctccaagcactactacaactacaaccatattagccatagccacctcttacttgtttcttctgatcacgccaacccaaaaatccacgtaccactctctcttcatatatgattcccggctcgacaatgcctccatatataaccaccttaaaactctcacccgcagaccccatgtcgcaggttccaaagccaacgctgaagctgcctcatacgttgtctcagtcttcacctcctcatacataccatcacacatagtttcctacgaggtttctctcacgtaccctttgtcacgttcgttggttctaataacgaacccttctacaaccttcactctccaccaagaaacctacgagggtgatccttatgctgacgtggcagatgaggttgtccccactttccacgcgtatgccaagtcaggcactgtggctgctcctgtgtgttatgtgaactatggaagagtggaggactatttgactctgaaggataaaaatggtgtgaatgtttcaggcactgttgtgttggcaaggcatgggaagatatatagaggggacattgtgaagaatgcttatgaggaaggtgctgttggggtggtgatatattcagataggaaggactatggtggtgaggaaaagtggtttcctgatgagaagtggttgccaccaagtggggttcaggtggggacagtgtatggggggttaggggacatgatgactcatacccggtataccactcactctatgatgacatcgtctggatggtaaaattcggcgatcgtatgtttcaaaggcatgttgcagctgctagtgtttggggtctggtagcactttggttagcagatgaggaattcctaccttttgattatctatcttatgccaatgagctccagcttagcgtggagaatctggaggatgagatttcaaataaagacataaatttgtcacctatattcaagtccatcaaggggcttgagaaagcagcaatcaagatagatagccagagaaaggaaatagaagctggtaaaggttggataacagggaagaaggaccacttgagagtgagagagctgaatgatagattgatgatggctgagcgtgcattcactgacagagatggcctctttggaatgtcatggtataagcatttgatttatggaccatcaaaacataatgactacggctctcaatctttccctggaatcgatgatgctgttaaaatggccaaaaatctacatactgcagaatcgtggcatcgtgtacagcacgaagtttggagagtctcaagagtcatcaaacaagcctcgctagttttattcggtctactatcatgaatatcaatttagttgtatatttcgattcatggtaaattatatctccgtaagaataaatatgtatatatgtgtgatgattcataaatctcaataactcaaagaagagatttaggattttgtttttccccgcttctctcatctgtcaaattcgagcatttatgaatcttggactagttctggtagttctcctctgtttgggaggttaggaggtggaggatcagactatgcatctttcttgcagcatgtgggaatcccggctgctgacatagcctttggaggagatgttgcaggatacccggtataccactcactctatgatgacttcgtctggatggaaaaattcggcgatcctatgtttcaaaggcatgttgcagctgcaagtgtttggggtctggtagcactttggttagcagatgaggaattcctaccttttgattatctatcttatgccaaggagctccagcttagcgtggagaatctggaggatgagatttcaaataaagacataaatttgtcacctatattcaagtccatcaaggggcttgagaaagcagcaatcaagatagatagccagagaaaggaaatagaagctggtaaaggttggataacagggaagaaggaccacttgagagtgagagagctgaatgatagattgatgatggctgagcgtgcattcactgacagagatggcctctttggaatgtcatggtataagcatttgatttatggaccatcaaaacataatgactacggctctcaatctttccctggaatcgatgatgctgttaaaatggccaaaaatctacatactgcagaatcgtggcatcgtgtacagcacgaagtttggagagtctcaagagtcatcaaacaagcctcgctagttttattcggtctactatcatgaatatcaatttagttgtatatttcgattcatggtaaattatatctccgtaagaataaatatgtatatatgtgtgatgattcataaatctcaataactcaaaagaagagatttaggattttgtttttccccgcttctctcatctgtcaaattcacttcgcaattcgaataacaagttgcaaaatatatttttttcatgcatggtacagaggctgccatagttctgtaataaa

SEQ ID NO: 110476 - DNA, 506 bp, Glycine max
  Clone ID: PAT_MRT3847_70771C.1
gggcaaaaaaaacaaaattggcaattaacttaccttccccaaaaggaaaaaaaatcctaataataataatcaaacccggtttagagcttttatccccattgaccatagattatccctaaaattcctgaccgtagataaaccctatatttcaccaacgccccaaataatatatggctaagcgtgaaaggaaaccccaaatcccatatttttccaaattcacgaatcagttcaagagtccaaaaggaatttcaccccccaccatagacaggggcccctgggacaaacacaagtagcaggccaactatcccccccacaaaattgaaaaaattacaacgccaccggtttcatcaacttgcccagcaataacacaagtgccttcgccaaagggggcaagggtttcaccaaggagcatccaacaaaacccccggaaaaaatgccgctaataaggccatttgcaggagagaatcctcctgaaacccccccttaaggccccacccaggatttgg

SEQ ID NO: 110477 - DNA, 594 bp, Glycine max
  unsure (1)..(594): unsure at all n locations
  Clone ID: PAT_MRT3847_70772C.1
ggtcgatagagaaaaagcaaaattaatgttggctatatatggaagtgcttggaagccacaactttgagtatcataaagtgagatacgtaatttaaattacctagtctgaattagtaagcttagaataattgttaaataatattaaaagtgtaatggcccgtggccaaataacaaacattaaaaccaacgatgtaaatgtattaatccaaatcacctaccaaggtaagatgttcagcttcaatcattgcacgatgaatatcgtattatttggcataggtaccacatgccacacaattgtttgttgggttcttgttttatttttctgccccataaagtcaattatccttttactataacccattttggattctcatgacatcaatgtatgacttcccttgcagctcgcgtgaaaagtaccctttgaagaaatcttctacactaatgctattgaaagttgcaggtctttcaagagtgatgaggctttgtgctggacctataactgcggncaatcttggactatgaaatgtagcaacgagaatcctttccttttctggattaactgtagctttatgttcaatgctccggtaaatacca

SEQ ID NO: 110478 - DNA, 283 bp, Glycine max
  Clone ID: PAT_MRT3847_70773C.1
aacaaaaacataaataacctctggacttccattgcttaatcaatacaataactaggtactgggctcgatctatatttattaaatcaactttttcatattctaccactgtttttttttctaaaataaataacctttggattcacctaattcttaaagcctcatcgctaaaactcccatttaaataatcaaaaggcttcctggcggggtgcttttctcaacccaaaggtttttgtatcttttaaaaaatatcttatttttagaaaatatccaaaaccctttgtgc

SEQ ID NO: 110479 - DNA, 1266 bp, Glycine max
  Clone ID: PAT_MRT3847_70774C.1
atggagcattggagccagactgtggtgaacggtgaaccaatagaaagtgtttcattctggtgcgagcataaagaggtattctggggccggcctattagcatggacgttgttcgttcacaaagaggtagtagtagagacacgagcccagaccgtgcgaaaatatgcaggatgaaccaaaaagtgaagccctttagaaaagttcaagtcgtttactatctctcccgaaacggtcttttggagcacccccatttcatggagctcacccttttgcccaatcaacctctccgtttgaaagatgtcttcgaccgactcatggctctccgtgggactggcatgcctttgcaatattcatggtctagtaaaaggaactataagagtggttatgtgtggtacgacttgggtctgaaggatataatacatcccgcagaaggaggcgagtatgttctcaaaggttctgaactcgtcgaaggatgctctgaagcagagagatttaatgtgagaaacaagcagcagggaattcatcaacaggcagaggcaaattacaattacagttacgattcgaggagtaaggcgttgggtgtgtgcaacaagcagcagcagcagagagagagtgaagagttggaggaatacgaggagcaagaaaaggagtatgaggagggagagaaaacaagctacacgagctccacaacaaccccacactctggttgctccagaggggtatcaacggaagaagtggtttatgaggaagaagaaagcaagaagaagaagaagggtggtggtggtgcaggcggaaataataagaagcatttaagtggagagaaagagaaagtgaagagaagggtggtggatggtgatgggtcggggtcgagtcgttattcaggtctgctgcagttgatagcgtgtggaggtggggcaggggagtacatgaaggggaagcaggggccgcgtctcagcgacgtggggaccaaagaaagagacaagaaggctttgttttgggaggaggctgagactgagatgtcggagaatcccaggttgttggggaatttgcagacagaggagaaggagtactttagtggtagcttggtcgactcaatcaaagcccaccgggagggtgagcctgtgctcaacaagtccaattcctataacgaactaaggagaagtaggctggggatggtgacggaagaagacaagaagaaggtggtgaagggaggaatgaaagacaaatgtatccctcttatcaaatcccccaagactagtaggaaatga

SEQ ID NO: 110480 - DNA, 1694 bp, Glycine max
  Clone ID: PAT_MRT3847_70775C.1
ttttcaaatcccataaccacacacacaaatccatccaagatttcccccttgtaagagagagagataaaagaaaatcagcgtcctacagcaccccaccatgggaacccaccaagcacttgtttttatcatgtttttccatcctatatatgactcataagcacgacagaaggggattcacagccattctttatctctcatttttttaggctcataaatcttttttatgggtttcagggtcactactactctgtctctgctctccctgttttggctcttgtccctgcaccaagcaagagctgcaaagttccacaatgtgagtggcttgagagggaaaaagccagttgtagcaaatgggtgcaatttgttcctgggaagttgggtggttgacacgtcttatcctctctatgactcttcaacatgccccttcattgatcccgagtttgattgccaaaagtatggaagacctgacaaacagtacctcaaatacgcttggaaacctgattcatgtgccatacccaggttcgatggtgcggctttcctgaacagttggaggggtaagaagataatgtttgtgggtgactcactgagtctcaacatgtgggaatcactgtcctgtatgattcacgcgtcggtgccaaatgccaagaccggctttttgagaaaagaatcactgtccactgtgaccttccaggactatggagtaactatacagctataccgcacaccgtatttggtagacataattcgtgaaaatgtggggcgagtgcttacattggactccattgttgctggaaatgcgtggaaaggcatggacatgctgattttcaactcgtggcattggtggacccacactggaaaatctcaggggtgggattatattagagatggacccaatcttgtgaagaacatggaccgtttggaggcctacaataaaggattaaccacttgggctaattgggttgatcagaatgttgatccctccaaaactaaagtcttctttcaaggcatttctcctacacactatcagggcaaggattggaatcaaccaaaaagaagctgtagtggagagcttcaaccattgtctggatcaacatatccagcaggtctacctccagcaactaccatattgaacaatgtgttaaggaagatgagtactccagtttatctacttgatataacactcctctcacaattaaggaaggatgctcacccttctgcttatagtggggaccatgcaggcaatgactgcagccactggtgcctaccaggattaccggacacttggaaccagctcctatatgcagctctcaccaaatgaaggtgaaggccccatacaaattgatccttttcttcatcccttggttatatattcagctagtgtttttagaatttctttattatttgggggatatatagatactacagaggggtgaaactcaattgtaaaattatatataggattcttggaagaataatttacaaaacaaaataagttccttagagatcaaaattgttgcatactaagatgagtactttgtttacaagggttcgtaaactaattttattgaatcacagaatgatgttgaattctatcattggttgatgcacggatcatgtataacatcccatacttgtgacagctacagggttaatcgtaactatgaaactgtttccttccttctgagaaaaaaaaa

SEQ ID NO: 110481 - DNA, 275 bp, Glycine max
  Clone ID: PAT_MRT3847_70776C.1
tcgcacacgcgtccgcttcatccatagacatggccaccgacacttctgcagccgggggtacatcctaggcactgaccttaatgcaagcgcaggcaaagtgtgcgccgaagttaaagtatcatctccgcaagccacatggtagtgcataacagcttcgctgaaagacgttagacacgctgttgatgacactgccgcgagtgcagcgctagctagcaacgccatggccattgtactgatgctgagtgttgatgacaggtctttggctttcggaccaa

SEQ ID NO: 110482 - DNA, 1194 bp, Glycine max
  Clone ID: PAT_MRT3847_70777C.1
tcggccggccggtctttcgcaaggacctggcggagagatcggccaggctcctggatttccacctagacctggtgagcctggaagcctccactaagatacaatagaagccattagcagaagagatgcaggcaatcatcaagggattagaaaaggttaaacaagaatttgctgcatctgcaaatgatggacctgtctccgaagttttccataagacattgaaagaatttatagctgtcactgaagcgtgcgtaacatcgctaacagacctatcttctgctcctgggcgaagacctgacgctcttgccctagagctggattgggaccctgctcgttgcctgctgctgcgacctgccacgaccccgccaaattttataaggttgtttcggaaagcacatgaagagaatatcaaacaagcagagttagagaagaagaaagctgagaaagaggctgaaatggagaaggcaaagggcattaacttgacaaagaagggggcaaaagatagttgacgactgtgttttctgctcctttgcatcaacatgaagctcttgccaaagagcaggaatgtaccccgcgtaaggggaatgcttctgagaccacttaagaagctgttggcgtggaatagtgaattcctgcctcctgtggagttttgaacatacaacaggcttaggagataggagttgattctttgatggcatgctgttgaatgggattcaagtggccaactgatttagatgcagaatggacgcttagtgtgaatacatgcgtccagtgtatgctatgaaaatgatggatccagtcccatttatgttggctcaagaagcagggcatgccttctatatggcagtagaactggcattggattattttttggatttgcaaagcaccaaagtccaacccaaccgtagtaccatgacaccttgtataaagctttagcactcctcctttaggattcaattctttctcatgtaacatagaaattagtttcctttttgatagagattttggtaggtaccctcgagaaaatgttgtatagctgtcaggttcagagaaaatagaaatcagctcattgtattgtaaccaatattatttcaattgtgaatcacgaggctaatttttgaattgtgaattataaatcatattgaatcagaagattgagataaaaaagggggggggggggggggggggggggggaag

SEQ ID NO: 110483 - DNA, 944 bp, Glycine max
  Clone ID: PAT_MRT3847_70778C.1
tcggttagttaccacaaccctgctaaattttatacgattgtttcggaaagcacatgaagagaatatcaaacaagcagagttagagaagaagaaagctgagaaagaggctgaaatggagaaggccaagggcattaacttgacaaagaagggtgcaaaagatagttgacagctgcgttttctgctcctttgcatcaacatcacgctcttgccaaagagcaggaatgtacccgtgtaaggggaatgcttctgagaccagttaagaagcctccccttccatgatgatgatgacgatgacgacgatgatgtggcaattagcctttcaagctgatatattggcggggaatagcgaattcctgcgtcctgtggagttttgaacatacaacaggcttaggagataggagttgattctttgatggcatggtgctgaattggatttatgcggccaactgatcttttttatcagaatactctggaaattccctgatttagatgcagaatggatgcttactgtgattgcatgcgtccagtgtatgctatgaaaatgacggatccagtcccttttatgttggttcaagaagaaattttgtagcagggcatgccttctattatggcagtagaagtggcattggcttgcatcattcatttggcatatttaatgtagcaccacagcagatgctttttggatttgtgaaacaccaaagtccaaccccaaccgtagtaccatgacaccttgtataaagcactagccctcctcctttaggattcaattctttctcatgtaacatagaaattagtttcctttttgatagagattttggtaggtaccctcgagaaaatgttgtatagcagtcaggttcggagaaaatagaaatcaggtcattgtattgtaaccaatattaatttcaattgtgaatcacgaggataatttttgaattgtgaattat

SEQ ID NO: 110484 - DNA, 1818 bp, Glycine max
  Clone ID: PAT_MRT3847_70779C.1
gcataaccaataattgaatttgaatcatttgggtctctagacacaaacactaccccctctttccccctcctcaacattgttatgatcccttgttggtaaccattccatttgcacttgtctttgcaaccaaaaaacaagctctatgaccaacgaaatgaaagaagcaagtgccttaggagctagaacagcacgagcatgcgagagctgcctaaaagtaagagcacggtggtttttgtgcagcggatgatgcattccttcaccatggctgtgacaacatggttaactcagcaaaccaattagtaggtggccagaaaaggttaaagctccaaactccttcttccatgtgcaacaataccttgacccctaagttggttggcctaattgtatgagaacaaagtctaaaatctccttacagtatcaaagccgatctccgtcatttgtaacaaaaggagaaagcgtctgtttagacctaacatgacgatctcaaaagcgagcttttaattacaatattagtcatcgtccccttgtgcctgagcttggaaaagaagagccaatgcttaatgatgagactgaggagcaactacagtgtcgcgtgccgttgtttgatgctgggttcagtagaatatacaatgaagtgaaagactaggttgtagctttttgtgaagaagccttggacttggaaaacttttcttccgagtttcttccatcagatacggaccttgctgagtttactgctgatgtgaaaagctttcttggaaacggggctgatgaggattcacctgatgatgatgagcacgtgaaagaatcagaactactgattcttgattgcaaagaagaagaaggagatgaggaaatggatgaatgttttgatgtagtactaattgaagccaaagaaggaatggtgaaggtcaaagatgaagaaaaacttgatgctgatgatgacacagcttgccatttggattcgattcttgatatgaacggcgaggcatttaattggaatattgttgaatcagaatcacctgcacaggcacaagaagatgaagtgagtaaagtgggaactaagaaggacatatttttgagattaaactatgaagaagtcattactgcttgggcaagtcaaggttctccatggactaatgggaccccacctaagttcttcaactctgatgattgctggctagacttcttgggttcgaatggtgggaatgttcaatgctgttatggggcagtgggaagcttaagggtgcatgcagatgggggaagggaagcaagagtgtcaaggtaccgagagaagagaagaacgcgtttatttgcaaagaagataaggtatgaagtgaggaagttgaacgcggagaaaagacctagaatgaaaggtcgatttgtgaagaggacaccctttgttggagccactgcgttgccagcttaatcatcaatcaccactgacatgattgatcatcaaagtgatcaaataaatggttaacttctccaagttaatttgattttatggaaaagttaatttttagattaattattagttacttggttttgccatatatgtacaatatcatcactaggtcaggtttctcttgcttgggatatttatttctttctctaacaggtctagctagtactaatggaaatgtggtagcccctctcagcattttgaaggctttggtaatcaatttcgggagccctttttcaatgttgcttaattatgatatatataagaatctgtaattaatctatgctgatgttatgtttacctttaactctgagggtactgattaacagtgtttaacatcaggtacttatatgtcc

SEQ ID NO: 110485 - DNA, 274 bp, Glycine max
  Clone ID: PAT_MRT3847_7077C.1
gctccttaagtctaatattaacaaagcatgagttttttactggtttgcaacaaaccgtgtttaagtaaactaccgaatggtacctcaaatgcaagagcaggaggtttgccccatgctcaggctaacagcttattgttaaccattagagaaaacgctgacatcccatggaacgcaaagaatgttaatcctttccagactatgcagaactcccctgagaccagagagggggttccatcacagcccagggatccaactgctcaaagtcagcaaccct

SEQ ID NO: 110486 - DNA, 269 bp, Glycine max
  Clone ID: PAT_MRT3847_70780C.1
caaaggggctatggctcgtcatggagaagtgctcaggaagacagtactcggccatgatactctctgaatgactctctggcagaattccatgatcctgcaaaagcagacaagtttatgaacatccagagagtcttggctgcatcgacaatcatccttccataaaacctactgatagtgtgctagttacaggggcgctgctggatagtttagtcgacgcgagtactgatctcactaccgcttcgcagatgatctatcggcagtcgtcgtcg

SEQ ID NO: 110487 - DNA, 116 bp, Glycine max
  Clone ID: PAT_MRT3847_70781C.1
gaactgtgatacactcgcatactaattttgggtcatagaactgtgtctcagaagcagcacatcagaatacttatgaggaattcaccaagaggatcttagcgaacgcctagagtctg

SEQ ID NO: 110488 - DNA, 240 bp, Glycine max
  Clone ID: PAT_MRT3847_70782C.1
atttgaaagttcaaccagcaaaatgatcaatgacagggagagtacctaagatttatcgtaacatgaatgctgttctgtgaaatgactcaacagagtgctcaccattcattgttgtccatctcggaaatgtctgcttgttttgtgaagagatgtcacttgtttgatttatttatttttacttgaggaagcaaatcataaaggaagagggttttgggttggggtgagcgcctgggaacatgt

SEQ ID NO: 110489 - DNA, 1446 bp, Glycine max
  Clone ID: PAT_MRT3847_70783C.1
ggttaaggtcaaagatgaagaagaacttgatgctgatgatgacacagcttgccatttggattcgattcttgacatgaatagcgaggcctttaattggaatattgctgagtcagagtcacctgcacaggcacaagaagatgaagtgagtaaagtgagaaccaataagaaggacatatttttgaggctaaactatgaagaagtcattactgcttgggcaagtcaaggttctccatggactacaggaaccccacctaagttcttcaactccgatgattgctggctagacttggtaacttctcttcaaccctctttgcttatgcagcagtatcttcttgtgtgtttggtttgacttatttttatgagaataaatttttcagttttcttatagtatcatagccgatctcatatatatctggctaaaggaggaaggttgtgttgcgtcttcagtaaccgatgtaaaattcgtcgatatacctgaaatcattcgtagggcggagatgtgttatgccttcggtaaccaatgcaaagttcgtcgatatacctaacatgaatcgctcacagtgagataaaattttgttgttgtggatacatgagagctctcaaaagaaaactattatatattttttattttttttaaaaaagaaaaagtctctcaacaagcatgcagctactcaattatgcacaattgtattgtataggtggccgtagctccttatgagttgtttaattacatagctgtgtttttagtttttgaagttgcaaaccaaaatactgagtttttaaaaaaaatttagaaatgaccatttaaattgttttgaagctcaaacttgatcatcactgtttctatagttgaaatgaaactttctaatttttattttattttgttaagggttcgaatggtgggggtgttcaatgctattatggggaagtgagaagcttaagagtgcatgcagatgggggaagagaagcaagagtgtcaaggtaccgagagaagagaagaacgcgtttatttgcaaagaagataaggtatgaagtgaggaagttaaacgcggagaaaagacctagaatgaaaggtcgatttgtgaagagtgttcctttgttggagccactgctttgccagcttaattatcaatcatcaccactgacatgattgatcatcaaagtgatcaaataaatggttaacttttccaagtttgattttatggaaaagttaatttttagattaattattagttactaggttttgccatgtatgtacaatatcatcactaggtcaggtttctcttgcttgggatatttattgctttctctagcaggtctagctagtactaatggaaatgtggtagcccctctcagcattttgaagactttggtaatcaatttcgggagccctttttcaatgttgcttgattgtcatcatatatataagaatctgtaactaatcct

SEQ ID NO: 110490 - DNA, 519 bp, Glycine max
  Clone ID: PAT_MRT3847_70784C.1
gcataaccaataattgaatttgaatcatttgggtctctagacacaaacactaccccctctttccccctcctcaacattgttatgatcccttgttggtaaccattccatttgcacttgtctttgcaaccaaaaaacaagctctatgaccaacgaaatgaaagaagcaagtgccttaggagctagaacagcacgagcatgcgagagctgcctaaaagtaagagcacggtggtattgtgcagctgatgatgcattcctttgccatggctgtgacaacatggttcactcagcaaaccaattagcaagtagacacgaaagggttaagcttcaaactgcatcctctaaggtcaactactcagtgacccctaaggtagcatggcacagtggattcacacgcaaggcaagaacgccacgccacaacaacaacagacactcatcattgaaacaacaacaacaaaaaaaaccattacatgaagaacgaggagaggaagaagtgtttttcaataacactattagtcttct

SEQ ID NO: 110491 - DNA, 441 bp, Glycine max
  Clone ID: PAT_MRT3847_70785C.1
atgggtgaagttgaggaggtgaaagagcagatgaaggccgacacgaaggccttgaaagagcaaatggtcaccatgatgagcataaaggagataatggaggtcaatgcggctgcaataaccgctaccagcatcattgctgaggtggacctgacccccctatatggcctcaaccaaataaatcatccaacctcagatatggtaggtctagaaggcaaagagttgggaggtacaggcggccctcatttagtgcaaaaaacaagcatgccttcccaccatatcgcttgcctcccaactatacaccacccaatgtggcaaacacttccagtgaggatgtcaataactccgcttccatactcattgaaagtcgataacctcaaactgatcatgtatatgtctctcaaaccatgggggagacacatgaaattctccaccacaatctag

SEQ ID NO: 110492 - DNA, 498 bp, Glycine max
  Clone ID: PAT_MRT3847_70786C.1
acgtaggctataagtgcctctgaggaaacccccctttttttttttttttttttttttttttttttttttttttttttttttttttttttttttttttttttttttttttttttttttttttaaaacaaattttcgctccccccttaaaaccccgggttttaaaaaaaaaaattccttttcttcccccggttttgggcccccgggttcccccccccgggtaaaaaccgggggaaacttaagccccaagaaccccccccccgcccggggggaaaaaaaaaaagggttgggggcggcaaacttaaaaacccgccccggccggcttttttgggcccccccaaaaaaccaaaaattcctccttccggggcgcaaaagggcaaatttaactgggaaaacttggttgggcggggccccccttttttgtttccgggggcaaaccttctttctgttttcaaaccttcaacccgggggcgggccccgaaacaaacccttcccccccgg

SEQ ID NO: 110493 - DNA, 1381 bp, Glycine max
  Clone ID: PAT_MRT3847_70787C.1
tacggctgcgagacgtccgcagaaggggacctccaacacatcatctccttccttcaccttcttcccatacacccaaaggaaaaatcttccatctccactttcttttcaatggccactctctttaacttcaactccacccttcgcccctcttgttatcttcccttctcaccctcctcgtcttatccccacttctccaatacactctccacaactttcttgggccacaccgtaaccctcaaatatgccgccacttccacaagcaaccgtggccgttcactctccactcgcatgtcatgggacggtcctctctcttccgtcaaattgatcattcagggtaaaaatctcgagctcactgatgcagtgaagcagcacgtggaagacaaagtggggaaagcggttcagaagcacagtcacctagtgagagaggttgatgtgaggctttctattcgaggaggaggtgaatttgggcgaggacccagaactcgtagatgtgaggtgactttgttcacgaaaaggcatggagtggtgcgggctgaggaggatgctgaaagcacctatggaagtatagatttggtgtcatcaatcattcagaggaagttgaggaaaataaaggaaaaggtgtcagatcatggtcgccacatgaaggggttcaataggctaaaggttagggagcccgtggagcaattacctatggaagaggatgaaatattatccccacgggaggaggaagaatcaattgatgaggttgttcgcacaaagtactttgacatgccaccattgactgtggctgaagcaattgaacagcttgaaaatgttgatcatgacttttatggttttcgaaatgaagaaactggggaaattaatattgtgtacaaacgaaaagaaggaggatatggactcattatacctaaaggtgatggtgaagcagagaaattggagtctgtagtgcttgaaccagctatagaatcctctctgaaagaatgatgggctcccacaagaaactctttttgtaagaacacaagagcttgtacatgattagcggatactaatggtggtttcttggagccagaagtgcataggcaaattcaatggaggctctgacgttttaaagtatgatgtattgtatgcttggatgacaagcgactgtagaatgaaagagatgcaccattttgattgcactgcatttgcatataatgcccagaatacgccttttctctaaaaatgatacaccatgctctgcatttgcatataatgtccagaatacgccttttctctaacaattccacacactatttttcatctctggttttgttctgctttcttgtctattgcttatccagattacaccatgaaaagtaaatcatttttctcttctgaccct

SEQ ID NO: 110494 - DNA, 269 bp, Glycine max
  Clone ID: PAT_MRT3847_70788C.1
ctcactttctctatcttcaaccagccaaaaaaaaaaaaaaaaaccccaaaaccaaaccctaattccccgaaatttgattcctttcaggaaatttctcccaaaatccaggcctcctgcagacccataccgttttccttctcctttcaaatcctcggccacaaattttgggatctttctgggcctccgaatcatggaaaaggaagagaaggaaccccaggttcagaaaagtgggggcgaaagcgaagacgctgaacccatagggctcgttc

SEQ ID NO: 110495 - DNA, 1020 bp, Glycine max
  Clone ID: PAT_MRT3847_70789C.1
ttcgctgtcggtattttcattcgagttgcagtttggcggttaatttcatttgagagttgcaggttgccagttaatcgtcttcttctctgcatccatcagatccaaagtttctcgcgatacgagggagcaatgtcagaggctaaggttcaggatttgaagaaggaagaggaggttgctgatgattctcctaagaacgaagttgacagtggaaaatctgtggatgatctgaaagattcggataacgataaaagcgatggaaacgccatgccctcatcccatcaggaggaagcagctgttaagaaaaagtatggaggggtgttgccaaagaagcctccactaatatccaaggatcatgaacgtgcttactttgactctgctgattgggctttggggaagcaaggagcacaaaagcctaaaggaccacttgaagcactccgcccaaagttgcagccaacacaacaacatgctcgttcaagacgctcagcttatgctccagcagatgataatgaagttgatggctgcagcagtgattcatcagcagagcatcagagtgccactgaagaagttggtggtgataaaagtgatactgctcaggaccaaagctgccattagttgtaatggatttgacctttaatttgcattttgacagtgactagagttgcttgtgttaaaaaaaaaaactaaaagttggagttttgaagcagttgtaaccatgaattagataactctacgcaagtatgggattatatgacgtgctaagattgcactatgagacatcttgatctctacattcatttgcgaaggcatgattgtggcatttgtaacatttgacatctcacataatataatcatctacaataagattgggtgtgaaacttggcaataaagttgtttgtaaacgatcagtatataagattatggtcaaggcatatgaataactgataaacagtctagtgaagttatattaaaaccaagagtaaattacaaatcatttccttgtgcttgtgtcacaaggtaacc

SEQ ID NO: 110496 - DNA, 168 bp, Glycine max
  unsure (1)..(168): unsure at all n locations
  Clone ID: PAT_MRT3847_7078C.1
gaaaaagaaaaaagcgatcatagtttcacttcggccttatccagttnagggtttcggtnctctaccctatcttncangtatcgaaacctnaaatntancggtcngggcntgagcagtcnggntggnaanactcttnggccntagtgacccatgtgntgtctnnnantg

SEQ ID NO: 110497 - DNA, 372 bp, Glycine max
  Clone ID: PAT_MRT3847_70790C.1
ttagtggggggggaaaacacgggccggggaattcccttcctgaacctttatccctttcctcctcttccttctggcctctttggtttggcccatgccttctttattggtttttaaaataaaaggaatggggattcccctgggtattaccccgggaaaccccgccttggcgatgcccccaaaggctatgaacctgaccttggcccctgttgggatcccacctggggtcaaggggaagccccctgccaaaggtggacccctacctgcgatcggccattttaaccacatgggcaccctgggaaatggggggatcccttggtgggctcgattccatcatccaccaacccttccttgggttaccccaatgaaccatgg

SEQ ID NO: 110498 - DNA, 369 bp, Glycine max
  Clone ID: PAT_MRT3847_70791C.1
ctctctcccctgttcctcccttctccttttctctatcaggtactctattgtaatgagcttttgtttgtgcaacatcattatcctttcctcaatcttgtagctgaggtgacattatatatttagctcagcatcactactggtttctcgaacctaagcagcgaaggagatgtgtggctgattcaattctaaagggaccagaaacaagcacatctgaatttcaattgttaatttaccatgtatacgagccaagccttttcttcagggtcctatgcggatatgttgtctgggaatcctcttttacctcataactacagtgaaactgtggaaagacaaaatgagttgaagtttatcacatccctgagggacaca

SEQ ID NO: 110499 - DNA, 1041 bp, Glycine max
  Clone ID: PAT_MRT3847_70792C.1
tcggctatcggtattttcattcgagttgcagtttggcggttaaacgtcttcttctcttctcttctctgcatccatcagatccaaattttctcgcgatacgagggagcaatgtcagatgctaaggttgaggatttgaagaaggaagaggaggttggtgatgattctcctaggaacgaagttgacagtgaaaaatctgcggatgatctgaaagattcggataacgataaaagcgatggaaaccccatgccctcatcccagcaggaggaagcagctgttaagaaaaagtatggagggatgttaccaaagaagcctccactaatatcgaaggatcatgaacgtgcttactttgactctgctgattgggctttggggaagcaaggagcacaaaagcctaaaggaccacttgaagcactccgcccaaagttgcaggtgaaatgcattgcagatgttttcttttctctgtttatatgaacaattagtgagtttatttttctgcattcgggtggtttgcctatttccacttcatttaaccccctccctccatgcctcttttaagtgtgtttcaatgttcaaaccccccagattgacccagattaaattgcagaaccattacgaaaactgggtttgttgtttggattacatctttgccatgctgcaaatgtgctatgcgctttgatgcaattaactttgatgggagttagtgaaaccatcaccataatccctttccttgtattctgcagtgaagttttttaatgaaaattttgggctgaataggggacaggattcattattgtgatatttttctaaagtaaccattgatctattacatgactaacataaatgatatattgcaacgttcccgtgcatatcattgacattgcttttttgttttctgttccccttcttggcatcttaccatactggtaatcagccaacacaacaacatgctcgttcaagacgctcagcttatgctccagcagatgttaatgaagttgatggctgcagcagtgattcatcagcagagcatcagagtgccactga

SEQ ID NO: 110500 - DNA, 353 bp, Glycine max
  Clone ID: PAT_MRT3847_70793C.1
tctttcttgccagtagattaataagatctagttagctgtacggatctctaccactccacgaaatcccttttttcagtaacttgctttttgttacccacaacaattaccaaaccctcaacaaatgtctgaacgaggtgaagacactgtccactctccttctgaacgtaaaaggtcacttccgtctgacgacgaggaagacgaccttagttctgacgaaagaggaggacgtttcaaacgtcccgctttaaatacttctggaggtgaggacgataactcttcagaattagactataccgatgaaccacctgctgaagaacgtccggtaactccgtcagaaactggtgacgttatgg

SEQ ID NO: 110501 - DNA, 2085 bp, Glycine max
  Clone ID: PAT_MRT3847_70794C.1
aaaaaactatcccacaataacctctctctccggcgcaggtccacttttgtgcgtgacgctcacgcttgcatcagaaccaactatatataaacacagcgcgcgctccaaaccttaaactgaaaaacaaaagaacaccaaaaccactcaataagaagaaggaacactcgctctgcaaagtgtgtgaacgaaccctaataatggagacgaaggagaacggaccgagcaagaaggtttcgaatgggggaatagatggacccacgaacccgatggtcactcctctgctcaatgatctctaccaattcaccatggcttacgcttactggaaagctggcaagcatcaagaacgtgctgtgttcgatttgtattttcggaggaatccgtttggtggggagtataccgtcttcgctggcttggaagagtgcataaggttcatagctaatttcacgctcgctgaggaggagatcgattttgttagggaatgtttatcttcctcttgtgaggatggattctttgactacctcagaggacttgactgctctgatgttgaggtgtatgctattcctgagggaacagttgtttttcccaaggttcccctgatgagagttgaaggtccagttgccgttgttcaattgctcgaaacaccttttgtgaatctaattaattatgcgtcattagtttctactaatgctgcaaggcatcgtaatgttgctggaaaatccaaaactctacttgagtttggattacgaagggctcacgggcctgatggtggagtaggagcatcaaagtactgctatattggtggatttgatgcaacaagcaatgttgcagcaggaaagttattcgggataccccttcgtggtactcattcccatgcctttgttagttcatacatgagccttgatgagattacagacaagtcacttcgcggaaaagatggttcaagtaggtgtgacgattttgttagtctggttcaaacgtggctgaacaaaattcagttgtcaaatggtgtttttggtgagaccaatcaaagcgagttggcagcattcacatcatatgcattggcatttcctgatggttttcttgccctcgtagatacatatgatgtgatgagaagtggaatccctaatttccgtgcagttgcattagctctcagtgatttaggatacaaagcagttggcattagattggactctggtgaccttgcatatttatcctgtgaggtcaggaacttctttcgctctatcgagaaggaatttggagtgcctgaatttgggaagttgcaaatcactgctagtaatgatcttaatgaggaaacattagatgctttaaacaaacagggtcatgaggttgatgcctttggaattggtacatatctggttacatgttacgctcaagctgctttaggtgttgttttcaagctggttgaaataaataatcaacctcgtatcaaactttctgaagatgtgtcaaaggtctctattccatgtaagaagcgatgctataggttgtatgggaaagaaggttatcccctggtagacataatgactggagaaaatgagccctctccaaaggtgggagaaagaatcctgtgccgtcatcccttccaagaatccaagagagcatatgtagtgccacagcgtgttgaagagcttctgaggtgttactggtctgggagtacagatattaagaaagatactttaccagctctaagagatattagagagcgatgcatcaatcaacttgagcaaatgcgacctgaccacatgaggagacttaacccaactccatataaggttagtgttagtgcaaaattatacgacttcattcatttcctgtggctcaatgaggcaccagttggggagctacagtaaggcaaatgtgctttcggagttcagaacccaatgggttgggaaaaaaaaagttcagttcagcggaaatttttccatacagtatttttttatcagcatttctccatacagtatagatgcattcaatgtgttttgattgtttttcaaaataaatgattctgtatattggtgttggtggaaccattattctttgagcatccttaccctttatcacatt

SEQ ID NO: 110502 - DNA, 239 bp, Glycine max
  Clone ID: PAT_MRT3847_70795C.1
aactactgctgtggccttatgaacagaacatcctgcaggctgcgaacgagcttatcgctatgtgtaagctaaagacaatcagttcagatcctgctgcctatatttgtatcgactatcatttcacagaagaagcatccattgcggttgctccactctccgttgtaatctctactgctcaaacttgggcgcgtcattgtgccataaaacttcatcagctcgattcaacctccacatatttg

SEQ ID NO: 110503 - DNA, 371 bp, Glycine max
  Clone ID: PAT_MRT3847_70796C.1
cggccgccccttgcttcttgttagcagataagttaagtactatagacccttttgactcgtttcatggcacagctgctgaggtgcgtggcgaggagaaattatacggcgctgttccacaaacatgaattattgagccaaaactatggggaggggagggcgaacggtttgtttccagaagggaggagggaacgggctggcagcacaccaaattaaaatccttgctatacgcttggtgggagaaagcgaccacggaaccctagtttaggcggttgacaaatatagataatagtacaggcaaaattcccaggatgatcttgcgtggttggaactcacccgtcatggaagatgagcatatgcctgtgagggccaaa

SEQ ID NO: 110504 - DNA, 1270 bp, Glycine max
  Clone ID: PAT_MRT3847_70797C.1
cacgcgtccgctgaaaagggcaagaagaagtgagagagaggggatcacttcatccacgatcccttgcgcgtttgcttgctttgatccacaccactggactctttactcccttcattttccgcataatgccaccatgcctcgtaaagtaaattacggactcgattacgacgacgatttctatgatgatgattatgatgactatgcttatgatgatgccgatgcagaagactatgcagaaggacctgatacaaagcaagagaccattaagcctgggctttggcaatgctccatttgcacttatgacaacgatgagagtatgactttttgtgatatttgtggtgttgtacgccgttccttggttaacactggaacttccaacagtaacaaaacagatcctttcaagtttgatgttccatccccagatgatgtggtttatactggcctacgttcttccaaaacgggtttgaaagacaaagctacaaacactaaaagttctcagctttcatcaagcatcagagagaagaatgaactttctgtacaatcaaatgctgaaagttctgacaacttatcatccttaacgcgaaagagcaaacaggatagttcagctaagagcaagctttccaaaaatgtagcaattgatctacaaacaagtggtaaaacttcaaacagcttgccagaatctttgtcaaaagacaaaggtaacaatattaataaaataaattctttgaaaaatggtacaattgatattcaatcaagcaaagaaaagtcaggtagtttgtctgcactgtcaaaagtcaaggaaagtgataacattagtttctcttctatcaaagatggaaaacctgaaagtatttccagcagtttcaacaatatggctctcaatgtaagatctggaaattcatctggaaattctgataatactaatgctaagggaactcgctcacatgtttcttataagccagaaaaatggatgctccctcaacaagctgaagatacattgactcagctgaatcttgcaattgttggccatgttgattctggaaaatcaactctatctggtaggttactgcacctattgggacggatttcccagaaagaaatgcacaaatatgaaaaggaggccaagttacagggcaagggatcctgtgcttatgcttgggcacttgatgaaagttctgaagaaagagaaagggggataactatgacagtggctgttgcttattgtgacaccaagagatatcatgttgttgtgctcgactccgctggccat

SEQ ID NO: 110505 - DNA, 469 bp, Glycine max
  Clone ID: PAT_MRT3847_70798C.1
ccacgcgtccgtagagcgcctacttcgacaggtacggcggcggcgccaactcgctcgcctgcggctactcccgcggcaccggcctcggcgccgagatcatcggcaccttcgagctcggatacaccggcttctccgccaccgaccccaagcgcaacgcccgcgactcccacgtaccggttgtggctcccctccccatcggcttcggcgggttcatggtgcacctggccaccatccccgtcaccggcaccggcatcaacccggccaggagcctgggcgccgtcgtcatctacaacaaggacaagccctgggacgaccactggatcttatgggtgggccccatagtgggcgctggcattgggggcttctaccaccagtacatgctacgggctggcgccagcaaggcccatggctacttcaagagcaacgcgtgatgagcggggcttggctgttgagcagtggcgggcgacct

SEQ ID NO: 110506 - DNA, 325 bp, Glycine max
  Clone ID: PAT_MRT3847_70799C.1
aaacttagtatgggaaacgagcttgcttgaatattttttgactttttctggatttattcattggattaagatgacaaccaataggatgactgatcttgtgaactccctgggcatgtacgtatgtatgtatttctgtatgaatgtctattgatgcatatactcatgaggttccatttatatgtcccgatctatcaccattgttatatgcttgatggaggttgacgttttcactacccgatgactgaattacaggcccgcactgtcgatgtaccctaaaatgtaatgagcctgaaggactaatgatactctccctgcatagtcccat

SEQ ID NO: 110507 - DNA, 775 bp, Glycine max
  Clone ID: PAT_MRT3847_7079C.1
cttgcatgcctgcagattattaactctagtaaaagttgtaagccaattgctgtggttggtgaagctgggttgagaccaactgatttccataaagaccctaatcagaaagcaatgcaaatgtacaatccaaaccacctcaagaaagagctgaagacaagactgaagacaaaaaattaaaaattttaaaattaaattaataaaaactcatacggattgatgatccgtttgagtcatatggattgaccatccatatcactcatacggaacatcaatttgtatgagtttttctttttgtacaattaatttttaattttttttataaataagtaaaagttaaataaaaaacttatacaaattgatgatttatattcatgactcatacggatcaacaatccgtatgatttttttaaaattaattttacttttttaattatttttttaaaataattaaaagtttataaaaaaaattcttacgaattgttaatccgtatgactcatatgaattgtcaatcctatttaaagaaaaagtgaaggacattttagttctttcacctatgttgctgggtgtctcaacaaaaaatgttggatgcctagagcaattcccaagactatattacattgcaatatacttgttattttgttcaagcttatgccaccgtccaaggagattttctacaacggtgtttcaatttttcttatcacttttttgttctttctcttttccaaacacaccagtccaaccacccacaccgtcgaccatcatgcaccaccattt

SEQ ID NO: 110508 - DNA, 1189 bp, Glycine max
  unsure (1)..(1189): unsure at all n locations
  Clone ID: PAT_MRT3847_707C.1
tccccggcccccccccccccccccccctttgtcaatgatattgtatgttaattttattcagtctcgtatctagctgaataattaagaattatactacgtcatgcctataacacttgaggtgcttacaaataaacatctttttatacaatattccgatctgctaacacagttattttatttacataatatgtcctgatcagagttccctgcgatgagtattctgaggcaacacgtcaatttaatagctgatacatcatcactcccagtccgtgtcgaagaaacccgcatctttcatctcagaataatacacattttccaaatggaaattttcctcctggaaaaagtctgctaggaatgttgtatacaaaaagggaagataaaatgcatggtaaaagacaacagtgacacgatacaaccagaaagcaaacgcagcatgggtaccagcaaggccacaagcaagtgtcgcaatcgcattaaaaatgaacatgatagcaacatacttgtaaaaggcaatttttgcaggcaacgtttctttccatccggaatggtacataaacattatgaagccataaacagcagtgagcaacagcttgtggacaacccacaagttccacttcccatgatgagtatgatcattgctgtcgacgaataaagggatcccaaatacaaatagatatatagccttgagcagaatatccaaaccaacaacgagcgttgagataccaaaagttcgtttcattgcttctaagccgccagcattatttccttgaagtaaaaaagccagcaagctcacttccaaaaacagcattccggaagtagtaaacaaggataacaaattccatgtcaactctctcccagacgtgcactcccatgcctggaggaaacaccaagcgagattgagcagagtaacgaggcagaggcaaaggttattcgaaatgatgatataggagcgtgcgagggaaactttgagtaagctgtgcctggcgtgaagtgccaagtcgcaccgaagaggaaggaggggatgatgagngtggcataacacagaagccgtgtcatttgcccagccaatcgtagnntccgtngccngnngnngnnncgtttgntntcgcnttcncgccncttgnntcggngncttgcgttntcnctgnctgtggnnccttcttccnnngggcccnttgcngttgccggt

SEQ ID NO: 110509 - DNA, 268 bp, Glycine max
  Clone ID: PAT_MRT3847_70800C.1
gaatgcttgattgttaaatagctcacttcttggacttggacctcatcaggcacatacgagcgcccccgataggtgcatcgagatgagactatttatcgatctcttgacaccaaacggagcgagcacgttagaaaaggaactacacgtgctacggttgggcacacacggtctcttattgccttacttattgttgtgactggtgtaatatcacacagacttggcatgtgaaagaagaagggggaacaagcacacttggagagcgcagggc

SEQ ID NO: 110510 - DNA, 354 bp, Glycine max
  Clone ID: PAT_MRT3847_70801C.1
acaaaaaaatcaccaggttttctttgttgcccaaaaaaatatcgctaactttcaacatatcacaattttgaacatgggattattttttaggggtaaatacagagggacctaacaactagttcccacataaaattttagcaaaagtttttttattttaatactaatcatttaacagagggggaaaaagattcacccatccccaaagttcatgggaaatgtggcttaacaaaacttagcctcctaacgcagtagtttagccttttacattcacttgctcaaaaaaaccaaacccgctggtaatattatgtttgggtcagcaccggagcagtatattcccgacccataatagtaata

SEQ ID NO: 110511 - DNA, 348 bp, Glycine max
  unsure (1)..(348): unsure at all n locations
  Clone ID: PAT_MRT3847_70802C.1
tttgacaaatagaaagttaaaaatattagaatatttgttgggagcaatcatcatccaaacgacacaatcaactataggtcactggattttcccttaaaatcgaagcttgtgttggttgatatggtacatagtcatttacaattgggctcatttctgaataaattaaataatggatcaagtaaaaagctgtctcgctactttgccttgcatttgatttctttctgtacagttctatcggctcgatgattacaagttggaccacaagctccgataacagcggcttcaaggggcatgcaatttctgtanctggtcaaacacatcataggaactgctgaatggttggaaatc

SEQ ID NO: 110512 - DNA, 238 bp, Glycine max
  unsure (1)..(238): unsure at all n locations
  Clone ID: PAT_MRT3847_70803C.1
aaaccattaaaatnnttttaaaaaaaggggcaaccgccaacttatcaaattaatatgcatactcccttaaataatccataaaaatccatttttattaccaaaaccaaaattaaccaccttcaataccccggcaacgataatattccacaactacaacaaaatatcaagttctaacaaaattactgaattaaaaaccgaaaacaaaactatctcattctgatcaaaactacatatccaa

SEQ ID NO: 110513 - DNA, 579 bp, Glycine max
  Clone ID: PAT_MRT3847_70804C.1
aaaaaacccaaaaggggtttgtttttgggttaaccaaaaccctcatacaaaatttaaacaaaggaaagcggggggttgctccccacaaggatagggcaatggtaccaaaaaaaaaaaaaaccggtattataaaattgggaaaaaacgggaaccccaccctgaaaaaggctttggatggaagttggcacccaaggaaaatataaagaggtaaaacgagccctttttggccccattaaaaaatttggccaaaaccagaaaaaaaatcccctgaaggggggggacctttcaacagccaaaattttgaggacaaaaccaggccccacacaataaagggccacacccaaacccccgtgggggaaaaaaccctggaactgggcatgttgcagggcaaattttatggttttttcagtggttcaagcaggaaaagctttagcaaaagctgccctaaatacggaaaccaccccgggaaataaaaggttatgttttgaagggccctaatcattgcttgcccagtaaaaggtatgggttttaacctgggaaccaaccacaaaaaaaatgggcatgccggccctgtattaa

SEQ ID NO: 110514 - DNA, 522 bp, Glycine max
  Clone ID: PAT_MRT3847_70805C.1
aaaagttcaaaggagggaagactacatatatatcattttcccaaatatgtattcattattcacataaaatttatctcatagggacaccgataaatcaattactacatgatatcagtaatagtgtaatactggtgtttattaagctacactcctcgagataaataatgaagaaggtaattagccactaatcagatatctcgaaacatctcatatgcaccgaccctatcacgaggaatcagacgtagctctgaaccatgcttaaggaagacattacctgcactttgctgaggatttatcccaacaccatcattggtgatgatggcgctggtctggggaggcactttgaattcttctgctgcaaatttcctggtgccgaataaactggcaaaagcattttgtatgaacactttgaaaggtggctttggttgaaagtccataatctcttatcattggtgatgatggcgctggtctggggaggcactttgaattcctcggctgcgaatttgagaacggcggtgaaag

SEQ ID NO: 110515 - DNA, 290 bp, Glycine max
  Clone ID: PAT_MRT3847_70806C.1
cggactcgtgggctgaaattttgaaaatcaattcaaattgcaagaataaaaaaaaagggtaggaaataaaaaaagaaaagaaagataaaaaaaaataataaaaaaaaataaaagggtaacatctatagaaaaattcaagaaaacttacaaattaatataaaataatatgttgtttatagcttaaattaaatgaatttaattgttcgtcaattaataatgtaattacagtgaaaacattggacgttaaaaaatttaatgccataaatcataatactatttaacatattgga

SEQ ID NO: 110516 - DNA, 361 bp, Glycine max
  Clone ID: PAT_MRT3847_70807C.1
tttcggacgggtgatggggaaactgactgtccctcagggcactttccgaagagttaagagaacgcctttttctatagaggggaagtgagctggtagcaaatgaatgcatcttgtcataagaatgccagaggcggctcttttaatgcggagatttctttgagtatatctttcttactgagccgcaaagacgactaatgcctacataaaatgtacaggctctttcttcatagcatatggaaatttggctgatgacaccatcagacatgaggcttactgacacaagctggtgcactttcggagagatgcacgaaaaaacgttgtttagtaaactttacaagatgaatttattacagtttggcca

SEQ ID NO: 110517 - DNA, 1938 bp, Glycine max
  Clone ID: PAT_MRT3847_70808C.1
ctggattatgacaccaagcccttgcatgaggatcctgttcccgactctgctgttccagaaaaccaggtatcagaggtcaaccctagtttagggtctcaagtaaaatctgattctatttctactgattctctgtcaattaatcaaaagaatgaactaaaggatactataattactgataatgtcaaattagaacaagatattgttaagccggagatggtggaagaaccatcatccagaaatgatgttcctgtttcttatgatgaatcacattcaatggatgttggagggctgcatgagaaaaaggcatctgttgaagaaaatatcaataatgtttcaagtccagacttgaacaagaccaatagcagtgatgatgtagggtattcagaaaagttgaacttggacagaagttctggtgatgattctatggaagaggatttgcctgagactaagcaaattgattctaagtttaatgttgatgaacttaaagacaaagtagagattgaaaagcctattgtgaaggaggaaagtagtactatagctgttggagatagtctatctgcaggaaaagatgatacccaccaagatattgacattagtcctgctgccctgactgagaaacggaaatttaatgaagttgggaacagtgagcctgccaaaaggcaacgcaggtggaacactgaaacagttaaaggtccagatgcacaaagcactactcccaggcctgctactacacctagagatgagccaattactttgaaacgcagcttctctaggtctgattcctctgcaactgatgatacacctaaagaacacattgttccaccatcacaaaggtccccaactaattccctcagaattgaccgtttcctccgtccatttaccctaaaagcagtgcaagaacttcttggtaagactgggaatgtcagcagcttctggatggaccaaataaagacccattgctatgttacttactcatctgtggaagaagctattgagacacggaatgctgtatataatttgcaatggccaccaaatggtggggcgtctcttagttgcagagtatgttgatcctgaagaagtgaaaatgaagttagaacctcctcctactcaggctgcatcggacagcactgatcgagcagttcctcctgctccccccttctcacagccagagccttccccccatctgcacagggagcagcatccagttccagtcattctcccacctccaccaccattgtcaaaacccccaccagtagcaagagaacggcttccatctccaccacccctccctgagaaagttgacccacctattgtcactctggatgatctcttccgcaaaaccacagcaactcctcggatctactatctacctttgtctgaagagcaagttgccgcaaaactttcaacacagggtaaaagcgggaggcagtagataggccattagcctgcaaatcttcccttgcagccctttaactgatttggatatttttattagtgctatgggattattttgaatgcgtcttgttggcagatctggtggtgttttgtctcgggaagaaattgtcattgctaatgtatcttgagacttaaatttatttagttttagaagtcgtgaactaagagctactggggttggatagattttccccactgtttgaactaggcttgagcaaacctttacctgaaattttatggaaaaatttggcgttagattatgtttattctcctagccgcgtattttgtttccggtagctgcctttttcttgatccgcgtattttcttatgctgagtgtcgatttattttagtcagttaattaaccatagtatatttcttctaagccacatcatttatttaacataaatcagggtctagcaccgtatttaggttgatctgccaatttatccatcatttgggagaatgtatcacatgttttttat

SEQ ID NO: 110518 - DNA, 2947 bp, Glycine max
  Clone ID: PAT_MRT3847_70809C.1
ccacgcgtccgacggaacggaacaaaaggcgcacacaatcgccaaagagaaaaagaaccctcaaccaaacaacaacaacaacaaaaaaaaagccctagaaaagattttggagaagcaatttctcactcctgaaaatctcatcctcttcttctttacatttgttttggataaaacattttgctgatactgaattttattttctcttgttttcgtttcttttcgaccttttttttttttctgcttcgttgttttcagggagaaagggataggagtaataaaagagagtgcattcggtttggttcttcgcctcgggactcgaatcttcgatgcctctctgttttttcttctctggcgcctctttttctattctcaaattagggtttccgtgagcgttcctttttctcgattctccgcaaactattatcattgttagggaaggtgatttgcgtttggacataatgtcgtcaaaatatcagattcttgacaaccgccctattaatcagtggaaggttacagagctaaaagatgagctgaagaggaggaagttaagtatcaagggtttgaaggatgatttggtcaagcgtttggatgaagtccttcgtcttgaaagggaggctgacgaggcttctgagaaggatgaggccaatggtttcgatggtcatgtagatggggaaaaagattcagaggcggttactgtggatgctgaaatggttgattcaactgacagggacaatgccaaaacatttgagactgctgaaaagggcaagagcggtgtagttgatcctgttgaaatagaaaatgtggaaaagattccggaggttgtggatcacgacagcaataagaatgacaagcaggatggtgttaccaaccaagttgacattaataatagtgtgtcagccatagatcaagaggttgaacctaagggcttgccagctggtggagattctgcaaatgtgggacaggaggcaattgcccatggttctactgtggagaagactaccattacagttaatgagagtgtagtaacagaagtagtggccagtgctgaggattcttatcgtgcagaaaagaataatgaggattcagcagcaaagctggagaatgaggagtcaaaggcgcagctggatggtgaggactcaaagccccagctggattgtgacatcaagcccttgcatgaggatcctgtgcccgactcttctgttccagaaaaccaggtatctgaggtcaaccctagtttagggtctcaagtaaaatctgattctatttctactgattctctgtcaattaatcaaaagaatgaactaaaggatactataattactgataatgtcaaattagaacaagatattgttaagccagagatggtggaagaaccatcatccagaaatgatgtacctgtttcttatgatgaatcacattcaatggatgttggagggctgcatgagaaaaaggcatctgttgaagaaaatttcaataatgttttaagtccagacatgaacaagaccaatagcagcgatgatgtggggtatcccgaagagttgaacttggacagaagttctggtgatgattctatggaagaggatttgcctgagactaagcaaattgattctaagtttaatgttgatgaacttaaagacaaaatagagattgaagagcctattgtgaaggaggaaagtagtactatagctgttggagatggtctgtctgcaggagaaagtgatatccaccaagatattgacattagtccagttgctccaacagagaaacgaaaatttaatgaacaagcatcagttgggaacaatgagcctgcaaaaaggcaacgcaggtggaacactgaaacagttaaaggtccagatgcacaaagcactactcccaggcctgctactacacctagagatgagccaattgctttgaaacgcaacttctctaggtctgattcctctgcaactgatgatacacctaaagaacgcattgttccaccaccacaaaggtccccaactaattccctcaggattgatcgttttctccgtccatttaccctaaaagcagtgcaagaacttcttggtaagactgggaatgtcagcagcttctggatggaccaaataaagacccattgctatgtgacttactcgtctgtggatgaagccattgagacacggaatgctgtatataatttgcaatggccaccaaatggtgggcgtctcttagttgctgagtatgttgatcctgaagaagtgaaaatgaagttagaacctcctcctactcaggctgcatctgtcagcactgtcccagcagttcctcctgcacctccctcacagccagagccttcccctcgtctgcacagggagccgcatccagttccagctactctcccacctccaccaccattgtcaaaacccccaccagtagcaagagaacggcttccatctccaccaccccttcctgagaaagttgacccacccattgtcactctggatgatctctttcgcaaaaccacagccactcctcggatctactatctacctttgtctgaagagcaagttgcctcaaaacttacagcacagggtaaaagcgcgaggcagtagataggccattagcctgcaaatcttcttcccttgcagcctttactgatttggatattttaattagtggtatgggattattttgaatgtcttggcagatctggtggtgttttgtctcgggaagaaattgcattgcttgagacttaaatttatttagttttagaagtcgtgaactaagagctaccggggttggatagattttccccactgtttgaactaggcttgagcgaacctttacctaaaattttatggaaaaatttgacgttagaatatgtttatattcctagccacgaattttgttttcggtagctggctttttcttgatccgtgtattttcttatgctgagtgtcgattgattttagtc

SEQ ID NO: 110519 - DNA, 298 bp, Glycine max
  unsure (1)..(298): unsure at all n locations
  Clone ID: PAT_MRT3847_7080C.1
tctaccctttcctagtaggtagatttcaaattccccagattagcanntttataagatatcttttacccaaaccccttattaggaccagaaaagacccacttcactctttctcttcttcccatccctttctctatgcctcaaatatatatnataataaaactctacaactggccaaaaaaatcagcttttgctccctgacacattagtatataatatatagnttttatgtgttgtgtagcactttagattactacttactagagtgaaaagcgagaggcanaanagaggaagggagaga

SEQ ID NO: 110520 - DNA, 1060 bp, Glycine max
  unsure (1)..(1060): unsure at all n locations
  Clone ID: PAT_MRT3847_70810C.1
tacggctacagaagggtatcattatgggattattctaggcaattccctccccgaaaaggaaagaaattagtacacgctttttactttttttctttcgatatctgtatattggggattataaatattatctatctatttagtgagaagcttggattttgttcttatctactcgcatattttactctctagtgttttaattttgacataacgactaacacttgttccttttatttttattttttctttcttgcagcaggtgtacggtacgatggtagtgaggagccagaatccctcttcctgctttatgatataatacaaataaaatagcgattccggaaatcatgtctgtagctgctctttttatttatgtgataaatgtaaaacgctttggtttggcttggccgttgtgcattaggttgaaaaaataaatgttataattactcnnaaaaaaaaaaaaaaaannaaaaaaaaaaaaaaaaaaaaaaaataaaaaaaaaaaaaaaataatttatttataaatataatttaatattttacgtaatgaagttctcatatttattgagtggctaaaagggcaagcctttgcctcagtacaacattagaagattattgcaactgcaaactggaaaagaacacggaattttaaagcaaagatgtgacaccaccgagttttaacacaggaatagtgttaaaaagatgaggcaccaaataaaaactatatatatatatatatagcagcatgacattaattgcttctcccctcgatttgagtgaaactttagagtccagaaacatataattttcgtcagcaattacgaatatatataggacatgctcgttttggtggcggatagcaaggtatattcgggttcgatgtacatccagtcacccctcctttctgcagtagttgtcgagcaagagttgaactgggaaggaaaaaaacagaggccaagagtaagaagaaaacaataatagccttcatcgtttcgggatatatatctaatgcttagtagatgtatttcaattttcctggacgcgggggggccgcctcgagcggccg

SEQ ID NO: 110521 - DNA, 256 bp, Glycine max
  Clone ID: PAT_MRT3847_70811C.1
ctcattccgccgcctacgtacctctacgaatgcacccctcttcttagggatggcgaccgtttctaagcaattgctccatctgacaatgcatggattcaacttacttccgctgagagacttgacccacgcaccctcaggctgatcgagctcttggagctgatccagatagagctgcgcctggctgagaaccacgtagatagctggaatgccagaggcgataggacacgggggccgtggcactgaccatgaaaccata

SEQ ID NO: 110522 - DNA, 405 bp, Glycine max
  Clone ID: PAT_MRT3847_70812C.1
gagagatgcatagaggaatatgtggaatgcactcaaagtctcaattgatgacaacccgagttctgagagtcggatactactagtaaacaatgagaaaatattgcacagaatatgtgaagaaatgtgaagaatgctagaaatttggcaacatctctcacttgcttgtcgaagagctacacaatatagtagcaccatggccctttgccatttgaggagtagacatactcagacctttccccttatcaaagagacaagtgaaatatctcctagtgggcattgatcagttcaccaagtggatagagactgagcacatcgccatcatctcaatagccaatgttcggaagtttgtttagaggaacattgtatgctgatttggaatccccaacactttgatctcggataacg

SEQ ID NO: 110523 - DNA, 147 bp, Glycine max
  unsure (1)..(147): unsure at all n locations
  Clone ID: PAT_MRT3847_70813C.1
ttactctggcaattcttcgggggggctggggggggtatcctttttgagcgttaatgggggggcctgaaaccttccctttcanggggagatcaaccagcttctaagtctcatcatcaacgcattctacagcaacaaggggattttctt

SEQ ID NO: 110524 - DNA, 460 bp, Glycine max
  Clone ID: PAT_MRT3847_70814C.1
gctgcgagaagacgacagaagggtgccattacaatgtcactatttaagcctccaattaaacccaactgtgaaacaacttcaggaacacaagatttcttcattgcagattattctacttcagccaaatagtcatcaatttcagctggtgtcaataccctgcaacatcattaacatgctattgctaagtcacccagttaaacaatctaaatatgaaaggatggctttgaagtttgaagtctagattgatttagaatttaagtgtagaaaacttgaaagtctcatttttgtgatgcaattctcttttactttgaaatactccaaatttattatttcagattgaacaacccaaaatcaacacaattagactgatgacagaaaccagagagtcatgcaatgtaggtatatttcaagtatgcatatatgcacctgaactttttatcagcaccaattatgccaattt

SEQ ID NO: 110525 - DNA, 600 bp, Glycine max
  Clone ID: PAT_MRT3847_70815C.1
ggccgccctgttttgggggggtttttttatttttttcttttgggggtttttttttttttttttttttttttttcaccaccaaaaaaacctttttccttcctcaattaattacccactacaggatgaccaaagtttttttatgaaacaacatcccccttcggggggggggttctatcttgggctataaaaccaaaaaaaccacgagcttttaaaaatcccttcctttggctactgctttcctaatcaccggtgaatctttaaagtggaaagccccaaattcaactggccccagccagcgggcgtttatttatatatacatacttacacatataaagagcccttaatatgcttcccccttttactatgggcaagacaaaaatggcaaccaaagggggcaggcccattgggtcccaacaacaagcctcccaaaaccaaagaacaccctaacaaaggcccgcccccaagcccacctttttgttagagaacccctccgccttccacagtggttacgacccaccctacaaaggccccaccggttgtggtttatgctccgacaccaccttatcaatcttctcccgggcccggtggcactaccgggaa

SEQ ID NO: 110526 - DNA, 156 bp, Glycine max
  Clone ID: PAT_MRT3847_70816C.1
gggacgctggtggatattgtaaacatgcctctgcaatatctgggcttggatggagaaaaaagttccattgggctcgccgtgagcaaaatgcaaacttggcttttgaatagttaaaggcacttctttctagtgttttaaacacaaggccttacttgg

SEQ ID NO: 110527 - DNA, 945 bp, Glycine max
  unsure (1)..(945): unsure at all n locations
  Clone ID: PAT_MRT3847_70817C.1
aattcggctcgagagattatctcatcaccaccatcccgaaataaagtaacctcaaaccacaacttctttgcatctcacacaacactctctctctctctctcctctctcttctctctctgcgtttcactgcagaaccaaaacaagctccggagaaaccgcaacaaaaaaagaaaaaaacacacaaacttaacccaaaactgtaaccccagtatgccatgcttcacaccacaccattctcttctcctcctccttctctctattttcttcttctctctctccgtcaccgctgcaagaacctcttctttccattccttacgtattcaaggtattttttccccttttttttttcacttttcatgacctatttacaaagttttgatattcatgaaatgggtatgttttttttttcgcttttgttatctgggtattgttttttcttcagatggaattgagggtggtggcgagggagagcactaccacgaggtgctaccgtggaaaacgaggagatccatggctgaagaagaggccacgagcaacgcctctctgatattggctcagaaaagaaccacaaggaaggaccctttggataacttcaaccgttacaccggtggttggaacatcagcaatcgccactacattgctgtcagttcctacctaaccttctataaccactcttcacttttttttttcttttcttttttctcttttaataaaaatcaaacttctaacgtggtactagtcatttgttggtttcatttgattgtaaataaataaatttctctttaagtgaaaaaaataagatgaaataaantttgagtttttctttaagttaaaattagtttattaagaagttggatggaagaattttctatacaaaattaagtgtataaaatgattttggcttatgaagaaactcaatttattttactttgncatattcttctc

SEQ ID NO: 110528 - DNA, 460 bp, Glycine max
  Clone ID: PAT_MRT3847_70818C.1
ggttgacgacgctcactacgtcggctggccgaccctggtttgtgtgcatgtattgatttttttgtttttttgatggagttaaacataagctggcatcgtttattgcgaggttgcctgaaatgcttaccataaaatgataaaatgcctgctgcaagggttacatgaaagcacctgagctctagagggacctgtatgtgagcaagagccgtgattagattgcttgactacagatgcaatgatgaagcatcaaatgttgaggcaattatatgcaaaagggataatgccctgatcagaacagtttctatacgtgttctaagacgatctcgactttctgaacaacctcattgggacttatgtcaactttccatgatatgcttttatattgcaagtgttgctggggagacttttaggctaaacgagccagtctgccgaatgagtattaaaacccaatagggttccc

SEQ ID NO: 110529 - DNA, 494 bp, Glycine max
  Clone ID: PAT_MRT3847_70819C.1
atttctagacgtggctgattagaccaagtttctccgtgcacattcctgctgaaaagcatagtaggcacacagcaggctgctttcactgagaatgtcccgattggcggagttcgtgttacagtggtctctcgtaaggattccgacagtgaaagttgtgtacaactctgcgatactgagagtgagtgcatgcttccatggaattgatgcacatctatagcgaatggtctagaaccctgtaatccccatctggctggacatgctgcataactgctttgatggagacgtgactcgtatgttcttcattctgcatgagccaccctgcgaggtcgatgccgcctctgttcattgtctctgcccttctggcacacactgagcctcaactctccgcagctaaagaagctctgccagaagctatatgagcatctgatggatagtcatggcgtgacaacgtgatacttgctcaaacaatactccaccgaggattggggtccggc

SEQ ID NO: 110530 - DNA, 2279 bp, Glycine max
  Clone ID: PAT_MRT3847_7081C.1
caacaggggaaagtggaaggagaacgcaaaagggtacccttgttttcattgtctcgattgttttcctattgtcatttatcatcataaaccttcagagccatgagcccagctttgaaaacaatatcacaacggtgccattactacctatagctagaggggtcgctgagggtgtatcagccaagtcaaatccatatctatcacagaaagcttcatataattggacaaatgccatgttatcttggcaaagaacagctttccattttcaacctcaaaggaactgcgcatgtttgttggtcttatctgcttcagatcctaacggtccattgttttacatggggtggtaccatgtattttaccaatacaatccggattcagccgtgtggggcaacataacatggggccacgctgtatccagagacttgattcactggctctaccttcccattgccttgtttccagataagtggtttgacgtcaacggtgtatggtcaggttcagcaacccttttgccagatggcaaaatcctaatgctctacacgggtagcaccgatcaaaacgtgcaagtccaaaatcttgcctaccccgccaacctatctgatcccctcctccttgattgggtcaaatatgctgataaccctgtcttggtccctccaccaggcattgggccaaaggattttcgtgacccaaccactgcgtggattgggccagatgagaagtggaggatcactattgggtcaaagctcaacaagacaggtctttcgttgctttataaaacccaagatttcatccactatgagcaaagtgatcgctatttgcatcaagtcccgggtaccggcatgtgggagtgcgttgacttttacccggtttcagtaaacgggcctaacggtttggatacatctgaaaatgggccagatgtgaagcatgtgttgaaggctagtttggatgacactaaggtggatcattatgcaattggaacctacttcattgaaaatgatacatgggtgcccgataacccgaatgaggatgtgggtatcgggttgaaattggactatgggagatactatgcgtcaaagacattctatgaccaacaaaaacaaagaaggatcctgtggggttggattaatgaatcagatagtgaaaccgctgacttgaaaaagggttgggcatctctccagactattccaagaacagttgtgtttgacaagaagactagaactaatttgcttcactggccagtggaagaagtagaaagcttaagacttagcaactccgaatttgaaggagttgtggttaaacctggctcagttgtgccactggacataggcccggccacacagttggacatatttgctgaatttgaaatcgaagatttagcatccaaaggaattggcaaggacaatgtagactgtggaaatggagctgttgacagaagtgcttttggaccattcggtattttggctattgcagatgaccaactttctgaactaacaccaatttatttccatctttctagtactactaaagatggcagtttaaccacttccttctgtgttgatgaaactaggtcatcaaaggctcctgatgtttcaaagctcatttttggaagcaaagctccagttctcagtgatgaaaaattatcaatgagggtattggtcgaccattctatcattgagagctttgctcagggagggagaacagtgatcacatctagagtttatccaacagaagcaatatatggagctgcaagattgtttctgttcaacaacgcgacggacataaacatcaaggcctcgctcaagatttggcaattgaactcagctttcatacgccccttcccctttgaccagaagttgtgaaagtcaaagctatggatgcacatttgcattatatattttgtaaacggttattactattgcccctgccaactaaggaaacaatgaaagtcttgtggcatcaacatgcataaaggcataaagctgataagtttaattagcttgagttatcctacagcttgtaggcatacccatgccatggatatccatattatttggaatttgtcaagagtcattaaagtctaccactagagtaattatatacaaaagagccttctattgttttattttatttttatcttaattttcatatcatattatatacatatcattcttacacttccctcttattctctgaaatagcatatgggtgtcattgtgtccttatatacggagacccttctattgtattttattttctttttcttcctatcattttatagtaca

SEQ ID NO: 110531 - DNA, 561 bp, Glycine max
  Clone ID: PAT_MRT3847_70820C.1
tcgctatatcaaggaattcaaaaagagaaaaacgaaaatactcatcctcataagcatgacttcagcgtcaccgggtcatcggagaaaattctccggcaatgacccgccgagttccgggcgcaaactccagccagagaaacactccggtcgccgatttgcgcccgctcctctgacgctgaagcttccgttgcaaaacagtgagtactctcttcttcggccatcgaagctgttgctgaatgtgaccatcgagaactgtttgggggccgtacaggtgctgttgtcgcctgaggacaccgtcgccgatttgataaaggctgcattggcgttctacgagagggagaagaggaggcccttcttgaagaacactgatcccaagtgctacgaccttcacttctcgtccttcacccttgaaagtttgaagccagatgataagttagtgaacttggggtcaaggaatttttttctgtgctgtaaggctcctgccgctacttgctttgagaaaaagaatatggcaactgattctgcatttccttggatggtattcgtcccactgctgcttta

SEQ ID NO: 110532 - DNA, 1381 bp, Glycine max
  Clone ID: PAT_MRT3847_70821C.1
gtaacatccatcgaatccaataataccaaaaaacaccatgatgcttgggggagacccaccgcccaaatccaaccgtacacgtgccaccgtgggcgccggagatcttctcaccatacaccggcaatgccgattactctccgtactccatgcaagaagcacttagtgcacttcagcactacgaatccaccgatgctgagtcagactcggaggttccgtctcgggaaccggaagtcccggtggacgcttactcctgcgaccatttccgcatgttcgagttcaaggttcggagatgcgcacgttgcaggtcgcatgactggaccgactgtccgtacgcccaccccggcgagaaggcacgccgccgtgatccccggaagtaccattactccggcacggcttgccccgatttccgcaaggggagttgcaagaagggtgacgcgtgcgagtacgcgcacggggttttcgagtgctggctccaccccgcgcgctaccgcactcagccttgcaaggatggcaccagttgtcgccgccgcgtgtgtttcttcgcgcacacgccggatcaacttagggttttgccacagcagagtccgcgcagtgctgattcctacgacgggtctcctttgaggcacgcgattgagtcgtcgtgtgcaaagtcgcatccgtttgtggcttctcccggttcggcctcgtcgccggtggagtctccgccgatgtcgccgatgactgtgagtgttaatgagatggtggcttcgctaaggaacttgcaactggggaaggtgaagtccttgccttcttcgtggaatgttatggggtcttccgggttcgggtctcctagaggacccatgatccgacccggatttttcagccttccgacaacgccgacccaggctccgactcgcggtggggtcaactactttgaccagtgggatcagagttgttgcgaggaggagcctgttatggagagggtggaatctggacgaagcataagggcgaggatgtttgaaaaactgagcaaagagaatcatctggacgggtcgggttccgaatcgggtcaaatcggggttcccgatgttgggtgggtttcggagcttgtcagtcgctgatttcattttgttgcacttccctcggtgtgtatagaatgcgggggagaagaaaagtaagatttattttggaagaaggagcatcaactcaacttgtggtttctgtaaatagcttattctcaaggtaaggtatggtatgggtgaagaagttaattaagagaaagagtagaatctttttttggggttattttcttggtcgatcaagaagtgatttgcaagaatcaggatcgtaagcttttgtataggtagctgcggatgatgaaattatattattcccacgtgtt

SEQ ID NO: 110533 - DNA, 2730 bp, Glycine max
  Clone ID: PAT_MRT3847_70822C.1
cgggttcggttttccgagagggcccatatccgacccggatttttcaaccttccgacaacaccgacccgggcacgactttcgggggggtcaacaactttgccaagtgggatcagagttgcgagaacaagcctgttatggagagggtggagtctggacgaaacataagggcgaggatgtttgcaaaattgagcaaagagaatcatctggacgggtcggattctggatcgggtcaaattggggatccggatgttggatgggtttcggagcttgtcagtcgctgatttcattttgttgcacttctctcggtgtgtatagaatgcgggggagaaaaaaaaaagtaagatttattttggaagaaggatatcatcaacttgtgttttctgtaaatatctcattctcaaggtatggtatgggtgaacaacaagttaattaagtgaaaaagtagaatctttttttttggggggattttcttggacgatcaaaaagtgatttgcaagaatcaggatcctaagcttttgtataggtaccagcggatgatgaaattatattattcccacgtgttaactcctgtgtttattatcacgtggcaggtcacacgtctggaccgagtgtccgtacgcccaccccggggagtaggctcgccgccgagatccccggaagtaccattactccggcacggcgtgccccgatttccgcaaggggagttgcaagaagggtgacgcgtgcgagtacgcgcatggggttttcgagtgctggctccaccccgcacgttaccgtactcagccctgcaaggacggcaccagttgtcgccggcgcgtgtgtttcttcgcgcacacgccggagcaactcagggtgttgccacagcagagtccgcggagtgctgattcatacgacgggtctcctttgaggcatgcaattgagtcttcgtgcgccaagactctggcaccggcaccgtttgtgtcttctcctgggtcggtgtcgccgcctctggagtctccgccgatgtcgccgatgactgtgagtgttaatgagatggtggcgtctttaaggaacttgcaactggggaaggtgaagtctttgccttcttcttggaatgtcatggggccttccgggttcggatctccgagagggcccatgatccgacccggattcttcacgactcggaattcccggggcaatcccacgaatccaagtaaaaccgaaaacatccatcaacaccatgatgcttggggagacccaccgcgcaaatccaaccgtacacgtgccaccgtggacgccggagatcttctcaccgtacaccggcaatgccgattactctccgtactcattgcaagaagcactgagtgcgcttcagcactacgaatccaccgatgctgagtcagactcggagtttccgtctcgggaaccggaagtcccggtggacgcttactcctgcgaccatttccgcatgttcgagttcaaggttcggagatgcgcacgtggcaggtcacatgactggaccgagtgtccgtacgcccaccccggggagaaggctcgccgccgtgatccccggaagtaccattactccggcacggcgtgccccgatttccgcaaggggagttgcaagaagggtgacgcgtgcgagtacgcgcatggggttttcgagtgctggctccaccccgcacgttaccgtactcagccctgcaaggacggcaccagttgtcgccggcgcgtgtgtttcttcgcgcacacgccggagcaactcagggtgttgccacagcagagtccgcggagtgctgattcatacgacgggtctcctttgaggcatgcaattgagtcttcgtgcgccaagactctggcaccggcaccgtttgtgtcttctcctgggtcggtgtcgccgcctctggagtctccgccgatgtcgccgatgactgtgagtgttaatgagatggtggcgtctttaaggaacttgcaactggggaaggtgaagtctttgccttcttcttggaatgtcatggggccttccgggttcggatctccgagaggacccatgatccgacccggattcttcagccttccgacaaccccgacccaggcaccgactcgcggtggggtcaactactttgacaagtgggatcagagttgcgaggaggagcctgttatggagagggtggagtctggacgaaacataagggcgaggatgtttgcaaaattgagcaaagagaatcatctggacgggtcggattctggatcgggtcaaattggggatccggatgttggatgggtttcggagcttgtcagtcgctgatttcattttgttgcacttctctcggtgtgtatagaatgcgggggagaaaaaaaaaagtaagatttattttggaagaaggatatcatcaacttgtgttttctgtaaatatctcattctcaaggtatggtatgggtgaagaacaagttaattaagtgaaagagtagaatctttttttttggggggattttcttggacgatcaagaagtgatttgcaagaatcaggatcctaagcttttgtataggtagcagcggatgatgaaattatattattcccacgtgttaactactgtgtttattattatcactaatctcatctcattcatgtataaatttgaaatatttctcggatatgttatgaagaaattcaaacttgtctcccttattaatctttcatatttgaaaacaaaaaaaagcgcccgctctagaggatccgagcttacgta

SEQ ID NO: 110534 - DNA, 315 bp, Glycine max
  Clone ID: PAT_MRT3847_70823C.1
gggaaattggtttttttaaagaaaaaaggacaacatttttggcaaaaaaattacatgacaaaattcaaaggttgatggttaaaaaaagcgcaattttttctttttaaaacccaggactttaacctaaaaatgttgtgagttaaactaaccaggttaggggctaaatttttttctttaggataaacttcttttttttaaataaaaaggccatttttcaaaacaccacctttaatttcaacaacaaagatctgctttaaataatccaaccttttttttaaaaactccccattttatatttttaaacgacccatcctt

SEQ ID NO: 110535 - DNA, 446 bp, Glycine max
  Clone ID: PAT_MRT3847_70824C.1
ggaaaaaaacaaaggaggggggcaaactttcagtctaccccctttgtttttaaaacgggggggccaattgcaccccccgaaggccccatgaccaaaaaacctaaatttttggagcagctaaggttaaaagaggaaaaaaaaacctaaataccaaaaattggggggaaggaaataaagagccctttagttaaaccacaaattccctttttttattaacattatggggagccctcgttggccctcaaattacaggatacaacaatttcctcctttccatgccgaaccagttacccattttgaaaaatttattagggggcccaaaaaaaaggggcaaaaataatttcaaaaaaacatcccttgaccaacaactttttggaaaggagggggttttcgtaaggcccctttgccaatgtttacatttgacaaaggttacatgcccagctaaa

SEQ ID NO: 110536 - DNA, 259 bp, Glycine max
  Clone ID: PAT_MRT3847_70825C.1
attaacagcattagccaacctcatgtttaaaacacaaatgcatccaattgttttgggttcatagtaatgcccaaaaaataaatatgagaatggagagaaaccaagcatggcgagacacggttaaccgaagctcctaaaaacaaagtacaaagcaaaccggtggggttactagggagcacacgtagccccagttaaagcaaactgcataaacagaccctctactaacgaaagctaattacccctattgaagatggcccta

SEQ ID NO: 110537 - DNA, 457 bp, Glycine max
  Clone ID: PAT_MRT3847_70826C.1
gatactctgatgaaccgggatcacaggtcgccggaccttatatccggaaacaaaagcattcgtttcttgactccaagaatcttccaagtttcttcctacttgttggtgcacgattgcttaagggaaagaaaatcactctctgtgctggccacagacttcgtgaatcattctcttttacactcttagctgatctgctgaacactctcctattggatataggacttcgtgtcagatttaaactttgtctgtttctttctcagctctctgcttaatttcaagttcaagctggtgaaatcttggattagcgctcccactctcctatgtggtataggacttcgtgggtagacttttctatttgtgtccattctttcactctcttcttatcactgatgccgatagccgatcaaagtggtcttatctgaaaaacacttgggcgctggtgcacatgtctgcttcg

SEQ ID NO: 110538 - DNA, 469 bp, Glycine max
  Clone ID: PAT_MRT3847_70827C.1
gcggctcccgtcctatgacgtcagccgtaaggcgctgctgtcgtaaaaggacgtccggtccgtctcctagtgtccggaatcggctgtcagcctccctggctgttagtaccttctttcccggagtcctggtccacgagttggatttactgctgtcgcgggtgggcctcacgccattccctgtccctcggccccctgagtgagtccggtctcccggcgaaagtgagcgaggtttgcccggagcgcgcacgaggggaaaatgcctaaaaaaaagactggtgcgaggaagaaggctgagaaccgccgagaacgtgaaaaacaactaagagcatcaagaagcactatagatttagctaaacatccatgtaatgcctcaatggtatcagctttttttgatatcagttggtagttggaaaaactatatactattttatctgacgtatacctgaataaaatattagtgaagacaggg

SEQ ID NO: 110539 - DNA, 836 bp, Glycine max
  Clone ID: PAT_MRT3847_70828C.1
actccaatattcaatattcaatcattcatattccaatcctgaatccttccttcatttcatcagtgaattatcaagtgtcaagtgttaactaaccgccatcgatcatgaggtgcaaaaagcagagccagaacaagttagttcgaatcatggcatcgccaatcagagcactgggaaaagcacgtgacatgtacgtgcggagcattacgaactgcggccagcacgtgagctactacggcggcggcgaccccacggaaggcgccggaaggttctcgaggagccacagcgtggccacctcgacaacaacgaggtacgaggttgtcagcgaggactacgcggagcttctcagagccgcgtccgcgagaaccttggcgaatcgaatcgacatggatttggttctcaaacagcaacagcatgcgaactctttgaaaggtaacaatttgcctaagtccagcagtgttgggatggcgaggattgacgaggataaaccctatgattccgaaggaggtgttgcttttgtgacggatccgtatccgaggagtagaagctacgctgtggcgaagagaggacctgcttttgaaattcatagttcaagacttgtgtcggttgaagctaggaaataggagaagtacttagatataacttgtgtgagggagaaagagattttagttgaatttgtaagaattagtccttctcctttctttctgaatctgtttcttggtgttttggataaaattaattgcattctgcgttctctttatgtttcatgtagtgataagttgtattgatttgattgtttttgtgttttcatttgttttcggatagaaatttaatttctt

SEQ ID NO: 110540 - DNA, 422 bp, Glycine max
  Clone ID: PAT_MRT3847_70829C.1
agcttcaaaaaaacaagaagctgatcttggaaaggggttacccggccctaacaattggtttggggacaaagaacaccgggggggggagagggaaatacctaatccccagggtcaaaacggaaaaatgaaaattttttccccccaaaagaaaatataattagatctcggggggtgggtcccaagtaataccaggaaaatcctccgccgggggcaaaaattttgtaatggaacaaagggcaaacatttggaacaaaaagaacccatcccctggggatggaactttgggaacatctttgactaaatatttgggaagaacctccaatggcccccgggatagctgacaaaggccaaaccaacatttacatgggaagggtcttttctgaaggggggctggaatcaagcctctccctggaatttaaccc

SEQ ID NO: 110541 - DNA, 2286 bp, Glycine max
  Clone ID: PAT_MRT3847_7082C.1
attcaattatacactttccttttttttttttttctgtgaaagtttcattttgtcatttctgctcattaacaatatagctagtatagacactcaacgagaaaataacaagctataggccgccatgaaccctgatcttgagcatgctccgcaaattcccttgctgaatcctccaacaggggaaagtggaaggagaacgcaaaagggtacccttgttttcattgtcctgatgtcattgtttgcacttattatcgtaaaccttcagagccatgagcccagcttagaaaacaatatcacattaatacctaaagctagaggggttgctgagggtgtatcagccaagtcaaaccaatatctgtcacacaaagcttcatataactggacaaatgcaatgttatcttggcaaagaacagctttccattttcaacctcaaaggaactgcgcatgtttgttggtcttatctgcttcagatcctaacggtccattgttttacatggggtggtaccatgtattttaccaatacaatccggattcagccgtgtggggcaacataacatggggccacgctgtatccagagacttgattcactggctctaccttcccattgccttgtttccagataagtggtttgacgtcaacggtgtatggtcaggttcagcaacccttttgccagatggcaaaatcctaatgctctacacgggtagcaccgatcaaaacgtgcaagtccaaaatcttgcctaccccgccaacctatctgatcccctcctccttgattgggtcaaatatgctgataaccctgtcttggcccctccaccaggcattgggccaaaggattttcgtgacccaaccactgcatggtttgggccagatgaaaagtggaggatcaccattggctcaaagctcaacgggacaggtctttcattggtttataaaacccaagatttcatccactacgagcaaaatgatcactatttgcaccaagtcccgggaacgggtatgtgggagtgcgtggacttttacccggtttcagtaaacgggcctaacgatgtgaaacatgtgttgaaggctagtttggatgacaccaaggtggatcattatgcaattgggacatacttcattgaaaatgatacatgggtgcccgataacccgcatgaggatgtgggtatcgggttcaaattggactatggcagatactatgcgtcaaagacattctatgaccaacacaaaaacagaaggatcctgtggggttggattaatgaatcagatagtgaaaccgctgacttgaaaaagggttgggcatctctccagactattccaagaacagtagtgtttgacaagaagactagaactaatttggttcactggccagtggaagaagtagaaagcttaagacttggcagttccgaatttgaaggagttgtggttaaacctggctcagttgtgccactggacataggcccagccacacagttggacgtatttgctgaatttgaaatcgaatttttagcatccaaagggagtggcaaggacaatataggatgtggaaatggagctgttgatagaagtgctttgggaccattcggtattctggctattgcagatgaccatctttctgaactaacaccaatttatttccatctttctagtactactaaagatggcagttcaaccacttccttctgtgttgatgaaactaggtcatcaaaggctcctgatgtttcaaagctcgtttttggaagcaaagttcctgttctcagtgatgaaaaattatcaatgagggtattggtggaccattcaatcattgagagctttgctcagggagggagaacagtgatctcatctagagtttatccaacagaagcaatatatggagctgcaagattgtttctgttcaacaacgcaacggacataaacatcaaggtctcgctcaagatttggcaattgaactcagctttcatacgcccctttccctttgaccagaagttgtgaaagtcaaagctatggatgcacatttgcattttattattttgcaaacggttatcattattgccccagcgaagtaaggaaaacaaaacaaatcaaaacaacaaagtcttgtggcatcaacatgtataaattacagctttgtaggcataccgatgccatggatatccatattatttggaatttgtcaagagtaattaaagtctaccactagagtaattatatacggagacccttctattgtatttttttttctttttcttcctatcattttatagtacatatcattcttacacttctctctc

SEQ ID NO: 110542 - DNA, 397 bp, Glycine max
  Clone ID: PAT_MRT3847_70830C.1
aaaagaacaacccgaaccccccaccaaagggcccttggcccaaggccccaaagggtccgaaccattgaaaaaaggggttggcaaaactaaggggcttaatggaccaaaatatcgtggtccggccggggggcccacccaatggaactggccacacaagaaccgtccggaatccaagggccccggaaccccaatccccctaatttccaacacctctaactccaagaagtggtgaatggtgaaaaagaaaggcctcctccactaacctccgagaaaggaactttggccgaacccggggtcccgccccctggtgaaaaatatgccttcgaacaagaaggcctcctccgctgataaccctaaggtcacccaaaactttccgaacctggggttggctgaaccc

SEQ ID NO: 110543 - DNA, 295 bp, Glycine max
  Clone ID: PAT_MRT3847_70831C.1
tttggtttttttttttcaccgctaccggaagatgaactacccgaactttatgccgaacctagcatttaccaaacattcatatatatctatctctctaaaaagagggcagccttgaccttataacacccataacaagtacaaaacagtcgaacttgctcaagggcaagaaaggaccactggtattctaaggggggaagagaagacacaaaacaccagagggcaacatagtaaatagtacataataatgaagtctggaaactacatacgaaacaaatgattatctataagggccatt

SEQ ID NO: 110544 - DNA, 204 bp, Glycine max
  Clone ID: PAT_MRT3847_70832C.1
ccctcgcgtcctctccacgcgtccgaaaaaaaaaaaaaaaaaaaaaaaaaaaaaaaaagaaaaaaaaaaataaaaatatgggaggtcgttttgggggcccctttattgggtccacgttcttgtgcgctgctatgtctcatattgggtctcctatggtgacaccactggccattgattgccccgggtttactgggaaaagcctgg

SEQ ID NO: 110545 - DNA, 439 bp, Glycine max
  Clone ID: PAT_MRT3847_70833C.1
tttgaggttttcaattcttttttttttttatgccaactctccgtggcaaattattgggaccacattatgggtgcaaaccaaaaagatgccgctcgggggcctaatcaattaaagcgaacgaaactcccatgtaccttgtggagatgatagatacacgctggagaatgcgggggaggtttctgattgtgaactgaaattggcaccagattaccgtcttccaaacaacaaaattggacgaggaggccttcggtaccgttgaccattgaacatatagagaggggaggcttattgtactgatgacaaatataactaaggcaaaactgggagttcgcgaacttttgactgaaattaactcttggggtaatgttgaacatgcatacactcgatgtattgcgggggaggtgggttcaaggacctatccgaacatttatatacgagt

SEQ ID NO: 110546 - DNA, 272 bp, Glycine max
  Clone ID: PAT_MRT3847_70834C.1
catacgctttcgtccatgaatgcggatctttgtaagcggcgcagataccctagttggggcgcgggctgtcatgacatgggatatctccgtagcctaaagaaatagcaaatagtgtagccttgcgctaacagatttaagaaatcaaccgtctttgtatcaaaggtgttgccttactcttataaagtggccttccactcttttttccaatcgggaattggcggagcatgccgaattgttattggaagtcgccaccccttgtcccaaataatttt

SEQ ID NO: 110547 - DNA, 1578 bp, Glycine max
  Clone ID: PAT_MRT3847_70835C.1
ccgcgcgtacgctcctttgtttagtaaccgaccgtgtgcgagagagagagagagagagagagacggctatattcgcgcctcggtctctttatttctccgccaacgacaccaccgcatctttctctctttccgttcccttctctctccgatctgcattttgcattctcttccgatgccgatattctccaattcctcgccctgctgcaccgccgccgccgccgcagtggttaactcctccaaccggaagaccagattcgtctctccttcttggaggaattgcaaggtcacatctccaattttacggctctccgagaatgacaaattcaatgtgtctcggttagctcctagccactctaggcggtcagttaaggaccggaacatatcaatggcattagtgggcgaaactgttggagttggacaaaagggacaggtggccggctcctctagcatcttggcatatgatttgattcagggggcacttgtaagatggagttctgttatggacaggtctttacctgagccaccaacggctgtttttctgcatggaatcctaggttgcaggaaaaactggggaacttttgctaggagattggctcaagagtttcctacatggcagtttcttttagtagacctgcgatgtcatggcgattcagcatcaatccagaagaaagatccccatactgttgcatctgctgctatggatgttttaaaactggttcgagagctgagaataacacctcgtgtgttagttggtcatagttttggggggaaagttgttttgagcatggtagaccaagctgcaaagcctcttgctcggccagtgagagcttggattctggatgcaacccctggaaaagttcgagcaggtggagatggagaagatcatccagaagaactcatatcctttctaagtacactgccaaaggaggttccttcaaagtggcatgttctcagagctcttattcaacatggattttccaatgatgtggcacagtgggttgtgactaacctgcgaccttccagctctcctggttcacaatcatcaagcttctcatgggtgtttgacctaagggggattgcagaaatgtatcaatcctatgaagaaacaaatttgtggaaaattgttgaagatgtacctcgtggggtgcatgtgaactttttgaaagcagaaagaagcttacatagatgggctcttgaagatcttcagcggatccatgcagctgaagagcttgctgttgaggaaggaggtggagttgaaatgcatgtccttgaagatgctggccactgggtgcatactgataacccggatggactcttcaggatactgtcatcatctttccaattccagggaggcaagatctgagtttacaaatgtgctctcttgtaatttcgatttatacggggatggattggcttcacagtttgatgccattccttcttcccattttttgtctagttatccctttcgtatatgctattattttttttaatcttcttgtacatcacccttttatatatatataaatgtgattcttactctaaaaaccaacaaaaaaatttaatgtccctaattcctgg

SEQ ID NO: 110548 - DNA, 239 bp, Glycine max
  Clone ID: PAT_MRT3847_70836C.1
ttccgggtcgaccagcgtccggcgaacagacacacagggggtagacgggacccctggataatgggtatcgctgcctctagagatgaagcagccctgcgtatcgatctattagcctaagtgctggcttctaagatctattcttcaaccaccttgcttgactcaccccaaggcgaagttcatcctacgaccccaactacaaaaggaactaccccactctccctacttatcctttattccta

SEQ ID NO: 110549 - DNA, 1195 bp, Glycine max
  Clone ID: PAT_MRT3847_70837C.1
ccacgcgtccggttcaacttatccacaaagaaacatcgtggttccctcgcatcagcatctttcgtaattttcttcactgctatttaccattgccacactctcattctcgatggcggcgaagatttcattggcaattggtttgagaactctcttcactgttttgggacttctcatgcttgctgtctttctttacactgccttcaccgatggtctatgtgttcgctttctcaaagaacttgtcagaccgtggatggtagcaactttggtttgtttctatatcaacattgtagcttttgctgtctggattgcttacaaggaatcaaacttgatcagctcaattctgtggattgttttgattgccttgttagggagtatctttacatctgcctatattgttgtgcaatttctgaagttgtcatctcaagaatcttcacaggatcctatgtattatgttctgttgcggcatccaaacaagaatggcacagcaccacaaagacagcgttcatctgttgtgactctaagaataattttcagcattttgggtgttgtcatgcttggaactttggtgtacactcttgtcaccaatggttctcctttccgtaaaggggttctaactccgtggttggcaacaacactagttgacatctatttccacattgtgatttatgcagtctgggttgcctacaaagaatctagttggatttctgcagtcttttggataattctattgatatgttttagcagcatggctacttgcctctacattacatggcagctgttccagatatcttgtcaagatcctgcttaccttgttttagtgcatcatggagacagggcggaaaacgaatatacggggatttctggtgaggcaacataacaatggtgttcatgaaccaaagttgcaggaaataaaaagaaaggggatcagatcatccctgagcagatattgtaacaccagaagacaaaattaacatactggtgtaatagatgtagtttggagatcattatctctgcaaatactactgcagaagaatgatgtcattccccaagcagtaattgttctactttcttgtgttatgaatgctcaattttttcctctgtataacaccactgtaattgattataaagttcaaacgttagaatcagagaaaatgttcagatcataagtatctattcatttgttacttgcatgaat

SEQ ID NO: 110550 - DNA, 552 bp, Glycine max
  Clone ID: PAT_MRT3847_70838C.1
attctattgatatgttttagcagcatggctacttgcctctacattacatggcagctgttccagatatcttgtcaagatcctgcttaccttgttttagttcatcatggagacagggcggaaaacgaatatacggggatttctggtgaggcaacataacaatggtgttcatgaaccaaaggcaagtaagaagctcatgtggcatgttcttgcaaatctgtctgtggattgcttataaggcttatgatctggcatttactttgttcgatagttgcaggaaataaaaagaaaggggatcagatcatccctgagcagatattgtaaccccagaagacaaaattaacatactggtgtaatagatgtagtttggagatcattatctctgcaaatactactgcagaagaatgatgtcattccccaagcagtaattgttctactttcttgtgttatgaatgctcaattttttcctctgtataacccccctgtaattgattataaagttccaacgttagaatcagagaaaatgttcagatcataagtatctattcctttgtt

SEQ ID NO: 110551 - DNA, 3386 bp, Glycine max
  Clone ID: PAT_MRT3847_70839C.1
cggtccggaattcccgcctcgaccacgcgtccgaataccctcagcaataaccccgcgcccgacatttttctccatccgttccctctttctcctcccttttctttactccttcaattcctttgtctttgtcctctcttctcctcttctttctcccttgaaactaagcttttttctcatcacagtaacacacacacacaggcatcaagctttttccatggttgccatatataagcaactttatttccatatcttcctcaaagcctttttttctcctatgcatccttgaaaagggtcccttttttggcaacaagcttatagccccaaagcagatctaaatactcatcttgttctctagctagctatatatcttctccagcaatttccaccgactgtgaccttgtcagaaacagatcctgagaagttttttcaacataaaaggtcttctcagaaacacaacactggacacaagagagagaattgaaggagagggatcgaatttctcccgagtgtgaaatatgccagctggtattatgattccagcaagaaacatgccctcgatgattggaagaaacggaaccgttggtggctttggattatcttcagggctttctcttggccagattgaaaaccataaggcttcggaatctcaaagatctgaagaaatgttccagccgaacctgatggaagctggtcagctccacccactggacatgcctcagaacacttcagagagcgatgtccctagaatccgtgaagatgactttgacagttccaacttgctttttggcttaatgtgtcaccaaaaagggtttttgaattcctccgcgatgagaactccagaagtgagtgggatattctttccaacggcggagttgaccagaaaatggcacacattgccaatggcccagacactggaaattgtgactgcctacttcgtgtgaatagtgcaaattcaagcccaagcaacatgttgatattacaagagaattgcgcggactcaacaggatcttttgtgatatatgctcctgtagatattgtggcaatgaacgtagttctgaatggaggggacccagactacgtggcccttctttcttcaggatttgctatactcccagatggagcccatgcacatggaggtggcattggtgacactggacatgcttgaggctcgaaaatgctcgcctgagagaagagattgataggatatctgccattgctgcaaagtatgttgggaagcctgtggtgagctatccacttgtttctccttcatctgttcctcctcgtccactagaacttggggttagtggtggttttggtggccaacctggaggcattggaggggacatgtatggtggagctgcaggagatcttctaaggtcaataagtggacctactgaagctgataagccaatcataatagagcttgctgttgcagccatggaggagctcattggaatggcgcaaatgggtgagcctctttggttgactaccctggatggcaccactgtgctcaacgaggatgagtacatcaggtcttttcctcgagggattggtcctaaacccgttggtttcaagtgtgaagcttcgagggaaactgctgttgttatcatgaaccatgttaaccttgttgagatcctcatggacgtgaatcaatggtccacggtgttctctggcattgtctcaagagcaatgactttggaagtgctatcaacaggggtggcagggaattacaacggtgcattgcaagtgatgacagcagaagtgcaagtaccttcacctctggtgccaactcgagagagctattttgtaaggtattgtaagcagcacggtgacggaacttgggcagtagtggacgtgtccttggataatttgcgtcctagtccttcagccagatgtagaagaaggccctcaggttgcttaattcaagaaatgcccaatggctactctaaggtcatatgggttgagcacgtagaagtggatgacagaggtgtccataatctatacaagcagcttgttagctcggggcatgcatttggtgcaaaacgttggattgcaaacttggatcgacaatgtgaaaggcttgctagtgccatggcaacaaacattcccacagtagatgttggagtaataacaaacccagatgggaggaagagcatgttgaaactggctgagagaatggtcataagcttttgtgctggagtgagtgcatctactgcacacacatggacaacactttctggaactggtgccgatgatgtaagggtcatgacacgtaagagtgtagatgacccaggaaggcctcctggcatcgttctcagtgctgcaacttctttttggcttcctgtgtcaccaaaaagggtttttgaattcctccgcgatgagaactccagaagtgagtgggatattctttccaacggtggagttgtccaagaaatggcacacattgccaatggccgagacactggaaattgtgtctccctacttcgtgtgaatagtgcgaattcaagccaaagcaacatgttgatattacaagagagttgcgcggactcaacaggatcttttgtgatatatgctcctgtagatattgtggcaatgaacgtggttctgaatggaggggacccggactacgtggcccttcttccttcaggatttgctatactcccagatggaaccactgcacatggaggtggcattggtgacactggacatggtggttctctcttgactgtggcatttcaaatattggttgattcggttccaaccgcaaagctttctcttggatctgttgctactgttaacaatctcattgcctgcactgttgagagaattaaggctgctttatctggtgaagttgcttgacctaatggatcatcgtttagaagaaggataaaggggtgcaatgcattttggacaaatggggaggtgttgggaacttcggcttataccaaaaatgatgagaattgagaagtcaagagcgcaccttgcatgatcctttcttagcacccaacacagtgctgagaggattaaggttcgggaattgacttccctggaaatagtacatgctaagagcttaaatcaagaccttagtacttctcttcaccttcaaagactaagtatttatagttagtgttagcttcttctatgattaggttgtagctttgacttgatctctcttatgttccttctattgttttttgtgttttgttagatcaacgcactagccttatggctagtaaatgggaagcttgcaccgttagtgtagtgtttaattaagttctcactacgctacacatgtttgacccttttaaggttttcaaatgaatgttccttccaatttgcccaatctcattcagtaatttaagtctcgtggtttataaaaaaaatat

SEQ ID NO: 110552 - DNA, 429 bp, Glycine max
  Clone ID: PAT_MRT3847_7083C.1
gaggctcgagggcacgtgtagttgagtactaggccgccgttacacgctactggtgtccgccgtcaccgcatgaatcacccaccgtgtcttagccgcagttttttacctttacctctaattgtcccttaccttccttggcgctgaaatggagagtggtccgaacatcacatccctggcacgtgacggtgccgctaagcccaccctcctcatatgcagactctctctcaaatgctgagctacgtcctcttcctccacactctttgacaacgcccaggagcctctaagctccatcagagaagagaacgaccaccctctgttcctgtgtgtatcatgccaccagctcactctggggcttgggcggctgcgtctagattaccgaggtcaagggcgacgctgtcagcttcttcgttgaatacaacgaccgctgcc

SEQ ID NO: 110553 - DNA, 259 bp, Glycine max
  unsure (1)..(259): unsure at all n locations
  Clone ID: PAT_MRT3847_70840C.1
gcattcaatcaaggctatcaggattttacgtgaaatctgagcgcagaaccttctanctttcctattgccaccccctggcacactaacccatatcacatcccagaaaaggatgcacacatantttcctttttgttcttcgatgcacttcgagacaaacttgaaacgacacattatacctaaacggggaaaggaacaacctaaccgttgtacttaattttatacccagnnatcctggaatgtcactcgagcttaacannct

SEQ ID NO: 110554 - DNA, 489 bp, Glycine max
  Clone ID: PAT_MRT3847_70841C.1
acccaaataaaaaattaggaaataaggcccccttttattaaaaaaaggatcattcccagttaaaaaaaaatccctattcttacaaaggggggaaaaaaaaaaaacaatataaagtttataacccaaaaataaattaatttttttttaagggaaaaaaaattgacccccccgacaaaagccttgaaacggtttttccttggttctactacccgtttttgacttaaacatgccaaagggttttatttacatttttaccacaaaaaaaaacgggtttcaccattcaccaccactggtggaaaaaaaaactattcccccaccactttaacaggagcaggaaaccacttttgggagccccagcgatgggagtagccattatttttgagcctaaacagcattaaaaagttatggccatgggtgggtgaatccaaattctttttcagttgggggaaacggggaaccaacgctttgtccatccattcataaaggggg

SEQ ID NO: 110555 - DNA, 475 bp, Glycine max
  Clone ID: PAT_MRT3847_70842C.1
tataaattgatcaaacgtagaagcatctctggatatgcatggggtcaaaaaaaaaaaaaaaaaaaaaaaaaaaaaaaaaaaaaaaaaaaaaggacaaacaaaaaaaaaaaaagcaagcttacgcatacttgcaaggtccaagctactcttttatgtaaagttaaataaatattatttgcacgccgatgtacaacaacgtgactgggaaaaaactgcataaccccagctaaatcaaattgcttgccataccccttctttcagctgtaggaataatttacaataccgaacagatcgtaattgataacaatctctaaccctttatgaataatgaaaggcaccctgactcgaacgagtaagcaccatcgacgtgggggttacacacagcgagaccgatagattcgctaacacccaacgtaccgctacttccggttacttccctacctttctttcctttactgccggctttccccgccaa

SEQ ID NO: 110556 - DNA, 351 bp, Glycine max
  Clone ID: PAT_MRT3847_70843C.1
ggggcaaattgaaatttgtttccttggaaaaaccaatcttttgaaatgccccaaatcccaattttaatagggaaaccccctcccattttgaaaaaaactcccagcttaagaaagcgtagctaaactaatgcttaaaaaaagcaaccaactaaaggcttttgattttgcaaacaaacacgggccaatgaaaaaacaacttaacccggggatcagggggaacttatatgcccttcaaatgaatcgcaggattctgccataaaaaattgttaccttattttaggggtcaccaaaatcacctttttcttgcaaatatcatttttttaaaacccctgcctagaaaaagcaaagcct

SEQ ID NO: 110557 - DNA, 747 bp, Glycine max
  Clone ID: PAT_MRT3847_70844C.1
ccacgcgtccgacacgcccgtccgaaccatcttttctcttcgctgttcctcttcagatcaaacgcacacagttacgctcttcaaatcaatctcttctcagaaatgggtgtggctcaaaacattcccgatgcggaggagggaaccttggagattggaatggaatacagaactgtgtctggagttgctgggccattggtcattcttgataaagttaagggacctaagtttcaagagattgttaatattcgcttgggagatggaactactcggcgtggacaagtgctagaagttgatggtgaaaaggctgttgttcaggtctttgagggtacatctgggattgacaataaatttacaactgtgcaatttaccggagaggtgttaaaaactccagtatcattggacatgcttggccgcatattcaatggttctggaaaaccaattgataatggtccacccatattacccgaggcttacttggacatatcaggaagttccatcaaccctagtgagagaacctatcctgaggagatgatacagacagggatatctaccattgatgtcatgaattctattgctagaggtcaaaagatccctctattctcagctgctggtctcccccataatgaaattgctgcacagatatgccgtcaggctggcttagtcaagcgactagaaaagtctgataatcttctcaggggtggaggaaaaaaaggacaattttgcccatcggtgtttgcagctattggg

SEQ ID NO: 110558 - DNA, 362 bp, Glycine max
  Clone ID: PAT_MRT3847_70845C.1
gggggaaaaaaaaggggggggtttccttggcccttaaaacttatttctctccaaacttaaaacctttttccccttaacttaatttgggggggaaaaacaactttttgggacagtatttaaaaacaaaaataatgttggtttaaaagggccaacccccccacccttctttttttttcagggggattttttcggttttaattttggggaaacgaggaaccgggtaaaaaacccaagtcccgaaagccctcccctaaacccggggcggcccaaaaaaaaagcccttgcgggaatggaaaccaaaccacccctttttttcaaaaaaaaaaaattccataaggggttggaaaaacccaacccccatt

SEQ ID NO: 110559 - DNA, 763 bp, Glycine max
  Clone ID: PAT_MRT3847_70846C.1
agccattgttcttcggttccattccctgcatttttctagctccttctctcatcactcatctatggctacctttccctcccctccttcaccatcttcttcttcttcaattccgtctccaagatctagaatgttttactatgctggaagtgaagaccactatgaggagcctcacttcctccaagcttgttttctttgcagaaaaccactaggccaaaatcgtgacatcttcatgtacagagggaacacaccattttgtagcaaagagtgcagacaggagcaaatagagattgatgaggcaaaggagaaaagttggaagctttcttccaaaaggggtgtgagacaatcagagaccaatcaaaattccacacccaataaggctgtaagaacaggcacagttgcagtggcctaatcataatcaaacaaagaataatcatgacatgatgatgatgatgagtggggaaagtgtccaatttttgaagtaaaaaaaagattgaatattggaaatggaaaaattccaaaggaagaagtgcaatcatcaataatccatgaagattctgataacccgggatgaatcttcaattcgctgcctttgtaaagaaaaaaaagttgggttttccattgggagaaaaaaaaacccaacaaagaattttggctacttttgtttctgtttttggtaatattggtttgaccttttttttaatactcttttactctacctgctttgaatgttctataagaaaaaaacatggatattcatattgaa

SEQ ID NO: 110560 - DNA, 988 bp, Glycine max
  Clone ID: PAT_MRT3847_70847C.1
actctctctctctttttctcttttttattttttttttttttatttttttttgctccaagatccagaaatgggagcggctcaaaacattcccgaagcgggggagggaaccaaaaaaattggaatggaatacaaaactgtttctggagaaagctgggccatggggtcattccttgataaagttaacggacccaaaatgcaaaacattgaaaaccttcgcttaagaaatggcactactcggggtggacaagtgctaaaagttgataaagaaatgactgaggatcagggcttaaagggtttattacaaattccatctaacatgggaaattgacaataaatttacaactcctgaatttactggatgagggacagatatatcccgtatcacagttgtataacaggcagatttatcctccaatcaatgaaattccatcatagtctcgtttcctgttgagtgccattggtgagggaatgacacgaaaggatcatcaagctgtgtccaaccagctctatgcaaattatgccattggaaaggatgtccaggcaatgaaagccgtggtcggagaagaagcactttcatctgaggacctgctgtatttggaatttttggagaagtttgagaggaagtttgttgcccaaggagcatacgatacacgcaatatcttccagtcactagatcttgcatggactttgcttcggattttccctcgcgagcttctccaccgtattcctgcaaagactcttgatcagttctacagccgagatgccagtaactgaggatataataatagcaaggtcttataagttataccttagtcacatgctcaatcatcttgtaatgaccctgactattgttttatttcttagatttctcatccaacaatctttatttcttctatcacaccatattcatcatatataataaaaggtttgagtgcctcagttaaaaaaaaaaaaaaaaaaaaaaaaagcggccgctctagaggatcca

SEQ ID NO: 110561 - DNA, 407 bp, Glycine max
  Clone ID: PAT_MRT3847_70848C.1
ggaaacaggggaaaaaatcgccctttttatataccctttttatatacatggatcaaaacattttcccttggggcaaaaaagggggggattttttttcctaataaaaaaaaaaagccagagggggccaagggcttaaaaaaaactacaaaactttcaacatttttggatatcaccattaaaagttttggcttgaggagtcctacaaaaagggggcataaatacaattttttcccataagggaaaaaaaaaattttaaatttggcatctttttttttaaggggatcccacatggaaaaaggctaaaatcttcccttttttaggggaacaaaaaatattccgctggatggaatttcaccgggggcctgtccagaaaatttaatccaaccgggaattgggtccttgattcc

SEQ ID NO: 110562 - DNA, 1552 bp, Glycine max
  unsure (1)..(1552): unsure at all n locations
  Clone ID: PAT_MRT3847_70849C.1
gggaagttccatcaaccctagtgagagaacctatccagaggagatgatagcgacaggaatatctaccattgatgtcatgaattctattgctagaggtcaacagatccctctatcgattattgctgggcgcttccccatatggttcttgatgcacaactcattttggcccgcggcctttacccgagcgattagcaaagtcagatcatccttcacgcgtcaggtggtgtgggagagcctattcagattctttgatacacccgagaaagttaccatctactctataaattctatcggttgccaccacacactccgtcttcaaaccaagatccgtgttcttcacccacgtctctctcccgcttcagatcgtaaacgtctttcgctgttccaagatgggtgtggctgagaacattcccgatatggaggagggtaccttggagattggaatggaatacagaactgtatctggagttgctggaccattggtcattcttgacaaagttaagggacccaaatttcaagagattgttaatattcgtttaggagatggaactactcggcgtggacaagttctagaggttgatggtgaaaaagctgttgttcaggtatttgaaggtacatctggaatcgacaataaatttacgactgtgcaatttactggagaggtgttaaaaactcctgtctcactagacatgcttggacgcatatttaatggctctggaaaaccaattgataatggtccaccaattttacctgaggcttacctggatatttctggaagttccatcaatcctagtgagcgaacctaccctgaggagatgatacagactggaatatctacaattgatgtcatgaattctattgctagaggtcaaaagatccctctattctcagcagccggtctccctcataatgaaattgctgcacagatctgtcgtcaggctggcttagtcaagcgactagagaaatctgataatcttcttgagggtggagaagaggacaattttgctattgtgtttgcagctatgggagttaacatggagactgcacangtttttcaaacgtgactttgaggaaaatggctcgatggagagagtgacccttttccttaatctggcaaatgatcctacgattgagcgtatcatcactcctcgtattgctcttactactgctgaatatttggcatatgaatgtggcaagcatgttcttgtgatactaactgatatgagttcttatgctgatgctcttcgtgaggtaatgtacctaaaactattataataaggtggcaaaagaaaagaaaagagatgggaaatcttttatagtctctatcattgccatgggatcatagtttccttgtttgtctacaaataatatttcaagctggcataatagttgctagttgacatgtatttatatctttttctcagagtattagaagtaacaaagtattttgcaaacaattagattgacaatggaactattaaccccttctggatcttgtaggtatctgctgcccgagaagaagtacctggtagacgtgggtatcccggctaca

SEQ ID NO: 110563 - DNA, 585 bp, Glycine max
  Clone ID: PAT_MRT3847_7084C.1
ggctcgagaacaagatgaactagagaacatgggtttaagctctttgcactcctctctctctggtatgatactcactcactttcattaattttctcaaaaccacttttttcttcttcctttgagaccaaaatttttaagcttgtgtttctggcacccgaaaacctgcttctcgtggcaatttcaatatctgtttttgaaattttggggtataaaagaatcttttttaattatttactctgacattcttcggtttagttcatttttctgttcatgttaaggtttctggttttgatttttaacgctgcctgtttctgggtcacttaaaagtttgaaactttgagtaatttcaacactccgttgaagtggaaaaatggcgtccatgccttcgaaaaacatatgtattcggaggcaacaatgcccttgtggagattggaaatgttatattacatatgagggtgatgctgaggagggttctgcagcaccagaattggtgaaggcagagaaagcctcttctggggctatggttactccctatgttggaatggtgtttaagagtgatgatgatgcttttgagtattatggcaa

SEQ ID NO: 110564 - DNA, 620 bp, Glycine max
  unsure (1)..(620): unsure at all n locations
  Clone ID: PAT_MRT3847_70850C.1
ccacgcgtccggggaagcttctgggtctgggggagacgatttcacaggaagatctgaaattctgaactggaatcagggttttgttttttcgttatcttcctcagtaagcaatgtcttctcccgctgagttttatcactctcttccgccaataacgaaggcatatggcaccgtttgcctgttggctaccgcaacttaccatcttggattagatcatccagcttacattgcactattgtacgataaagtgttctacggttttcaggcttggaggttgttcactaacttatttttccttggaccgttctctatcaattttgggatccgtctcctaatgatagtaaggtatggtgtccaacttgagaaaggaccatttgaccgacggactgctgatttcttgtggatgatgatatttggtgcctttgcactattgagaatttccgaatgcccaaatcaacatatatgnggcttgttgcacttaaggccttctatcttccatgggcgatgctggctttggacatcatttttggatcgcctcttatacctgacctcttangtatcattgcaggacatctgtactacttcttgacagtgntgcatccactancagggggaaagaaca

SEQ ID NO: 110565 - DNA, 2057 bp, Glycine max
  Clone ID: PAT_MRT3847_70851C.1
ggagtaacatggagaactgcacagtttttcaagcgtgactttgaggagaatggatcaatggagagagtgactcttttccttaatttggcaaatgatcctacaattgagcgtattatcactcctcgtattgctcttactactgctgaatatttggcttatgaatgtggcaagcacgttcttgtgatactcacagacatgagttcttatgctgatgctcttcgtgaggtatctgctgcccgagaagaagtgccgggtagacgtggttatcctggatatatgtatacagatcttgcaacaatttatgaacgagctgggagaattgaggggcgtaaaggctctattacacaaattccaattctaaccatgcccaatgatgatattacgcacccaactcctgatctaacaggatatatcactgaggggcagatatacatcgacaggcagctgtataatagacagatatacccaccaatcaatgtcctcccatcactatctcgtttgatgaagagtgccattggtgagggaatgacacgaaaggatcattccgatgtgtccaaccagctctatgcaaattatgccattggaaaggatgtccaggcaatgaaagctgtggtcggagaagaagcactttcatctgaggacctgctgtatttggaatttttggagaagtttgagaggaagtttgttgcccaaggagcttacgatacacgcaatatcttccagtcactagatcttgcatggactttgcttcggattttccctcgcgagcttcttcatcgtattcctgcaaagactcttgatcagttctacagccgagatgccggaaactgatgatataatagcaaggtcttataccttagtcacatgctcaatcatcttgtaatgaccgtgacgattgttttatttcttagatttctcatccaacaatctttatttcttctatccacagcatattcattatatataataaaaggtttgagtctgtttgagtgtctcatattttgatttcctcagttagttagaatgaagaccccatagatatttccatttcctgtgccatttttttttctgggtgatggggaaaattagttgtcgccagtgatggcatttaaatgtattgtgggatttcagtgctgttagtatttttttatttcccatctatgttgtttattacttttgtttctgtttttggtaaaattggtttctttttttttaatactctttaactcaacctgctttgaatgttctataagaaaaaaacatggatattcatattgagatgccgttttgttttcctgaaaatcgaggcaatgaaaacaagtatcaaagacacttcctcgggaaaaaaaaaaataagggcggccaaaaaccacgcgtccgtttttctaaggttccattccctgcatttttctagctccttcttctctaaacactcatctatgactacctttccctcccctccttcaccatcttcttcttcttcaattccttctccaagatctagcatgttttactatgctggaagtgaagatcactctgaggagcctcacttcctccaagcttgttttctttgcagaaaaccactcggccaaaaccgtgacatcttcatgtacagagggaacacaccattttgtagcaaagagtgcagacaggaacaaatagagattgatgagtcaaaggagaaaagttggaagctttcttccaaaaggggtgtgagacaatcagagaccaatcaaaattccacacccaataaggctgtaagaacaggcacagttgcagtggcctaatcaaagaataatccatgacatgatgatgagtggggaaagtgcccaatttttgaaggaaaaaaagatggaatattggaatggaaaaagttccaaatgaagaagtgaaatcatcaataatccatgaagattctgataacccgggatgaatcttcaattcgccgcctttgtaaagaaaaaagttgggttttccattgggagaaaaaaaaaatcaacaaagaattttggctccttttgtttgtttttgataatattgatttgaccttttttatc

SEQ ID NO: 110566 - DNA, 324 bp, Glycine max
  Clone ID: PAT_MRT3847_70852C.1
ggtggggtgttaaaattaaagacacaaaaaatgtaaaactgcagaacgaggcactaattgggggttgaacggaaccaaaaaccccccctactcaagaaaaacagctgttgacagggccttaaacaaaactcaaagtgcccaaatgccgagcaacctatctaaacaaaaaccatggactgcgaaaagcgtttaggtgggctctttacgcccaccatgacaaggaactaacccgggaaaccataacagtttgccactcctcggaatcgaaaaacaaatagggttcagggtaaatacccataccaggccccggtgggcgaactaatt

SEQ ID NO: 110567 - DNA, 1261 bp, Glycine max
  Clone ID: PAT_MRT3847_70853C.1
cggctcgagcggctcgagcggctcgagacggctgcgagaagacgacagaaggggacgtgagaggagggtggacggaagcttctgggtctgagggagacggagacgattttacaaggaagatctgaaattctgaattcttaactggaatcagggttttggttttttttcattatcttcctcagtaagcaatgtcttctcccgcggagttttatcactctcttccgccaataacgaaggcatatggcaccgtttgcctgttggctaccgcaacttaccatcttggattatatcatccagcttacattgcactattctacgataaagtgttctacggttttcaggtttggaggttgttcacaaacttatttttccttggaccattctctatcaattttgggatccgtctcctaatgatagtaaggtatggtgtccaacttgagaaaggaccatttgatcgacggactgctgatttcttgtggatgatgatatttggtgcctttgcactattggttttgtctgctatccccatattttggtccccatttttggcagtaccacttgtttttatgctcctttatgtttggagtagagaatttccaaatgcccaaatcaacatatacgggcttgttgcacttaaggccttctatcttccatgggcgatgctggctttggatgtcatttttggatcgcctcttatacctgacctcttaggtatcattgcaggacatctgtactacttctttacagtgttgcatccactagcaggtggaaagaacattttgaagactccaatgtgggtacataaattaattgcaagatggagaattggagtgcaaccaattagccgtgggccggctgctaataaccctcagcaagagaggggttcgggagttgctttcaggggaagatcctatcgacttggtggatagatgcaattacctgatcagctgtttcatcttcacttattggttatagacatgacaccactgacaaatgaagctggacagttccttgaaaatcgaactttgtttttgagaacagccttatagttttcaatgaattaattgccgaatgttgattctgaattcattactttgtcctctctttctagatatgtacactttttcgtattcggtattaaagctagtccctgtagttttcagttttcacctcaaactcttaattctcctgaatccatgcccctgtgcaagtgctaaaaaatgaagcaaagtttgatcagataacataatggtgcatattc

SEQ ID NO: 110568 - DNA, 2900 bp, Glycine max
  Clone ID: PAT_MRT3847_70854C.1
tttcggttccgcgtgaagacgacaacaccccacctcgaatatctcttcacttctctcttccttttcagatcacacgcacacagttacgctcttcaaatctatcctttactacctttccctcccctccttcatcctcttctccgtgttcaaatcttttacaaaggtttggcatgttatactatgctggatgggaagatcactctgaggagcctgactacctccaagcttgttatgtttgaagaaaatgtctctgccaaacctgtgacattggaatgtacagaggtaacacaccagttagtagcaaagagtgcagacaggtacaaatagagattgatgagtcaaaggagaaaagttgtaagctttcttccaaaaggggtgtgagacaatcagagaccaatcaaaattccacacccaataaggctgtaagaacaggcacagttgcagtggcctaatcaaagaataatccatgacatgatgatgagtggggaaagtgcccaatttttgaaggaaaaaaagatggaatattggaatggaaaaagttccaaatgaagaagtgaatcatcaaaatccatgagattctgataacccgggatgaatcttcaattcgccgcctttgtaaagaaaaaagtttgatgaactatctggagccttcgttaatctagctgttccaacaatgagcgtatgaacagactagtattgttactcttctataattggcaaatgaacgtagaatgcacgtattattgctcccacatttctcgtattttggctaatgttttcgtaagaatgtgctgcacgagctaagaatctgatagacgtgggtgcttctgttcatgctctacgtgcggtaccagaagacctgaaagaagtgccgggttaactggttatactggttctattcttacagatctttaacaattttggaacaagctgggagaatagaggcgcgtaaaggctcttttagactatatccatgactaaccatgatatatggagagaaaatcctgaccaaaggctgaatataactaccgatctatacattcacatagatctttctcttatcgctcatttatggctacctttccctcccctccttcaccatcttcttcttcttcaattctttctccaagatctagaatgttttactatgctggaagtgaagaccactatgaggagcctcacttcctccaagcttgttttctttgcagaaaaccactaggccaaaatcgtgacatcttcatgtacagagggaacacaccattttgtagcaaagagtgcagacaggagcaaatagagattgatgaggcaaaggagaaaagttggaagctttcttccaaaaggggtgtgagacaatcagagaccaatcaaaattccacacccaataaggctgtaagaacaggcacagttgcagtggcctaatcataatcaaacaaagaataatcatgacatgatgatgatgatgagtggggaaagtgttcaatttttgaattataaaaaagattgaatattggtaatggaaaaattccaaaggaagatgcgcaatcctcaataatccatgaaaattctgataacctggaatgaatcttaaattcgctgaatttgttaagatagattagtgggatttattttgagagatatgtagtcggcaagaactctttatgattttggatgataccttagctatgttcttttcgagtggtataatgggtgtggctcaaaacattcccgatgcggaggagggaaccttggagattggaatggaatacagaactgtttctggagttgctgggccattggtcattcttgataaagttaagggacccaagtttcaagagattgttaacattcgcttaggagatggtactactcggcgtggacaagtgctagaagttgatggtgaaaaggctgttgttcaggtctttgagggtacatctgggattgacaataaatttacaactgtgcaatttactggagaggtgttaaaaactccagtatcattggacatgcttggccgcatattcaatggttctggaaaaccaattgataatggtccacccattttacctgaggcttacttggacatatcaggaagttccatcaaccctagtgagagaacctatccagaggagatgatacagacaggaatatctaccattgatgtcatgaattctattgctagaggtcaaaagatccctctattctcagctgctggtcttcccccataatggaattgctgcacagaatatgccgtcaggctggcttagtcaagcgactagaaaagtctgataatcttctcgagggtggaggagaagaggacaattttgccattgtgtttgcagctatgggagttaacatggagactgcacagtttttcaaacgtgactttgaggagaatggctcgatggagagagtgacccttttccttaatctggcaaatgatcctacaattgagcgtatcatcactcctcgtattgctcttactactgctgaatatttggcatatgaatgtggcaagcatgttcttgtgatactcacagatatgagttcttatgctgatgctcttcgtgaggtatctgctgcccgagaagaagtacctggtagacgtgggtacccctggatacatgtatacagatcttgcaacaatatacgaacgtgctgggaagaattgaggggcgaaaaggctctattacacaaattccaatttctaaccatgcctaatgatgatattacacatccaactcctgatcttacaggatatattactgagggacagatatatattgacaggcagctgtataacaggcagatatattcaccaatcaatgtcctttcatcattgtctcggttgatgaagagtgccattggtgagggaatgacacgaaaggatcatttcgatgtgt

SEQ ID NO: 110569 - DNA, 1234 bp, Glycine max
  Clone ID: PAT_MRT3847_70855C.1
cgcatacttctgacaggtggagcgaccgaagcgcttaccgaacacctaggcatcttaaaaaagttccctccttattttctcgaccaggttttttcataatgcagagatcattgaactttggaatccatgatattctgggaaactggctccctgccagatacattagtaatgaatcagttgagctgaagactgacaatgatgtcgtacggttctctctagacaagtctgatgatattaattatggaaagaagagccagctgaacaaaagagttaaaatgtctagaaaagctaaactgaatgagcttaggttctatcgtttgaaggccaagaaaaagatgatttccccaaatccagaagttagaattacatataagcttgaaaaggccaaacaaaaggaaacttggtagatttagaatctaagaaaatttgatgtacccaagttcactccagtaataattgatcttgtagacttagctaaggcattgtggttgacatcaagccccattatactatcattttttaccgtggaaagaactatgtaaaaccagaagtaatgtcacctccaaatacattatcaaaagcgaaggccttggagaaatataggtatgagcagtcccttgagcatactagccagttcattgaaaagttggagaaagagcttgaagagtatcatcaacaccttgcaaagtttaaaaaagggaaagaggatactgctaaagatggattggggaagcgtgactctatctatgctggacacaaaatgtcacatacatgaggctcagacaaccttatcttgtttgctattgagtaactataagtgcgagtttctggtctactactgtaatgatttcatcagctacactacaccattagggtagaatgtcaagcatcacacatattccaaggtcctgttcattattggagatgtcaatgattgaagaaggatttctcaaacccattccccggatgcactgaaacaaagttcaacatgacttgctctgtaacaaatttcataacaaaaggtttagcaagtgttgctgcatttaggttaggacggtggatgatgttactatcaatatagctacggccattagctccatgataaggctaaccatatcaaatgtttatggcaagctatttgtctttatgaaagtacagatcataacagtttcccaatgcacattggtagagtgacttgtctttaatcataattgggtcctcaatgtctatagct

SEQ ID NO: 110570 - DNA, 640 bp, Glycine max
  Clone ID: PAT_MRT3847_70856C.1
ctcatagaaagagtctcgcctagccactactcctacttcatatcatatcattcacattcatctctcttcttccatccatcatcgaagtgataacaacattcgcgcgctcttcgtattttccttcttcaatccgcgcgacaccaaaaccctagatccggcgcaatcatcgggagagagaaagtttttgactttgagacaatattgctagagagaggaccggtggtgggcttggcaagaaatggatcctggtcgctatgctctgcatcaaggctgggataataacagcgctcttgagggatacagcaccgtccacgaccccaacttccgggttggtggttcctatgatgagagaaggtttatagatgaaagatatccaagggatgctgtttaccagagaaataatttcccccgtgacattttggatagggaggcctatctgccacctggacctcctgttggccactggagtcaagccaaacggagaggttatgatgaagattatgcacttgacagggaatctagacgttttcagaggccctatcatgaatcgtataatcagattgatggtttcagggatcgtgagattgacacctatccagaatatgaaaggtttcgggatggctatactggcattgaaaac

SEQ ID NO: 110571 - DNA, 278 bp, Glycine max
  unsure (1)..(278): unsure at all n locations
  Clone ID: PAT_MRT3847_70857C.1
gctgtaactgccanaatgcttttgtgtgaataggacgatggagaaactgactttaccccagggcacttcccgcactgttgatagaatgcctctttcaataaggaggaggagctggtgcaaacaatgctattctcataaatatgcctaatgctggtctttcaatgtggagatattatagccggagacctcatctttcaagttcctaagataacttctccctacattaaacgtacaggctctttcttcatagcatttcgacatttggctgatgacaccat

SEQ ID NO: 110572 - DNA, 525 bp, Glycine max
  Clone ID: PAT_MRT3847_70858C.1
acgaggccaagtgtgtctgcaaatgttgaagtgctgaatgttgccaataactcaatttccggaacaatttctccctttttatgtggaaagccaaatgctactaataagttaagtgtgcttgatttttcaaataatgtcttgtctggtgatcttggtcactgttgggtgcattggcaagctttggtgcatgtgaacttgggcagtaacaatatgtctggtgaaattccaaactccttggggtatctgtctcaacttgagtctttgctgttagacgacaaccgcttctcaggatatattccttcgacactgcaaaattgctctacaatgaaattcatagacatggtaaataaccaactttctgacacaataccagattggatgtgggaaatgcaatatctaatggttcttcgtctaagatccaacaatttcaatggcagcattactcaaaagatgtgtcaactttcttaccttatagtgctggatcatggcaataacagcctgtcacgatccatttccaatcgtttg

SEQ ID NO: 110573 - DNA, 176 bp, Glycine max
  Clone ID: PAT_MRT3847_70859C.1
aacttgcaaagttatgttaatttgttttctttgaaaatacaaatacaactgcttaaaaccacatttattaacttaaccagacgaatgatatgactgccaacctcttatttcgctagtatgaattaaatctcgcctctactaccttgaatatcacacagaaacataacgtatcttca

SEQ ID NO: 110574 - DNA, 417 bp, Glycine max
  Clone ID: PAT_MRT3847_7085C.1
cgtgaataatatggttttatgtgtttttgtttttaagccacatactagggttaatatgttggggttgatgattaaatacaagctttggattcaataatacaaaccacgaatggtttgctttctgcaactcccaacacaaacctttattgcaaacatgatactgttccattagataaaaatttgctacaaacttgcaggggagtatatggctttatcaacatttgctccctgggctgggggagcatcaacttgagccaattacacaaccatggcaccaaattaaaacttgaaaatggcagagaagatgccgagcaaagccttaaaaccatatgtgggcaatcctgagttctcaaggaaagtgagcttctccagaaacccaagagtagccctgcctcgcgtccagacaaaatctaacag

SEQ ID NO: 110575 - DNA, 207 bp, Glycine max
  Clone ID: PAT_MRT3847_70860C.1
agcaatggaaactttcctttgtattgtagctgacaagccagctgactagcgaagccagcttactagcgtagcttttccgggaaatgaaacctgatatgatttgacataaatgtctaaaggaaaactgacctctcatttgttttactccatggtctctgtaacacaacctatgggcggtatcagtactaacactctccaaagcatgat

SEQ ID NO: 110576 - DNA, 527 bp, Glycine max
  Clone ID: PAT_MRT3847_70861C.1
caaaaaaaacccctttcccttaaaaaggcaaaataagttaagggttcccttttttacccctttcatcatcttggtttaacccaccggcaaaccatggatagagaaatgggggccccatttgaaggaatttcaagtcccaggagtggggggaattaggaaaggtacccacccccgccttccccagggtttaaaaaaaccgaacctgcccgcattttgggctgcaccatcagggtttggggggtaaccaaacccacaacccccccatagtggcagctgcatcacccgatttggtccgaatttttccgaaataaaaaccctcctcgatcttataaaaacaaggggggctggttagctttgaaagcggggggaagcaatccaagctcatccttaccctaaagagggtggtgaggataattcctcccccttttccccttggggttggcaggggccttatgagggaccccatccttttgcaaaattgggttatcaccaaagttatgggccctttccttttgtttaaagcccct

SEQ ID NO: 110577 - DNA, 655 bp, Glycine max
  Clone ID: PAT_MRT3847_70862C.1
gaccactcttagagtgtgatgtttcctgctctgtctatcaagatggcataagggttggctggctcgaaaggttgttggaatacgaaaatttgatttcagatcacgtggtgattttgtatcatgacatcagtgaatttgacaaaataagtgaagtgcatgatcatttcttcagcaacataacatttatatttgaaaacaatgaagaccgcataacagagtttggtgtcttcccggtatatgcctcagaatcagggttgaagttggttggtagcaaggaaatttttgaatgagaattcattactcaaatatctgaaatgagtcacagaaagaattgttgttttttcttaaatgaaactagtccttcaaatatagaaattatcaattgaaaatactattgaatcttgattcgagataattatgcgtttttctttttattgcattaacatttttctgtaattatgttgaacaggttttcttttaaaagaatattaattggtgggaaatgagcattagcttattcagagagccaaagcagtactcaagaatattttcgttgatcattttcatactgtgattatgtatttatttaaatgctaaactatgcttttaatcattaaattttttgacattgttggttttgattcttaaactttat

SEQ ID NO: 110578 - DNA, 390 bp, Glycine max
  Clone ID: PAT_MRT3847_70863C.1
tttcttttttttttattttttttttttttttttgttttaactgcgttctttggggggggttgaaaaaaaggaaaaaattccttctttttcctttaaatttggccctttttgagacaatctcctttttaaaggacattttatgcgcctgctttttactaaaattatggtcactctttatttcactctattttctcccactcttttttttaaaaccgggggtgatttttatctatcctcctccgataaaaatccccccccctcaaattggtggggaaacaaaatccccggattttgccttttccaaccaccattttcttatttccattccggcctgtcctcaggcatttaaaaaacacagcatgctttttgaccccctctggcctggtcttt

SEQ ID NO: 110579 - DNA, 2142 bp, Glycine max
  Clone ID: PAT_MRT3847_70864C.1
ggtttccacacttttctcctttctctattcttctcttctcttcgcttccaaaaccctaatcaatccttcttttcaggtttcggttcgcgaagggttttgatttttcggcggcggaaaatcttggtaaaattcgtcttcttaaccaaaaaaaagaaaggttttcttctttaaagttggagggttgggtctgatgagaattgttaggggaatgcagagatcgctttgcgaggaatactactgctgctgcaacaaagatttgttcttccaagggattggcatcactgcgcccaaagccagaacccgcgacaaactaatggtccaaaccctctgaaaattcatccaaaattagggtttgcgttgcgttacggtgcgaattgaaatgactcgcgttttggttcagaggggttcttccggtggtggttcttcgtcgaacccgaaccgcagtggtggtggtggtgggtcttcttctaattcctcggtgcgagcggagccgcaggttccggttttgccggagaatagtgacgaggttgttgttgtgtcggatgaggttttggagagtggtgataaggggaagagtgaggagggtgttcattttgagcagggtgatgggtcgtgtgaagatgacgtggctgctgttgttgttgagagtgatgttagggaggagattgtgaaggggttgagtgggcttagagttggtgaaagagttgtttcggagagtgagggttcgagtggggattcttcttccctccttgttggtggtggttcgtgtccccctccacctccggtgccgcctcccaagccttccgtgacggggaacttgaattcgaggaggagtgtggccgggagtttgaattccggcagcgtcggatcgtcgaggagggcagttacgtggccggttgtttcggctaggacttcacctgctgggtctaggccgtcttctcccaggtcacataatgaaagtgaggggtacaacagtgctgatgaacagaagccttgcctggtttcatcttatgatgattttgaaagggagcgacagttcgaaattgatatcagaagggcaaaaggttatgaagtcaaaaaaatgatggaggatggaaattgtctattccgagctgttgcagatcaggtgtatggggattctgaagtgtatgatttgatcagacagatgtgcatagattatatggagcgagagagagatcacttttctcagtttataactgaaggcttcacatcttactgcaagagaaagagaagagacaaggtctatggaaataatgttgagatccaagccatgtgtgaaatgtataatcgtccaattcacatatactcctacaccacagaacctatcaatatctttcatggaagctacaacactgacatgccaccaatacgattgagttatcatcatgggaatcattacaactcccttgttgatccacggcgcttgacaattggtgctgggcttgggttcagcagtcttcgtggaacaaatgttgacaaagatcaagtcaaggctgctattaaagctcaacaagacaaacagatcaataatgcactgttagccgagggtcggttttactctgatctcgagctcacagaaaaggaaattgaacgcatggtgattgaagtttctcgagctgagtaccttgcagatagtacatttaagcaacagcttggaaacagagagtcctctacctcaaacgcagaaccatcatcttctggagcaaccggttcatctggcactgatcgcaagacggaacatgggaaagagcatggttctgatcttagtagcggtatgcagatgttactatcaatgggattcagttacatgcaagcgattgaggcttacagcatatttggggacgatgttgattccatggtttgttacctgttagaaactggcagtagcagcagacgtaaaggcaaggccactgaatgacatgccatcaagtcaaataaatatctagtttttgaattgcaaccaaatcagttaaataaatgtatcaagctacttactctgtagttcaatttggtatctggcatattcatgacggctatagaaagaaagaactgagccacgattcaatcttatttggctaatgagcaggtcgttttctattcaatccatttttttttccaaaa

SEQ ID NO: 110580 - DNA, 474 bp, Glycine max
  unsure (1)..(474): unsure at all n locations
  Clone ID: PAT_MRT3847_70865C.1
gcatgaattagttntactaatatatagaaccgatcatagacacatatgagctagtactgcaacctctgctaattaataagaaagcgactatagtgtgagagttaaaggagtattgaaggtgtcctggttaagttgttcttcttgctgtgttgttgaagcagtggtggtggaagtaagtgtttgcaacatcaaacggaaagctcgctccaaccttgtaccattaatattcctgctgaacacaatctgacgcaatcggaagaagaacaacctcgctgagtaaagggcttcttcttggaacacccacagactaagtaagagctccaacgctataggacaaatggttcaagccaccacagggccaacactgtctggtagcttgcaagtggaacatggccacagccaccacgtgcaaccccattttccgttaccaccgccagcttcaaagttcaaaccaatgaaaagttatataatttt

SEQ ID NO: 110581 - DNA, 304 bp, Glycine max
  unsure (1)..(304): unsure at all n locations
  Clone ID: PAT_MRT3847_70866C.1
caantagtgggcancctggtgcttctgatatgtcgcanccagncntncanaggntgnatccgancggtatgnntgatgattgggaggagaatctggctgtaataactgcaaatagnancanaagtgangaacttgnaattattnacctaggtgattgcttgtggangganagaagtgagattantgcngcacanatctgctatntagttgctgaangcaaantgcgantcatactcangatagtgnaanacncggtttaattggagcagatcactggnaatgncctcgnagttatgcgagtcca

SEQ ID NO: 110582 - DNA, 324 bp, Glycine max
  Clone ID: PAT_MRT3847_70867C.1
ttgggcttacatggagcaggaaatgcttttccaaacaagattgcttttaatgataagcttgagttggctaacacacaagaattctttgatggaaacattgcagtggatacttggttaccaactgttgggaatcgtctttatcctgcaagtcaatcaccttcagaagctgccgttgtaaatgttacatgtgacagcggacttggtggttcacccaccactgcttggatcagttggtgagataacaatcgctcctcagacatcaacaatacgtttcgcactgcactcgcgataggtgagacaacagactagcttactagagctgat

SEQ ID NO: 110583 - DNA, 373 bp, Glycine max
  Clone ID: PAT_MRT3847_70868C.1
aactgaacacagtttaggtaatgacttctattcgagaaggtgtcccgatggtcccagagaatgaccctatctgtcctttgagcaaaatgctttcgaccatctttgtgaactcggatgatatgtataccgcaccgttagtgcttataatgagcatcctaggatgttcgccaatcaggacagtgcggccataccacactaatactgaggactagtgccatctagcactccatagcctaaataaaaactgtacctgtaccgtttgttacgcggaagactatctctgactcaggacacctgcgcctcattatcaaatgactctgtctctggggttgcacatccttgctcacacttaatgcgagagagaatggcaacc

SEQ ID NO: 110584 - DNA, 268 bp, Glycine max
  Clone ID: PAT_MRT3847_70869C.1
cttcaaagttcaaatctgtttggggagttttgaaaatggaaatggggactgtagcatggattttcttggtgattatggtcacatttttctgcccttcctctcttgctctcactcaggatggtatggcgttgttggaaatcaaaagcactttgaatgatactaagaatgttctgagcaactggcaagagtttgatgaatctccttgtgcatggactggtatctcttgtcacccgtgtgatgaacaaagagttcgctcaataaatctgcc

SEQ ID NO: 110585 - DNA, 831 bp, Glycine max
  Clone ID: PAT_MRT3847_7086C.1
ccccctctttccctgtccctccttttccccggtaaaaagagaaacaaaaagctgaggacctccccaaactttgcaaagcgtccgattcaccaccaccaccaaagcctaaactttaagcaaccaaaatccccctcttctctctatcctcccatccatcttccccatcaacaaaaatagtaacaaatcccatttccctctctctcccccaaaataaaacaaaaaaaaaatccattctttctccattttcaaccccatttccccccaaaaatccaatctttccccatacccacctcccaaaatctcttctttctccaaacccaaatccccaattcccccaaatccaaccaaagagaatcaaacacacaaaaaagaaaacaaatttgtagcttcccaccttcaatgtggcgaccgtggggcaaatcaactgttcgaattcacagcgcgtcttcatcaccctcttccacattctcttgttcttccttcaaagacattcaaaccctttgcctcgacgaacccccacaacaaaaccagcatcatcaacaattaccctctccttcccccacaagaaaaccctccgttttccaccgagtccgactcgccaactcgctcctccgaacctggtcaactcacctccacccccaaccccaacctcccaaactccccgaaccccccgaatccgaacctgatgttgtcgtctcgaaacccgaaccacaacaacctgcgatttattatttcccgggcgcggaacagcgcgtggggggtgtactacacgagcctgcgcggggtgaggcccacgttcgaggcgtgcaagagcgggctctccattctacg

SEQ ID NO: 110586 - DNA, 483 bp, Glycine max
  Clone ID: PAT_MRT3847_70870C.1
accacgcgtgcgtacgaaattaactacaacatcaagaggcaagtcttgaactcggcccctaataaggctgaccatgactgtggatggagaaagcctagacaccggtgcaagagcaaaggacgggacccatggctgggctggatgagcttatacctaacctcatattgtatactccgtagagacactttgaggatagacgtctgcttgctgactacatattttacaatgagaggacggttaatattgtccttggtctccgtggtagcatgcaccatctaaattgaagagggctagggaccctaatataaccttagtgggagaaagctacgaacggtgagatgggttagagtcaagaatgaatgcatggagggatgtcccatgatcacgcatctggtgctcttgatgggaaagcagctctatgacagacgtactaatagggactgcctcatacacatagtatcaaccttacacctggacctgaaa

SEQ ID NO: 110587 - DNA, 199 bp, Glycine max
  Clone ID: PAT_MRT3847_70871C.1
ggtgttccatttgggtagaaccaaatcactccttctgggtgacaaatgtgaaccttccagccacattcacaaggggacaagtcctaactatgatggggcaggaacagtacacatacgttgatactgtaggattacggggcaaaccacgataaaacaaggaaagggaattgactcttttaatcaaacggccccaccctct

SEQ ID NO: 110588 - DNA, 685 bp, Glycine max
  Clone ID: PAT_MRT3847_70872C.1
cggggctcctggggagtctccccttttgaatggtactagtactagttatttgacttgttctctgcgcatggaagtcaggaaaggagcaagagttggcgtgggcgaggaccacgacatgggtgacggaatgcaatgcagtgaccacccttacagaaacaaccctggcggtatctgcgccttctgccttcaagacaaactcggcaagcttgtttcctcttctttccctctccctctccttcctccttcttccccttcttcctcctccactctcccttccatctcctcccttcctccctcctcagcccccgctccttcctcctccaccgccgtttctcacttcaatcatccatactaccctcgtagaacgcgcctcccttttctcttgcccaagaagaagagcaagaaacccacgtcagcacccacctctgataatatccttctcaagcgcagcaaatccactgccactccccgaagaaaccgctccttggtcgacgacgacgacaacgacgacgacttagtcattgggccttttagtcccaggaagagaaacggcttctggtcctttctctatctctcttccaaatcatccaagaaactcaactccaaaagcttcagagacaacaacatcaacaacactccgaggatctcctccattaacttagcaccggcaagtactagtttctgc

SEQ ID NO: 110589 - DNA, 526 bp, Glycine max
  Clone ID: PAT_MRT3847_70873C.1
aaaaaggccctcgaacatgttttattttttgaatataaacggccacaattacaaactttaaacgagtttttttttttttggggggggggggggtacaaaccccaccaagtttgaaaagggggccccaataatgaaataattttttaggcttttaaaagggccccactgggcaaaacaacagtttaaaggggaagtccagggccaaaaccgaacaacacaccccattaaaggccttcaccggggggtttaagcccattttcaacaaatttcctcctcatttcatccaaaaagaaaaaaacacaagcccttgacatggtcccatattcactaagcacatttttaggggcctttattttttaagggtggaaacctaacttttgctcaacttggacaaaaatagcaggcccaccggggggggcaacccaaaaaagggggttgaaatcaaaaatgttcaatggggtgaaagcctaaaaaagggcctgtgcaatgttttttgaaaaatcccgggaacctccttggggggggg

SEQ ID NO: 110590 - DNA, 811 bp, Glycine max
  Clone ID: PAT_MRT3847_70874C.1
cgtacgtaagctggatcctctagagcggccgctttttttttttttttttttttttttttttggcaaaaggaatgtattacctgagaaaaagtgttgctaccgctcctattgtacaaaattgcatgggcaaataagagcatgcaacccaactagcatataacatcgccttcttatctaccgctaatttttaaaataaacaatgcatattctgacgtacataagtttatagcaaaaccactccccatagtagaagtactatcaccattagaaggcttctaattcccaattcaccactatggagattggaggcagaagaaactgaatttgtggaattcagtgatgataacgtgacgttggggaagctgccattgattccaagacttcctggaaatacacaggatccatgacttggattggtggtggagattgtagccatgtcattgaaatcacaagactgagtagactttcccatctgatgatagtaagtgtcaaaagcataatttgcatgtgcaaccacattgtctggttcataacatggttgtccttgcagcaaaggagagcaatccaccttgccaggtccacaagcccaatctattccagcctgcagcatcttaggatcagcaccatccttagcaacacagtaagtttgattggtggtgtcatttgccaacactcctcctgattctgtcaagtgcaaaacataaacaggttttccatttgcatcaaataagccccagtttttctctgacaatggtcctgcctttgcatcctcattgtagagctcatagatgaaaagtctaacaccaattcc

SEQ ID NO: 110591 - DNA, 369 bp, Glycine max
  Clone ID: PAT_MRT3847_70875C.1
ccaatatttcctctctttttccctcgaaattggttagcaattcacttgcatcgcactaatcctacagacaataatggacattgcaagttgtgcactgctcattgtcttgacatgtgccatagttcatgctcttcttggttcattccttgcaatggccacaaaagcaaaccataagctgccaccgggaccatcccgtgttcccatcataggtaacctccttgaattgggtgaaaagcctcacaagtcattggcaaagcttgctaagatacatggcccaataatgagcctaaagcttggacaaataaccactgttgttgtgtcttcagcacaaatggccaaagaggtgcttctaaccaatgaccaattctt

SEQ ID NO: 110592 - DNA, 991 bp, Glycine max
  Clone ID: PAT_MRT3847_70876C.1
gaaaaggataataagttatcttgccgcgtagccgcccagtgggaactcgcaattggcgactgctgctagaaccttcttttgttatctcgcaatggctgacttaagccccaagccattaccaaacctataaatacacgccttctttttattcttcttcttcaattcatattcataatccacatttattcatcagtttttcgttcccttcacaaaactcagaaccctaactatatccatggcatcgggtggaacagaagcttttccagatttgggtaaacactgccagcaccgcgattgcaaccagctcgattttcttcctttcacctgcgacggttgccaacagatcttttgtttggaacacagatcctacaagtcccacgcgtgcctgaaatccgaccacaacagcagaaaggttgttgtttgcgaagcatgttccatgtccatcgagaccaccggccatgtgggacaagacgaggaggcaatcttgcagaagcacctcaagtctggtaattgtgaccctaccaagaagaagaaaccaatttgtcccgtcaagcgttgcagggaggttttgacgttttccaacaccagcacatgtaaaacttgccacattaaggtgtgcctcaagcatcgtttccctgctgatcatgcctgtagcagaggagcttcagcttcttcatcagcttgtgtttctaatggtttgtggaacaatcggttcttgactgcttttgccaagaggactggacaagaatgtgccaaaaatggtgcaacttgttctacttctcctcctagtacaccttctgttaaggcctattgattgctacatgcttgatgtgttacttattgattcttgggtggtttgatggcaatacagtattgctttacagtgtaatttgaatgttcatgattacattgcatccatgaactacgatattgaaatcatctgtattgggatttgttttgggataaaaaaaaaaaaaaaaaaaaaaaaccc

SEQ ID NO: 110593 - DNA, 1882 bp, Glycine max
  Clone ID: PAT_MRT3847_70877C.1
attccctcccccaccctcaccaccaacgccaaacaagccctaaatctctcttctctttcttcttcttcctttaaccatgagagagatcttgcacgttcagggaggccaatgcggtaaccaaatcggttccaagttctgggaggtgatctgcgacgagcacggcatcgatcccaccggaaagtacaacgaggaaggcaacagcagcatccaactcgaaaggatcaatgtgtattacaacgaggcctctggcggaaggtacgttccccgtgccgtgcttatggatctcgaacctggaaccatggacagcatcagatctggcccctacggcaagatcttccgccccgacaacttcgtcttcggccagtccggcgccggtaacaattgggccaaaggtcattatactgaaggcgccgagctgatcgactccgttctcgacgtcgttcgcaaagaggctgaaaactgcgattgcttgcaaggttttcaagtttgccactctcttggaggaggcacaggttctggcatgggaacactgttgatatcaaaaattagggaggaatacccagacagaatgatgctcactttctctgttttcccatctccaaaagtttctgatacagttgtggagccatacaatgccactttgtctgtacaccaactggttgaaaatgcagatgagtgcatggttcttgacaatgaagcactttatgacatttgctttaggacattgaaactcagcacccctagctttggtgatctcaaccatctgatttctgcaaccatgagtggggttacctgttgtctgaggtttcctggacaactgaactctgacctcaggaagctggctgtcaatctgattccatttccccgtcttcacttctttatggtggggtttgcacctctcacttctcgtgggtctcagcaatatgtctcccttactgtcccagagctgactcagcaaatgtgggatgccaaaaatatgatgtgtgctgctgatccccgacacggccgatacttgactgcatctgctatgttcaggggaaagatgagcaccaaagaggttgatgaacaaatgatcaatgtgcagaacaaaaactcgtcatactttgttgaatggattcccaacaatgtgaagtccagcgtttgtgatattccacccaggaatttgaagatgtcatccacatttattggcaactcaacatcgattcaagagatgtttaggagggtcagcgagcagttcactgctatgtaccggcgcaaagccttcttgcactggtacactggggaggggatggacgagatggagttcaccgaggcagagagtaatatgaatgatttggtagcagagtaccagcagtaccaggatgcaacagcagaggaggatgaatacgaggatgacggtgatgagcagcagtatgatgaccagtagctggatcaatcttagggcaatgctctgatggtaattaccaatggcgtgatgataacttctggcaccgatctacttttactgctattcgtgtatctacagccatatgaactctatttcattcccatttatctcttcttttaaattctgctaatttcatttatatgttctgcttttgaattgtttggaatgtgcccggtgagacaatagttgattattctatacttccaattgccaagcatagcaagtgtatgaacaagttttgtttcctcccatgtcatggtcctgaagaaatggcctcaaatgggccaccttttttttgttggcgttctattgtttttcctctttttataaaataactagcataagtgttttcttacaatattaaattcacattttataaatttataagagttatgttttatattatttaaatttttaatatattttatttagttt

SEQ ID NO: 110594 - DNA, 336 bp, Glycine max
  Clone ID: PAT_MRT3847_70878C.1
gtgtttttttttttttttttttttttttttttttttttttggggggctgcaaaacaattttaattaatggagggctcattgggtggatcacccctttaagcaaagggttaccttcatatatcatatatgcataggaggagaccctcgggacaaaatacatgacgcaaaaggaagccaaattagggggattttctcacctttggcaggcatagggatccccaggataaaaaccataatccaaagttctttggcgagtggggctcgagatccccctgtagcagccccagcatgaacggtagattcaactgacctccggatcttttcacccaacggggg

SEQ ID NO: 110595 - DNA, 196 bp, Glycine max
  Clone ID: PAT_MRT3847_70879C.1
ttcttgcgtttggttgatgccaaggttggaaatcacaaacacattgttggttatcatgttgctggaaacaaaggaagactggaatatgcttcattgctaccatatgttgagccaactgtgcaagctaatagtgataaatgttacttagaattcttacctgtggagggtgtaagatccaagggagttagggacattg

SEQ ID NO: 110596 - DNA, 273 bp, Glycine max
  Clone ID: PAT_MRT3847_7087C.1
ataacttttaaaatcataaccgttttccagagcggagccacatagacctaccacaggctttcataccaagaacttaccatctatatacatcaagggagattcttactacagaatggattgatagacataatctcatacagagcacacatagtgactatcccaaactggctaaagtttgagatattctctttctaaaacctctactatatgctagtttttgtcatacttatacacccccttttaattttatacacacttctgacagaaaatttg

SEQ ID NO: 110597 - DNA, 1803 bp, Glycine max
  Clone ID: PAT_MRT3847_70880C.1
cccacgcgtccgtccctccctctctattttcttccataaatcactccactctcctcaacgcatcatcgtatttcatttcatttccctccccccactcccaccgccaacgccaaacaaaccctaaatctctctcgtcttcttcttcttcttcctccttcaaccatgagagagatcctgcacgttcagggaggccaatgcggtaaccaaatcggttccaagttctgggaggtgatatgcgacgagcacggcatcgatcctaccggaaagtacaacgacgaaggcaacagcggcatccaactcgagaggatcaatgtctattacaatgaggcctctggcggaaggtacgttccgagagccgtgcttatggatctcgaacctggaaccatggacagcatcagatctggcccctacggcaagatcttccgccctgacaacttcgtcttcggccagtccggcgccggtaacaattgggccaaaggtcattacaccgaaggcgccgagctgatcgactccgttctcgatgtcgttcgcaaagaggctgaaaactgcgattgcctgcaaggttttcaagtttgccactctcttggaggaggcacaggttctggcatgggaacactgttgatatcaaaaattagggaggaatacccagacagaatgatgctcactttctctgttttcccatctccaaaagtttctgacacagttgtggagccatacaatgccactttgtctgtacaccaactggttgaaaatgcagatgaatgcatggttcttgacaatgaagcactttatgacatttgctttaggacattgaaactcagcacccctagctttggtgatctcaaccatctgatttctgcgaccatgagtggggttacctgttgtctgaggtttcctggacaactgaactctgacctcaggaagctggctgtcaatctgattccatttccccgtcttcacttctttatggtggggtttgcacctctcacttctcgtgggtctcagcaatatgtctcccttactgtcccagagctgactcaacaaatgtgggatgccaaaaatatgatgtgtgctgctgatccccgacacggccgatacttgactgcatctgctatgttcaggggaaagatgagcaccaaagaggttgatgaacaaatgatcaatgtgcagaacaagaactcatcatactttgttgaatggattcccaacaatgtgaagtccagtgtgtgtgatattccacccaggaatttgaagatgtcatccacctttattgggaactcgacatcaattcaagagatgtttaggagggtcagtgagcagttcactgctatgtaccggcgcaaagccttcttgcattggtacactggggagggtatggacgagatggagttcactgaggcagagagtaatatgaatgatttggtagcagagtaccagcagtaccaggatgcaaccgcagaggaggatgatgaatacgaggatgaaggtgaggagcagtatgttgaatagtagctggatcaatcttgggcaatgctctgatggtaattaccaatggcgtgatgataactactggcaccgatctataccatcactgatttacatttgctgctattcgtgtatctactgccatatgaactctatttcattcccatttatctctgttttttttacgttttgccaatttcgtctatatgttctgcttttgaattgtttggaatttggccggttagacaatagttgattattctatacttccaattgctaaaaaaaaaaaaaaaaaaaaaaaaaaaaaaaaaaagaaag

SEQ ID NO: 110598 - DNA, 239 bp, Glycine max
  Clone ID: PAT_MRT3847_70881C.1
ctcaaatttttggttccatattcaaaccacactctctctacatatggcattgaacaatggcatctccgccaccggcaccggcctcatcttcagtttcggggagatgcttatcgactggatccccaccatctctggcgtgtccctggccgaggcccctggctttctcaaggcccccggcggcccccccgataacgtcgccatctccgcgacgcgcctcggcggaaaagccgtcttctgtc

SEQ ID NO: 110599 - DNA, 346 bp, Glycine max
  Clone ID: PAT_MRT3847_70882C.1
ggggggtggtagtaaatattccgcccttcccacccggcgaccgaaaaattccagcgcactcctcctggtagagacgttaacacagtttcactatgtgcctgtgatgaataaacatgtgaaacagatacatagcctgactcatttaaaaattcatactgcccaagttatatattttttgatgcagtacgatctgggtgatgcacaagcacaacacctcttcgaagctttcatttagaaacaccactcatattgtgattgtacacttttctttacaacacatgcttgctccaattggtggggaatagcctgtgagtggccataggatactggctagccaccactacct

SEQ ID NO: 110600 - DNA, 506 bp, Glycine max
  Clone ID: PAT_MRT3847_70883C.1
gcattacaatattcattcatatctgtgagcaaggaatttgaagttaactaatgcaggctcacttcaaatgagagtttgaagtcaaattgcaatataaaaaagacacgtccgacagcaaaactagacaaagaatttatttagtttaagttgagtctatgatgctgattggtgacatgtttttgaaaggtttcattccgcactccaaaccggcacttgcgttggtcaaccttttcaccggaactcaacccatgcatttgctttgtataaataaggagagtcacatcacatgcggaggtgcgccaaccactatcattgtttgcaagtgggaagatcataagagaaaacaaacattagattagatggaccccaccaatccaaatgcattctgattctgccataatcacatcgacaatgtcaactttgagcacatgcgtcaccccttgcgtcatgggcattgctcatttctatgaatctaaaacttgcggatccaagattcttatacgggg

SEQ ID NO: 110601 - DNA, 237 bp, Glycine max
  Clone ID: PAT_MRT3847_70884C.1
acccaaaggggcacaactgagtttgttgatcaccataactaaaaacagtgtgattaaaatgaatatctttatattcctcgatgtcacaaatttggcacgggggcaatactatgcgtacaatatgtgccctctccgaatgtctcacgtcaaaggtgcatgtacttcggccgtgtaatgctcaagttggcacgcttgctgtgctactacacactatctttggatatgggactattcctg

SEQ ID NO: 110602 - DNA, 389 bp, Glycine max
  Clone ID: PAT_MRT3847_70885C.1
tcaactcaaccttttttttttcaaaagcttgatccattaaatacttgataaataaaataaaagattaatgcgtaaaaaaccataaaaacttttaattttaatattcaaagaaaaaaaaaaaaccagcaaagaaggcggagatacagacttaacggggggggcggcctctaaacagaaacaaagcatacgtcccagggcaggcgacaaaatacttcttttatagggacaccataaaaaatttcgctggcggcggttttaacaagctcgcgagggaaaaaacccagccgttaccaaaaataagccacttggcagccagaccctttttgccaattggcctcatagcaaaaaggccttgacaacatacatttaggaaaaatgtgacagcccaa

SEQ ID NO: 110603 - DNA, 226 bp, Glycine max
  Clone ID: PAT_MRT3847_70886C.1
cgggaaagtgcattaatttgttgtgagctatacactattttaacgttaagagaccatgaattcgtctgtgctacatgttgcgtgcacatagttttggtatcattgccatacgatggctcacgctatgaacagttcccactctgaatgtacactggctgtggtatgcgtacgttggaggcatgctgtgcaagtttacagcatccttggctttgacaccatacctgaa

SEQ ID NO: 110604 - DNA, 293 bp, Glycine max
  Clone ID: PAT_MRT3847_70887C.1
atctctttatgtacggtccggtcgttgaagggtcagagatagagcggggttcccatcaatataccaaacttcatcgtcatcgttaaatacttcaacaactacagcgacgtcgtcagtatgtatcgagtgaaagatcacaacgtcttctcgagaatggtactgtactacagcggccatgtggcaaagtcgacgttgcaggcgcatgaaaatacgtggtttcaacgatgggatgcgcccacggatgattccgacaacttccgatggttcgggtctagcacgaattgcgatccata

SEQ ID NO: 110605 - DNA, 339 bp, Glycine max
  Clone ID: PAT_MRT3847_70888C.1
ttttcttttagacagacacagtgagaacgaggaggcgtacgttacttccggttacatggctctctatgccacagtggagactacgtaaaagcagatggacgtggtggggtcgagagaacaagaggagagcaaattacgctgtatggtagcccctactatgctgatggctttaatgcctcacggctaatgtatctggcgctcagatcctcatcagagaaacagagtctcatcagtgtttaaacaggctctaaatcatggtcagaacattgccagaacttgagctcaaagtgatggaagatatgaaccactacaacactctcctggatcgtacaagaacca

SEQ ID NO: 110606 - DNA, 617 bp, Glycine max
  Clone ID: PAT_MRT3847_70889C.1
ggacgccctccacgcgtccgacaattttcactttaatttttcaaaaccccgaaagaaaggtacctggcagggtgggggaagtgcgccccagagaaaaaaacaagtcccacggatgtcaaaagaaggaatgaaacccccaccccaggggtcgggcccccatggaccaggccaaaagagaaagtaaccgtgcacaaggtgcaactaaacgaaaaaagcgggcgcccacaatggggaaacctcagaccccccccggagtccgacccaaacccacccccccccgtaataaccatgcccgggggccgttcccatgggccaatagtaacaacaagcacacaacggagccccgaggaggtgataaaacaagggcgcaccatggcaaaggctgcaggccccaaaagggggggaggagagacctgcttccaagcgaaccatgcgcatagaaactaaccccggtggcctaagccagaagaacccgacccagaaaacccgggggcaacccattacggaaacacccacggggggccaaaacggccttaaagggggccgtggggggaccctgaaaaaacccgtgcggaaagggtcggaaaccggcccaaaagaaaaaccgaggacccggg

SEQ ID NO: 110607 - DNA, 518 bp, Glycine max
  unsure (1)..(518): unsure at all n locations
  Clone ID: PAT_MRT3847_7088C.1
gaanncggcnggagaggacatactaatgcgtgttgtggctcaaaatctttctcctgagttgactctcgtggaaaaggtaatgactccaaacccagattgtgcatcagtagatacaacgatactggattctctgcatatgatgcatgatgggaaattcttacatcttcctgtggtagacaaagatgggtatgtagtggcttgcatggatgttttgcagataactcatgctgcaatctccatggttgagagtagctctggagctgttaatgatgtggcaaatacaattatgcaaaaattttgggactcagcttttaatctagaaccaccggaagattctgatactcatagtgaaatttctgggctaatgacatcagatggggctgatacatcgaagtctgcatatcaatctgtaggttttggaaattcatttgccttcaaatttaaagatctcagtggccgtgtgcatcgattcaactgtggtactgaacatatagatgagctagtttctacaatcatgc

SEQ ID NO: 110608 - DNA, 271 bp, Glycine max
  Clone ID: PAT_MRT3847_70890C.1
agggggaaagggggatgtacaaaatatcacttggaatttttaacgggccctggggtaaaaaaaaataccttccaattttaaaaaatttgatttgaaagcaaaaatgcccccccattcaagaaaaaaaaagcttccttacctataaaatatttttacaacctggaatccccccaaataaaaatcccaaaaaaagaagaattttgggtttttggaaatcccaaccccaaaaaggaaggtttttttttccaagtataaaaaactaattggattt

SEQ ID NO: 110609 - DNA, 618 bp, Glycine max
  Clone ID: PAT_MRT3847_70891C.1
acgattttgattatccgagatcataggttgccgaaccttaaaaccggaaacaaatgctattgttacttgattccatgaatctctcaatatctttctactactttggggacgatttattaagggaaagaaaaatattctctgtgctggccacagactttctgaatcaatttcttttccatacttagataatttgctgaacacttttctatttgatataggacttcttgtcaaatttaaacttcttctggaacttatatagttttctggttaattataaaggtaagctggcgaaaacttggattagtgctaacacttttctatttggcataggactttctggtaagacctttttaataaatatcctttcttacactctctttttataactgatccggaatgtcgttaaagtaggttattcgaaaaaaaattgtgcgttgctgcaaaagtttgtttataatattttctttggaaacatcagttttactaaacaaaatttttaattgaaaaaattggaaatcttggtggttttaaaaaaatcacttaatttaaaaaatttctccattaattagtggattggatacctggtgatataaatatcaattatttatgctaaataaa

SEQ ID NO: 110610 - DNA, 544 bp, Glycine max
  Clone ID: PAT_MRT3847_70892C.1
ctgcttggggggggctgggggggggggggggggtgccgacgggcaagatttcgagacaatggagtgattagcaactaactgatcgaccagcgtgtaagtgggggggaatacgttgaccctaagctgaaagccaccggttacaaagccaacctgaccatgcaaaccgtagagcatagtgctactacttgggcgccaatctccgcagtaacaactggcccagcagctggctacgagagctgtgccatccagaaggctcaaagcgcagttggcctatgcgtacgaagggctactgcaagatattgctagctaggtggctagccatttcgggaagaagtgcgtagcccgccaaggcataaaattaacaggtggacgctgagggggattgttagcggtgtaagccccaagtgagggggccggtaaaaccgtgttgcctataggccatagcccgggctgtcgcaaaaccgtaaaatggcaacctttgagcctaactgggccggggccttaccgctgggttgaatttttggtaaaaggccggctaccgggg

SEQ ID NO: 110611 - DNA, 415 bp, Glycine max
  Clone ID: PAT_MRT3847_70893C.1
ccggtcatttggtttggactgagaccaacaggacagggtatagttaaatggcaagaagcagcccctacgggaataaaaccgacaaatcgttaaacctcggagccagatattcagagcgggtcccaccgatgatggatactggcggaggaggcggagcatcgtcaccgacagccaccatgtcgcggtggaagtttgcggcgtggcggcagttccagcacctgctggataaatcgacgccgcacgtgggacgccggtggctggggttcgcggcggttgcgcttttgtacgcgctgcgcgtgtacttggtgcaaggcttctacgtcgtttcgtacggcctcggcatatacatcctcaaccttctgatagggttcctctcccctcaggtggaccccgagaccgtgattctcgacgccga

SEQ ID NO: 110612 - DNA, 234 bp, Glycine max
  unsure (1)..(234): unsure at all n locations
  Clone ID: PAT_MRT3847_70894C.1
agggggagtccgcaacaattcaagtttcaaacaaccctaaccaatttaagggttccggtccctaacccaaccttggccttaccaaaccctaaatttgggaataagtccgaacaatctggttggtataacctttggtcctagagagtcaagttttatgtctggattagacgatcaaattcctactgccttcgattcntttgctgatgcaaatgctgatgactcgggtgctgggtc

SEQ ID NO: 110613 - DNA, 541 bp, Glycine max
  Clone ID: PAT_MRT3847_70895C.1
tagcaaaccccatgccatgcgagttttgtccttcataaacttcggcaaccatttacctatcgccaaataagaatccagatgtttaagaacatatcatttcaagaaaaaggcaatgatattgggagtccctggggatcacttttatctacttacaatataacaggcccgacctatatagatgggcctaaactatttataatttttacacacagcgtcctttctaaaaaacaagaggtacggctacactaccattttcttcccataaatataatccaggggactttacttcggccataagggtatcatactcaggcttaccttcctgggtttttcttctaagcggggtaaccttaagattaagctcttcctctgccttttcatattgcaaacattctttcaagagttttttctgcacttccatcaagtttataattcttgggtctaccgcctggcctgtaggagatgcacttgtaagtacattttgatcaaatgcagcaactgtaacaatttcttgcattgcttgccttttcatcttatgaag

SEQ ID NO: 110614 - DNA, 175 bp, Glycine max
  Clone ID: PAT_MRT3847_70896C.1
atatagattgatataccaaaatacttgtcattcatggtaaagcacatcctcataaataccagtaccataaagatgaccgcgggaaaaaaaccttgaacattcataaggagttttagactcatctaatcccttccttgggataacgggttgggggcacggctaaatatatcccgta

SEQ ID NO: 110615 - DNA, 1111 bp, Glycine max
  Clone ID: PAT_MRT3847_70897C.1
cttcaatcttcttcttccacatttcactctcgtccattgtttccctcataatcattttctcttctattacaattctctttccctttgaaaccactttttttcttcttctcttgtttccttttatccattgcgttcttcatttgcacttgaattttccttagtttgtaaaagggtgtaaattggggaagaaaattccatggaatctaaatactttgactccaatggggaggtctcactaaagcaaaaatcaaaatccatttcagcagagccaacaatctctactagtgaatatgattgctttgattgcaacatttgcatggaatcagcacatgaccctgtggtcactctctgtggccacctttactgctggccatgcatatacaagtggcttgatgtccaaagctcctctgttgaaccgtaccagcagcagacatgcccagtttgtaaatcagagatctctcacacttcagtagtccccctctatggctgcggaacatcgaactcggaatccaatgccaagaaacttcagatgagcctgggaatacctcacaggcaacctccttgcagcttgaatgctatgttaacttctcctcgctcgcggatttcgcatcctagtcagcaactgcatccaagttatttccagacacaatcaagaccatttcattatcagcagttttatggaagttatggtaccaatggattaccttatcttggaggtgcttctatgactagtttctttaatactgtgattgatatgtttggggagatggtcttgacaaggatttttgggatctcagatgcaaatttgtttgcaaaccctcttaatggaagtggaagttctaggatgagaaggcaggaaatgcagattgacaagtctctgaacagactatctattttcctcctatgttgcatcatgttgtgtcttctcttattttgaggacatttcatttcagactgtataggcacttatgtgcagctctgaatgttcatgctgttagggatctactgtaggttgtaccattatgtagatagtagactttggcatatattatgattatgttgatattggtcttgttattttatgattaactattgcatgcatgtaataact

SEQ ID NO: 110616 - DNA, 149 bp, Glycine max
  Clone ID: PAT_MRT3847_70898C.1
ttttgctcacaaaacaaggccctggaacattaatataaatcattggaagggcttggttgggagcaaacaacagacatgcttcattaagggccaccaaattagtgcgggcaaagggaaaataccttggcttatatacaggtgcagccaaa

SEQ ID NO: 110617 - DNA, 336 bp, Glycine max
  Clone ID: PAT_MRT3847_70899C.1
gatcaagatgacgatgtaaacgcacttcaggtatgctcttatatatgccctttctgtatattaagatactcgttttcctcatttattgcatgcagtcattcattttacttctgttctcatcggaatcaatattgtaccatgctattataaacccaaatttggagcctccatacaattttaaatatctgaggccagtagcttcagagacaattactgatttgtttggtatcccatttcctctgtgtgctttacaaacacctcttccacttccactttcaccgcctcacacgattccaccggcagtaccacattagggttaataattttttatggaag

SEQ ID NO: 110618 - DNA, 453 bp, Glycine max
  unsure (1)..(453): unsure at all n locations
  Clone ID: PAT_MRT3847_7089C.1
tgatagtgttgtacggataccaatttctgattactaaaatgtgctttgtaggttgagagtagctctggagctgttaatgatgtggcaaatacaattatgcaaaaattttgggactcagcttttaatctagaaccaccggaagattctgatactcataggtaatctggttgtgcagacatttaaacacaagctttgttttgttctgatccttgatcggcctgtatgatgtattgatgttctattgcagtgaaatttctgggctaatgacatcagatggggctgatacatcgaagtctgcatatcaatctgtaggttntggaaattcatttgccttcaaatttaaagatctcagtggccgtgtgcatcgattcaactgtggtactgaacatatagatgagctagtttctacaatcatgcagagacttgatgtgaatgatgtggaacgccctatga

SEQ ID NO: 110619 - DNA, 639 bp, Glycine max
  Clone ID: PAT_MRT3847_708C.1
cggccgggcaaggctaaccgagggatgctcctttaggaagaagggagactgagtggtgtgccatctttttttgtctgtgattggagagtttcagtaatgccttcttttgttttggttatggtatgctaattttcttaaatttgtaagacttgagtctacaaacttatccaagacactagggattatttacaccaatccttatgagaagtttctttgaagggaatactggttgcatcatataatctaatagcattgtcttgaaaaaaaaaaaaaaaaaaaaaaaaaaaaaaaaaaaaaaaaaaaaaaaaaaaaaaaaaaaaaaaaaaaaattaaaaaaaaaaaaaaaaagggggccctggacccccactttttgttccttttagggggggtaaatgggcccctgggggaaaaaagggcaaaaggggttcccgggggaaaattgttttccgttaaaaattcccaaaaaaaaaagaccgggaaacaaaaagggaaaacccgggggggcctaagggggggcctaacccactttattgggggggggcccatggcccgttttcaagggggaaaactggggggcccagttgatttaaaaaatgggccaacccccgggaaaagggggttggggtttgggcccctttt

SEQ ID NO: 110620 - DNA, 257 bp, Glycine max
  Clone ID: PAT_MRT3847_70900C.1
ctgcatttttctttgcaaaaaccaaaaaatacccctggttttcatacagccgttgtccaccgaggtactgaacaaaaccaggggtactttttggtttctgcatttttctttgcaaagcttgtggagtgcctgacccgaaggcattggttctttaggttgcagcaagttggactccgaatccgagcgctgcttgtcacaatgatctataataaggctctgaccctttcttgtcaatcaaagcagggtcacacttctgg

SEQ ID NO: 110621 - DNA, 686 bp, Glycine max
  Clone ID: PAT_MRT3847_70901C.1
atcattgccagtagtgcgagtgtgatcgcccatagcacgcgatggtatatgcaatgactagatgaagaatgtatgaaaaacattgagtgattagcctctcgatgggtcatgccaatttgcagcaaggccacgctaaagtggccataccatgggcaatagtctgtcttactccatcatgtaccctaaacaacctctgtacactgtcctttgtgtctttggctgcacttgttatgtccatgatcttacaccaggtaaagataagctttttgctaggtccttgaagtgtcttttccttggttactctcgtcttcaaaaaggttattgttgttttttcctcaacttcaacagtatattgcctttgcttatgctaccttctttgagactactatgggttgtcgttggatttatacaatgaagatcagaccaagtgagccttatagcgatcaatactaccatttggtcgacaaaggatacactcagatttttggccctgactacagggacaccttttccccaatggccacaattgctcatgtccatcctcttcttgctatggctgccattcaacattggtctcttcaccagctaggcataaaaaatgccttcttgcatggtgagttgcaagaattttatatgtctcaaactccaggttttatagtttcaggtgactctcggttaatttgttg

SEQ ID NO: 110622 - DNA, 273 bp, Glycine max
  Clone ID: PAT_MRT3847_70902C.1
gtgttatttcttgggtcacacttataaggcgtgctttctaggtgttcatactttcccaattgtcactatatatgttggaaaaaactatctcatgatgatatgttacttttccacttggattgtggaagtggaacgaacgccttcatagtggaagtataactaatttcatttgttaatcccactagataaatatttggggtgatattttcgaagtatgatctctttctctcataacatggctctattcatttaattagcatctcagtttcttat

SEQ ID NO: 110623 - DNA, 374 bp, Glycine max
  Clone ID: PAT_MRT3847_70903C.1
caagaccatgaccactgcatgtagtaaagacggcataaataaagcacttgtgatggtgcattggccaaacacccaagaggctacaaaaccaaatggatcatgcacgagtagtagtcacttctatatttgccggaacacaaacctagaaccgactagctgagaggatggggccctatagctgatatataagaagaactcaagggcacaaagggttgaagctaattttttggctgtggaatgcaacaatggaacattaccttcttcatcgacccacgttgatgacatgctgggatcgatgcctagagataaatgaccggtgcttcaccctgctacgagtgaactcactcaaaacaaagcaccagcacgatgagaaa

SEQ ID NO: 110624 - DNA, 288 bp, Glycine max
  unsure (1)..(288): unsure at all n locations
  Clone ID: PAT_MRT3847_70904C.1
gtaaaactcaaaagaaattngttttccatgtttctgttagcaagctctcattcgggtcgagtcgggtaatcngatccgatcggcgctgtgatcggatcatcgatttgacgcttgtttgggagagangcatttcattgccaatgggaatgcncaatcccaacaacattcttcccagtcntcctcgtcacntcgcaccatgagcaaanccctgggaggaacaanagaagacgaagacgaagaagaacaacaactactagaacaagacnaagattgttctncgactnacac

SEQ ID NO: 110625 - DNA, 691 bp, Glycine max
  Clone ID: PAT_MRT3847_70905C.1
ggttgccttggtggtttcatccttcacatatttgcccatttaaatttcaatattattgacttttgtatattatttgttaaagtgtcttcaacattgtaattaatctctttcttttctcaccaccatgtcatctggagttactgtatccacggaagcaaaaaccgtatatgaagaagttaaaaaggataggaaataccgatatataatctaccatataaaggatgaaagagtaattgatgtggaatcaacaggacctcgggatgcaacttatgccgattttctagaggaattaaacaaattcaagacagaatgtcgttactgtgttttcgatttcccggccaatattcccgttgagggatcgcaggatacgcaaagtatgagtgttaacagactcattctcatgagatggtgcccatagggggctagagttaaacaaaagatgctttactcaagtagttacgaagctcttaaaagagcactagttggaatctacaaatacatccaagcatgtgaattcgaggaggccagtcaagcagccattgatgatgccttcaggaagagcggaggaaaatagtcttgcaaacgacacaaagcataaaatccttccccaccttctttgaatttctaacaagatctaatttgtcttacaatcaaagtgataatgtattaataccattcaattgtgtaactc

SEQ ID NO: 110626 - DNA, 1175 bp, Glycine max
  Clone ID: PAT_MRT3847_70906C.1
gataattctaatttttattccaaaataaaatggctgttctattcagttttttttaagtatattgcttatatttcagaattttctatattcactgcatcatcttggcttaggccatatatctggttatctgaggatggttgcttttcaaagttacttcattctttctattgggagcattccataaatgtttagtgtgtatataggctaactgcactctgaaagcatttgagtgttttttctaattatgcacataactaaattaaccacatacaccatgggaaagagaaaattattgtgtgaaagattttgcacataacatttttatatgatatagtttgtgatctttctatccatcgcaggaaattattgatatgtgtgattattgtgttgggctaagcagacaattgaatggatcaattataccatcagaacgtccagatcatatgatgtttgaggtatggaacccactaggaatagttggtgtaatcactgctttcaactttccatgcgctgttctaggaagggtgctccaacaactcctttgataactattgctgtgacaaagctagtagctgaagttcttgagaggaacaaattacctggtgcaatattcacctctttctgtggaggtgctgacattggtcaggcaatagcaaaagacacccgcattcccctggtttcatttactggaagttcaaaggttggcttgatggtccagcaaacagttaatgagagatttggcaaatgcttgcttgagttaagtggtaacaatgcaataatagtcatggatgatgcagatatcaaattggctgtacgatctattttgtttgcagctgtgggtactgctggtcagcggtgtacaacttgccgtagactgtttctgcatgaaagtatttacgcagatgtactagaccaacttattggagtctacaaacaagtcaaaattgggaatcccttggagaaggggactctagttgggcccttgcatactcctacttcagtggaaaactttcagaagggtatttcagtcataaaatctcagggaataaactttggctagaaagctatccttgcaaatgaaactgcacaaataatgcgattttgcagcccgaaagagagatgttagtctggctgacatgggttcaaagtgttgtattaacaagatctgcctgctg

SEQ ID NO: 110627 - DNA, 474 bp, Glycine max
  Clone ID: PAT_MRT3847_70907C.1
atgttattaggataataatgatttggagggtgggatgaaagtagtgttttttggtggatggtaatgtaataaagggggagaaaaaggaacggggggggggggggaaaaggaaaaaaaggggtaaggtttttataaaaggggggaaagggggtagagggtatggataaagaattcttggggaggggaatgtttgggggggaaaaaagatagggtgggggggtggtcgtttaattggtgagcaaaaaagttagggggggtgaggggaggaaaacctatttagggtggggggagaaaaagtttttgggggggaaaaagaaaggaagggggcccagcatgcatggaggaaaaacggggctggaaaagagaaagacaatgttcaaaccaaaaatgaaaggggggggtccttgggggggggggaagggggggggaaaaggggaaaggagggggagatttgttatccccagattttttttg

SEQ ID NO: 110628 - DNA, 2191 bp, Glycine max
  Clone ID: PAT_MRT3847_70908C.1
ccacgcgtccggctttattgtacaaaaaaatctgaatccccatcactttccccatcccatgtgtgtccctgtcagagtatgatatgaggaactaactctataaataaaactttctgaatcaaacacatcacacacacgtaacttcatctgggttgcagggaaaaagaaaaataaaatgggttccgataataccaacttggagttcttgaaggagatcggtttgggctcctccaacattggttcttacattaatggccaatggaaagccactggttcttctgtcacttctgttaatccttctaacaatcagagcatagctcaagtgactgaagcgactttgcaagattatgaggagggattgcaagcttgcagtgaagcagccaagacatggatgactattccggcaccgaagagaggtgagattgtgagacagattggtgaagcattgagggccaagttggatcctttgggtagactggtgtctcttgagatgggaaaaattctcccagaaggaattggggaagttcaggaaattattgatatgtgtgattattgtgttgggctaagcagacaattgaatggatcaattataccatcagaacgtccagatcatatgatgtttgaggtatggaacccactaggaatagttggtgtaatcactgctttcaactttccatgcgctgttctaggatggaatgcttgcattgctttagtctgtggtaactgtgttgtgtggaagggtgctccaacaactcctttgataactattgctgtgacaaagctagtagctgaagttcttgagaggaacaaattacctggtgcaatattcacctctttctgtggaggtgctgacattggtcaggcaatagcaaaagacacccgcattcccctggtttcatttactggaagttcaaaggttggcttgatggtccagcaaacagttaatgagagatttggcaaatgcttgcttgagttaagtggtaacaatgcaataatagtcatggatgatgcagatatcaaattggctgtacgatctattttgtttgcagctgtgggtactgctggtcagcggtgtacaacttgccgtagactgtttctgcatgaaagtatttacgcagatgtactagaccaacttattggagtctacaaacaagtcaaaattgggaatcccttggagaaggggactctagttgggtccttgcatactcctacttcagtggaaaactttcagaagggtatttcagtcataaaatctcagggagggaagatcctaacaggtggatctgtattagagtcagcaggaaattttgtacaaccaacaattgttgagatttctcccgatgctcctgtagttaaagaagaattgtttggtccagttctgtatgttatgaaatttcagactctggaagaagcaattgccttgaacaattctgtacctcaaggattaagtagttcaatctttacccaaagacctggaactatattcaagtggattgggccacgaggtagtgattgtggtatagtgaatgcaaacatacctacaaatggagctgagattggtggtgcctttggtggagaaaaggcgaccggtggtggccgtgaggcgggaagtgactcgtggaagcaatacatgcggcgttctacatgtaccatcaattatggaagtgaactaccattagctcagggaataaactttggctagaaagctatccttgcaaatgaaactgcacaaataatgcgattttgcagcccgaaagagagatgttagtctggctgacatgggttcaaagtgttgtattaacaagatctgcctgctgtaaggatggtaccttcacatgacagtttcaatgtataagatatcttaaatcttaaataaatttagctgcaaaagttcttatttcccagtcaaaaaaaaaaagttttttttttttttttttacacaagtgtcttatatataatgtagactggaacctgagttgaggactcatgacaacgattaatattctcacacatattacagcaacaattaaagatcagggtgatatgtgatgattgatattgagatgtatataatagtgtcaattttttagatctttatttgtggttttttttttttacattatatatttatttgccgacaggcataaataaaccaatcgatttatatatggtctttatttttgtttaaaaa

SEQ ID NO: 110629 - DNA, 2063 bp, Glycine max
  unsure (1)..(2063): unsure at all n locations
  Clone ID: PAT_MRT3847_70909C.1
ccacgcgtccgaaaaaaacaatactgaatccccatcactttcttccccatcgtatgtgtgtccctgtcagagtatgatatgagaaactctataaattaactattttttctcccactttctgaatcaaacacaacacacacacgtaacttcatctgggtttcaggaaaaaagaaaaaggaaaacaatgggttccgataatcaccagaacttggagttcttgaaggagatcggtttgggctcttccaacattggctcttacattaatggccagtggaaagccactggttcttctgtcacttctgttaatccttctaacaatcagagtatagctcaagtgaccgaagcaactttgcaagattttgaggaggggttgcgagcttgcagtgaagcagctaagacatggatgactataccggcaccgaagagaggtgagattgtgagacagattggtgaagcattgagggccaaattggatcctttgggtaggctggtgtctcttgagatgggaaaaattctcccagaaggaattggggaagttcaggaaattattgatatgtgtgattattgtgttgggctaagcagacaattgaatggatcaattataccatcagaacgtccagatcatatgatgtttgaggtatggaacccactaggaatagttggtgtaatcagtgctttcaactttccatgcgctgttctaggatggaatgcttgcattgctttagtctgtggtaactgtgttgtgtggaagggtgctccaacaactcctttgataactattgctgtgacaaagctagtagctgaagttcttgagaggaacaaattacctggtgcaatattcacctctttctgtggaggtgctgacattggtcaggcaatagcaaaagacactcgcattcccctggtttcatttactggaagttcaaaggttggcttgatggtccagcaaacagttaatgagagatttggcaaatgcttgcttgagttaagtggtaacaatgcaataattgtcatggatgatgcagacatcaaattggctgtacgctctattttgtttgctgctgtgggtactactggtcagcggtgtacaacttgtcgtagactgtttctgcatgaaagtatttatacagacgtactagaccaacttgttgaagtctacaaacaagtcaaaattgggaaccccttggagaaggggactctagttgggcccttgcatactcgtacttcagtagaaaactttcagaagggtatttcagtcataaaatctcagggagggaaaatcctaaccggtggatctgtattagagtcaggaggaaattttgtacaaccaacaattgttgagatttctccagatgctcctgtagttaaagaagaattgtttggtccagttctgtatgttatgaaatttcagactctagaagaagcaattgccttgaacaattctgtacctcaaggattaagtagttcaatctttacccaaagacctggaactatattcaaatggatcgggccacgaggtagtgattgtggtatagtgaatgcaaacatacctacaaatggagctgaaattggtggtgcctttggtggagaaaaggcgacaggtggtggccgtgaagcgggaagtgactcatggaagcaatacatgcggcgttctacatgtaccatcaattatggaagtgaactaccattagctcaggggataaactttggctagaaagctatcctagcacatgaggctgcacaaaataatgcgattttgcagtctgaagagagttctatatataccgagatgttagtctggctgacatgggttcaaaagtgttgtcttaacaagacatgcttgctgtaaggatggcaccttgatatgacagtttcaatgtataagatatcttaaataaatgttaaatgaataagctgagaattcttttcccagtcaaaaagtgtttgatgtttaaattcgtgttttgtgattttggccattgaaaaaataatatatatatatatatatatgtatggcatgtattcattgctataaaaaatttattctttttaaaanaaaaaaa

SEQ ID NO: 110630 - DNA, 355 bp, Glycine max
  Clone ID: PAT_MRT3847_7090C.1
gttaaaggagattaatcttgactagctcatgctgattcgatctgataaagttgcagatggggagcatgaatatgaagaggcatggttgattaaatattaaccttgactggtactgttgtggtcttggctcagaaaatgtgagccgcattgtgcaatacattatagacaatggtgctctaatctctagaatatgctttggataggatatatcatgtatctggctgtcaattgatggtcaattactcaatgtggatcgatctgagactggctctactctgattaggaaccattggattgacgacccttacttgtaatctgtgtacatatggcactacgatatatatctataattctc

SEQ ID NO: 110631 - DNA, 361 bp, Glycine max
  unsure (1)..(361): unsure at all n locations
  Clone ID: PAT_MRT3847_70910C.1
ctnnaatntntnngaaaataaggcggtttaaaggtgcaaagccccttaaatattaaaatagggtggggccggggggggtgaatacataaggcaaaggtttattatttccccaaaaatattttttttttattttttataaaaagggctccccccacccttattaaatcctggtgcaatttatggggggaccaaaagggggggggtttctttatacttttttttaagcactttcttttgtgtccagggggtagaaatggaaaaaacactctaagggggtggcctcaacacactctttatttaagtggtccccggcccctggggtgtttttaaaaacaaaaaaaaaaaaaatttgttttcccct

SEQ ID NO: 110632 - DNA, 619 bp, Glycine max
  Clone ID: PAT_MRT3847_70911C.1
tttagcatcaattgtcaactatgtattgggcatttatgtgaaacaacatatcccatgagctaatccaggagtttgttcaatccaaattttatgcctcaaatcaagatacaaaagatacaaattctacgagtttaatgaaatatatcccaaattctttccatctatagccaagacataaaagtatgaacagcacttttggtgttcataaatttcattatgtggagcacaacaaagttacttatcattgatcctgtccttgtcctctgtaactcttccatctttctcttcatcttccccaatgtttcatttccttcaagcatacctaactagttcttgatgggatagggatacatttatgagataaactctggtcggtggaggagagttcacaagtaagtgctccaatgtcctacttacttcttccttagatatgtttacatgtggatgcattttcactttcaatgactccaatctaccaaagcattggaggttgaacagtcgctgcagcaggatctgataggtcatttagtattgccttaagggtagcagaagagattgtgagcatcttaacattagtcataagtcgcagccaggtaatgatgactgaataatgtatatc

SEQ ID NO: 110633 - DNA, 185 bp, Glycine max
  Clone ID: PAT_MRT3847_70912C.1
ttagaagtgcatatctgtctactgagaaatcttttttttctcttcatagactctgcctgttatcctaaagaggggcaataacccgctaccatccgagaagtcccaccccactgttcataaacaagactcatggagcgtgaatgaggtgcaattggggtgggaggactcaatgaagaggattacga

SEQ ID NO: 110634 - DNA, 365 bp, Glycine max
  Clone ID: PAT_MRT3847_70913C.1
ggaacaacagaaaagaatctatataccacccaaatcttatactaagcatctaatatcaagagcttcgatacacacacctaatacaccacaaactgctgggcccctcacctggcatgctcaaaaagctgactacaaggatgcacctaaatcgacggctttcgggcggatctgctgacgaagaacctacccacaatctttttgggcttatcgaccgtacactcgagggcaccaagataagaagaaattgctaaagctccaaagtgaagcactataagtccattgggaaagagaaaggctacttcaacttattatcctccaccacgagaaacattccatatattatcggacgcggggctcgaaccggg

SEQ ID NO: 110635 - DNA, 170 bp, Glycine max
  Clone ID: PAT_MRT3847_70914C.1
cggacgcgtgggcttacgcgtggggttaacttacttaatcaagtagttgtggaatggcagggttaaaggaaaaataacggcggccactctcgatcagaaacatatgaggctcttcagtttcttgagaatgagctgaaggacaagaagttttttggaggagaggaatttgg

SEQ ID NO: 110636 - DNA, 130 bp, Glycine max
  Clone ID: PAT_MRT3847_70915C.1
ctccaacttcaacgacatcatccactccatcatcaacatggacgctaatgttatcaccatagagaactctcgctccaatgagaagctcctgtcagtctaccgagaaagtgtgaagagtggagctggaatt

SEQ ID NO: 110637 - DNA, 286 bp, Glycine max
  Clone ID: PAT_MRT3847_70916C.1
tcagtgggatcgagaatatatttgagaatggggaatcagtacctacttctggttaccctggtgtcagtctcctagggtgatcggtcggaaccaccgccgttcttatcgatccctcgcactgacgctttcaattctcaattcgccaatatcgcttcatcttcgcagacctatttgcacacacgcacttgggacaattgcaattttgacacatgtcctcttcggcgagacttaggacatatccggcgttatccacagtccagtcgaccaagcctttgacggatatggc

SEQ ID NO: 110638 - DNA, 764 bp, Glycine max
  Clone ID: PAT_MRT3847_70917C.1
ccgcgtcgcgccacgcgtccgattgaccctggatgaataatcggctaccactactaccagtggtgtagtgctctgaaactgcaacagcaacagcaacgcgatggggagaggaaaaagagggaagagtcgcactcaaagaaagcatttccagcagaacagagagaatgtttggacatcttccaaacgctctaaatcagatccttcctccgaaaatcctattcctatctgcaatccctacgccactcaaaacctcgctttcgatcactattacaaggagcagggaatcgtttcctcagaagaatgggatgcattcgtgcaagttctcagaactcctttgcccgcagcattcagaatcaattccactagccgattttctgcagatattcggtcccaactggagaatgattttgtgcattctcttcaggccgaggttgcggaaggggaagatacggaggctattatacctttgccatggtatcccgagaatcttgcttggcattcgaatttctcccgtaagcagctcaggaagaatcaaacacttgggaggtttcatgaattcttaaagctggaaaatgaaattggaaatattacaagacaggaagttgtcagcatggcacctcctctgttcttggatgtacattcaaatcattttgtacttgatatgtgtgcagcaccaggttcaaaaacattccaattgctcgagatttacacaaattaactaaagctggatctcttcctgatggaatggttatagcaaatgatct

SEQ ID NO: 110639 - DNA, 385 bp, Glycine max
  Clone ID: PAT_MRT3847_70918C.1
ggacgcctgcattttctcgtttccgtaatatcccgcgggcgacccacgcgcaccgcagcgcaccggaaaagctgctgcaggccacgcgaagagaagagaggggatgaaagatgagagccattttcgagaaaggtcaggagagggctggacgttcctgaactacaacagcgacggagatcccctcattatcctgccccaaggaccacaacccaaccatctggtttgccgacaatggtgaacgcttgggcactgatctcgggcgcaacggcaccgaatggacctgcgacggatcatcacatgtatttcttctgatcacgggtagtgccgatcagaccgccaagctatagggacctgcaccacggacggccattgcacaccttcaatt

SEQ ID NO: 110640 - DNA, 716 bp, Glycine max
  Clone ID: PAT_MRT3847_70919C.1
ggcaacaaatgataagctcaaataaattatatttattttttcttgactacaaaaaatcatttatctttatgcattaaactacaaggaaaaatttccctgcaatagttcgcaagaaaaaataggcatgtgaaggatatttataaatctaattatcaatttgtctacaaatgaaacctctctttactagtagatctcacatcttccattttcaacatttctagtaggaaatcactccatgtgtcaatgggtcctggcaagcaccaatgcacacaatcattaaacaatgtcacattctcatgtggccagtgcccatatttattagggtggccatctggccttagtaacattgcttgtgtggtgtcaagtaacatgaatttcaaacctttctttctggcttctttctcagcaattttgaactgttccaattgtatggtatgtaactccaaattgttgccctctaaccttgtttcattactcttaaatggcttagttctgacgcaattcccacctttatcccacaccccattctcaaaatgagatggtgcaaatgttctaagaaatgttactcccttaaagttttctaaattaatgatggctttaaatgtagtcccaaaagcctttttatagccatagtgccaagataagtgagtgacattttctaaagacagtattgacatccaacaattttttgtttctcatagaacaccattggcctt

SEQ ID NO: 110641 - DNA, 1158 bp, Glycine max
  Clone ID: PAT_MRT3847_7091C.1
ttggcactgacaaagacactccaccctgtagtaagaagatgccttttgggctgaccgcgaaatatatgcctgaatttccattcattatcatgaagatctctggcaattagttcttgagcaggaggctgctgtgagtaatcaagaggagggaagactttttcagctgctcttcgaggaacagaaaatcctccatgagtgctggtatcacttgcagtcaatgttttgcaaaagtagttggttggttgcttgctgggagtacccaattctgcaggcagcagatacacctccttttgctcttggacttagaggttgcagagtcatttgagcatatacttcatctgtttcagcatctgcatgcattgtcacattgtgaagctgacagataagttgtggtggcaagttagggtaattaggaatatgtgcatctacttccctgttggttgatgcagcaacctgctcactatgaccttggggaaagtatactacacgacttccaaccagaggcagagaaaccagagggccagcacaagcatgccaaagttcagaattcaaacattttttctccccttcttcttcagcaggagggttaaatccagaagaagagagcttcatgcttggagctataacaataggtgaagttccaaactagtaaaaactgaagcaccccaaatcgaataaaagcattattattgttataaaggtcgcaaattttgcatgcccctttgaatcagcaatgatcctatttcataacccatcccacctccccacccaccccgaaaattgaagctacccacagaaaaccatcatccaaagccacttccaatgcaacacccgaatctcctggttctcataacacgctggaatccaaccctaattgggagcctgaagttcaaaccctagcttccagatctcaccgtagcggagctgaacagtagaattagagggattgggggagagaggcgagtgaagtgagagtgacattcatgtgggatttcagtggaagaagcggagaatgtgatgggagagagagagatggctaatggctatgttactcaacaacaataatgcacagtgactggtaataattgatccatggcatggtatgtgttgtgctattatacgaaaccggacgcggggtcgacccgggaattccggccc

SEQ ID NO: 110642 - DNA, 322 bp, Glycine max
  Clone ID: PAT_MRT3847_70920C.1
gaacccaacgacaaagcttttttcctttaacacccaagtgtaccccatcactttggatagtgtggggcgcatgtataaaaaatccagtatgagccctaggcttttcatttagctcatgcaagcaaacaaataatgaatgggaaaacatctagaaaatctgacacctagtagtcatgaagccgatgagacaatgatcctactatatgtacgtgatttaacatgtattatgtattgcaagtttacacacactatagatgagaaatcactgtgccatgtatcttgattcaacatcatagagctgagagcctcttaagaaaggtct

SEQ ID NO: 110643 - DNA, 1799 bp, Glycine max
  Clone ID: PAT_MRT3847_70921C.1
ttaattgcaattttggtgtttctactagttctgttgcttctgtgtgctcgtaagaggggtaattcaaatcagagaggaaatggtgtgggtcctgctcctgttggcagtagtcctccaaatcccggtgtaccaatcgactttccaaatgtcggagattcatttacctatcatcagttgctccaggcaacaggagatttcaatgatgcaaatcttatcaagcatggccacactggggatttcttcaatggtgttctggaaagtgggattcctattgttatcaaaaggatcgacacgcgctcagctaaaaaggaggcttacctgtcggaattggacttcttcaataaggtttctcatcaaagatttgttcctttgttaggaaaaaactttaaaaatgagaatgagaagttcctggtttataaacgcacgacaaatggggacttgtctaattgcttgtactacaaaaacacatctgaagatggtacttcgcaatcattggattggataactaggttaaaaattgctactggagcagcagaggcactatcatatctacatcatgaatgtgttccgccgattgttcacagagatattcaagcaagcagtatacttctagacgataaatatgaacttcggttagggagtttaagtgaagtttgtgctcaagaagctgatattcatcaaagtaaaatcacccggtttctgcggttgcctcagtcttctgaacaaggcacatctggttcatcaacatcaatttgtgcctatgacgtttattgttttggaaaagttttacttgagctggtgacgggtaagctgggaatgagtgcagctagtgaggccgaagtaaaggaatggtttgatcagattctaccttgcattagtatgtatgataaggagctagtaacaaaaattgttgatccgtcaatggttgttgatgaggatttcttagaggaaatatgggctatatccattgttgccaggtcttgcctaaatcctaaaccttcaaggagacccccaatgagatatgttctcaaggctctggaaaaccctttaaaggttgtgagggaagaaaattccagttctgcgcggcttagagcaacctcttctagaggctcttggaatgctacgttgtttggtagttggcgtcagagttcttccgatgtaacagttactccagcagcctctggtacaaaactcgaaagagctagcagtttaaagctgtcaggaactaccggttcgcagtcacagggtagtttccacaatggtggaggtgagatttcgtcatcgcggagacgacattcaaaggagatattcccagagccatctggggtacatgatgtaaagaggttggagcttgaatagaaacatgagtcataaatttaattcttttggtaatgagactgcccctttcttctttttggtatttggaactggaaagtgttcattgtacatgccagtactcagtagacaaagcggctctcaattcctttcaaagggggttactgtatttcttttcagtgattttggacacaaactgatgaagtggagagatagagagcaggaaggccaagtgctatggtagatatggatactttgactgcttgtttttgacacaaacaagccccattttttttttacctgtaattgattttttttaccctttgtctcgagtccccttatggaatgtaaattttaatgcgttagatttcttcattcagatcacttttgtttttattctggaaaaaaaggggactgcatcaaaatttgaaagaaaaaaaaagcaaacaggttatactaattct

SEQ ID NO: 110644 - DNA, 362 bp, Glycine max
  Clone ID: PAT_MRT3847_70922C.1
tagagaagcagtgatagcgagaggggcagtgcggggacgtcgagaacgaggcgcaggcacgtagatactggcagcagcagttcggcgaggccagtagagtgctcgccataacccgccagcaggctgaaagcacgccattggttcttgccttaatcgacggcgacggcgctatattcacggagggcctgctgagggcgggcgctgagggcgggcgctgagggcggctcagacgcggcacacaagcttcagagtgagataaggaaccatatattggacgtttatggggggggaggcgggtgactggtccgtcatggtgcatatctatgccaacctagagggtttaagcaggaagctagcttccg

SEQ ID NO: 110645 - DNA, 369 bp, Glycine max
  Clone ID: PAT_MRT3847_70923C.1
gtaggataaagctttatcttttctatcaactgcgataagagaaagccaaagggctgtggagcttgttatgagcaccttcgataacacactagacggcaaggcttgccgttgcggggcggaggctgcaggaccagcatcttctcaagaacgactgaataaacaaggcattctacaacgccttccagatggcaagcaaaaacgtagaggctgaacaaaggatcactaatgacatgctgaagccaacaacagacatgacaagactggtcactggaatggtaaagacatcgtgcggactgacgcacgagacttggaccatgaagctgggaacaggactgaagggaaataccatactcggtgcttacatgccac

SEQ ID NO: 110646 - DNA, 284 bp, Glycine max
  unsure (1)..(284): unsure at all n locations
  Clone ID: PAT_MRT3847_70924C.1
gcgtncgtaagcttgggggggggctcgngctcacaccggttggggtcgaggttttatacttctcagccttgtccctgcccgctcgccccccttactcgaaacgctcgaagcggtgttgttgagcgggtcttcctcggagccgggatctaaggacaccattgggtcgcttttcgngggcacgccgttgcggtggggcgcccccttgctctccgccggcgggtgcggggggccgcggtgtggttggcctcccgccggcgggggagacgggggaggcgtcgggtgcg

SEQ ID NO: 110647 - DNA, 354 bp, Glycine max
  Clone ID: PAT_MRT3847_70925C.1
gaactacttgtttgccagatgtattggctgttaatgttgattggcatatattgattaaattttccctagaacatatgttctttctgtttgctttaggtattctatgttggatcatttgtgaagcgtaagttatatctgattttttttcggtcggccaaaataaagatttatattaaataagtaccagaggtactacagaacaatttacatagcataaaaagctcctcttcagaggaccatacactggttacataatgaaattactgccaatagttactgatggatgctatcctgctgtgattacaagcccatccctgatattggaagcccactgattgtagttgatgtcgaaat

SEQ ID NO: 110648 - DNA, 543 bp, Glycine max
  Clone ID: PAT_MRT3847_70926C.1
ggaaaaaaaaaatttggggttttttttttaggccaacaaagggggaaacccttaaaaaaaaaattgggttgggggtttaagggtaaaatttttggggaaaagctaattttttgggggggaaacaactttaaggcccaaaaaaaggaccttccttggggacaaaagcccaaaaaccttatccaaaagccaaaaatttccaaaactccccagccaaaccaaattggggttaaagggggccacgggccaaaacccagcccttatttaattttaaaaggggcccttcccccccccaaaaaaccgggaaaaaaaccaaaaatccccaagcccaaaaaaattccttttaaccatttaaggggaaaaaccaaaattttctttggcccaaaaaaaaaagcccttaataattttctaaaaaaccccatttttccccaccccataaccacaaaaacaaccttttttggggccaaaaaaaaaaagcccttcctccaggggccccccaaaaaaaggggcctttgggaaaaggggccctccacggccagagcgggg

SEQ ID NO: 110649 - DNA, 455 bp, Glycine max
  Clone ID: PAT_MRT3847_70927C.1
ttgggggggtttttttttttttttttttttttttttttttttgaaaaaaaacccacccttgacacatcattacgataattaaagggggggggggaattttcaaagggggggggcctcctcaacagggggggggggcctaatttcctttattggattaaacaaacgggcgggggaaagaaaacccaaattccagatcatggcggggattccgcattttcagaagatcgggcaggagcctggggaacagaaaaagctgggataagagtattaccaggaatctcaaaatcttgagaaatgcccaagagaatatcaaaaactgcagactggtggggagtggcaataaggaaacccaaaggccaggaagtttggttggcccactcagaactccacttttcaaaaccgttggttgggaccccctacccttatggggaggaacctgcccgggaagggggggc

SEQ ID NO: 110650 - DNA, 389 bp, Glycine max
  Clone ID: PAT_MRT3847_70928C.1
tgcaaccttacaatgactcaaatctgtggtctgttggaaagggatgagtaaagatgtttgagcttttgttcagaaatgcagtgtatgtcaaaagtgtaaatatgagaccaaggcttctcctggattgctgcaaccattgcctattccggatctgatttggcagcatattaccatggattttatagaaggcatgcctagttcctttggtaagtaggtgatttttgtagtagttgataggttgagcaaggcagcccactttatggctctttctcatccttattctgctgctgatgttgctcaatccttccttgatcatgtattcaagttgcatggattttcagattctatcaccagtgacagagattcaatatttctcaatcagttttggc

SEQ ID NO: 110651 - DNA, 215 bp, Glycine max
  Clone ID: PAT_MRT3847_70929C.1
gggagagtgtgcaaatagctatccgaccaaaggtttcatggagtggttctagtgttgcagggactgtgcagattcagtgcagtgacctatgctgcacatcaggagacagtcgctgctgttgcggcgagtggtgccaattttaggtgtacctgatgctcttgttcctgttgatcttccagtcagtcaaataaatctattttcttggggagacgact

SEQ ID NO: 110652 - DNA, 288 bp, Glycine max
  Clone ID: PAT_MRT3847_7092C.1
tccctccgtgagaagacgacaaaagaggaaacagaagggatttaaacagcataaccggggaccctaactctctctgcataagcacaatcacatatatgaggaaaaaacttctgttcacaacccactaaaagccttttctttagcttcaatcgcaactgtactcccaaattcaatcacttattctattaagtatactatcctacttatccctcgaaattccatcatcgcggatgggcacatgctgcttctatccccttcgaggaaccaaaaaccccaaaaggccaaaaa

SEQ ID NO: 110653 - DNA, 1710 bp, Glycine max
  Clone ID: PAT_MRT3847_70930C.1
cgtacggttaggaaaatttgcagtttcttagcatagattggaggaagaagattgttggcaactgttcccagggagaacaaccttcatcttcttctgaaggtgctcggtgaaagggtgtttgaccaagagaagaaatccagttccagagattttttattcaagctcggcattgtggaaatttacaaaaggaggatggcacttatccttgcagcaaatatgtgctccattacaaattccaaaacggttgaagtgataaaaagaatcgatattgaagataaaatgcaatccagatctaatattgcactgcctccttcggaagcttcatcaagtcgcaggcatctcttaatcggtgttggtccttcattgcttaccttgacgtgtggtttatcaccaccaacggtatgggccgaaaagaagtctggtgagaaagaggaagaagataaaggggttattggggccatcaaatccttatttgatcctacgcgtccggttttggaacagagacagagccatcgataatgtataacagaagatgaaatgaaacaaggtccaagtttatcttgttagatttcatgaattggttgctcaatgacgcctttgcccgtctcatgtactagtgttggtatccaataccttgcgctcggcattggccttttttgcaagttgatgaaaaaacaaattctggcagcttatccgcacaccattacggattgcaaaccgggtgatcagtcaaaaggattcgataatgtgcagtttctgagcatagattggaggatgaagattgttggcaactgttcccagggaggacgaccttcatcttcttctggaggtgctcggtgagaggttagtttgccgcgcgaggaaatccagttcctgttatggtttaagcaagctggtctttcccaaaactattctcataagctggctcgtgtggtccgctgacgcggattgcagcgtatttaccatacgaatttccaaagtgtgttgacgaagtcttacttaaggtcagcaagggaagtagtgaaaacaatgcgtgaatctttaaacgaagtcactgatgataatgccaaatttagacggactgcggactcagcaaaggagtcaattcgggagtatttgggcagttggaggggaaatcagattgttgctcaagaagaatcatatgttattttggaaaaagtaatcagatctttggcaaacttttactcaaaggcagggccatcagctccactgtctcaggaagtaaagtctgaaatattagattatctaaatacagctgaagaatttttgtagaacatcctccaatgtgttatagaaacaacaccatttctaactccctggatgtcgtcaatggctgtgataaagtaaatttattcttcaatcaatttaaattttgtatcaaaaaattgatcaaacttgttttcttttttcatgagaattatacttgccgctagctttggttgatgcttaattctcccctcctccccaaacaaaaaaccagagagaggacaatgcgaaaattgagtctgtatgcttcatgtaatctgtatctcaagttatatcccaagtaaaagagcaagatacattcttgtctgttttactttcttttatttaccccctactcaaaaaaaaaaaaattaaaagagtaaaaagctttaacgtgcaaaaaccgtcactgccacccaaacaagtgttgctagcatgatgaac

SEQ ID NO: 110654 - DNA, 256 bp, Glycine max
  unsure (1)..(256): unsure at all n locations
  Clone ID: PAT_MRT3847_70931C.1
ccagaaggaggaaanagagaagnacgcngagaaagcaaaaacgnggccaccgacgcaaacaaacgaaaacaggcgaagccacaatggatggaacaaacaggccaccgnnggaccaggaaacaccagccgnccaggaacggncaacacgaggtttttttttttatgggangcacggaaagatgcngaagggaaatttaatgaccaaccaatgggtgaatacatgattaaggtgaaacagctgctggaagcagccggc

SEQ ID NO: 110655 - DNA, 864 bp, Glycine max
  Clone ID: PAT_MRT3847_70932C.1
ccgcgccccacttagagcagttttctctcggagacacattcattatcaagtgtgagttcatcataaaacaattgattgatatcttgccatcatttatggcttccttttggccattcttggcaatgttcatggccttaatggcatgcaattgttcatcattggcctctgcttctcgacaaagcatgcatgtttcaaccatctcagcagcaccaacaacattgccaggtgcccctctatacttctctccaaccatttcaccagatattgagcctttgtttccaacccctggacgtgctgctttctctccatcagagtcttcaattcctactattccttcaagtcctagccctcccaaccctgatgtcaccaatagtccagggtcagttttgggcttttccaccttcagagtctatgccagctatggccccatcttcccatggtgcatccctgccactttattcagttttgcatcttgccattctggtaatttgcataatgcagcttcatggcatgtgaatagatagatgttggtgtttctggttatgttttggaagcacgttttgactgcatttactgttctgggtaagttgaagtgcctatggtagtataatgttccaaaacattaagatttgtaaacatttttatgtgtctatgtggtattctgggttatttgagtgtagaaataacagtcgaggataaattttttcatgttatatcagttcagaaataactcaggagatgtaatgtaataggaaacttgtggtgtgtctaagctttactctattatttttagtatatgctacatgtctttcattttttagtatatattatagttgtaattttttagtttcttttaaaaaaaaa

SEQ ID NO: 110656 - DNA, 262 bp, Glycine max
  Clone ID: PAT_MRT3847_70933C.1
attaatcaatttctctagatcgctaaggcagaatgatgaaaatcacatatcctcccacacacaagaaaaaaattatcacattttttaaatttcttattagttagttttttatttaatttttcaatcaaagagaagaacaataattgattttttaattcggctaagccaaccatttctcaaatatgaattcattagattgttagtaaaggttttttttttcctaaaaagtttttattttgataactaaaatgttttttccccc

SEQ ID NO: 110657 - DNA, 217 bp, Glycine max
  Clone ID: PAT_MRT3847_70934C.1
cccacacatccttcacactaacttatttataccacaaccccccaatctaaaggatccgtttttttttacacgttctttccacttcatatctcttctatatcatcacctaaactcaatccactctccatctttttacaacaatattactcataaaaccctttccttacccatcttaatccccttccaacacatcccactttcctcatttctctttata

SEQ ID NO: 110658 - DNA, 133 bp, Glycine max
  unsure (1)..(133): unsure at all n locations
  Clone ID: PAT_MRT3847_70935C.1
atttcaaactanggattttcgnngctggnactgnggacagggttggcggntgatgnncnggagtgggagccattccttnaattttgattggcgtggnagtgttagcnatgacggagtcgacaaggtggctggt

SEQ ID NO: 110659 - DNA, 319 bp, Glycine max
  Clone ID: PAT_MRT3847_70936C.1
aacttgaaatgatttccaaagccgaaaaccacaagatagaggaaggaacatgacaatgcaaatataccagtgaacataggtcccaaggaggccttttgctcctcacagccaggagctgcagatgcgagaaaggggggacatcgggctactaaatcacacactcagcctctctgtgagaaaccggaggggaccttcaaagtaaacatttgaccatgggtgaacctttatataagaactccctaggcaagatatagtgcacactatgggcgactcatgccagagagtgagtctgtctactcagctccaattcaagggctgt

SEQ ID NO: 110660 - DNA, 321 bp, Glycine max
  Clone ID: PAT_MRT3847_70937C.1
atggcgagagtgcctctcatttgcgttccaaacagccctagcttacaccataatgggttgtgtcaccctcgtagccttccttgcattctcattatcataaacgacgccgctttgggagacgccttccatgtctatgccacccttcagagcataggccccaccatcttgagcttgtgggttgtcggactagggccgctctctaaagtcaccaccgctgtagcggtggcgctcgccgcgtttgtggtggttctttcctggcctcagagcacaaatttgatagctaaacgcatatcattgggtcagatagtaccaccatgttga

SEQ ID NO: 110661 - DNA, 268 bp, Glycine max
  Clone ID: PAT_MRT3847_70938C.1
aacaagtgaccatgcctacttgtttaatgtgtaattacatgtttttacaacattttttgtagtttttaacaaaaaaacagccacatactgcatctgttttattacggccccaaattcagtggagaggggaacccatgggttttgatcagaagccaatctaccctctgttattaaaagggacacggatctgcagatgtatttgcaggggttaaatcctcaaatcagaacacggccatggcttccctaacaaaacctatatgcgccatat

SEQ ID NO: 110662 - DNA, 315 bp, Glycine max
  Clone ID: PAT_MRT3847_70939C.1
gacagatttctagatattaccactttaccacacacaacaactcaatcgtgatgcgacatccatctagcgagagtcagcaaatgccattgggatcctctacaaggaatctggccatcaagacgcctattaatatctaacctatctggactagctaacttccggatgcatcccatactggcaacaacacactacatcgcatgactgactggactcatagaggatccaattactgactggaacgattaccatactggaaggaagaagcttgcaaaacttctaacagcgagaacggatccccagaacgtgatagaccat

SEQ ID NO: 110663 - DNA, 506 bp, Glycine max
  Clone ID: PAT_MRT3847_7093C.1
gaggaataatccatgtaaccaacaccactgtgatggaaactcatcgacggtgggtaggtctgagtttcaaattaaagatcagaagcagatcatttaaaacaaagaccattatttagttaacagaaacctccaagtaaactagcttctactggatttgcttgcattaaagctcttcatacatatgaattctgaattctcatcaacttaaacaaccaataaacttgagaactacctacccatcatcaacatattagaatagagaataatatcaacaataacaaagtaggctgcaggcttgagacagggagctaatagctcacatggcacttgcggtttcaatctttaccatggcgaacacaacgcacaggttcaatccctggcctgtcccctttcccttccctactttccagttccacaggaccttcctaatatttgtgggcggataatgtgctacgcatttccacagccaataattcaaccatttccgatttctccagcacgtgctc

SEQ ID NO: 110664 - DNA, 181 bp, Glycine max
  Clone ID: PAT_MRT3847_70940C.1
aaaaaaaaaaaaaaaaataaaaaaaaaaagcaggaatatctgaatggatacatacatacatacacaaaggcggcaaacggggctcctactaaatgggggcacccttaatgtactccactattccagattatttacatttggcttaactacgaaaagcctggtgctaccgggctgaaacgcc

SEQ ID NO: 110665 - DNA, 381 bp, Glycine max
  Clone ID: PAT_MRT3847_70941C.1
ataatattattcaaaatttaaagggaaatatttatgtatgtataaataaatatatagttctcattactcttattagcacaacaatacatgttgaagccaaaagtgagaaaaaataatagtaactaataaggagtgcgtggaatgtgtgggagtaaattgttttgttagaggtttaagattttgacaaaagttatataagtaatattttaatatatcatttatctttcatattaattagattttcttttatttgtatttcttttttattttcttaaaacaaattgagatatatataaaatttcaataaacaataaacggaaaaaaatgcaaaaacaattttttgtgtgtctataatgaaaatatcaatgttagaacttaaga

SEQ ID NO: 110666 - DNA, 224 bp, Glycine max
  Clone ID: PAT_MRT3847_70942C.1
ttgttttattttttttttttttatttgctattttcgatttttttactttttttggtcaacgttatttagctgatccgtcgtaactcaagagagacagacggaaaaaccttcgcaccgcagagcaaacactggagtcccgcccgaccctaagagacccccttaggcccaatccaatctgagactctgagcaccaaagcgacgctgatagagacagaaagcgacgg

SEQ ID NO: 110667 - DNA, 486 bp, Glycine max
  unsure (1)..(486): unsure at all n locations
  Clone ID: PAT_MRT3847_70943C.1
gtatttcttaatcatgcacgagttgtattgagtttactcggagtgcaggtataacaaaatgccgccacagttgccgcaatttgcggagagcaacagaaggttctcgtttgacaaagccgagtacagcaaattgctgcactcagaggataaaaacatccgccctttgccgcaacatcggtgactgctcccctttaacctcgtcatagtactccgtggcagtagacaaaactattctacgatgacggtgctagatctagattcgataggcttctggagcaattttctcaagtaatttagattaagaaaatatctattgatcgtagctggaggaggggtggtacggagagttaanggaggtcntatctggangaggaggangggagagagagganattgaaaggccatatggggattcaacgtcagatctggattggaggttggcaatgcttgttctctgaggacagcatcattttgcagtggagagtg

SEQ ID NO: 110668 - DNA, 385 bp, Glycine max
  Clone ID: PAT_MRT3847_70944C.1
ccgcaacacagtttgaggaaccattctgcgtagcgacttataggcaacttttttgacagagggcaattatagagcaagtgttgattacgcagcgcacttatcgcattagaggcatgactaatatggcggccacactgggcactcctgagaatacagttttatcattgacctgtgctatgaatagatcttttacggggcgcgccagctctgatatttacaccatctgttctaaaaactgttgattcgtggaatcctgcttgcacaaaatgcatgactatgtcattaaatcctaacccgtgttttgaagcatagtgcttgtgattttttgagccgactgcattgcattgcgatgatatttgtgtcattggatggtctgacaccccaa

SEQ ID NO: 110669 - DNA, 408 bp, Glycine max
  Clone ID: PAT_MRT3847_70945C.1
acgagaaggaatttacatgttttccctcgtgtttgaattcagggaaactgccctaaatttcatttcttaatgtatgtttttttttaatccaaaaccatgaaaataaagtgaagagcttttctttattctatttcaatatttgtattctgatggcttttgggatgaaatgttttttgcaataaagatcaaatcagcattttgatttctggttggagtcgcgattttgccacaattgtgaaatgcgattggtgttgttgcaattgtggttgtagggacctaaaatccttgacaggtgcaattgtagttgccaagggcaagtgattggatgagcattaagaggctaaaaataccctagaacttggatgggttagatatcttttcaccaaaagaaaaaacatatggcttgaa

SEQ ID NO: 110670 - DNA, 1704 bp, Glycine max
  Clone ID: PAT_MRT3847_70946C.1
ctttcgtttttttctttttctggtgctttgaatatgaggatcagcgggagcccggctctaattggatttcatcaaggaaaaaaaaatcatatcattgcccggttgaattgtacctaaagtccgcagatatttctcagttttggtcgcagaattaactactaccaagcaacgacactattcacataatgataaagtaaaacctagaaataattcaaaaccaaaggtaaaagaagatgccatatttatctatatcaagttatctacaaatcggattctgtcccaatgccgccacttctgcaccgtagaggcagaggcataagccgcctcctctttgcagcttgttcctcacaattatcaggctccatgctatcaatcatctgaccatcatcacatccagcctcatcatctactgcatcagaaacttgtttcaatggtgttgtgggagcttcctcgtcatctactgcatcagaaacttgttgtaatggtattgttggagcttcctcatcatctaatgcatcaggaaactgctgcactgaaattgtcgtagtttcttgaccagtatagtggagatctccattcttgttatcatcacacttcgtaatcgagtctagagaatttcccacaaccgagttggaaatatctataacatgctcagcgttttccatggctgaacaagttttctcaccttgttcaggttcattagatgacccaggcacattcaaaacaaggcaacttttggtgactgttacatcttctgaatcatctaagacaccatttgatgtatctaaagatggctgcaccacatcacgatccactagcggagagatttgtggtctatgacatgtctcatctccacaatccctaggaagatatggcaaagaacatgttggaggtgtaattccagtcacttgctggaagttgggatctgtaggcaagtacataaactggttcccaagatccgtgtcttcctcaattgaaaatattgaaccactgaaacgataatcagatgaacgctggtcaaaagattgacactgtcccaacattgctcctgcagtagctcctggatcaaaaagctctttaagaaccaatcctgaattgttaaaggattgaggatccaaagacgatgaaccagacaatagagtgatttctattccctgcccagcatgagaagttgttggctccttattgacttcagggtgatcaatcccagttctgttatcattattttctaagcactcatcatcaccactacagtcagaggaagagatttcatgtgaaccatgattttccacaagttcaaagattaacttctggatcagtgttcgcttgagaaaagcttcagcaggcagaaaccagtccacattgagaaagttggaaaacttggttagtttgaaaggattgaaattaagaggtgcttcaacaaggaacagctctaggtagtgaagcagaaataggccacaatcatatgaattctcttgctgtggcaactgtcatggaaggagagcattcaataacaatcttgaagaaagatcttattccaagatatcctaatgtcaaaaagtgaccagtgttcagcagaaataggcaacaatcatgagttttcttgttgtgccaattgtcaacaagtaagaatattcaatcataatacaataaaaaattaaattaaaaaaaataaagagcataaaaccaaaaagtgatcagtat

SEQ ID NO: 110671 - DNA, 918 bp, Glycine max
  Clone ID: PAT_MRT3847_70947C.1
agcggccgtttttatttcataatctggagcttagaatataagaaacgggggggtgaagaatttcaaaggtttttcatcaaggaaaaaaaaaaatcctaccattgcccggatgaatcgtgtctaaagtccgcagatatttctcaattttggtcgcagaattaactactaccaagcaacgacactattcacatattggtaaagtaaagcctagaaataattcaaaagcaaaggtaaaacaagatgccatatttatctatacctatttatctacaaatcggattctgtcacaatgcctcacttctgcactgtagaggcattagccgcctcctctttgcagcttgttcctcacaattatcaggttccatgtcatctatcatctgaccatcatcacatccagcctcatcagaaacttgtgatggtgttgtgggagcttcctcatcgtctactgcatcagaaacttgttgcaatgatactgttggagtttcctcattatttacagcatcagaaacttgcactggtattggagtttcctcatcatgtactgcatcagaaacttgttgcaatggtattggagtttcctcatcatctactgcatcagaaacctgctgcactggaattgtcagagtttcttgaccagtatagtggagatctccattcttgttatcatcacacttcgtaattgagtctagagaatttcccacaaccgagttggaaatatctataacatgctcagcgttttccatggctgaccaagttttctcaccttgttcaggttcattagatgacccaggcacattcaaaacaaggcaacttttggtgactgttacatcttctgaatcatctaagacaccatttgatgtatctaaagatggctgcaccacatcacgatccactagcggagagatttgtggtctagac

SEQ ID NO: 110672 - DNA, 404 bp, Glycine max
  Clone ID: PAT_MRT3847_70948C.1
cttgattttttttttttaactgggaagcgttttttgcattcaaaataaaaacatacagaccagggttttgtttaaacgatgcaaactcattattgaaaaacctaataaagagccaccctacacccagagtatcaactcagaatgccacggaagacactgttcacaacccatgttacatctgtgaacacttcatagaaacgattccccttctcaacctccacaaatgcaaccgacacgaggcctagggcacatcatgtgaataccagaagacaggcaaggacctaccctatgtcaaaaggcacccactatatatgaacatatgcctgtctggatggaatcaacactggctccaaccatatatctgctctatgccaatagactaacagctccagacccaccaacaa

SEQ ID NO: 110673 - DNA, 464 bp, Glycine max
  Clone ID: PAT_MRT3847_70949C.1
gaccaacacaaccattttgtttaccatagtctttaatgaaaggaacaagaaaattttgaattgtttatatgctacatgataatcagcaaccagagtttaatttttttggcaagggactaatttttccatacaggaatgatcccctgtgctgccaaacgtttttaaacccaaaaaataatgggttttgcagggatctttttttcataaacgaaaaatggctcaacggggcttgctttcgagttatacgatgacagaaaaaacccctttggaccaataaggtttcctgggggaaaaaaggcccaaaatgaataggggttaccttttttaaaaaacaaaccttccaacttattgtccttgaaaaccagcttaatatttgaaaaatctttttgggcttaaaatattgctttcagggaagggatcacatcctcctccatcatctgaagcaaaggcttaactggagcttt

SEQ ID NO: 110674 - DNA, 517 bp, Glycine max
  Clone ID: PAT_MRT3847_7094C.1
tttcggctagattcaaggaaagctgtttatcttcagcatggagtttttgattcatcaatggggtgagtattttatctctatatttgcttagtttttacttgattctgttattagtttacttatgagttaagagagtcatactgtatagttgtgtttgaaaagctcaagttttgaagaacaaaaggttttgccttagtgttgttatgatgtcagaataagcaaaatttgtgcagtagattgagaaaagcttttgttgcattatgaactttatatttaagtcaataggtgcatgaaccttacattcttactattagtagggtagaaacagtctggtaaatggaattggctttatttactaaaggccagagcatttatagtatttgaattctaaactcactattgagcaacttgtcgagagatttgtgcatacccacttaaaattgtgtttttattgcactatttgcttgggatagtaatatgtctctatgctaggaattgggataaaaatgggacaata

SEQ ID NO: 110675 - DNA, 204 bp, Glycine max
  Clone ID: PAT_MRT3847_70950C.1
agcaatggaaggactggacctcctgtagtggctgacactccttacacttagacacagtcgtgaggttgctagagagagccatgctcatagacgaagaaacttggcatcgctaaaataccccaacgctgacgtcacacgtacaaagccagaacatgtaaagactatgcctgcgagggaagaaatagctgaccacactatgcatac

SEQ ID NO: 110676 - DNA, 319 bp, Glycine max
  Clone ID: PAT_MRT3847_70951C.1
gtgtgttgccgccgtggagaaactactgtactggggatattctatacaggaccgacgctcacgattggatcctgtgggacgagtgtgtgggagctatatacgagagctctaacgcaaatcatgattgaccctgcgcttcgtcggttgcgtttaaggactctgttcccatactagacagcgcgccgtgcacagcctcggcaactgtgtctgctagctaatcatggcaacagtccactgatttatcacctgacgtgcaccggagaactatatactaccatattgtttaagacaactgatatgtgtttgatgaaagtgtgca

SEQ ID NO: 110677 - DNA, 746 bp, Glycine max
  unsure (1)..(746): unsure at all n locations
  Clone ID: PAT_MRT3847_70952C.1
gggttcattttcatattggatatggcatgagttgggcatcatgccatcttctatttttccaagtgtcagatgtggcttggaaatggctatcctcaatgccattgctgatgcaaaaggctctaacatgctgaacatactctatccctcaataaatgggaacaataaatgtgaaaggtcattaaatgttcagatttgtgcattaattgattcaaatggatctccaactgaagttgctaatgttgctgccaaactaactgaggaaggattttctgcaattaagctgaaggtagcacgtgggggtgatccaatgcatgatgcagcactaatacaagaagtgagaaagaaagttggttgccagataattatccgtgcagatgctaatcgaacctggacttatgaagaagctatgaaatttagttcgttggttaaggattgtaacctacagtatattgaggagcctgttcaggatgaagatgatattctcaagttttgcgaagaaagcggcttacctattgctttagatgaaaccatagataacattcaagaaaatcccatggaaaagctagccaagtttactcatccagcaatagctgctgttgttattaaaccaagtgttgttggtggatttgagaatgcagcattaattgcccaatgggctcaccagatggggaagatggctgttgtaagtgctgcatttgaaagcagtctgagtctgtctgcatatactcagttntctagttatcttg

SEQ ID NO: 110678 - DNA, 380 bp, Glycine max
  Clone ID: PAT_MRT3847_70953C.1
tctacgcgtccgatcattcgaaagaatttgcggggggacttacaaaccgcagtgtgccttttttgcggataaaaaggccagatttggatatgggagcgtccacacatttgccacaagacttcttagatgaggctaaagatagaggatacataacatggtggagcccccaagagcatgcgctgtctcatccatcaattggggttttcctaactaattggggctggaattctactctataaggattaagtgggggtgtccctatgatgcgttggcctctctttgctgaacaacacacaaatcggctgtccatattcacaacttgagggataggaatggctattaacgatgatgtctaaagggatgaggcgacaacacttgtg

SEQ ID NO: 110679 - DNA, 431 bp, Glycine max
  Clone ID: PAT_MRT3847_70954C.1
acgagatttaaccctatgctatatatttcttatctaccacactttttatggggggatggagctggtttggctctgatgaaaatgatactcaagcttggaaaggtaacagattgctttatgtaaatgtcattataatgaattttatccactcctcaccatctttgtcatgctcaatgataaagctgacacccatattttatcatttctggttgaaagattgagggccctagattatgaataccatccattttgacatttccatgttatggaggcagtcttcttcctagttttgaggaattcatcttggttgcgtggaatattgatggctaaggacctgtttgatgaaatatgctctcttggtttaggagaattactacattcatttgttcttccatctacccagcactgtaggatcgtgagtttacaacaac

SEQ ID NO: 110680 - DNA, 282 bp, Glycine max
  Clone ID: PAT_MRT3847_70955C.1
aattcggctcgagggaagaactgtatgaaattgatattcctctgagattcatagcctctgtgggcaccatagtgcgtgggtgggcatgtagcgtgtggtgtgctattcaatggatgtactgttcttaggtgtcttaccactgcttctgggttaccgactacctattggttccagttgtactgagttctctctcatcctttttatgtcatggttggacaagaaattactggcaggctttacttgattgcccacattgcactaaacttattcatttttacttaa

SEQ ID NO: 110681 - DNA, 448 bp, Glycine max
  Clone ID: PAT_MRT3847_70956C.1
gttggaacctttgggctgatttatgtgcttggttaaagagagcgagcgcgcagggccttacaccttaactggtagaaactggcactggaaggaatgagaggcggtggtaggtgactatagttacggatatgcctatggcgaccctaggaataaggctcggagcacgagtggcggtttccatcgctggataaagtatcggacgtgtactattgctaccgttacgcctggtgccgcatctactcgtacgtttactgtcacgaaacgtgtcgcatctgagtaatgatcataccatttcgcctgctttaccttcctctaatcgcggcgtaagaatcccggaatcaaagatcacaacgactacgacttacgacctactaaccgtactatcggcgcctatactacgctaagtaatacccacccgccaaacgtcgagaacacactagtcccaaag

SEQ ID NO: 110682 - DNA, 473 bp, Glycine max
  Clone ID: PAT_MRT3847_70957C.1
gctcgagaacaccacagaagggccttatgcatacattcacattctctccctttttgattcgcgttatcaagtaaattattttggtatcatcaaaatttgcatgattcacaaaatcaaacaatgaataaccaaaagccaaatttacttggtaataagcaatatgtacgaggctaattccttcatcttagcacctccattattttaaatcatcaacatgtcccttaaaatatctctttaatttttcggttcttagtgacatcaatatagattatcacaaccctgtaaaagtaaattgattaacaaataattccaatgaatcaaaatagtgggaaaaagttaatctaaagaagaaaatgctaatggttaaaaacttcttaatagcattcgatgtatctccaataatataaccaaaaaccaaaatttacctgggggatgagcaatacatgacgtgggtgaatgttgtgttgctccct

SEQ ID NO: 110683 - DNA, 258 bp, Glycine max
  Clone ID: PAT_MRT3847_70958C.1
accatggcaggctgaaatgtccctattcataaattttacacaaagggtcgttgtcatggccttttacaacaacaaaaaacgccatctaactgttcttaaaaaagctaacacgatgattgaatggacgccctgacgttggatagacaacttatatattgtgtggcacaggagccaaggcccctaaaccacaacaattgtctcgtaaacacgacctttgaaacatgtttgacaattaattagctattgtataacataatt

SEQ ID NO: 110684 - DNA, 199 bp, Glycine max
  unsure (1)..(199): unsure at all n locations
  Clone ID: PAT_MRT3847_70959C.1
tncatgcncgcnnncgcnngctcngaatnnggctcgagcaaaaacancaattctncancctctcanttagnaananacaancaaanangannnatcaatcannngattgtattttgntacgaaantggtngatttacngtggnnatganagctggncggaatcagggtcatagctgtttcctgtgngaaattgttancc

SEQ ID NO: 110685 - DNA, 3988 bp, Glycine max
  Clone ID: PAT_MRT3847_7095C.1
cttttggaactgaatgaagaggacaattgttggatagacatgagaggcatgaagggagaagaaggagaggaaatgaggaagaaccaagaggaaaccgagatgaggaaggaagagtttccattccaccatttaggggtaaaagtgatcctgaagcctatattgagtgggagttgaaggtagaacaaattttctcttgtcacaccctaactgaaaagaggaagatcaagctagctaccttggactgactatgccttagtttggtgggatcaattccaaagggagagaaagaggtatatagagcctatgttggagacttgggagaagttgaaaagagtgttgagaaggaggtatgttccatctcactaccatagagagcttcttgataagctccaaagaatgacccaagggagtaagagtgtagatgagttctacaaagaccttaaatagccctgattcgagccaatgttgaggaggatagggaggcaaccatggcaaggtttcttaatgggatgaatggagatataagggatgtagtggagctgcaaaattatgtggagatagaggatatagtccatcatgctatgaaaatggagcagcaattaaagaaaaaaagtgtgaggaagagttcatctaattttgataactctaggtggagggaggggtttaagaaagagggaacttcatccaataggaccccaagggctgcaccacagcccacccaaaataggggcaaggaagtggccaacaattcttggtctagagacataaagtgctttaagtgtttaggtagaggacacatagcttctgaatgtcctactaagaaagttatgatattaaaagattatggggaaatcacaagtgagagttctcattctgaaccatcaagtgaagaaaagagtgcggaagaggaggagatccttgaataagacttgtttattgtgaggaggatgttaggagggatagccaaggagagtaaggaaagccaaagagaaaacatattccatactaggtgtcttatccaagggagggtgtgctctttgatcacagatggagggagttgcacaaatgtggctagtgctaggttggtgaagaaaatgaacttagagactaaaccccatcctagaccttataagctacaatggcttagtgaggaaggtggattgagggtggataagcaagtggagattcagttttctattgggaagtataaggaaaaaattctgtgtgatgtggttcctatggaagctagccatgtgcttcttgggagaccatggcagtttgatcaaaaagctcgccatgatggtcacaaaaataaatacattttttatcatgacaaccgcaaggttaccttggtttcattatgtccaaaagaggtttgtgatgatcagagtatcatgagagaaaaaaaagagtaagagagaaaagaaaatgaaaaagagaaaaaagaaaagaaagagagagacccacaagataaagaaaaagagaaaaaagaaaaaagaaaaagtggagaaaagaaagtgagaaagaatggattatttgtgaaaagtggagaggtgaggagctttaatggcaaggaagtctatgtatatactttataataaggagattgctacccttgattcagaccttgaacttcctagtggagttaaatctattttgcaggaatttcaggatatgttttcaaaggagatgccacaaggactcccaccattaagaggcattgaacaccaaattgatttggttctaggagctgtgttgcctaataggccaacatgcaggagtaatcctcaggagacctaagagatccaaaagtaagtcactgatttgatgactaaaggttgggtagaggaaagcttgagcccatgtattgttcctatcatattggtgccgaagaaggatgaaagctggaggatgtgctcaaattgtagagctgtcaacaacatcaccattaagtacatgcatcccattcccaggttagatgatcttcttgatgaattgtatggatcatgttatttctctaagatagatttgaaaagtggatataatcagattaggattagagaaggtgatgaatggaaaacagcttttaaaaccaagtatggcttatatgagtggaaggtaatgccatttggtctaacaaatgcccctagtactttcatgaggttaatgaaccatgttttgagagagttcttaggaaaatttgtggttgtgtactttgatgacattcttgtgtatagaaaaaacttggatgaacatttgcaacatttaaaatctattttgcatgtgcttcgaaaacaaaggttgtatgcaaatttggaaaagtgcacgttttgtaaagatcatgttgtgttcttaggatttgtggttaactctagtagagtgcatgtagataaagagaaaataaaagcaatccaagagtggccaattcctaagaatgtgagtgaagtgagaagtttccatggcttagctagtttctataggaggtttgtgaaggacattagtactattgttgcacctcttaatgaactagttatgaaacatgcaagatttaaatggggagaggaacaagagaaaacattttttgtcctgaaagagaaattaacaaatgcacccatacttgctttgcctaactttgctaaatcctttgaacttgaatgcgatgcatctgaggtggttgctgatgctttgtcacgcagttatgctttactatatactcttgaagctaagtttctaggttttgagtgcattaaggaattatatgaacatgatgctgatttttcacatatttaccaaacatgttatcctattgcatttgatgggtattttaaacatgatggttatttggttaaggataagagactttgtgtgcctaagagttccatcaaggaagttcttattaaagaggctcatgaagggggggttaatggggcattttggagttcaaaagatatatgatatcttgcatgagcatttttactggcctcacatgaaatctgatgtgcattcattatgtaataagtgtcttgttagcaaaaaggctaaatctaaagtcaagccacatggtttgtatacttcattacctattcctgaacatccttggattgatatttctatggactttgtttttggtttgcctcggtccaagggaggaaaggactcaatttttgtggtggttgataggttttctaagatggctcattttatatcctgcaagaaggtggatgatgcttgccatgttgttgatttatttttcaaggaagtagtaagattgcatgggttgcctcggagtattgtaagtgaccgtgactctaaatttcttaaccatttttggaggactttgtgggggaaaataggtactaagctattgttttcaactacatgtcatcctcaaacttatgggaaaaccgaggtggtcaacataaatctttctactcttcttagggctgttattaagaaaaatattaagacttgggaagagtgtttaccacatgtggaatttgcttgtaatagggttgtgcatagtactactcaattgtcaccttttgaaattgtttatggttttaaccctttaactcctttggatttgttgcctttacctgacatttcataatttaaagataagtttgggtaggtcaaagccgaatatgtcaagaagatgcatgagaaagtcaagtcccaaattgagaagaaaatggaagggtatgcaaaatatgcaaacaaaggaaggaaaaaggtaacatttgaacgaagtgattgggtttgggtacatttcaggaaagagtggttcccttcccaaaggaagtccaagctcatgccaagaggagatggtccatttcaagtactggccaggatcaatgataatgcctacaaaattgatttgccaagagaatatggggtaagtgctacttttaatgtagttgatctcactcttttcgatgcaggtgatgacttcagagatttgagggcaaatgcttgtcaagaaggaggg

SEQ ID NO: 110686 - DNA, 519 bp, Glycine max
  Clone ID: PAT_MRT3847_70960C.1
aattacaggggtcgaaatcttgtgcgcccaactttctgtgtttgagtatgaatctctggactatatctgaaattagttatattattatcatgcacagagaatcctacaaaacggtattaaatgtattggatgtgagatgtgaggtggtggggagagaaacaaaccgtgccacaggatctacgggggaatccgtccggcgcaggggcccccattcccgtatcattcatcattgtccgtcagcctgtcatgacttctgcgaaattctccccacgagcaagacaatctgccacttacgaggtgcccacctcagctgtagtgttgcatagcatcgcggtaacctttgccaccacgcatgtcgtcctccaaagcctgggcgacctccagcacacgcttcagatgttccatacaaagggctgtttcttcgacaatgcgattgactgtcctgtcttaacgtgtttttgatctgtcgaccgttcatattcttcttactcagctcgttgaagtcgtcatctgtgaaca

SEQ ID NO: 110687 - DNA, 487 bp, Glycine max
  Clone ID: PAT_MRT3847_70961C.1
tttttttttttttttttttttttttttttttttttttttttttttttttttttttttttttttttttttttttttttttttaaaaaaaaaatttggaagcccaaaatttaatttccagggcttcccaaaattaaaagggaccccaaaaaaaccaatttcttaaccttttagagggggtttgccttttccttttccaccacctttcccaaggggaggtttgtttcccccccttcagggaattcccaaatttttgcccaaaagggggattcccctaaaccaaaagtttaaggaaaaaatggttttttgcccctttttaccccaaggaaaaaaaaaacctttgaaaaaaaaaaaaacttttttaaaaaacacccccttcctaagccccccccagggggaattttgcccccaagttttaagggccccaaaatcgcccatgtttttgttttctcccaggcaaatggcccaaccttttttttttggactttgc

SEQ ID NO: 110688 - DNA, 263 bp, Glycine max
  Clone ID: PAT_MRT3847_70962C.1
gattgtgactgcgctgcatcaccatcgagcccaatccattcacgagcatttcgcacgagatgattggatgtctgaattggccacggttgatgccaatttgtcgttctttaaatcacttttttttcaacctttgttacatatatagttattgctgtagtcttgactccggaattttgtcatttatcacattctcgttattggtatatgcacaggttggcaaatgtgtcacttcactcccgatctttcaaccaccaacaagtatt

SEQ ID NO: 110689 - DNA, 387 bp, Glycine max
  Clone ID: PAT_MRT3847_70963C.1
agttcttctttcttttcttttctattttttttcttttttttaaaaaccaaatcaaacctaaattttttttccccaaaaacattttcccacttattaataatccccatcaccccaaatcccgccccctacccctaatttctttccccccctctccaccaaaactttaggacaaacaaccccccccctccttcttataccccacatcctccccacgctgccaatatttccatcttacccaacaacaacatccccccacacatttttttctttaccggcgacaaaaccttacccaaggccaacacattcacctgggtttccctctcatggaaaacaatttcccctccaaacacggcagacccaaaccaatcccccaacaactccatacat

SEQ ID NO: 110690 - DNA, 307 bp, Glycine max
  unsure (1)..(307): unsure at all n locations
  Clone ID: PAT_MRT3847_70964C.1
tnnntnnannngtatgtaagctcggnattcggcttgagtgatgntgncagttcgcagtttttgnnggntantctcttgntttntntcttcttncaattnttctggagttnntttntgttnattnataggnaganatcttggagggtggagantnattannagntttagnanggctgnnnnagttgaggaattaatcantnnnnaagtttnatnagttnnnnntnnatatgaacganannnntannnnnngttnnnnnnnnnnnntnnntngntnnttnnnnanttcnannnnnnntgannnnntncc

SEQ ID NO: 110691 - DNA, 555 bp, Glycine max
  Clone ID: PAT_MRT3847_70965C.1
cctatgcgtccgtttgaaactcttatttctttcaggtgaatgatggactttaagtttgggagatgaagaatcatcacatgattctcatgatgatttttgccggcaaccccatacccatgatggaagatgaccaaatactagccatgactatcatcaacccccttgctatgatggaagttcagcgaatactagccattaatatcatcaaccttcatcatatgctgggagctcagggagttccagacatgattattgacagccaccctcatgtctagctgacagattcagctcattgaaccaggttgcttctgctttaagagaagctgctctggaatgttcaaatttaataattgacatcggcttcaccaagagcagtgagtgaacaggcatgtactccttcaaccaccgtagcgtacattgtactggaaacactgctaatccggatgagcacggaatctgtatcatcgagcgagctctctatatatctgatgaagaccatctgataccatgtgttggatctggcgatgcatctacgcatgatcagaatgagttcag

SEQ ID NO: 110692 - DNA, 674 bp, Glycine max
  Clone ID: PAT_MRT3847_70966C.1
cttaatcatattctgagttccaaattctcaacaactaacccttttcagttttcttcagagaaacgcttgctttggtgtgtcggaaagaaatgctgaaccatggtgctgaaactgagaatccgaaagggattccaattcacggagggaagtacgttcgctacaacatcttaggcagccatttccaagtctattccaagtacgctccccctctccaacccgttggtcgcggcgcatacgacgtcgtttgctgtgggacgaattcggagacgaaagaaggagtggcgataaagaagattgggaatgcctttgacaacaggatcgacgccaagaggacgctcagggaaatcaagcttctctgtcacatggaacatgataacataattaaaattaaggacataattcggccagcggagagggagaacttcaatgacgtgtatatcgtgtacgagttgatggacaccgatctgcatcagattatacagtctaatcaggctctcaccgatgaacattgccagtactttttatatcaactcttgcgagggttgaagtacattcactctgcaaatgttttgcaccgagatctaaaaccaagcaatttacttctgaacgcaaactgtgatctcaagatatgtgactttgggcttgctagaacaacctcagagaccgactttatg

SEQ ID NO: 110693 - DNA, 1729 bp, Glycine max
  Clone ID: PAT_MRT3847_70967C.1
tctggctctgcttcttcttcttttgaatcaagggtttctctttgtcgcaaagagaagagatctgcctcctttttccttcccaatcaaatctatctcttcttcgtccggtttcttcttggatcttaccctcttgtttgctaatattctcattcttctgtctctgcttcttctccttgtaagttctctcgctcgctctctccgcctgcttcttctccttctgaactaagagtgatttctaacattctttttatcaaatctctctgttttctatttttaaactaagagcggggaatatctgacgaatctctctctcatagatcaaatctaaaactaaatgcgcatatgttctgtattcgacttgcattcccaacacagcacaacgagaagaaccagatctctctttctccaaatccaccaagaatatttgaaaatggggttgtcttatcacgaagtctttttagccggcttctttgctaagaaagagatgcgtattctcatggtaggtctcgacgctgctggtaagactaccattttgtacaagctcaagctgggagagattgtcacaaccattcccacaattgggtttaatgtggagactgtggaatataagaatatcagcttcactgtctgggatgttggtggccaggacaagatccgtctctttatggagacactacttccaaaaatacccaaaggggcttatctttgtggtggatagcaatgaccgcgatcgtgttgttgaagctcagggatgagctccacaggatgttgaatgaggatgagttggagagatgactgtgctactgagttattgcaaatcaaacaagatcttccaaattgctatgaatgctgttggaattacagttaagcttggtcttcgttctcttcgccagcgtcactggtatatccagagtacatgtgacacatctggtgaaggtctttatgaaagtcttgactggctctccaataatatagctaacaaggctttgtcacttttggtcaagggctgtatgaaggacttgttgagtttatcaattaacatttccaatctatgattagatatttgtttttaaaatcttatttactcaagtatgcattattgttttcgataaagagcagattgttttcttcctctacttagatttcattgcttttgcatgtatttttcttgaagggacattttgtggaatgccgctatttcttgcttattatattatgaggttgatgggttgctgcttctcttatatagcattataatatatatatatatatatatatatatatatatatatatatatatatttttttttttttttttttactcttttaagtcttttctttttctttatttaggtgtttgatactatatcatagcaatcgtattgaatcctgtagaatttttaaataattaatgaattacaaactatacatgacgcgatcatgcttttcatcggtcatgggttgcatcaaagttcatttgagtttagcggttgtgacttccaatgtttgatgtgcttaccctgtttagaatcttattttctctagcatgtattatttgtcttcgataaagaacagattgtctactacctaatatcaaaataatttgcattttttctccgtgtataaccaaaaggcatttgtcttacccatcgatttgtgaagtcaatttatcattgaaatttttacatttattcatcaatattaaacataaaattaacctttgttttat

SEQ ID NO: 110694 - DNA, 542 bp, Glycine max
  Clone ID: PAT_MRT3847_70968C.1
ggggcatcattggcctttggtgctaaattggttgggatgtcatcgaacaaggacaagaaagcaatggaagtggttggtggcagttattatgatgataaacaacaagatgatcaattgtggagtgagtttttaagtgcatgcaacaacaaccaagagtcaatgaagtatgagcaaaaactggtggcaagcaaaggtgatattgaggcagcattgaaggaaatgaataggagcaatctaatattggttggtagaatgccatcagtaggacctttggttagcagaagtgattgtccagaacttggacctgttggaagctacatggcttcttcagatttctccactgttacatcagttatggtaattcagcaatataatccttcaactgacattcatccactagtgatggaggaatttgattacccagataagctagagccaaactcaccaaggagttaatgtggcattaaagctggagttgtcttttggttataacttataacttacgaaacaaggcggatgctcataatgttggaaataaattt

SEQ ID NO: 110695 - DNA, 323 bp, Glycine max
  Clone ID: PAT_MRT3847_70969C.1
gacacttcaaaatcctctggtaacccttattttagctattctctctcattcatttgtgtactaagcagctagaatcattggcaaggaaaagaagccatgcctctttcatcatgtttgcaatgcttgatggcgtgatcactcatagccttgacaatcctgtaatatccaccactgttgaagatcagattaactatctagactccagatccatatgctggaaatcccccctcatgctcatacagtactactcctcgatctcatggccatggaaactctccaccctcacatcatcacagtagtctaagtactccatcaacatcctc

SEQ ID NO: 110696 - DNA, 296 bp, Glycine max
  Clone ID: PAT_MRT3847_7096C.1
acgcgtcaatacgggatgccaaaacaacacaaagggggacaacggttccttaacatgggaagcatttgcctcttaagtttagaaatctcattccaatttgctacgcacatcttatcttagacgaattcgagactcaccgacaactgatgagaatttttactccaatccctttcctaacagtgtgttcaacatgtctcacgaggaaatgaccaaccataatctagactaccatcggtttggtattggagcaccaatattctgtgtagtgtccctggttttgtcacatattttaagct

SEQ ID NO: 110697 - DNA, 896 bp, Glycine max
  Clone ID: PAT_MRT3847_70970C.1
cccaaggggatggaaaatttctgcatgacacgaaaattatacaaaacacacactataaataaaacatctgtcaagattatcagatatcaaatttatgatccaataacaaatacgatctccttaagcaagattgaaatgtagttcaatttggtaataagtaggcatcaaaaatttaaaaacacagattactcagtacttaacagcagcaagaacatcaagttgggaaccgagcctctcttcagcaaccttttcagctttcacccttaatttgttgagttgtttctttctcgcataaaccaactctgccttctcctttctcttcttctccagctccctaatggtatcatagtagctccatccaacttcaggtgacaacctgcccaatacacagtacttgtgtcctttctgaagcctcaacaccttgagagcatcaggaacaaccattctcttggtcttgtcatatggaggagggattccttcataaaccttcaaacgagcaagagcagcttccccacgctttgtcttgtgtggtatcattccacgaacggtgcgccagaagatcttggctggggcgcggaagtggatagggccatgggagggtttggtgttcatgcgtttgcggaggaatctcaagtatttcatcttctgcctcaccagaccgccggagatgcaaatctcttcgcagcgcaccaccgcaaccttctgcccattcagaagctctttcgccacgatggacgctagccgacccaacatgtggtggcgagcgtcccaccaccactcgctttgcgcagattccagaacctgacaccatcttcttcccttacacaaactcctttttgctagttgatgggctgatgctatagggttttaatcggacgcgtgggcggacgcgtggg

SEQ ID NO: 110698 - DNA, 129 bp, Glycine max
  Clone ID: PAT_MRT3847_70971C.1
ccacccgtcagaagagaaaagaccagtaattggtacgtaaatgtctatatcgaaaggggagcccagcatcccatcctgtggctactatccttctatctaagtgcgactgcttactccaatacaatttct

SEQ ID NO: 110699 - DNA, 1271 bp, Glycine max
  Clone ID: PAT_MRT3847_70972C.1
cggctgagaagacgacagaaggggggcgggaaaaagactgaccggaagcgcatagcgggaacaaattgacgaaccgctaaatctcaatatttttttttttaatatttccctttaaatttacctatataataatacccacaaaataagattaatatattaaactaaacttaccaaagcaaaactaatatcactgagttaggaaaatggggaagaagaagaagagaagtagggtttccgaagacgaggaaatcgaatccgataccaaccccttcgataaaaacgaaaactctctctatcaggttcttggtgtggagaaaacagcatctcaacaggaaataaagaaggcatactacaagttggcattgaggctgcatcctgataagaaccctggtgatgaggaagctaaagcaaagtttcagcaattgcaaaacgttattgctattcttggggatgaagaaaaacgggccgtttatgatcagactggttgtgttgatgatgctgaacttgcaggggatgttgttcagaatcttaaagaatatttcagagcaatgtacaagaaggtcactgaagctgatattgaggaatttgaagcaaactatagggggtctgacattgagaaaaatgatttgattgatctgtacaagaagtgcaacggtaatatgaacaggctattctgttcaatgctttgttcagatcctaaacttgactcacaccgattcaaggatattattgatgaggttatagctgctggagaactaaaggaaacaaaagcctacaagaaatggacaaagaaaatatcagaaatcaagccaccaactagtcccttaagaaggagggcaaaatcatcaaagaagcaaccagaaaaagagctttatgctatcatatcacaacgcaaacatgagaggaaagaccactttgattccatgttctcatctctaatttcaaagtatggtgggggtcaaatgccagaaccctctgaagaggaatttgaagctgcacagagaaaggtggaaagtggaaggtcctcaaaaaaattaaagcgaaaataacaaacttatatctgtgtacaattcgtttaagtgtgaacggtacttcagcttttgttagtggaaattcttcttttctgatgaagtacgggaagttagttattttcatgtgtatgttaatgttactggttactgtcaatagtgtcaatggtgaaacagccgcaacttccccaaaagttttagggattttatgttatcttccatcaattttctctgaaagaagaa

SEQ ID NO: 110700 - DNA, 177 bp, Glycine max
  Clone ID: PAT_MRT3847_70973C.1
tgcaaatcatcggtgggggggcctgaatagttagccccgctcctccccaaaacgaacgggaaagagttgtcgcttccgtggccaactaccttgtcctgaggtaggagaggaaacatcacaccggtggacatatagagggcattgtcctatgcattgtgtgcataggtgaccaatttg

SEQ ID NO: 110701 - DNA, 2313 bp, Glycine max
  Clone ID: PAT_MRT3847_70974C.1
caaaaaccaaaaccaacaccaaaccaaaactttatccatccatcccaaaaagtttgctttggttaatgcccctaacaaatttccatttttattttccctgtttgtgactagagagttgggttcccatgccggttgatttggacaacgcttccacagcttcaggggaagccgccagcgtctcttcctccggccaccaaacaaaacccgccgtcccaaagaaaaaacgaaacctcccgggcatgccagatcccgaggcagaggtgattgctctatcgccgacggcgctcttggcaacaaaccgtttcgtgtgcgagatatgcaacaagggattccagagggaccagaatctgcagcttcaccggcggggccacaacctgccgtggaagctgcggcagaggtcaagcaaggaggtgcgaaagagagtgtacgtgtgccccgagcccacgtgcgtgcaccacgaccctgccagagctttaggggacttgacggggatcaagaagcacttctgcaggaagcacggcgagaagaagtggaaatgcgacaagtgctccaagaagtacgctgttcagtccgattggaaggcgcactccaaagtctgcggcaccagagagtataagtgcgactgtggaaccgttttctccaggagggatagcttcatcactcatagggcgttttgcgatgtgttggcggaggagaacgtgagatctcacgctgttgtgaaagataattcggagaatgattccaaggttttaaccttaaccggtgattcgccaccgctacagcctgtctctgcaacggtggctactactactacgcagacaaatagtgctatgtcctgtggtttgcagacgcagaacctagagttgccagaaaccaatcccccgcaagtcattgaggaggagccacaaggtgctactgctgtaagtgggagctgtggcagcaacagcacctgctcaacaagcaatggcggtgctactagtaatagcaatagtagtagtagtgtgtttgcgggtttatttgcttcttcaacagcatctgggagcctacatctcaaacaccagcattcagtgacttaattagagccatggggcctccggaacaccctgcagatcttatctcagctccttcatcatccgaggccatatctctttgcctctccaccaccagtgcctcaccaatcttcgcaacagtaggccaacagtatgtgtcgtcgccaccgcagcctgccatgtcagccactgcattgctgcagaaggcagctcaaatgggtgctgctgtcacaaacgcctcccttcttcgtgggtttggtattgtgtcatcatcatctttggcttcgacctcatcggggcagcaaaatggcctgcaatggggccagcagcagttagaatccgagagcggctccgttcctgcagcagggctaggacttggtcttccatgtgaagatggtggttctggactaaaggaattgatgatgggaacaccctcaatgtttggtcctaaacacaccactcttgattttctaggattggggatggctgctggtggcactgctggtggaggcttatctgcacttatcacatctattggtggtggtttggatgtaactgcagcctttggcaatggagatttttctggcaaagatattggaggtagctcttgatatagcagtaataatatattttggtagtaagaaagaaagaacaagagctgcacttatcagggcaaaaagttatataagacagtgtagaattaaaaatgttgtctttgtgtagaatctttagttgcaatgcaccaacatgcacaaatgagggcctttttaggattgtgttgctccctttaatgcgagggagagaaactgtatttagtgttagaaaacggaaagttggcacaagttacaatatgcttgctctggatgaagggtagttgttcaattaagggtgttttgccaaagggtttgaactttgatatggttgtcgtaggttatggcgacagtggcacgtttgaagatatactcaacagtgttgattgaatttgaattaagccgttggatcatggatgctttggttcgtagctgttggcataaatcaggaaactttgatgatgttgtagttttcttcaactgtcgatttattgtaacgaggtggatttccacgtacgccccattgttttgtagttaatggttgattgaattcttctagtgagtaagtagtgtttttatgtaaatgtcatgaagaattgttgtattccgtatttccttttgtagttaaagttgctgttttaagcagctttatttaattgccaagcatttacgat

SEQ ID NO: 110702 - DNA, 1643 bp, Glycine max
  Clone ID: PAT_MRT3847_70975C.1
caagaaaaaagggcacctaagaataaagatcaagaatcccatcttctatcaaataagcgaacacggttagtagcggcagagaaaggagatggaatcggcgggggagtggctggagaaggcgttggtggagttgtgctccaagattgaaactggcttgggtttaggtttggaccaagacatcatcaaaggcctcgtgtcttactgtgaccttgccgagccacgagatgccaaagagtaccttgacaatataatcggtcaggatgcagggaaaactgtgattgaagaatatttacgacggagaggttactcagaatccagcatcggctcaaatgttccaactaccaaattacatgcgtatgtcaaaccgccttcagttgagacatctgctagtggaactaagaaatcatttaaaacaccgaaagtggcaggccgcggtaatcatgcagaacccaacaagaatgcgagtagcagtaatcaggaaaatcagactccaactgtagttagtgaatcaaaaacatcgcaaaaggggaaccaagtgaattccaagaagaagaaagccgggaaagttgtctcacttgctgaggctgccaaaggatccattgtgttccagcagggaagaccatgctcctgtcaagcacgtcgtcacaggctggtcagcaactgcttatcttgtggcaaaatagtctgtgaacaagaaggagaggggccttgccatttttgtggtgcacttgtgttaagagagggcagctcgtatgctggtctggaagaaagtttgcctcccttgtcagagtctgaggctgttgctgaagcttatgcaaagagactggttgaatatgaccgaaactctgcagctcgtacaacagttattgatgaccaaagtgactactatgagattgatggaaacagttggttgtcaaaggaggagaaagaactgttgaagaagaaacaagaggagatggaagaagctgagaaagccaaacgtaatagagttgttgtgacttttgatctagttggccgcaaggtccttgtaaataaagatgaagcttcagaattacagtttgaaaatagaatattgcgtcctccggatgcaagggaagtgaaccgtatcaaaccaaatccaactctaacgtttcaacctgtttttgtggacctgggctttggtaggaaatccactaaagataagcaatcacataaaggcataagcaagggcttgtgcttggagattacagggcgagtgcagcatgatagaaatgaccagaagtatgttatgatggaaaaccaattggcaacagcttcaaatgaaaatgtttggcaagtatcttcaggaaatggaatgcacatcatggaagatgatggtcaatgtttactgaactatgataagtaaagtgccttatccagcttttagcgattactgttacattcttcatttgctttctcccattttctttttgatttgcgcgtctaagccatgaaattgatggtcctaattacttttttcagaaagaaagttaagaattttaggcagcgctatttttgtttatacactgctcagatattaaatatcagtcaactactattatctatttgtatttatgttttacagtgattggtttaatgtaacttcaggttttcccttgccttcc

SEQ ID NO: 110703 - DNA, 303 bp, Glycine max
  Clone ID: PAT_MRT3847_70976C.1
accagcaatgggagagggcgtggtccaaactttcctttctagtggtgtccagattttctgttttactcctgtcttccaaagctccccgccaattttgccaatgtttgctgtgttatcttttggctttatgtcaatgatgttaacatgcttttggaactttgatgcctggatgctagaatgtcaaacttacaaatgactgccatgttcatgttttttttgggctcatgagctggtctttttgacgtttcaagtaattactgtccataattctctataacaatcagtgccagatgaactccttac

SEQ ID NO: 110704 - DNA, 249 bp, Glycine max
  Clone ID: PAT_MRT3847_70977C.1
gacagagacatcctcaacaagctcatggccttttccatggactcatccctaggggattttaactatgcaaacagaatcttcaaccacattcatcacccctccttgtttttctacaacctcatgatcaaggcctttgtgaaaaggggtagtttaaggagtgccatgtctctttttcagcagctgttggaatgtggggtgtggctcgataactatacctacccatatgttttgaatggtattggttgcatt

SEQ ID NO: 110705 - DNA, 1271 bp, Glycine max
  Clone ID: PAT_MRT3847_70978C.1
gtgaatggtacttgagtgaatacagaaggcagatatttgttgccttctgcttcccccgagcaagacaaatatttggaaacaaagttcattgaatattcgttagaatggcctagccttgtcgcttgccgcttccgctctgggctcttccacaagttcggggcgaccctgcgtctgggcgcgcacctggtgggggaggggcggttgcgtgcggagtctgggggatgcaggcaggggctggtgagtgttcttctcacccctggggtctcccggccttcagcgcacaggttcttccctcgcgggtcccctccggcgcggagcacatggcggcccgtagctgctgtcctgctcgccaagcaagacatcaagaggcttgtcttggggtataatgacagagaagaagaggagcttaatggattagggacccaggcaacaaactggatgcagagtgtaggttacaagggtggtggccgtggcagcagtttggaaggaaacagtggcaggggtagtggatcaagacatcggcatcataattattctggcagtggaatctattacagtagaagaaagtgaatggtacttgagtgaatactgaaggcagatatttgttgccttctgcttcccctcagcaaggcagatatttgtttgccacactaccacacttttgctgttcaaaaaattcatggcaaaggcaagtctaatagcttatcttgttggtaagtggtggtttcgaacatagagtgttggagatgctggcaggggttatagagtggtgtacacaccactttggtttcctgatcttaagctgacatgcaggatgtaagattgtgggttgcctgcatacatgtagcaaatgtagtcctgtaatttatatcacggcttcggagcttcctgtatagctatctgtatggagctaaaatcacaatgtttggttttggtggtgtcaagttagccaaaggttggattatataacgtgaagaaagaataggcaaaaaaatgtcttgatgctttgttaacatatcaaaaatcctgtcaaacatcagtgtaagaatcgatctctattgtttacaagtttgtattgccaatcatcatcattacattctagttcaatgagtaattcttgtatgggcattggtttgatcccagactgctcaattggagatttagctgaagattgtcccatagtttgcccttgggaatgtgttaagcttttttttgtaaaaaaaacttaaaaaagatggggtttggcccccattctattttttttttgggtg

SEQ ID NO: 110706 - DNA, 822 bp, Glycine max
  unsure (1)..(822): unsure at all n locations
  Clone ID: PAT_MRT3847_70979C.1
aatgtgagttgagataatatgtgttgccctagaatatgctctctctaccagttccctcacttccgcatccactacatccgcagttgccaaggagtaatccttttgcgatgacatctgttgacccaagaatggattccaccaggtccaccaatggcaacttgtccaatttttntgctgaatccaaatctctcaaccatctgccttgccactcgtgaaacttgcatgaagtcgtttgatgctccggtggtgacattttcctggccaaaaataacctcttcggcaacccttccacncagggcaacagccatctgattttcaaggtaacttctactgtacaatccagactcgagcctctcttcgctgggagcaaaaaatgtgagaccaccagcttggccacgaggaataattgatatcttggctacagggtcatattctggcattaaagcacccactagagcatggccagcctcatgataggctactaatttcttcttctcatctgagacaacagcatttttcttctcaggtccagctatgatcctttcaagcgcatcagatatctcatctttacttatttccttgaggtcacgcctggctgcaagaatagccgcttcattcatcagattctgcagatcagccccagtgaatccaggggttctccttgcaattttttcaaagtcaacatcctttgcaagtgcttttcctctagaatgcacctgaagaattttaactctgccggcaacatcaggtctatccacagtaacttgcctgtcgaaccggccaggcctcaacaacgccgaatcaagaacatccggtctgtag

SEQ ID NO: 110707 - DNA, 306 bp, Glycine max
  Clone ID: PAT_MRT3847_7097C.1
acatgatactttttttgtaatttaaattggacatccttcggtaaacttgatttttcaagaatttctcaagccggtacaagaacctcaaatttcagtgtaaaactgttttgcctgcagctgatccatctggaggatatttccaggcacccactagggctgacactggcttatacaggacatcgaaggcttactgtccacatggtcgagtaaaagttcatcctttcaaatcagcttcttctacttcgagtttcgtcacactggggtggcccttgggtaaaagctttctttttaactccctatgagccc

SEQ ID NO: 110708 - DNA, 815 bp, Glycine max
  Clone ID: PAT_MRT3847_70980C.1
gtctttgactgggtattgcaagttacaactcctgcttcgccctcagtagagcaggaccttgagcagcatggaaaggatctccttggcctacttgggaccagcactaccatcgtaacaactggtcacagaatgacttaactaatcagcatctagtaattgatttggagattattaacgacttgagaattgacatggctcgattacagcaaaggatgaataacatgcagagaatgctggaggcttgtatggatatgcagcttgagttgcaacgatctataaggcaagaagtttctgcagctctaaatcgctctgctggttcatcaggaatacatgattgcgagtcaccagaagataaatctaaatgggaatgtgtaagaaagggactttgctgcatatgctgtgaaagcaatatcgattctttgttgtacagatgtggtcatttgtgtacatgttcaaaatgtgcgaatgagttgcttcaaagcagaaggaagtgcccaatgtgtcaagctcctgtggtggaggtgatacgtgcttattctatacaataatttgacattaatataaaggtcacacttttaacaaaatacaggattctaacaagttttatttcctggacgtttccaggtacactttttcgttttttttttttttttttataattttcttactgtgattactgtatttatgtcgagtgcaccaatggaacacatgatggcatttttttgcggccatgattctcatatgaataaaaattgtacgtcgtttaaaaaaaaaaaaaaaaggttctagatcgcgattttttggggccatgattc

SEQ ID NO: 110709 - DNA, 808 bp, Glycine max
  Clone ID: PAT_MRT3847_70981C.1
ggctcgagcttttacttcacttttcagatttccagcttattcactcatgcaagttttgacatttcaatcacccccaccttctcaagatatactgtgatgccggctctgagaattcatggatatgccttggctgtttcgttttgtcttatcaccttcatagcagcctcactaccaacagacccttcagaagttgatgccctgatagagatcaagaatagtttgattgatcctaagaacaatcttaagaactggaataaaggagatccatgtgcagcaaactggactggtgtttggtgttttgatcagaagggggatgatgggtacttccatgttcgtgagatctacttaatgacaatgaatctctcgggaagtctatcaccacagcttggacagctatcccatcttgagatactgaatttcatgtggaacgacttgacaggcacaataccaaaggagattggaaatattaaatcattgaaactcttgctcctgaatgggaataagttatctggtagtttaccggatgagcttggcaaccttccaaatttgaatagattccaagtagacgaaaaccaattgtcaggtcctataccagagtcatttgccaacatgaccaatattagacaccttcacttgaacaacaactcatttagtggtgaacttccatccacactgtcaaagctatcaaatcttatacacttgcttgtggacaacaataatttatcaggccatcttccaccagaatactccatgttagatgaattggcaatactccagcttgataccacgatttcagtgggagtgaaat

SEQ ID NO: 110710 - DNA, 1379 bp, Glycine max
  Clone ID: PAT_MRT3847_70982C.1
aattcggctcgagccaaccttaaagcttgaaactttcactaagcagagaagcatggtgtcaaaaaatccgaacccctctgaggctttttacttggacccctccggcatgtcgctccccggaatccttcccttcgccgccgcagccaccgccaccgcagattcctttgaggaccctgctaagaagactcgcaagccttacactattaccaagtctagggagagttggaccgaacctgagcacgacaagttcctcgaagctcttcagttatttgaccgtgactggaaaaagattgaagcatttgttggatcaaagacagtcatccagatacgtagccatgctcagaaatactttctaaaagttcagaagagtgggacaaatgaacatcttcctccacccagaccaaaaagaaaagctgctcatccatatcctcagaaagcttcaaaaactgctccagtactctcacaagtatcaggatcctttcaatcttcatcagctttgcttgaacctggatacatattaaagcatgactcttcagcaatgcctaaaactcccattattaacactgcagtgtcttcctggtcaaacaactctctgcagaaaaccaccagcgtattgcatgggcaaaaacaaaaagtgaataattgttgcagtagcagtagaagtcctagagcgcagttggttggtgaatctaatggtcaaaggaataacagccatccattgagagttcttccggattttgccgaagtatacagcttcattggcagtgtatttgatccaaatgtaactggacatgtacagaaactaaaaaggatggaccctatagatgttgagacggtgctattgttgatgagaaacctgtctatcaatttagcaagcccagattttgaggaccatagaaggctgcttgcatcatatgaggtggaacctgaggtcgataaatataaatgcagattgaaccatgcttgatgtgcagttgaagtgtgctacttagataggcggaggccgaaaatggctttgtttttcggctactgaatgcagtctggaaaaattttgcatgatgataaaatgccttggcatggcaactggctgaagtaaaaatgctgctgctcatcatcttggctaagcaacacttttaattctcttaattcaatttggttatgtatatagtaaaagaaattaatgtggaaatgtatagggtacatagttttgcataggtatgcacagtactagatatctgtgctctagatttagccaaacgtctaatatctggaaagcgaggcagctccctattaaacactttctaacattgtacagcataaaaattttgagcgctttgtttactaagagactcaactgagatttgttcagctcaaaaacc

SEQ ID NO: 110711 - DNA, 530 bp, Glycine max
  Clone ID: PAT_MRT3847_70983C.1
gcgctcagtccgcgaaaacatttcattcactaaaaaactagaagatggggatggttgtggtgatttctcttcctttcataatcttctgcttagttcttggttttggatgttacttctttggaagagccagaggaaggagagaggttcaaaccaacccacaagtttatgggatgccagctccacccccaactgcatgtgcttcacatccccactccaagccagacaacactgataatgtttgatctcaaattatctactcagcttcgcttcgctgttgtgttgcgcaaatacatatacgtcatatatattgggtttcgtttggtgtaattattcactccaataagattaacctctatttactttttgtctgttatttactaccccttgtttcgaggttgaaagttcaatcaacttttattcttttttattgtctcaattaccccttgcccattttgtgtataaagatgtaaaaattctttaatgtcacttgcgtttgttttttcatgtatcccttgtttccaggttgaaaa

SEQ ID NO: 110712 - DNA, 301 bp, Glycine max
  Clone ID: PAT_MRT3847_70984C.1
gaccttttagcttccatgtagaggtttatgtatgtatatatttttctttttctttttttcccatctcatgtaaggtataatctttcttctgctctatttaattttatttattcaatgaagtgtatcttctttgttgttttatttgtttgaaacgagcattttaacgtgtcttcgaatgaatgggatgaacgagtatcttgcttatttgtaagcattttctagatttacgagtggcaataacgtatcagcttaacactgtatattcattttagcttattttgaaaaaataaatcgttttatt

SEQ ID NO: 110713 - DNA, 271 bp, Glycine max
  Clone ID: PAT_MRT3847_70985C.1
tcagattctataatactactaacttttttttttcccaaacaaaatactaaatatggggtcttgttttaatttcatgaatggatttttttttactctaattaaacaattcaacttcatttcattaatcatcattatatactattataataaatataaccctatctatatccttctttaaacagatattattttttttcttttcttaatctgataatatatcatctaaatactgtattgtattttttaataatcttgatataattttttaaat

SEQ ID NO: 110714 - DNA, 283 bp, Glycine max
  Clone ID: PAT_MRT3847_70986C.1
tcctctagatcggccgcttttggttttttttttttttttttttttgggaaaaggaaggagtacctaagtacaattttattcaacttgagctgatttgagaataataatttgcttcattttgagaaatatgaacaacctccctaataagcgatacataaggatgtgacttacacttggaaggcgattagaaattaaaagaaaacaaggcctttatatattccggtggggggggggagaaagaatttgaaaaaaacaaaagggccaggcatgaagaaatataaaa

SEQ ID NO: 110715 - DNA, 484 bp, Glycine max
  Clone ID: PAT_MRT3847_70987C.1
aaagaagcaactcataatgtatgttgggatggattgtactactccaactccaaatccaacacagtgtttaatttataaaagaaagagaagaaacatgactttagatcaatttcacataatatttgacatcccaaagcatggtagttagaagcaattgttcagtaggccataatgtttacatcatttcacatgccagtgaagctttcaaaatatacaactacccatcctaatatcaaaatgcaacaaaaaatgcttcttcagtttttttcatcagcaaccttcaaactcaacaaccttcaaaatgcgcaacaaaaaatgggtcttcagcaaccttcagcaaccttcaaaatgcaacaaaaaatgcttcttcagttttctgcatcatctttatcagcaaccttcctttttttggctcttgttatggctagcttattccttgctattggtggaacaatagttgcagggaccataaactccatgtcac

SEQ ID NO: 110716 - DNA, 275 bp, Glycine max
  Clone ID: PAT_MRT3847_70988C.1
cgtcgttgagacttgtgcgaacttatacctggggaccaaggacttagggtcaaccagagtactcctgcattctattatccctctgtctgttctcagaagcggcaaccgaccagctggctattactatctgacttcccggccggcggtgaccgttgaactttggttggcattcagctaatcgcaaagtccactagtagccgctttctagaattgcccatagacaaaataaggaaacagttaaaatggtacggcttgaaaaaaacaaataagaaaaa

SEQ ID NO: 110717 - DNA, 232 bp, Glycine max
  Clone ID: PAT_MRT3847_70989C.1
ctgctattatcactgtggctataacttacttacaacttgcagctgaggatcatgaatagtggtcggggtcttttctttgtggaggatcaactggcttggtcatctactgctattgctagtaatactactattcacaatcagatatgcatgatattaattcaaacttcgttcttctacaggtacattgtcattatctgctatagtttctttattatgctttgttaattatgtt

SEQ ID NO: 110718 - DNA, 265 bp, Glycine max
  Clone ID: PAT_MRT3847_7098C.1
cgagttcagatctagagtcatcagtttcaccacattgttctacacttacctgattacaattacgattcttacgttaatttaataagatgtttgggagggcaccgaagaagagcgataatacgaggtactacgaaatccacggcgtctccaagaacgcttcgacaggatgatctgaagacggcttacaagaaagccgccattaagaatcaccccgacaagggcggtgatcccgagaagtttaaagagctggcgcaacttatgaggt

SEQ ID NO: 110719 - DNA, 462 bp, Glycine max
  Clone ID: PAT_MRT3847_70990C.1
cgaaaaactttccatgcggcgaattttgaatcatgaacacgttgggccgcacttatcgagctcttgtgagctgtgctaaattaattgccttttcctacataagcgggagatcctccacttagaggtctctcttttttttttgatacaacaataaaacattccattgttcaccttctgtttgaaagcaagcagcggccgaactgacccatcttttgaccttgcacctcgaaatgtaccaacttcatggactttaggtcccatgtagaatcgacctctgatagcggccaaacgagcattggactcaggaggctctacgaaaactggccgagtacatcttgcataggggaaacacaaggagctggacagagatgggatctcatcagagagagaaattgatccccacccacagaccatgataacgagctggactacttggaccctgaagtcccgcatgactgctta

SEQ ID NO: 110720 - DNA, 727 bp, Glycine max
  Clone ID: PAT_MRT3847_70991C.1
tatttattactttttacaatagtgatataaataatttaatttgttttattacttgtgtattagatgcatagaacataaaatcacgaaattaggcaaattagaagaacataagcaagaaataaaattgatttacgcaaactttagacctggtaaaactagcatacatctactgattgaaacagtatatatatatatagtccacagtttgtatttcaaataaaatatgctgcatagtgtaaaatattttgattattctagattgtataccttcaatgtctgatgaactagctcctggctgctttgaatactagaaacctctctgataagaaaagcaaatctaccacatggctagataactcggcagaagtttcatcactcttccaaacagaaccatcccttgtatactcctacaaaaacattctccataaataattaaaaatcacaatagcaaaaagaataattttcccagtctggaaactcacttgaggaattgaaaagtcacattctagaagcagatttctagctttagccaagatctctgtctttttcttaaatgaaaattagatatttagaaataacatagcagttaaatgacaatgcttcctaatttatttaagaaaatcccaaataataaattgagaatgttgtccatgaataaaccaataacacaggaaggcaactaggcaagcaacaccctcccctgccaaaggtgcaggcgggtgtctcc

SEQ ID NO: 110721 - DNA, 770 bp, Glycine max
  Clone ID: PAT_MRT3847_70992C.1
cctgcgtccgcttctctctctccaccaatgccttgaattgaattccctctcatgggctttctccggcgactcttcggcggcaagaagcaccacaacaaccccccaccctcctcctccgacgcctccaaacccaacaaagacaacaaaaaaacatggagcttcatcaaacacagtacgaggtacaaacccaacacattaccaacaacacttaacaacaacagcaactttgactcttccacttcctctgctcctttcactgaatctttggacgctaacaagcatgccattgctgtcgccgccgccaccgccgcggtcgctgaagctgctctcgccgccgcacatgctgcggccgaggttgtcaggctgaccagcggcaccggtggcgtctccagccggcccgccccggcgccgcagccccgacgcgtggcggaggaaaccaccgccgccgctgtaaaaatccagtcggctttcagaggttacttggcaaggagagcattgagagcacttaaagcactggtgaagttgcaagcattggtgaggggtcacattgtgagaaagcaaacttcagatatgctaaggcgcatgcaaaccttggtgagactgcagtctcgggcacgtgcaactcgagggaacttgtcagataatatgcattctttcaagtctccactttctcattaccctgtccctgaagattataagcactcacttcgtgcctatagtacaaagttggatggatctattctcaagagatgtagttccaatgcaaattt

SEQ ID NO: 110722 - DNA, 682 bp, Glycine max
  Clone ID: PAT_MRT3847_70993C.1
tcgacccagcgcccacgcgtccgcccacgcgtccgcaagcacacacaaaaattctcatcaaagatgttcagtgccaaaaaagctgagcttcatccccagaacacagtgctccaaatcaagcaagatgacaagttcttcagcaggcttctctcaaaggaaggttccatgtccaaaccctctttcagaatggctgtggcagtcccttttgtgtgggagtctcaacctggcacccccaaatacactttctctgaggacactctcccacccctcactcctccaccttcctattttgttaactccaacaaaaaaaacaagccactaaagaaacgctcaagatccaacatcttcttagcactcttcccaaaactaaatctcaagaagaaaaacattctctcaccctcttcaccttcctctccatcttctctatggtcaacctcagatcattcttccaaagtagttccaatggagaagcatggaaggaggcgtttcctaagctttggttcatcttttgactttagaggagatgaagaagaagagagtgctagtgctttactactacttcaactacttcaaaactttgctttggcatttctcgttctacaaacactttggctagtattggcttccgaggttcaagcaggaggtcatgaatttcattgcaattattaagcctttttctcac

SEQ ID NO: 110723 - DNA, 324 bp, Glycine max
  Clone ID: PAT_MRT3847_70994C.1
acgcgttcgtgtaactgtatgctcttagccattggtgatggagtttgcctttacatcgaggagggggcccataatacgtgatcgcgagtctgcattcacatgggtcttgaacgactatgagtgtctagactatcggctaaggaactaagaggagaccgttgtactttctgaatcatacgaaagtctatgatgctatcatgctgaacgccatcgtatgccgttcaatcgaaaacctcaactacctaacccgcgttctcaagacacttgttaccatgcgccttcatacgatatgtagtacttgagatatcataatggaactacata

SEQ ID NO: 110724 - DNA, 1342 bp, Glycine max
  Clone ID: PAT_MRT3847_70995C.1
ccggacgcgtccggcaatcagtaagaagaaaatcatgaaaagagagaaaagaagagagggagatagatatattatagctagctagatagagattagaagctatattattatatacataaagttatattatttatattgaactaaaagaaagggtacaagggaaagatgggaaggccaccatgttgtgataaaggtgtgaagaaaggaccttggactcctgaagaagacatcattttggtgtcttatattcaggaacatggtcctggcaattggaaagctgttcctgccaatactgggttgtcaaggtgcagtaagagttgtagacttagatggactaattacctgaggccaggaatcaaaaggggtaacttcacagaccaagaggagaagatgattatccatcttcaagcacttttagggaacagatgggctgcaatagctgcttacctaccacaaagaacagataatgacataaaaaactattggaacacatatttgaaaaagaagctgaacaaaaaattggaagcaggttctgatcaaggaagcttgttgggaggaggacataataatattgggttttcatcagtttctcaaccaatgtctagaggccagtgggaaagaaggcttcaaacagatattcacatggccaaaaaagcacttagtgaagcactctcaccaaacaaggcatcatcatcatcatcaaccttgttagctgaatcaaattcaaacctctccaatgaaaatagtaccttctataatagtaacactaataaaccaacaacaacacaatctatgtgctatgcttcaagtgctgacaacatagctcgtttgttgaaagggtggatgaaaaacacaccaaaatcagcctcatgtgctgcctcggctgtgactcaaaattcctgttcttctagtgaaggaattacaacaacaaagggaagcacaacaagcactagtactgttgaattgtctgagacttttgagtccttgtttggttatgagtctttcgataattactcttcaaattctgagttctcaccatctctttctcctgaggctactcttttccaagatgagggcaagccagatataactacaggattaatagacatgcctttctctttgcttgagaaatggcttctagatgttgatgctggtagtcaagagaaacttggcttctagattattagttcaatttgatatgttttttcttagttacaggagagtaagttaaatctctctctcactttggccctcaacccttcttttggttctagaagtgtatattccaatccaatgttaacattattatatgataaatctataataccactatcctataatt

SEQ ID NO: 110725 - DNA, 730 bp, Glycine max
  unsure (1)..(730): unsure at all n locations
  Clone ID: PAT_MRT3847_70996C.1
ggtccggaattcccgcggtcgacccaacgcgtccggnaaaaaaatcatgaaaagagagaaaagaagagagggagatagatatattatagctagctagatagagattagaagctatattattatatacataaagttatattatttatattgaactaaaagaaagggtacaagggaaagatgggaaggccaccatgttgtgataaaggtgtgaagaaaggaccttggactcctgaagaagacatcattttggtgtcttatattcaggaacatggtcctggcaattggaaagctgttcctgccaatactggtaattagtgaattaatcttcttccactcatcatgtgagattttaatttggtgatttttgtgatgattgcatattcaacttttttgtgtcttttcttagcaagttagggaaaaaaattctgaattattgtttcatacangctgtgatctgaaattaatggtactctctttttggtttggttttcagggttgtcaaggtgcagtaagagttgtagacttagatggactaattacctgaggccaggaatcaaaaggggtaacttcacagaccaagaggagaagatgattatccatcttcaagcacttttagggaacaggtaaattcattttatagcttcttaaagttctttntttgccataaacccctagttatggaatntggcataccatattatatgataataacacatctttttaatataaa

SEQ ID NO: 110726 - DNA, 604 bp, Glycine max
  Clone ID: PAT_MRT3847_70997C.1
ggctcgaggcgtgaggttcgttactaattacaagctcaccaaggaagacattgattatatcaaaaataatttgtctgtttcatgtgaggatggctttctggactatcttagaggaattgactgttctgatgttgagttctatgctattcccaaaggatcagttgtttttcttaaggtgcccctattgagaattgaaggtccaattgccgttgttcaattgctggaaacaccttttgtctatctaattaattttgcatcattagtttctactaatgctgcaaggcatcgttttgttgctggaaaaccaaaaactctacttgagtttggactacgaagggctcaggggcctgatggtggagtgggtgcatcaaagtacagttacattgggggatttgatgcaacaaggttcgttgcttttttaataccttaggttgctattgtataacttcactttttcatatggcacaccaatagcaacgttgcagcaggaatgttatttgggattccccttcgtgacactcattcccatgcattcgttagctcatttatgcgatcgaattcactacgtggcaattttgctgagacccatcaaagtgagcttgcc

SEQ ID NO: 110727 - DNA, 588 bp, Glycine max
  Clone ID: PAT_MRT3847_70998C.1
ttgtgggttttatgggtaatattatttattcaatacaaccgattgattgatacgggctgattctttattacgaggaatcgagaaacaataaccagtccgatagctgcttcagcagctgcggtacctataacaaaaattgaaaaaatatttcctttgaaggggcggctatcacaaaaatcggaaagggctacgagatttatattaactgcatctactataagatcaacacacaggagggctctaaccatatccccgctacgcgatcaacccatatgtgcctatgaaaaaaactgcactcaaacaggagctgctcaaaaccaatgaccaactccctatcaatctatattcatttcgccttgaacaagaagaaatcagcgcatttgacggacttctcctataagactaccacaaaacaaagcatccgcaccaaaaaaaagattctatacagaaatattcgtgatcattcacctagaattcagccagaataactgtgataaaatctacaaaaaaaaaagattgaattctggttttggttgataatactagctctagaagtttcttattggcgagctacgacaattgccccta

SEQ ID NO: 110728 - DNA, 1645 bp, Glycine max
  Clone ID: PAT_MRT3847_70999C.1
atcttccagtcgcggccctgctcccgagggaccctcccgttgtcttgttctgcctggggtctcgtctgcttggtgtccccggtagcgttctcaatgggtgcttcctgcgctggccgtctccctcgggcggtcgttccgcttctgctcctgctgcaggagccgcccgcttcgtgccggcccctccgtctgcgggtgtgcgcttgttggttgcctgcgcccctttcagggccccgatcgctggcttgctcccacgtgtctccactgcactctttgctcaagatgggaaggatgaaacttctcgtagtagtgcaaatgaaacttcaggacctggtggacctgccatcatcacagacataacagtgaacaaatcagtggaattttcatatgaggaactggcaaccgccacggataacttcagtttggctaataaaataggtcaaggtggttttgggtcagtctattatgcagaactgaggggagagaaagccgcaatcaagaagatggatatgcaagcatcaaaagaatttcttgctgaattgaacgtcttgacacgtgttcaccatcttaatctggtgcggttgattggatatagtattgagggctctcttttccttgtctatgaatacattgagaatggaaacttaagtcaacatctgcgtggttcaggtagtagagaacctctgccatgggctactcgggtgcagattgctttggattctgccagaggtcttgaatatattcacgagcacacagtgcctgtatatattcatcgtgatataaagtcagcaaatatattaatagacaaaaacttccggggcaaggttgctgattttggtttgaccaaactgacagaagttggaagctcatcgcttcccactggtcgtcttgttggaacatttggatacatgccaccggagtatgctcaatatggagatgtttctcccaaagtagacgtgtatgcttttggagttgttctttatgaacttatttcggctaaggaagcaattgtcaagacgaacgattctgttgccgactcaaagggcctcgtagctttgtttgatggagttcttagtcagccagatcctacggaagagctctgcaaactagttgatccaaggcttggggataactacccaattgattcagttcgcaagatggcacaactagccaaagcatgtacacaagacaatccccaactccgtccaagtatgagatctattgtggttgctcttatgacactttcttcaactaccgacgattgggatgttggttccttctacgaaaatcaaaatcttgtgaatcttatgtccggaagataggatgataccagattaattgttttgcatttacaattatatgttttggaccaattttgggcaacacaaaaaattgttgaagcgaatgatgtgtgtaaaatggacataggaataaggaatttgtagatttttactagtcaggactcagtagaaagagtgtctagtttaacaattttatgataattcataaccaatgcacaaagtatgaatagtgttttgttttgagagatgcatgtttttctacccagttacatttatccttgtaaatttgtataataaattctatttgagacctatttgattattggtaaaaatttatgggtgttaag

SEQ ID NO: 110729 - DNA, 582 bp, Glycine max
  Clone ID: PAT_MRT3847_7099C.1
tttgccgtgctacatgtgctgccagctgcttgggggggggggggggggggatagggatgagcaaaagagtagatatgaattaatacgaaaggagccggtaacattggagatagtaaaacaaaatgatagcatgttggcgttggcagtacgtgggcgcattactcgaagataattgaaaaatggggccaacagaaatacctaataaaaagttaaataaaggcaactattacaaccttagcggactgatactaacgatgtgtttaataaacagttgttgagtacatttatgcgctgtggtaggaattggcggcagtgtatgttgaacttaagttataagccgcaaaagttgttggcacggcgaaaacatacctataaaactgtgtaggccacggcacaatagcttacacaagcttattttggttagcaacatggcctgacataacacaaaaatagccccgctactgctgggcagtttggttggcgtatttgtaaagaggtttgttaacagagaactgaggcccctagaaacgttaagcagccttttgagaaatatagacacccttgtcacttcaaggttcactg

SEQ ID NO: 110730 - DNA, 158 bp, Glycine max
  Clone ID: PAT_MRT3847_709C.1
ggagaagggctgaatacagcaattcaattacttcatcatatctccctacctaaaatttcaggacttagaccattcttgtttacaaacatccaaattgaaatgcatgttccttgaaagcatttctagaagtcattcggacgcgtgggcggacgcgtggg

SEQ ID NO: 110731 - DNA, 616 bp, Glycine max
  Clone ID: PAT_MRT3847_70C.1
aaactgcggaaaacaccaataattatctaactttggggacgaacattaaaataagcatcagcctctagcaagctagggcgtatatgtacatatttctactggcacatttaactacgatgtttggagctacaaggacacattgagcacaacgcgagtaagatccactgcataattgctggtaccatttcacagctaggaagcataagaccaataagtgacatcatgggttacaacggagcataaatgcaaccctggggaggcatagaaccctacgctcacccatccgggaagattactctccaagctcactgtgccagaaaggatgggactcgcattctttgaacggtggatgagagaagccaccaaaacgctagtgcccgcattatattttgccagacactacgcgacttgtacatgggacaacccctacaatgccgtttagactgacgagatccacttggcgggggagcatatgggtcgacatgcaagagcccattattggtctaagaaagtatcgaacacaatggacacccacgcgaccgaccacgcgtacgcggacgtgccgggtgacccggaaataccggagcgggtcctgcgagcgtaccacctttcctta

SEQ ID NO: 110732 - DNA, 630 bp, Glycine max
  Clone ID: PAT_MRT3847_71000C.1
tttttcctattcaagccatttctggtaatatatatatcctttctcttccttctttcaatcaataagatctgaagaaagaaaaggagaaaaaaacagaaaagaaaaagccttaattacactgtaaccagtatatcaaagcattattttactaaagaatccagtattttgttgcaataagagatgcaatcaaaaatgactttcttatacttgagcctccattgaacagctaatttccacctgtccatggaccttcttgcttttctagataaaattacatcagtaaaactatgagtatccttcatattatgcgtttctaagaaggtataagtctcctctctggaagacactaactttgtgatctccatgaaagttgaaaaatcttgactattgtccattgcattgaggagcaaagtgtcttcctcaagagatgttggcagattccttaacacagcatcacaagtttttgacagccatttcatgatgaaaatttcattgtctgtagaaactcgagaaccagaatacacaagatgtccaactgacctcctcctgttttgaggggttgcccacagccgcaatgcagctagtagtgcaaagaaggcttcccattgtgatggatatagagtgattcct

SEQ ID NO: 110733 - DNA, 539 bp, Glycine max
  Clone ID: PAT_MRT3847_71001C.1
catgatttcttcctccacattcctcattttcttcaattattgcattcccacgccatcatagaaacaaaacaacaatactaacaacgatagaaaatttttaaaatctaattaactgactttcattccgaactttctctcttgttttttgggaaaatcgaccgtggacgaattttcccaagaacgagagaggaggtgacgggatttgatattgtaattttgaaattttaatttttctttcattttgcaatcattgttcctcaacttttgttgtcctctcatcatttcattttgtggtttttaagtcaaaaaaggaacaccaatgttgggaaatcatcacaagatggaaacttgtttttgaatttcattggtacgaacatggtgcctgtgcattgatcgtgggtcattattaggctctggaaagagagacaacagagagatagagaggaaaacgtcatggaagaagagttcgaggtgatcgaagttgaatacgcgcctctatgcgagggtcatgaagatgatgttgattacgagttcgatgc

SEQ ID NO: 110734 - DNA, 218 bp, Glycine max
  Clone ID: PAT_MRT3847_71002C.1
ctatatcgaaaacgtgagccttctcgatcattagggggctgaatagcgccatgaatgagcttccagacttgccccccgccccccgttcttacacctctacaggccaacctacttggtctgaatcaccaggtggatgctcactggacgcgggacactgagtctgctgcgtaagaaacgcgaatctccatttaaacgaaagaaacacagaccctaaaaga

SEQ ID NO: 110735 - DNA, 181 bp, Glycine max
  Clone ID: PAT_MRT3847_71003C.1
tgtttcacccacgcccaatcattggcctaatgggggagtttttagagagacgggggggtgttatcagcgtgcctgtcacggggctcttgcaccggctgatgctcaggtaacaccaaccctgttgggcgcgggacggacgggtttcttacgcactagagctgccataaccgcatgatcacca

SEQ ID NO: 110736 - DNA, 726 bp, Glycine max
  Clone ID: PAT_MRT3847_71004C.1
agcttaaaataaattaagagaaacaccatcaatccaaacaagccttatttgtcaaagaagttcacaaaaacaataatgacatacaaagtgggacataacaatgaccacataatcatcaactagttaaattaaactcctatatatgatcttcattatttgtaccagaccctgtcacggatggagcaacattttcttcatccaactttgactcagtcttggcctctaatctctgcttcttctgtatctttgccatgtcataagatgcatgcaatcccacaaacaggtaatacaccaacaaaatcgcagtccacactccaaatcttctaaacgaagccttatccaacgacccaagaaggaaaatattgatgccaatagaagctgatggcaaaaatggcactagtggcacaccccaaatcttcggcttctttgttagtggaaccaatagccaaatccccactgttcccacaaaccaaagaggcaccattatggtgtaaccaacccattttgtggtattggcccaataaaccgccgaggcaacagaagagcccactatgagaataatacacacaatgaatttcacaacattcaactgtgtagccacccctctagcacaatagcggcgaaccaacaaggctaaggccacaagggagaacaagaacaaagtggagattgaaagtaggttagctagaatatcaaggcttgtaaaaatgcaacaatagcagaggc

SEQ ID NO: 110737 - DNA, 119 bp, Glycine max
  Clone ID: PAT_MRT3847_71005C.1
cggctcgagcctactgacctgcgatttacaactagtggtgtctgactcacaggtcagtagtgtcaagatttttagcacgatggccgcgacatgatgcgtggtgaatcatcaggtgctat

SEQ ID NO: 110738 - DNA, 2885 bp, Glycine max
  Clone ID: PAT_MRT3847_71006C.1
ccccacgtccgatccattccgtgggtttcaccagatcaccatcaccgtacatatcatacgttgttaattgattgattctaaattcaattccgaaaagatctagggttctgcctgaatccgcacctcccaatccaaatatctccaccgcatttgttccctttttggtacagtatctgcttattataggttccgattcgccggaggcattgaaattcaacttgctgcaattttttttctaaaggagaaaggaaaaataaaattgaggattcgtgttgttcttcgtgcttagtgatttggtctgtgaatgagagatagaagaacgagattggtttagatgaacatggaggtcgtcactgatgcggcgtcgttggacgtcgaattgttgcagctcccagaattttctggtttggccctcaagtctaacctcaatttcatcgagaagctcttcaaccagtggttgtcgcttcccgaaagtaatcgattggtaacatcattactcaatgaagcaaagtctggtgttcccttgaatgtcccagggaattgctctagtccaaatgcttcaagtaattctttgccttcaatgtttcccgctggcactgctcctcctctttcaccaagaagtacatctggttcccctcgcattgtgaaacagagagttggcccttctaatttgggttctcccttgaaagttgttagcgagccagttaaagaagtgatacctcagttctactttcaacatggacgtccacctccaaatgaactgaaagaagaatgcttgtttaaaattgatcggctattctatgatcatatggatggcatgcaggtgcatgaattcaaatcaattactaaggaagtttgcaagctgccatcttttttttccacttcccttttccagaagattgataatggaactggtgttgtgacaaggaaagcatttattgattattggattaatggcaacatgttggcgaaggatatagcaactctaatattcaaaattttaaagcaaccacagctgaagtaccttactcaggatgattttaaacctgtgctacgtgagcttttggcaactcatccagggctggagttcctgcagagcacacctgagtttcaagagagatatgctgaaactgtcatatacagaatatattactacattaatagatcaggaaatggtcgtcttaccctgagggagctgaagcgtggaaacataattgatgcaatgctgcatgctgatgaagaagaggacataaacaaggttttgaggtacttctcttacgagcatttttatgttatatactgcaagttttgggagctggatacagatcatgatttcttgatagacaaagagaatctcatcagatatggtaaccatgcgcttacctatcgaattgttgatagaatattttctcaggttcctagaaggtttaccagtaaggttgagggaaagatgggttatgaagattttgtttacttcatactgtcagaagaggataaatcatctgagccaagtcttgagtattggttcaagtgcattgatttggatggaaatggagttctgacacggaatgaactgcaatttttttatgaggagcaattgcatcgaatgacccacatggcccaagaacctgtgctttttgaggatatactgtgccagattattgacatgattggacctgaggaagagagctatataactctgcgtgacctgaaaggtggtaaactctcaggaagtgttttcaatatcctgttcaatctgaataagttcatggcctttgaaactcgtgacccatttttgattcgtcaggaacgtgagaatcctacattgacagagtgggatcgctttgctcatagagaatatattaggctttctatggaagaagatgtagaggatgcctctaacggtagtgcagaagtttgggatgaatcactagaggctcccttctgacgtcatttattgtatgaaaagatattaacgccccagatcggatggactggccattgttcagagacacatgactcaggttcagcttggaacgccaactttgccccataaagggggaaattccaagcttagatatggaatgcgttttggatggggggcaagcagcaacagcgacattcagacatgcatgtactgacatatattgggaccgttatcatggaagttttgtcgctggaccaatgtccatgtaaagtgaggacctttgctaagaggtgattagccaagttgaattaaattgacatcattttgagacgcttaccttaagtagcgagattttctgatggattttttttagtaatttgattttttactgatcgagtcacttttgcctcgaatctgtccaatagtacattcgtgatttgtttcgtcaatctatggctcgggctgttatttcctttttctttttaggctaattgaagaatttaatgaaagtgtaatgctacacatataaaagattcattatcttttctgcgttattagattttgaagtgattggcccggttgaattatgttgacatcagtatgttatttgggggcacccaagttgttaaggaacataaatagcaacattttctcacctttggatcttttagtaatatgcttccatgatcaactcccttttgccccagatccgttgacacatttgtttcatcatctgtgcctctggttgctgtctttcagtgaaatttatttgttgttagggattaaagaatttaaagagtaatgcaacacataaaatgtcattttttttcctggataattagatttatatttcaagatatatgcagcagcattatgttagcaccttcttctgcaaaggattctatttaatgtaaaaaaaaaaaaaaaaaaaaaaaaaaaaagcggccgctctagagga

SEQ ID NO: 110739 - DNA, 438 bp, Glycine max
  Clone ID: PAT_MRT3847_71007C.1
ggctcgaggaaaaattgacccatttttatgaggaggttcttatggggtggtggccttgatcagaagaaaatcgcgtgggttaaatgggatacaatctgccttccaaaggataagggtggcctggagataaaggatatcagaattttcaatagagctctgctgggaaaatggagatggaacttgatgcagcaacatgatgatctttgggctaagattctgcattctaagtatggaggttggagggctctagatgaaggaacatcagtcaccaatgaatccatatggtggcaggatttaaggtcagtcatccatgaacaaggtgtgcaggccttgcttcaatctgcaatagagtggaaagtggggtgtggggatgaagtaaggttttgggaggactgctggcttacagatcaggaatccctacccttaaggccaactact

SEQ ID NO: 110740 - DNA, 205 bp, Glycine max
  Clone ID: PAT_MRT3847_71008C.1
gtttaaccttttttttttttgtctttttgtttttttttttgttttttttttttgggggcgaatacaaaactgatggcgctggatttttccgctttagcccagtagcaagattccaacccaaagtccttttttacatatggcaaaaatttgtgttgaaagggaaacaattggttgtcttttacccaaatgaattttcaaccgcgcc

SEQ ID NO: 110741 - DNA, 613 bp, Glycine max
  Clone ID: PAT_MRT3847_71009C.1
ccacgcgtccggcaggtgaaaggcagggacgagtcgaaatggctgaagcagagagtgtgcagattcctcaagtcaaacttggaactcaaggccttgtggtttcaaagttagggttggggtgtatgacccttagtggacgctataatgatccacttcctgaagaggaaggcatatctgttattaagcatgctttcagccaaggaatcactttttttgacacatctgatgtctatgggctcgaccatgctaacgaatttttgctcggaaaagctttgaagcagttacctagagaaaagatccaggtagccacgaaatttggcgttgcagtagcaaaatttcctaattttcaaatcaaagggacaccggagtatgtgcggtcgtgttgtgaagcaagcttgaaacgccttgatgttgaatacattgatctctattatcagcacaggattgaccaaacagtacctatagaggaaacagttgggaatccttcttctaatacaccttttaactacttgaaatgtattatatacttgttactttttagtacatattctgtcatcatgtgactcatctcactagacactagtcactagtcacatgtcaataaagttgttct

SEQ ID NO: 110742 - DNA, 1406 bp, Glycine max
  Clone ID: PAT_MRT3847_7100C.1
gattttacacaactgcgtccacaggtttgtgaatcctgacataaacatggatcccggtcgctccactccgaagaaggttctcaattttcgagaaaccgccacgtggcttctggaagcagcaagtttggtctagaaagatcccaaggagtcggtccgaacgaggatccacccccttccttgacgaacacagagacgtgtgttttggattctatttgtgccgtggtttgagatttagatgcaaataaatatataccctgtcttgtgccgtgtcccctttaagccaattgcaatcaaacaaagtttcggttattggtgttcatttttcttcctccatctttctctaaaacattaattgaactctccattccttaaattttaccaacgagctagttccgacacagacaaagcaatggcaaagactgagttagaggtgactgttgagagcaagaacaaagaactaaagcacctgggatttgtgaggattgctgctattcaaacttttgtgattgtgtcaaatctgtatgagtacgcaaagcagaattctgggcctttgagatccgctgttggaacggttgagaacactgtaaccaccgttcttggtcctgtctgcaacaaattcaaggacttccctgatgatgtcctggtttatgttgacaaaaaggtggatgaagcttcccacaagttcgatgagcatgctccttcctttgccaagcaccttgcggatcaagccaagggtgtgattcagaaagtgacttgtgaggcagggaaagttgcaagtgaagctcaatctggggggtcaagagctgctgttcattttgttgctacagagtcaaagcattttgtgttgataaattcggtgaagttgtggaatggactcacccactatccaccattccatgcattggcagagatagcagttcccactgctgctcactggtcagagaagtacaaccatgtgatcaaggccatgactcaaaagggttatagtttcatcgggtatctacctttgattcccgttgaagagatagccaaggcattcaaacagggagaggcgaacttaaaaggagataatgcagcctctgaggaacaaagattagaatctgcatctgattctgattaaattcagctttacttcttcaaaaaaatttgcttatgagtgaacttgttttgtgggttgtgacattctaggcaatgtggtggttgtgactagacatacttttaagcttgttaagcatggtaagactatgtaattaatccatgtagaagatacgatttatgtaaatggtgcggataatgctcataaaggttgcttcctccttttgtatgcatataaaatattgcttagtgctctttattgtgactacatttggtggttgcaaacctgataagcacaatactgggtattt

SEQ ID NO: 110743 - DNA, 432 bp, Glycine max
  Clone ID: PAT_MRT3847_71010C.1
ttagtggaaaaaccttcaaatgtgaggggtttgtttctggtttacattctttacatcacccccctgaaaaagaagatcaagaaaaacccaaaaagattgatgcctgattgagacaaagaatagatcctcaatacattgaggttcaggctcagatggaaaacaaatttgtttaaatagacttttgatgatgttgaaactcctaaaggttccatgtgggattttaaaatttctcaatcttaaatttgcactttccaaaaacacagttggtggaaccatttcgcgtagtgaactataggcaaattttttgaccagatggcaattttatgagccagtgttgattgtctcgcacttatcgtattaaaggaatgattaaaatggtggccacaggtggtttttctgagaatacatgtattttattgggcctgtgctatg

SEQ ID NO: 110744 - DNA, 437 bp, Glycine max
  Clone ID: PAT_MRT3847_71011C.1
ggctcgaggcctaacgtcagactactgttcgcgcttgcgctattcttcgccggagcacaatctgtgccattcatcgttttgcatggtattggagatgcatgcaaacattcgggcattagaaactttattaaggaactaagcaagtggtctggttcaccaggatactgcttagaaattggaaatggatcctgggattcttggactaagcctctattaaaacagacatctattgcctgtgagaaggtggtgaacttgcttgggaatcttctgtaccagcagctgaatcataattcgcttttgcatgagtttttgcttccatcttactgtatagggaaagaagatgaaggatctaggtcagggatacaacattgggggacttattcacgcaaacttgattggtagaggaataatctgattttgagatggagcacctgctg

SEQ ID NO: 110745 - DNA, 188 bp, Glycine max
  Clone ID: PAT_MRT3847_71012C.1
agtctccacattattatagagcaacaacagttataataataggggcaacagcttaaggtgttgattggcttgcgtccttccgcgtggatgccctacacttgatccgaatagtgcacttgaacgggtgcgcggatgaaagtcacgcgtgcaatcacggcggcggatgatgctaaagcgaattcaaacca

SEQ ID NO: 110746 - DNA, 401 bp, Glycine max
  Clone ID: PAT_MRT3847_71013C.1
ctcagagaaccaaaagcaagtttgtctttgctggaccttctaaatcagctgagacccttttgagatacattgctgcggagcaacttccggtcaagtatgggggactaagcaaagatggcgagttcggaatttccgatgctgttacagaaattacagtgaggccagcagcaaaacatacggtagagtttccagttactgaggtgggtttggtcttttcctttgtgtttttttgtcggaattgattgatctcgattgaggtagaattcaatgaatgcagcatagaaatgcggagtctttcctaggattcctctgtcctcaagattttaatattatccttttcgttctttacttatttctcccgtttcatgcgacaaattagggcaaacccatgccccgagatg

SEQ ID NO: 110747 - DNA, 788 bp, Glycine max
  Clone ID: PAT_MRT3847_71014C.1
attttgttttctttgggaataaactgcaggtttcttatgctccccaatttgagagcctgtctgacacaatggataagttagagggaagaagaagggaggttttagcacgattgaaccctagaagatctaaagagaccacagcctcaagctctaagccccggattacatcaaagaccaattgctcacaacatttagattctaatgcaagggatgtagagctcaaaggaggttcacacagtggtaattttccaataagaatggtttcctctaatgaggtttgttgcgcctctgtttcctggattctaacagtgtgccctgggcgcgtgctccctccttagattcaatcaagtggtgagaatacaaaagctggatctgcatcaaagaaacaacgagttgataataggaagagaattttatctgcaaattaatgttttgttctcacctgcactcctatgttttatatgattttgggtgtgataaagctcaatccccaagcctgtaaggaaattttttatttgaggagtctcatccaattatattgtgggtcacatcctctgttccaagataggttttttttttttgtataatgttactaactggtagcgcatcagcaatccgtccgggtaacggtgctagaagcctagaacacttttgaattcccagtcaccatgcaatttgtttgctagctttttgttaaccaagccatgccttataggaaaccatatattgaaatcgcatgtatattatttgaaattttaaattatatagcaaatacggtttccatttga

SEQ ID NO: 110748 - DNA, 1043 bp, Glycine max
  Clone ID: PAT_MRT3847_71015C.1
gctgagtttggcttggactactgaggtcatgaggaatgttgttaacatcactgttagtagggttattgccttgtattacctcagaggaatgcaatctagcacccaattttgctttctgagagccttgactcggaatcttggaagtgcttgtttggggtctctctttgtgcctgcaattgaagccctgagaattgtcgcccgggggctcaatttgcttgagggagaagatgagttcatgttttgttgtgctcactgttgtttaagagtcatggaatccattttcagaaatggcaatggctgggcatatgtacagattgcagcatatggaaaaggttttgtaaaggcatcccaggacacttgggccctatttgagaaagaagatatggtgtcaattgtagatgctgatataaccagctcaatttgcttcctcacaggagtttgcagcggctctctttgtgtcattgttgtggctgcttggacctacaaagtacaccaaactttcacagccaccctatccctcctcacattcttcattggataccttttgactaggattgccatggcagtgcctcatgcctgtgtgagttgttattatgtatgctatgctgagactccggagaatagattgtttgataaaacaattaaggatcgtcaggccttgttaaaaactggccgtgatgtggttcctacgccaaggggaattaggaggtatacaaggacctaattgcatctttatttttgattgattttacacctattcaggacatggtttatgtccaaaagggttaaaattgaaatccatggtggctggctgaggtggtggtttgttgagaatgatctggcgaggttgagccattattggaatggaagaaatgtgaaggataatcaacatggccactacagaaagtgacttttgttgtggtcccccacctccttgtagtgttttgtatattttttgcatatatacttttaggatattctataaggtgaagtcccatcattattttattgcaagatgtgcgtagaagccactaacttttttt

SEQ ID NO: 110749 - DNA, 428 bp, Glycine max
  Clone ID: PAT_MRT3847_71016C.1
cccactcgtctcgctcgttgtctcgaatacaagttcatagaatcctattgcaattttacccgttgttacacttctttgcacatacgtaaacctttcaataactaacacttacacatgatcaatgccaatacatactatctcatataaacagtatctattatttaatctttgtttcttctctatctctcatttaacatttttcattactccaccaatattttttcataaaagcttgaatttttctcctaccctttacaatgatctcttcgcttaaacagcctgttatatggatcattgtttctgatcttcttttgaagcaaatacattcaactccaattaatgcaatattctttttaccctctttgtcaatataaaaagttcaaagatctcttgtttaatttaaaaaccactccacatttattcttctc

SEQ ID NO: 110750 - DNA, 267 bp, Glycine max
  Clone ID: PAT_MRT3847_71017C.1
ttagggtttaaatttttttttctggggagcccctttggccttacccagcacccaaaaaaaagaaaaagccttcgaccctaggttttttttccccccctttttcccaaatagagcctttttcgtttttggattcctttccgtagccgggcgattggggggcccataaagaaacaacccgaccgttttatttttttcggttaaccaatcgaaaagtgttggtggtttccttttcccccctcttgggtttagggaccgtggggacccctt

SEQ ID NO: 110751 - DNA, 575 bp, Glycine max
  Clone ID: PAT_MRT3847_71018C.1
atatctttattcttttttttactctttctttttttttttcttttattttactgtctatatgcaatgtaggggggcggaagataatatacttccccaaaactttttattcaacacaaaactcccactttttcattgatcccgcccaggatacaacctttaaaaaaactccaactatgtaattcctgctcctaacatcccttataaaacgacgtcttctctgcggatcacagctcttaatatttccatagatccaatatctcctaacacggtttgaaacatcaaacgcaccattctaatacggcctttttgtaggcccacactgcgaaattccataagctatccgatgccctgttctttgccgactttttatccgacgccttaacaattatttacgatgacttgtgaagggaacaacacctatttttatggagccctttcaccacgaatatagcctgagccctttagggatcacaaaccctctgggtaccgcgagacgttttcgcaaatcgatttttggaaaacaaaacaaccctcgataccatgggaaacccccgacccctgggtcaaccctggaa

SEQ ID NO: 110752 - DNA, 515 bp, Glycine max
  Clone ID: PAT_MRT3847_71019C.1
aggccccaactagttgggtcaagaggtaacccacgtcctaaccaagggtaggactgaccgtgtatacatgtttaaaagtatctctaccttaagacttctaacatggccgattctagatagagagcgcggtaaccctactctacaaaaagtggaaaatctcttcatagggtactgtagctgtacagccatagtaccatagggatggtgagagttcatcagagcccgaattgatataggttaaatatccttactcaaattacgaaccctgaacctctttgcgaattcggctgaaccttgatgggaaatctgagatttctgataggaaatagaaagccccaaaaaaaaaaaaaaaaaaaaaaaaattctcccgttactgaaggaaagacccccacttacgtgcgcctggggaacgcaagtttgatcgaggattggagaggagaggtggaatggaagaaaaggcgaaggatggatctgtcttaaggatcttcagtcttacttggttagtagttttagat

SEQ ID NO: 110753 - DNA, 458 bp, Glycine max
  Clone ID: PAT_MRT3847_7101C.1
aaaatagtaaaaaaaattttctatgggggcaaatccccaaccccttttattttttcaaaaaaaagggctgcaggggggtttgaacctaaaaccaaactccccaatccctaatcagcacaatccatcacaaaaaaggggttttaaatatacaactctccatactaaaatggaaaaatcatttgaaaacctaagaattaaatccttctttacggggcacaaaacatatccgggaaacaaacaaacaaaattcacccccccgggtaacttttttattcgagggggaccaacccccactttgttttcataccacaattcatattataaacccgccccccatcacatttttagcacccccaactaacccccgggggggaaccaaaatttttcctttgccgaattcttctggctcaaataaaataatccaaaaaagcctttggaaccccaaaaaccccctaagc

SEQ ID NO: 110754 - DNA, 296 bp, Glycine max
  Clone ID: PAT_MRT3847_71020C.1
cggctcgagtgtacaacagtgaagacactcctgttgctgccgtatctattatagacaccaacagctaggaggaccatgtagaccagatgcctaggagattctatcttgctggtaaccatgagcaagagtttctaaaatatcagcaagagcaaggaggtcatcatagccagaatggaaagcgtcatcatgaagaagaaaacgcaagaggcaagatattgagtggcttcaccctggaattctaggaacatgcattcagcgtgcacaagcagatagcgaaaaacctacactgagagaac

SEQ ID NO: 110755 - DNA, 496 bp, Glycine max
  Clone ID: PAT_MRT3847_71021C.1
ttggaggatccacaaaaattcgcagacgagggtgtcaagacgattacgtggcaggagtatgtttctcgactacatgaactcaaagatgaaattactcgttcctggcttgctgaagatcgagtgacatccttaaagttatccataaaggttgctaagcttctgatggatacgtcagtatttgagttttatcctacactttttgttcttgtcacagatatcatggatatgcttgggaacctggtttggcaacgcataaagcggaaagctgagttttccgaagatggagctttacgctgcaacttagcagaaaactttcaagcaagggatatttgtgctgatgccaaagaaacttgctataactggttcaacaaaattggtgctgtgcaagagcttcttccacgcatttacttggagctggcaatattgccttgctggcggtttttgcttgagcaacctttagacagcctccgacgcttggtaatgatgataagaggat

SEQ ID NO: 110756 - DNA, 416 bp, Glycine max
  Clone ID: PAT_MRT3847_71022C.1
cgttctttaaccgcggtaatctgagcattgcgcgcgacctgctcgacattctcgcggaggccaagcaggaggtccccgcctggctcgtcgacattagcaaggagcgctcgtttggcggcggtggcggctacggccgcgggcgtggcggtggtgggcgcggtggcggtcgcccgacgggcgggggacgcgatgtgcgcatgggcgggggtggtggtggtggtggcagcagtggtgggttcggtggcgcccgcagcggcggcggagggtggggcggcagcggtggtggattcggcggctcgggcggcgcgttctcgactaacggcggcggtgggggcggtgcgagctagtggtaagcgtcgttggcgaagccgatcagtgcggtgcgcgggcagtgaacgtcgcgttcacgctcgatc

SEQ ID NO: 110757 - DNA, 404 bp, Glycine max
  Clone ID: PAT_MRT3847_71023C.1
gccgaggatgagttttagccatagtctgagacatgggaagtccaggggcatggttcatatggacagtacaatgaggagcactggttgtggacatagatttaatcggagtgaacagagggacacacctacccagagattgtgaaaatggaaaatggacttggaaagaatggctttgtgcttaactatggatgggacttgatcggctcctgatacaccattaataagagaaccctgtgtgcatggaacaatatcgcacacgaactctctgctagcaaccatgagatattgacaaaaatagacatccttgtgtccccgcctgatgcagagattgagccagcgatgatggtgatgaacactctgctatcagatatggctaaacactatcacaagtgagaagctgagag

SEQ ID NO: 110758 - DNA, 1869 bp, Glycine max
  Clone ID: PAT_MRT3847_71024C.1
tttctcgcgtccgaaataaagaagcgaaaccaaaccaaaccatcgagtgcgttgcacccccaccgttagcacagctatgtcgttgcgcaggcgaaccttgctcaaggtcattgttctcggcgatagcgggtacgttctttctattttccctgcaacaccacccttttccaaacccgagaaatctgattcgttcattgccattgccagggttggaaagacctcgttgatgaatcagtatcctcacgcggcgcgcgtcgcactttctcaccgcttttctgattcgctttgattcattataatgatttattataattatattagtgcatctgtaaagttgattagatttgtgtttgcggttaatttgatgatatttttttatagctttttatttttataattttatatgtcctttattttttttattttatttggaatttagttctgtgtggaccttagctaactggcacgcggagagaactagtatcgagttttttctttttttttttttgctttggtttgtacttgcgcattaagtcgagtacaagaaggaacagtgcagaaagcgatagaaaatggcttcccttttccccttttgtgctcgcaattgaccgtcgaatccaatcctgaaatcccccaataaatagagaagcgaagaaaccaaaccaaaccatcgagtgcgttgcgcccccaccgtaagtagagctatgtcgttgcgcaggcgaaccttgctcaaggtcattgttctcggcgacagcggggttgggaagacctcgttgatgaatcaatacgtgcacaagaagtttagtcagcaatataaggctaccattggagctgattttgtcaccaaagagcttcagattgacgacagacttgtcactctacaaatatgggacactgctgggcaagagcgattccagagtctcggggttgcattttatagaggcgcggattgctgtgttcttgtgtatgatgtgaatgtgatgaagtcgttcgatacccttgagaactggcatgaggagtttctcaaacaggcaaaccctcctgatcccagggcatttccatttattttacttggaaacaagatcgatattgatggtgggaatagtcgagtggtttctgagaagaaagcaaaggactggtgtgccgcaaaagggaatattccctactttgaaacatccgcaaaagaggattacaatgttgatgctgcattcctgtgtattgccaaagctgctttagccaatgagcatgaacaagacatatattttcaagggattcctgaggcggcagttccagagaatgagcagaggagtggatgtgcatgctgatctggagatgctgaataatttttatgcactccccttaatgctgttgttgaaactcttcaaattctttttggtcatttagtgtatactgtatgccttgattgtgcgtgtaaattgttattatgtaccttgaggtttccattttgataaattgtatcatttatttattgtagtcctgttttaggaaggacgaagcttgagaatgttgcacacgcagtaaaagcatgctctattgataaaccatgacctacgagatgaggcatggaccatggaatgtttaaataatttttgaactttttttcctattgtagtcctgttttaggaaggacgaagctagagaatgttgtacacgcaggaaaagcatgttccattaataaaccatgacctatgagatgaggcatggaccatggaatgttttaaataatttttgaacttttatccgttgattgtcaatttgagatgcggcatggaccaaaaaaaaaaaaaaaaatgaaaaaaaaaaaaaaagcagacattaatctttgttggcgtcaaaaaaaaataaaaa

SEQ ID NO: 110759 - DNA, 363 bp, Glycine max
  unsure (1)..(363): unsure at all n locations
  Clone ID: PAT_MRT3847_71025C.1
ngttaatgcagcntangtnagcnnggantnnggnttgngnngaatgnngngagtgnttngtcngagnagngngncnagggatcggncncgccagagtgngtgagttggtngtgtttggagntgtgtggtacanttagattaagntnngncnaagntncnnctngnnanaggnttgcnagangnagntagnagagannggcggtttngatcgntgaggtgagatnggngtnatgtngnnagttgtgctgtgcatanatagagcaagngganganggaaggtttnatatggagtgntgatncgagtgtgnttatagttggaagtgngtnanaggngttgagaggtgttnaagggntggaagaann

SEQ ID NO: 110760 - DNA, 1576 bp, Glycine max
  unsure (1)..(1576): unsure at all n locations
  Clone ID: PAT_MRT3847_71026C.1
ggctcgagtttcattttcgttttctctctcttctttctttctctttaaacgccgaccaacgacgcgacacgacaccgtttcgatggtggtgaagatgatgcggtggaggccgtggccccctctcgtctcgaagaagtacgaggttaagctcgtcgtgaaaaccctcactctccagggctgcgatctggtgcgtgcgtccgcagagaaaggcttcatgctccagattaagtggaagggtcccaagcttaccctaagcttgctgagacgcaacgccgttgcgagaaacttcaccagagaagcgcaccctgaacaaaacgacgacgtcgttttgtgggacgaggagtttcacgcactctgcacccctaacgcgtacaaagacaatgcctttcacccctgggaaatcgctttctctcttcttaacgggctcgaggtttgaatcaaaggtcaaagactaaagttcctgtggttggaactgcagctttgaatctagctgattttgcatctgtggttgatcaaaaggattttgatttgaacattccactcacagtttctggtggctctgtggagtcttctccttcacttagtatatcgattagtttggtggagttaagagcggttcaagagagcacagagttagttcataataaagcaatagtgcctgtgcctgtggcttccgctaattcgcctttggttcagtcaggggagactaccttggctgagaaagacgagctttcgacgatcaaagccggtcttcggaaagtgaagattttgactgagtttgtgtctgttaggaaagcaaagaaagcctgccatgaggaggaggggagtgagggaaatttctctgccaggagtgaggatggtgaatacaattatccctttgactcggattcgctcgacgaattcgaggagggtgattcagatgagatgaaggaggattccagtgtgaggaagtcgtttagttatgggaaactggcatatgccaatgctggaggggcgtcttactctagcgtgacggtgaatgatgagggtgaggactgggtttactacagcaatcatagatcagatgttgggattttgcataaagagaattctttgaccgtgtcagcaactgagccttatgtgttgcaaagctcaaggcgtagtatactgccttggaggaagaggaagttgagtttcagatctcctaaatctaagggggagccattgttgaagaaggcttatggcgaagaaggcggtgatgacattgattatgatcgcagacagcttagctctgatgaatccctttcactcgggaagactgaggatgattcaggtgcaaatcgatcatcggtgtccgaatttggggatgacaattttgctgtcgggagttgggagcagaaagaagtaatgagccgtgatggtcacatgaaacttcagacacaggtcttctttgcttcaattgatcagcgcagtgaacgtgcagcgngtgagagtgcgtgtaccgctcttgttgcggtaatggctgattggttccaaaacattcgtgatctcatgccaataaaggtccagtttgatagtcttatttcgggaaggctcg

SEQ ID NO: 110761 - DNA, 1103 bp, Glycine max
  unsure (1)..(1103): unsure at all n locations
  Clone ID: PAT_MRT3847_71027C.1
aaatggcgttaatataacagagagcacccgaatccctccctccccctgtatctgtatcccactttcatttcatttccgttttctctccaaaaacgtctctctctctctctctcttttccctttaaacgccgaccaacgacacgacaccgtttcgatggtggtgaagatgatgcggtggaggccgtggccccctctcgtctcgaagaagtacgaggtgaagctagtcgtgaagacactaactctccagggctgcgatctggtgcgcacgtccgcagagaaaggtttcgtgctccagattaagtggaagggtcccaaacttaccctaagctctctgcgacgcaacgctgttgctagaaacttcaccaaagaggtgcaccccgagcaaaacgacgacgtcgttttgtgggacgaggagtttcacgcgctctgcactctcaacgcgtacaaagacaatgcctttcacccctgggaaatcgctttctctctcttcaacgtctctctctctctctctctctctctctctctccctccctcttgccattttaggataattttcatttgggggttttgttgactttttttttgtattttaaaaaatattaattttgtgggttaattggaaggtttttacttttaaaaaaaattattgttgttggtttgagttttgatttgaattggttgttctgtgttgcagggtttgaatcaaaggtcaaagactaaagttcctgtggttggaactgcagctttgaatctagctgattttgcatctgtggttgatcaaaaggattttgatttgaacattccactcacagtttctggtggctctgtggagtcttctccttcacttagtatatcgattagtttggtggagttaagagcggttcaagagagcacagagttatttcataataaagcaataaaagctgtgcctttggctcatcttaccaaggaagagtatctgtaaatgactttgtaatttccttttggatgtgagagctcaaacttttggcccctaacatgtagtttgcaaaagacttgtgaattggcttaaaaaaaaaaaaaaaaaaaaaaaanccacgcggccgctctagaggatccaagct

SEQ ID NO: 110762 - DNA, 747 bp, Glycine max
  unsure (1)..(747): unsure at all n locations
  Clone ID: PAT_MRT3847_71028C.1
gaaactggcgtatgccaatgctgggggggctttttactccagcatgagggtgaatggtgagggtgaggactggttttactacagcaatcacagatcagatgttggggtttcgcataaagaggattctttgaccgtgtcagtgactgagccttatgtgttgcaaagctcaaggcgtagtatactgccttggaggaagaggaagttgagtttcagatctcctaaatctaagggggagccattgttgaagaaggcttatggcgaagaaggcggtgatgacattgattatgatcgcagacagcttagctctgatgaatccctttcactcggggtaggaatttacttgcttgttctcgctgatttcatttatctacatgtttatggcacaagaaagaaattataaaacaataggtatctgggtgtactgaaaattgatactttggtctttgtgattactgattagtacttgttgactagtgatctgacatttgtggtaagttgtatgtttattgaggaattagtgacagtaacttctgaacctttagggatgcacttgaaaactgttgttaattagcttagcagtaccagtgtttcacactgtatgtctgtcttgcagaagactgaggatgattcaggtgcaaatcgatcatcggtgtccgaatttggggatgacaattntgctgtcgggagttgggagcagaaagaagtaatgagccgtgatggtcacatgaaacttcagacacaggtctt

SEQ ID NO: 110763 - DNA, 392 bp, Glycine max
  Clone ID: PAT_MRT3847_71029C.1
gggccatgtttaggcatgcttttcttaacttaataagagacgtggaacggaggtagaggaccgggttgtaggaattccagggtctcgccaacgaggaacccgtgatatgagggtccacaaaatgaagggaagagatattttttttgttttttgtttcatttcaaagcagcggttaaacgtgaaaagtgaaaatcgccggtaaaagtgaaagatagtgacgggttggtggcagtggaagtacttgtagaaactagctagaaatggaagaaggaagaggggacatgcaactgcaactgtaactgcacgctcagtattttatttatttattgtattattgattttgatatttaagaggggtaaaaacaaaatgggccagtttttaaagttgaagt

SEQ ID NO: 110764 - DNA, 441 bp, Glycine max
  Clone ID: PAT_MRT3847_7102C.1
catatgagactacactgagcatcgtctagctatgtcgatcgaactgtccaaggtcctgtcacgagctacacgtgtggctatctgggtaaccacccgtattggatagagagttgggcgagccgggaccacactggttttacgtagggctatcctggacgctgcgggagccgccaatagagagcggcaagaacttgcacgctaaccgacaagggcagcaccaaccaaaccgcggccgcggatagtgcaacccaaatgctaacgcgaaaaaacggcggcgcagttagtagagggcttgcctaaccgcaccaaccgtaggcagttagccggccgcgcaacaacacgagttacaagcaacacgtttggtcgggtggtggcgaaaaaggcgcccaagcgaaactttacggctaggactatgggagtaggcaaccaagttaaagaaac

SEQ ID NO: 110765 - DNA, 286 bp, Glycine max
  Clone ID: PAT_MRT3847_71030C.1
ggaatgggaatgggacccataatttttagggaatccaattgcaattttgtaacattgggaatgtaataaaaaaaaaattttaaccctaggctttggggaaaaaagtccctaacaaaaataaaaacatttttgaaaattttttggaataaaaggaccaaacccgctaaatttttaacccctttaaaagagctcaaccccgggctgtttttttggagccccccattgaacattttccaaaaaaaggcccccaaaagttgggggatccaaaaggggtttttcatttttt

SEQ ID NO: 110766 - DNA, 494 bp, Glycine max
  Clone ID: PAT_MRT3847_71031C.1
aaactgtcattaatcaaatttcatattcaaaagcacatacatactataaacactttttacattgccaattaatattagctgccaagccaacaacaaaagcaaactaaactaaaaaaatcatgggtgctcaagcaatggcaacttcaacagtttttgatttttggggaggaggatgcttctcaacaaccacagtgagaaccccattttcgcatttagctgtaatggctgacacattagcattctcaggcaaacgaaacttcctctgcaaattctgaggccctctcctctccaacctaagatacttgcacccttcatcctctccatcttgacgcttcctcttcccattgcttcttataacaagtgtgttctcatcttcaaccgtcacctacaaaacaaatacacacatgccaatgcaccataacattaatggaggggaagaaaagaatattggagtgagacatcacgtttgtacctgaatttcagacttggagaga

SEQ ID NO: 110767 - DNA, 719 bp, Glycine max
  Clone ID: PAT_MRT3847_71032C.1
aaggaaattatatacaagactgtccaagagatgccacctaaccccaaggagccttgggaccttgaaatggactatgatgacactttgacgttggaaattcctattgaacagctaccagatggtgatggtgcagatatagcaatttctcccaatcaggttggaactcatactgttcaaggggtggcctccacttcttcaaccggtgtggctactgctgagcctgatttagaattgcttgctgtactgctaaaaaatccggagttggtatttgccttaacttctggacaaggtggtagcataccgaaccaagaaactgtgaagctgcttgacatgatcaagagtggaggtgtgaacttgggtttaagtgaaaatacaaatggaagttatggcacgagtgtgaagtccccggagaaggtggaagtttctctcccatccccaacccccttgagcgatccaagaacgagtggatggagctcagaagcatcaaaaaatcccttttcacggcgaagtctagcacccgatagaattacacagaaccatgctgcagtggcaactaccaacttattatctcagattcctataactggcactacagtaaggcaacagccaacagttgtggttccatcttcgaggcatcttacaagcacatcagtttctccatattctctgcctcatgcaaactaatgtattcctgaaaagccatcaccactggggcaagt

SEQ ID NO: 110768 - DNA, 610 bp, Glycine max
  Clone ID: PAT_MRT3847_71033C.1
acacgcttgactgcaattggataaatatttttgatgttgtagaattaaaattagagtttcatctcctaatttatactgcaatgcaaagtcaaattttggagtaaacactaggttgtagttttttgttttcttaacaaatctttattgtgtgaaataccaaaactccaattcaaacaacaaaatgataccaaaaacatttcaggaattgcatgtacttttttcgttttcaatttaaaaaattaaaaaatgctttaattattaatatctctttgatttcttagagggatttggttgcatggtcagtggattactaatatgatttaacgaaggatagttctttgtaaattcttgatgcctgccccgtgtggtagtttactttctgatgtagaagaagattatgattagcagaacaacattgaaaattttgacttaaagaaagtagaggaacaagcagcagagttggagaaggatttgattgtcaaggaacttgaaacgcttgacgtgcttgaagaataggagctaccaaagattgtggaggacttgagcaccagttacaaaaggaggcttgaaatggttaacaactcgagatgtaaattcatatgaagaagct

SEQ ID NO: 110769 - DNA, 329 bp, Glycine max
  Clone ID: PAT_MRT3847_71034C.1
ggcgagccacgcgtccgcccacgcgtccgataaaaaataagttatcccttttatcttcgcatcataacactctgggcatagcggactcataatgatgatttcacaaatttccacccacacccctcactgctttttcctttcccacaccccttcctatcgttgccaatagagtgagtcccttcactgtatagaaattaaacatggccaacaaagcttcattttcaaaccaccagacaataaaactgctttttgtgaaccttcaattcaagacaatttaatggtatgcagggaagcgctacttaaagcttctgttttcaactaatgcattc

SEQ ID NO: 110770 - DNA, 387 bp, Glycine max
  unsure (1)..(387): unsure at all n locations
  Clone ID: PAT_MRT3847_71035C.1
gtgaaaataaancataacacaacatcatcccgaccanncnagaaacccccntccaaagatacngncnggnctctcgttcattccncanacccttacccttaatagcaccaccccctgnnccatctccctntgnnganaagaagaacacacccgncncaanncacananacngatctcaacnatnaaagcaacactgctcccnccttgcctggcccccgatcccgacacacatacaaccgaaccccncaacnanagacancttccaccntgnnngngctcatcgaaaaccaaccctacatcccnaanctcnaccttttaccnaaccaanncnaaaggccnnaaagaccccccccaacnaaaaaccgaaaaaaaacccacaacacgcca

SEQ ID NO: 110771 - DNA, 144 bp, Glycine max
  Clone ID: PAT_MRT3847_71036C.1
gacagccaacacaattagtaaagatgagttcgaagagcaacacggtgctgcgataggtctgtttgttgcttcttttccctattcgtgtggcaacggtacccgtggatctgaccttcttcagatttgatgagtcatccagtgttg

SEQ ID NO: 110772 - DNA, 235 bp, Glycine max
  Clone ID: PAT_MRT3847_71037C.1
atacggggcaaccggacctagcccagccccaacccaaaccacgctgttgaatcgcgcaaccgcagtgacagcaccggcgtgcataaaccctaaaccctactatgtccgaagacaagtacggcgtgctcctctattacaagtacgccgaaattcccaacctcgacgacctcctcaccttctaccactccaactgctcctccctcagcctcctcggtcgtgttcgcctttcttctca

SEQ ID NO: 110773 - DNA, 837 bp, Glycine max
  Clone ID: PAT_MRT3847_71038C.1
gagatatgtcgtagtggaccccacaaaaccgcacttttttctatcttctcttacctcgagagcctgtccgaggctctgagaatccctaactccttctttttcttcttagattttcctttcagatttgattcagattatgctttttcttcttccatctccttgtgcaaattaagataaaataaaagaaagatattaggatgaagagagggaacgaggaagagaagttgggggggcccatgttcccaaggctgcatgtgaatgatgcagagaaaggagggccaagagcaccaccaaggaacaagatggctctttatgaacagttcagtattccatctcagaagttcaatccacgccttcttccacgaaaaccaaattcttcttctaacatagttcctcccccaacccagggaaatggccatgagagaagttatgtctacccagttcgtttctcttcacaaacacccactcatcgagctgaaagttatatttctcgccaatctgatgatggatcaaggtcgaacacttcattggtgcaacttgaacggagaaaaaaagtagatgatgacattcacgtgtacacttgctcggggattgatcaatctaatgataaaacgatggaaagtgtagatgggaaaaaattcactcctttcggtgctaggaatttttgttattcagttgctgtgcaaaatgatggtgacaaggatccaacacaatttagctcctgctcccttcctgttgatctgagaaaagatgtgaggaatgggaatgaggctaatccacatgtaagcttaagtagacggaaaccaaaaatgtcggtcaaaaacaattcaagtggag

SEQ ID NO: 110774 - DNA, 328 bp, Glycine max
  Clone ID: PAT_MRT3847_71039C.1
cttagaattcatctctagtgtgactcatactcaatttttataatttactactaatcattataaactcttagctatttcataatctggtagacagttgtttataataatacttattaacaattcaaattgttcatattgcacaaatattaatccactaccacttttccagaatgacataaaaaataataaaatcaatattaatatcaaactaaatgaataatattacatatctttttatacttataccaaatcccttcaaactcaatatacttcactatttattaaaatctacaaaacacctttcttaatgaatatacatcttttaact

SEQ ID NO: 110775 - DNA, 309 bp, Glycine max
  Clone ID: PAT_MRT3847_7103C.1
taccactttcctatccctcagctttactttttcaatacatttcacttacacatcgcttcgtttcattttaacgctggtcctacttacttctctaatctcatcacaaatcttccataacaactcatacaaataaactctcaattacccttttctcatctctcctatttatatataccctcactttcaaccacatcttacatctatcaaccaaaatctcacattcaccactcacacatgcttctaccctaatacctcaatttactacaccaaccaactcatatacatttcaaatcccaccatcttaacatt

SEQ ID NO: 110776 - DNA, 216 bp, Glycine max
  Clone ID: PAT_MRT3847_71040C.1
aattcgcggtctgacccacgcatacatacggccctagaagaggagagaaaggggaaggagagggaatgcaagacattgagtagtttcagtaagtgattggtgttcaattgatccttcataagtcatcatcagcagcagcatcatcaccgtagattgagaaatatgccgcttacacacatcgctatcgcgaaagcctgaagaggcgactcatcacca

SEQ ID NO: 110777 - DNA, 254 bp, Glycine max
  Clone ID: PAT_MRT3847_71041C.1
aggcttcaaaagaatctcactctctcatttttaaataaagagtgtataatttagcatacaacataatctttgtgaattgtctctatatgaccaattgcaattaattttatttagagctgtttaaatttttgagctcgccaggggatacttaactctattaaaagaaaaatcttagattcaaggggcataaatgcctatccttgtatatatattgatttctttggcttataattaacatacttttcatcaacttt

SEQ ID NO: 110778 - DNA, 385 bp, Glycine max
  Clone ID: PAT_MRT3847_71042C.1
cttcataaatggtgataatgattcaaaatgtaggtagcttagggaaataaaagtttgtccaaactgggtattctgcactattttaaaaaaacaaaaactttagtcattttttttttttgggttaggattagaggaaaaagcatgaagaacttgtactggttcaaagagatttctaacaacgtgagatcagggagaaggctttcactaggggaatacaagagagcagtatcatggtcaaagtatttgatctcttctggggcagccataaagggagaaggagaagaagaatggagtgctgatctgtcttaattgttcataaggtcaaaatttgcctctggaaagcatagcaggaattacagaggcatctacaagcacatggatgttg

SEQ ID NO: 110779 - DNA, 391 bp, Glycine max
  Clone ID: PAT_MRT3847_71043C.1
ggcgcgggatgattgagacctttcttgtgaaaatagttgccagcgtaggattgttacactaaataatttccttatgatgattagatgagcgcagagatgcatgaattgcatggcttccggaagtcaaaattgggttgcaaattttacaaaggcattctaccaagcgcgaaacaaggatatatgattatatgcgacgatgaccgataaagtttaatttgtaccaggaaatgtgcctacgcttggttcaattacttgaggagttaccctgtaaagactttgtttccactccagtagaaatgttctgacagacctgtttcacaatcgttacgggtggattgatcactgatccattatgcatcgtggcactggatttgaaaggttaagttttttt

SEQ ID NO: 110780 - DNA, 442 bp, Glycine max
  Clone ID: PAT_MRT3847_71044C.1
tacggctgcgagaagacgacagaagggattgctattttttagaatagtattacactaagttgttaaatattaaatgttggaacaaattaaagtaacattcttttatctttactctagttacccatgtatttccttcttattttgatctatataaaattccttatcttatagccattctatgtactagtacccccaatcccttaacaccatcagttccattaacttgaacaaatcatgtattttaataaaagaaattttttaaaatatccttctcttctttctaaacagtcattaaaatgataatcaaatatttattccataatacaatcatattggctcagacatttcatcaaacaggtcgaatgcatgtcggttaagtcacccaagtcctcttaagtaatcaacaacgaatggaataaaaaaaatttcagacttgttcaac

SEQ ID NO: 110781 - DNA, 650 bp, Glycine max
  unsure (1)..(650): unsure at all n locations
  Clone ID: PAT_MRT3847_71045C.1
tnntntgcacaaacagaggataagatggggctctgaaaacaataaaactgtcttctaacaatgaaatatttgttaatatctccctgttttcctgtttgtttttactccgcaatcattaactagcctacaaagaccatggggaccatgaactgtgctaaagagtgaactgttcatatcaccaagatgatgacgaaatattacacaagctcaatttgacatatctttaaactccatgccatgaataattttcttcgacttctatatagtactgcttgacagacactttacttttgactaagaggcacaactaaaattgagacttgtcaagactgtcaaagtagggatgatcaagtgctgccttggcagatattctctcagaaggattaaacttgagcattttcgtgagaaggtcgagaccatcaggtcctaaggaaggcacattctttgccaatcctcgtccatctccagacgcgtcttcttcagagccttgtacactttcccgtatgtcccttctcctacttgtccatttctcttctctctcagatcaaacttgtagagattagggttaaggatcaaacgcaacggacacttccagatctagccgcgccttttccttttcaaattctcttttcttccttccccttctgtcg

SEQ ID NO: 110782 - DNA, 554 bp, Glycine max
  Clone ID: PAT_MRT3847_71046C.1
cagtggcttccctagcatcttcttctgccagaccaaaatttccaaacttgactttgtttttgccggaaccctccatggtgtactcatcaatatcatcctcaaatataaaaggtggtgaagtcatgtcagctacttcagacccctcatatcatgtgtctcagtttggccaaaaccagcatcaagcaggtagtggggatgcacacaaaatgaacaacaacctaacaaattcgcggtccaagtctttcaacgagaattggttgagtgccactaggactcagcctttgaagtatggtggaagaggcaagctgtttaaaggtgtgaggcagagacactgggggaaatgggtagctgagattagattaccaacaaacaggacaagggtttggctagggactttcgactccgccgaagatgctgccatcgcatatgacacagcagcatacatactacgaggagaatatgctcaattgaacttcccagaactcagcatgtaattcaagcaaattctctgaaaggctaccactgctgcacttgtggaggcaaaatacaagcaa

SEQ ID NO: 110783 - DNA, 496 bp, Glycine max
  Clone ID: PAT_MRT3847_71047C.1
cgctgaaacacctttagtcactaacaagacaagaactctgcagacctcgttgatattcctcatgaaccagttcaccagggggtggtagccggctaaaaatcaaagttcgctcgggcacacccacaattcaggatttacggcttttacacaactcatcactctgttgaacatccatacctacatgaagtgcggaccactcttatgagacaaaatgcttggttatggtaaacccaaagcgggcggccttccaatgttttattccagacacacaaacaatattcatccgtgcctgcacctgaggtgatgcctcatgacgctgaactgacccgagacaatgtgatgacgggactctttatcctgggtgccaccaatgtctacattgttccccgtggaaccatttgagtcaacatactttgaattttctaccacgcccggttgacttgaccagtggggcatgggtgataaagaagaacgtaatgccacttcgttgctagca

SEQ ID NO: 110784 - DNA, 486 bp, Glycine max
  Clone ID: PAT_MRT3847_71048C.1
aattcggctcgagcggctcgagcggctcgagtacggctgcgagaagacaacagaaggggatgcattttcattacatattgttgtaatgcattttttactgcgcttttggtatcaaattccataccaacatataattcttgacccatattaaaatttgatcccatatctaaaccgcaaatttcttcttggtcaggatgactccaattaatattactatagtgagaagcataatcccaaaatggagtctgacttccacctacaaaaataatataccaaaaatttgtaattcaagggtagcgaattatttaaatattataatatttatttatatataacaataaatataccttctcccgattgcacaactgtaagtggttcgatcaaacgggcaacttcatcatctgtgtcagacatttcatcaatatcctcatcctcatctaatgagtcctcaacgtatgaattagatattaaataatcatcatcatc

SEQ ID NO: 110785 - DNA, 437 bp, Glycine max
  unsure (1)..(437): unsure at all n locations
  Clone ID: PAT_MRT3847_71049C.1
cacgcgtccgctctttccttcactctctctctcactgactctcaccgccggacctccattttccggcaacaccccctcgccggcgagatctgtccggcagtcaccatggtttccacacaaactctgcatctttgaaaaggaaagtagtttccacaactcattttcatttttcatccaaacaaacactctcaaacatggatcttctttttcttcattccttcttcttcttcttcttcttcttcacttcaaatgacgcaaatgccctcgatgccactattcctcgcgacgcattgtcccttctcagcttcaaacgcttcgtctcttccgacccttccaacctcctcgccgcctggtccaaccgcacttccccgaatctctgccgctggcgcgccgtcgcgtgcggcgtcgncggnagagtcaccgnnctnaacgngacc

SEQ ID NO: 110786 - DNA, 454 bp, Glycine max
  unsure (1)..(454): unsure at all n locations
  Clone ID: PAT_MRT3847_7104C.1
ggccgaccgggcgtacggtgggcatgnanaaacctgnattggacttctggcagcactacatcttcagcatattaatgcgcttagttcttcacagaagttaactgcgtgaagaagggccacaactgcgtgaagggtttatcttcaatggcatcaatccattgtcggcattctagtatatgtgaatatgagagctacaatttcgtagaaattgtgtcggtgtctaaatcgttgattgttttgcaaaattttgagaatgctagtttgttctgtagtacaaccgtccaagtatgaatgaatcaatacgtattgtatggtcctaaatccctataggtattgtctttttttgttcaatggccccaatatagtctcttttctagttagtttttcctggtctcagaatcatgttattagaaccatgtgattttgtaatagaataaaaagttaccaaaaattt

SEQ ID NO: 110787 - DNA, 321 bp, Glycine max
  Clone ID: PAT_MRT3847_71050C.1
ttttaacaccaactatgggtagttttatgtctgtttgcccttatgactggttgtgacaaatgcttaaacctctatgggagatgataacaccttttatggggaacccttaaccgtacttctgttacataaacaaaaaaccggtagtgttttctgttcatgccaaacctaaggttgttctagaggaccacctgcagtagatacacaaaccaaatagacactatgatggacgtattgcactgagtgatgaatgctaatgggaaccgtgacacgtacatgatctgttagtaaaccggatcaacgttccatagcgactgttgttat

SEQ ID NO: 110788 - DNA, 314 bp, Glycine max
  Clone ID: PAT_MRT3847_71051C.1
ctacagccgccaagagctgttttgctcccagtctctgaagacacacaagtggtagtggtacagacacaggatacatacaaactgatggtggaagccatgcgtgtcaactaagcagtggttacttacacttggagtcaagaccattctaatggaagcctttagtgcacatgcttagctctacatgttactgaggacccatggtatcgttgtgtgtacatcagacttcggtcgccacatttatagggttcacatcgctctgggagaatgttcaatcagcgaatgaatagatagcctatcgatacctgaacacactg

SEQ ID NO: 110789 - DNA, 564 bp, Glycine max
  Clone ID: PAT_MRT3847_71052C.1
acataccggttttgttttaaataggataaataaataatatatacaaaagaatactatacagaaaaagaaaataatatatacgaaataatggaggcagagttagtgttagcaacaacactaaaacattaaaagctcaataatcacagccgatggatcgatcataatcatggactgaagagtgattggttgcatccaatgactgacactgaacctagccagcaaaattccaccatttcttctttttctttgtatgagatgagggcaattctgaatctccttctggataaattgagttgtaatgcacctctgcccaaaagctcagaaatatcactctttcagacttctgtatctgtggaagaatctcgatgtaacatgtatccttaaaagacgtaataacaaaaattttgacgccataccaatctgcagcagcctgcaatgtgacatgatcaccccattcgccacttttgctcatatttctcaaatagtcactatacgccaagggaacataaccagcatacagatctgggtaatatttgagctgttgaataatttgctcccgcacaa

SEQ ID NO: 110790 - DNA, 382 bp, Glycine max
  Clone ID: PAT_MRT3847_71053C.1
gatctgtcggaagtcatgccatccaagaacacgcattggaattaaagaagtaattatagacatgttgagcaataataccatcaatacaatattgtaataatgtctctgaccaaagaaaatcgaaataacaaaatgaggggagaaagggagctgaattagaaaaccaaaaaaaagaaggaaagtagagaatgggtgaactctaattacaccttgtcatcgttctgactcgattcaacctctattgttggccttgttctacatagagaaatcatgaaaatccacatgagacccttcacgatcctgaccatcccaatagtgacaatgaggtaatacaaccaccattcaacaaaagtcaccaaggcccacatccatagttgctcac

SEQ ID NO: 110791 - DNA, 211 bp, Glycine max
  Clone ID: PAT_MRT3847_71054C.1
ggttttggggtgttttggctttttgttttgatgaggtgttccttttgggagtcttctgttagcccattttgtgtgcatggtttatttttgccctggggggaaaaagaaaaaacctctttttttgtttttggtgaattggaggacggggagaaccccgctggtttttgggggggaaatcccaagatggcccctgtgggggctctctgggaaa

SEQ ID NO: 110792 - DNA, 1054 bp, Glycine max
  Clone ID: PAT_MRT3847_71055C.1
tttacggctgcgagaagacgacagaagggggttgtcttgttggtaaagaaagagaagaaaagagtggaatcgaagacgaagacgaagatggaggacgcatcagcatcaaagttcatcccacaccaaatcggaggggtccaaaacgacgtgcttcgatttggtctccatggagtcaagagcgacatcgttggttcccaccctcctcaatcctcactccaatctacaaggagaatggatgaagcgatgaagaagcaatgcaaagttaacctgtacggaactgcttttcccctgaaggaggagcttgacaggcaaatcctgtctaggttccagcggcctcctggaccaattccatcttcaatgctgggtttggagactgttacaggaagtgttgatcactttggttttgaggattgtctaaatgacccccgtgagtcagagactttccggccattggacatgcatcatgggatggaagttcgccttggtctgtctaagggaccagtgtacccaagtattatataattaaatttgactgttattctagtgccagaaaacagtattttgtgatcgaagtttcttgctattcgttaaaatgaaagtgtccaaggagttggcatattttgtgatcaaagcttcttgttttcctaatgctctggatgctagaaatgttattgatccatataaacagagcatgtctttcaaattaaagcagaatttatgcatgaggcatttgagttgagcatccatccttattggattataatttgattccccccgtttccccttttcaatactcgatatggagggaattaatttattatgcctggaatggttgacgaatatctcgtgtttttgtgtgtcttcatctggatatggggtacaagtgttaaattagataacgattcatgtctaatgtagatccccgtatcctgctatttttcatctgctcatcttttgcaaattccattcttcctttgttcgaactcgggggtatttttatgcaggagttgtggctcggtagctacaaatccaaaatcaaaatgataattgtatg

SEQ ID NO: 110793 - DNA, 866 bp, Glycine max
  Clone ID: PAT_MRT3847_71056C.1
taccgctgcgagaagacgacagaagggggtcccacgcgcccggggttccgccctgtcgtcttgttggtaaagaaagaaagagaagagaagaatcgaagacgaagatggaggacgcatcagcatcaaagttcattccacaccaaatcggaggggtccaaaacgacgcgcttcgattcggtctccatggagtcaagagcgacatcgttggttctcaccctcttcaatcttcactccaatctacaaggagaatggatgaagcgatgaagaggcaatgcaaagttaacctgtacggaactgcttttcccatgaaggaggagcttgacaggcaaatcctgtccaggttccagcggcctcctggaccaattccttcttcaatgctgggtttggagactgttacaggaagtgttgatcactttggttttgaggattgtctaaatgacccccgtgagtcagagactttccggccattagacatgcatcatgggatggaagttcgccttggtctatctaagggaccagtgtacccaagtattatataattaaatttgactgttattctagtaccagaaaacagtattttgtgatcgaagcttcttgttattcattaaaatggaagtgtccgaggattctccatatgtagtcgtggacttgtgttttcctatgctttggatgctagaaatgttatggtccatataaacagagcatgtctttcaaattaaagcagaatttatgcatgaggcatttgagctgagcatcaaaaaaaaataaattaaaaaaaaaaaaaaaaaaaaaaccaattaaaataaaagatatgctctgaattaattgatcatgcctatttctagcatccagagcattaggaaaac

SEQ ID NO: 110794 - DNA, 377 bp, Glycine max
  Clone ID: PAT_MRT3847_71057C.1
attggcgttgtgattgcatggtacacttccaacataggggttcttcttctgaacaagtacttgctaagcaactacggctttaggttccccgtgttcctcaccacgtgtcacatgctggtgtgctcgctcttcagctacgttattgtttccgttacggaagctgttccgctgcagcgcgtgcggtccaggagccagttttggaggatcgtggcgctcggcgtcgttttctgcttctccgtcgtttgcgggaacgtgtcgctcaagtacattccggtgtcgtttaatcaggccatcggcgccaccacgccgttcttcaccgccgttttcgcttatgctgtcagcgccaagagggaggcttgggttacgtacgccacgct

SEQ ID NO: 110795 - DNA, 1280 bp, Glycine max
  Clone ID: PAT_MRT3847_71058C.1
ttaggaggaaaaaattcgttgacttatattttaatgttcaccacgaagatatagagtacacatgctttacatagaaatacagtgaagcctgagtggaattcaccaaattgctcaacctttatcaggaatttaataagagccgaaatataaggataaacgttgaactagaaaagttacacatttaatgagaggaacatgatacctacaattattcaaatgcaacgaggcaaccgctgcaattccaaggctgccagcccagctgttttggctaaagctgatccacctgaacttttgagttcagaaactatgacttcagttcttgaaatctcaggtttggatattgataatatcattgcatgcagtaagtattgcttgcaagcatagcctaaagcgtgaagcattcgctggatgatcaagtgaggaatgcctctactccagctctctaggatcacagtcaccttggggagattggttagtataccagtggtggcttctctaggagctgccttgagcagtaagacaacacattcagaagctatatcagcaatactggtttctgcagaggcactcaactctagtaagacaccgacattgcttccaaagtctgctatatcttttatgcattgctggggatcgacagcaccaccactcaactcaggaggacagtcacctaagagaattggttctgttgtgtagctgaagccttttgtgcagctgactgaacgtgctagaaaagccttacacagcccaagagttggatccagcaaatcttccataccctttgcatatacaaactcaagaaagttgccaatcctcctaaccacctttaactgagagagtaatttggactccatctcaggagcagaagccagagcaagacacagcttaacattattcacatttgcatttgagagatcacccagcaagaactcaaagcattgtgaaattgtcttcagatgtagaatgtcaggaattgtaataaaactgaactccattagcatgacaagaagcttctgtgcatagataggaataggatcttcatcttcaatcaaggttgggtagagaggaagaaaatgggtatttgatacgaatttcagatccgtcaatctttgctcttcttcaattggttcactcaaaagaatgatcatcacatcaaaaagaattttaaggcacaaaaatctggcatcaccgtccttgttacccttgtacagaactgtcagactagggaggatttcacgtatgaaaatgtcaggattgccaataatcaccggagattcctc

SEQ ID NO: 110796 - DNA, 699 bp, Glycine max
  Clone ID: PAT_MRT3847_71059C.1
atgcatccttcatccaatgtaaagctacctaagtcacctatcagtggtagttctcaaaatccacaaatttataatcaaccatcaactcccaccaactcaaacacatgttataggccttctttatccaatattgtgtcccttagcaatgaaattgaatcacccatcggtgtagacaatattcaactagacgaaggagatcaaaatttagatgggaaaaaaagccgtatcacattctcagttacagaagatgtgattcttgttcgatcgtggtttaatgtgtcaaaggatttaattataggagctaaccaaacatcaaagatctattctccagttcaaaagtttaacgggtgctacaaacaagcagataaacataggagaaatgaaagttcagagaaggatattttggatgatgctcatatgatttactcacaagacacaagtaaaaaatttgagattaagcatgtttggttgttgttaaaagatcaaccaaaattcgatacagaatttatgtcaaagtgtttaaaaataacaaaggtttctacttctagaaattactcatcgtcttctaacccaaagacacccgttgaagtcgaaaaatatgatacgccttcgccaatgtcttacccaattggacaaaaagtagcaaaaaagaagaacaaaggaaaagaatctatgcatgcatcatattgcataatatga

SEQ ID NO: 110797 - DNA, 460 bp, Glycine max
  unsure (1)..(460): unsure at all n locations
  Clone ID: PAT_MRT3847_7105C.1
gggctggttncttgcnaagntngnnnnncnggccggntnngncngganagggncagnanncncagannanaannncaancnggggccntnccngnanaanncggnanannaanaattnccanatnaatncaanagnnnntnnnancttcgannnnnanatnncaaaaatngncaaaaaaaaaanngcgcacannaaagncangaaanacgncaagananactaanncaggtagnnnnnngngttgcgnnngtannccaanagacntaaacnncnnacgngngnncccgngaaagnnccaganannnntgnngaatncaanacgnaanccaaagccaancngannnncgcnggtnnngganccncnncnnnnncanangagctnncgnncngtgncgnnngnnnnagannaaaanaanncangannaantntnaaagaacncnaannngangagancaaag

SEQ ID NO: 110798 - DNA, 728 bp, Glycine max
  unsure (1)..(728): unsure at all n locations
  Clone ID: PAT_MRT3847_71060C.1
cacgcgtccgccccttagacgacagacctacacctatttaacgcactctttaaacccacacacaaaaacgctcgtcgtctggcgtttgcttgcctctcttttttctttctcccatcttttacgttagtttcacgcttcaacatttttccatggaattcaaatatcgtgccgtccaagatcgaaggacaccgccgccgccgccgccgccgcaccctctttccaccggcacctacgtcttcgacagcccattacgagggtatgagttttcatcaggtggttatcccagcaatgtttcggcgcctagagttttcctaactccggtgccagtcaatgttggagaagcgttccggcgagaattggagaaaaagcaaatactgcgggagctggagaaggaagaaattaggagagagatacttgcccgcgagatggcacaacggcgagaactggaggaggaagtcatgagggaaataacagtcgagagagtacttggaatctcatttcgagaacaagtttcgatgtctttgaatcagaatcatagaatgaacaagccgatcaataacaacatatttggtggttcacaacctcgacttccccctcaaattgatatcaaacagagtaacaaagataaagtgatcatactggccggtgctcagtgctttgcttatctcaatcttgcaaacgcanagcagggaacctnctacattgatgacatcatcattctggattta

SEQ ID NO: 110799 - DNA, 157 bp, Glycine max
  Clone ID: PAT_MRT3847_71061C.1
aaatacatgtttgtgcatattaagaacaatttcttatacatgacaaaaggaatatctgcatacacagcatgtttattatataaaatgaaaatgcatcagtgtagtgtttattcctacttattatcatatttgttttattcaggggaatctttttata

SEQ ID NO: 110800 - DNA, 699 bp, Glycine max
  unsure (1)..(699): unsure at all n locations
  Clone ID: PAT_MRT3847_71062C.1
cggctcgagcggctcgagcggctcgagcggctcgaggtggagtctggatttaatgctccccaggagaacccgccaccatatgaagatgatacttctaatgctgaaagctcaacccaacattctgaatctatttctcaattagttaacttaaaccaaactgcatatgaaaatccaaatctgggaaccttgagtcatgaagaatatttcagagtcttggatgagatgaaaaccaagagctactcgtatgacactgataaggacacaaacatctatgatggaaacacctcatgtcttgcaacatgcacaaccagcgacatagatgatgatctttgtaagggttcttttacatatgaagctgaggaggtaggagggaatgaacttggttgtctcacatcatgtgttggaactcggtggttccaagccccctgactactctatggatccacagactatggtttagagggttgatcttctggtcttggaggtgtgtctttgccgagctcttaacattgaagccattgtttcctgggacaagtgatgtanaatcaagtcagcagaattggtaagtgttttggggaacattgatgaggaaacttggcctggttgtcacaaacttcctgatnatgggatcaatctcatttggtggagggggaaaatcctaagtgggcttgaagcatgcatgcccaaaatgcacccctg

SEQ ID NO: 110801 - DNA, 309 bp, Glycine max
  Clone ID: PAT_MRT3847_71063C.1
gtccataagtgactgtgtatacagcttcaagactgcctgtgagatagaatagagaacatccaggaggaagtttctacatccgtccacaacgtggcttagactgttcaaccaatctaatcaatcaagatggttattttttatttgtaaataacataaatgctagaatctatacagattatcatatagtcttgactaaatcatatggcattgattaaggcctcaactctcaggaatcatattaaatacaggtgtctaaaaaaaacgagattcatattgtttacaaatgaaaaattaccatcttgattgatt

SEQ ID NO: 110802 - DNA, 523 bp, Glycine max
  Clone ID: PAT_MRT3847_71064C.1
ttcggctcgaggtgagaaagagatggcaattgggttcatggaggtgcagcttgtgaaagcaaaggagttgtgtgacactgatttctttggtagtatggacccgtatgttgtgatacaatacaacggccaagagcaaaggagtagtgttgctaagggacagggcaataatccggtatggaatgagaaatttgtgttcaaggtagaatatcctacactgagtaattcatacaagattatcttaaaaatcatggacaaggatcttttatctgcagatgactttgttggtcaagccatagtctatgtggaagatttattagccataggggtagaggatggtgcggctgagctacaacctctaaagtacagagtaattcgtgcagatcaatcttattgtggagaaattgatcttggtataacttttaaggtggaagaagagttcaatggagaagctaaacgaggatcgaaggacagtaaatagtatttgcaaatacagttggccaacatgaatatcaattgatttcaa

SEQ ID NO: 110803 - DNA, 1253 bp, Glycine max
  Clone ID: PAT_MRT3847_71065C.1
agaaaagtggcatccaaactaacatgtacatcatgatactcttctctgttcatttccatgcttcacccttcatccttcatttttcacctactaccacaaggtccttaaaccccactcccattccataaagcaagccacttcattgaactccaagtttctctctatctttatccatgcttgttccgaattcatggattgatttgacaaatgtcttcaactacaagatactcaccccaacatacgtagagagccaggttatttaactttttgttaccattcattctactaggtgatcattgatgatccaaatttcaacaccaactctttttctctcgtgtttcctaattttggaaaccttctggctggttgcaaagcaaaattccaaggcataacaaaggttgaaacttggaatggattcattcaatcagagtgttcagaattccagcttcaggtacaatccaaatttgaacacaaggacacatgcagatgaagaagctgagttctcaggaattcttgatatctttgtccatcatgccaggaatattcataacatatgcatctatgacaaccaggatgtctatgctaagttctctctcacttacaaccctgatgagactctctctacaagaatcatcaatggaggtggcaaaaacccaacattcaatgaaaacttgaggttgaagatcacccaaatgaatgctgttctgaaatgtgaagtttggatgtttagtaggtcaaggattcacatggaagaccagcttttggggtttgctttggtcccaatttcacaagttgttggcaaaggaaaggtgactgaagattacagcctttcctccactgatcttttccactctcctgcaggaactgtccaactaacattgtctttggacccctctttggcaatcaactcctcagtgaatttgatacctgaatcagcaaagaactcatcaatatcatcagaagttattttgcttgatagaaagatctcagaagttatgttggacccagttgagtatgctagaattgagtttcctgacatcagtgtggtgaaggagaatcagcaaatggtatctgagtacttcaatttggcttctcaaggtactacttctgctccttcaaagtccaacattggagggtcactaccatttcttcaccttggtgcatctcctcaacttgatgattatgagatgactatcatttcctcactgagaatatgtatggccatttttcaatgagagcattcagactcttgc

SEQ ID NO: 110804 - DNA, 679 bp, Glycine max
  Clone ID: PAT_MRT3847_71066C.1
ggtcagcgtcaaaaccctgtctaagctccccaaaacgcaaaacccgcggcaccatctcattttcatttcccgcccaacatggcagacaacaaaaagcgccggcgaaaggaccccgccggcgacgagctccccttcaaaaacaagctgaaaccggactccgcaatcatggaaaccctaaagcagttctccgcctcatcctcctcctcctccgcctccgtctcacaaaccctaaccctccaggacctctccctccccttccgctgccgcgaggtggcggacctctccctctcctccgtgcagtccaacatcgagtccctcattctccggatcgcccactccatcctctctggccacggcttctccttcgacgtcccctcccgctccgccgccaaccagctctacgtccccgagctcgaccgcatcgtcctcaaggacaaatcctctcttcgccccttcgcgaatatctccaccgtgcggaagtccgccatcaccgcccgcattctgcagctcatccaccagctttgcctcaagggcatccacgtcaccaagcgtgacctcttctacaccgacgtcaaactcttccaggaccagatccatctgatgctgtcctggatgatgtgtcctgcatgctggggggcactgggtccagcctcaatgttgtggctgcagaaaaaggggt

SEQ ID NO: 110805 - DNA, 752 bp, Glycine max
  unsure (1)..(752): unsure at all n locations
  Clone ID: PAT_MRT3847_71067C.1
ccgaccccgcgtccgtaaaattccctacatgatgcaatacttatgcattacggactaaggattctgcaacattatgcagcataagactgcactttggatattagggttcgtcattcactttggatatgcagtcaaaggctcatcgtgactcatgaaggattgaaagggggtgtgtggttctatactttggaaatcaaacataaaacaaaaacacatttgacccctctttatgggtcaagttggaaaaaaaatcacctacaacaactacaccaagaaaataattggaaaaaagcacaaccaaaatcaacatatatataaaaaacgactcaggtttgaacgcatctgaatgagaacggagaataacataccaaatagtagagcaattttcgattttgcaagttattgcacgacactaaaggaggaatcacggtgcgtacaaacgggtggaggcgctctctctcacacacacgtttggcaagcacgagcagtctgaactcaatgattgggtgctctaagtagaactcaacatggccattgatttctggcccaataagaagacatttggatatgcacctcctaactttgtatcttgcaactcccattttatttgtgtggataaaaatatctctttcagtaggaatctccattccgaaaggtattttttaccttttggaatagttagttcaaaataggttttaggagcacttatccctattttggaantagttttttaggagcacttatccctattt

SEQ ID NO: 110806 - DNA, 489 bp, Glycine max
  Clone ID: PAT_MRT3847_71068C.1
ttggaaagctggtggtacttgacctatttgctgaagtaaaacccatttgggtaacctcagaacagttttatggagttccctacatctggtgtatgctgcacaattttgcaggaaacattgagatgtatgggatattagacgcaatagcatctggcccaattgatgcacgcacaagtaataactcaacaatggttggagttggaatgtctatggaaggtatagaacagaatcccattgtctatgatttgatgtcagaaatggcatttcagcacaagaaagttgatgttaaggcatgggttgatatgtattcaactagacgatatggacagacacttcctttaatacaagagggatggaacgtcttatatcacaccatttacaattgcactgatggagcatatgacaaaaacagagatgtcatcgtagcattcccagatgttgacccttccttaatttcagtacagcatgagcagtctcaccacaatgaca

SEQ ID NO: 110807 - DNA, 2312 bp, Glycine max
  Clone ID: PAT_MRT3847_71069C.1
ctcgaccttgcatcggctcgagcgataccttggtagagagggagtgaattaggaattaggaaacgttcggaattgggtagtaaattaatgggttgagccgagttggttcgtggaaggaagaaataaagaaatcaacaaaggcagacaaagagcttaggaaaagaagaataagaatggtgtggtgagaaggatgaagggccgttcggaaagggaaaagacgaaagttgtgattaggcatttgcccccttctctcactcaatccgatctcttccaacacatcgattctcacttcgcttctcgctacaattggttctccttccgtcccagcaacaatactcacaagcgtcagacgcctaccctagcgttcataagcttcaagtgtccccctgaatttatcgggttcgccgagttctttgatggacaggtttttgttaacgagcgaggtgcccagcataaagtgatagttgagtatgcaccttctcagcgtgttccaaagccaagtgccaaaaaagatggacgtgaagggactatattcaaagatccagattatcttgagttcctcaaactaattgcaaaacctcaagagcatcttcctagtgcagagatacaattggaaagaaaagaatctgagcaagttggggccaacaaggaaacacctattgtcacacccctgatggaatatattcgtcagaaacgtgctgttgacagtggtatgcaggcttcatcagcagtggcaaaagtttgcagaagatctagagctgctttgcctggtaagcctggctcaggcaatattaaacgtggatctgaaaagaaaaagtatgttcagaaggacaatgccaagagtgctactcgcaaagagtcaaaaaacatgtcagcctttattgtggtcccccggcgagacgatcaatttgctgaatcaagtataaaaggaatttctgacattaaaactttgcatggcgttgaaggttccatttctggaattccactgacttctgagtcaggaaagaaaaaattccttcttcttaaagggaaacagcaggacattcccagtgccactgaggccacagtaaaacagcaaaacgtacaatctggaaattctcctatttcaactcctgcaaaacagaaccagagacgtgaagctagtggaagattgattaggagcatacttctaaataatgaagctcgtcaaagtcagtctacaactggtacacaacataaaattcaaattttaagttctgagaatgggcagcgaccctctcgtcgttttggttcaaggtctgggttaaataatcaagtctcaaatcatgatgctgcacaaattaattccgaaggggattctagaagagcattggacgaaaagttcataaaaagggatcttcatggtttggggagcagtgccaaaacagaaaaacgtactagaaacaaggatagacctgatcgaggtgtttggacaccccttcgtcgttctgatgtttcgcatgctggtaacgactattcatcatcctcattggcacagcctactcagtcaaatcctgaatctgctgaaggagaagtaaaagaaaatgttccttctggaaacaggggaggtgaattctctgcttctgcaggtggacacggtggcaatccttcaattgagaatggttctcaaagaaattttattcatcatggagcttcctatgtagtgaaggatgatggtgcagtcagtagtataagcaaagggaaaccttccaagaaaagtgttgggcatagtgctcacgagaagcaagtctgggtccataaatcttcttcagggtcataaaatatctgcgtcagggcatcattcctgctatggtctccgtataggacgtaatcctcaactaattcaggtcaacctgagtctgagcgacttgaaagagcctctgcacaataaagggaatgcaaagttacagacctcgttgacatgattattactgaaaacagattggcattgttaaccatgctgatggatttagacccattacggttcgtgtctccttaaattgaatatttcagtgttgggaaatattgtgtttgggatgtaactgtaaagttcttggtacataacatgggatagtatgttggaaagagtgaagaatcttgtcttgttcagtggacaagtagttaaataatgttttgtattgaaggcttatactttagcgtgcacatgtccgtgttattgtaaggatattagaacgtctttggtcctcaagaatcatccttattccctactctttccatgaatgtggatattttttttttttagataaaggaggaccagaaaatttgcccgatgg

SEQ ID NO: 110808 - DNA, 366 bp, Glycine max
  Clone ID: PAT_MRT3847_7106C.1
ccgatctaaaaaggattctacccgccgctcgatgggaattgcgccttaaggcgtcttgtaaggcttatcccgcttaccaaggtcaccaaccgcacctgcctttggggggcccaagccccctacttgtggtccgcaaaacgaccggcggcccacttctttcttctaaccccgattcttacttaaaagccttcaatcattattcaacccaccggaacttccccccaattgcttttcaaccaaaccccaagaacaattgggccaattaaccggttcttttgtacctaggtgaaataccaatgccaaccttgcattaattagggaaaacttaccttggttaacaacggtttaaaccaacttaactttcct

SEQ ID NO: 110809 - DNA, 299 bp, Glycine max
  Clone ID: PAT_MRT3847_71070C.1
cagagaatatactaatgtttgtggattatgatattagacaataaaaacttggggtgacagttccatcctggtaaatccttgtcctaacaactaaatttgactaaaaactacaaagcattacattaggccggaagataacaattttttcatactattatacttttcattccctcttattagaaggcggttgcgcagactcctcatttttatcatcaaccccctcatttttattatttcaattatcatcatcttaaccattatcatatctctcgtgatcatttccatcgtttttatcactt

SEQ ID NO: 110810 - DNA, 282 bp, Glycine max
  Clone ID: PAT_MRT3847_71071C.1
actgggtcttcctgattgttgaaccctgacccgaagtctctgggctagctactccccccagctcctagttgatagacatgggggttctggaccagatgatcccttccaatgtggtgctagcaggcaggatcccttctccacctccaaaggccctaaagggtggtgagagatcaccaccttccctcggcctgacatccctcccatcccatatttgtccaagtgttcctgcttctaacagacttggttcttagaatggagctgtgtatctacactccagtttgt

SEQ ID NO: 110811 - DNA, 293 bp, Glycine max
  Clone ID: PAT_MRT3847_71072C.1
cacaaaaagtcccttccggggttattgaaaatttttaatccacatgaccaaaaaaaccacatcactatagagtggtatttttttaaacagaacctaattaaaaaatactgacaacagacgaaattactaaaagtaaaataaaatccttcggactactgttacattcactagacataaaatgggcaaaaacttgttgactatacccttttagaattaaaaaacaataacccttgttctcaattttataaacttaacctacacatattaccacgctttattttcgatcctatatc

SEQ ID NO: 110812 - DNA, 457 bp, Glycine max
  unsure (1)..(457): unsure at all n locations
  Clone ID: PAT_MRT3847_71073C.1
acggctgcgagaagacgacagaagggcagctccttttgttgatgttgcttattttctataaccaacaaatatgaaaagtcaataataaaaataaacatataatatataatttttatgttagcaaaaggttggtgacattgtcatgtatacctgtcctttctcagaacaccaataatgtactaaatcacgatattgagaaggatcaacccttggatctgggatatgagcaaccatttcctccttagttttgccctcatcatatccttttgatttcagttcatatttaaattgcctccattttagactcatgtcatcaatcaatattttctttatttgttcagttaattcaggaacaaattgaaacttactctcttatgagtatcattaacaaacaaaaaagatcattttgttagacattagaagacatanaaatttacaagaagcaagatgaaacaac

SEQ ID NO: 110813 - DNA, 323 bp, Glycine max
  Clone ID: PAT_MRT3847_71074C.1
gacccacgcgttcgttcacgctttcgttcgggctttaccaggacccccaatggtcttctatcattggaagggtttaccctgcaaggtgaagtttatcgggactaagttattggcgaaaaaggtcctcccgttgaaattcctttcacaagggaagagttcttaggatcctgaggccaaacgttggaaaattattttttttaagatgcacccgttttagcttttgctgtggggaagtttccctgggggcggctttaaggggaaacccaagaaacaaaggggtgggttcctacccccattgttgggtttggccaaggaaaaccaag

SEQ ID NO: 110814 - DNA, 408 bp, Glycine max
  Clone ID: PAT_MRT3847_71075C.1
gacgggcccggatacgtcctgaaggaccatgttaccacattcttcttttaaccattcatgtgacaaaggaggcagccgtacccgctatgcaattgtcccaaatactgctccgtcgtaccttatggggcggcgacgtgtcaacccatgacaaccactcattcatggccgaacctgtaaacagcagccgagacttcatacggctcgcttacattccccaccggcagaaatatcccccgcggagaggagagcacatacaagcttccctccatgggctaggccgtgctctacgatgttaacaccggcacctctgacataggagaaacacttcgagcgcctcctgaaaaccctagatccacgtatcagctacatggtcaccgacggtgatcatctggagcacccttcactcgg

SEQ ID NO: 110815 - DNA, 1187 bp, Glycine max
  Clone ID: PAT_MRT3847_71076C.1
gattttggcatccgttatggcttccagtggccagctcttatttatcgtctatcaaaacaacccggtgggcctcccaagctgcgcattacagggatagagctcccacaacctggtttcaggccagcagagagagtccaggagacggggcttcgacttacaaggtattgtgatcgctttaatgttccatttgagttcaatgccattgcacagaaatgggaaactatcaaaattgaggacttgaagataaaggaaaatgaacttcttgttgcgaatgctatgtttcgatttcaaaatctacttgatgagacagttgtggtgaatagtccccgggatgctgttttaaagttaataaggaaggcaaatcctgctatctttttacatgctaatgtcaatgggagctataatgctccattctttgtgacacggttccgggaggcccttttccattattctactttgtttgatgtgcttgataccaatgttgcttgtgaagatccaatgaggttgatgtttgagagagagttctttgggcggcaggtaatgaatattgtagcttgtgagggttgtgagagggttgagaggcctgagacatacaagcaatggcaggttaggaacatgagagctggatttaaacaattgcccttggataaacatctcattaacaaattaagatgcaagttgaaagatgcgtaccacagtgatttcatgcttcttgaagatgacaactacatgctgcaaggttggaagggccgagtagtttatgcttcctcctgttgggtgcctgcataggccttgacaatgttcttcccaaggtagttaattaggagaagcgtttcatgagttgtaggggagacatggacttccaaaattcttgtggttgacatattctagaagctgatccctgctaatgtaatgacatagcatagttcaatttcagttctcagaatatttttaaattggtcaagtcataagtgtgtgtataatataactgataactggtgctgtgtggatgacatatttcaatgttgaacaattccttcttgagttcttctgataggcactcatgagcagcagaatcctgagattgtgagattttaggtctaaaatttgaactggtttctaagtttgtatattaagttaatattttattctgttcaattaattatttagttaaagggaaaattact

SEQ ID NO: 110816 - DNA, 270 bp, Glycine max
  Clone ID: PAT_MRT3847_71077C.1
acgcgcacgcttagggtcaagcatctatcgtctgatgctctcttcaactcgatcctattgctactaggcatgctcctgttgatacctaggacggattctcaacatgatgcgatgcaatttttgaatgaatggatgacttattgactcatgcgtacaaacatcaggcagctatatcaagtttactcaaggttgcaagaatatactggacatgatcaatgatgtactaatcttgataagtatgtgcgaatgctgcatacgaccagcgtgtca

SEQ ID NO: 110817 - DNA, 163 bp, Glycine max
  Clone ID: PAT_MRT3847_71078C.1
caacggggggggggtgagcttacaatcgtacttgccgcttccttaatcagaagacgcgcaactcacagcgagtgccggccccccggcatgggtcgattgctcatgcggaggggggggatatgctattatgctttggcctacgtaaggacacctgctagctggc

SEQ ID NO: 110818 - DNA, 200 bp, Glycine max
  Clone ID: PAT_MRT3847_71079C.1
ttattgaacaatgacattttaattggtgattatgagtttactctatgtacttttgcatcatttattattgaaaaggacacccgttatttttttaagtttgggccgggcggtgttgagtgaactaagttactttttttactttggcgaagctagaaggggaagctccttgcctccttccctttaaagcgtttttggggggg

SEQ ID NO: 110819 - DNA, 444 bp, Glycine max
  Clone ID: PAT_MRT3847_7107C.1
tggaattagagttagtatttgaatatgcacatgttcttttgcaaggttttataaacctctacttcttacttcggggtttatttcctctctttttgtaattttttatttgggtcttttcgatcactttgattgaaagacccaaataaaaaattaaaaaaagagaggaaatatttgttgatgaaattcaaatccacaacctctcccagctattcctttcatacctttttaactactagatcaatcttatatatccgcatggcaatgatccttggttcatatattttcaagattcttataaatcattatccaaagagattgtttatttacatatctgattagtccataaaaaaatggtcaaggagtgtcaacatatgttgtagggtattgcaatgacacaaaggttattggctctgcagtatgaggattgcacatttgaatgggttt

SEQ ID NO: 110820 - DNA, 409 bp, Glycine max
  unsure (1)..(409): unsure at all n locations
  Clone ID: PAT_MRT3847_71080C.1
cttttgcctcaacgcttttttaactcctttcgcttttccattccaacctctttcacacttcagatctgtttcttcatcgaaattttgaattggatgcttaggcctacgctccaccgtacgatcttgagcacttagccacattgatccttctttgttcgttttatttaggattgtagctaattagctgtttgattttctctctctctctctctctctaggttnggccgtcgattaatatctacgaatttttcactttagtttcgatttttttttcatataaaaggatactaatcgtggagcatgagctctgtaatgaacactaagacatcaattacaagctcgactgtatttcgctcctcaagagtgaggaaatgtacaagttaagacaataaggatgtatgtatctatg

SEQ ID NO: 110821 - DNA, 340 bp, Glycine max
  Clone ID: PAT_MRT3847_71081C.1
tgctagaagacgacggcagaagatgacctctccaatttgcaaaaaccaattaccacctggatatcacttaactcctattaaactcacactcaccccatataaaccctccttacacaactcaaatcttcctatctgaacaccttttagcactatcattcgaataacctttacacatcaagattcaaacttactcactaagttacccgttcaaatttcaactgccttcaatcctttccctatctgcatactctaatcaatacgtcaccacaaaaagggacaatgttcataaaatcatacaattgcataccttgtttgaatcaccttaaaacctttaccctat

SEQ ID NO: 110822 - DNA, 383 bp, Glycine max
  Clone ID: PAT_MRT3847_71082C.1
caactctccccaaccatttcttttcatctgcacattcctattctattttctcactcaacaggatctaacatgtttagatccactagtactcgaggagggccttccaagtatgagagattagaaaaagaacttgctgacaatggaacttcaaatgaggagtttaagaggagcacaagtttgccttctcgggctatgggttcaacctttcgagacatcaatctacagagaaaccccacaaaaaatgccaatagtaaacctaaggagaagaagagtcacccactcttcagcttctttgatcttcccggaagaagaaaacaacagctaggcctgaatttgcgaggtatcttgagtatgtgaaggaaggaggcatgtgggatttgaat

SEQ ID NO: 110823 - DNA, 353 bp, Glycine max
  Clone ID: PAT_MRT3847_71083C.1
acggctgcgaggacaacacaaaggggggacaggatagtctgcttcgaggacttttctcgtatcgatggagctgaatgagcgatcatgatgatgacggggttgtgatagcgatgatgttggatgatgatcatgatcatgctatgactgatgagcgtgatagtatcttttagacggactgcaacttcataactgattgtacttcccttttgtcatgagcatccggaagaattatcatggagatgaatctaggagaaaaatgggagtataattctgatggcaaaagtggaacacactgagatattgagatagaaacgcctatctgtgtcaagccaaagaccttgaaagctagagat

SEQ ID NO: 110824 - DNA, 974 bp, Glycine max
  Clone ID: PAT_MRT3847_71084C.1
gggtaacccggggttcaattctgaaaaggaaaaaaatacaaaacaaaaattgaaaattccaagttggggttctcacgatttcgattcaccctttctcccacacactccgattctccttgtaaacagcggtgccagaagttgatataggatgggggcaatgatgtcgagattctggttcatgttattccctgcaaaagagtataagattgttgttgttggattggataacgctggaaaaaccactaccctttataaattgcatctgggtgaggttgtaactaccaaccctactgttggtagcaacgtcgaagagctcgtctacaagaatatacgatttgaggtctgggatcttggtggacaagaaagattgaggacatcatgggcaacatattaccgaggaacgcatgctgttattgcggtgatagacagcagtgatagagccaggatctctatcataaaggatgaactttttaggttgttggggcatgaagatttacaacattctgtcattcttgtcttcgctaataaacaagatatcaaggatgctatgactcctgctgagatcactgatgcactatcccttcacagcatcaaggatcatgattggcatatacaagcttgctgtgccctatcaggagaagggttgtatgatggtcttggatggattgctcagcgagtaactggcaaagccccaacatgatgttgtgttgctgaaaacctgggatgagattcatttttcatgtattgaatttatatgacgagggacaaaaactctatgtatcatttatacttaaaagagtcaagcaaagataatgtgtttgatttgctatgaggaaaaagattattcaacaaagtgattaaaagacattttttccccccgctttgcaatgaaaaaaaattatatatacatatctcttgtcatcatgggttggtcaaagagtcaagcaaagataatgtgtttgatttgctatgaa

SEQ ID NO: 110825 - DNA, 1152 bp, Glycine max
  Clone ID: PAT_MRT3847_71085C.1
ccacgcgtccggaaaacattgaaattccaagttggggttctcacgatttcgattaaccctttctcccacaaactccgattctccttgtaaacagcggtgccaggttcgatctttgcgttcttcatgtttttttttgcacgttttatcgatctgctaacttgacatttgatccaacgcaagttcgttgcttttttgattgaaaatcagattttgagataccctttgtgttcccaattaatgggttttttctggtgattgtatgggtgttaatttagaagttgatataggatgggggcaatgatgtcgagattctggttcatgttattccctgcaaaagagtataagattgttgttgttggattggataacgctggaaaaaccactaccctttataaattgcatctgggtgaggttgtaactaccaaccctactgttggtagcaacgtcgacgagttcgtctacaagaatatttttttttctctggggatctggtttgtgaatgtttttaaattggtattgttcgaagctttactactgtgcagactcattacactttgtcatcgttcaggtctgggatcttggcggacaagaaagactgaggacatcatgggcaacatattaccgaggaacgcatgctgttattgcggtgattgacagcagtgatagagccaggatctctatcataaaggatgaactttttaggttgctggggcatgaagatttacaacattctgtcattcttgtctttgctaataaacaagatatcaaggatgctatgactcctgctgagatcactgatgcactatcccttcacagcatcaaggatcatgattggcatatacaagcttgctgtgccctatcaggagaagggttgtatgatggtcttggatggattgcccagcgagtaactggcaaagccccaacatgatgtttgtgttgctgaaaacctgggatgagattcatttttcatgtattgaatttatgtcataagtgacacattctatgtatcatttatacttaaaaaagccaagctagattgtagattcttgcagtttcacttttgtgtaatcgagcagatcatttaccaaagatttatagacatgccttattccaaaaaaaaaaaaaaaaaaaaagaaaaaaaaagaaaggaag

SEQ ID NO: 110826 - DNA, 350 bp, Glycine max
  Clone ID: PAT_MRT3847_71086C.1
cgggattatatttgagttcaaacaaatcacagccatggccaactctaacttctctattgttctctctgtctccctagccttctttttggtgctacttaccaaggcacactcgaccgataccgtttccttcaacttcaacaagttcaacccattccaaccaaacattatgctccaataagatgctagtatttcatcctctggggtgttacaactcaccatagttggcagcaatcgtgtgcccacctcaggatcactcggtcatgccctttactccgcttccaatccaaattttggacatcgaaactcgcaatgtatccaacttttctacatcccattaaattcaacatttt

SEQ ID NO: 110827 - DNA, 132 bp, Glycine max
  Clone ID: PAT_MRT3847_71087C.1
caagaaggcggggaatacacaaagaagatctatcctggcggcaaatgtatgttagacctagaagattcagaaaaggtgctcggcgtatgataacactttcaataaaactgagtttcaacaaaccatggaatt

SEQ ID NO: 110828 - DNA, 374 bp, Glycine max
  Clone ID: PAT_MRT3847_71088C.1
cacaaacaacgttagttactactaactagtacgtaccactttcttctagtaactactaactaccccttttgcacaccttgtctcattctctcatacaacgaaactttcgaccaggtaacatgttttccatcaatcatttctccgccccagatgcgaactcgccggggtcggggtcaggaacttcccgaccggtaccggcgctgtcggacgaggattattttctggcggcgagcaatcccaagaaacgcgccgggaggaagaagttccgggagacgcgccacccggtgtaccgcggcgtgaggaggagggactcaggcaagtgggtgtgcgaggtgcgcgagcccaacaagaagtccaggatttggctcgggacc

SEQ ID NO: 110829 - DNA, 383 bp, Glycine max
  Clone ID: PAT_MRT3847_71089C.1
aaaaaaggaatcccggaacacagtttttgatctaaatggggaaaaaaaactttcaagggttaattggtaacaaaacccaaatggggggttacatcaaaagttgaccaaagcagggaaaagcgtgaaaaagggaaagcctcgaaggaagtaaaagtagcaccagttgttggtgttttgtctgcccttgggggctttgattccccggggggttttgaggctttccataactacatcccccttatacaaacaaaaatgggtcatttttcggggggcatcgttgccgaaaaaaacgtttcccataccttcgtttcacccacagggggcactatgaaccctttagctttggggacataaaacactaaaacaacttttttattattttt

SEQ ID NO: 110830 - DNA, 460 bp, Glycine max
  Clone ID: PAT_MRT3847_7108C.1
ataaacattatcttattaaatgaaacaaaaaaaatcaaaatttacatataaaaatgaaaaaaaaatagtgtttttttaatattaaaaaagataaccgaggaagtatattttatgctagtgagagttggacaaaaaagagaagacgtacgggtaagggtggattgaaggctagtaggtcgctttggagaacgccaatgctaacggacaaaatcacataattggtctcgtaaacgcaaccatcctccgttttcaccgtaacaccactttttgaatactgcaattcccggacgaccttgttgagtttgagacgattgtccaagattcttcccttggatgtgaagagaaattcttcagccattttgtacagcaagtaatcgtaccctctttcatccgcaacaaaatattctctctccccgaagtctacgtaggtggatattggttctacctcagccatttcgaa

SEQ ID NO: 110831 - DNA, 339 bp, Glycine max
  Clone ID: PAT_MRT3847_71090C.1
aaccaacaaatgtacagcaaattcaagttacaatttatctgccacaaaacaacttagcgtttcgaaatgcgcattgattccaagtggagcagaaaggctcatcaatgtgtaatttgatgttcatctaacctatctaaaaacagacttaaagtgcaattaagtagaccataccttgcaccatagacttcaaaagtagtgcataataacttcatgagcacgcatcatccttgatcaagattcaaaactgtcatcatgttcctgaatttttgcaccacggcgcttttttctcaatatactcaaccttctcacatgaacaccaaaaaaccttcccttcaaagc

SEQ ID NO: 110832 - DNA, 437 bp, Glycine max
  unsure (1)..(437): unsure at all n locations
  Clone ID: PAT_MRT3847_71091C.1
ttttntttttttttttttttttttttttttttttttttttttttnnnttttttttttttttttttggggcccaaactatttttagctttaacaaaactttaggggtatagcgggggtcccccttcaataatccccggcaaaaaatttcccttgtttttggggcccccaaaaaaattttttgtttgaaaaaaaaaaaaaaaaccttttttttctttacaaaaaaaaaacaacccttgctttcccaatgggaaaacaatggtgctaacaaaaaaaatcaaccccggggggggggtaaaaaattaattgccaattgccccagtttcctgaaaaaacctacaaacataccattgcttagccaaaagggaaaaggaaaatttttcccgggggggtgggaaaaaacacaactgggggaaactaccccatttttggtaaacttt

SEQ ID NO: 110833 - DNA, 750 bp, Glycine max
  Clone ID: PAT_MRT3847_71092C.1
cccacgcgtccgcttgaatccctccctctctctctctctctctctgactctgtcactcctctatttctctcttctccacgtctccaaattcttaatgtttatggaatggagtctcactcttgattcctctcactcttcctcctccaccactaaccacaacatgttccccactttaggatttccggtcaaccttagcccctcctccgatcacaatcggacggtcctcggtgaagttgacttcttctccggtgctagaaacatctcatcatctcacaccaacaacgatcatggaaccccccttaagtgtgatccccatgtaaatactggtttgcaacttctcaccgctaacgctggaagtgatcagtcaaccgtggatgatggggcttcatcggatgctgaagataagcttgtcaagatcactgagctggcacgattgaaagaggaccttcggagcatgaatgcagagaaccaaaagctgaaggagatgctcagccatgtcagcagtaactacgcgaacttgcaaatgcatcttgcagcagtactgcaacagcaacataaccaacgcactgagaacacggaacaagaggttgttcaaggaaaattagctgatgagagaaagcatggagttggcggatgaacggggcctagacaattcctgagtttagttccaagtgaaatagatgatcaattatctaattcttctttccgtgaaaggacttgatcaaccacaccttccagcaattaaaatga

SEQ ID NO: 110834 - DNA, 261 bp, Glycine max
  Clone ID: PAT_MRT3847_71093C.1
ggcctcttcaagaacggtgaggattacaggagaaagaccacttcaaggcaacaaatggcacaaaatggaccaatcatatcccattcctgactattgtgagcctgaggcacttcagggcaagtttgagattccaattctcacccttacaatgccaaagaagatcacttctcaagttgctcctaaacaacaagaagtgggaacatcccaagagaaaggtgaagcaaagcccacagaaaatgtacaagacaccactccaccaca

SEQ ID NO: 110835 - DNA, 804 bp, Glycine max
  Clone ID: PAT_MRT3847_71094C.1
aattcggctcgagggaagtacctaatctttgggctagcttatggttctgggtttttctgttgtttaccttggtataggtgcatggaaggctgataatacagacatgtaccataaggttattattttagatacagggtgcgtaacccaagatcttgaatgtcgatgatggcgtcctcatcctcttccttgtcaccgtctcaggcatggcaaccgtgatggtttccttcacgcattaagctcgacgatgaaaaattcctctacgaacgtgctaaatgttgaggccacattcaatatctgaatgagtttcttatttttgtttcagatttgagcatggcgatgtgttccaaatctgagcttgttttttttctttttcagatctgagtttttcttcttcttcagatctagggttatgttttggggcgtattaagaaatgtgcgtttgagagaaataaccagatccaaggtaaagaaaacaacaagaaccaccatcagatctaaaaacgaggtggtctagtttcgatacggggatgccgggagcgagtggttcttctacattgacagcggcgacagtctttcaggctgtgacgaagggttttgcgatgatgctgacaaggtgatgttggagtgggaggggtgattgcaaaccgaaagaaaaagctagtgagagagaaaaaaaataaggaaaataatatatttttttaatgttatctgatgtaagtaattttatcgtaatattaattgttgattttaatctcaatatatctaacagaaaaaaaaaataaaaaaaattctttccctgaaaaa

SEQ ID NO: 110836 - DNA, 1406 bp, Glycine max
  Clone ID: PAT_MRT3847_71095C.1
cccacgcgttcgtccaggctcgagggctcactccaaagcttgaaagacagagagagagttaccttgtttcagttggttgatatccatacgatgggacaagtctttgacaagttagagggccagaatgtgtgaagtttagagtttaattgttttgatatgcgaaatgggaggacaaggctcaagagagatcacagtgggggaagaccaattaatgtttggatttggttatgtgagtcaacttgagatgtagaatagaaggaaaaccaattaaaaagagaacaaggagaaaaaaatgacagatgggaatcatggcaaaaaggataaggaagagaaagtattagagcacgaacagttgcagtaattttagtagctccatccaagaattcactaatcgattgtttcaaagaggttgatgacaaacgaaatcaaagatagtttgagttctaagataataaggtagggagtggaggcaaaggcaaataaggaagataacagatcgagtttttgacaaagtaaagaatcaaatggaaactgataagttgaattttgaagatctgtatattgctgttttacttgtgtacaatgatattaacaagtatatacctggtccccattttgaccctccatcaaaagacaaagtcagagaagtcaaacagcaccaacagttgcagtggcaacaaagaaggctactgaaggtgttccgggtgttgggaaactggtgcaaaagatacccaattcagtttatgcttcccttgtgacaattgcagctgtgtggttccaaaaaaaggctcagagttcttcactgtagccattgctgatcatgtgtttcacacggaatgatatatagaattctcttgattgtacaaaaaggattaaactgtttccatattagttgataaaaaacaattgttgtgttttacattttggacaaaagatcaactcttgatttttctgtcaggttatgctatgcatgtaaattaactgtcttcaataaaattgtattacagttcctgttcctcagcgttgtagcaccaacagttgcagtggcaacaaagaaggctactgaaggtgttccgggtgttgggaaactggtgcaaaagatacccaattcagtttatgcttcccttgtgacaattgcagctgtgtggttccaaaaaaaggctcagagttcttcactgtagccattgctgatcatgtgtttcacacggaatgatatatagaattctcttgattgtacaaaaaggattaaactgtttccatattagttgataaaaaacaattgttgtgttttacattttggacaaaagatcaactcttgatttttctgtcaggttatgctatgcatgtaaattaactgtcttcaataaaattgtattacagttcctgttcctcaaaaaaaaaaaaaa

SEQ ID NO: 110837 - DNA, 1014 bp, Glycine max
  Clone ID: PAT_MRT3847_71096C.1
actccaaagcttgaaagacagagagagagttaccttgtttcagttggttgatgtccatacgatgggacaagtctttgacaagttagagggccagaatgtgtgaagtttagagtttaattgttttgatatgcgaaatgggaggacaaggctcaagagagatcacagtgggggaagaccaattaatgtttggatttggttatgtgagtcaacttgagatgtagaatagaaggaaaaccaattaaaaagagaacaaggagaaaaaaatgacagatgggaatcatggcaaaaaggataaggaagagaaagtattagagcacgaacagttgcagtaattttagtagctccatccaagaattcactaatcgattgtttcaaagaggttgatgacaaccaaatcaaagatagtttgagttctactagaataaggtaaggagtggaggcaaaggcaaataaggaagataacagatcgagtttttgacaaagtaaagaatcaaatggaaactgataacttgagttttgaagatctgtatattgctgttttacttgtgtacaatgatatcaacaagtatatacctggtccccattttgaccctccatcaaaagacaaagtcagagaagtcaaacagagctgtgatatcaacctcgatggtgatattgaccgtgatgaattttatgatttcatcctgataatgacagctgatacattcactattgttagccaaaaacttattctcacattggttgtagcaccaacagttgcagtggcaacaaagaaagctactgaaggtgttccaggtgttgggagactggtgcaaaagataccgaattcagtttatgcttccctcgtgacaattgcagctgtgtggttccaaaaaaaggctcagagttctccactgtagccattgctcatcatgtgtttcacacagaaagatagaattctcttgattgtacacataggattgaaactgtttccatattagttgataaaaaaacaaattgttgtgttttacattt

SEQ ID NO: 110838 - DNA, 2907 bp, Glycine max
  Clone ID: PAT_MRT3847_71097C.1
gaaagttggtgttgtaacaactctaaggaataattcatcatcctatgaagttgggcaagagacatactcatgtttcttgaggctgaaaagcacagttgaagaagatgcaataaggttgcagcctggatctagtgaagtccatatgttttttccagatagccttggagatgatttgattgttgaagttcaagattccaagggaaagcattttggccgtgttcttgtccaagtggctgctattgctgacgatccggctgacaaattacgctggtggcctatttatcgtgaaccagaccatgagcttgtgggcaagttacaactgtatataaattattcaacaagtgcagatgacaatagtcatcttaagtacggttctgtagcagagacagttgcgtatgacttagttatggaagttgcaatgaaaatccagggatttcagcaaaggaatctattgttgcaaggtccatggaaatggcttttgacacagtttgcatcctattatggggtatctgagatatataccaagctgcgatatctatcttatgtcatggatgtggctacacctacagcagactgcctcaacttggtgtataacctgctagcacctgttatcatgaaaggcaatagcaagacttctttgagccaccaggagaaccaaatactaggagagaccaatgatcaaattaaacagatacttacacatgtttttgagaattataaatcacttgatgagtcttctttctcgggcatcatagaggttttcagaccaacaacgggtcaagcagcaccagccttggaacctgctgttaaactctacaagcttcttcatgatatcttatctcctgaggctcaaactgcattttgtcattattcccaagttgcatgcacaaaagatgtcctcgaggcacctgagtgaaacagatgaatatattacacaaaataatgaaaacagtttgatggatggcatggctatgtctactgcttaccagaagatgaaaaccctatgtgtaaatcttataaatgagatccatactgatatccagattcataatcaaaatatactacctagctttgtggacctgccaaatatttctgcttccatactcgagccggagctttgcaatagattacgagccttcctcatatcttgtccaccgacgggcccatcatcaccagtggcagaacttgttattgcaacatcagattttcagagagatcttgtaagctggggtattggtcctatcaaaggtggagtggacgcaaaagagttgttccatttgtatattcttgtttggatccaagataaacgtctatctttgctggagtcatgcaaattagataaggtgaaatggtcaggagttagaacacaacattctactactccctttgttgatgatatgtatgagcggctgaaggagacgttgacagactacgaggtcatcatttgccgctggccagaaaaaaattggcaacaggccattgctgatattgaaaaggccattgtggaagctttagacaaacaatatgcggatgtattatctcctctcaaagaaagcatgggtcctaagaaatttgggcttaataaatatgttcaaaaacttgccaaacgatctacatgtgcctatgtggttcctgatgagcttggaattcttttgaattccttgaagagaatgctcgacagcttgcgccctaggattgaatcccagttcaagacatggggttcttgcttgccacatgttggaaacacgacacctggtgagcgacttagtgaggtgacagtgatgctgagagcaaagttcaggaattacgtgcaagctgttatggacaatggtacgtttcggggtatgatacagagtgtcataacaataagagttaatcctagacaatcaatggaaactgttgtagatccctacatgagtaataaaattgtcccattttcttagcctttgaaaggaatagaaagcttatacaaagagtttacgtggttcgagtataaaaatgtcatatgtgcatcttatttggatcgtatgggacatgaaattttaagtttcatggatggcagataaaagactagatcttgacagaaaggttcaacgctaggtatttgtattttacatgatatatttgctgcactcaagaagcagcttctatgtaatctttttcattagatagacctggaaccacttagttccctcatggaagttcgttccatttgctgcaagtttgctcccaatcacaaagacaacacattttactattaggctaattctacatgtaaatatgatgagaggaattcacagggtaaaaagagaatggatcaccaattttgttgtaggagcaagcaactcaactgctccctgaatgattgatgtgcttttcaatgggaatagtgattttttaatcctctatctttgccgcagtcgtgctactcagtgtaggtctggcgtcctggtcatctcctgccgctggccgctcgacaccttgcgccccgtcgaatcccagttcaagacatggggttcttgcttgccacatgttggaaacacaacacctggtgagcgacttagtgaggtgacagtgatgctgagagcaaagttcaggaactacgtgcaagctattgtggagaaacttgcggagaatgtcagtagccttttgaaagcaaatttactgttcttaatagcataatatttaacttaagtaggtagagcagtactgcagtcaggatatttatgcatataccaatgactgaccagaatattaccattaaattgaaaatgtgaagttactgttttcttcatatttatgcagtgcaagatatctcaaatttttgttcccatttcagaataatgttaataaagtattcacgtatcctaacatcatcatctatgttgttccaggcaaagttacaga

SEQ ID NO: 110839 - DNA, 282 bp, Glycine max
  Clone ID: PAT_MRT3847_71098C.1
gtgtatgattaattactcttctttttttaagtagcaaaccaaactaataatagaacgaccgaagaggattgacactagctgacgaacactggcggcagcaaaactatcgaggccatctataaagctgatcatgttgcataaatcttgagcattgactccagcctgggtatttacatactcaggccaaaaagaccgagacaacatgccataccataacggggactataacattgaaagacgtggatcttggttggaagttcagggccctgaagcataaggaaa

SEQ ID NO: 110840 - DNA, 348 bp, Glycine max
  Clone ID: PAT_MRT3847_71099C.1
aaacactttcgtagtccatacattcacttccaagataatcttcactttctaccatgacactaggtcggcggacacactaatgctgaagatcaaatcatcccacgtagatacttgcaaaacaaccaacttgaccgaggttatgatggcagacttaagcgctataatatgcacgcttgcctttgctaggaagtatgatgacgacagctcacccaaaagcaagttcaatggtctgtttaacgactcgcaggctatgttgctcttgattaagaaacggatgacattatactcactgcacgtgacttgataaactcaccgtggtgggtactcgaaacaaaaagacactatagg

SEQ ID NO: 110841 - DNA, 213 bp, Glycine max
  Clone ID: PAT_MRT3847_7109C.1
aatactatgctctaaaaacggtgcgcctttataaggccgcctacgaatccaccagtgtctatcctaatccggattccttcacatcttctctaatcccacaagatgccatccagtcccgcgacgaaaggaaagtcgccaaattccataagcgaacatctatgcggtgaaacgaacagattatcttctattactcccaaataagggagccaattc

SEQ ID NO: 110842 - DNA, 646 bp, Glycine max
  unsure (1)..(646): unsure at all n locations
  Clone ID: PAT_MRT3847_710C.1
ccacgcgtccggtgagagcgttgttctccgaagcgaacatgggtgatctgattgagttgagtgagcgggtgcgtgtgtatgtaatgggttatagatctgcatgtttagttttgatccttttcctcatccttggaattggaactggaattgcttcgtctgagactccgaggcccaaaaatgtccaagcttcccttggcgctaagtggtccggtactcctctccttctagaagctggtgagttgttatctaaagaagaccctcgccttttctgggacttcatcgacatttggctcaatgctgctgccgacgatcaatctcattccgcaaaagcttgcgtcatcgaaattctacatcacgctcgtcctcttttgagacaacccttagcgtccttgttcgagttctctcttattctcagatcagcttcccctgctctcgtgctttaccgccagctagctcacgattctcttgcgtctttccctctccaagatgctcgtgctcatgctgaaatcaccaaattagatcccttgcgtcttgggataagcctcaaaagccccggagggaagtgttgttgggttcacacttcccaaaacttgttnttcgatgtcccccaactgctctcatggcttcaaactcaaactccgggggg

SEQ ID NO: 110843 - DNA, 182 bp, Glycine max
  Clone ID: PAT_MRT3847_71100C.1
ctcttatcacccaattttttttatcatttttattcaatctattctaacgggcttatatagaggtctaataaatgataatctgcgtcaactatctttttggggggccatactcctgccacaacaaatacccctgcgactaacataaaacctcagcctctacaccccccctttattctctcggg

SEQ ID NO: 110844 - DNA, 1027 bp, Glycine max
  Clone ID: PAT_MRT3847_71101C.1
tacggctgcgagaagacgacagaaggggatccaaagcagaacaaagagccattgaactttgactataatattcagagttcagattactcactctaatcttctaagttttcattttggggtttaagtttctgaaggaaaaaaaaaatgataaagtttgttctatttttgttctgctttgcctctgcactgaccctttcagtatcggagtccaaatcagcttcagtgcaacctcatgctgctgaatctttctctgttggatatattcagatgaagactgcagcgaactgttcttacctggtagttatatctacgagttgttcatcgcctaagttcacaacggataagatcggtatcacgtttggggatgctaatggcaaccaggtatatgaaccaagactggatgatccaatttcaaggacatttgagcagtgttcttcagatacatttcagatagatggtgcttgtgcatctccaatttgctatgtgtacctatatagatctggggcagaggaaggttgggagcctgagagtgtgaaaatctatggctacaactcagagcctattacttttgatttcaacacctccatccccaatggcacatggtatgggtataatctgtgcgagactccttcttcttcataccaactatcccctcagaaatggttcatgagtttggttctaggctctgttcttagtttttggctgtaataatgttatgcaattaacttaatcacacatagcaatacaccttttacatatagccgtgaaaggtgaaacttagtagtagtagtattctatgccgaaagtagggacatgagatgtgtaaggccaaagtcagttgctttgtgacttggtggttttcatgctttgtgggagttatgttaaatttaagttaatgttatgaaaggagaaattttagtaatatactctaatgcatgtcttaattttagagaaaatggtatatgtattgataatataaaagttttttacactatcatctaagaataaactcttatgaatattaagt

SEQ ID NO: 110845 - DNA, 308 bp, Glycine max
  unsure (1)..(308): unsure at all n locations
  Clone ID: PAT_MRT3847_71102C.1
actctcngcagcgtacgtaagctcggaattcggctcgaggttagtntatatgtacntatnatggtgataaanctganttantgattnnagtancaggncattagagaggnngaagtcncattcanntattncnctttantattctaacantattantngttnctatatcgataatangaatataacngntgatattanttaggccacannnnnngaagatagntgcnatnnaatggnattgcttgtntngntgctaccatgttctggnaggtatagtgtaggaagnagctgactcacataatggnntn

SEQ ID NO: 110846 - DNA, 236 bp, Glycine max
  Clone ID: PAT_MRT3847_71103C.1
aagctctgaattcgggtgcagggatctatgtgaggagatttgtattttggccaaaaataccagccgttcggggaggcgatacatgatgcttaacacatcaacttcactttcggcggtcatctataggttgaaggaatccatgtaaattttattcacatttttatgttgatttacaaggaaagtgatgggaaagcgtactctgcgatggaagtgcactagccgactgattattgatg

SEQ ID NO: 110847 - DNA, 389 bp, Glycine max
  Clone ID: PAT_MRT3847_71104C.1
agaaaaaaaaaaacacaaaaaaaaaaaaaaaaaaaaaaacaaaaaaaaaaaaaaatacaaagtaaaaaaatcaaaacaaaaaaacaagctacaaatgcaacacaagtttgaaatcacaaaacaatgcataaaaaaaagggggggccccccaaaaggttccaaccttacttccccttgcatgcaatttcaaaccccttcaaaagtgtccccaattttcatttcacgggccttcgttttaaaccttcttaactggaaaacccctggctttccccactttaacccccttgcagcaaatccccctttctccatctggcttaaaaccaaaaaggccccccccgatgccctttcccaacatttgcacaccctgattggcaaatggaaccccccct

SEQ ID NO: 110848 - DNA, 360 bp, Glycine max
  Clone ID: PAT_MRT3847_71105C.1
gaacaagttccccgagagacagccaattgggacggcggcgcaaagccaagacgacggcaaggactaccaggagccggctccggcgccgttggttgacccgacggagtttacgtcatggtcgttttacagagcagggattgcagagtttggggccacttttctggttctttacattactggcttaaccgttatgggagtcgcccgggctaaatttaagggtagttctcgtgggattcaaggaaattgcttgggcctttggtgggatgatttttgcccttggttacttggaccgttggcattttaagggggcacataaacccggggggggcatttgggctgttttttggcaggaaatttctt

SEQ ID NO: 110849 - DNA, 388 bp, Glycine max
  Clone ID: PAT_MRT3847_71106C.1
tatattttgataaaccgcgatcacaggttgccgcaccttaaaaccggaaacaaaagcaatcggtacttgatttcacgaatctctcaatttcttgctacttctttgtgtacgacttcttaagggaaagaaaaccactctctgtgctgggcacagacttcgcgaatcattctcttttccactcttagtttatttgctgaacactctcctatttgatataggacttggagccagattcaaacttcttctgtctgtttctcagttctctgtgtaattgcaagaacaagctggcgaaatcttggattagtactcccactctcctatctggcatatgatatcgtgggtagactgcactatgggttaactttctttgactgtattcttctcactg

SEQ ID NO: 110850 - DNA, 280 bp, Glycine max
  unsure (1)..(280): unsure at all n locations
  Clone ID: PAT_MRT3847_71107C.1
attggacaccagaaagacgaaaaaggacattacctccatgggtaggaacgggggaagagtgcaatgcatgcaggtgtggggaccagatggcaagaagaagaatgagagtcttgcctacctgagatatctagatgatgaacgagtggaaaaggaaggagaataccttcttaggaagggagggatccctagtttgtttttttaggaggagcacgggagcgggnacggggagattaataggtcaccaagaaaggacgagggacggtactggaggatgtggaag

SEQ ID NO: 110851 - DNA, 276 bp, Glycine max
  Clone ID: PAT_MRT3847_71108C.1
gcgcggaagccgactcgtggttcccatctctcacttttcactcttttctcgaaacaatgaactccatagtcggtaaatcgggggtcggcctccgccagtcctcaccggaggccccacatttcgctgcccagttccgccccggcacttcccaccgtaaattccgcgttgtgtccggcaaatgcagccgctggctgaacggtcggaacctccgcgtggcggcggtgggcggaggctcggtctgaagagcccccacggtctctctggacatgggtaaga

SEQ ID NO: 110852 - DNA, 521 bp, Glycine max
  Clone ID: PAT_MRT3847_71109C.1
ccacgcgtccgcaaagtcagcgagcgccacatccgactccgagggccaccggtggccggttgcccgttgacgccgcggcacgcgattccgatcctggtgagcacctctccctcttcgtcctctttctttgccccagaccccgagcgccacctgcggccggcaggccagatcggacgcaactccgcgtcacgcatgggcaccgctccccccctctggctttcttcttttccctcccaatctggcaatctctaatctctcgcctctttccgttaccgccgaggtgtcccgtcaccgctgaatatctttctttttaaagggttttacctaagaaataaacaactctgaatttcccaagacctgaagaccagccagcgcaagcctgtggctgccacggtgccaccatgtcccgcggcagtgccgcctccgtattcctcggcgtcgacgttggtactggcagcgctcgtgcaggactcttcgatgaaaacggcaaattgctggggtcagcaagcagccctatacag

SEQ ID NO: 110853 - DNA, 325 bp, Glycine max
  Clone ID: PAT_MRT3847_7110C.1
ttttttttttttttttcagaaactgcatggtaaaataacacatgttaatataacttctatacaaagtagtatatatagaaataaaactagaaacaacagcaatgatacaacaaacttgaaattgaagacgcacaaaaggctccagatgagaattttctacttgataatccccatttttgaacaaatatattaataacaatgtcaagaatccatatatattaatacaaaaaacatttaatacatatttttcaagtaactaaatgtttcatagggtatattaaacgttctcttgcctatgtcttttaatagaaccaactatcctcgt

SEQ ID NO: 110854 - DNA, 441 bp, Glycine max
  unsure (1)..(441): unsure at all n locations
  Clone ID: PAT_MRT3847_71110C.1
gctctttaatactatacaattcctataacttgagccacatagaagaacacataaagaaagaggggggatctatattatattatatatattatattatatagtataatatatactagtattatatgatatcatgattatganatagaagnagnagtagtagtgaggtcgtcataattgctacgatgaggtgtgtcgcgtgcactcggaaaattttctacatcaacaatatataagggcagccactgctcacactctatctataaaactatgctcaaagaaagcgctatccaaaaaaatatagtaggatgatcctatggaacacactgatatctctataatgctttgacgatagggtaaagactttaatcctagtaaaatgtattttaggaaggatgttgataaaaataatgtgatatggataaagaattctaccttggggct

SEQ ID NO: 110855 - DNA, 737 bp, Glycine max
  Clone ID: PAT_MRT3847_71111C.1
ttttttttttttttttttttttttttttttttttttttttttttttttttttttttttttttttttttttttttttttttttttttttttttttttttctcattggtaataatgatatttgtattctaaatgaaagtcatgcatcaaccaaggagaaatagcattggaaatggtataaaataatgcattttataatacagtccacaatttcactcgtgggtgaaaataacttctgctctagtagaagctcttcgacatttcaccaattcaatcaacattttcaaattattctccatatcaaatacacaaggaatgatactcaatgtctcgagaacaggagaacggccaagcaaatatttgatgaattctatctcatgtggccaaccacccatttctgacaacttcacagttttaagcttgttaagtgtagaatctgaaaggcattctttttcccaaaaatccaagtctggggtatctacagcaactggtatgtttgatgaacctgaaatttgtagttcttttagattgggagagctagtaatcaagcgaaggatgacaagtatctccaccatatcctcaaaatttacttgatataattcaatactctccaaattgtggtacatcattggaggatgcaccgagtcaatacctatgctcaaatactttgggaagtagataagtccaacaagcttctcaagattgggcacaccaccaagaaacttgacaaaattgcaatt

SEQ ID NO: 110856 - DNA, 505 bp, Glycine max
  Clone ID: PAT_MRT3847_71112C.1
gcaccgatgaactcgtgaagatgttcagtgctcgcgcacgtagaaggttccagagaggcctcaccagaaagcccatggccttgatcaagaagcttcgcaaagcggtactcttttctgcttccaattatgctttctaatgcatacggtattatgtgctatgttttactagtgtcctgcacgacacgtacgatgaatcttattgtcaatcaattcatttaatttagtttgtgttggccccagatgactggaaggtttggctttgcaaaattgattcgtgtttggatgcttttaccctgaaaataagtttgctataaaacttgttgtaaattttttaacacaacaacaaagttactgtttattatttagttgaatcaacgttttgagataaaatcaaatttacatagcaataatcaaacatctatattttacgaagtgaattcttatgattcccaccatgaaaacatgcaaactcttaatttcttcataccatgaatatctgttaatg

SEQ ID NO: 110857 - DNA, 202 bp, Glycine max
  unsure (1)..(202): unsure at all n locations
  Clone ID: PAT_MRT3847_71113C.1
gaccggaanggaagggccgggccgagcgacgcgtaaaggaataagggccgctccttcctattatcttttaattgctggggacaccttttggcgtgggggcgattgaaagtggcacacaccaaacgtgaaagccaagaccattatgcctgcaacccttcaataaggagtggttttttccttctcggttttctattttggaata

SEQ ID NO: 110858 - DNA, 288 bp, Glycine max
  unsure (1)..(288): unsure at all n locations
  Clone ID: PAT_MRT3847_71114C.1
cgcacgcgtgcaatacctctggagggataatataatgaaagatcaccatcccctgagtgaataacatttttccagaggcaaggcgtttattccttagtttgcttgggattaangagaacaggatgtaccttctttgtttcttttaagaatgcccactgctaacaccaggaaccttgtatatacacggtttagtgcaaacgttttagccagtgattgtttgtaggattttcatgtttcatctgtgtggggcgactcaaaggaggatatattacattggcattttctggc

SEQ ID NO: 110859 - DNA, 271 bp, Glycine max
  Clone ID: PAT_MRT3847_71115C.1
ggcgcgtccgcttataaccgatcatccgcacgtacataggtttccgtggttctcaatactgaactatgctagtgcggtggctacctgatgtacgcacaaaagggcatcagatatgctcgtggtgattctcaggatgccctcgttagcaaactgatgacgtaacgatgtcttcatacaatcgcttaagaccttcgaagattaagtggactgcattggacagaaagtgacactgaaaggacattgatacagaggctttgagaacaaggacaca

SEQ ID NO: 110860 - DNA, 644 bp, Glycine max
  unsure (1)..(644): unsure at all n locations
  Clone ID: PAT_MRT3847_71116C.1
cacgcgtccgcctttctccnacgcttttcttcgcaacaacaacatggcagcagcagcaacaacaacaacagcacaagatacctcctcggtcccgccgctcgcgtactcaggccgggtccagctcaaggagctgctggaccggtccgaggcggcggtggggcagcgcgtggtcgtgggcgggtgggtgaagtctgcgaaggaggttgagaagacggcgccgcccccatcgattgcgacgacggacgacaccgccagggaaggagggaagggcaaggacgtgtcgtgcgtggagattctgcagtcgaggataccgctgattcggagtatactggatgtgttcggaggtggcggttatgggcagcgcaagaaacgtgagaatgtgactgcgccgaatgataaggttttgcctcccaaagcttctacggcgtatttgcttctaacggatgggtcgtgcgctccaagccttcaggttgttgttgattcttcagtagctactcctagccggcttgtgcctactggaacgtgtctattagtggaaggtcaactagaaagagcagaggggaagcatgctattgagcttatagctgagaaagttcttcatattgggacagtagattttgacaagtacccattatcaaagaaaa

SEQ ID NO: 110861 - DNA, 1208 bp, Glycine max
  Clone ID: PAT_MRT3847_71117C.1
ctcggtcagtcgaaaaatgaatgtttattttttatatataaaaaaatagcaacattaaaaggtttaattgtgtacagatttggatgtatggtattctgatgaaggatctggttattgaaaattgtgttattcttgaaaaaaattttaagttgagattcgtaactgttaaattgcagtgcaggataataatagacttgtcattaagccacttcttgttgtcttcttcgtgctgttgttcttactcccaagtattgtaaaaggagcttgacttatggggtggtggttttgttactctaggggttcttgtctgtatactgtaacagaacagaacgagaattataagaggacttgatttgatgaagagcaaaacttagatgcagtttcacaggtgcttttggtgctattttccagttagaatttgggttttacttcggtggtctgtgtactagagattttgattaaatgtcaatgcggattattggggtgaaactccgattcagaacagagaaaaatagttccaaaagcacaatggaactgcatctaactttatgtcctttgatgacttcagttactaccgtgttttctcatttactatcgtcagtttggatttttctgctcccatgttgcaaaaatagagtaagaagaataggctcataaatttagttatctaagaattttagtttaatagttggggggtggttgatgctggatctagcaccctctaaaatgagcaattgctcaagatgaaaaagtaagggcgtatcctctgctgactttaacttaattaggtttacatcaactgtatattaatcaaactagctgtacatgcacttttagaggaaccaaatctactggtgctacctgactttttgtgttattaacggaattgcaatgtttaacagaacatcaaacttaactttcaatgtcattctttctgttgctgttgttgcattgatagtttcataagaattcctaatatctctccgaagctcacattttatgtctcatcataccccctaactggtacggtggtacctaattacaaaaactcaaatattttagctcctcccctgtcacaaatggtacctaattagtacacatttcatgtaattgtgtttagtataaatatataaatagaaatagaaattggaagacctgaaaaatgtttgagaaccaagaaaggctttattagttccaagttagtgatg

SEQ ID NO: 110862 - DNA, 147 bp, Glycine max
  Clone ID: PAT_MRT3847_71118C.1
ggagaggtattcgtgctcacattgttcgaatgctgtgaagaaatgaggggatagtccgacagtctaggggaatgggaatgtgttggggaagaaggatggaggattctttactctttttacactcattgtttcgcctatctttcctgt

SEQ ID NO: 110863 - DNA, 233 bp, Glycine max
  unsure (1)..(233): unsure at all n locations
  Clone ID: PAT_MRT3847_71119C.1
tcgagcggctcactacaagacccgcccctgcgacaccctctcctccatcgccgacggcgttaagncggnctcgtctcctccgaccagntcggaggcaattccatctcgaacttcggnttcnntgtcggagaacttgtggtctcntcctgaagtgtnaacggtcgnnanctttccgggatacttctaagtgtcggccggtntaacngtgcatgtggangaattanaaccangnt

SEQ ID NO: 110864 - DNA, 350 bp, Glycine max
  Clone ID: PAT_MRT3847_7111C.1
tgcatgcgacacaccacacacattccactttacagggggagtgtaccaaaatcacactggctccctctgtcaacgggttcactattcttcctctctctatatctctctctggacacacacatacttgctggcaaaccattcttcttgtgaaggagtagtgatagcggactaatcttttactgaataacgatacaacagcatgccatgctgactgactaactctactcacgcatacccgacacataaatccctgaatctgtattgcatacgcacactgtgactcttaaactcgtcatgatcataaaaccttctacaatcattttactcatttctttcctggcttgaatcaa

SEQ ID NO: 110865 - DNA, 865 bp, Glycine max
  Clone ID: PAT_MRT3847_71120C.1
cccacgcgtccgcctagccactccctatctttctctctcctcttctgaatttgacggttgcaccgcgtaatctcatcggattcttctctctatcctcatcggtttcaaactcgctcactctctcactcagtcttgttcagatctgatcaaaggaagaagaaatggaggaagctctggaactgtcacgcgccaaggacacgaaggagaggatggcgggcgtagagcggctgcatcaacttctagaagtttccagaaagagcctctcctcttccgaagtcacctcgctcgtcgacacgtgtatggatctcctcaaggacaacaacttccgcgtctccctcagcgctctccaggccctcgcctccgccgccgtcctcgccggtgaacacttcaagctccacttcaacgccctcgtccccgccgtcgtcgaccgcctcggcgacgccaagcagcccgtccgcgacgccgccggtcggctcctgctcactctcatggaggtttcttctcctacaataattgttgaaagagcagggtcctttgcttgggcacataaaagctggagagtcagagaggagtttacacgaactgtcgcagctgcaattagtctatttgcatctactgagcttccacttcaacgagctatgctcccccctatctcgcacttgctcaatgatctgaatcctgctgttagggaaacagctattttgtgtattgaggaaatgtatacacaagctgggtcccaatttcgtgatgaacttcagcgccacaatctgccttcatctttgctgaaagctattaatgccaatctagagggaattcaaccaaaagttcactcttcagatggtatttctagtggttataatgctgg

SEQ ID NO: 110866 - DNA, 724 bp, Glycine max
  Clone ID: PAT_MRT3847_71121C.1
cggctcgagctctctcattttcagcgttaaagcatggccttcgcaagtgccattgcttttcttcttctgcacactctttcatcagttagaagtgatttcctatctcctctaagtcctctggtcgctccattatatgaggatgtgtgcaaaaaagtggaatgtggaaagggaacttgcaagccttctcagaatagtactctcttgtttgaatgccattgtcatccaggttggaggcaaactctttctgctcatgatgagggcttcaagtttcttccttgcatagttcctaattgtactatggacagctcttgctccaatgctcctgctccagctcaacaagaaagaaaagcaaatgaatcaatatttgatgcttgccactgggttgattgcggaggtggctcgtgcaacaagacatccttattctcttatagttgcaactgtgatgctggctattacaatcttctcaatgcaactgccttaccttgcttcagagaatgtgctattggttttggttgctctaaccttggaatatcaatgacaaactcatccaccgcttcaccaccaccaccattaaatgagaatgctagcttgattctaaaaggaagctccccgtggctactcgtgctgattatattcatagctaatatgcagttgcagtaggaaatttggcacatgactttgcaatactgaactgtgtgctattttaagtgagaactggattttc

SEQ ID NO: 110867 - DNA, 389 bp, Glycine max
  Clone ID: PAT_MRT3847_71122C.1
acaaaacctagtcttgtccctggtgaggaaagagcggcatggaagtagcgaaagaccctaactcacaggcggattcagattcggaactggaactctacaccatcccaagctcttcaagatggttcgcgtgggaagaaattcacgaaacggagagagcagcattcaaggaatacttcgacggaagctcgatatcgcgaagcccgaagatatacaaagagtaccgagacttcgcttcgaagaaggcgcccccagtgggattcgagtcgccgccacgcccaattccttgaagcctatgctgctgcctcgcaatgggaagagtgccgccaatgccactggggcttctctcaaattgccgcctcctggctcttactctgatgtttatggtgatt

SEQ ID NO: 110868 - DNA, 1899 bp, Glycine max
  Clone ID: PAT_MRT3847_71123C.1
cagccgtgtatcactcaaataataagtatttgattctacacaatcaaacacagccatcactgtctctctccaactttcactttcgcataccttcacttcatataatatgccaaactctttccataacctcatcttcccacgcgtccgcacgttcccattcctctctccctaacctcaccggcagcgccttcacggtcatcgccgccgacaccccccctcccttcttaatggcctcaatcccagtcgcgtgttccacacaccccaggctccaagcctcacccttattccaatcccacgcgcgctcccgcagcgcgtccttctggagggttcagcagaggggttcgatgggtggtggtggtgccgcgtcgagtttcgcctgctccacttctcagttccgcggcggattcgggttccggttccaccggagacaggggaagttctcgttgctctctttcggcggtgacgacgacggaagcgccgttggcggcgaagcgagagaaagagacttgtctcagcttctctccgcattgcttcccgttgttgttgctgccaccgccgttgccgctctcgctaaaccctccacttttacttgggtatcaaaagagttatatgctcctgcacttggtgggattatgttgtctattggaataagactatccgtagatgacttcgctcttgcatttaaaagacctttgccacttaccattgggttaattgcgcaatacgtgcttaagcctgttcttggaatcttggttgcaaaggcttttggtttgtctaggatgttttacgcgggctttgtcctcacagcttgtgtttcgggggctcaactatccagctatgcaaacttcttaagcaaaggggatgtagccttgggcattcttctcacaagctataccacaattgcatcagttattgttacacctctgttaactggtcttctgattggatcagtagtgccagttgatgcagttgccatgtcaaagtcaattctgcaggttgtacttgttccggtgacccttggtcttcttctcaatacatatgcaaagtcagttgtatctgttcttcaacctgtgatgccctttgttgccatgatttgtacttcactgtgcattggcagccctcttgctttaaacaggagtcaaattttgacaggcgaaggtctccggttggtttttccagtattaacatttcatgttgttgccttcactttaggatattggttctcaaagattccatccttgaggcaggaagaacaggtgagcaggacgatttcactatgcactggaatgcagagttccacccttgcaggactccttgcaacgcaatttttggatagtagtcaggcagttcctcctgcatgttctgtcattgctatggctataatgggtctctgtcttgcctctttttggggaagtggctttgtaattagaaacctgttgccattacctcctctcagaaccaattctgctgttaaaacttaacttttttgtttctgatgcgtgtcattgaggcttattttttagcatcagttggagggtggaaacttgataaatttgatcttttaatggtaacaattagaaatggctagggaaggtagattaataggaaaaattcaagtgtataggttagtcacatacaaatcagcaagaaacaggtttcattagtaacattgtaacattatccagagaaaaaagttacatagtaacggggggtatagatgcatagatactatcatttgttacctagctgcaaatcagtacacttctgtacatagactcaaactatgtcatagatcatttaccaattaacagttttctctgtcccaaagaacgtttcttccacttgtgtgaacctgtgatcttcaaacgaatgtagtagccaaactcttcttcattttgc

SEQ ID NO: 110869 - DNA, 1005 bp, Glycine max
  Clone ID: PAT_MRT3847_71124C.1
acgcgcgcgcgaagaccgcagatcgggacgcggcacaaaacctagtcttgtccctggtgaggaaagagcggcatggaagtagcgaaagaccctaactcacaggcggattcagattcggaactggaactctacaccatcccaagctcttcaagatggttcgcgtgggaagaaattcacgaaacggagagagcagcattcaaggaatacttcgacggaagctcgatatcgcgaagcccgaagatatacaaagagtaccgagacttcatcatcaacaagtacagagaagagccctccagaaggctcacattcagcgaggttcgaaagtcgctcgtgggagacgtcacgttccttcacaaggtcttcctcttcttggagcattgggccttgatcaactacggcaccgcagaggatgtggaggaggaccattgcaaggttcgcttcgaagaaggcgcccccagtgggattcgagtcgccgccacgcccaattccttgaagcctatgctgctgcctcgcaatgggaagagtgccgccaatgccactggggcttctctcaaattgccgcctctggcctcttactctgatgtttatggtgatttgattaggcagaaagagggcaactgtgccctctgcgctcacaaatgtggttctggacattaccgatgtacacaggataatttcattatttgtactaattgtttcaaaagcgggaattacggggagaaaaggtccacggaggattttgtattgagtgagtcaagtgaaaatagtggtaagcatgacactgtctggactgaggcagaaactcttctccttctagaatctgttttgaagcatggcgatgattgggaacttgttgctcaaagtgttcaaaccaagaccaaacttgattgtatctcgaatctcattgagctgcccattggggagctcatgttgggccctgctcacagaaatgttaacattaacgatgctaatggcatcgtgaacaatgcaaaacaaagtcaatca

SEQ ID NO: 110870 - DNA, 1253 bp, Glycine max
  Clone ID: PAT_MRT3847_71125C.1
gcaatagcctgatcctcttcaactcagagagagcgaaacgaagcgtctaaggttaaaaaaaactaaaaagggaaccacaaatactaccaccagctagcagaagttcaacaacgaagggcatatattagatggacaatgatttggctggggatatgctctgccagaatgtcaactacaattctgcttatcggaagcttgcccggagttatcatcctgatgtgaacaaagaacctgatgcagaacagaaatttaaagaacttagtaatgcatatgaggtcttgtcagatgatgagaaacgatccatatatgacacatatggagaggctggacttaagggttcaggaatgggcatgggggatttcagcaatccttttgacctgtttgagacactgtttgagggcatgggtggcatggggggaagcagaggatcttggaatggagcagttgagggcgaggatgagtattacagtcttgttttgaacttcaaagaagccatttttggggtggaaaaagagatagagattcggcgattagagagctgtggaacctgcaatggtttgggggctaaaccagggactaaatcatccaagtgtagcacttgtggtggtcagggtcgggttgtcacgtcgacaaggactccattaggcatctttcagcagtccatgacatgctcttcttgcagtggaactggagaaacttcaacaccttgcagcacatgtgctggggaaggtcgagtgagaaagacaaagcggataagtctcaaggttcctgctggtgtggattctggcagccgtttaagggtccgaaatgaaggtaatgctggaaggcgtgggggttctcccggtgacctctttgttgttcttgaagttatccctgaccccgtgcttaagcgagatgacacaaacattttatacacatgcaaggtgtcttatattgatgcaatattggggacaacaattaaggttcctactgtggacggcatggtggatttaaaaatcccagctgggactcaaccaagctcaacacttgttatggctaagaaaggtgttcccttgctgaataaaaagaatatgaggggtgatcaattggttcgggtgcaagttgaaatccccaaaaaactgagcaaagaagagagaaaacttattgaggaactagctgatttaagcaaaggcaagactgctgccaccaactcacaactcggggctgcagctattcatttcagaactgtggtgggattggttagcatatattga

SEQ ID NO: 110871 - DNA, 715 bp, Glycine max
  unsure (1)..(715): unsure at all n locations
  Clone ID: PAT_MRT3847_71126C.1
cttntttnttttttttttttttttttttttttttttttttttnttttttttttttttttttttttttttttttttttttttttcagaaacttatttctcattctcaaattctctctctgaactcactctgtttactattttcctgtctccactgatttcttttgttcttttttccaactttctatacaactaaaagtggcacaaacatttcccatacaaaattacaatgatgataatgggaacctattcacaactaaaacatcactagtaagtttaacaacttctatggtgccatcaaggaaatatcatgacaaaaccaatttggtaaccattttcctacttataggatgatagctggacaaatataatgatgaaccagcaacacaacaggactccaagcccagcagttatttgtatcaacacatctattcatcaggaatgttttgtattatatatgtgtaaaattccttatgcaccagcctgttagtgataaaatagaaacaagcacaaagattgtggccacttgctagaactccttttgagtgccttcctcaacagcagatcgagctgcctggaattcaattgtgtaccgtctctgcagttcttttagcctttctaacagttcctggaatgctggtcggcaagctggatcgctgtgccagcagctctcaattatagaagtccactgtggatcaacatcttctggaatttctag

SEQ ID NO: 110872 - DNA, 427 bp, Glycine max
  Clone ID: PAT_MRT3847_71127C.1
gagtcatcgtctagctatctcgatcgaactgtccaaggtcctgtcactttatgacctgggccgaaccagcacaacgttggcaaccagggcaactgtaccaacgcaacaagccaaccggcctgagcggcctaagtggccctggatgggcggtaacatgtggcgtatacccgcggccgtttagattaaaattgttgcagtaggcctgcatttcacctataataatagtggcattacgtgtaacggttatgcaagcgaggagagcggaggggatagaggtgggatcgcgttaaaatgtaatgattgggtgattgggtgagagtagcgcccataggggcggttggccgcgcatgtgcgaacaaagcatagcggaaaataatgcgaaataggtcatagtgggtggcgctggagtgtgggcatgtcggacagg

SEQ ID NO: 110873 - DNA, 2066 bp, Glycine max
  Clone ID: PAT_MRT3847_71128C.1
ggctcgagatgacccacgcgtccgtcctacgtgttcactgcgctctctctggtaaaaagggaaccaactaccaccagccagaagttcatcgagaaggtacatcgaggttctctgtgcaatagcctcatcctcttcaactcagagagaagcaaagcaaataagagtgctccatttcaaacaacactgtaacctcatcctccaattcccacacccagctcgttctcaacgaagttcatctactagatggcaataacagctagcagaatttcatcgagaaattttgtattttttggcatattatcctgctgaaaatatattagatggccattgcaccttttggtaatacatcagctactcaatgggggattcatcctcagattttcgcaggatcaactgggttgggaaagattgcatcatccaggaacaatgttacaagcaggataaggtttatggctgccccatgttcgagctttttttctcgagattccttgcatgcactatttgacaaaggttcatcgcaaactttgcaacatcgcaggggatcgaggttgatagttagagcagatgcagattactattctgtcctcggggtgtcaagaaattccagtaaatctgaaattaagaatgcttatcggaagcttgcccggagttatcatcctgatgtgaacaaagaacctgatgcagaacagaaatttaaagaacttagtaatgcatatgaggtcttgtcagatgatgagaaacgatccatatatgacacatatggagaggctggacttaagggttcaggaatgggcatgggggatttcagcaatccttttgacctgtttgagacactgtttgagggcatgggtggcatggggggaagcagaggatcttggaatggagcagttgagggcgaggatgagtattacagtcttgttttgaacttcaaagaagcagtttttggggtggaaaaagagatatagattcgtcgaatagagagctgtgaaacctgcattggttcgggggctaaaccaggaactaaaacatccaagtgtagcacttgtggcggtcagggtcgggttgtctcgtcgacaaggactccttgaggcatctttcagcagtccatgacatgttcttcatgcagtagggatggggaaacttcaacacgttgcagcacatgttctgaggaaggtcaagtgaggaagtcagagcggttaagtcacgaaattcctgctggtgtggattctggcagccgtttatgggtccgaagggaatgtaatgatggtacgcgtgggagttgtaccggtggactcgatattgttcttgaagttatccccgacctcgttagttattgaggggatataaccagttcctgtccattaaacgtgatgtatcctgacatattattcggcacgcaaggtatcgtatattcatgcgaatcctggggactataataaaggccccctaggagtagatggagctcaacacttgttatggctaagaaaggtgttcccttgctgaataaaaagaatatgaggggtgatcaattggttcgggtgcaagttgaaatccccaaaaaactgagcaaagaagagagaaaacttattgaggaactagctgatttaagcaaaggcaagactgctgccaccagtaggagataacttattgaggaaactgtatcctgtgtatttgtagacatatttccttttatgatggatggttcattcttgatcttgagactcacaactcggggctgcagctattcatttcagaactgtggtgggattggttagcatatattgatagatgtaggttactagttttttatttatagacaggcagatatgaagagcagaagaaactagagatctttctttttctttggaacttattatatgccttagcaatgttattgtttttttaagggtgggggtggggaaggactacagctcaggtgcaatgccatctttattttctcaagtgttgtttttagacaaaattggaaatgtatactaatttatttaaagttatttataaagccaaaaaaaacttattgttaattatatattttgtttgccaaaatt

SEQ ID NO: 110874 - DNA, 757 bp, Glycine max
  Clone ID: PAT_MRT3847_71129C.1
tatcttctcattattcctttgatctctctgccattcttcttcgatcatgggcatctgtttctctgccaccaaggtcagcggctctagcagcaacaacgccgccgcatccaaccgtaaccgcaaaggtctgatctttatcttctcattattcctttgatctctctgccattcttcttcgatcatgggcatctgtttctctgccaccaaggtcagcggctctagcagcaacaacgccgccgcatccaaccgtaaccgcaaaggtctggccgcgccggccccggcgccgccagcgcagccggagctggagccggtgacggggaagcagaagaagcaaccgtcgcaggctaaacggcggcaagtgccggaggattcgcagaagaacccacgctccaaagacaaagcgggtgcgcgtcggcaagggacgcatgttccgtgcggaaagcgaacggatttcgggtacgtgaaagacttcgagaatagattctcgctcgggaaattgttgggacatggacaattcggttacacctacgttggaatagacaaaacaaatggggatcgtgtcgccgttaagagactcgagaagagcaagatggttctccccatagcggttgaggatgttaagcgagaagtcaagatattgaaagaacttacaggccatgaaaatgtggttcagttccataatgcttttgatgatgaatcatacgtgtacatagttatggagctatgtgagggtggagaattgctagatcggatattg

SEQ ID NO: 110875 - DNA, 458 bp, Glycine max
  Clone ID: PAT_MRT3847_7112C.1
gaaaaagtctgtgaggtgtgctacatcatgctcaagaaatgtgctgtttataattctacattttctggtggagtgaaaattggaaataacagtgacataaagatgttattgagctcggaaatgaagttgagacatttgcttccagtttgcaatgccaggattcagtatttgatttgaatttgtaaaatcagccgactccatatgtctccattaaatctattatgataagtattggcttaccacatattgtgtggtaagccatttggttttgttccttgctcatatcgtcacatagttagcttctgtaaaatagaagtgagaccatattgccaaagccataaatcgcatcaacagtctgcttagttctgactttgatattgtacaaaggtttctcttaaccataatttttgttactttgactgtgatgaaactttgttatgtagtatgtacatgttact

SEQ ID NO: 110876 - DNA, 410 bp, Glycine max
  Clone ID: PAT_MRT3847_71130C.1
atgatcgttaaaaaattgtaacctgattaagtttagttttcttccttatactcgaccttctttcttgtatattacaatttttttctataaggaaaaggaaagaaaaaatcgatttcaaacaaagcgcagaaaaatcacatgattcatatttacaaaacgccgaaaatttttttgattaaatatgaagccctataatttaaccactctctaaaaaaaaactccaaaatatcttccttacaaacacccgacataaaatatttaaaccccctcacccaaatcatttataaatataaatactgttgtttctaacaacacctcccctttctaaccacatttctcctccaaattaaaaatcgattttgcccctcccctaaaaaaaacaaaacaccaatgtgtgaagggccctttat

SEQ ID NO: 110877 - DNA, 1035 bp, Glycine max
  Clone ID: PAT_MRT3847_71131C.1
ggacgtccgctcctccggtccgtaacccccatccctttttctctctcaatgagcacagtaccctaaggtaaccacgagaagagatgcctctccaatagcactcggaaccccaaatccagtgccaattcttcaccctcccctccttttcgcagacgaaggcgcattctgttctaacgttcacaagataggaaggcaagactaaagattccaccacctgatacaagctagaaaaccgaggtttgaaatggctgtgtcactgtggagaagtcgcactgcttcatctgcactgaacttgttcaccaatgctcttcgccatttctcttccgaggcaacaaactccagtcctcatagtacacgagagagtatgatgtattctgatataaactcacgaattgggagttgcatgccattgtctgcaatgcgcattggaacaatcattcacaacattgagttgaatccagggcaaggtggcaagctcgtccgagctgctggaactagtgcaaagatcttgaaagagcccacatcagcatactgtttaatccaactgccctcaggtgttaaaaagttgattgattctcgatgtagggccactggttggtgttgtgtctaatccaagccatggggatcgcaagcttaggaaggctggacacagccgatggcttggtcgaaggccagttcgtccgaggagtggcaatgaatccagtagatcatcctcatgggtggagggagagggtaagatgcaagaagtggtggacgatttgggcgaggatctctcactccttggggcaagccaactaagagtggctacaagactggacccctgaagcgcagaaggtagtaggatacaacattcactacgcacggcttgtctctgatgtttccttatgagatgcttgtaagttgaaataattgtggaaactgtcattcctgtttaggaaattcatggaactgattattcagccaatttgcggattttgagttcaaattttattgttgtgaaagtaaaatgtttttgaaatgatcacattttcctct

SEQ ID NO: 110878 - DNA, 776 bp, Glycine max
  Clone ID: PAT_MRT3847_71132C.1
aaaagaaatgcttctagaagaatcacacttgacgtcgtccgttcaccgattgaaaaccctaaaaatgaaatttaccgcatctgaatggaatcctgtgccctaacccacatcatcgcagagatagtcgtccgaagcgagtctttcttcgccggcggttgaggcaccgcatccatccattaatctcgagagatccagtggattgcgacggaaaagctggggaagcgaaagagagcaaaagcgaaagcgaaagggagagtgagggagatggagagttcggggttaggtcctgttgattgcgacgttggatcgattgtttgggttcgaagaaggaacggttcgtggtggccgggtcaaatacttggccccgatcacctttctgcttctcatctcacctctcctcgttcaggaactcccgttaaacttctcggaagggaagatgccagcgtgtaattgcctttattttttccttttattatttattattcttattcaataattcatatcacgctttatcgattgattatagacagtgctgtttagtttagtttagccaccgataattaagttaaagtttatgtgattgtgactgtgaacatatacttgttgaatggtttcaactgtatgcgagtcagaaaagttatggagacttgttcttgtgacatccagtgtgctgatgcatcaattgtcattagtatttattttgatttttcctcctgtgggggtggtattatttttaacagagattggtacaatttggagaaatccaagcgcgtgaa

SEQ ID NO: 110879 - DNA, 487 bp, Glycine max
  Clone ID: PAT_MRT3847_71133C.1
atactatatggtggcggttataaaactaaatggccgtggaatacaattctatttaactgtaaaagaaatatgccctatcattgttgtgcaatctcccaatgatctcaataatgagattgcactagtctttacatctccatcacatgccctttttatcgcctaaagctatcctttgagcattaacttttgatcattttcatttttaaccctgtttgccgcaatgcctactatactgtctattgtaaatacatatggtctaactatctatatactctcttcactcaatacataatattgttgttttaatatctagacattttcccgtgaatactatgactatattcttatgttctgtccacagctatctgaaaataactaatactaagatattttcattcacatcgacatttattgtatcagtcgtctattgctatctaacaacatactatctcttgctctatttcatatatttatatcattcactgca

SEQ ID NO: 110880 - DNA, 337 bp, Glycine max
  Clone ID: PAT_MRT3847_71134C.1
gttaattattatccaccgggatcacgggttgacgcaccttaaacccttaaacaaaggcaagcgcttcttgagtaaaagaatttctgaatttcttcctacttctttgggtactaattcttaagggaaagaaaatcactctctgtgctggacacagacttcttgaatcattttcttttgcactctaagttgattggctgaacagctctcctatttgatactggacttcgtgtcgagatttagactacttctgattgtttctcaggagtgtgtcactttcaagttcaagctgctgaaattctggatgaaggcacccactctcctatggggtataggactt

SEQ ID NO: 110881 - DNA, 732 bp, Glycine max
  Clone ID: PAT_MRT3847_71135C.1
cccacttatttccttgtattccccaaccatccaggttctctctcaaatctctctgcaacttttttgagattaattaaattatgtctttttacatctttaaattatggttttaatctctataaatatgattaaattattttttcagtcaatcttttctaaaatcatctttataaaaaacatacatttatacatgttatgtaacatatactacttcaaaatggtcactaatatgttacacgcctcatcattatatgaaaaacaaaatcaataataaaaaaaaacttttggattacgaaaacctaatatttagccatatattttgggaccaacaaacatatattttaagaacatctacatctcttaattaattaccactatcacaaatatcattaattgattatgaaggttaattagctcaaacataatttttcattgcagagaggctgtagagagctattctttggagctggaaaagctttgcatgacaatcatcaaacttatggcaaaaacacttaagatcaaacctaacgaattgttagagttgtttgaagatgtaagtcaggctatgaggatgaattgctatcctccttgtccccaaccagaacatgtcattggccttaatcctcattctgatgctggtgctcttaccatcctactacaagtcaatgacacagaaggtcttgaaattaggaaagatggaatgtggggttccattaaaacccttttctatgc

SEQ ID NO: 110882 - DNA, 413 bp, Glycine max
  Clone ID: PAT_MRT3847_71136C.1
ctctctttttttttttgctaatgtagcaacagtgtttataaccatagatgctttctttgagaatataaaataagttggtgattaccccatcaatcaatgtgtgaatgtgagccaaaatgatgggtcagtgcgtaaagtataatttatatgggactctgcttatttcattaggactattcacttataatcctaaccgagaaagtattattatggtaattggaggcgttgtttatatccaaaccaaggtgtactgaactgggttgattccaagggaacaagaacaataaaggacgagtgcattatcatcaattgacctaattatcatgcagtgtgattctgtggcgctcggtgatgcaacatctccaaaagatgggtgaaggaactttatattctgtgttaaagaaaagagaaaa

SEQ ID NO: 110883 - DNA, 698 bp, Glycine max
  unsure (1)..(698): unsure at all n locations
  Clone ID: PAT_MRT3847_71137C.1
cccgcgtccggttgggcgtcattcctttccttattttcttcttagcatacaatgaatcacaaggcacctagtttttttctggggatggatgtgaagagaatcatgggtggtgatagagatgggaacaccaattgggtgattaaggaagatggtgaagaagatagcaatgattcatcatccattggactcaactcaatggactctatgtgctcgtcttcttcatcagagctgagcgaggacgcttcatcttcaacatcatcaacacattcaaatggacctttgtttgaattatcagacctcatgagccacctccctatgaagtaagcaattaatcgatccctcgtgccattctgaattttattcaatttcctttaaccaaacacatacacacacgtaccatcgatcgacatgtagatcaactggttcaaggttgcttcagtctagttagtgattttgaattccagttttggatgtatgataagttaaatatttagttggaacaagattattttctatgaaagaggatattttgttttctctatagaaaaaaaaaattacacacacatcatctcaccatcatctattatcaatgttcagaattgttaatacttatgagtttgntgtgttaagtagtttatatttgacctgtgcaggagagggttatctatgttctatcaagggaaggcccagtctttcac

SEQ ID NO: 110884 - DNA, 595 bp, Glycine max
  unsure (1)..(595): unsure at all n locations
  Clone ID: PAT_MRT3847_71138C.1
ggctcgagaaaatatgaccttattgggagatttagtgctttcaaataaacttgtcttctatgaccttgaaaatcaggttattggatggactgagtacaactgttcttcaagcattaaagtgagggatgagcgaacgggaacagtccatttagttggtttccactacatttcttttgcttgtggtttaaacatcaacttggtgatgattttgtctctacttgctctacttcataaatgggtatattgaaatgaagcaacaaatacatataccaaagtcaaaattatggtcaaaggatttgaaaatagaaagaacatgaaaaaaatgctgtgagaaattgacttttcaggaacttccatgatttataaatgtaatcttcaaggaaaactaggacactgaccattgggaaacttcgctgtgggtaaaaattttcttctcaattcccatcatggtgaatatgtaaattgcaaaatcttaccaccaattgtatatgttattagactntgatttttgacttagcttggatctcaatgccaaatgtataattaacatatacaagtcacgcacggaaatgaagtatagttgcaaatatttaac

SEQ ID NO: 110885 - DNA, 247 bp, Glycine max
  Clone ID: PAT_MRT3847_71139C.1
ggggaggggctggctaaacgcacaagctcttatatacgactcactattaaggtaaacgctggtcaccgcctagcaagtacccggttccgtgtaattatcagggtccgactccacggccgtgcggtcctgttgaaaaccacaggaacctggaggctgagatgttcaagacagatttgggatcaagggacaggctaggagataaccgtgggtccttcttcctccgtggtcctgaaaccgggaaacacat

SEQ ID NO: 110886 - DNA, 248 bp, Glycine max
  Clone ID: PAT_MRT3847_7113C.1
atgcgaatggaaaaaggcttttttaaaactagacttgctggagtggaaaacccaaatataacagatttcaatcatacacaatattgaaacaacaaacaagaattttaaaaaaaggtgcctttctttttttacttccgtctcactacccttaatctaaatataaatacagacgtcactttaatttagactcttgcaatacaaaagctgccatctatcgcaatctatgggcttatctatgaaacttccat

SEQ ID NO: 110887 - DNA, 367 bp, Glycine max
  Clone ID: PAT_MRT3847_71140C.1
cataacgcacaaagcaagctcatcctacagttttaaaaatggcatcatcctcctccatggctctctctgctccatccttggctggcaatggcgtcaatctgagcccatcagcccacgaactctggagggtcagcattgagaacaacgtcatcaagcaggcctcctaccggatacccatggaagcgcccaaaccgcgtcaagtacatgggcccaatctctggcaagcccccgtactacctcataggctagttcccatgtgactactgctgagacactgctgggctttcggtagaaccagaaaccttcgccataaactctgagctcgagctgatccactccacttgggccatgcacggggtcttgggct

SEQ ID NO: 110888 - DNA, 358 bp, Glycine max
  Clone ID: PAT_MRT3847_71141C.1
gtcttttttgggttggtcaacaaagaacactggctttatttgatgcggccgccgtcttctacattgataattccccaaaggtctgcgttaaagaacgggcttccacaccacaaggcatggaaaaaaaattcccctccaagagaggggggggaaacccggcacttaaaccccaaaaacaaaatccccccaagaaacgaagcccggggggaaaagaattaatggaaccgaactccctttaaggaatacaaattcctccgtaattttccccccgtgcttacaagggacaggcttttttagaacaaccccagcggaaaagaaaaacaactctctatcaaccattcccccacccccttggaag

SEQ ID NO: 110889 - DNA, 462 bp, Glycine max
  unsure (1)..(462): unsure at all n locations
  Clone ID: PAT_MRT3847_71142C.1
accaagttcttgtgagtgcttacccaacacaaactaatatcaacatggacttctacccctgcgttataaatgttgttagggatcctatcgtggctgcttccacaccacgaccaacgatgggcacctaccaccacgctatggctcaccgggtgctcaacgagaagactgtttatgaagaggaagggattggaggatcccgccacaaccacatgcatcaccaccaccctgagactcatgaaagatgaaaagggcggcagtctgaacaatttcctgagaggctgcgttgactatgacgagaaaggtgcctatgactgcagccagatactactctccagggtattggacatggacagatggaaaaacacctataacgtgctatcatgcgtgctttatattacgcattgctacatagtatactantatgcaccactgtgcttgtactattataccgagctgcttata

SEQ ID NO: 110890 - DNA, 269 bp, Glycine max
  unsure (1)..(269): unsure at all n locations
  Clone ID: PAT_MRT3847_71143C.1
caaattttggccaccaaaagagcttcttcaaccattgggactctgtagctttagaaatcacagcggggagagcctggctgcctctttgacccgntgggcntggnggncggggggccggggccgggccgacgagcctgcccctgggggctctgcgctggnttgctggggggcccgggccccccgcgcgcggggccgctgggcggcccggcgtgggggggggcgccccgggccggccccccgcccccggccccgccccccccccgcgggcc

SEQ ID NO: 110891 - DNA, 421 bp, Glycine max
  unsure (1)..(421): unsure at all n locations
  Clone ID: PAT_MRT3847_71144C.1
cacgcgtccggttgcattaagtagccttattgttgcaaacaatcccgtgtgtcatgggaagactaaacatttcaacatcaaggtttattatttgataaagatgcaacaaagtggagaagtgaacttaatttactacaagtctaaagatcaactggctgacatgtttacaaagtcactacctatcaataaacttgaactcaaagaattggagtttacagtttcaaaagcaaggaggggtgttaaagatatacttttgtaactgcataatattttatttttcagttttaaaataagatttagtaaataagttgatttcctatattttaggagtaaggcaggtttaatggattagtctaatcaataagtggttnctatctttaaggagcaagttagttttaatattctgttttgctaatatctt

SEQ ID NO: 110892 - DNA, 183 bp, Glycine max
  Clone ID: PAT_MRT3847_71145C.1
gcatcatctcatggataagaacctaggcttaaaggggaaattttgcctttgttttgactagatttagtgaagataaatagatgattttcaaaaaataaataattatatagctgagaggaacatttcattatttcatatatatatatatatatatatatatgtcttgaactgtactgtttccat

SEQ ID NO: 110893 - DNA, 410 bp, Glycine max
  unsure (1)..(410): unsure at all n locations
  Clone ID: PAT_MRT3847_71146C.1
atnccggagccactctctcttcttattccaacagtttatgtacctcaaattcccaaaactgggaccttagtagaattttaaataagcgcaagatcataaaattattgctggattattatcaatggaaaggtatatgatatcacaccatctttggattaccatccaccagtttatataacttttactgacatcaacattgaatgatcccaccattgattttgaagatgttttccacaatcattctgatatacaaatgatttataaatacttaattaacaaggtagacacttccactattatcacacaaaattaaccataaactgtcacaacctactcttacacatgtcgctggcaatcaatcttctcgattagttgtaaagatcttgaaattcctgattcacatttttata

SEQ ID NO: 110894 - DNA, 342 bp, Glycine max
  Clone ID: PAT_MRT3847_71147C.1
ggctcgagggagaaaaaaaaagagggcgcgacgcttagtcctggagaaaagatgaggccactacgtgttgaaggaggatgttaacactgcggatgtgtggcaactacttgagcgattcacgtgcctgtttccgatcaggatgtgatatacatcatcggctatgcctgcggcgctggaattacatgtggtgcttctggtgatgtacatggcgatgccgcttatgaaatactgcttgctcaggctctgtcgcaccctcctagacattagatcctactggacaaccttgtgagcttgcgagatactactctgtacacatgctgtcgaggtactgcctgaatatat

SEQ ID NO: 110895 - DNA, 1999 bp, Glycine max
  Clone ID: PAT_MRT3847_71148C.1
tccttctcacaccaactgccatccattgccttcatcatgagcggcgccaccactcctctgccctccggcgtgagcaccccggacatccgcacccgcgagctcaagcagcccatggacgtggcggagtacctcttccgccgtctgcaccaagtcggcgtccgctctgtgcacggcctgcccggtgactacaatctggtcgccctcgactatctgcccaagtgcggcctcgactgggttggtaacgtcaacgagctcaatgccgggtacgccgctgacggctacgccaggatcaagggcatctctgccatcatcaccaccttcggtgttggtgagctgtctgccatcaatgccattgctggtgcctactcggaatatgttcccgtcgtccacatcgtcggctaccccaccactgccgctcagaagaacaacctcctgctccaccataccctgggcaatggcgacttcaactccttcgccgacatgagccgcaaggtctcttgcgccgtgtcaatgctcaacgacccccatgaggctgcgaccctgatcgatgatgccatcaagaagtgctacgtcctctcgcgtcccgtctacattgctttgccttcggatatggtcggcaagaagattgagggcgagaggttgaagactccgctgaacctcgagttctctcctaaccacgaggagaaggaagactacgttgtcgatgttgtcctcaagtacctccacgctgcgaagaatcccgtcatcctcgttgatgcttgcgcaatcaggcacagggctctgaaggagaccgacgagtttatcaagaagaccggcattcccactttcgttgctcccatgggcaagagcgctgtcgacgagaccctgcccaactacggtggtgtgtatgctggcgatggctccaacgccggtgtccgtgagcgtgtcgagtctgccgatctcatcatcagcatcggtgctgtcaagtctgacttcaacaccgccggcttcacctacaggacttcccaacttaacaccattgatctgcacagctatggcgtcgccgtcaagtactcggaataccctggtgttcgcatgaacggtgttctcaccaaggtcaccgccaagctgggcaagctcaacattgagagcgggcccgtccccaacaacaccgtccccaaggagcacgctgactcttccgaccctaccatcacccaggcctggctctggcctcgtgtcggccagtggctgcgtgagaacgatatcgtcatcaccgagaccggtactgctaacttcggtatctgggagactcgcttccccaagggtgtcactgccatctctcaggtcctctggggctccattggttacgccactggctgtcttcagggtgccgccctcgccgctaaggagcttggtcgcgagcgcaccattctcttcactggtgacggttccttccagttgaccgctcaggaagtcagcacgatgatccgcaagaacctcaaccccatcatcttcgtcatctgcaacgacggctacaccattgagcgttgcatccacggctgggatgccgtctacaacgacatccagaactggaactacaaggacctccctgctgccttcggtggcaagccggagcagttcgacacctaccaggtgaagaccaaggaggagctcaacaagttgtttgctgaggagagcttcaacacgagcaagaagctccggtttgtcgagctttacatgcctcgcgatgatgctcctgcagcattgatgctgacggctgaggctgctgccaagcgcaaccttgagggttaaactattgtttgcttgtattatgaaaagcggattgtcagtggagttcggtaatgattgggggtttcggtttttcttttctcattcccacttacctccttccttccaccatgaggtcacgaagttttccatggtattaaataggagctaccagagccggaaaatgggctgtaaatagaatagaatatcaatggcaccttatgtcctgggc

SEQ ID NO: 110896 - DNA, 205 bp, Glycine max
  Clone ID: PAT_MRT3847_71149C.1
ggtggccgctgtgattcccatgaggtcctccccatgccgcatctcccaccctcaatgtcgcccgatcatattgttgtcgtcgatgctcacccaagctctttgtgtggtcaaagttatgatctactcacaatgggtgctagtgagtcatggtggatgatagagatgacaatggatgctggtgatttcttggttcattgttcatgga

SEQ ID NO: 110897 - DNA, 181 bp, Glycine max
  unsure (1)..(181): unsure at all n locations
  Clone ID: PAT_MRT3847_7114C.1
cgacncagncaatgtcacgntcttcaatacgaatgcaanatncgcatntntgagntcccgantatcantgccncgancgggnnaattcgagaatgctanacgcaatgnaaaattcggtcaatggnggctnctaccatttgnagagntgtggnnatnccagcgagaagagttatcggtgatt

SEQ ID NO: 110898 - DNA, 112 bp, Glycine max
  Clone ID: PAT_MRT3847_71150C.1
cagaacccataaattctctcaccaagattaccttaccttattgcattgcataataccaggtcaattaaaatgtatgctgacctcacccttactgtgtggcaatacatggcca

SEQ ID NO: 110899 - DNA, 2050 bp, Glycine max
  Clone ID: PAT_MRT3847_71151C.1
aacaaattctcagggcatattagtgcaatctcatcatattccttggagagcttgtctttatcccacaacaagttacaaggcaatattccagaatcaatttttagccttctaaaccttacttacttaggtctatcatcaaacaatctaagtggatctgtcaaatttcatcgtttctccaagcttcaaaatttggaagaacttcacctttcacagaatgatcagttatcactaaatttcaaatccaatgtcaattatagtttctctaatttaaagttcttgaacttatcttctatggttttaactgaatttccaaaattatcgggaaaagtcccaattttagaatcactctctttgtccaataacaaacttaaaggtagagtgccaaattggttgcatgaaatatcgttatatgaattggacctctctcataacctattgacacaatcattgcacctattctcgtggaaccaacaactcggttaccttgatcttagttttaactcaatcactggtggcttctcttcctcaatttgcaatgcaagtgcaattgagattctcaacttgtctcacaacaagttgacaggaaccattccacaatgccttgcaaactcatcatcccttcaagttttggatctacaactgaacaagcttcatggcactttgccaagtaccttttcaaaggactgtcggctcataactctggatctcaatggcaaccaactattagaaggtcttttgccagaatctttgtccaattgcattcatctggaggttttaaatcttggaaacaatcaaataaaggatgtgtttccccattggcttcaaactctaccagaattggaagtattggttttgagagccaacaagttgtacggtcccattgagggttcaaagaccaagcatggattccccagtttagtcatttttgatgtctcttccaacaacttcagcggcccaataccaaatgcctacataaaaaaatttcaagccatgatgaagaacattgttctagatgtcgatcggcaatacatggaatttatttcttttcatgaagccaactatgctgattctgtgactataacaacaaaagcaattactgtgacaatgggcagaattcgaaatgactttgtaagcattgatttatcgcaaaatagatttgaaggagagattccaaatgccattggagagcttcattcactcagaggactcaacctttcccataacagacttattggtcctattccccaatccatgggaaatttgacaaacttagaatcattggatctctcctcaaatatgctcactggtgggatacctacagaattaagcaatttgaactttcttgaagtcctaaatctttccaataaccatcttgtgggagaaatacctcaaggaaaacagttcaatactttttccaatgattcctatgagggaaactcagggttatgtggactcccactgacaatcaaatgcagcaaggaccctgaacaacattctccaacttcaactaccttgaggagagaaggaggatttggatttggttggaaaccagtggctataggatatggatgtggaatggtctttggagtgggaatgggatgttgtgtattgttaataggaaagcctcaatggcttgtgagaatggttggaggtcaactcaataaaaaggtgaaaaggaagacaaggatgagatctaatgaaaatggtagcagaatgaattagttgatatatggcatgactggagaatgtcttgttacatacctgccatctttgaaaacaaaacttaagggcaagaactttatcacactgcattgcatgggagatctggttcaaagttttgctgtaatatgaatgtgttgtacttttgcttttttgtgtgttctttttcgttttttgtgtagaagagtgcgatgtattgagttgcagttttgatttatttaatacgtataactgtggcattaattgaatatgtaataatagatgttgtatatttttttgtataataatagatgttgtatatttttaaaaatgctatgtattggccaatgct

SEQ ID NO: 110900 - DNA, 1644 bp, Glycine max
  Clone ID: PAT_MRT3847_71152C.1
aataacaaattttaaagtagagtgccaaattggttgcatgaaatatcgttatatgaattggacctctcctcataacctattgacacaaatcattgcacctattctcgtggaaccaaccaactcggttaccttgatcttagttttaactcaaatcactggagacttttcttcctcaatttgcaatgcaagtgcaattgagattctcaacttgtctcacaacaaagttgacaggaaccattccacaatgccttgcaaactcattcatcccttgaagttttggatctacaactgaacaagcttcatggccctttgccaagtacctttacaaagaactgtcagctcagaactctggatctcgatggcaaccaattattagaaggtcttttgccagaatctttgtccaattgcattcatctggaggttttagatcttggaaacaatcaaataaaggatgtgtttccccattggcttcaaactctaccagaattgaaagtattggttttgcgagccaacaagttgtacggtcccattgccggtttaaagatcaagcatggattccccagtttagtcatctttgatgtctcttccaacaacttcagcggcccaataccaaaagcctacatacaaaaatttgaagcgatgaagaacgttgttatagataccgatctgcagtacatggaaatttctttttcttatggtagaaacaagtacagtgattctgtgattataacaacaaaagcaattactatgacaatggacaaaattccaaaaggctttgtaagcattgatttatcaaaaaacggatttcaaggagagattccaaatgccattggagagcttcatgccctcaaagggatgaacctttcccataacagacttattggtcctattccccaatccatgggaaatttgacaaacttagaatcattggatctctcctcaaatatgctcactggtggtatacctacagaattaaccaatttgaactttcttgaagtcctaaatctttccaataaccatcttgcgggagaaatacctggaggacaacagttcaatacttttcccaatgattcctacaagggaaactctgggttatgcggactcccactgacaatcaaatgcagcaaggaccctgaacaacattctccaccttcaactaccttgaggaaagaaggaggatttggatttggttggaaaccagtggctataggatatggatgtggaatggtctttggagtgggaatgggatgttgtgtattgttaataggaaagccccaatggcttgtgagaatggttggaggtcaactcaataaaaaggtgaaaaggaagacaaggatgagatctaatgaaaatggtagcagaatgaattagttgatatatggcatgactggagaatgtcttgttacatacctgccatctttgaaaacaaaacttaagggcaagaactttatcacactgcattgcatgggagatctggttcaaagttttgctgtaatatgaatgtgttgtacttttgcttttttgtgtgttctttttcgtttgttgtgtagaagagtgcgatgtattgagttgcagttttgatttatttaatacgtataactgtggcattaattggttgtataataatagatgttgtatattttt

SEQ ID NO: 110901 - DNA, 714 bp, Glycine max
  unsure (1)..(714): unsure at all n locations
  Clone ID: PAT_MRT3847_71153C.1
tggccgcagacagagagaaagacactttcactgaaattctaaaagaataaaagatttgtgttttgtatttttatgttgaattgaatccctcgttgttttttgtcagtcactgtcatagtccaatttgtgcggttggttttgttaccctccctctccagcctttttcttgagtttctctatctctctctcactcctttttaatttttaataatttgtttgtctgttgcgtgaaagaggccctgaaaacaaggtttctgctgtcaagtttggagctttttgctctgtgattggtngtgttctccaaacaatgcttcattcctccaaataatgcttcattcctcatctgggtacttggttctggtttaagatgggggtgggtgaccgttttccggtgggtatgcgtgtacttgccgttgacgacgacgaaacgtgcctctcagttttggagaacctgcttcgcaaatgccagtataatgtcactacaactaatcaggcaattaaggcgctagaaatgttgaggaaaaacagaaacaagtttgaccttgntattagcgatgtaaatatgcctgacatggatgggtttaaacttcttgagctagtgggacttgaaatggacctacctgttattatgttgtcangataccgtgataaaagagcgggtgatgagaggtgtatacanggtgcttgtgactacttaaccaaccagntcgaatt

SEQ ID NO: 110902 - DNA, 589 bp, Glycine max
  Clone ID: PAT_MRT3847_71154C.1
aaggaaatctattttatttttttttttttatagagaaaatggaaggcttgtcacttctcaaagtaattttcacatccaggggaaattttacccatgtaatggaacttgcctttaacaaacgggtaccctttgaacaacttaaaatcacttaaagaaaattgataattttcgttgagatttgaaaatctaaccctacctttcttgatctggacaaccataatataaggattcaagccgtaatttgatgccaaactaactgcaccatacatctcaacatcacataaatacttaccgcaaggactaactacctacttaatataagcaccttttggatgatggtccatattcatagccaaacccaattcaattttgttcaaatcccagagacactgttcggggtatacacaaaattttgtttttacttgttgtcacccactaccaccaatgtaaagattgaaggcctaaaagtcccttatctgatttaaaccaccaccaaattacctttgccttgcgacattaacaagccgattggctttactatcaattttgagccttggcccttacatgggaaggcgaattatctcactta

SEQ ID NO: 110903 - DNA, 600 bp, Glycine max
  Clone ID: PAT_MRT3847_71155C.1
ttcggcacgaggttcaatccctctatttttgttgggtcaatcctagatttgaatatgccaccagaatcttgtcagtttcaatagcttttcctccaaacagaacccaggggctaaccctttattcaattctcattggaaccctttattgttgttttctggtggctggaattggagggggaagagctattgaaaacagaaccaatttatcagcctttttcatcttcttgatcctgttgagcctaggatggactatgcagtttctgaagaatgcaatgtatgtcactatttcaagggtcaagtatatgaattttgcaggaggagttgacatggacactagagttgcattttgtgacacaatcaagcacttaactggaagtgtttccatgggctccatcctcgttcctgtcatcgtgctcttccgaggttttgcgcgaaccacgagcctggttggaggagacacagatgagttcatgttttcctgtgttagttgctatatgggggttgcatcttttcttgtggtccgtgggaaccggtggggttttgtgcatgttggagtttataacaaagggtttgtgcaggcatctactgatacttgggaaa

SEQ ID NO: 110904 - DNA, 507 bp, Glycine max
  unsure (1)..(507): unsure at all n locations
  Clone ID: PAT_MRT3847_71156C.1
ttnnnnnnnntnnnnnnngattaaaaaacatttataataaacatcatttctcaataatgttattctttaaaaattgatgtcaaacatgaaaaactatttcaaacctatgattatcgaaaacaaaaaatttagcttctaccaaacgccccctaaagacaaaaactattgctgggtctaaaattaaaattaaggaattcctttcaagtcgcagggtgaaaggagaaacaaattccaaatcatatcgctaatgccaggtgtaacagacgggacttgtccacaagctatgtagagaagtaccattacaaacactgaactaccaaacagcaatgcctaaacctctcccttcttcaaaggattacacagtatatatctaattgccggaagcagagggactaattcacaagtaggtctctttaaaaaaaaaaagaaaaagttacactgatggaaccatgttaccgcaccaagttatcatcaaatcacatgataattatttcagttcaaaacaca

SEQ ID NO: 110905 - DNA, 1429 bp, Glycine max
  Clone ID: PAT_MRT3847_71157C.1
atggattttggtccaagagggtcatctatgttatctcccaatgctcagatgggtggactgcgtggattgcctactcaagttcgcgggtatggttctcaggatgctcgcatggaagacaggcaaacttatgaggctaggacattgtcagttcccttgcctcagagacctttaggtgatgaatccataaccttgggaccacagggtggccttgccagaggaatgtccattagaggtccacctgcagtttcaagttcaactggtcttaatggttataataatttgtcagagcgcacttcatacagctctagggaggaccctgcatcaagatatactccagatagatttgctggttcgactgcttatgatcaatctagtgttcaagatcgtaatatgaattatggcaacagggacttgagaaatgcaaataggattcttgataaacctgttgtaacttcacctgcccgaacacaagggacagcagcctcccagagtatttctgcagagcgactgcaggacatgtccatggcagcaatcagagaatactatagtgctagagatgtgaatgaagttgttctatgcatcaaagatctgaactccccaggctttcatccttccatggtttctctctgggtcacagactcatttgagagaaaggacaacgagagagatcttttggcccagctgcttgtcaaggttgtgaaatctcaggatggacccttgggtcaagcccagctcatcaaagggtttgaatctgttctcagtactttggaagatgcggttaacgatgcccccaaagcaccagagtttcttggccgtgtttttgccaaagctataacagagcatgtagtctctttgaaagagattgggcggttaatacatgagggtggagaggaaccggggagcctcttagaagctggacttgcagctgatgttcttggaagcacattggaggtaataaaaatggaaaagggtgatgctgttttgagtgagatctgcacgagctccaacttgcggttggagaccttccggccacccgaacctcttaaatcaaggaagttagagaaatttatttagggggtagagatgctcatagaggaatatatttattcatgtctagtgctactaataggggatactcaaatttgcagaaatggttttctccatgggggagtgggtgggggagatttttatgttcggatttctgtctaaaagattatttctgccatatcttcactgcaattataaaaggttcagttaagcgtctgaaaattttaggctgagttatatatcatgtctgtcatgagggtttactttttcagcagtcttgtatcattcaaagttcaaactgtccatgaaaatatactggcatattgatctgcatcatgtcaatgtgtatagggacatgcaatcaagcataacgccacatact

SEQ ID NO: 110906 - DNA, 660 bp, Glycine max
  Clone ID: PAT_MRT3847_71158C.1
aattcggctcgagagagaaactccctaacagaatcattttcttccgagacggggtcagtgaaactcagttttacaaagtgctggaagaggaacttcaatccatcaggtgtgcatgctcaaggtttcctggctacaaacctaccattacctttgcagttgtgcaaaagaggcatcacacaaggttgtttccctttgaaactgaccagtcttcaactcaaaaaaacaattttctatatgaaaacattcctccagggactgtggttgattctgtgatcactcatccaaaggagtttgatttctatctttgtagccattggggtgttaaaggaacaagtaggccaactcactaccatgtcttgtgggatgaaaaccagtttacttctgatgaacttcagaaactggtttacaacttgtgctacacttttgttaggtgtaccaagccaatttctttggtgcctcctgcatattatgcacatttggctgcatatagaggcagactctaccttgagagatcagagtccttaggtttattcagaagcacatgtacactatccagagctggtcctccaaagaccaggcccttacctaaacttagtgaaaacatcaagaaagctcatgttcttttggctggcggatattttgttactctttctggccatg

SEQ ID NO: 110907 - DNA, 648 bp, Glycine max
  Clone ID: PAT_MRT3847_71159C.1
cagacagttacagtagttactcttagtcaacaccagaggcagagagacttctagctctcggtcaaaatcacttccaccactccgatcaaaaccactgttcctaaaataaaaccctaacctctcacaaattttccattttccgagtttcttcttctgaaccgctttcctgcattttcgccaaactccttctcacaagttatttattactttgaactccataaatagcccccggtttctgctcgaacaaccgttacaagaaatagaattaactattgctttttattctttcctttagtttttgaattttgataatttcattgtgactgaatggatataatttgataatttttcgcagatcgagctttgaacatttgaggcatttcactgataactgatacagattaccgaggacattttgtttttcgttgttggttgtgcttattgtttttggttggatttgatttgagttatttgtcaaaatacgtataactcataataagcatggcaagcactatgcaactaagttgggttagtaagagcacggtccccgtggctttgagtagaagagtgtgttgtcaatgtcaaccacccctgtggctgccatggcgaattgggtttgttactcccgttccccttgtgaggagagtt

SEQ ID NO: 110908 - DNA, 395 bp, Glycine max
  Clone ID: PAT_MRT3847_7115C.1
caaagtggaatatatggacactaaattgcttggaaaacggtgacgctgttcgactgaattgaatctgatccaataatccgatacgcaccaacatgagttttataccgataaatgctttccagagtgccgagtgagtgatacatccttacaacgtaaaggaggggggttgaactttattagccgttggacctgtctcccaagaccgaatatgagctgaactgtataatatgaaattttcacctaagaaaagcaaaaaatatttatgaaacaaacattagattccattgaggcatcgatttgaacaattggctcgttaaaacttgaggatctactccatttttcatgcaaatagtgctctaaagaaacagtgcgctctgtgctactgatggagaggg

SEQ ID NO: 110909 - DNA, 330 bp, Glycine max
  Clone ID: PAT_MRT3847_71160C.1
cttaatacgcgaccttctgatcaggagcagagaactagcgataggctatgtttaatcctgatggtgatgacctagagcttgaacgtgtgactttgttcattcctattgcaatactcctgtgaccgcactactacaagaccatgtcctatttctaactggtggttgacaacgacgaggagtgccatttattaggccgtctgtgctggaccgtgtaaaaacacatgctcacctgagaaaacaacaaagttgttagtgcgatggatctgagcatataataacgaggtcggccgcgccacgattaaatacctcgcctacctgcgcatgatgacc

SEQ ID NO: 110910 - DNA, 454 bp, Glycine max
  Clone ID: PAT_MRT3847_71161C.1
agccctctagttgaaaggagtcgaatactaatatgtggtagtttatttggcctactagagtgatttgcttctcttatccttccctgttctcaagatagttccagtttttattctctttgagtagcccttagcagagtctcttgagatagtagagttcattgatgtgacatggtagtacttccccttcttgccttctgttccttaccttagagccttggctcgtttctggtcctaattctttgatgactagtttgtgggtgctgcatggtatgctgttttctcggttgatgagttagatcgtgagtagaatgttgtagttacttatgaagctctgcagtttcttgagtatgagatcaaagacatgaaattctttggaagagatgaagttgagtaggtagacttagctagtgtctacattgcattgtaagtccctttgatttataatttacagggt

SEQ ID NO: 110911 - DNA, 277 bp, Glycine max
  Clone ID: PAT_MRT3847_71162C.1
cctctttttttttttttttttaaggaaattgggggaattttataaatcctttgggcgaccaacccgaaaaaagatccccacaaatattataacttcccttccaaagaaattttattaatttccataacttaaagtctatataagctttagcaagcctccttctcaggtggggaggggtatattaatcccaaccttaattattgtccgcagggcccaaggccacaagccccaaactttaaaaaagccaacaaggccccaaccaccattagctccaccc

SEQ ID NO: 110912 - DNA, 520 bp, Glycine max
  Clone ID: PAT_MRT3847_71163C.1
ggctcgagctaaaatatcttcaaaacttgagcttgaactctaaccatcttactggaccaatcccaagtgagattggtgattgtgtcaatctcaagacccttgatatctttgataacaaccttagtgggggtcttcctgtggaactaggaaagctgacaaatctggaggttataagagcaggagggaacagtggcattgtggggaagattccagatgaacttggagattgcaggaatttgtcagtgttaggtcttgctgacactaaaatttctggttcattgcctgcttcactgggtaagttaagcatgcttcagaccttgtctatttatagtactatgctctctggtgagattcctcctgaaataggaaactgttcaaggcttgtgaacttgtttttgtatgagaatggtctctctggcttcctgccaagagagattggtaagcttcagaagcttgaaaagatgcttctgtggcaaaacagttttggtgggggcattcctgaggaaattggcaactgtag

SEQ ID NO: 110913 - DNA, 350 bp, Glycine max
  Clone ID: PAT_MRT3847_71164C.1
caaggcaagaacaaagtgacttcaaggggggggtaaaaactaaaaacagattcattatgacacacatgtccaaaaataaattacaagccaattttctaaaaggaagaaaacacagcgacggacacttggcagagtttgcctgtagtacaattaatgggtaaaaataccggaaaacacctacccttcctaacaaccctatccatagaaaaaaaaaaaggggtctggtcaacaaaaacacccccccgaggaacccaatgtgaaatttatctttaaacccccccccttaagacacgtctaccgggaattctttcttgtcaagtgggtgtacctgggccttaatgggtaccccc

SEQ ID NO: 110914 - DNA, 171 bp, Glycine max
  Clone ID: PAT_MRT3847_71165C.1
cggtcgcgtgggcggacgcgtgggtgaaattgtgataaaccttgagcacaggttgccgtatctttaaaaccggaaacaaaagcaatcgttactcgactttcaagaatctctcaaccacttcatactgatacgtgaacgacttcataagggaaagaaaatctttctcttgtg

SEQ ID NO: 110915 - DNA, 495 bp, Glycine max
  Clone ID: PAT_MRT3847_71166C.1
ccaggtctgatttgcacttctctgtgtagaagggtatgatattacaccagactttacggttaaaggatcggtttaagcagtattattttgagaacaggaagcttcagacttgactctcggaattttcaggttacgacgatgactcctttactgtagtctaatcaaacgttctttgctacatgattgaagggttctctaaggaggaagatcacgttgtgagggccgggggaggcttgattatcaaaatgaaagttgaaaacctttggcatattgttgttactaaaatgcggtctgtgttgaaggatcagttttatagaatgcaatctgacaatcatttattgattattaaggatgatgatactctgttactaatgacgctaatgatatatggatattctatagatgcacagcttgatgttgtgagcaaacatagggatatatacaatgagctgatcatgtctgacagcacgaagctgattgcagaggcacatatcg

SEQ ID NO: 110916 - DNA, 290 bp, Glycine max
  Clone ID: PAT_MRT3847_71167C.1
ccacgcgtccgcccacgcgttcgtacggctgcgagaagactacagaaggggcggtcacttggccagaacccagctgatgcagagctgcaggacatgataaatgaggttgatgctgatgggaatggtaccattgatttcccagaattcctgaatctcatggctcgcaagatgaaagacactgattcagatgaggagctgaaggaggctttccgcgttgttgacaaggatcagaatggctttatctctggagtggtgctcccgcttttgatagaccaatcttggtgagaagc

SEQ ID NO: 110917 - DNA, 351 bp, Glycine max
  unsure (1)..(351): unsure at all n locations
  Clone ID: PAT_MRT3847_71168C.1
ttcttcaccgtggttaactccacatatgtgccatgcaacccaccccccaaaactccaaaacacccacctatcccaaagccaccttccccaaagcaaacaagttaccccaaagacactattaagtttggtgtgtgtgctaatgtgttaggtttaatcaacatacaacttagaaanccaccaaagaccccatgctacaacctcattaaaggtctcactaatcttaaagctacagtatacctctacactgctctcaaagctaatatattaaacatcaacctcaatattccagtaaacttaagcttactactcaactactataaaaaagatattcccaaagatttcatctactat

SEQ ID NO: 110918 - DNA, 272 bp, Glycine max
  Clone ID: PAT_MRT3847_71169C.1
aagactaactattatgactgcttatagcttggaaccggacgatctcttgttggcataagagcccattgcctatggtagcctttaaaagggaaagcatcattgttctctagcccctataggacgtagcaagagaggtaaggatcctattgtattaagctcacgggcctataagaggttcctatctagagagctcatattagatcatgggagtagcccctgaacagacctaggccatttgttgattctaggaggggagtccattggtctgcagg

SEQ ID NO: 110919 - DNA, 1249 bp, Glycine max
  Clone ID: PAT_MRT3847_7116C.1
gtccagatccacccccctgaagctgaacttcttgaacgttctcttctttggctgccctgcagccgccgccgccgccgccgccgccgcgtcgacctccgggtcgaccaacgccgccggaacggcaaaggtggtcttgtttttgtttcttttggagaaagagagtgagagagaagaactgtgtgttgtgtgtgtaagagagccatggggaaatctacctcctgcttcaaactaatcacttgcggtggcgatgcggcggagaaggatgattaccaccaagtctctgagatcaaggaatctaacgataaacgtggttggagtttccgaaagaaatctgcaaggcatcgtgtgcttagcaatactgtgatagcagaggccccatcttctgcaaataaggaaacttcagaatgtagtacttttaattttcaaccacttcctgaacctaatgttgttgagaagatttacacaacaaattgctctgatgagaagccccagttatcttcctttgaaagctcacaagtagaagaaacaaatgtcattgaaactgaggagaagttggatgtgaatccaccagagtctgatgtcatcatcatccaggctgctattagagggttattggctcagagagaactactacagcttaagaaagtagtgaaattgcaagctgctgttcgtgggcacttggtccggagacatgctgtaggaaccctgcgttgtattcaagccatcatcaaaatgcagatccttgtgcgagctcgtcgtgcttggcagtcacgtctggaaaatcatttaaatcataaggatggcaaaagggattcctcagaagctttgggaaacaaaaatctcatgaccaaatcaaatgtgagttacatttccattgagaagctgcttagcaataataggtttgctagtcagctggtggaatcaacaccaaagaacaaacctatccatgtcaagtgtgatccttctaaatccgattctgcttggaaatggttggaaaggtggatgtcagtatcatcaaaagatattgcagagtgcaaagaaattagttctctgatagagcactcaagggaaagcaaagatagcactcccatgttttaattcgaaatgggtattacatctgaaccttttccccaagcagttgactcgaagctcactgttgaagattcacttatgccatctgaggatgaagaaaagatgattacttgtgatgctgatgactttgagctacagcaagctactccacatcatc

SEQ ID NO: 110920 - DNA, 431 bp, Glycine max
  unsure (1)..(431): unsure at all n locations
  Clone ID: PAT_MRT3847_71170C.1
tgatcctttcagatggctgcttccacctttcaagtgtcttaactcttaagatgaggtaaaagaactttctcccaaacatatcattagatatagagctcttccatcagtcttgaaggctttgtgtccataacttcactgatcttggctattgcttgcatgtagttttttaatttgttttctggttattaccggtagtagactagtagtgatactgacccaaagtggggttggtgcaccttggtcactgcttataatagtgactatcagcatatgtatcaatcagatgtatgtagtagcagtcatgcatatttctatgtatatcacatgttctatgttcaatgaaatggatcttcaatttttttgttccncacaaaaaaactccaaatcttatatctaataattaatataccaatcttttttttatttaaaaa

SEQ ID NO: 110921 - DNA, 133 bp, Glycine max
  Clone ID: PAT_MRT3847_71171C.1
caaggctacagtccttgctggattcatatcttcaggcaacatagaatatcagaaggtgcctggaaagggagagctcatggtctcaccactagggctgttgcacttccaaattgctgatggtaagagaaaggcc

SEQ ID NO: 110922 - DNA, 563 bp, Glycine max
  Clone ID: PAT_MRT3847_71172C.1
aaaaaccaattatgcctataataaatataaacaggaactgactcaaaaatccctgtgagaaaagatgcttagactatcgccctcctaactcgaggcaccgtaattttgggccccagtggaaatcgcattaaaggggaaacccaaccaagccgaaccttcaaaggtgcaataccatccgccaattgcataaaaagtctggcgttccgggtgtgccttatggggaaaattttaataatacttctaaattgcaaaaatccttttttttaaactaggaaaatattcttattttaaaaaaccccccaagggggtttttattaaaacgccggaaagaaggctttttgccgctaaaattttttttctgggggaaaaaaaaagggcgtctccccacggtatcggggggggcccacctcaaaaaaaaaggaaaaccccctcccctctcttacaattttcactggcaaagaaccctggggtggagcaacaaaaaaatttttctaataaaatccccccctcccgggtcttctgcccccaagaggggagtaagggccccctttttttttttattt

SEQ ID NO: 110923 - DNA, 359 bp, Glycine max
  Clone ID: PAT_MRT3847_71173C.1
attgtgcttttttcaatgggattttggggacttgttttttgcttttaataattaatttccttttaggtttgatttttaatgaaataataggcataatgttaatatacaacagtgaccaaaaacagaaagccaaacaaaaccccacaacctaagcttctttcctaggggaggcatgagccagaacaacgccgtggcacaaaaacagggggctagaaaaaaatgcccagcttttttgctggcactgcattcaggagtcttggctagcccttaaataaaaatacaaagacgggcgacaggcttagcttttattataactcacttgcgccgggaagagatcatatgctggtgaaccttgatat

SEQ ID NO: 110924 - DNA, 975 bp, Glycine max
  Clone ID: PAT_MRT3847_71174C.1
ccccgtgccgccttcggctcgcggtggtgattgccctcgcggtatgcctcaatgctgctttttgtccgtcggctgtggctctcatcagctgcccgtgtggcgtctgtgcttctcaatattcgcccgtcggctgcggcgctccatacttttcgtgctgcgtctctgactgccccccctggtgtaccagtgtagcggaagactcccctgtcaaacactgtaaagggaaagaagaaaaagtacaagaaaactctgtggttagagaaaacccttaccacaagaattagttgatcgcatagattcccatatggattagctgatcgcgtagaaaaatgataggatggccttgaagagctgcttgttgatatgtcttcactgttatatgatcatcggttacaggatgcctacttgaacagttcagatattctgcagagcaccatgttcaccgaacaatatgttgatcatgtcttgaccagtgagagggataatatgagatgttgcaaaattgagtacaaataccccgtgcactcctctcaaacttatatatatgggggaatacttattgctggattcgttgtgtactttgttgtaatttttttctcatctccggtgcgctgaatccagattttgaagccaacagccaaaaacaacccagccatatcacactaggtagagcttatcactgctataccaaaatcaaatatcaaatgtatacaattttgaatgcatagttatcaatgcaggacaaatgagaagatcaaaattactagagtaacattgactagattatgtattttggtaggtactggctggggcttcgggtttaatttactttgacattcctagagtggtaatagctgaagaaatttgcgtgtgattatttaattcgttgcaaagtagcggtaatagctgaaaccctaaatttaatgctgaagataccaatgaatttggtagcgactaaaccataaattcaaaccc

SEQ ID NO: 110925 - DNA, 1014 bp, Glycine max
  Clone ID: PAT_MRT3847_71175C.1
caattttggtaaatgaagccctctgtgctacgtttgtcactgcttgttttcgttcctctgcttctatccctcttgtatgttgcactcatgccaaagaaggaaactgctatgaaaacctatgaggtctttggagtgaagatagagaagaacccacctcagtccaagctcaatgagcttggagtctcaacttggtccaagtgggaaggtggtccagccaaaattccatggtcctttaaagaagaagagactatgtatctgctggagggaaaagtgagggttactgttgaagggtctgttgggtcttttgaaattgggggtggtgatttagttgtcttcccaaaaggaatgaacattacttgggaagtgattgaagctgtgaagaagcactacagcttgaaaaaataatgatgtgtacttataagccttttctgttgttgtggcctaatgatgccatgtatgaacatgatcaagtaattactactcactatagcaggatataccaaagcctttcacttccattagattgtacctttgacaatgatcctattggaattaatctctgatcattatgtttaaaatgattgtggagggagcaactctcatccttccattagattgtacccttgtcaatgatcctattggaaataatctctgatcaaacattaaataagtgggatccttttataaattaatgaagaaagagatgaatactacaaaacttgtacatcacctacctgtcatgtgcatgaggggatcctctccagatttttcttataccaaatttacatcgatgataaagtgacaagtttggctacaaaggccaaaatttcagagtaatcatccatctctgctgataccatttttcattaagcagttgaaactagccaatcaatttggcacctataatttttaactccttagcgattagacttcctagtattgcaaacagaaacttcaatatagtttcccattcattgttaaccttcttatgccactaatgaattatgcgcatgt

SEQ ID NO: 110926 - DNA, 526 bp, Glycine max
  Clone ID: PAT_MRT3847_71176C.1
gtaaggctggctcgcctgcctgtacgcgcccggactgactggctcgacccacccatgcgatctttttcacattcctgggaattgatcttcccaatatgggtgtgtagtccttacaatggcagtgaaatgtggagttctgagtagggcaaatcaaactttatggcacttgagatatcttattgacaatcccaaacagtctacattttctgacattcatccttgggaatatcccatgaacatgaaaacggtgtggatactattatgccaactttttactgtcacacaggctactgccaaatctgctgagaatgcggaatcctctgaatgatctggaatgtggatgatttttagtgggcacaactggtgaattcaatacaggaaatcaagcatgaccctcttgtagcgtgtgctcagcctattttaaaatgaccacgcctctaataattgacgatatgatgtgtggagagtgtgttattctaaggaagtgattgttcctcattggtacaagtgttgttaacaaacgggc

SEQ ID NO: 110927 - DNA, 224 bp, Glycine max
  Clone ID: PAT_MRT3847_71177C.1
caccgataagacgagagaagaggacgagattccagtacactaacatatacattgtcgtatcgcttatgactcagagtctggtcttgtgagttatggcaatcttagtagcataatgtgtggctggcacatgcaacgctgtgatccgtgtacaaatgatgactcaagccgggtcatgctatggcgattctgtggccctagcaacgtgcctatcttacgtggtacag

SEQ ID NO: 110928 - DNA, 662 bp, Glycine max
  Clone ID: PAT_MRT3847_71178C.1
gctcgagtattgttatccatcctattcctatccacttgaggaagaaatgcatcatatctgtgtttgctgcaagggcttgactcctctacctcctcctcctcctccgcttcaccaaagacgaaacactctagtcattacttttgcttcaaagtctggaggaggattttcacttaactcgttactgaaaagttgtaaaagttgcggaggaaagggggcaattgaatgtcctggatgtaaggggacgggaaagaataaaaagaacggaaatatatttgaacggtggaaatgttttgattgccaaggatttgggctaaagagctgtcccagctgcggaaaggaaggcttaacacccgaacaaagaggagaaagataggactaaggattcaaacttgcacttttctctcaattgatcaaccccttacccctttatgcaatcttatacttacgatataaatagaggtcatatgcatctttttgaaactttgataatttgaatattaaacttcagattttagagttcttttagagcacaaaatttcgtattcctcccggtctttatgttgaaaactctctttgtatgttgaaactttaaaactgatacccttcatgtgacttatatagttttgattataaaatattattaaaagtatccaacttactgc

SEQ ID NO: 110929 - DNA, 355 bp, Glycine max
  Clone ID: PAT_MRT3847_71179C.1
gactatgagtgagatggacgacttgcacaaacacgctcctaccgcgtgcagcgacagacctgtcacaacagataagatacattggaaatggactagcctggggacccctgatagcacgtaccctgggagtgatctcttaaatctatttcgtcatacaccagaatgaccgtgcatgaacgctttgctacatattaggacatagttgtgcacccccctgtcagcagcgaatggcattatttgtattgatatcgcagcagatcccagtacccctcgaattgacaatacaaaaagtctagtgctcctctgctccctattcacccatcataaccagaagatccctttgctacttgacttg

SEQ ID NO: 110930 - DNA, 831 bp, Glycine max
  Clone ID: PAT_MRT3847_7117C.1
attactgagggagggcaacgatattctgtgttgcgattatgctagttttgatggtttgattaccaagcaagttatgagcaagatggcagaaatgataaacaggctttgtggtggtgatgaaaaattgatgccgtgaaaggcccatctgctggtggcttggtggtcaagggtggcatttgaagaaagattttggagaattgaatggggaatcccttcttgatttccggttacaatttatttgcattacctttttaatgaaaaggctattaaaatagttttgaaaaataactgcgccaggttaaggctccaagtttgttttaccaatccttcaaaaattttgtttcttggggtgagtatggtgatgataactaaattagggttcatgaatatgtcaagccttactttagtggttctaaatggaaaagctttctagctgggcataatatcaccattactgatggtattgacaaaactagtgcaactttgcattttagaaagttagcagattgtgattctctcattttttaactggggggggatgcctaatgttttgtgggtggctcctgaggacaaggcgagtttatggtcacaaccttcttatgcttcgtgtaataatctggaaatgcaagaagcttatccttgccatctccgaaatgtgttacgagaatttgtatttgcacagtccaaaggaagctcgcccactgaaaagggaagctctctctcctattgaatggctgcacacgctgagtgctctacctagcacagattaagaggtcattccatgccgaggatgataatgctcctgctcaaatgataatattgctccaccgg

SEQ ID NO: 110931 - DNA, 817 bp, Glycine max
  Clone ID: PAT_MRT3847_71180C.1
ggagacactattcttagagccattcctctttgttgctttctttctagaagattccccatggctgaatggagaaacaattttgggatccacccagcctccagaagcattaaaagatccatcaacattcaaattacttgatttgtttcccccccttgttgagcaattaataaaaccattttgaactccctgcatgtttgaggctcctccattaccaaattgccccatgtaatcaatgtgtgagaaattaggttgctgattcactgtgttgatggtacctaggggattaaaattccgcaggcggctgcggactaactgctgaattctcggatcctcatggaaaaaataactatgagcaggatgaacggggtctgttgattcccatcgttgttgatacctctggcagctagaactaaccccaggattcctctcactaaaacttttagatgcatcaccacctccttccttgcaattggcagaacgaaagtattcttcacatatctcattgaaggcgggcgtggggacagaaacattcttcaccggcaaaaaatccttccatagatcatcatcaggcgatgttttcttattttgttctaaatgacggttagggttagctttattggcaccacctacatccacatcaacatctgaatcatcagaatctgaaagcaattgaaacttactaacagaaacattcttcaccggcaaaaaatccttccactgatccttatttccgttcacatcaaccgaagttttattatcttgttccaaacgactgttagtgttaacttcattggcaccaccaacatcaacatccgaa

SEQ ID NO: 110932 - DNA, 513 bp, Glycine max
  Clone ID: PAT_MRT3847_71181C.1
gggacaaactaaaagctttttattgcaagaacaaatgggaaataacatattcaaaggttataattttagcttatgagctatacattgcaaccacagaacaaggaggagatacaggaatcaagcacaggtcattttttcttctaatagtcactttaaattcctcagtcatgtccaagtcttcattttgtattccattggggagcttccaatcaaagtgatacaagaacaatgcaagtgccatctcaacatttaccaaaccaaatgtgctgccagggcatattcttcttccagcaccaaatggaatgtactcaaaattattccctttatagtcaatagagctatcaatgaatctttctggataaaacctctctggttcattccaatagtttggatctcttccaattgcccaggcattaactattaccttgcttttgatgggtatgtcatacccatgaatcttacattcttgtgttgattctcttggaagtaaaagaggacctggagggtgtaatc

SEQ ID NO: 110933 - DNA, 205 bp, Glycine max
  Clone ID: PAT_MRT3847_71182C.1
aatgaactttattaatctcatttcaaagacggaacaaattggatttggagaattgaaaaaaggatttggggcactggccttaatgatacttttggtcttaaaaatgggaatagtatacaaatgccggcttgggaatgaaagtaatggacttagcccagggttaaaaacttaaaaaagggaatataattatgttctctatggcaag

SEQ ID NO: 110934 - DNA, 373 bp, Glycine max
  Clone ID: PAT_MRT3847_71183C.1
tatttttttttttcttcacatgatgtacgcacacatttcatttcatatcagctataagcgggattacaccaggtaactaggaggctacagaagaaaaccccctgttttgtattaacatcaaacttgatacacaacccacaggcaccctgtcttatttaactaaacttctttctattcagatataaaacaaaggatccgtattgaaacctaactctgaagcgatctaagaacaagacttaatgccatccaacagaagctcgcgttaatccaaaacacggacatgtggctcaagaattgcacataatgcgctgattgggaccatcccctactgtgaattcgcgcgtattaggtggagggcatgccgcgcaatcat

SEQ ID NO: 110935 - DNA, 472 bp, Glycine max
  Clone ID: PAT_MRT3847_71184C.1
gttgaataacaccttaaaggacgagagtcttctttgttaatggagacttacaggagccgtgtttatgttatgtcggacttgtatttgccacttgtttcagacacaacattacacttcaaaagcatccatgcgcttggaatttttatgtagtaccgttcccgcgttctgcctagcagtgcattagggttactgttcatgtcatataccatgtgccaaaaacatagataactgttccttctctctgcttctttattccatgccaatttacctagggatgctaaattagtttgcgtatctgacttttctcctattttgctagtcttctcataaaacacataatagatatatgttttaattttgccccaattgacaatgactttaagtaggtttagggatgaattcttgcttggttttcttgagaaaatttgcattcagttacttatgtggattttttaaattccagctgagcagg

SEQ ID NO: 110936 - DNA, 175 bp, Glycine max
  Clone ID: PAT_MRT3847_71185C.1
tttccaaaaacaacaaaataacatgggtgcttgttaactccaactaacaaggaaattactctttctaaccattcaaaccattaaaaatattatttaaacacctatattcaacaacatacatccactttaaaggtatatatttaacactacaaatatactctacctctattcaaat

SEQ ID NO: 110937 - DNA, 1271 bp, Glycine max
  Clone ID: PAT_MRT3847_71186C.1
caccgctgcgagaagacgactacggctgcgagaagacgacagaaggggactgcagaaattgatgagaaagttcccatcccaattcggtggtttatcgcgttaagcaaaaaacccaatcaaaattctaagtctctttgtttacgttgttcgtttccctcattgctttgttctcttctctcttctctctcacattcaacttcaaaggcgtagagtgagatccgaacgatgaagagagtattcggcgtcaagaagaacaaggatcctcctccttccattcaggatgcttccgataggattactaaacgaggtgactcggtggatgacaagattaagaagcttgatgccgagcttagtagatataaggagcagattaagaaaactagacctggtcctgcccaggaagctgttaaagctagagccatgagagttcttaagcaaaaacgaatgtatgaaggccagcgtgacatgctgtacaatcagacattcaatctcgatcaagttcaatttgcagctgaaggcattaaagatgctcaacaaactatgacagctttgaagtctgccaacaaggagttgaagggaatgatgaaaactgtgaagatccaagacattgataacttgcaagatgagatgatggacctcatggatgtaagtaatgaaattcaagagactttgggtagaagctataatgtgcctgatgacattgacgaggatgatcttatgggtgaacttgacgcattggaattagacatgggaaatgagactgaagctgatggggtcccatcctatctccaacctgataaagaacctgatttggatgcagaacttaacttacctccagctccaacaggacaaacggcagtgccacctggcagattcaatgcccagactgaggacgaactgggtttacctgctgtccctcgggcatccatacgcggttaaagaatgtttttttatatcttggcatagctagtgaagtcacgagcaagcccttgtaaagatgtgcagatcttgagaatattgattgatacagtgatttaattggtctggtgtttccattatagacttagtgccttttattttcccttgtaataaaccatgtggaagcatctttgttatttgtatgaagcttttggctcgggaaaaaaagggaaaaaatgtttgtcgaaagcttggaacctgcaagtaatgtttataaaggaaatttatgcatacacatttgttatgcaaattttgtagtctcaaaaaaaaaaaaaaaaaaaaaaaaaaaaaaa

SEQ ID NO: 110938 - DNA, 942 bp, Glycine max
  Clone ID: PAT_MRT3847_71187C.1
tacggctgcgagaagacgacagaagggggaaattgatgagaaagttcccatcccaattcggtggtttatcgcgttaagcaaaaaacccaatcaaaattcaaagtctctttgtttaccttgtttccctcattgctttgctcacattcaatttcgaaggcgtagagtgagatccgaacgatgaagagagtattcggcgtcaagaagaacaaggatccacccccttccattcaggatgcttccgaaaggattacaaaacgaggtgacacggtggatgacaagattaagaagcttgatgccgagcttagtagatataaagagcagattaagaaaactagacctggtcctgcccaggaagctgttaaagctagagccatgagagttcttaagcaaaaacgaatgtatgaaggccagcgtgacatgctgtacaatcagacgttcaatctcgatcaagttcaatttgctgctgagggcattaaagatgctcaacaaactatgacagctttgaagtctgccaacaaggagttgaagggaatgatgaaaactgtgaagatccaagacattgataacttgcaagatgagatgatggacctcatggatgtaagtaatgaaatccaagagactttgggtagaagctataatgtgcctgatgacattgatgaggatgaccttatgggtgaacttgatgcattggatccactgatttgaaatttgactggatttgatggggcccactcctagcaccatcttctgtaagaacttgatttgatgcgaaaggtagggatattgatgcccatgcttatggatgatgatgtatcttgaaggatatgcctcattctctgcttaggcattcctatgctcatccatatttttgtcaacctttcatctgggtaacagcttactgttcaatacaagaatctgaactatgaatagtgtactctattt

SEQ ID NO: 110939 - DNA, 262 bp, Glycine max
  unsure (1)..(262): unsure at all n locations
  Clone ID: PAT_MRT3847_71188C.1
gtctttatctgatacccaaacctcttcttctttttcccaagatgggagttcaacggcattaagggttttcgtgnacaacgagcctggtgaaaatncttttgctantaattccttggaccaaggtgctcttggcagggaggctggcaacagcgatccaagggtgaatacttgaagtgcggaaggtaatggaccgggtgacaattcttataagaaaaggagtacaccgcatatctataggcaaggtgtcgtgaaaaataatatc

SEQ ID NO: 110940 - DNA, 1630 bp, Glycine max
  Clone ID: PAT_MRT3847_71189C.1
ccccccttaagccttgaattcgtgagggccatcgggctacggctgcgagaagacgacagaagggtgggaatgagggtagtggcgagacagtgagagggtggaaatggcggctgtggcagcgagaagcacaggcagcgttggtgttggtgctgtcatcttcatctcagtcgctctcaccacttatttcatctcgaaaaagaagaagaagaagaagaaggaatccaggaagaagaagaagggactggtggacgccataggcaacactcctttgattcggatcaacagcctctccgccgccactggttgccaaattctcggcaagtgcgagttcttaaaccccggaggcagcgtcaaagaccgcgttgctgttcaaattattcaagaggctctagaatctggccagctacgtccaggtggaatagtcactgaagggagtgctggaagcactgccattagcattgccactgttgctcctgcctacgggtgcaggacccatgtggttataccagatgatgctgccattgagaagtctcaaatacttgaagcccttggggcaactgttgaaagagtgagaccggtgtccattacccacaaagaccattttgtcaaatcgcaagaagacgggcatctgaagcaaatgagtttgcattgaagcgtacaaattcacaacaattgaatggcaaggaggacaccgagaaaataaatggttatgaatctgatggatgcagttacagctctctgtttcctgaagattgccaaggtggcttttttgctgatcagtttgagaacctagcgaacttcagggcccattatgagggtacagggcctgagatttggtagcagaccaatggaaagttggatgcatttgttgcagcagcgggtaccggtggtactgtggctggtgtttctaagtttcttcaggaaaagaatccaaacatcaagtgcttcctcttagatcctcctggctctggtttgtttaataaggtaaccaggggagtgatgtacaccaaagaggaggcggaaggaagaagactcaagaatccatttgacactataacagaaggaattggaattaaccggataacaaggaattttgcaatggcaaaacttgatggggcctttagaggcaccgatagggaagctgttgaaatgtctaggtttcttttgaagaacgatggtctcttccttgggagttcttctgcaatgaactgtgttggagcagttagagtagcgcaagcaattggcactggtcacacaattgtaaccattctctgcgacagtggaatgagacatttgagcaaattctatgatgctgaatacttgtctcagcttggtttgacaccgaaagcaattggtttggagttcttaggcgtcaagtgagaaggtttcttcagagtttaaaattttaatgccactgccttggatgagagtggccacctagaagttagaactgagggtgttgtagttattgatatagaagatattacacttattaatacaatgttttggggatattacatggctcattctttgttagtctttcatggtttattgatttattaactaggccaagatgaccaaattgttgtgaactataaatatattcaactctaactatttcagtacgggg

SEQ ID NO: 110941 - DNA, 345 bp, Glycine max
  Clone ID: PAT_MRT3847_7118C.1
gcaagtaacgcttctctatactcattcgtgatgaaccactacgggtgtgtatgggactgaaaccatactattctacagggtagagtatgcctaacaactcctccctaacatggaatgaaaacttattaacggtcgtgatggtgatctatcatggtgcgtcaaaccacacatacttcatgcatctatatctgggatgcaaacttaattacacaaacaggtaccactcggatctatgtatataactactatgtattcatccatcaacaaaaatgggtggtcggtgcgttatcaacatcagaagagggtcatgaacttgcgggacctcttcgcgaaccaggtctcctc

SEQ ID NO: 110942 - DNA, 975 bp, Glycine max
  Clone ID: PAT_MRT3847_71190C.1
ggcaatcagctcagaggtcaagggtaagaaagctgcaatacatttctgagcttgaaaggagcggcataactttgcagtcggaggtatcagcattgtcacctcgagttgcattcctggaccatcaacgtttgattcttaatgtcccaaaaggtgcctatgatcatgattattgagatagtgggtatatattttttttacaagacgctcaccaagaagcattaaagaaggaaatagagagactaaggcaaatctatcaccaacagaacctacaaaagatgaacaacaatcttcaacaaaccacaccaacatcacagccacaacaacaaccaatgcaacttcatcatcatcagcagccgatagcagtgtctcaaccattgggatgcaaggacaacaaggagcagctcctcagttgagggggaagagacaaggaatagtgctgtagatggatgaatgaatgaatgtcccttcatgctaactagaaaactttcacgtgatgtgttccccatcaatgttgttggtgtgggggcaccctgacacagtgatgggggttggagggtaggaacttcacaagtggattaatgcttgaaaataggttggagatttttttttttttatgctttcaaggtgaagaaaattggttatatcttgggggttggattgggattttgggatttgatgatttcttcagattacacttttttttaacataaaaattattctcaatgattttttattttgttgggtggaataaggggacaaagcatcgtggttttgtattgggtatgcatgggagctgtcagagaattatttttctcctttttttttttgtttggagaggaagggggtgtctgatcgtagtagtttaatttcttgtttttcttcgttttggaactaattgtttgctattttgtattttatttggatgaattgtacaaaattttaattaagccagctataacatttattcttctacaa

SEQ ID NO: 110943 - DNA, 409 bp, Glycine max
  Clone ID: PAT_MRT3847_71191C.1
attcgagcggccgatatacttatggggtgttttttttttttccattctacctttggagggttggtcccttcaaagcccaagtttactgccttataaaatatagctgctgatattttatttgtggtatgatacaattaacttttctttaaacttaaaaaatactttgcaataacaacaaaaccttaatgttgttttccattttgatcacccaacttaagtgacatcttaaataacttatttatcattttctttgcaatgcatatatacttaatctattcctactcaagtaaaaatcctttgattcaatgtttgtgtccaaaactcaagtttggagttaacttcttgccttattttctcaatcagaaattctattttaggtaaaaaagcctgcatttatagaatttttttt

SEQ ID NO: 110944 - DNA, 827 bp, Glycine max
  unsure (1)..(827): unsure at all n locations
  Clone ID: PAT_MRT3847_71192C.1
ggtgtttggcgaacttgaattcattggcttgtgtggctttctccctccaaaaaactcccctcttttccgtcggagaatggcgtcatcttcacaaagccgctgtggcagcggcagcgccgcctcacgactgaggaacgcagcttccaccttctgctccgactcacagcctctccttgccgatatccgaaaaaccgtgcttatgatgaaggacatcgcagttcaattggagaaagacaacctccctgacaaggcgaaggaactggaagatgcggttattgagttagtagggctatctgagctcagtgtgcaattttcatcagcggttcaagcttttgctaacgcataccagcctaaggaagagttcactaattttaacacgttgtttgaggatgagctttccaggtttaaggccaaccaatcttcagatgttcctaaaaatcctgtagtacgccaatttaaggaagctgtgtggaatgttcatcatgcggggcagccaatgccaggcgaagagcaggaggatattgtaatgaccagtatccagtccaacattttgaatattacctgtccattgagtggaaaacctgttactgagcttgcagaaccagttcgcagcatggagtgcaggcacatttatgaaaagaaagtgataatgcaatatttgaagtcaaagcaacatcaatgcccaatttcaggttgcccaaagatattgcaggcagataagctggtgcagatccgttgntaatgattgagatggangaaaatgcgcaaatgaatagagaaactgacgtagaagatataccatgcttaatgaaggatagtgattgttc

SEQ ID NO: 110945 - DNA, 442 bp, Glycine max
  unsure (1)..(442): unsure at all n locations
  Clone ID: PAT_MRT3847_71193C.1
ccctncgtnagccggatcaggccttgagggccgtccaaccaacccttccgccgaaagtttgtggccctggagggccggcacaccagcgccctggccttccgcctgaataatgcctggcagagctgcccccataacaacgtgaccggcattgcctttgaggacgttccgattacttccagagtgttcttcggagagcctgggccctggttcaaccagctggacatggatggggataagacatctgtgttccatgacgtcgacggctccgtgtccgagtaccctggctcctacctcacgaagaatgacaactggctggtccggcacccagactgcatcaatgttcccgactggagaggggccatttgcagtgggtgctatgcacagatgtacattcaagcctacaagaccagtaacctgcgaatgaagatcatcaagaatgact

SEQ ID NO: 110946 - DNA, 156 bp, Glycine max
  Clone ID: PAT_MRT3847_71194C.1
ctcatgacactcccatggataccacccaccttagatgtcgtaaaacactgtcaactcttacaagaccatatcccaatctgtacaacacaggcatccacatactaaaaagcaagcttttgcatctgcttcagctgacaatattaaaaagttcaacct

SEQ ID NO: 110947 - DNA, 306 bp, Glycine max
  Clone ID: PAT_MRT3847_71195C.1
cattccacctatctcatacacaattcaccattcgaatacaccacttactgatcacgacgcctttcaaacacactccggaccatctcctctcatatgtcatccacgaatacacactactaggcaacatcaataaataatgccaaatatcccggtagaaactatatattaactatacccaaatcataactgatacaactatactacacatcacagtaacgcatatcctgaccaatgcaataactgaagctatactgctcatagaacttaccacccttctcattctgcctgctacccaaacccatgtac

SEQ ID NO: 110948 - DNA, 275 bp, Glycine max
  Clone ID: PAT_MRT3847_71196C.1
ttggacgcggggggtgcatgcttacttctggtgggtctccaatgagagccttactggctgagcaggatcaattaagcccaaaggttacatgggacaacaccaaaatgccttgggcaacctataggcgaagaataatcttggaggtattttcacagaggggacattatactggatggggtgaataggtaaaggatggaactatctaattaaggcctgattagagaaaacgaggggaggataactcattgcccaacattgctaacaatattataggt

SEQ ID NO: 110949 - DNA, 770 bp, Glycine max
  Clone ID: PAT_MRT3847_71197C.1
ggctaattccttatcgagatccttcatttttgcaagacaactaaagatgagtggattatatttgcttgggatggtactaacaccaccaaatgtcatatgttcaaaacccaactcaacagacttctactaataacttaatggttcaacaacttgatggaactattaatgaacgcgcttggagcaaatgctatattggcaatgtctcctgcagtctgtaaagttggtgttgacgtcttaaaagttcctctttacaaggtatttatccatgagttgtggtacttgattatctcaaatgaaacttgttcattgaatccattttgtgtaatacaagttgtcttgaaaattaatataaatatgtgatgtctaaaaaaatgaaaatacctgctgctttgatggcttgcttataatctaaattttatgaattttcgtattcaaggtcaacatgatataggtgttatcatactgtcatattgcttacaattattcttacaatgggttgttagatctgatggtgcaagtttgctagttcttgcgaccccctcacaacaaacaaacacaccataattgtgtgcattttgaattaaggtttcctgttgttttctatatctaacttcactctatctctagtttgttatctattggtttcttcttgtggtctcttcagctttgtttccatttaaaaaggaagagtggcacttatattttgctttgtttatgttccgtttcaaactcaaagacttttgttggaggatgtgaaaactagtaaatca

SEQ ID NO: 110950 - DNA, 198 bp, Glycine max
  unsure (1)..(198): unsure at all n locations
  Clone ID: PAT_MRT3847_71198C.1
cgangcacgcgtacgnnagctcggnattcggntcgagcngagggtgtgaagaanatnaagatnaanatntncgattcgtatncgangaantcgcattcaggncnnnaancaccaagaagccnctntnnttntacgtnaatcnngnnaagagnnanatggnaagagnatgatgaggtcgaactctcagctnnangaana

SEQ ID NO: 110951 - DNA, 257 bp, Glycine max
  Clone ID: PAT_MRT3847_71199C.1
cccacgcgtgcggcttcatacgtatcatcggattcgacaacgttcgacaattgcagtgcatgggcttcatggcctactagcccgcagtcttctaagtgtgaaaaatttgcaaagcatttgtagccgccaccccactttgtatgtttgtacttaaactacatacccattacgttcatgctttctgagatttcatcatccagtatctttgggttctgattacggacttcaatggaaattaatggatgagaactaatgaa

SEQ ID NO: 110952 - DNA, 476 bp, Glycine max
  unsure (1)..(476): unsure at all n locations
  Clone ID: PAT_MRT3847_7119C.1
tacgtaagcccctcggannattcggtnctcgagcccgagtctncgttgaggtttggggattttgtnnggatgataatgctatnnagggatatgtttgctttttgcnnaaactctttctcaatggtnnttctcgtagagattatatggacnncatgccgtgcgagatnntcgtatgccctgcactnnccttnnntccgtcgtggtnntcctctactgggggttctacgtnntttctcaatgaacctcctcnntctcaaatctcgtnnaattaagttagagtcggagtctcctnntccgtagttaaatcccttgggtctctnnttttcaatannattaagttagagtctggcgtnnctcctagtttnncctttttttggttttgggtctgggttatcaaaatcannaataaaannaatctctcttctcggagaatggcnnngtcgtcaatccaaccaacannacgctcgacttgcaac

SEQ ID NO: 110953 - DNA, 318 bp, Glycine max
  Clone ID: PAT_MRT3847_711C.1
agggacagaagaagaagctagaggaaagtgagcaattgctaaatcagcgaagagacttgattggcaattacagaaaatctgtggaggatcttgttaggtctgagccagtagagaatgttgtgctttagataggtaggcacccttaaatggggttttatctcttaatagactgtagccttcatgttttactaggagtggatcaccagttttctatcttaaaattaagattagcagaaatgctaataattatttatacttatacctgataattagttaaagatgtatgtttcaatacatgttctattatctgccgatatt

SEQ ID NO: 110954 - DNA, 168 bp, Glycine max
  Clone ID: PAT_MRT3847_71200C.1
cccacgcgtacgatgaacctaaagctgtattctgacagaaccaagatgggatggggccatattgaagaccaacactgcgcaggtgggagcttgtggattgagatgcttgatcaagacaaaagtgatgcctattaagatgagtctcagcagagacgcttacgcttttgg

SEQ ID NO: 110955 - DNA, 334 bp, Glycine max
  Clone ID: PAT_MRT3847_71201C.1
acgcctacgcttcctaaaaacctaactgtgccgtttaattttagcccacgtccaataatcccgagcatgggtttcttcctcaaggtactcacgatcatggtttaagcttcacttgtaacatggtcataacgcattactcaggaagctgtatgaagtctgtgtagtatgcatccacatagatgcatgaacatgctccactatctatgagcaacctaggtctaaacttccatacagaattgattctctacaatgaacaggtttgtacgctaggtgctgtcttacaatacctatacatcgaaagcttctcatatagaagctggcttcgtcaattaaa

SEQ ID NO: 110956 - DNA, 1145 bp, Glycine max
  Clone ID: PAT_MRT3847_71202C.1
gcccgcgctggcgccggtgttctccttcccattacgtttgtgtttggttctctttctcttctctttatctgaacgaaggagagagtgaaagatccttttgtggatcgaacatcttgcgttttattgtggtgttgaggatcgaaaatggatcagatattcaacaaggtcggatcctattggttcaaccagaaagcctccagccagctcaattcggttggttttttctttctcttctctttatctgaacgaaggagagtgaaagatccttttttgcgttattggatcgaaaatggatcagatattcaataaggtcggatcctattggttcaaccagaaagcctccagccagctcaattccgttggtgatgacatcaattcgatgacaaacagtattgaagggggaaccaaatggttggtcaacaaaataaaaggcaaaatgcaaaaggcattgccagagttactaaaggagtacgatctaccaataggaatctttcctcgtgatgcaacaaactatgagttcaatgaagagacaggaaagctcgttgttttcattcctcaagtatgtgaagtaggctacaaggattcatcagtcttgcgtttcttcaccaccgtgaccggttatatggagaaaggaaagttagcagacatagaaggaatgaagaccaaagtgttgatctgggtgaatgtgacgacaattttgtcagagggatcgaagctctatgtgacagctggcatgaagaaaagaaggagtagggaagcatatgaggttacaagagatggtgtatgtgtagataagttctaaaactaatagttttataatctgtaaaacccctctgtctgttattttgatctcctttttcatgattgtttattgcaagtagtgttcaaatatgtacttcaaatattgcccttgtattggaatcttgcaatttggctaaagtccttgtcgatgatctaggctatgcttgtattttaattgggagacctccagcatctgttcaaaaagtaaaactgaaaaaatctcgattggtgttgagtttgattgtaaactgagttttgtcttaattttgccttgaacctcagcttaaaatgatgttcattgacttaagtttgcaaacttcaattcgagcatacagttagtagtt

SEQ ID NO: 110957 - DNA, 1124 bp, Glycine max
  Clone ID: PAT_MRT3847_71203C.1
ggcagtcaaggcttgaaagggtccataagtgatcagattagtcttttgtcagatttggaatttgagttctaatttgttcgtgggtgaaataccttctggacttggtcagaaatccctgatacacctggacttgtccaacaatcagttaacaggccccataccagatagtattgcctcttcaagtttgcagctcgtgctactgaatggtaacttattggaaggacgagtaccagagcaactttattcgattggtgtgcatggtggagctattgatctctctggaaacaaaggtctgtgtggtgtaccatctctgccagattgtcctatgttttgggagaatggcaaattatctactcagggtaaaattgcaataggcttgtcctgtctttttgttttctgcgtgatactgctgctggtctatatttacattaggaggagaagaaatgactatgactttgctctacctcatgaattaacatcattagccgccaagagaaacagatatcagaggcagaaatccttaatggttcttgagatggaaagtcaacacgccaagggattaccttcacattttactacacaataaccatttatcttaatggaaatggaatactcattttcatagttttcagccaaatatacaacgagacagcttatagaaaatggtttgaatgtgttgcagcatcaatgatcaacactgcggctttaggaaagaaatgctttgtctcggcgaggtttttggaagccacttattgtacgatgcatgctccccccgtgtcattgtttcttgacccatgaaggaaaaaaagcatataccctgttatgtcaatacttagccgcaacttttgctgaatgtgataggtacaagccattaatttatgaaatgagtcacaaattagagtatatttttcatggcacatagattctgattgaagctaacattgtataccgatctatgtagcaaaagactagtgattggactttactgtacattgtatttcgagccttttcattctatattcattcagacttgaagaggattgtaactagagcacgccgcaccaaaatacttttgtatatcaatttcttttatgctatataaacctttaatgacaaataccaat

SEQ ID NO: 110958 - DNA, 835 bp, Glycine max
  Clone ID: PAT_MRT3847_71204C.1
aggatcgttgttctcatcacattacgtttgtgtttggttctctttctcttctctttatctgaacgaaggagagagtgaaagatccttttgtggatcgaacatcttgcgttttattgtggtgttgaggatcgaaaatggatcagatattcaacaaggtcggatcctattggttcaaccagaaagcctccagccagctcaattccgttggtgatgacatcaattcgatgacaaaacagtattgaagggggaaccaaatggttggtcaacaaaataaaaggaaagatgcaaaaggcattgccagagttgctaaaggagtacgatctaccaataggaatctttcctcgtgatgcaacaaactatgaattcaatgaagaaacaggaaagcttgttgtttacattcctcaagtatgtgaagttggctacaaggattcatcagtcttgcgtttcttcaccaccgtgactggttatctggagaaaggaaagttagcagacatagaaggaatgaagacaaaagtattgatctgggtgaaagtaacaaccattttgtcagagggatcgaagctctatgtgacagctggcatgaagaaaacaaggagtagggaagcgtacgaggttacaagagatggtgtatgcatagataagttctaaaaccatcaatgtttgttaatagttttataatctgtaaaacccatctgttattttgacctccctgtgcatgattgttaattgtaagtagtgttccaatatgtacttcaaatattgtccttggattcgaatcttgcaatttggtgaaagtaaaatgtccttatggccatgctgtgtttggattataatt

SEQ ID NO: 110959 - DNA, 282 bp, Glycine max
  Clone ID: PAT_MRT3847_71205C.1
ggacaggcagaagggggacgagacatgaaagctaaggggcaagaaggccaagtgagtacaagaacacggggacaaggggcgaaaccgagaaaacaagaggaacgcataacaggacaagcgcgggagggcaaaaaacctggcacctgaggacgcacacaaaggggcaccaacacaaaacccactgcacaggaaagggctcagaaagaacaccgaagagggaggaccccagcgagcagagcaccaggcaagcacagctacaccaaatcgaagaccgaacctcac

SEQ ID NO: 110960 - DNA, 253 bp, Glycine max
  Clone ID: PAT_MRT3847_71206C.1
tcttctacatcgccatctataactagccaacttactctttaactcttctcctcactacaattggagcagtgtgcatcatcttcttcaccttcctctattcttctactttcctcaattgcaactccttattcctattcatcagaaacacctttatccaaaagatctttttattacaatttcatcataatttgttcttaagaccattttactacctctaaaaatttacatatcttttatctctcactatacaaat

SEQ ID NO: 110961 - DNA, 462 bp, Glycine max
  Clone ID: PAT_MRT3847_71207C.1
cgagtctttagtggcatctgcatacccaacagagatggtcaaatttccgaaactcctttgaggataagctctgcagataaacatgcaccaaatgagtcctttccatgtaatacaacctccaaggaggttatcaagaatagatccgctgcgacattttctaacactggtcatgctctccgagtccaccacggagatgatatttgccaaccatcagagttgctcgacgtcaaacaccatttttcctcggaacatgcagccacggttgatttgttccaactgtcctcacatcttcagagggtggagcagcaaagaaattctgttttggtgaagtgggaaaatgaggactactgtttcccaactgtgtgaaaggttgtttattgtttaaagcctcaaagtgtcattagcatgaccatttttattgatacctatgtttgtgatgctgtagtagtggtctagcgggac

SEQ ID NO: 110962 - DNA, 409 bp, Glycine max
  unsure (1)..(409): unsure at all n locations
  Clone ID: PAT_MRT3847_71208C.1
ttcccttttcttcccacgcgtccgactgcttcagaacanacagaaggggatcccgtgggattttaaacaaaagggggggaacaaaaaaaccaacaaagcggccgcccaaagaagaagccggtttcaaggtccgtcaaagccggtctccaattccccgtcggaagaattggccgttttttgaagaaaggaaggttctctcagcgtgtcggtaccggtgctcccgtatacttgggtgcagttctcgaatccctatctgccaaggtcctttagctggctgggaatgcctcacttgacaacaagaagaacaggatttttccaagacccctgctttttgcccttaggaactaataaaagttggggaaattgttagctggagtgccaattgcccaatggtggcttgcttcaaaca

SEQ ID NO: 110963 - DNA, 347 bp, Glycine max
  Clone ID: PAT_MRT3847_71209C.1
ttccgtttttatccgtagccaagactaggaagataatgatatggttatttgtctcagtattaaacaaaggattgcatgcaaaaatgtaacttaatttagaattgtgagatacattgaaagctctaaaagtacacaaagctaactgtttggtgagggggagataaatacccgctcatacgatcctgattaaagaaaaagggcgttcacatatttctttatccaacaaatggaacatgctttgacagcttagggattctcattatcataacacttgtgtgaaattattgtaaacgtattaagaagaaatcttttctaatatgagcaccaaacactaattatatgtaccc

SEQ ID NO: 110964 - DNA, 141 bp, Glycine max
  unsure (1)..(141): unsure at all n locations
  Clone ID: PAT_MRT3847_7120C.1
anggnctatgccagtngtgctgcgcagagagaccaagnactatgcaagtngntnctgacncagcaggaccaaggacccatggcaantgatgntgctncaaaagaggcanagattnatggcgggtgatgtagcacagactnc

SEQ ID NO: 110965 - DNA, 400 bp, Glycine max
  Clone ID: PAT_MRT3847_71210C.1
tattgaaacaccagctcatagtgctgtatttcactcttgaaccaagtgagagaaatcctccataaacaaagagggtttttttgtcaggcaaatgatgtaaacctcactttaggctcaaattattgctattcacaaatgttcgagccccattggcctacttacataatttaagctaatgaatattctttttagcagataaaacaatttgagggtgatgttctgtcttagagtctgaaatgcaatccccaatatgcctgacttcccatatactgcaccttgatgataagccactttaattccggcggatattctctgtgtgcaaagatggtcatgcccatcctaacattgagggcttcccggcgaactaacttgctcacaggttccaattttgcccatggac

SEQ ID NO: 110966 - DNA, 196 bp, Glycine max
  Clone ID: PAT_MRT3847_71211C.1
tcatcctagaacaaccctgcctattcaaaagaagtacctcacctcacttacgaagaagtagtgggagctgggctctagattcagttggatagccagtctacctaagtaagagttacgttgaccctgcaaggtatcctagaggggcacaatgcaagctggagatcatctggttaggataatccccaggctttagata

SEQ ID NO: 110967 - DNA, 354 bp, Glycine max
  Clone ID: PAT_MRT3847_71212C.1
acgagtagaagttggcttgctaaagaataaaataggagtgaaaggttcataaagtaggtgcagtgattatgctgtgttattgctagtttgcaactatccatactccatatacccacttgtaggatcatgtcattgatttgaagtttttatatatggccttggaaccagaaacggttttcttgagaagattattgacaatctgagccattacttttctgtaaaaaaaaaaaaaaaaaaaaaaaaaaaaaaaaaccaaaaaaaaaaaaaaaaaaaaaaaaaaaaaaaaaaaaaaaaaaaaaaaaaaaaaaaaaaaaaaaaaaaaaaaaaaaaaaaaaaaaaaaaaaaaaaaaaaaa

SEQ ID NO: 110968 - DNA, 965 bp, Glycine max
  Clone ID: PAT_MRT3847_71213C.1
cggagccaacctgcttgagtccggcgtcgggtcaattcatgtctgaatctgattatgttcgttggaaccacgctaacccctgcattttacatttttaatataaatagtttttatttatttattaatttttctttaaaccttaagaaaaagtagattaagcgattagcatagcaaatttgaggcttgcttaatgctttcttcatcatcgggttagggtttttgcagttctttcatttcgaaaccctcgtcgattcaccttcactatctgcttctctcctaaatctcacgctatggggagcaaaggccgcatgccgccgccccctcacctacggcgcccgcacccgccgggccccgccgcgatgccgcatccgctcgcggggccgttcgatctgctcccgccgccgcaggtgatggagcagaagctggcgtcgcagcacgcggagatgcagcgcttggccacggagaaccagcgcctggctgcgacgcacggcgtgctgcggcaggagctggcggcggcgcagcacgagctgcagatgctgcacgcgcacgtgtcggcgcttaagggggaacgggagcagcagatacgcgtgcagctggagaagatttcgaagatggaggccgaggcgaagggcgcggagagcgtgaagatggagctgcagcaggcgcgtggggaggcgcagaaccttgttgtgtcgagggatgaacttgtttccaaagcgcagcacttgactcaggagcttcagagggtccatgctgatgctgttcagattcctgctcttatctcggagcttgaatgcctcagacaggagtatcaacattgcagggccacttttgactatgaaaaaaattatacaatgatcaccttgagtcacttcaggtgatggaaaagaactatgtttctatgagtagggaagtggaaaaacttcgagcagagcttacaaacaccgctaatgtggatcggagaa

SEQ ID NO: 110969 - DNA, 791 bp, Glycine max
  Clone ID: PAT_MRT3847_71214C.1
ccacgcgtccgatcgggttagggtttttgcagttctttcatttcgaaaccctcgtcgattcaccttcactatctgcttctctcctaaatctcacggtacttgtttcttcattcatcattctctttcctctttccaattcttcattacctcaacttcgtaattcttctttcaaatttgattcctctctgccctaatttcactatcactccattctcttcagctatggggagcaaaggccgcatgccgccgccccctcacctacggcgcccgcacccgccgggccccgccgcgatgccgcatccgctcgcggggccgttcgatctgctcccgccgccgcaggtgatggagcagaagctggcgtcgcagcacgcggagatgcagcgcttggccacggagaaccagcgcctggctgcgacgcacggcgtgctgcggcaggagctggcggcggcgcagcacgagctgcagatgctgcacgcgcacgtgtcggcgcttaagggggaacgggagcagcagatacgcgtgcagctggagaagatttcgaagatggaggccgaggcgaagggcgcggagagcgtgaagatggagctgcagcaggcgcgtggggaggcgcagaaccttgttgtgtcgagggatgaacttgtttccaaagcgcagcacttgactcaggagcttcagagggtccatgctgatgctgttcagattcctgctcttatctcggagcttgaatgcctcagacaggagtatcaacattgcagggccacttttgactatgaaaaaaattatacaatgat

SEQ ID NO: 110970 - DNA, 392 bp, Glycine max
  Clone ID: PAT_MRT3847_71215C.1
aggacggagaaaccaaggaaatttattcacacaagttattcaccaattcacgccaactaatcctctcaaactgaagtattccaacaataggggacaagaaacccccaacgcatacctataatttcaaaatcccttgggaaaaaaaggttttaaaagggttggaccaaggacatcccctgctggtaatctataatttctcaagagaatacacgttcggacaaaccgcacttgggaaatatgcttacccaaaacagggcaatcatggaatccagacggttttctaccaacacatatataggcttgggtgtacctaatgagggaataaagggtctttattcaattctgatttccagcttgtgacacaccctagtcaacaaaaaagttctgttggg

SEQ ID NO: 110971 - DNA, 423 bp, Glycine max
  unsure (1)..(423): unsure at all n locations
  Clone ID: PAT_MRT3847_71216C.1
acgcgttcncggacgcgtggggttttagaaacttaaagggaaaactttactgcctatggtggttttatctgacttaagcaatgaagattttttatcccagtttctctttcattatttttaacactatctcctgtggaaaagaaagtgttaaattcctgcttatcatgtataaatatctctaaatgttcttcttatccttggaaaaaatgtgatttgggtgggctatcggattgggggatattttggggttttgggcttaatcctaaatcccctttcttcttttcattactattaatggatggtctatattaccttctgattagcttggacccctttttagtgatggcaattttattaatattatgaacctttcctgggaatttactctctaatttctttcacaacatttttaaggaccacttt

SEQ ID NO: 110972 - DNA, 322 bp, Glycine max
  Clone ID: PAT_MRT3847_71217C.1
catgaacgaaatacaaattatttttgctgcccggggggaaacaaggggacttatttctgaatctgttggggcacagattgctttttggaacactgacagatgcatttctggagctggggtttaccgatccaaaaacctgggggggaggctatttgggtaaatggctaggcctactaaggcaagggcctacgacggcactcataatggcggcattaacgaattttcctgcgggtgggactatgaaaagtgctggcatgggattatcccacttctccccaaaaccatacagggggatgttatctctggctgtgcttcttattgc

SEQ ID NO: 110973 - DNA, 678 bp, Glycine max
  Clone ID: PAT_MRT3847_71218C.1
ggctcgaggtgtgatacaaagaatgggcctgcaaccacacaattcttggaaacatcgtcagccgataccaaggacaatgtttacagctttggaatagtattgtttgagttgattacagggagaattccccttgctgggaacaatgaacttctggcagattgggcagcagaatatgtaaggtgggggaaatccttaagagatgttgtggatccaaggctgaagtctttgcaggaagaagagattgaggaatggtctgaagtgataagaaactgtgtacaaccagatccggagaaaaggccaactatgaaagaagttacatctagactcaaggaaatcacagctatggggcctgatggagcaaatccaaaagcatcaccactttggtgggcagaaatggcaattacatccactgattcaagttgagacattaatattataacacaaataagagttggatgataatttgtacagttactctaaatttggaattcatgcacttttgaaatatgtatgtttatactaatgttttctaaactattattttgaagccaacagaaaaaagaaaaaagcatgtagagaacaaataacatttgtctcattgtagaggaattgacttttgttaatatttggagggacactgtttccttaataataccctttcgaatatcttcttttggg

SEQ ID NO: 110974 - DNA, 380 bp, Glycine max
  Clone ID: PAT_MRT3847_71219C.1
cgccaacatcttcccaaaaatgcgggcacaccgaccaaaggcccacgggtccctcccaggggaaacggcactaaaaagagtctaacaaaagggaaggggaacggccgagggggggggggccctgggggaatgctaaaaaaacaaaaacagggggggccgggacagtacaaaccccctcccgagtatataccaggggggcggtatacccacacccaaaaaaacgggggctgtgaaaaaggccaccctgcccaaaaccaggcggccccccccgaggaccacccgatactggtggaccgtccccgggtggaactgcccccccaaaggaacctggcgggacgatttggaaacctgactcacataggacagcccccgaaggaggg

SEQ ID NO: 110975 - DNA, 144 bp, Glycine max
  Clone ID: PAT_MRT3847_7121C.1
tttcaattttttggggataaatgctgaatattattgctgcactactaatagcagaaattacctcttttgcacatattgggtccacttgatatgaaggtgagagataaggactaatgaatgaagttggactccccttcaaaatac

SEQ ID NO: 110976 - DNA, 467 bp, Glycine max
  Clone ID: PAT_MRT3847_71220C.1
catcctttttttatttcccctctaattcttctttcaaaaagggaatttttataaagcccagggggaatcacacctaacacaccaatggccttctttgcatcccaaaaaatctgcctcgaaaatctaaaaaccaacctgccaaaataggaacctaaaacgaacatcacaaaaccaatcccccgcacaaaaataatgccttaaaaatgcaataaaacatccaccgcaaataaagtttaacaacactaaacccacctttttttatttttccctttaaaccagaaacccaaccacggcctccaaacatacattggggggacaaatttctacaaagatgggaaaaatcccggtcacacacccacttttaaaatcgcccctccaacatcaactttaaaaactccgcccgaataaaaccattcccaacaaaaaaattatttgccgcccacttcatcataacaccccatagacta

SEQ ID NO: 110977 - DNA, 412 bp, Glycine max
  Clone ID: PAT_MRT3847_71221C.1
tcggcggccgcccttttttttttttttttttgaacactaaatatatttagtcgacatttaataaaccaaagccgcacaggtttaaaaagtccagaaactcgctcccctaacaaatgaataacgcctccacaaacccaccattaagccccgctaattaaaaccaattctaccaccgacgatcaagaacccaaataagcgaacaacagctgaaagaagatggcccaaacaaaaaacttagtccgaaaaacaccctacccataaaagaagactcaggagttcataaaagaaaccaacatttatagcaaccaacatcccctgatgaaccaatccacacgatccacttcttttacggggcaggctaagtgaccaaggaaactgtaagatccttcttctcaaccttctataagactcc

SEQ ID NO: 110978 - DNA, 902 bp, Glycine max
  unsure (1)..(902): unsure at all n locations
  Clone ID: PAT_MRT3847_71222C.1
aaactaagaaaataatgcaatcgaataatcaacaaaaggaaatcaaccaaacaaaacacaactatggaactgggcgctcatccacgtgaaacaaaatagtaaatacagaccaaagccaatgagttatacggaaatattggagacatcgaaccatactatcaaatacctcctcatttgccaatggcaaacatcaactcattgagtaatataaaaataattggtcaaacttaaaatgtgttgtcgtggtcatcttatcggcatatcacacaaatcaaaaaggaagcgtgcgtgtgcttcaaaagctctaaacaaaccaaactgcaattgcgtctgcaactcttaaatgcctacatacgtgtagaaataaatatcgggctctctttttctcctctcccaatcttgctatctaaatccagagttgttgagagaaaggtttttggtatgtttgatgagagtaccttgcttggtaccactcgattgcatctccattttcttctctctggctttgacagtgttttgataattgtcattgccatatacttcctgttccggccttgcatgcttgtgcttagtactcctctgggaacgaaataacttttctcgcctctcatagaagtcaaaatcatccaatagagatgtcttagctgtataacttctaaaaatattcagcatctccaggccctccttcaatccaatctcttgtgtgtccctagtgtaagttacaggcttgttctcattgcttggaaggatgatatgcacaaactgattgttgggaacatcttttattatgtgccacttaattgggaagaaaccgttgtacttatcaagtttccaaanaagttcatgtcgtttttaaagtccccggtcaagcatctcagccactccaacaaactgtctgctag

SEQ ID NO: 110979 - DNA, 902 bp, Glycine max
  Clone ID: PAT_MRT3847_71223C.1
attgtggaggtggagtagtataaataagggtaggagccttcatccctaactgatcccaagacaagagtgaatccactccttggagtgagaaaactagaaagttagagagcttctttgagagagaagataaatagcttggaaagcctctatcctcaagcttgagtgagccaccgtagagtgagtcaatccaagacaagagtgaatccacttcctaaaggaatcggctcgagttcttagagtgaggaagagcctctttgagagagaagaaaaatagcttgggaagtctctatcctcaagcttgagtgagccactatagagtaagtcaattttgtaaacacatccttataaccctactatcactttgtatagtggaagaatctccatattagagaattataatcgtgttcccaatactatctttaattactaagtgtctatcttaacttcacgaaacgggaaagtccgagttttcccaacacatccaaacgcatatggctaaaacctgaaccatcatctccaacatcctttatatatctctactttcttggagctgcgactagtggggtcttcctcctgccaagaagaccgaggttgaacctaaacctccatgcaagaaaaaggaacaggaaaggaaaaagaaacggtttgagcaaagaaaacactagcaagagaagaaatgacagatcctgtttgtgttgtcctcttactttttaagggtcaacttaaatcttgtagattgagatatataaagcaaaccggtgcaatatatagtacgttacagttaatgcaaaatttgtctatacgtagcatccttaaaatttggctttgaagcacatgtccaaaagatgaaattcaagtttagacaccagcttatatgtgcctagatttccttcaagacaagt

SEQ ID NO: 110980 - DNA, 468 bp, Glycine max
  Clone ID: PAT_MRT3847_71224C.1
ggaattcgtttacgcacgcaccgtagagattctgatgtttttgatcggcattggccataggagatgaacaagaacgtgatgtcatcgtcttagaacgaacacttccatgctcgctaacgaagccaagtcagcaacattgctatttccaccaaatcatattattttactcattgtctcatctcaactgcttacatatttttttagcacccactccttaaatactagtcttgtgtctcaccacagcttcctccccaacctccaaacacaagaaaacattttctaatgggattgttgtccaagtccaagagtactatgcctgggactaggagagaaagccaattcctgaaactagtacaccctggtggctttgtagagctacactctaacccaatcattgcatctcaagtcatgaacaaaaatcctaggcactgtgttacacgacccgacttcttccatttccttggattg

SEQ ID NO: 110981 - DNA, 137 bp, Glycine max
  Clone ID: PAT_MRT3847_71225C.1
gaatgttttgttttggtacctagggtccagggtttgggaggcaaggagagtagggccctaggtcaatgacaatggaaaatttataccagtgtattgcttaattctcaatattaaccattagtttggatttggtctga

SEQ ID NO: 110982 - DNA, 585 bp, Glycine max
  Clone ID: PAT_MRT3847_71226C.1
atgatttataaaggagacaacaactcgagcatctaacaaaaaacgattacaatagaaaaacaaaaaatagttaagttacaacacaacctatgttaatgaaccaccaaactggatgctcccttctatgtgactggacgctccaccagattacagaagatcagacaatcaaaacaaaagacaagagtcctaaaccatacgatcaatgttgtcatccaccctatctctattgtttatcgtccaacaatcaacaactttcattttttggattaaattatttttcaagaaaaaattgtttatgatttgcctattatgaatattcttgatggtgtgtgtgacacatgtgagattggaaagaagcatagagaatcttttccaactggaaaatcttggaggatgaaaaagttgttgaagatagttcatttagatctgtgtacagttgagattccaacacatggtgataacaactactttatcactttcattgatgattttagcaaaaagatgtgggtctattttctgaagcagaaatcaaaaacatgcaatgccttcaagatgttcaaggcatttgcagaaaagcaaaatgga

SEQ ID NO: 110983 - DNA, 468 bp, Glycine max
  Clone ID: PAT_MRT3847_71227C.1
aacctctaacaacaaaactgttttttatacccaaaagaaaattttttaaacaatatacctcccctcatatcttaacctacataaaacacaaaactgaattaaaaaaaaaacattactttcactaataccaattaaataccatgtttgaataaaacatcagctacttggatctcctttcttaataatacgtgattccaacaaacaacaaatttcactaatcacgccaactcaattaagtatataatcaaccaccctttatcatcttaataactaaaaaagccatattcttccatcacattatttattcctcttgaaccatccaggtttacaccaaaccaatattactaacttccatccttgtacaaaccaatttttaactcaatgttaaataccatgttacactcaaaactaatcttaaacactaacatggaaaccaatctttatcaatactacaaaaatatattacac

SEQ ID NO: 110984 - DNA, 131 bp, Glycine max
  Clone ID: PAT_MRT3847_71228C.1
gtctggctcttgaattgatttcggcatgctatacacttgaacaccacacgacaaccggaccatgactatctggcatggtcattgggagagccttgagaaggcccgacgccactcacgatatgtagcaccca

SEQ ID NO: 110985 - DNA, 747 bp, Glycine max
  Clone ID: PAT_MRT3847_71229C.1
attgaatgataaaggatatggtctacgaagagttgaagttgaaatcttgaacaaggaactaatcgtgggcttttgactttatttgtctcctaaagatttgatatatacatctttttcagcctgtcaatgcaagctaatacactcgtaacaatcccgaattgacaataaggaaatcccccacctggtttgcttcccttctaatatgattgcaatgaacatgatctccaagagccataagctgcctaattttcttgaccaaagcgaagcatccttgattcttaacggctgagtgtatcagatttaacagtgatcttcttaaaccctttattccatgtcaagtgaaggaccatgaaacatagctcatgtgcaaaaccaaattaaatttaaataatgtaaccgttgaagtaaatgatatagtaatactggatccctagagtgtgctcatgtcatcacttgaccagattgtcaccggaacattggcacaaaacttgccctctctagacatatggtcccagcaaacatcacaactagttcaatcaatcatgacttgaggaagttgatatttttgaaggggaaataccacaaagccagatgatatgtacagtaaaaggattggggagaatgctacaaaaacaaaaacattagtggttcaacttgataacacgagataccctttcaaagaatatggggtacatgctagggctgcacatgatgtcctccctatccattctggtgctactctttaaa

SEQ ID NO: 110986 - DNA, 297 bp, Glycine max
  Clone ID: PAT_MRT3847_7122C.1
ccagagaattatcttcacagtggcttgtcctgtcaatagagggtggctttaacgagggctatgagtaagagcatatgcgagcagcaccataccagatatttataccaccagttctcatgacagtgaagtatggaatactggttgctcaaaaacaatgacgatgggatttaattcaaacccatgctctgatgcaaggagcttggaatattttaagcgtaccggatttcattgaaaaaaaaaaaaaaaaagcggtcggctgcgtacgagcttgctgaccggggaagtaataacagaccg

SEQ ID NO: 110987 - DNA, 782 bp, Glycine max
  unsure (1)..(782): unsure at all n locations
  Clone ID: PAT_MRT3847_71230C.1
cgtattttcatgtccttcgcctgcagatagcgcagcacccaagttacttctagaacctccgtgttccgcgaattacacccccacctcaaacaaaccacttgcacatattctgagagaaagagtattgaatcctcatcctcttccttccattcctcaagaaccctaatcccaatcagccatgcagcaaggagactacacctccgctccatctccatattatcaattccctcatctccaaaaccccaatcccaatcccaatcccaatcccgatccacacccaaacaacccttacgcttctgcacctcccttcacccccaattacgctccctccgattacaccccttacccttcctaccctcaaaatcccgatccttctccacccactgctccttcctttcctccctcttcttccaaccctaatttaccccctcctttcaatcctcccttcgaatctaaccctccctaccaacaacaacaaccctatttctcaccatatgatcagcatcaaacgcctcccaaccccaattccactccctcctcatacaaccctgtcccttctccctacagctactccggaccctcctccgttcctccgattccgacctacgaacctgcatacgaggctcccgtgaggcccgatcaaggtggaggctactttgacgacaggtaccgagccggatttactcggagccattccgatttgggatccgattattacgggaagagcggtggtggcgcanatgatggatacggagatggggtgtatgcttatgaaaggggca

SEQ ID NO: 110988 - DNA, 616 bp, Glycine max
  Clone ID: PAT_MRT3847_71231C.1
aaaaaaaaaaaaaaaaaattttaaaaaaaaatttaaaaaaaaaaaaaaaaaaaaaaaaaaaaaaaaaaaaaaaaaaaaaaaaaaaaaaaaaaaaaaaaaaataaaaaaaaaaaaaaaaaaaaaaaaaaaattgggggggcccgataaaaaagaaaccaaaattaagggggggggcctttaaaagaaaaaaatttttttaccgggggcggaaaaaaaaaaactttttcttgggggccccaaaaattaaatgggggggcccggttttaaaacccatttaaaggggaaaaacccggggtccccctaaaaaaaaggggtggaaaaaaaaaacccttttccccggggggctttaaaaaaaaagggcccccccaaatggctttttgaaaaaggccttaaaccgaaaagtaaaaggggcccccccttgggctccccaaaaaagggcggggggggggggggatcccccaaggggccccttttttttgggaggcccctatatcccggccatttgggtggtttcccccctttaacccaaaaatggggggtttttcccggggaagcaaaaaaggggggcccccttttgggccccaaaaaagtgttttgggggcccccccccccaaaa

SEQ ID NO: 110989 - DNA, 412 bp, Glycine max
  Clone ID: PAT_MRT3847_71232C.1
aggggaatctcagcatgatgacacagatgcagaggaacaaatcatatcagcttttcagaacattactgcttccactgcagcctctgacgaagaattgttgaatcaactggagaagcttgaactggagaaacacgatgatatccttaacattcatgttaaggaaaaccaagaggctaccacttccatagatgtcactgaaggagagaaaaaagttgttcttgttcatgctgaagaaagtgctggtgcagtcacagcttcatacaacttggaaaagcatcctctttatcctccaggcaggatcatgcatattgttcctgcaccatctaattcatctgaaaattctaattcagatgactatgatcctgatgagaagtacctttacttatatgaaacgcctaaacagctgtatgga

SEQ ID NO: 110990 - DNA, 237 bp, Glycine max
  unsure (1)..(237): unsure at all n locations
  Clone ID: PAT_MRT3847_71233C.1
cncgcgtacgtnagctcggaattcggctcnagcggtannncannannngggcngannannaannctnnannattaattaaangggctctncatnaccccaaagcgaganggggnttcttanattcaacatngctaccnancncnnnacatnntacancctcnatcnnaaagcgtnnanacnaagacnctgcttcccngnggcccccanaagaacccnnaaaggtccnncaggccnac

SEQ ID NO: 110991 - DNA, 712 bp, Glycine max
  Clone ID: PAT_MRT3847_71234C.1
acaataggtaacactttttatttcttttcaagtaactaccgcaagtacatcccagttctttctcccactatcaccaaaccaacgaggtgagaaggtaaaccctgaatatgtcattcgcaacgccatcccatgcaccatatcacattctagtccaacagcgcttttcctcatcctacctggctttccagcaactagtgtttggttttattcattgtatgaaaaaagattaattcacagcgaggaaattacaatcgagacaacctggggcccgattgtggtcattggcgcatatccacaacgcagcggatgcagtctcctgccttcatgtcactgaatgcctggttgatcttggcgaggggctggcggtgggtgatgaattcgtcgaccttgaggtcgccattcatgtaatcggcaacgagaccggggagctgagtgcggcccttgacaccaccgaaagcgcagcccttccagacacggccagtgacgagttggaaaggtcgagtggcaatctcctgtccagcagcagcgacaccaatgatgatagattctccccatcccttgtggcaggcctcaagagcagcgcgcataacattgacgttacccgtacagtcaaaggtatagtcgcagccaccatcagtcatctcaatcaacttctcctgtacactctggtttccaagcttggttgggttaacgaagtcagtagcaccgaact

SEQ ID NO: 110992 - DNA, 412 bp, Glycine max
  unsure (1)..(412): unsure at all n locations
  Clone ID: PAT_MRT3847_71235C.1
tntnngggnnnnnnnnnnnnnnnnnnntttggggtaacgagctgggtttggttggtgtttttgatccaacagttacatttatttggtttcctaaaatttcgcgagtcatcaaggccttgtccttacgtttgttcatatgcaatttgtgcagagaaaaagtgcgtgtgcctgtgaccaagccttatgtatcatttatagggaaaagaaatcgaacagcaagtcctataattacttggaacagtaaatcatctgacaaaggcccaaatggcacagcattgggcacctatgcttcagcaacagtgggagtggactcagattatttctgtgcaactgggatcacttttgaggtaaggacacacacaatttttggtaccctggattccctgcattcacttttcacacattcaacatt

SEQ ID NO: 110993 - DNA, 400 bp, Glycine max
  Clone ID: PAT_MRT3847_71236C.1
gacaagggggagggtatgcaccctctcacaggcggcacagctccgggcccacatctttttctcactgacagccgtaacctaaaggctccgttggacacagctgctactccgtgactctgggggcaacggtataaaaatgtgttatttgcattgaagcacatgatggtgggggggcggaagacgcacaggaagattttgacgttttacactgatctgcttcgggttagggcagcctcacaaggaactatgcgatggcgcgttcgcacatcaccttcttgagattgaatagcccctgctgacacggccataggcgatgagctcagggctcctagcactgtctacgcaccaagatgtgctctagctgggtttaaacaacttggcagcttcgccttctgaggct

SEQ ID NO: 110994 - DNA, 3951 bp, Glycine max
  Clone ID: PAT_MRT3847_71237C.1
cacagactcggcgattaaggtcattctctgatgttgataatagcccagaatctttgctggcttttagtggcaacagcaatgtacatgctttatatgagtttttactaaattacaggtttctcttgacgagtttccaacaccaacaccagccacagaaataagtttgtggaaaataagaaactgttgttaccgttctaccttgagaacaacctcaaactcaaacacaacacaataagagttgtttcggtttttgctatagtagtaatagtacaatacaactactgcaaccatatcaaaccaaagaagcattgtgtggaattattgactcagaaatttgaaaaccactttgtcccatcccacttggacttccacctcacccctttttctcaacgccatgaaaatagatatcgccagaacgacgaatggcgcatcctcctcaactcaacaacaaaacttccaactaagttccttccacgctggtagacgtttgccaacacaacaccagccattgaaacaagtttgtggaaaataaaaaaacaacatttaactgtttttaccgttctacctaagaagaacaatctcaaactaatatacaacacaaaaagcgatagttaagaagaatagtgtggaactatcgacttaagaaatttgtaaaccactttgtcccatcccacttggacttccacctcacccctttttctcaacgccatgaaaatagatatcagcaattgattcaaaggtcattttgtttttgtggctctgagaggggagtgattctaaactaaaatatatgggggctggggaagagagtacagctaaatcttctaaagtatcttcggcagctcagcaagagacaccaacagcacttgcatatcctgactggtcaagctccatgcaggcctattatgctcctggaggcactccacctcccttttttgcctcaactgttgcttccccaactccccatccctatttatggggaagccagcatcctttgatgccgccatatgggactccagtcccatatccagctatatatccttcctgggagtatctatgctcatcctagcatggcagtgaatccaagtattgtccagcaaagtacagagattgaagggaagggagctgatggaaaagatcgggacttgtccaaaaaattgaaaggaacttctgcaaatacaggttccaaagcagaagaaagtggaaaggcaggctcaggttcaggcaatgatggcatatcgcaaagtggagaaagtggttcagagggttcatcaaatgctagtgatgagaatactaaccaacaggaatcagctgcaaaaaagaagggaagctttgacctgatgcttggtgatggagccaatgcaaaacacaattccagctggtgccatttatcaatcatctgtgcctggaaagcctgtttgtcccaatgccgccaactaatcttaacatcattagagactaattgaagaacatctcttctgggggctgtgaatgtacaaaaatgagataatattcaatctggcgcgcggggtgctgcccttggtgattgacgggtacacgaagatgagctgcaaaaaagcaagaggagccattagtccaacagcgagtctgggacggagagcatagataaggcaaccaggcatagagggtaaagttacaggatagagtcgcaagtagatgagaatgaaactctcagagatgagcttcagaagctttcggaagaatgcgaaaagcttacatcagaaaataattctatcaattctgagaaggaagagttgtgtggtccgtgaggagctgcagaccgtggatgaaaaagcaaaacaattcagatcttcaatttagtgtttgaagggaacggtaaaatcggatagattcgtaattaagacgattctgaagctagaatattcttattttttttatcagtctcttgattgagaataggatataaaattttttactttgttattctaactctgtgtcattaatctctaaattgtaattgcccttgtgattttacttgtcatttgtttgtaaaattaatcagtactttagactagaaaacgtaggctacttgagcacttttgttcagaacttagttttgaaagtgatgttaagaatcctgcttcaacttttcaaatctttcactagttgattatggaatcatttttgttctcatttacgtatatttgttctttaaagttacgtgcaattcagtgattattaatattgtatcaaactcagtgttccagaatgttgccttaaaatcaacttgtgagaagtcggaatctaaagctgccggcagtgaaagcttacaagaccaaggaagtacgtttggcattccagaagttgtagtctcttctcgactgtgttcatgttcattaaaaggcgtaaggtacagtgatgaatcttatacagcatcgctatcccctgtacaatcttatataaacaagtaacttatattcatcactttgatggctaatttatttaaatgcctacccgtcccttgaccctccagaaaattaaaatctaggaatgttgcatttgtaaatccaaaaactagaggaacatgttggcaaccaagaatatgtaatatccatgtcaattgcgagttgctaattccatcaattggtgcattgagaatttcattcaagattaaaactatgaccaccttgtgaggggaaacaaatcaattacgaactgtcgaactcattgtgcctttgggccttggcatttgtaatcatcaaggaagagttagaacggttgtgtggaccagaagcagttgctaatcttgaatgaatcagcttcttattatcatgccaaagcaacggcgaaaaatgatcaactcccaaaagaatgaatttgcagctgaaattttatcaatggcgaaattgagcataggatataatttttttccttggtttactatttttaccattaacccttaattgtcactccccttatgttttgcccgtttagtattgtaaaacaaattatagcaaaatatttttttcaacacttttattgggcagatttttatatgtaggttatatagtaaataaccttggcctacattatttatcgagacttacatgcaattcagtgataataaagattgtatcgaagagactgttccagtcacaatgtaactccagaagtaggtcttggaccaaggattgtgtgttgtgccttcttcagatatgacggtgcatatttctccaattcggggtttggtcaaaatcttgaaaaaatggtaatcatgaatcatcccatgatcgtaagttgaggatagtgcttgccattgggtcgagcttctggaagggcattggcttggcatattcagaagccagatagtgttcaaagaaatcccatatttttagtatttacttgtgccgatgaatagatgattttatgctaattgggcacttctgttcggtgttcagtagtttcactttctcaacttctgctgatgtttacatgccgctttaatttccgagccccttgtaagaggtaaccatggaaccatgtgtttgttctaccaaaaaatattttggaaatggggttttcccatttcgaagttccccagtgttgtgttcgcctgatattaaatgtgatttgatagatttttaattaacacgaatttgcagctggaatttttttatcaatggcccggcctttttaattgcccataccagataagtagttttttttttgttgtctactggattaatatcataaaacatcgattgtagttgcccaagggcaattacatgtcatttgtttgtaatattaaccagtcccgtagaatagaaaatgtaggctacttgagccctttttgtttagaacttagtattgcaagtgatgttaagaatcctgcttcaacttttcaaatcttccctagttggctatggagtcatttttgtccccccccgcatgtgcatgagctgattgatg

SEQ ID NO: 110995 - DNA, 573 bp, Glycine max
  Clone ID: PAT_MRT3847_71238C.1
ggttatcggggttttaaacagcagagttttcctgaatatgatgggtccactgccaatcctcctacttatgctggttttaataaaccattggaatcgaggaacaggttttcaggcaacatggaaacttatcctaataggcctcatgataattttggtgaatttcataggcgtggagattttgcaaaagcttccacaagatattaaaatcctgtatatcaatcaagtagtgattcattttacttagtctgtcaaaactccctaaaaatggaatttaatattttagaaaaatggaatttaatttggttcctcagattcctcatgtacagttgaacttcttgtctcattttggtaataatgcccccctaatcagatatggatcttggctcagggttggattgctattctatttaattcatttagtagtatattctagttttaaagatcccctgcgtgatattgtcagtcataagagggttaatgttgtaaagatcatatttacaagttagttaggtctaatgttgtaaagatcatagatattagttgaccaaggatattattgcagtttgttaaaaa

SEQ ID NO: 110996 - DNA, 643 bp, Glycine max
  unsure (1)..(643): unsure at all n locations
  Clone ID: PAT_MRT3847_71239C.1
agagtttccaacacaacaacaccaacaccaacaccagccacagaaataagtttgtggaaaataagaaaacaacattttactgttgttaccgttctaccttgagaacaacctcaaactcaaacacaacacaataagagttgtttcggtttttgctatagtagtaatagtacaatacaactactgcaaccatatcaaaccaaagaagcattgtgtggaattattgactcagaaatttgaaaaccactttgtcccatcccacttggacttccacctcacccctttttctcaacgccatgaaaatagatatcagcaattgatcaaaggtctttttgtttttgtggctctgagaggggagtgattctaaactaatatatatgggggctggggaagagagcacagctaaatcttctaaatcatcttcatcagctcaggatacaccaacagcacctgcatatcctgattggtcaagctccatgcaggcctattatgctcctggagccactcctcctcccttttttgccacaaccgttgcttccccaactccccatccctatttatggggaggccagcatcctttgatgccgccatatgggacttcagtcccatatccagctatatatcctnctgggagtatctatgctca

SEQ ID NO: 110997 - DNA, 252 bp, Glycine max
  Clone ID: PAT_MRT3847_7123C.1
acgtaaaagagaatcttaaatcttgcccttggaagcataaagattatacatgacttggaaaagacacggttccagatgaagggcatggaagaatcatcctttctactccttctctttcgactggacactcagaaatataatattatcagctacgattgatggagcttgacacctcacatgtattttgatccatgcattcaccataggctatgctcccttcccaaaaagacaagacccgtctgtcacatatag

SEQ ID NO: 110998 - DNA, 2658 bp, Glycine max
  Clone ID: PAT_MRT3847_71240C.1
ctccgtattgcaagtttttcgtgcagagtcacctattcaacaggactttccgttcacgacactcccttttatcgtttcacttccgtcgtcgtcgtcttcaattttggatcttcgaatcgaatcgcatcctatgggtagcagcagaggacacacgctcatggaggttggacccgacggggttgccgtcatcaccatcgtcaaccctcccgttaattcactttcctttgatgtattgcgcagtttaaaggagagttttgatcaggcgatacagagagatgatgtcaaggcaattgttgttacaggtgcaaagggaaaattttctggaggttttgatatttctgcatttggtggtattcaagaggcaaaagagcgtccaaaacctggttggatatcagtagaaatcatcactgatactattgaagcggctaggaaaccatcagtcgctgccattgatggccttgccttgggtggaggattagaaagttgcaatggcatgcaatgctcggttatcaactccaactgctcagctaggcttgcctgaacttcagcttggaataattcctggatttggaggaacacagcgacttcctcgtcttgttggtttgacaaagggacttgagatgatactggcttcaaaaccagttaaagggaaggaagcttttagtttggggcttgttgatggtttggtgtcacctaatgatttggtgaacactgcacgccaatgggcactggatatgttgggacaccgacgaccatggattactagtctttataagaccgaaaaattagaaccccttggggaagcaagagagattttgaaatttgcacgagctcaggttcgaaaacgggctcctaacctccagcatcctttggtttgcattgatgttattgaagtcaggaatagttgctggtcctcgtgcaggactttggaaggaagctgaagcatttgaaggacttgtaaagtcagatacttgcaaaagcttagttcacgtatttttttctcaaagaggaacatccaaggtacctggggttacggattgtggtctggctccaagacacgtcaagaaggttgccatcattggtggaggactaatgggctctggaatagcaacagctttaattcttagcagctatcctatcatcttgaaagaagtaaatgagaagttcttagatgctggtatcaataggattaaagcaaacttacagagccgtgttaagaaaggtaaattgaccaaggaaaattttgaaaacaccgtctctcttctcaaaggttcccttgactatgaaagcttcagggatgtggacatggtgatagaggctgttattgagaatatttccttaaagcaacagatattttctgatcttgaaaagtattgtccacctcattgtatacttgcaagtaacacttccacaattgacttgaatctgattggagagaagacaaagtctcaagatcgaattgttggagcccatttcttcagtcctgcacatgttatgccgcttctggaaattgtacgtaccaagcagacctctccccaagtgatagttgacgtgttagatatttcaaagaagataaagaaaactccagtggtggttggaaactgcacaggatttgctgttaataggatgttcttcccatacacgcaagcaggtctcttgcttgttgaacgtggtgcagatgtttatcaaattgatagaataataaccaaatttggaatgcccatggggcctttcagattggctgaccttgttgggtttggtgtggcaattgctactggcacccaatttattcagaattttcctgagcgaacttataaatcaatgcttattccacttctgcaagaagataatagagctggcgaaacaactcgcaaagggttttatttgtatgatgataaacgcaaggctagtcctgatcctgaattgaagaactatattgagaaggctaggagcatttctggtgtctccgttgatccaaagcttgccaaattacaagaaaaggatatcatagagatgatattctttcctgtggtgaatgaggcttgtcgggtccttgatgaaggtatcgcagtcaaagcagcagatcttgatatttctgctatcatgggcatgggttttcccccttacaggggaggcatcatattctgggctgattctcttggatccaagtacatatattcaagattggagaaatggtcagagttgtatggggaattcttcaagccttgtgcctacttggctgcaagagctgccaaaggaattcctctgagtgcctctttggagcagcaggcaaagtctcgcatgtaagaaaaaaacagctcattacgtgtttactggattgaattttcctttccccgttatatctcctttcagatggtaggaatatagtggtgacttgagaaatagcttataatgtacgatgagaaaacatttgaacagcataattatttaaaaaataaaagtatttttagtttaaaaaatttgtgtgttcttccgcatagccattgtcggtttatttactagaatagacggaaaatgtaggtggtgatggagcgtggagcatggtttcttctttgtatgtttcatcataagttaactgtagtgctgcttaaattgttttgtaatatacaacaggcttgcctttccagtttagcagtc

SEQ ID NO: 110999 - DNA, 292 bp, Glycine max
  Clone ID: PAT_MRT3847_71241C.1
atccgatgcttttcactacaagggattcgcatgtccgacgtatatacatggtcactctgcttccgatcgctccagtagtcacttgcgaagatcttaacgaaaatttaggatgggtacactgcatccagatgacaaatcgggtaatctaaatgctttggtagagcttcagcaacagatagatgtgaatgcaggcgctctcgttgtccgcatagccgaaagttctgggagccattgtgcgtagcacgtgaaaatgtcgattgtggcagcagctcatgtaagtcttccttatgca

SEQ ID NO: 111000 - DNA, 483 bp, Glycine max
  Clone ID: PAT_MRT3847_71242C.1
cgttggttaaagatcggacagttgagatttcgagtgtttttcaagttgattaaaatttgaccattccgatcttcatccaacagttctgaattcctaaatgtgtgaaggcgttgaatagtgatacaggcaatcctaatgaaatagtctagccgatccttgtggtcttgtcgtatgattcaataaaatcaataattaaggttagctccattttgaacttttacatttgctaaatatggcttgaggttcagtttagtgtctttgatgcgcttgtttattttttgtttggttttgaactagctccgtttgatgttcaatttctttcaagctgttgacatcttgggccaaattgttacttgaacttgaggatactgtcaatgtttgatgaacggaaaattgtctgttattttaataaaatgatgagtgagattgagagtttggtttctgaggcttattttatttcataatgtgaaatacactgtattg

SEQ ID NO: 111001 - DNA, 257 bp, Glycine max
  Clone ID: PAT_MRT3847_71243C.1
tcgacccacgcgcccgcgtcgcgtttgcaaaggcacagacaggactaggggaggtataccatcgaccacgttcgtggattgccataccctgcccaaagactcataaaccccgtcctctgttagtgaatgactcgtgccgacagggggagatgccgcagacaacaccactatgtacactgccatcttcttcaatggccacaacctcacgatggaaaccttgtacatgggatacgagcaaggtatctgcacagacccaa

SEQ ID NO: 111002 - DNA, 374 bp, Glycine max
  Clone ID: PAT_MRT3847_71244C.1
cttggggttttttttttatttttttgtatttttttttttttttgggtcttgattttttttttgggaatacggatttttaaaatactttttactttacgggggacggtggttgttttttaacacctgttacaaaacccaatttaggtccccacatttttccctttggcgcccggaaatgataaaaaaataatgccctttcgagggtaaaaacaaggtttctacatgttttcaaaaaaacaactccattacaagatttttatcgtgggtcaccccctcctaaccaaacaaaggcgcttaagaaatcaatttctctccctcggttaatgaagaggggggtttcccaactatacatgttcgaaaggttggacaggctc

SEQ ID NO: 111003 - DNA, 364 bp, Glycine max
  Clone ID: PAT_MRT3847_71245C.1
gccaaaagaccacagaaaggtgtacttgcaatttgaaacaatggaaacaacaagtgctgctcaaccttcaatgcccacaaaggtgtttgcaaggaaaatgacatccgccatccaaaagccacctcaaatgtttgaaaccaaatttaaaagtgacacttgaagaaagtacttacagactttttgactcacatggcaatcctcttaattttctcaaattactttctgaaattgagtttagtttagaaattttaatcataacttgcaccattatatgtatgtttacagaaattttactgtcaaagttgtgtgatattcatgatcagtaatttttttccaaattaaagatattcctcaggaaaagaaa

SEQ ID NO: 111004 - DNA, 721 bp, Glycine max
  Clone ID: PAT_MRT3847_71246C.1
gttgaagaagccctactctctcgacgcctctttcctctccgacatcgagaacgaccccttcgagaacctgcaagagactcacgatatcttcgtcaaccagatgggtatcaagcccactaggcctgagcttgagcttctccgtcgtcttgccgaactcatcggtactcgcgccgccagacttagtgcgtgtggtgtcgcggctatctgcaagaagaagggctacaagactgcacacgtcggcgccgatggctcggtatttaacaagtacccccacttcaaggcccgtggtgctcaggcactcaaggagattctcgactgggagggtggccgtgacggcaaggcgctcggcaagggccacgacccgatcgagatcctgcccgctgaggacggttccggtgtcggcgcggccctcatcgccgccctcactctcaagcgtgtccaggaaggccaggttgctggtatccgtgaccccgagggtatgctcaagggcaccgctgccgccaagtccagcaccaaccaggtttaaattctcttatgaccctaggacgattggcgatggaacacatgcgatagacggtggcagggtgaaatccttgatgttgaaatgattgcggtccagaaacttgatcaggtagactccgaagttgtcgggtccaaccacctgagtagttagccaaaggctatgaaatgcacaaatgcaaatatgaactccatgactgaa

SEQ ID NO: 111005 - DNA, 391 bp, Glycine max
  unsure (1)..(391): unsure at all n locations
  Clone ID: PAT_MRT3847_71247C.1
gagagagagagagaactagtctcgagttttttttttttttttttatgngnncattaatttattttacaaaggaacggctaacgaaagccagtgttacaatggatgttttccgtggagtgaatatttcacgtagatttcttcataaaacttacctctctctctcacacacacatatgatataacatatacttgctcacctcatcagccttgcactactcagccgatttagccgttatttttttataggaattccatgtggactgaaacatacttactgtatataaataaactggagaatgtgacaatagatagtcccacctaaaaggctgccngcaaatgngcccaaaatgcgtgcgtgactaggagggggggggcntnntaaggaattgaa

SEQ ID NO: 111006 - DNA, 498 bp, Glycine max
  unsure (1)..(498): unsure at all n locations
  Clone ID: PAT_MRT3847_71248C.1
ccacgcgtccgggatcattcatgagggagaagctggaggatgtgaagtacaagataccaagggccatgccatttgagacaagagtgcacctcttgctgaaatgttttgcttgtgggatatgtatgacagatatttgcctggaggagattaagggaattaaagaaaagagttagaccaaggtacagctctatggatatgcagtcataattttttatttgtaaatgttagttgagctactaaaattgatcgaatctattaaaacctgtaaaaatcgaataaaaatctaacaaataaaaataatttttcctcccttcaaaaatatatacagctcaagaatagtgaaaaaaataattttattcttgtataaaggtaagaaagttctaggatcaaccttgtaataaatgtcaaggataggattccaagtcttatgagtgtggttgtgtggctactcgtgtttttcactccatggngacattanatcttaaaatcttatggtgc

SEQ ID NO: 111007 - DNA, 401 bp, Glycine max
  Clone ID: PAT_MRT3847_71249C.1
gaccaacccaccgtggcaccatctgttacagtatagacaacaactaccggatctggcccagaggagcctaataaaggcccagttgagaccgaggaggtggtggctcaggagacagaggaagagaagcctgcaaaagagtcatcagaggatcaagactgagcaagtgaaagatgaagcactggagcctatagaatctactgatacagattcagctgcagcaccaccaccatcagccaccgaggaagagaacaaaccagcttgttcagtcgaaaccccaatagaagttcctgttgagacgactgccacttatacccatggacagtgtgagtgagaacaacacgtgcataaatggtcccagttgtggggatcaggtgtcccattttgcatgccatgatgaaaag

SEQ ID NO: 111008 - DNA, 394 bp, Glycine max
  Clone ID: PAT_MRT3847_7124C.1
ccaaaagcaatgttttttacaccttcaaattcttcaattgggcggtccctttttatattgggcgagcgccctctccctcgcttagtcccaatctttcatctgacttaactacacgccaggtcgccgacaaccttccttcgcctgaggacactgtctgccttctcaaatccaccaccatctgaaatgtccgtctctactgcgccgttcccgccatcattaaggccctttccaactccagcatcttaattttcatttgtcccttcaactgtgacattgttatgttcgccggctgattctaacgctgtcacttagttgttttacacgaacgttttgttcttctaccccttcagcaacatcacttctgatcacccttgtaaacctatatttttcacct

SEQ ID NO: 111009 - DNA, 532 bp, Glycine max
  Clone ID: PAT_MRT3847_71250C.1
ggtttcctaattgttcttttccccacttgttccctctgtcaaccgtcctggggccggcttgttggttcctttccttggcctcaagtccttggttggtttcccttcctaaaagcccaccattaactttccttcttttgttgtcaccggcggaagagtgcattgcttgcgggtgtgtcccctctttggcagacataggtttggcactttttcctacctgcctaaccttgctgatccacattggacgaaggacttgaattaccttcttaggaaggcatggtttccttgctcgaaatctcagttggaccccggtttactgtcccgggagctcatcaggtatccagaatcttcctatggacgctactgctccttctgaaacctgcctatgtgagcttgccctgatgctcttcaggtgtggaaggagcttcataaggctaatactgtttacccaaccggctcattccctatgattggattcgacaccgttcgccaagtgcggctcttcagcgttatcgcctcacagcccccaggtttc

SEQ ID NO: 111010 - DNA, 171 bp, Glycine max
  Clone ID: PAT_MRT3847_71251C.1
aagaagagaaggcttgtactttttaataaacttgagaagcaaaatgaaaaagaataaggacgatggtggggatgttgacaagcatcaagataatgtagacgttgtttcatgatagacattggtcttgtgggggccccctttgacatggtggggccctggagggatgatagg

SEQ ID NO: 111011 - DNA, 358 bp, Glycine max
  Clone ID: PAT_MRT3847_71252C.1
ggaatcatcaacctttactctctgatcggatcatgccttgtcggtagaacctgctactgaataggtcgacggtacacaaaggatgacgagggcgccatctaatttgccggagcactattgatgggtttgtccatcaactatacatttctcatgttcggccgattgggagccggcatcggtatcggatacgccctcatgatagcccacgtatacaccgtcgaggtctacccggcctactctcggggctgagtcacatccttcccagaggatcgttgctttaattctatatatatatctccatcgttatatatatatatatgacaatatgattctgcaggttgagattaatggagggata

SEQ ID NO: 111012 - DNA, 860 bp, Glycine max
  Clone ID: PAT_MRT3847_71253C.1
acgcccccttagaagcggcagaccggtcttccttttttggtcgtcaaatcacaaatccccatatatgataaatttgtctaactttttttttccgataactattttaaaagtcatatatctaccatgaattgtgaccagtagaccgtcaacagaaattaaattaaacccttcaaagaaccaaaggagtctagctcaattggttgtgaaggatgtgtgaatgttgtaaactacccggcaccatattcaattcctacggataaaaaaaaaataacattcaaagaaggacaatgagaatgaaaacaagaagggcagctatgaaagagtacttgatggcagcagtgagaatggccaaggagatgaacaagagctgccagaggacttgcacgcttgcccaagtgagaataccggttaatccaagtgcaaggacgttgtcggggtcagggtccaaaagggtcctccaattgaaccccaaaatggttcgtctttgattgctccaatcgttaaccttttcttcttcttcttcttctttggaaccattgggtggttttttttgctgctgttgttgctgtgtgttaccctgttccctcaattcattgttgttgttgttgtttgcgaatttgagaaatgggtgtggtttgggggagagaaagagagggtggggtttgagagaaaggggagaagagaatgggaaagagtgagaaagaggaattgagagtgagagtgagagtgagggtttcaaccctacaatcgtattagtcatcgctgtgttcttttctcacatccaaaaattctgggacttgaggaaatgcaaatgcaaggaaggaaatgtgggtgaaaatacaaaattgaaattaaatacg

SEQ ID NO: 111013 - DNA, 211 bp, Glycine max
  Clone ID: PAT_MRT3847_71254C.1
cacaatacatgcaggcgacttcatgaggcgatactgcactcatccttgtatgaataatcaagctggtaaagctgattatgaagctgtgcataaatcagaagatttcgatatagcgaggagtgccattcaaattgctgtagcaggtctatacatcataactcagctttatgacgatgagaatcctatcaaagatatatcacttgccacagcg

SEQ ID NO: 111014 - DNA, 300 bp, Glycine max
  Clone ID: PAT_MRT3847_71255C.1
ctctctctttctttttctttgatcaattcaatctccttgacacgatatccaaattaaaccaagacccagaaagtgatcaagaagataaagaaccacaaagaaagaagatacatacactcacataagtacatacatacacaccatgaagctcgtttggtctcccgaatcagccttacaagcttacatagatacggttaaatcatgtgagaaattcaaggaaaccggggtaccagagttgctatcagacatggctgcaggatggaacacgaaattcatagtagaatcatggtcctacggggg

SEQ ID NO: 111015 - DNA, 366 bp, Glycine max
  Clone ID: PAT_MRT3847_71256C.1
tccggtccggaattcccggtcgaccaacgcgtccggtcggttgtaaataggtagttagggtgaatgtatttcggcgttgattgtagtcagcctttgataagaaatctgagcaatttgctggttcagtggtcggttccttgattaaagtgtgagcctgtcaagccatgggctagaagccggctgctgttttctctattgaatcaaagtagtgctactactatagaggaagatctctccgctattgatgctatcgcagcaatggataacaaaaatattcggttactgcttagtggtgctgcctgtactcttgtacattgccgacagagcaccaccagatctttggtatttttttcagatatttgggcc

SEQ ID NO: 111016 - DNA, 172 bp, Glycine max
  unsure (1)..(172): unsure at all n locations
  Clone ID: PAT_MRT3847_71257C.1
ggacatttgatgtttctttactaaccattgatgagggtatcttttatgttaaagccacagctggtnacaccagtcttggtgtnaagattttgagaacagagtnntttaccacttttttcaagagtttaagagaaagatcaagatggacataagtgggaaccccagagcactt

SEQ ID NO: 111017 - DNA, 504 bp, Glycine max
  Clone ID: PAT_MRT3847_71258C.1
ccacgcgtccgtccttctgcggctgctgtagtctaggaaagagctggacctttctatagagactgttaccggcgataatcccaaaacgcatatgagaacctaacaaacctagctgaagcatagcttaacatcaacaaactttttggacaaaactctgcgggtttgtacaatgccattacactatcatcatttagtgaggcacttactaacttatctggctccttgccttgaaatggcaactcactatactgcacctgtgctgatgggaatccgctcttacattcttgcaatgaagcttttcttgctgcgccatcagctgaccaagggcaggctgataattccaggtcttatactgctgcaccaccgagaagttacaggcaaaaagggggggaatgggttcaattctattgaaatagcatctataacatgtgcgttggccattgtttctgatattctagccctaattgtgctttatatttatacacggaacgaggaatcctatgt

SEQ ID NO: 111018 - DNA, 312 bp, Glycine max
  Clone ID: PAT_MRT3847_71259C.1
tgagatgcaccatgacgacactggattccgacgttaccagggttccggccggcgaaccctccatcatcgccggtccttcgtcatccaccaagatgcctaagcgattccagatcaacaattggggtggcgtttctctcagggcttgggatattgttgtggataactgctctatttgccgctgccagatcatggatctctgtcatgagtgccgggccaagtattctacctccattagccacgaattctctgtaacctgtcgattgtgtcatcaagcgttgcagctttattgcataagcttatgggccaataccc

SEQ ID NO: 111019 - DNA, 603 bp, Glycine max
  unsure (1)..(603): unsure at all n locations
  Clone ID: PAT_MRT3847_7125C.1
nnnnnnnnnnnnnnnnnnnnnnnnaaaatagaaacaaaaaatacatatcttttcgagaacattaaatcagaaaatagggtatccaaaaaaaaaaaccaatttttacacaaaattcaccatccaaatctgcagccatgagttgaaacctcacgccgtttccatcatcaaagtcacaagaaaaaataaatcacaatgaagcaaacaaacaattttgaatctcataaactgttatagaggatacttgaagtctcaatttgcctccgatgaaggacgccccttgaaggcctctgaaataggaaaccgcatagtgagaagtgacgagggggtcttcgccatctgcggaatcccaaagtggatgtcacaccagcgccgatgttgcaccagtgtcgccgccaccagtgcaatcttgcgaccaaccaaggcaccaacagtgtagatctaccagggtttttttttttttatcagacctcgcaccacgtttctgacatcgtggactcgtaagcggggatgccgaggcatgggatgggggagtggtgttcaaccagagtgcttcgttccatcactctctatcgtattcatacccaatctttccggacgcgtggg

SEQ ID NO: 111020 - DNA, 429 bp, Glycine max
  Clone ID: PAT_MRT3847_71260C.1
tgctcgaggcggacggaggttagagtaatttgtctccgaattctgcgaacgcgctgcccccactttcgtccttagaattcttgttggggacatcatagaggaatttgtgctgattagggttgttttctgcttttgatcagaacagaaggaagaatcacttagtatagatggttgcagatcactattctcctcctctgtttagtgtggctccaatgatggactggacagatcatcactataggactttggcacgcctcatatcgaaacatgcttggctctacacagagatgcttgcagctgaaacaattgtatatcaaaagggaaacctgattattggcgttttctccagatcaacatcctattgtgctataaatcggagggagttattttttatatttggcaaaagcaactgaacttgccaatgctttc

SEQ ID NO: 111021 - DNA, 448 bp, Glycine max
  Clone ID: PAT_MRT3847_71261C.1
taccgacaggggttctaccacagcattctattcattcaatcacgcagggcttacaatatgggtgggcagacctaaatacttcaagatccctcatacaaatcagacttcttgcaagtcaacttgacgaaaatccaccctcaagcatcttccaaccaatgctgctcgtctgtatgatccaaccactcttggtgctaacatacctcatcatcatcgtcctcttactgctgctcttcatcacattatgaaataccacacgagcactcttctactaatcatcaagcttcctttcctgaacatgcttcgttacattacccatcatgacatcactgctctaccttttcaaatccatgctgagcttgcatcacacgaagatgcttattcatacctagttgggctcttttatgacactaacttgcttgccattcactccaagcgtgtgactattatt

SEQ ID NO: 111022 - DNA, 656 bp, Glycine max
  Clone ID: PAT_MRT3847_71262C.1
cccagatgatgctagacaagttgcagactacatttgggccaacttcttgggagggaaatcaaactctaggccttttgggaatgccatattggatggagtggattttaacattgaaagtggtgaactacactatgcagcacttgcttataggttgcatgaccattatgctggttctaaaaaaaaattctacttaactgcttcaccacaatgttcattccaaaacaacttacttcatggagcactcaccgcaggcctttttgaccatgtttggattcaattctacaacaatcctcaatgtgaatttacctctaaggaccccactgggtttaagagtgcatggaatcagtggaccacatcaattaatgctggcaagttctttgttggacttccttcctcacatgcagcagctagaacaggttttgtgtcatcacatgctctcataaatcatttgctgcctatagttaggtcacctaaatatggtggtgttatgctttgggataggtatcacgatttgcaatctcgatatagtggtaaaattagtggaagcgtttaagtgctccacttattaaatagaagttttaaggattctaggaattatttcaaataactgttgtagaatatcttcaatttaaatataagtaatttattttcaaaaa

SEQ ID NO: 111023 - DNA, 1979 bp, Glycine max
  Clone ID: PAT_MRT3847_71263C.1
cacaccaattccaaaatatattgaggggtataatattatatcacccaagccaaaaagttagagagaatacagtaaagataacaaccccataaacaaagcaaagagaaggaaaaagggtggtcctacactcccctcttacaagtatcacacacaggctgttaaagggaaccaaataatgcaaagtctgatgggtcacatggtctacaaagcaaactgacaccaccacacatgcccttgcctcccaattgcacatgcacatggtgactgttccctaagcctcccaccacctaataacaccatcctaaatcctttttttttcttctcttctctctaataataatcactttttttctcattaattatgcaaaaaagaaaaagcacacccaaactatcattaaaaattctcacaacatctcacaaatcagaagaaaaacctttttgtcctatctgattaattaatattatacacaacattaaccgagaagtaaactattgttgttagccaccttacatatgctcttcagcatacataactaataactcttaaatttttatgtctatgtcttgagctcttctccagggtcaataatctcttgttggtccttgtttccaagtagtaattgaaattggatctattgagagggctctatggtacaaagggatcgagctgccaatagggtgcactgcaagtgcctgtggcatgtgattaagtggtcattcgtgaggccagatgtttgcatgaatgaatgaaccactgttggaccaacgcacctaaagcctcttctaaccatgtctttgcttatgctctctgattttgatgtcttcactggaatcttgtggccaaacttgtattgagtggagattggtttatgattcacaaacccccaaatgtacttgtcaaatgaaccaaagtctttcttaatctctaaaatttggttagcattatcaacaactcctcggactctgcttatgtcaatgccatattcagaactaatagacatcatttgcttatcagtcaagttagccacggtttctgcatcaaattctgaaaatgcagccctgaaatctaggcgtttcttcaaggttgaggtccaatcagatccaacttgagcaccgctcaaaactaaaagttcaaacagcatcttgtcatcatgaactggaactccccattcctcatcatgataagcaatatagatgggatctgaattggctgtgataaagctgcatctcttctcctcctcagttggctttgatgcaagactagtgtttgaaggatcaagaggaacaactctttcaaactttgcagactttgatcttccataatgggcaatcttcattttcctttgtgcttgttgcagtgccatctgctccctcctcacagcagctatgctccctggggagtcagtgatcaaagaagatgagtaactcaatgaagcctcaatagaagcagacacacaggaaccttccttgaaactcttggacttttttctctccaaagttggagtttttatggtgtttcttggggtcacaatcttttcagaacttgagttaagtccattgttctcattgcctctctttataggtggaggcctaggggacttagactttggagaaactggaggtgtcaatgaggtcttgctaggaagtggtggtgatggaggagatggtgattttggtgacagtttcttgattgaatttctcctctcaaggttaggaaatcggttacaagtcggttgaaggaccggccggccgttgattctggctaccagagaggtagctgtggctgcttctatgcctacagtcaccttggtcatggaactgcacattttgttgcttgcttatgtgtgatttaattggaatttgtatttttgttgtaggggagtgttgacaaggaagagggttaatggataaggtggtgtgtaatggactaatgaatgtggaacaatgataagaggaagaaaagggaagagatgaagaat

SEQ ID NO: 111024 - DNA, 588 bp, Glycine max
  unsure (1)..(588): unsure at all n locations
  Clone ID: PAT_MRT3847_71264C.1
tgtgcgagaagacgacagaaggggactgcagtgatcgtattaatcagctagccacaaggtacccaaatagcctcaggctataaatttcaatacccctctcgccaattgatctgttttaatttgtacttccacttccacattgcatctggtgtgttttttcttctactatagctatctttcattctctctctagctacacacaacctctgtatattctccgcgcgcgctttcgatcgatgctattatagtgttccctacctaccttatggctcctctcttcatctcaatgcaaatgcttcttctggttttcacttgcatattattgcatgtcacatgcacaacttaccacgacagcacccccaaaacagtgccttctacaaactcctctaagtgggtggggcccatcggacaccgagtaatcaccgttgacgttaacggcggagcccatttccgctcagtcaaagccgccgtcaatgctgtcccggaccacaacacaatgaacgcccttaaacaataagcgccggatattacatagagaangtggtagtgcccgtgacgaagccgtacattacgtttcaaggtgcggga

SEQ ID NO: 111025 - DNA, 1080 bp, Glycine max
  Clone ID: PAT_MRT3847_71265C.1
gttctaaatagcatgcttaaatattgcttctgtaatggtggatcataatccgaattctgtgcaaaaactatgggattagaccaggcagaatagtaccaggtggctcttcaaaactccgaaattccgcattttctaaatagctaaattaggttgttacgtatatcataatatatggccaaaaggcataaaatatatttgttagcctttgatcagtaaaccatataactcaaggaagaacaattaaaaactatttgcgtgtcctcctgtataatttaggccaaaactaaaagtatatggttgccggaccttgttctacaaatcaaaagcaactaaaacaataacttcagcaataacaaaataaagatttttggtaaaccttatgggtaagaaaaacaacaaaagctttccttccagtaccaaaaaaactctctaagcacattcttgcttaggcaaaaagactcacaactgccatgcacaatgttttaagtggcaaaactttgtaatgatgtacgaaggcattatcatagaacctcacaagcttgtcacagaggcagaatagcagacacacaaacacgagtgacaaaccagtacttgtaattgttaacttacaaaagatgaatggaagaaggaccagacacagcagcagctctctgtgcccgatgtgcttcacatttataaagctctttcattcatcttttgtaagttaacaattacaagtactggtttgtcactcgtgtttgtgtgtctgctattctgcctctgtgacaagcttgtgaggttctatgataatgccttcgtacatcattacaaagttttgccacttaaaacattgtgcatggcagttgtgagtctttttgcctaagcaagaatgtgcttagagagtttttttggtactggaaggaaagcttttgttgtttttcttacccataaggtttaccaaaaatctttattttgttattgctgaagttattgttttagttgcttttgatttgtagaacaaggtccggcaaccatatacttttagttttggcctaaattatacaggaggacacgcaaatagtttttaattgttcttccttg

SEQ ID NO: 111026 - DNA, 324 bp, Glycine max
  Clone ID: PAT_MRT3847_71266C.1
actttctgttatgaccacaaaccaaagaacacgaggcagacgccaactagacctagccccaggaatgccacaggaagcagagaacctgctgtgtactgctcccaaggagcccagagaatcacacgaccagccggccaaaaaattagacaactatgtgaaccaacaatcaaaggtatcagatgctgcacataaaaattcgaaaactgacaatgggtcggagctagcggaaagggaaccaagtgaagatccccagtctaccacaaggcacaggcttgttaccaaacaaacacctgcgggcactctccgatgaggatctactaatga

SEQ ID NO: 111027 - DNA, 301 bp, Glycine max
  Clone ID: PAT_MRT3847_71267C.1
aaccctaggattattagacgggaaaaaaaaaaattggattacagggccgatttttttaagccatctacaaaagtatatgttattgaggtatgggggaggggcttgactaggaagcctgtttttttaaaaaaacggccttattaaagggacattctacttttcgggtattccaacacaactaaaattttggtggaaggtggctattggaaaaccacaggaggggatttggctttaaccaaatcaatagacccttttatcctggaatatgggctaaaaccccgacgggggcagcatgaatcaa

SEQ ID NO: 111028 - DNA, 378 bp, Glycine max
  Clone ID: PAT_MRT3847_71268C.1
aagtctttgagaactaagaaggagaattaaatggcttcctcaatgatctcttccccagctgccaccactgacaaccgtgccggtgccgccatgggtgcttcattcactggcctcaagcccatggctggctatcccaccagaaagaccagcagcgacattacctacattgctagcaacggtggaagagtgcattgcttgctagtgtggccacctgggggcctgaagaagtatgtgactctttcctacctgccggaccttgatgatgctcaactggcaaaggctgttgaatacctgattacgatgggccggattccgtgctcggcattcgagatggagcgctgcttccagcaccgcgagcacaccagggaacctggatac

SEQ ID NO: 111029 - DNA, 325 bp, Glycine max
  Clone ID: PAT_MRT3847_71269C.1
gatgcctactatattcaactgtcttgagcataaacagggactctcgggggcctcaccagcatccaagacacagaatgtatcacagctacctacctgttgaaaactcaccttttatcatatgggcagctgctgagataaatgaaaatagccatctccgatccatttacacgaggtaccccgtgggaggacaactgttaacgggaaggctgcctgaaatgaatcgcttgcccagtgataataggtgacagcactattggcgagaacaggtctgaagatattcctcaagagtcaagagagccttctggttcttgagccgatcaatatg

SEQ ID NO: 111030 - DNA, 388 bp, Glycine max
  Clone ID: PAT_MRT3847_7126C.1
tccacggcgtgagacgactacaaaaagacaaatgatggggacatcccagatcttaaacatacaccaaaaagaacccttatgcaacacatccataatggccacctgtgctatctaacactcactattaactggccaaactgctctgaaacaggtgagcagagcacatccgcaagaccgagggcgccgacgaaggtcgcactaacatgctccgtacccaaaatagtgcttctcaaagcatttggaatggccctgaccgtgctacgtgatagagtccattaccaagatccacattccatcatactctgacctgataatgacctgccgactactgaggggacactgctgtattatcagctgaccccgaggcctacacaaacatccgggagct

SEQ ID NO: 111031 - DNA, 377 bp, Glycine max
  unsure (1)..(377): unsure at all n locations
  Clone ID: PAT_MRT3847_71270C.1
tctcatttcgtccggtctcngctcgttcgcaagggaggaaacagttctatatgaagctggaagaaaaaatgcatgcataggaagcagtgatgaatcaaatgcaagcaatatcacaggagaagacagaagctgattttaagaaactccggaagagcctcaactttaaagcaacaccaatgccttcgttttaccgcacaccttcaccttcacaaacacatgggaataaggtacatactttccgagttttcagcttgtttctgtttgtgattagtgcatccataaatatgggattcattgtaaatgagctgtgtttgttgtatgacatccatttttcaatttaatgggaccctcctggtgataaatattcaaaatttact

SEQ ID NO: 111032 - DNA, 345 bp, Glycine max
  Clone ID: PAT_MRT3847_71271C.1
ctcaatccgctcttgactcactgacgcaggcccttagttcatacatcaggagaactgggcatggcattgttatggatgaggagaaagatagcgatatggtctcatcgcttcctgaatttaacgcttctcttgacgcattatgggattatatctttttcgtcaacgaagctttcagcatttcaattaaagatgcctttgagtatcttatcactcttcgtcagaagtgacctgtagagttgattgccaagtttttggctgataagcttcatgcaggtaataaaggtacttctgacaaggaactggaagctacacctgacacaatcctggtgttattcacgttcagtc

SEQ ID NO: 111033 - DNA, 1422 bp, Glycine max
  unsure (1)..(1422): unsure at all n locations
  Clone ID: PAT_MRT3847_71272C.1
gcggccaaggttgtgatgcatcagtactattggatgatacatcgagtttcacaggtgagaagacggcatgtgccaacgctgattcgattagaggctttcatgtaatagacaccataaaatccaccacggaaacctcataccctgatgttgtttcttgtgctgatatccttgctgtaacaactagagactccgacgttgctcttggtgtaactacttcgactgtacaattgcctagacgaggccatttcaatttcacctacccacgccccctactattccttattttttttttttcagaagccaacaaggccaagcgctgagagaaaaaggttcagaaatgggtttatacacgagcgtgatggaagagataagtttttacacagggctatctcccgctgcgtttttcaccattttggctatgatggtcgtcgtttacagaaccgtgagcggcatgtttgtgtcccccgaagactacaacaagccccccgtcgtttcggcccgagccaattcccggttagacgagtccgagccgccgcgcgaaccggtccaattgggcgaaataacggaccgggaattgcgagcctacgatggctccgaccccagcaaacccctcctgatggcaatcaaaggccagatctatgacgtgtccaatggcaggaatttttatggtcccggaggaccatatgcaatgtttgcaggaaaggaatgtagcagagcccttgcactcctgtcttttaaacctgatgacattaatgggaacctcgaaggtttaggtgaggaagagcttacaattttagaggactgggaatttaaattcatagaaaagtatccgaaagttggccagctcattgcagaacaaagaactcggcaaaatgagttcaaagaacaaactcaagacaatttggacaaccctaatgaatgcaaggaggaagaaaaatagtaaccattatattgtataggttacaaccgagggattttgtagggctactgaatcactgatagtttcgaagtactgcttggtaagtatgaatacacatagcaatgcatattgtccagtagatggtggtcattatttcaacataagcctcttgcaattgataaaatacatgttgtattcggccattgtttacacatcccccaaatccatatatgtaactggataccgaaaacgttctctttccctctgctcatgtagaaaatgaaatctagttatagcttgttgtactcatactgttctgcttacgtaattacctctttttggtgtttttagtcaaacttggcatgaaagatagagttgtttaatgttggctatactctacatattttggtgtttattgttgtcttcttagcaaagtgtaaaacacacccctcttttcggctcttttctttaaggaagtgtttatttcaaggtgtaaaaaanaa

SEQ ID NO: 111034 - DNA, 438 bp, Glycine max
  Clone ID: PAT_MRT3847_71273C.1
tattgtacaccgaaacaaaaggaaaaagaccaaaggcggcaggggaaaaccacaaggaggaaaacgggaagcagcacgaggcatacctaggaaaagacaggcagagagaggcgaccgagcccagaggggcacaagggacacctcaacagcaaacgccgagaggaacgggcccaaaagcagagctaaagaaaccgaacacccctgaagagcccgaaaaccaaaaagccgggaaaggcacggctgaaaaccccacgaacacagaacccaggacccaccaagagaccagaccagcaggcacacaaagaaaccgccggaacaaccaaagaggggggcaacaaagagaccagcagcgggcacggccagtccaaagacaagcaacaccgccaccatgggaacaagccagcagaaactgggcaggcgaccacacagccaccaaag

SEQ ID NO: 111035 - DNA, 299 bp, Glycine max
  Clone ID: PAT_MRT3847_71274C.1
gtgacacgtacgagaactatgggtagggtatatttcttaaaacggcaagatctacaagggtgtatgtgttgccgtgaataatccttcacttgtggagtcttcaactgagcccaaatagtgttgtgatggatagttgtccgttctatcacggataggtgaatacggtttctggaatgtccattaatggatcgactacgacaataatgtcatggctgcctattctttcaaaactgacttggcaagggcactgaggatgaccggcatgaattgttaggagttgatgcttgaccatacacgga

SEQ ID NO: 111036 - DNA, 1581 bp, Glycine max
  unsure (1)..(1581): unsure at all n locations
  Clone ID: PAT_MRT3847_71275C.1
acggagtaagttttgttttgtttgttgttgttgctgcaaaggaaggaaggaaggaagagcggtgggtgagtgacggaggaggcatggctactacggctacggcttcggcgtcgtgggaggaactgacgctgaaagtgaaatggatcggcaacgagtacaccgtcagagtctgcgccgacgacaccgtgggcgaactcaagcgccgaatctgcgagctaaccaacgtcttaccccttcggcaaaagctcttgtaccccaaactcggttccaaactcaacgacgactctctcttcctctcccagctccccctcaactcctctctcaagatgaccatgatcggtactacggaagaggacttgctcgtggatcccgtggagtcccctgagatcctcgatgatttggagcttcccaaggacgaagctgttgacatcaaagatatggaagtcaacaagctgaagttgaatagacgcattcatcacttcaagattgagcttcaaaattcctgtcgccaagggaagaaactgcttgttctggatattgattacactctctttgatcaccgctccactgctgagaaccctcttcaactcatgagaccctaccttcacgagtttcttacttcagtttattctgagtatgacattatgatatggtcggcaaccagcatgaagtggattaaagtcaagatggaacaacttggggtgttggacaatcctaactacaaaatcaccgcacttcttgaccacatggcaatgatcacggttcagacttcttctcgtggggtctttgattgcaagcctcttggtttgatctgggctaagttccctgagttctacaatgcttcaaatactatcatgtttgatgaccttagaagaaattttgtgatgaacccacagaatggtttgacaattaaaccattcaggaaggctcatgccaaccgagatagtgatcaggagcttgtgaaacttacccagtacttactagccattgcagagcttgatgacttgagcaacctcgaacataataattgggagttattcacagaggacaatgctaaaagacgtaggcacagataaatgataattgaatgcaataactggaatctggtaagcaagatgcagcttctagacttgtaaaaaattgcagctttataagagacattgttcagccagaggatttcagttttttatatcaagtatttatgtttggacgtggtgaatgacagaaaggaaaggatttcttgtagcagctgtttggagtatctaagatgattaatattgcctatgcaatttctatcccagcaattcctgaacagaatttgatttgatgcatgaaaaaaattctatcctttcataatttgttgggaaagggtataaagcatgcatgaattgcaaaatgtgaatgattagttgtgtgacacctacggctgcaactattctccaaagtgatcaattgattctaattatagacaatgtattacatggaagttcaatctccttgtgtttttcggcctatcatgtaatgtaacttatcgttgttcttggattttatgctaaaagatatattttatngtcttttgtt

SEQ ID NO: 111037 - DNA, 521 bp, Glycine max
  unsure (1)..(521): unsure at all n locations
  Clone ID: PAT_MRT3847_71276C.1
ctcacgcgtccgaaaatggacaaatgtgtgcaataaaagaggtcaaggttgtctctgatgatcaaacatcaaaagagtgcctcaaacaacttaaccaggagataaatttgctaaatcagctttcacaccctaatattgttcaataccatgggagtgaactggtagaagaatcactttctgtatatttggaatatgtctctggtggttctatccataaattacttcaggagtatggttcatttaaggagcctgttattcaaaattataccagacagattgtctctggacttgcctatctgcatggaagaaatacagtacacagggatattaaaggggcgaacatactagttgatcctaatggtgaaatcaaactggcagactttggaatggctaaacattctgtcacatagagctggagagccggcacatcacacataaattcttctgcctcaatgctttcattcaaaggaagtccatactggatggcacctgaggtntgtatgaatacaaatggctatagt

SEQ ID NO: 111038 - DNA, 748 bp, Glycine max
  Clone ID: PAT_MRT3847_71277C.1
ttaaaccattcaggaaggctcatgccaaccgagatagtgatcaggagcttgtgaaacttacccagtactttctagccattgcagagcttgatgacttgagcaacctcgaacataataattgggagttattcacagagggcaacactaaaaggcgtaggcactgataaataataattgaatgcaataactggaatctggtaagcaagatgcagcttctagacttacaaaaatatgcagttttatgaggacattgttcagccagaggatttcagttttttatatcaagtatttatatctttggacggggtgaatgacaaaaggaaaggacttcttgtagcagctgtatggagttatctaagaggactaatattgcttatgcaatttctatccagtaattcctgaacagaatttgatttgatgaatgaaaaatattctatcctttcataatttgttgggaaagggtataaagatggataatttgtgtgacacctatgcggctcgagattctccaaagtgatcaattgaacatggaagttcaatctccttctctagtgtttttcggcctatcatgtaatgaaacttgaagttgttcttggattaaatgcttcatgatatattttattgtcttttgttaaaaaaaaaaaaaattttcttacaggggtgttaaccaaccccaccccctctcccaaaaaaaaatccccccttctcggggcccccccgctcccaattttttccccccccccccccc

SEQ ID NO: 111039 - DNA, 1000 bp, Glycine max
  unsure (1)..(1000): unsure at all n locations
  Clone ID: PAT_MRT3847_71278C.1
accggtccggattcccgggtccacgcgtgcggcaagttttgttttgtttggtgttgtgttgcactgtcactgttacagttgttggtgtaaaggaacagcggtgggtgagtgagagagggaggaaacatggctacggcgtcggcgtcggcgtcgtgggaggaactgacgctgaaagtgaaatggagcggcaacgaatacaccgtccgcgtctgctgcgacgacaccgtgggcgaactcaaacgtcgaatctgcgagctaaccaacgtcttaccccttcgccagaagctcttgtaccctaaactcgcttccaaactcagcgacgactctctcttcctctcccagcttcccctcaactcctctctcaagatgaccatgatcggtactactgaagaggacttgctcgtggatcccgtggagtcccctgagatcctcgacgatttggagcttcccaaggatgaggctgttgacatcaaagatatggaagtcaacaagcagaaattgaatagacgcattcatcaattcaatgttcgagttgttgttcttttttcgcattttcattttgtttctttctattgtaacaaacaatacctatctacataatgtcctacagattgagcttcaaaatccgtgtcgccaagggaagaaattgcttgttctggatattgattacactctcttcgatcaccgctccactgctgagaaccctcttcaactcatgagaccctgtaatttcatttccccccttttcgttttcttcttttttcactcaattaggggatggagtttgcttaaaattacaaaaatgccatttttaatcactcaagttgccgaaccttggcaactttagtccttagttntgtaattntagatgctaaaaggattggttggttttggtaattttagtgattaaaatgacattctntcgaatttaggaactaaattgatcaatgcggatgatttcatagactaatttgattaattaatctattttttactacta

SEQ ID NO: 111040 - DNA, 402 bp, Glycine max
  unsure (1)..(402): unsure at all n locations
  Clone ID: PAT_MRT3847_71279C.1
caaaaaactcgaaactaattaaagttaaagcagagaagagcagagaatcatctctctctctctgcaagaacaagaagagaagagacgagagggaggagaaagttgaacacttttctcctttattactattgctggaacaatctccttctctctctctctctctcttctttgaaggcaagaagaagaaaagaaaagcgctctcttcttcatcttgttgctttgtgagaagagaagagagatgtttgggtgcaatagtttatgctgggattcttctgtccctgaattcactgaccctgatccacttcccttctctctgccttcgccccttcctcaatggccacaaggtggtagttttgcaagtggaagaatatgccttggagaaatagaagtntaaaagtaaac

SEQ ID NO: 111041 - DNA, 467 bp, Glycine max
  Clone ID: PAT_MRT3847_7127C.1
cgctcaagtatctcgagccgaatcggctcgagcttcaagagacttctaagctgcccatgactcatgcccaatttaaaatgagaaaggaaataatttgacatagaggtgattgacaaacatatggctattctcaaattgtagcctcaatttttttgacttggtttcaaatattggatggtggagatgtctgttcaacatgaaaattctgatgccaatggtgtatcaggatcaggatcttgcctttatgatctcttatgttctgaaacaccaagtttgaatagtcaagttcttagagatcgatggatgtcttccggtccacaaaaaaggctagataatttgatgcgtcaagctgggaacaagtattgtgccgactgtggatcatcagacccaaaatgggctgtcttcaaataatggagtatttatttgcatcaaatgctctggtgtacatagaaacctaagtgtccata

SEQ ID NO: 111042 - DNA, 158 bp, Glycine max
  Clone ID: PAT_MRT3847_71280C.1
gccataaaaaatatagatggatttctagagaaaaagccatttatatttcaagcagtccaaacaatcattggaagatatttagaaatatatttcatcaattattttatatcaagatgtgtaaacttttctacattacaattgactattgtgaaagaagg

SEQ ID NO: 111043 - DNA, 698 bp, Glycine max
  unsure (1)..(698): unsure at all n locations
  Clone ID: PAT_MRT3847_71281C.1
cactctctttgcctctctgactcccacctctgcttaagggttaggttgcacttgtattatagaatgagtagaccgacaacacggagtaaaaataaaagacagaaacaaggggatgatggcaacggcactggcgaaatatggaggaaaattcataatacaggtgtggtaactgaggatgatatgaatcaattgtatatgatttggaagccagtttgttcaggctgccgtgtcaataataaagataacccaaattgcttctgtgcattggttccacctccanatggagcccgcaagtctggcttatggcaaaagatgtcagatgttgttgagagtcttggccatgacccaaccaaggatcttcgagcttctgctgattctcctgcaggtctcacaaatctgggagcaacatgctatgccaactgtatactccagtgcttgtacatgaataaatctttccgagaaggcatgttttctgtagaacgagatgttttacaacaacaccctgtgctggatcagctggctcgactttttgtgcagttgcatattagtaaaatggctttcatagattcttctccatttgtaaaaacactggaattagataatggagttcagcaggatagccatgagttcctgacattgcttctctctttgcttgagcgttgtctgagccattcccccttctgtcgtcttctcgcagc

SEQ ID NO: 111044 - DNA, 184 bp, Glycine max
  Clone ID: PAT_MRT3847_71282C.1
tgatgaaatggtggggaaggtagtcactggtgtcattgatggcacttttaatgctggatatcttcttagtgttaaggtggcagacactgatgctttcttaagaggccttgtgtttgtagaagaccaagtttctccagttaatgtagaaaatgatgtggctccacatgtcaaaatgattgaaagg

SEQ ID NO: 111045 - DNA, 310 bp, Glycine max
  Clone ID: PAT_MRT3847_71283C.1
ttgttttcaccaaattaatttgggcccctaccgtccatgctatgcagcaggtaactaacatacaaacagcgcgtatggcaaagatttaagatgcacctcctctacagaaaactcaagtcatgaacggagagctttacttccactaatgggcgcggagactaatgcacacactgttggactcagcaaatggtgcatagggcataccagaattatagcctagcaaagagccctttcatatatggcctgactcaccctacctaatgcgtgctagacacagaactccccatgtccactgacattaccactactg

SEQ ID NO: 111046 - DNA, 280 bp, Glycine max
  Clone ID: PAT_MRT3847_71284C.1
ggccccggtttcttgatgccggggccggggccaaaccaaatgaataaatgttttctttatcggacttgttcaactaaattagcttttaacttattctgattatgggccccacttgggcttggttaactaaataacattcaactgtttatagcatttttttattttattggggaaggggccgaggaaaatgaacatttattggcttgaacaatttaacttttgaagaaatattatggtaaaggttatccaacttcttttttttgcaaataggattcttttt

SEQ ID NO: 111047 - DNA, 596 bp, Glycine max
  unsure (1)..(596): unsure at all n locations
  Clone ID: PAT_MRT3847_71285C.1
gcctcttggctggaattaacacctcgtnnaaaatcaaaaaggcttgcattaaacccttcatctttttacacccggtgtaaatgaacaatcgaaaaatacaaaatcacacataatcatcgattaaacccgagattatcaatccacacgcaaccactgcaccgtgttgaaatccattcgatgtgcacggagccgaaaatcattgtgccatccaacacagatgtctagccgtgtcagtaccggccgatgtctctcctcctcgaaccaccgcagccagtggcgtacctatgtttgtttgagggcgggtggcatgaactctgactcaatccgggtattnnntcccgccactaagatgctcagttgactccttaaccttgataagaacatggcttattcaataatttgcgtataaggataaggaactttggatctcgcctaggaacatgatgttttagtatgcgtccttggatcagcctttagccattggcgttcattttatgtgcatgtagtccaccgatgcaaccacgacagnngctcngnccaacgtcaccaagaccaaatgtgggcgccacttgtgaatccatgatatgacttcttca

SEQ ID NO: 111048 - DNA, 952 bp, Glycine max
  Clone ID: PAT_MRT3847_71286C.1
aatccgcctggagccaaacatctttgagatttcatgagactttctttctttattttcttacaaattgtcatgcttttcttttcccatcacacataatcccctgtctctttgttgaaagcggtaaacattcataattttttttactctttctgactaatggtcaacatgtccttaaacgtgtgatatgagagatttttccaattttttgaatttggagtgacatcttgactacatgcttatacatataaacaaaaatgaatttatatgaacatgagaaatatatagttttaatgagcgtgagtagttgactcatgtttaagtcgataaagatataaatgaggtttgaaacaattgttggacatgttttttgtttggtaggattgttattgtgggaatgattacaaatatttatactactaacaaacattgtggtatataatttttatacaattaacataattgatgattgaagggaaatgaacttattgggcttgtaaatatgctaggggaaattgatttgttatgtaccaagttttaggttctttgtataagatgagttttatttaaagtataaggtgatcaaaattcatggatctttatcaataattttgaatgttttttaaaaattcacggagtcctttaaaatcttaaaaattcataatatcctttcaaatcttatgaattcatattttgtaaatccattaaaatctgaactacaaaatcctaatcataaaagtcttttaaaaaaatcttaaaaatcattacattcttaaatagtcttttaaattttaaatctacaggatattttttgccaaaatagttttttaaaatcctaatctaatacaccccttaaagttgtgcttcttcctttttgcatatcttagaattttttatcatgacatcattgttgaatagggttaatctggtcctatatagcacttaatcaacatga

SEQ ID NO: 111049 - DNA, 253 bp, Glycine max
  Clone ID: PAT_MRT3847_71287C.1
gttcagaaaccagtccgactcggacttgaccacatggagccctgcggggatgctgttccaggtgaaatacactatggatgcggtgaatcagagctcgacggcgatagggcttcgatcttagacccacatggtcctcgcatgcgtcaaccaggtcaactccgaactctcctcgctccagacgaagatcttcatggtctacaatcacatccgctttgccatcggtggcctttccgtcgatggccacgtcctttcc

SEQ ID NO: 111050 - DNA, 321 bp, Glycine max
  Clone ID: PAT_MRT3847_71288C.1
attcggctcgaggactttgctgagccacttttttggtcatacggtttcttcacaaggcaggtttgatgtttcagagctgggataggaccattaccaacagttcgtgaccttttaacactgataatcggctgtgcaaaaatgtttcgcacaccatcccaaccaagatggacttatcatgcacaagggtcaccaaccaaaagctcgcaagtgggggcctaccaagtcacagccatgttactgctctcgccgaactatcccgagggcagcaagctcatatagtttttacactcattgtcatgtttaacaccaacaatttattgt

SEQ ID NO: 111051 - DNA, 244 bp, Glycine max
  Clone ID: PAT_MRT3847_71289C.1
attatgtaacatcacctggattgtctgttgtactctgttgtaactaggtaacccataagcaagtgttgtaggtgttggagcaaacctgctagagagttccatcagttaatttccttaaggtggagattgaagaccatccatacttggcaaaatcagttggtgtgaactgcatcccagcctttaagttatacaagaatggatcgaggattagagaaattccaggatacaaccacgatgtgtttgt

SEQ ID NO: 111052 - DNA, 1444 bp, Glycine max
  unsure (1)..(1444): unsure at all n locations
  Clone ID: PAT_MRT3847_7128C.1
cttgcatgcctgcagtgacgcccaggaatatgcatcccctccccaaacatcctccgggagcttcgtcgtgtcgacgagacagctagcacccctcccgccgtgccctccgccacctccctcaaccccctgcggtgtcccactcgtctgcggcggaggatcccccgccatccccgtcgtgttcaccaccgactcgttcccaaaaacagcattctccgactcgaactcaaaggccccagtcacaatcgacgagttgctacctaaactaaaattaccagtgacgttaaccgttaccatgcacccgggaatctcgcagaggaacctcaccccagggaggatgttaaaattgcccttccctgctatgtacacgtcacgggtgaggttcacgtcgttcacgatcttgcacgtcgtgtccagagtccccaccccgcctagatcgtccacgcacgataccgacggcggatgaggcggcggtggcggcggagccggcggcgagtagtcctggtggaaaaggttccaatccaaatcggtcaccgagagctcgcgctctgactccaattcgtcactcgcgaacaccacgacgacgacgaagatggcgaggaatcggaggcgccggaaacgaaatctagccattcaccggcggcgatagaactcatcacattgaaggaactgagattcggatttgcgaaagtggaagttgattcagacaccaatgcaatgagtcaccatcaacagaaagtatagaagaaaaataatactaataatcaaacaaaaaccctagtatctgtgtatctctctgcgttcgtgcggaaattcaattcaatctcactgaaaaccctagaaatctatcggagacgcgcggagagaaagatcgaagcgaattggagagaagaagaaccacaatggtgaagagcgagctttatttaattctcgtggtaaaggagagggggtgttacagtacggtgcggttcatgtgaaccccagtgttttttatcaatgatctttattttctcgaatctgattggggagtgttggggactatagtggacgttagcgtgggggattttacctcggtttaccgaacctcacgccgctttaaaggagcgtccgagacacaccccgatttaagaaaataattaacggacgaaaccatgcagtgaagaggcataagttactagtcgcgttgagaacacgcgcgggagctggcgcgtgggtaacgtcgcgaggagagaggggagagcgacggcgccaccgtggagtggaggacgaatgaggttgtgccagcggaagggggattgttttgcgggggggttggttttagctagcacgcacgcacgcatcacttgaaaattatatattattggtgagagatggttttattaaaaataaaataaaatgcacacgcgtatgcatttgatgtgcncaagaacactgcaggcatgcaagc

SEQ ID NO: 111053 - DNA, 525 bp, Glycine max
  unsure (1)..(525): unsure at all n locations
  Clone ID: PAT_MRT3847_71290C.1
agttttgggttttttaaatttttttttttttttttttgttttttttttttttttttttttttttngggaacaagggccaaaaattttttaaagccccgtaaaaaacaaccaggagggccctggggggttttaagggacttccccccctttttttaagggggggttaccaacctnngttaggcccctttttgaaaagggcctatcaccctcccttttttcctgttgaagggggccaacttttttttatttttttaaaaaggggaagggccctcttcctgttgcccctggggtttggaaacttaaagggcctttttttccctttgggggctccaaacaaaacccttccttggtttccaaagatttcaacaatttttggttccttcctcaacaaaaattttttctttggggattttattaaaaaagcctttggggggaaaaaaaaggggtcctttaaaattaaattccccccttgggggaaacccccccctttttggggggcttttgggtccccccttttttcaaaaa

SEQ ID NO: 111054 - DNA, 775 bp, Glycine max
  Clone ID: PAT_MRT3847_71291C.1
ccaggcccgtgtttttctgatcccttatcttaattaatttaatcaccaacggctcgctgtggagagcttgtgtttttctgatcccttatcttaattaatttaatcacgaggagagcttgtgtttttctgatcccttatcttaattaatttaatcaccaatggctcgttctatcgctaacgccaagactttctccgctctcgtgctagacggattctccaacactctcaccagacgtggctactctcaaagcgcaacaaggggaggagttgcctccatagcacccaaatcaggggaagacaaaggtgtctcatcatacaaggtttcctgggtgccagatcccgtcaccggttactacaaaccggaaaacatcaaggaggttgatgttgccgatttgcgtgctacccttctccgcaaaaaattcaacaactaatttcaacaattttaattttttaccaaaccttgggtgattgattcgttatggaattaattttgatactcatatgctctgcccaccttcattatacgattgctatagttttacaagtcagtagaataactattagcagctaataagaattgtaatttcttttaatcttattcattacttcagtttttttttcttttcttttcaattgccttcaatgtgattggatgtgtttctagcttgcacaagcacaacaaaacatatttaatcatgtaattcatgtgaaatgttataaacaatacaatattttacatttgtttaaaaaaaaaaaaaaaaaaaaaaaaaaaaaa

SEQ ID NO: 111055 - DNA, 228 bp, Glycine max
  Clone ID: PAT_MRT3847_71292C.1
gtttctcgtggaagtgcaaaggcaagagaagccttttgagatgcgaaggcgtcatgaactcattctcggagtactcctcgaagagggtcttgatctccgacagctccttcgccagcgccagtttgaaccgccgtcgccagcagaagcacacgctgtatgtctgcttccaaatcatttctttgctcctgctctttggtccgagttctttatggagggtacttttgaaca

SEQ ID NO: 111056 - DNA, 415 bp, Glycine max
  unsure (1)..(415): unsure at all n locations
  Clone ID: PAT_MRT3847_71293C.1
gagagcttgtgtttttctgatcccttatcttaattaatttaatcaccaatggctcgttctatcgctaacgccaagactttctccgctctcgtgctagacggattctccaacactctcaccaggtacataccccaccctaatcgtttcctacacgatcttttaatcgtccttgttatgattgttaattaattatatggtttttgaacagacgtggctactctcaaagcgcaacaaggggaggagttgcctccatagcacccaaatcaggggaagacaaaggtgtctcatcatacaaggtttcctgggtgccagatcccgtcaccggttactacaaaccggaaaacatcaaggaggttgatgttgccgatttgcgtgctacccttctccgcanaaaattcaacaactaatgtcaaca

SEQ ID NO: 111057 - DNA, 1586 bp, Glycine max
  Clone ID: PAT_MRT3847_71294C.1
cttgacgcgtgggcggacgcgtgggctcagatggctaaagcgcctgttcagaagtttgctgatcgcatttccaaatactttgtgcctctggtgattatcatctcgttcactacttggctagcctggtttttggctggaaaatatcatgcttaccccaagtcttggataccgtcttctatggacagttttgagcttgctctgcagtttggaatatcggtcatggtcatagcctgcccttgtgctttgggtttagcgactccaactgctgttatggttgggaccggagttggtgcatctcagggtgtgctcatcaaaggaggccaagcattagagagtgcacataaggtggactgcattgtttttgataagacgggtactctcactgttgggaaacctgtgatagtgagaacagaactattgacaaaaatggtgctccaggagttctatgaacttgtggctgcagctgaggtgaatagtgagcatccactggccaaggccgttgttgagtatgctaaaagatttagagatgaagagaacccttcttggccagaagcacgagattttgtttccatcacaggacatggagtaaaggcctctgttcataataaggaaataattgtgggtaataagagcttgtttgctgaccataacattgcaattcctgatgatgctgaatatatacttgctgaagccgaaaagatggctcaaacaggaattgtagtatctataaatgggaaagtagctggggttttagcagtatccgatccattgaaaccaggtgctcaagaagtcatttccattctgaagtcaatgaaaatcaagagcatcatggtgactggggacaacttcggaactgctagttctattgccagggaagtaggaattgaaaatgttattgctgaggccaaaccggatcaaaaagcagagaaagtgaaagacttgcaggcttctgggtacactgtggctatggtgggggatggcatcaatgattcacctgcacttgtggcagcggatgtgggaatggcaataggagctggtacagacattgctattgaggctgctgatattgtcctcatgaagagcaacttggaggatgtcataactgccattgacctttccagaaaaacattttcccgtatacgcctgaattacttttgggctttgggttataacttgcttggcatcccaattgctgctggagctcttttcccttctacaaggttcagattgccaccctggattgctggggctgctatggctgcctcctctgtcagcgttgtttgctgttctctgttgttgaaatattacaggagacccaggaagctagacaaccttgagatacgtggcataagggttgagtcatccagtgatatatgacgcatcacgattgatggttttgctttaagccaattttgtatgtaatcatgtttataagtgtcgtcttgtgatgattttagtttagtgtacaaaggtgtgaaaactgaaaagggttcttttctttcctttaaaaatttatacttcctctcttctgcacaaaaaaaaaaaaaaagggcggcaaaaaaaaaaaaactgtcgacccgaaatta

SEQ ID NO: 111058 - DNA, 282 bp, Glycine max
  Clone ID: PAT_MRT3847_71295C.1
accacacatacaacacacacatatataaacacaaaaaaaaaacacacaaaaagggttctattaaaataataataaaaaaaatatcgtcctttatcaacaacccaatcttacttcctcttactttctactctttatttcatctctttctccaactatttccaattcatcgtccttcttattacactttctatactttataatccattcctattccaactttattttccataattactttcctttatctctagtttcttattattcaaataatccctatctttt

SEQ ID NO: 111059 - DNA, 160 bp, Glycine max
  unsure (1)..(160): unsure at all n locations
  Clone ID: PAT_MRT3847_71296C.1
acaatcatatttaattatcctattaattcgtataagtaataataatgaatgttcacatgtaggtagttattaactangatatgtatattgtctaaatatcagacgttaaattgaaactatcataaaaatatnnnncctggtgtgttagactgtccggaat

SEQ ID NO: 111060 - DNA, 374 bp, Glycine max
  Clone ID: PAT_MRT3847_71297C.1
aagtcaggtctgctgcaaaccattccatacattatgcttccaacaccattggcatagggtgtttgattcattttagacctttcttcagctgtttctggtgcttgagtgacagatagctttgtatgatggccaagtggtgtgctaacaggtttgctttgatgcatcctaaacctttccaccactttcttgaggtaattgctttgggacaggaatagttcgccctttgctctatccctatgaatatcaatcccgagtatccttctagctgaccctagatctttcatctcaaattgtgtgttcaagctttctttgagtttcctaatctcttccttattagtactcgctatgaggatgtcatccacatacaagagaag

SEQ ID NO: 111061 - DNA, 223 bp, Glycine max
  unsure (1)..(223): unsure at all n locations
  Clone ID: PAT_MRT3847_71298C.1
catctctctccaanngacannntncncactagctgtngaattccctgcacaagttacttcnttacttccactnaatgcactatncccctccacncccactcttcaccttcaaaccctagaaaacttctaaatcncccaacnccacncaccctcttgananaagatcccatcttcgtgctcggtttcctaatgggtgcnaccaatgcgaatgggtcgtgaccct

SEQ ID NO: 111062 - DNA, 129 bp, Glycine max
  Clone ID: PAT_MRT3847_71299C.1
ctcgagccgtccgacgcagcggaacacactatggactttgccgaacagctgtaccactggcacagatcagatgtgcagcacggcatggcgaggacacccttctgtggtgttgccgagcgcagacggtcg

SEQ ID NO: 111063 - DNA, 2138 bp, Glycine max
  Clone ID: PAT_MRT3847_7129C.1
aatggaaaatagaagttttattggaagtgtcaatgtcttaagtcctttgccaccgtttactccctctcaatgtcccctactgaacctgtagcagctggtgctccatcacaatcaaaacaaaacaagtgctggaggttcccacacaacaagggtcgcaagctctatttgatccccttctgaagtgtggaatcattttgatagggtaaataatgatgccttttgcaagtattgtaaaaaatgctataaggctaatagttctaaatatggaaccaaaaacttgaacaaacatttagcttcatgtatgaaaaaccctttaggcaggttgatgagaaataaaaaaacaattattgttggaaagaaatgtgagggtgaccctaatgctcttagtgtgaaatttgttgatttcaatcaagagagaactattatagaacttgcaaagatgatcattacaaatgaactttcttttaaatttgttgaatatgaaaggtttaggaagtttatggaagtggctcaaccttattttaatatttcttctcatgtgactattgctagatattgcattcaagtgtttaataatgaaaagcagttggaatgcatattgtttgcaaataaacaatggtttcacttacaattgatacatggacattaatccaaaatgtgaattacatgtgtgtgacaacttattacattgatgaagtatttaggttgcataagaaaatactaaaattttgtttgattggtgaccacaaaggtgaaaccacttggatagccctagagaattgcctgaaagaatgagggattcaaaaaatttgttgtataacagttgataatgcaagtgctaacagtgtagccatttcatatttaagtagaggtcttagtgtttgaaatgatcatactttgttgaatgaagagtttatacatatgcagttaacaacacacattttgaatttgattgtatgtgatgggtttaaggaaattgactcttcaattagtaaaataaaggttgcatgtaagtttgtgaggttttctccaagtaggttgactactttaaagaggtgtgcggaggacgttagtgtaaattcaaaggcaatgctaacacttaatgtgccaaccagatggaactccacttatttgatgttagatgttgctgaaaatttgaacaagctttcaatcgttatgagtatgttgaggctgcatatgtgctcactcttctaaatagtgaaggaggatgtcctaaagagatggattagaaacgtgctcgtgtgtttgtgagttttttgaaagttttctatgatgcaacaatttttttttctgggtcactacatgttacagctaagaatttctttaagaagttggttactattcagaaatgcctaaatagatggaggcatgaggatgatccggtgatacaaaagagacaactaatatgcaactcaagtttaacaagtattgagagagtgatcagattagctatcttttatttgtgactgcttttcttgatctgtgttataaatttgattatattgagttttgttttaagaaaatgcatggtgttgaccaaaccaaagagatgctgaaaaaattggatgatcttataagaaaaatgtttgttgaatatgcttcagaacatcctatttccattgatagtagtaattctagtactttggcttcataccatgcttcacaaggtaatgccaacgatgttgatgaggatgaggattgggacgaccaatttagattgaaaatgaataaaaaatgtggtgaatagcaaaggagtgagttggatatgtatttaaaggatgacaatgaagatgacggtcttggatttgacattttggcatggtggaaaatgaaagcatccaaatatcatgttatttctttcatggctagagatatattggtcattcttatgtctattgtgtcatttgagtctgcatttagtacaaaaggttgagtgcttgatccatttttgtagttctttaagtcccattactgttgaagctttgatttgtacccaaaattggcttcgccgacgaaatgaaaccggttcggcctccgaccggatactggccggaccggtggagcatgggctactaccggatgcttctcaccggcgacattctccggcgcaagatcaa

SEQ ID NO: 111064 - DNA, 394 bp, Glycine max
  Clone ID: PAT_MRT3847_712C.1
attcccggggtcgactccaacgcgtctcgtacgtgcttgtcgagaagaacgacacgaaggggtacctgtgctgtcgagaagactgacacgaagggagtacgcgtgtcgagaaagacgacacgaaaggggggtgcacacagtgaagttttgttgatacgagagtaactatgaaacacgtgttgatgaaaaatgtaaggtcccttggtgtttcttcgttggctacacatattttggtagcattgtgcaattgccatactgtaccgaatatgtgtccctcttccgtaatgaactactggctttatgtgtgcccgtacttccggaaggtgaaattgcgcacagttgtgaggctttgctgttggaagcaccacccatcatctttggctttttgagacca

SEQ ID NO: 111065 - DNA, 175 bp, Glycine max
  Clone ID: PAT_MRT3847_71300C.1
ttggaacttttttgcactaccgaaatccaggagttgggtaagtcttttgacgacatgaacaaggaccaacatgattgtacggatagaaagagtgcttattttaacaccaagaatcgtcaataaggctgaggatcggcggtcataagagcgaaggctccggctagttaccaaagaa

SEQ ID NO: 111066 - DNA, 241 bp, Glycine max
  unsure (1)..(241): unsure at all n locations
  Clone ID: PAT_MRT3847_71301C.1
ctttagccctgtcattgcggattctgcagtatactactcacatcatgatatgctttgaagaggaatattctcttatgctgattcacacacgcgctcatttatactacactatttgccacttcgtgctaatgatcctcaagatgcgttccagattactcttcatcaacgcttcttgtattatgttcacttgaatcatgaggttcacaacctcccttcaaggtatgatcctgctcgncatgca

SEQ ID NO: 111067 - DNA, 413 bp, Glycine max
  Clone ID: PAT_MRT3847_71302C.1
cctcccaaacctcagctctcaattctactccagaaatttatattacaacaaaaaaaaaaaaaaaaaacggcaagtctcaaaaataaggctggcccaacaaaaacaacaacaaaaaaacaacaaaaaatcataccaaaaaatcacaaaaaaaaaaaaaaaatgccctcccccccctattaccctttccacccctcaaattaattcctacccctaaccttcatcctacccacctttcccaaaattaataccaattaaaactttcccaaaatattccaatacctatcccccttttaaaaatttcacccccccccaattccccacaaaatacaaccccaaatcctaaatttaaaacccccatatcccaaaaaaattacccaacccccctaaattcctttccccccacttcccccttt

SEQ ID NO: 111068 - DNA, 399 bp, Glycine max
  Clone ID: PAT_MRT3847_71303C.1
gtctgtatttgtttttgcctacccttacgagagatgtcaagttcaaggtttcttccttccaaccaaggttaagtcacaaagcatatataattgccttctttgtgacgaaagcattatatccaacggtttgtcaaccttcacccgccctaccgtttaagcttttagacagtgttggaattggatatgcccccagcctcatatcttcggcatcactcaaattctcaattaaagataacaactgagattcggccttacaatttacaaatgtccatagagaacctctgaattctttcctgaatcatcacccctcttgcgcggaccatttttctctttctatctacccttggcccccaaaaacaaaaaaacaaaaaaaatgattccttgcattttccacatgtc

SEQ ID NO: 111069 - DNA, 816 bp, Glycine max
  Clone ID: PAT_MRT3847_71304C.1
gtccagctctaaggcacagcgagcttcggaatctcaggctagacagtacttgctattgcattctattttggagccagatttgggtttgataaagctgacaggaaacggcttttcaacatgatcaatgaactgccaacaatatttgaagttgttactggtgcagcaaagaagcaagttaaggagaagtcttcagtttcaaaccacagtggcagcaagtctaagtccagctctaagcagcgagcttcggaatctcaggctagacagccaaagccattgcaatcaaaagaggaggatgaagaactggacgatcaagatgatgatgaacatggagagaccttgtgtggggcatgtggtgaacattatggcactgatgaattctggatttgttgtgacatctgtgagaagtggttccatggtaaatgcgtgaagatcacccctgctagggcagagcatatcaagcaatacaagtgcccatcatgcagtaacaagagagctcgcccctgattgacatgagccaagttccatcattgacagtcattgttggactctttgctgatcgtgttattttgcttttcttcctagatgttgcagttaatggatagtttctgtttgacttgtgtaggtttcttttctagtctgtaggattctgctgtgttggttttagtgtcagctgcaattcagttgatgccttcttggatttgatcaatttttagtttatgcattgttgacttgggaaagtgaagtcttttccttaatgtcactctaaaactaggttaattaaacacaaatttatttgaaatggatgtctagttatgt

SEQ ID NO: 111070 - DNA, 708 bp, Glycine max
  unsure (1)..(708): unsure at all n locations
  Clone ID: PAT_MRT3847_71305C.1
tcgtacggctgcgagaagacgacagaagggggttgttgttgttgtgcattttgcactttgcaaaaatttggttgcagaggcagagaggaggcaacaccacaccacaccgcaccactctctacactctcactctgcaacactcaaatctcgtttccacctaaacgacttcgttttgcgttcttttcccttcttctgatttaggtttcagagggaaaaggagcagcgatggactcacgcacgtataatcctcgcaccgtcgaagaggtttttagggatttcaagggccgaagagctggtctcatcaaagccctaaccactgatgttgaagatttttacaaccaatgtgatcctgagaaagagaatttgtgcttgtatggctttcccagtgagcagtgggaagtaaatttacctggaagaagtaccaccagagcttcctgagcccgtgctgggcattaactttgctagggatggcatgcaagaaaaagactggctatctttagttgctgttcatagtgatgcatggttacttgctattgcattctattttggagccagatttggntttgataaagctgacagggaacggcttatcaacatgatcaatgaactgccaacatatttgaagttgttactggtgcagcgaagaagcaagtaaagaagaatcttcagtttcaacccacaggggagcaagtttaagtccagctctaa

SEQ ID NO: 111071 - DNA, 2144 bp, Glycine max
  unsure (1)..(2144): unsure at all n locations
  Clone ID: PAT_MRT3847_71306C.1
aagtaaactttgaacctttaaaacggcccccccatatttttttgtaaaaatttattctttatttttttttttttattttttattttttttattttttttttttttgtttttttttatttttttttttnnatactttcgtgtagttctcacttctctcgctctcaaacctgaattcggttgtgatataaacctgcgttgcgctaaacgacaccgttttcactgtctctgagaatggaggcactaagtcgctccgtggaagaaatattcgaggatttccagggccgaagagccggcatcatcaaagcccttaccaccgatgttgaagatttctacagccaatgtgatcctgagaaggagaatttgtgcttatatggatttcctaatgagcaatgggaggtaaatttacccgttgaagaagttcctccagagcttcctgagcctgtcctgggcattaactttgctagggatggcatgctggaaaaagactggttatcattagttgctgttcatagtgatacatggttacttgcccttgccttttattttggagccagatttggatttgataaaactgacaggaaacgactattcggtatgatcaatgaactaccaacaatatttgaagttgttacttgaagcaaagaaacaagttaaagagaagtcttcggtttcaaacaacagtggcagcaaatctaagtctaactctaaagcgataatttgtgttcttatcaaattgctggctggtggagcagcgggcttccgaaacccagggcagacaatcaaagccattacaaccaaaattttgcacttgcacaatttttgtgtcagagacacagagaggaggcaacgccacaccacaccattttatttttgtcactttaaacaccgaaagtacatgttttattatagggtacactagtgagcagctagctcttattcactagaaagttacaagacgatacaacaaacatgtagtcacagtttgtagtagccaacagccatagtgcacttacgccctgtcatctttgttttcagcaacaacctcaactctttcaaggcagagtgtaaggtccacacttgtaaccaacagggcgattagccaggttgcaacgcttggggatggtgacagcaacttgagggttgacaccagccattttggctgtgttggagagcagaactgcacagaggcagcttgggttctgcccaattttcttcacctgagcacagcaactctgagaaacactagcattctcatcttgtgctgctgaggcacatggtgcaagcttataagcctcattatctggggtggtagatttcccacattcaccagcactctccacccctgcaatagtactcacaagcaccacaaacccaacaaggcatagcaacttcacacaataagtacaaccctccattatttctcaatattatgcttatgtctctctattagtgaaatgtttctctgttgatttcacaatgccatcatacccattgcgataaaagatgaggatgaagaactagaagatcaagataatgatgaacatggagaaaccttgtgtggggcatgtggtgagcattatggtactgatgagttctggatttgctgtgacatctgtgagaagtggttccatggcaaatgtgtgaagatcacccctgctagagcagagcttatcaagcaatacaagtgcccatcatgcagtaacaagagagctcgctaagcaaatttccatcagggacaataaaccatttgagtcttaacgaatctgattaatattttttttttctagatgtagctgatggatagtttttatgtttgacacatgtagatttcttgtctttctgtgggatttatgctgtgttggttgtctgggggaagttcattctttttccaagccttgtcctagctatggatccacatcggcataagcttcatatgaatggggttgaaaccataatctcatcaatgcttagaagcttagggtttttcatcatattaaattagtatcagctgcaattcagttgatgccttcttggatttgatcaatttttagtttatgcattgttgacttgggaaagtgaagtcttttccttaatgtcactctaaaactaggttaatgaaacaaatttatttgaaatggatgtct

SEQ ID NO: 111072 - DNA, 663 bp, Glycine max
  Clone ID: PAT_MRT3847_71307C.1
aatattaagtattatagaaaacttaatttggaaacggtgattaaaatataatgttaaaacagttaaatgtttgagtaggcacatgaaacaccgaaagtacatgttttattatagggtacactagtgagctgctagttcttattcactaggaagttacaagacaatacaacaaacatgtagtcacagtttgtagtagctaacatccatagtgcatttacgccctgtcatctttgttttcagcaacaaccttaactctttcaaggcagagtgtaaggtccacacttgtaaccaacagggcgattagccaggttacaacgcttggggatggtgacagcaacttgagggttgacgccagccattttggctgtgttagagagaagaactgcacagaggcaactagggttctgcccaattttcttcacctgagcacagcaactctgagaaacactagcattctcatcttgtgctgctgaggcacatggtgcaagcttataagcctcattatcaggggttgtagatttcccacattcaccagcactctccaccccaccaatagtactcacaagcaccacaaacccaacaaggcatagcaacttcttcacacaaccctccattctcaatatatgtttattttttatgtctctctattaatttcacaatgcc

SEQ ID NO: 111073 - DNA, 366 bp, Glycine max
  Clone ID: PAT_MRT3847_71308C.1
attatcctatattttcccttcctggggaaaattttttctaaaattcccatttatttctcaaataaaatattttttttcaccaacatttcaattttccaaatttttttattcccattttatcttatctctcaaaaaaaaaacttttattattttttaattcaaccgagtcgaccctcttttatttttttttcggttgattattattaaaaacccctttccgcccagtggtccataaaaaactcccccttttccgaatttaaattgggtaaacaaaaacattggtggcttcctaagaggctttgatatttactatcccactccaaataggtttcaaacaaccggccagggggctcctaaccctttttt

SEQ ID NO: 111074 - DNA, 631 bp, Glycine max
  Clone ID: PAT_MRT3847_71309C.1
caggagaaagctgtcttgtacgcaagggattccttaactgcaaaggagagtataaaatagcaagcactcaggctactgctatgcatgtgggtagctatagaaaattatcattgattgatacgcaagtcctgactgcaacatattgggcgcaatgcttttggatgatacttatcataccaatcctgaaaatgcagatacccaatattttacttgcgcctatcagaggcataaagccccttcaggaggttacattttcgaataccattgtgcagattgaaccagacatgaattcaagtttcagcttttgagtaccactaccaatggctgatatatagttcaaggaaataagatctcttcaatgcgttaaagtatagatgtaactatgtgctgcatgttgagctgagacattacagctatactacagactccattgaattcaaactggtgatgcaaaaagacacaaggttaatctgtagaggaatttggaaggatgtcttacgacgctcataacagttatcaaccccaacagaaagatctgtcgaaaggaaatgatcccttagatattaaagctcgctctagattgcaaagagtatcctctactaaagcacaatttgttagtggaaaaaccttc

SEQ ID NO: 111075 - DNA, 722 bp, Glycine max
  unsure (1)..(722): unsure at all n locations
  Clone ID: PAT_MRT3847_7130C.1
ccacgcgtccgaatttctgtctctctctctcctgtatttgtcttgattccgatgcgaatggtaattgcagaaaccccaaccctcctttcctctccctcctcctagatcgagtcaggttgttttcgtgtttctttctctttctttttttctttttctctttcccaattttgtttctgcatttatcgttttctgacacaatgaaattgttttcttaatcaactttaccatcaattaccctttgaattttatgattgatttgggtttgttgcaaattctccatcttttttagtactatgattccagggttttctgctattttttgagcttgattagtggatatgtcattgatcggttggaggatttttgtgtgggggagaaatgggattgtatcaatttcgtttttttttctgtcggtttgaattagaaatggaaataacgtcgtttttcatttttgggtattgataattcccgaagaaaaatgcaaaattcgcatgcgccttgattgccacaattgatttagtcgttgcaattgcaaatttgaaaaaacaaatataccttttttttttccttttggttgngtaagtcccttgctcggaaatgagttgagggattgccttcactgggttcagggttttctattatgtaacctttttttacttgnttttggnagcatattaactgatcacttgttcattctttctcttttaagggatcctattttt

SEQ ID NO: 111076 - DNA, 389 bp, Glycine max
  Clone ID: PAT_MRT3847_71310C.1
gccactcgtccgatgttacgggtgcgacgttagtgacaattctaacggcgcttgagggctccataattgcggaagcgtttaatggtcgaacgtgcacgataatgcgctgagcattctatacatacagggctaggctgagccagcaaccatatcggtgctaaattatggtaagcagcatgcgccccacgatgtaacgattacgctgatgggtaccagaagcacaacgagtataaacttgatccaaacgacctgtattgcactgattcgagtctaggatggcctgtgcatactgcagcgctcgtggaactagaggaacggaccatggacatgctaaaaactggtccatacggttagatatatcgaatttgcaacattatattcggtcagag

SEQ ID NO: 111077 - DNA, 389 bp, Glycine max
  Clone ID: PAT_MRT3847_71311C.1
gtctgatgcttttttgggaaatttttttttagttttctcggggaacagaaatccaaaattctatttctgtggggtcaccaaaaaaaaaaaactactttcaacccgaccaggccggtctaaagaacctattttttcaaaagaaaagctcttctcaaaatgatatatggggctatcatacccctctttgggaaaatgataagccctgggcggggggcaacaattcccacttggacacccttaaggcccatctaatttttgattaaaaaaaaaaaaaaaaaccgggtcgtaaggggggggaataaaatgtccaagcgtccccctctgtaaaaccactttacatttttgggggacccccccccgggtaacagtttaaagaattttttgcccca

SEQ ID NO: 111078 - DNA, 437 bp, Glycine max
  unsure (1)..(437): unsure at all n locations
  Clone ID: PAT_MRT3847_71312C.1
agctgacctacaaccagccgaagatgtgcacttacattctctcattttctaaaatttatcagattgataaataaaattttatatttttatattttattttattttatttatatttatataattcaactttctaattttattttttataatttacactcactatttangattttcgatcgccactgcccataatacttaagttggatcccaaactgtttaattggcagagtatgaacatccggggtgagagggagactgataaaggctatgcacgcaacaacaatatttttttccatatattccatcaaatcataacgacagtggtatctgtattcttcttatgcaagataaaggcaagaaagtgatgggacagtccataagaaaaaaaatacttttaaggagaaatgggcaaaacatatcttttagttcactttatt

SEQ ID NO: 111079 - DNA, 649 bp, Glycine max
  Clone ID: PAT_MRT3847_71313C.1
tcctccggctcgctctctcttcacctttcagttttttttttctctctctctcctctgtctccccgccggagcccactttcgtcgccggtgtttcctttctgaagctgctcttccgttgcgagccaccgcgacccttttgagagccctgttcaacaagctcgaaagtccggtttttttcccgattcgggaaaactggtttggtctttgacttggaaccgtgagtggagttgaagggattttttttttgggttctgcgaagaggtgcggatccaggaaggttctagagagagaatacgaagtgggctttgttggttttttagagagagagagagaggttttggttttcatgtgagggtgaatggttgtggagagaagaagaggttggagttttctatgatgaccggaactgcggcgagtgatcggagagggtggtggcgcgtcggtgaatctctcacatggaatggcagatcttgctagctacgggaaggcctaccgtgacattgaacaacaagtattgattgctttgaaaaagggtgctcaacttcttaaatatggtcgtaaaggaaagcccaagttttgccatttagactttcccatgatgaatcatccttaatctggattacaagtagtggagaaaagaatctgaagc

SEQ ID NO: 111080 - DNA, 461 bp, Glycine max
  Clone ID: PAT_MRT3847_71314C.1
tactcgagccgaatcggctcgagagacgacagaagggggtgtcccatcttgaacttggtcagtataatggaatgattcatggaggcataactctttcatttgccaaactctacatcaatatcgtacagtgtagtttatatatgacaaactcataaacaagcaaaataatgaatgagtttattgtcaatattgatgaattcattgttacttttgtgtgtttattgagtgaaatgtgaccataagagattcagatgtacttggtcaaaattatcaattatataaattctactttgctagctccggctgaacgagtcttatataggaaactatatatggaagccagcggaacaaattaagagataaaagaaaaagaaactgcaattaaaaattgctgtcctacaacatgtaatgatccgaatgtatgagtttcagattctttaaactcgtggtctcaaacttaa

SEQ ID NO: 111081 - DNA, 285 bp, Glycine max
  Clone ID: PAT_MRT3847_71315C.1
aaataaatcggatgtgctatttgtgtacaaagataaatgatacattagcccataccaaaagaagaatttgtggaaacaaattcatgaagcaaggcatggacaagtataaatagacataggagtagcaaagttccatagatacccaaaacttctatggttggtcaacctaaccgacaactaatacaaaatttggtggttaagacttttcaaggaatgacgaggtttaataaaagaaggatcatcaaaggatactgggaacgaagccgaactcccttggttggttta

SEQ ID NO: 111082 - DNA, 515 bp, Glycine max
  Clone ID: PAT_MRT3847_71316C.1
atttagcaatatctatataatttcattatttttagggggagttttctcagccattcctgaaaccaccgcatctggatcaacctgtgtccacacttcttctctctgaatcagctatggcttttgggcgtatacttatgagtgaaaatgatgggaactacaaggggccactcacgctctcactgaagcaggggtacatattaaagaacttatactatttgcagtcctaatcttccatttattaattaagattctagtcacaatgctggatacaaaggaagaagtaccttcaacatttataggacagaatgtaagtgaataaggtgaagtgctagttttatagaggatgcaactatgccttcatataatacatatatcatcgagttagattgcttctctgcttttctttttctcttgagtaacaaacaaacttgcggacactcaagggaaggacagaaatgtattgtcatagaaatatcaattgttagattgtagttaaagtgacacctagtgtactt

SEQ ID NO: 111083 - DNA, 570 bp, Glycine max
  Clone ID: PAT_MRT3847_71317C.1
ctttgttagtcaaagaccaattccattggaatgaggaagccgacagagcattttcacaattaaaacttgctctgtgtcaagctccggttctgggtttaccagattttaattcttcctttgtcgttgaaacagatgcttcgggaattggtatgggggccattctttcacagaaccatcatccccttgcctttttcatttatgccattttgctcgaaattactccgcgcttccacttacgtccgcgagctcgccgcaattactgtcgcggttaagaaatggaggcagtatcttttggggcatcattttgttattcttacggatcaccggagcttaaaagagctcatgtctcaagctgtgcaaacccctgaacaacaaatttatttggctcgtttgatgggctttgattatacgattcaataccgcgccggcaaagccaatttaggggcagatgctctttcacgactaccaccacctactcagggagaattttatgtgctgaccatacccaattgccttttcttgcaggaactccgagcagcacttgctgctaatccagactttctgtctcga

SEQ ID NO: 111084 - DNA, 143 bp, Glycine max
  Clone ID: PAT_MRT3847_71318C.1
tattgaaacgcaccagcgcagatccgagaaaaagggtgtacacgcggacttaacgctagagggagagcacgggctctagctgaataggcctctgtagtgggtacaataccagctcaaactcatccgcttcgacccacaagctg

SEQ ID NO: 111085 - DNA, 288 bp, Glycine max
  unsure (1)..(288): unsure at all n locations
  Clone ID: PAT_MRT3847_71319C.1
aggaaagcacnccctcngcctcgattgtcngcaaaaagcngangggcccagcttagttcagaaagaagaccgggccccccacagcacggatgacgaatgctcctgattcaaatgacaatattgatctactgtagagcacagattcgatgggcttacaaggagcaggtaaagcttttccaaacaagactgtttttgacgataagctagcggtggctaacacacaagaatcctttgatggaaatcctccagtggatgtcttggttaccaatttctgggaattgactttat

SEQ ID NO: 111086 - DNA, 259 bp, Glycine max
  Clone ID: PAT_MRT3847_7131C.1
gaccagctcccctctcctgatcgtcctgttcctcacagcagcagccctcgcggccgagccagcgaagcaagcggcccccgcggcacaggagacggccgtgcacatcgtgtacgtggaccgccccgaggagccgaccctgaggagttccacatccgcaccctcaacctcgtcctcggcagcgaacagaaggccagggacgcagtgctctaccactacaagaacggcgccagcggcttctccgcgaagtcacccccagcag

SEQ ID NO: 111087 - DNA, 336 bp, Glycine max
  Clone ID: PAT_MRT3847_71320C.1
ttgacttgacacagtttctctctttttattgcatatatatctgaaagcatgctcgactcattcttcctatatcactgacttggacagctctttaaatctcattaatcatttgaaatattcggattgctgccagtttgataataccatatgtactgatattgtcgcattattgtgataaagatactaattttctatatagaggcaaaaatgtttgtaatttctaaggcgaagttggtgaaagcacccactgagctgaacagttcaactctacttgaactcatgtactaactactaagctaagtaaggaaaatacttaatgatttcatgtactgctga

SEQ ID NO: 111088 - DNA, 982 bp, Glycine max
  Clone ID: PAT_MRT3847_71321C.1
ggctcgagttcttattgaaatacaggatactttgaagtcgcctccaccagaaaacgtaaccatgaagagggcctcaacaatatcagtcattgtcacaacatttttctacctctgctgtgggtgttttggatatgcagcctttggtaatgatacaccaggaaaccttttaacagggtttgcactctataaaaaacattggcttgtagactttgccaatgcttgtatagtaattcacctagttggtgcatatcaggtgtatagccagccactttttgccaatgttgagaattggcttcgtttcaagttcccggacagtgaatttgtgaatcgcacatactccttgaaactccctttgctgccagctttcccgctaaattttcttaggctgactttcagaactgcatatgttgcatcaacaactgggattgcaatgatatttccctacttcaatcagattttgggagttttggctggcataatctactatccattatctatatattttccagtggaaatgtacttgagtctgggcaatattgaagcatggacagctaagtgggtcatgcttaggacttttagcattgttggttttctggtgggattgttcactctcgttggatccattgaagggatagtatctgcaaaactaagctgagaagctttcaggcctctcccagaattggaagttgaacttggaattagattgtggttgttacattttttgccctttctttgaaaaccagcattaaacatagtgaagcagacgcctccccaagcataaagaattaagcatagatggaacattgatgaattcaaggttctgttgttctacctgttaagatgtagtagtaaagatgtgtaattgagttgcagaagcttaaaattgcatttgtttcttgaaatgatcttgagaaactagttagtttcatctgtaattcttagctaatcatggaataaaaaagttgagcaggtccggtttttg

SEQ ID NO: 111089 - DNA, 710 bp, Glycine max
  Clone ID: PAT_MRT3847_71322C.1
aaaagttggcgaaaagatccaaattgttgcaaagactgctggcatgcatccgaatgagtgggtggaaaatgctgatcgttgggtagctggttttctggaaatgtttgaagaaggttgtcacaagatgggaacagcaattagggatcgaattcaagagaggttaagaggtcagcagtcaagagatggcacacttcgtctacaaaatggcgaggatgataaggatgacgatgatgaggagtattattatgatgatgaggaggatagtgatgaagaatattttgaagaatattatgatgatgacgagcttaatcctcaaaataatggaaaagatgagaaaaaagaataggtatacttcggtggagttggtttctcggaagaatgtcaatagcaactgtccatgcgatatctgtaatattatatgcattatattggatagtggatttgaagttgcacaagggaactttcattttgctggtgcggtcaaaattttgcgtgttgaatgctggtatacaagaaagtgttgtttgtgcatatgcttaattttagatggaaaaataccatgtccttttttattacgttgctagatcagggaaggaaaatcactacttccccggacaatctaacgtgaattttcacgtcccattgaagtcatcaattataacttttgcatcttgtaggcatcatatatattatgtgcgtgttttggatat

SEQ ID NO: 111090 - DNA, 622 bp, Glycine max
  Clone ID: PAT_MRT3847_71323C.1
ccacgcgtccggcagtcaagagatggcacacttcgtctacaaaatggcaaggatgataaggatgacgatgatgaggagtattattatgatgaggaggatgatagtgatgaagaatattttgaagaatattatgatgatgatgagcttaatcctcaaaataatggaaaagatgagaaaaaagaataggtatacttcggtggaattgttgggttctcggcagaatgtcaatagcaactgtccatgcgatatctgcaatattatatgcattatgttggatagtggatttgaagttgcacaagggaactttcattttgctagtgtggtcaaaattttacgtgttgaatgctggtatacgagtgtttgtgcatatggttaattttagatgggaaaagtaccatatcctttttattcacttaattttgggttctacattctatttcagcgttgctagctcagggaaggaaaatcacaaattcctcgtacaatctaacgtgaattttcacgtcccattgaagtcatcaactctatcttttgcatcttgtaggcatcatacatgaattggatatgtctgtagacttaagtttggatcatgtgattttataaaattgattttaagttaatg

SEQ ID NO: 111091 - DNA, 294 bp, Glycine max
  Clone ID: PAT_MRT3847_71324C.1
acccacgcgtccgtccactcgtactcccactctttcttacggatgtgagaagactacagaggggggcacaatataataccgttgatcaactcactcatcaatcttgtgtagttctcactaactattactttatcatgtcgtctagcacagttggtcatgtcataaaatgcaatgctgttgtttcatgggatgcagggaagccacttttgattgaatgaggtgaggcggcaccaccaacaagcttgtgatagtgcggttagtagatccattacactcttgttttgccacactgat

SEQ ID NO: 111092 - DNA, 281 bp, Glycine max
  Clone ID: PAT_MRT3847_71325C.1
acaaagcatttttttgaatttttaaattgatcgggcccgttctagatcttaagtttttaacggccgaacaaaaggggacttaaactttccgcacaaaaaattattgttggaggctttagcccggggggacaccattagggaaagccctatgcacagaagcgttttattaaaaaaggatgggtggaaacccatttttttttttctgccccgggggagaaagaggctctggcttttttacttcggccaccaaaagagcccccatctttcttgttgggaaaagg

SEQ ID NO: 111093 - DNA, 253 bp, Glycine max
  Clone ID: PAT_MRT3847_71326C.1
tttcgtcggatgtgtgatagagacgatataccctgcaaatgtactaatttacgcccaaagcaaaaccaggctttggaccatgaaggttgttgtcatgttgaatgttaaaggattaggagcaatgcttcttttaaccctctaactaaaacgggttccaaaagtttttctgcgataggatggatatgccttgttctaaacataagcgtattggctgtttctgtgtgcattatgaaacgagacataaagaccagga

SEQ ID NO: 111094 - DNA, 332 bp, Glycine max
  Clone ID: PAT_MRT3847_71327C.1
ttccggacctcatctactccacattgtcctctcaccactctccaattgaaaaggcttctttatcaaaagtaattgcaaaattccatttcatcatgtgaagaagtacacatatgtgcacatttttagctaaatgttgcaattagaaggaaattaaatgattattattattgttaattttttttcaggaaaaatggctcaagtttgtttgctcttggtggggcttctcacaatgttctcctctgcctatggctatggatatggtggtggctgggttaatgcacatgccaccttctatggaggaagtgatgcctcaggaacaatgggtaagcaat

SEQ ID NO: 111095 - DNA, 239 bp, Glycine max
  Clone ID: PAT_MRT3847_71328C.1
gataaactgattgtctatagccttgggaagcagcttcaccatgacacacagctacgtccatgtatgtacgaagagcatcgctgcatgctttgcatgcacagttttgcctacaccactgggtcaaaagccgctgggactggccaccttacacgccacattgctaaggtgacatgcccatctcttctacgcagccaagatcaaaatcagctcagctcatatactccaccttcaatgtgaag

SEQ ID NO: 111096 - DNA, 546 bp, Glycine max
  Clone ID: PAT_MRT3847_71329C.1
ctaatttcctcttttagaaaccatacaaaacacgtttgcatgcatcgttttgtctatttgtacgatgccatcttcgagtgccatgtgtatcatcacccacccaatccattctgccacctgcacccccaccttctagggtcgccacgttgttgttgcgtgccgccatcaatgggttttgttctttgttccccctactatataagggagccaatacaatttgcattcttgtttccataataacaactactccacccttagtgagagaagcttaatttctattttcatgtttttcggatttgcatcggggcaaaggaaaaaatggaggcatccattatgttacctcttgaaaggacttcgtcaattgaaagagagcccaggactcttaatatcaaccaaattcaatccgctagggagttagcaatatatatattgaacacaaagaccatagaagaagcgtccagaattttcacggaggggttgcagccggtggttagtgctgctccaaagatgggttttgggttgagaagttgaagtggtggaattcca

SEQ ID NO: 111097 - DNA, 364 bp, Glycine max
  Clone ID: PAT_MRT3847_7132C.1
catgggatgcatcaatgttattagaaatcaatactcaatatgttacataagcatcccaagctcatatatactaatcatgccccccacaccatcgttcatttttaacttataaacaaaaaacccccccaaaaaaagaaaaagaaaaaccccacaagagtttactagagtttccacaaactctagcttgctttttagaagaacaccccaacctgaggaagtggagaccaataaaaacccgttttaaaaaaaaagggaaaaaaaagaccccccaccaaaaaaggaattaaggggaatggagaggagcttctttagtggcccatcaacaaatgaagacttacttatcccggacatggaaaacattggg

SEQ ID NO: 111098 - DNA, 309 bp, Glycine max
  unsure (1)..(309): unsure at all n locations
  Clone ID: PAT_MRT3847_71330C.1
acgagcaatgatacaagcaatgtcatataggagacataccttgtgtaatacttgtctctgttctccataatttggaagtataaacaaagtcatttgcatttactagtaatgcttcccctgcattttccagggctgagaaggaggcatataggtgttgcttccagatttctacagaattctttnnttnccttttttgggcccttttcccctttaaaaggnaaaaaaccaaaaaaaaaaggggggggggggggggatggcttttctagtgtggcccttgataagccaacacatccatttaggtttgtggag

SEQ ID NO: 111099 - DNA, 164 bp, Glycine max
  Clone ID: PAT_MRT3847_71331C.1
gggcgcaacgcccggataccgtcgtcaagacagctacggtgctccctcagtatccgtcaagaacggtgccatctctggtgtccactcctcaacctacaacgaagactacttcttgggcattccttacgcccggcccccactcaatggacttctattcaccgggg

SEQ ID NO: 111100 - DNA, 233 bp, Glycine max
  Clone ID: PAT_MRT3847_71332C.1
attatatcaaagaaaaggacgagagtagtataacaaaagcatggcaaaacaaacagggcatgtaaggtctggcaaaaaatccaatattatcgagatttgtttttgtatggaaaataaaaaaagaaaagaaagcagcgctcagggctagcttggcatggatggcgaatactaggaaggaataggccttggcggaggagggagtatctgatggaggttggagaggagtctgatta

SEQ ID NO: 111101 - DNA, 1577 bp, Glycine max
  unsure (1)..(1577): unsure at all n locations
  Clone ID: PAT_MRT3847_71333C.1
ggctcgagtttggagaaaagtagtaatcctatctttaccccatcaaacaattgtcttctcaaaagaaaaatccagattctctgcattccacataacttgttagttcctttgcttccaagaccagtttcggattattgttcactcatctcattctcttgttaatttctctacacatattctctctctcaagtctaaaccatgcctgttgtgacagaacacatgaaatggagaagaccaagaaaccaatttaggaaccccatttcagaaaccgatgatccaatcactcaaatcccttccataatccaatcctctcacagcaaatccaccatctcctctctcttgtcttctttctccacctccggtgaaaccacacatgccagagaccaaaacagaaccaacaacaacaacaaaagcaacagaaaattctctgcagcaaccttcaggggcttcggctgcactgccggttcatcgcagaaggtgtcggtgccggcggtgattcgctcctcagcagattgggaagggaagaggaacagaaagaagaatcacagaaggaagagtaacagtaacggtaacagtggctacaacacatgtgatgatgatgataaaacttgatgtggtggaggactgggtaacactcagggagcgttcatcttattttggaaggcgcactgtaaagccagaaagcttctcctttctggaagatgaacctgacatttttgcagcacgccctggattagagccttttggaactgctagattctatcgccatgttccacatccttcccctgatggtcttgctgacataatgatacttcaaggaagaataatgatgggggacagatttgaagcacgccaccaatttagagcctttgactagaggttgataacatcgccatgttccacatccttcctgtgatggtcttgctgatataatgataattcgaggaagaataatgatggggggacgatttaattcacacgaccaatttagagactggagacttgatgttgataacatgtcatacgagcaattgcttgaactgggtgagagaatcggttatgtcaacactgggctcaaagaagatgagatgggactcaacataaggaaagttaagccttcaagttcaaatgatacatcaaagcatcaactagacaaaaagtgcagtgtttgtcaggaggagtatgaatcagatgatgagctggggagattgaagtgtgaccacagctatcattttcagtgtataaaacattggcttgagcataaaaatttctgcccagtttgtaagcaagaagttgtggttcgacactaagtggcactatcctcatgttttttacccttaaattggtgtatagttttttcttatgcaatataagcaatattcattactttacatatttttaaacttttggcttccttaaggaggagtcggcaatattatacttgtaagttttatattatggtctcgttattggacaatgattttgcatattatacgcaaggttttgaaactatcttgatccaaatctaccatacgttntttgatggggacccagcaacctaccttttgatgcttgct

SEQ ID NO: 111102 - DNA, 878 bp, Glycine max
  unsure (1)..(878): unsure at all n locations
  Clone ID: PAT_MRT3847_71334C.1
aaacaattgtcttctcaaaagaaaaatccagattctctgcattccacataacttgttagttcctttgcttccaagaccagtttcggattattgttcactcatctcattctcttgttaatttctctacacatattctctctctcaagtctaaaccatgcctgttgtgacagaacacatgaaatggagaagaccaagaaaccaatttaggaaccccatttcagaaaccgatgatccaatcactcaaatcccttccataatccaatcctctcacagcaaatccaccatctcctctctcttgtcttctttctccacctccggtgaaaccacacatgccagagaccaaaacagaaccaacaacaacaacaaaagcaacagaaaattctctgcagcaaccttcaggggcttcggctgcactgccggttcatcgcagaaggtgtcggtgccggcggtgattcgctcctcagcagattgggaagggaagaggaacagaaagaagaatcacagaaggaagagtaacagtaacggtaacagtggcaacaacacatgtgatgatgatgatgtttctggtggaacatttgtggattttcaggatgtttcgtgtggccctggaattggattctcaactgatgctgcatctgtggaatgtgctgtggctaggaagaatgtgtcttcaagaggaaaacttgatgtggtggaagagagggtaacacacagggagcgttcatcttatttttggaggcgcactgtgaagccagaaagctttctcctttctggatgatgaacctgacatttttgcagcacgncctggattagagcccttttggcactgctagattctatcgncattgttcacatccttccccctgatggtcttgctg

SEQ ID NO: 111103 - DNA, 1000 bp, Glycine max
  unsure (1)..(1000): unsure at all n locations
  Clone ID: PAT_MRT3847_71335C.1
ttgtccgccttatctagntagnnccttngcttctaagttcagtttcattactattgttcactcatctccattctcttcttaaattctcaacacatcttctctctctaaagtctaaaccatgcctgtagtgacagaacacatgaaatggagaagaccaagaaaccaattcaggcaccccatttcagaaactgatgatccaaaccctcaaatcccttccataatccaatcctctcacagcaaatccaccttctcctctctcttttcttctttctccacctccaatgaaaccagagaccaaaatagaaacaacaacaacaaaagcaacagaaaattctctgcagcaaccttcagaggcttcggctgcactgccggtgcatcgcagaaggtgtcggtgccggtgcctgcggtgattcgctcctcggcggatagggaagggaagagtagcagaaaaaagaagcacagaaggaacagtaacagtggcaacagcacaagtgatgatgatgatgatgatgtttggtgtggccctggaattgggttctcaactgatgctgctgctgcatctgtggaatgtgttgtggctaggaagaatgtgtctgcaagaggaaaacttgatgtggtggaggacagggtaacacacagggagcgttcatcttattttggaaggcgcactgtaaagccagaaagcttctcctttctggaagatgaacctgacatttttgcagcacgccctggattagagccttttggaactgctagattctatcgccatgttccacatccttcccctgatggtcttgctgagataatgatacttcaaggaagaataatgatggggggacgatttgattcacacgaccaatttagagactggagacttgatgttgataacatgtcatacgagcaattgcttgaactgggtgagagaatcggttatgccaacactgggctcaaagaagatgagatggtactctacataatgaaagttaagccttcatgttca

SEQ ID NO: 111104 - DNA, 380 bp, Glycine max
  Clone ID: PAT_MRT3847_71336C.1
ctttattctattgcgctcgcaggagagccaccggagggcctgccatccggcggcccgaggccaaggctacaacaggagggccggtgagctcttacgcatgcagtcccaggagctgcagtgtcccaaagacacgaagaagcagagcgcgaactatgtggaggggaaaaacaagactgacaccaatgactctccgaagggcaagaagacaagcctctaataattagagggggagacctaacacaggagtgcgtgatgtcatggtataccagagagcggatattgcacagtgcaggcacaaaaggaggcgacctcctgacatgcagttgcaaagatagagcttctcctacaaagagtgtacactcgccctgttgcaaccacaa

SEQ ID NO: 111105 - DNA, 323 bp, Glycine max
  Clone ID: PAT_MRT3847_71337C.1
cttacgcgttcgcttaatggtgttgagggtttggactatatggaaagaattcctcttgccacatctgagggttttcctcatgtgctttcacgcaaaaatggcgaaaaaggcaaaaggagatttgtttctggggatggtgaagagatgacattgattccgggacccagagttgtagaggtttactagaagctaatagatgaacttgagaaaagtgccactacattggttggtattgaaagtaccatggttgagaaaattcctcgcggcaaaatgtttgacaatcctaagacgcgctggttcatattctccctatggagcttaat

SEQ ID NO: 111106 - DNA, 580 bp, Glycine max
  Clone ID: PAT_MRT3847_71338C.1
taatattaataataataataataataataataataataataataataataataataataataataatataatttgaacttaagaactcgtataaactattcaagcttttattattaagtcgactctaataaattttactattttaacttatgcattgcataagtcaaatatttattttttatataactaaaattttagtgattaaatattttaaatatctggtaacaaatattttaaatatacaaattgtattattattaaaatttataacaaaataactatgttttatataaattatattttaaatttacaataaataatttaaattatgatataaatttatttttggaaagagataaaaaaaaacattagattgaatgggatcggcaattaaaaaaaaaaaaaaaaaaaaaaaaaaaaaaaaaaaaaaaaaaaaaaaaaaaaaaaaaaaaaaaaaaaaaaaaaaaaaaaaaaaaacaaaaaaaaaaaaaaaaaaaggggggcccgttttaagggaccaaggtttactaccccgtgctggcgaggctatagtttttttatagggccccctaatttaaat

SEQ ID NO: 111107 - DNA, 424 bp, Glycine max
  Clone ID: PAT_MRT3847_71339C.1
gttcagataagcatattactatgtcatgaaccaagaattcacaaggcttcagctgcttggtgaaaacacactaatggttccttcctagtgattgggaaaaaacattatttctcactttaactcataagaaacagtcctgtcattgattgagtgcaatctttctttgggcaagaaataaaaataataagttgtacataggattgtgataatatatcaactaaaaaatggttattaaattcattgtggtattccatcttgacattttacttaatgttctcatgatgcaggaagagccagttgataagaccaagcattggggagacttggaagaggaagaaagggccgccggtggaagaaagaaggaaaagaggctcgcggaaaagaaagaagaagaagaagctcgcggaaaagaaagaagaaagaa

SEQ ID NO: 111108 - DNA, 412 bp, Glycine max
  Clone ID: PAT_MRT3847_7133C.1
tttgaggtctttttgtgtagtttgaagttactatacttttaaaactgataactactttccgatagggagagaagcaagcagacgagtaaccgcagttcatggtgatttcgtacctcactcgttagatagtatttttctatcataaatagacttgacacgtggtgtgttactatacaacaacatttaatacgatggcattttgataaataataacaacttcaacatgattattgttgaaagatagttttaatgaaagtggacctgaccttagtggacattgtggattacagagagaaactaatggaatggccactgacaagtttgggtatggaatttatgatgattgagcactcttacgatgagagatagcggcaaggttatatttttggatcaatttatgaagagaaggggg

SEQ ID NO: 111109 - DNA, 357 bp, Glycine max
  Clone ID: PAT_MRT3847_71340C.1
ggcgaatatcaacttaagaaatccatggaaggctctctctcactgcatctctgccttagccaccacactctcatatctctccacaataacaaaaccccataaaactaacaccgcttcctccataccagaaccgaaattcacaccttttaacgtaacttacgcgacccacttgcatttgaatcttttctctaacgcttgcacgcgttgcctctccttccttaacggtgtgatgccgatcgacgacacgctgaggtctaagattacgactctgcagaagagtccagcctcgtatgctattcctgttacttcattcataggaaaactaggtcctctgctaagggagagaatgactgatcc

SEQ ID NO: 111110 - DNA, 340 bp, Glycine max
  Clone ID: PAT_MRT3847_71341C.1
ctccacgcgtccgacttaatgtaacttgtgctgaggtggtgttggcatcaagggacgctccaactccattgttggaatgtgggtggctgcaagacacagggtgaatggtggagccttatggaaggatgtcttacgatgctactgacactaatcagccccttgagatggatgtgttggagggaaatcggtccttcgatattgagtatcgctctagataggaaaaggttgcctctacaaaagcgcattttgtaagtggaaggaccttcagacatgacatacttggtgctggttcacattctttatatgattttcctgacaaggtacagcatgagaaacccaa

SEQ ID NO: 111111 - DNA, 346 bp, Glycine max
  Clone ID: PAT_MRT3847_71342C.1
acagccgccacgcgtccgcccacgcgtccgccacgcgtccgtactattatgtgatcggcttttctgttcaatcatttgttcggattccttcagcacccatcagattaatggctaaagctatcctcttgagcaacaaatggccctccctatgagcaattgtcgggcacacgttcttaccccacactacagaaattcagccacgggaagagggatctgaaggtgatagctgcgacttccttgaattgaaatgccaaaaagaaagcaaatgtggttgctgaaaaccaggatagaattcggctgccaacatataatgatgatcttggaggcgagaaatatcacatcagtg

SEQ ID NO: 111112 - DNA, 159 bp, Glycine max
  Clone ID: PAT_MRT3847_71343C.1
ggaattcggatcgagaagaacacgaagggcttgacctcttcttcaagagttttgagtgttgttgaagggtttaagcttatcacttcactttcatcagtatatatattattatacacttaataatagtcatagatagtcatagtttttccacgcagcata

SEQ ID NO: 111113 - DNA, 367 bp, Glycine max
  Clone ID: PAT_MRT3847_71344C.1
ctccgaacctttgggctgatttatgtgcttgcatggtcgtgagaatgatagaagagcatgccacaccgccgagtagagccggatcgtcgaccaaccactccggagttctcaccgtcgccaaaaggccgctaaaggactcgaccgaacaattacacaagcatccaaaagaataaccgcgccccgcaatttccgataacgcgcccgcctagatccacacgaacagacgtcttattccacgactctaaaaaaaaaaaaaaaaaaaaaaaaaaaaaacaaaacaaacaacacattaaacaaaaaaaaaaaaaaaaaaaaaaaaaagtggttgcctcagaggacttaagtccatccatgtgcgtacgtaatg

SEQ ID NO: 111114 - DNA, 117 bp, Glycine max
  Clone ID: PAT_MRT3847_71345C.1
gacgagaaaggtttggaaattattctccaactacccgttttagagatagcaggagtctcctccatggctcgctcgtcgagatccttgcctgctatcgccgttatactttgcccatca

SEQ ID NO: 111115 - DNA, 710 bp, Glycine max
  unsure (1)..(710): unsure at all n locations
  Clone ID: PAT_MRT3847_71346C.1
atcaaacctcttctttcaggtccaattcactcgcttattcttttctttccatacacatgcagacaataagttcgaacaagttcaggactggcgcactccaagtcacaatggagcatttcaacaaagccaaagccgtgaagctccgcagccacctcggcaagtacctcatcgccgacgaggacaaactccgtcaaagcaaacgaggctcaacaaaaaaggcaatatgggaaattgaactaataaacggaaagaaccaccacgtgcggctgaaaagctccaacggccgttacctaacggcgacggacgcgccgtttctcttaggcatgacggggaacaaggtggtgctagcgaatttcgacaagggcacggattggaagttcgagtgggaacccataacggaggggttccacgtgaagctgagaagctggtgcgggaagtacctcagaggtaacggcggcacggtgccatggagaaactccgttacgcacgatgaccctgctagctccgttactcacacttggatcttgtgggcttcggaacccgtgcaagagtttcctgagaaaatggtttctttcgccgagagcgacttttcgtcgttggattcggagatgagcttctggcctcggagtcttcgagaagtcacaagtccatgctcaagacaacaagttccaacacctncggcgccacctcgatccgttccggcatggagc

SEQ ID NO: 111116 - DNA, 343 bp, Glycine max
  Clone ID: PAT_MRT3847_71347C.1
tacttcaaagggaaaagcccaaaatatacttccatctctctccctaaccttgacctccttactgccactactgaccatcaacccaaactcagcgcgaactacttcttgcagctggaacaaatatcgccgcgaaccaaccaaacatcatgctcggaaaaacactattaatacctcctcaaaaaaataacaactcaataaggttaacgaaaacagcgccccaaaaacctacattgtgattcgggccctatacatcacccccatgggcatggtgaacaaagaaaccgatatccttaacacatgcaccaattgcttcaacttgagcttatatacccctaacacaaaa

SEQ ID NO: 111117 - DNA, 380 bp, Glycine max
  Clone ID: PAT_MRT3847_71348C.1
catttgtctgttagactcgtcctccgctaaagatcccaactgctgggaaccgtctccctccgtaaaaccttgccgtcgacgaccatgtacgtacaccgcctactgttcagctgccaccgggcgcctccaagctccaaaaaaacagacgacatgggggcgcgcgcgcggcaggtacagacgcaggacctgtggacctacgcactcacccatagggggctccagggcttcaagctgaacgtgctcaacaactactcaagaccagttccgtgtgtacgttaccccaaccgaaggcgttgaaaaaaacgccgccaagcacacaaaagcgcaggttccgctgggaggacttgctattgaagggggagcggctcacgcggggtaac

SEQ ID NO: 111118 - DNA, 292 bp, Glycine max
  Clone ID: PAT_MRT3847_71349C.1
aaataatccaacattcattcttatataatatatatattgtgagttcatgagtgattgttattctttgaagcacggacactccagtcccttgccttgtttggtgtttgacacgacaccgacgcccgtgtctgggttgagtttgatgtgtttgacgggtgttcacgtgtccgtgtccggtgttcgtgtcagtgtcggtgcttcatagttgccgtttgctacaacgaagagatactgagtcaatttctcatagtatatttataattgttgtttgctacaacgaagagataatgtt

SEQ ID NO: 111119 - DNA, 573 bp, Glycine max
  unsure (1)..(573): unsure at all n locations
  Clone ID: PAT_MRT3847_7134C.1
agagtgaaatgatgggcagcagcaccaactgagggctatcatttactactgctaattggcattgctgtggaagcgctttgattatatctttgaagcctcaaagtcagatcataggttctccacctgcctctcctcctcctccttctcctcctcgacctcctcctatttcgaacgcattggcttcgacgtctgccataaagcggacacgcaaagcctcacttctacgatcagtggtgcatgttgatcatgctactgggaaggccgacggtccccacaggaaaaaattaagaacataattggggattgtggcacgtgataaggtggacatcacctacgagaactggaaggaggtccctactgctcagaaggacctcatttgggaggatattcaggcggaatttgatatcccagaggcttccgacagtaggacanaaaggaagttactacaaactgtgtgggagagatggacatagtntaaattagacctcatgaggaaatggtgcccttgcagtcgatcaggacagtgtcgaggacactgtctgtgacaaatacggcttcagcaaggaaaagtgg

SEQ ID NO: 111120 - DNA, 267 bp, Glycine max
  Clone ID: PAT_MRT3847_71350C.1
cctactatctatgattaaccaaaatactaatataatattaattaatccactcttacatctgcgaatgccatggaactcatatctgtggtggcgggggaaacacaaaaaccactctcaatacaaaccatagacaatgctccaccacagacactgaaaaacacgtctcatcattcatttcaactaacttttccttatttatcattataaaatttatacaaaagaccacacacctcttctaccttgtatcatattaaacccagattcaac

SEQ ID NO: 111121 - DNA, 266 bp, Glycine max
  Clone ID: PAT_MRT3847_71351C.1
gcacgagctgatcggtgagcgtgactaaacgggccggcgtctagatggacccttttgtgttcccgctaagttctctggcgcggtacagtgtgccttacgtgcgctatcagggatagaccaaaaaatgcgccggggactgtgggtacttaagaaaagagccatgatgccggtcaaggtggcggggggcgcctctggcgcgttccttaggatatgggctgctatatatctattgcacactgcttggggcggagattcctaccgttttt

SEQ ID NO: 111122 - DNA, 147 bp, Glycine max
  Clone ID: PAT_MRT3847_71352C.1
cgaaaccttcttgcactgggcaaaaagccccaaccatcttttggccaacctggcgaggcctaacggccaatcattgcctttaaggtcgggccaattaccaacattatgggctttttccgccgccttggccaagaaggtgttcttaac

SEQ ID NO: 111123 - DNA, 228 bp, Glycine max
  Clone ID: PAT_MRT3847_71353C.1
caaatattatctatcaacatcacttcgaattcacagaacccacttatatttacagcatgtttcaaaacgatggctcaattaccttataacttgttatacactacttttccctaaacaaagtaaatattactgtattattcatctactacaactaaccaaatcattattaactcactatcccttcttcactatttacaaatattaattaatctttattacctacattct

SEQ ID NO: 111124 - DNA, 444 bp, Glycine max
  Clone ID: PAT_MRT3847_71354C.1
cccacgccgttcgtgagattttgagaaaccgcgatcacagggtgtcgcaccttataaccgggaacacaagcgctcggtacttggtttcaagaatctctcaatttcttcctacttctttggggaccatttcttaagggaaagaaaatcactctttgggctggccacagactttgggaatcattttctttttcactcttaggttatttggtggacactcttctatttggtataggactttgtggtagatttaaactttttctggctctttctcaggtcttctgttaatttcaaggtcaagctgggtgacatcttggaatagtactcccactctcctatctggtataggaattcggggggtagacttttctaattctttcccttctttcactctcttctctcactgatcccgattggccgtcaaggtggtctttattgaaaaacact

SEQ ID NO: 111125 - DNA, 485 bp, Glycine max
  unsure (1)..(485): unsure at all n locations
  Clone ID: PAT_MRT3847_71355C.1
gcgatctgtgnaagaatatgcacgaggaggcggggtgttatgaaggtncatcatattactgcttgattaaatgataaattagtacatttgataactttcttaaatgncgctttcaaaaattatattttgaggataatttntgatttatggataatgtaaaactttttacaataaaagtgtatgaggggtgaggtgttacaatgatcaaaaataatgtgcatggagtgtattattagagactctgttgcntttntcatnatatatataatatatgtgagtaaaaataattgngtattaattaggaaaggcagttaacataatttacttttactaatgttaagtcaaaaaaaggttatttttaaaatgtgtttcattatagagtgctttatatcatgaacaaaagggtgattgttaattggattagaatttagtgagaaatattttgagaataataaccttgagtgggataatattagttaaattta

SEQ ID NO: 111126 - DNA, 317 bp, Glycine max
  Clone ID: PAT_MRT3847_71356C.1
tttgaacccggagtaattttaacttctgcagcagggagaagaagttggattgtgaaaatgatactaggactcggtctaggtaatgcatatagattaattttcaatagcgttttatttaatgaattttatgtttttcttatagtagatactttctatttttttttattttattagggcagtcgttcacgttgctttattatccaagtgtgtaatctaatgagttactttttttaacaatatttattctatttatcgtgatagcattactttctcatccttatataataatctttctaattccaataacctctccagct

SEQ ID NO: 111127 - DNA, 258 bp, Glycine max
  Clone ID: PAT_MRT3847_71357C.1
agcaatattttctgttaggattcttgggctgaatcattgcatgctaattgctaatactataaacggatctatgtgtgttgagttgagataaaaataaaaatgtgtctgtctttgtggtgtaactgttccgccgctatggcggtcgtgttattccgaaccgatgttttgcctttgtacggcgaaggagaaggaggacgcaataagaatcctctccgttacccacccacttcgtcttttttctccacacaacaatcccca

SEQ ID NO: 111128 - DNA, 359 bp, Glycine max
  Clone ID: PAT_MRT3847_71358C.1
cggtcgacccacctccggtgctgtctctgagggccatagtttgttccctttgaactttaatctccacccaaacggcattttcagtaaatttccttggaaaagaaagagcgaataggaaaatgcataatcacatgctgaagcagcagcagcatcagcaacaacaagctcttatgcatcaagctcttcttcaacaacagtctctctaccaccctttcctccttgctcctcctcatattgaaccatattcaagttgaaatttgccttctggttttgatccaagtacattcctcattttgtatttttttaacattcttacacattttaactgatcccttttttgcaataatttttcttttttt

SEQ ID NO: 111129 - DNA, 483 bp, Glycine max
  Clone ID: PAT_MRT3847_71359C.1
gaacggcatcgtgcttcgttgtagttgtagactagactagttttgttttcttgcaggattttggcgcatggaacctatcggcgtctccctgaatcgcgtttttctgttctaaactgcaaactgatatgatcagataaattttttttaaaaaaaagcagtactccagtaactactagtaattggcaacctacaatcctggccgtccgttccgttgaccgatgaatatcaaaaacaggcgattcgcacttcccattcccattgccatcgccagcgcatacatcgtatccaacagccgcaaacccttcctttcttcttcgtctcgttggtgtcccctctgatccgcgctggcacagaacccattgctggaccttccaaaccctagcggagccacgcgctgaatttcgatgcgatgatcgtgcgcacgtgaggcggcactatgatgaacacagcttacggcacgatgatgtcaccgtcgtcttcgtc

SEQ ID NO: 111130 - DNA, 365 bp, Glycine max
  Clone ID: PAT_MRT3847_7135C.1
gggacccggggggtcccccgggaaattgcaggcggaccccggaggggcaacaaattttctttaaaggggggaaaaaaaaaggggggaaaaaaaaggggaaaaagtttgccatgggaaaaaatttacccacaaaaaattacccaaaaaaataaagcgggaagaaaaaggggaaaaagggggggggccaataagggggactgacccaaaattaatggggggggtacaaggggcaaatttgaagggggaaaacctttggggaatcgttaaaaaaaaaatgagacacccccgggggagggggggttaggattagggcccccggggggttttttattttcaacagggagaggggaaaaaatgtgtggcct

SEQ ID NO: 111131 - DNA, 619 bp, Glycine max
  Clone ID: PAT_MRT3847_71360C.1
ccacgcgtccgcggcgtctccctgaatcgcgtttttctgttctaaactgcaaactgatatgatcagataaattttttttaaaaaaaagcagtactccagtaactactagtaattggcaacctacaatcctggccgtccgttccgttgaccgatgaatatcaaaaacaggcgattcgcacttcccattcccattgccatcgccagcgcatacatcgtatccaacagccgcaaacccttcctttcttcttcgtctcgttggtgtcccctctgatccgcgctggcacagaacccattcacgcgctgaatttcgatgcgatgatcgtgcgcacgtgaggcggcactatgatgaacacagctaacggcacgatgatgtcaccgtcgtcttcgtcggtaacggcgcagtcgccgggactgaagacctatttcaaaacccccgaggggagatataagcttcattacgagaagactcacccttccggtcttcttcattacgcccatggcaaaaccggtactcaggtaaccctgggacatcttaaggacaagcctgcgccttctaccccaactgcgtcctcgtcggccatcaaggtcagagcccacaggggggtccggtcaggcgtca

SEQ ID NO: 111132 - DNA, 413 bp, Glycine max
  Clone ID: PAT_MRT3847_71361C.1
gcatgatgcataatataagcagtgagtccattgcttttccccacagaagaggaaacctgtttacaattcagtacctgatctattggaaagaagctgacaatgacaaaagcagcgattatgttgattggataagagggttctatgctgctatgactccctttgtttcatggggtccaagggctgcatatattaattacatggactttgaccttggagtgatggaggggattggtaatggtgctaatatgaaagatgctgtggaacatgcaagggtttggggtgaaaagtacttcttgagtaactatgacagattggtgagggccaaaactctgattgatcctaacaatgttttcaccaatgatcagggcattcctcccatatctttgaccagtccctatgccaaagcgcagagc

SEQ ID NO: 111133 - DNA, 1540 bp, Glycine max
  Clone ID: PAT_MRT3847_71362C.1
atgatgctccaaatatcagcaatgctgatgcctctgcactggatactgattccactgattcagactcctcagaaggtcctgagataattcagacatttccttctgatgatggtcaggaagagaacagttccaagacaactcccaaggaaaattcttctccctcaccgatgaaagtcccatcaaaacaatggacaaatgaagattttgccacatggcaacggatcatccgacttgatgctgtacgtgcgaacgcagaatggatgccatactccccttctcaagcaattgtaccagacagtagggcatatcgttctgctgaggctgttgggttgaaggattatagtcacctagatgccagcagaatctttcatgctgctcgactagttgctattctcgaagcatatgctttgtacgaccctgaaattgggttactgccagggtatgagtgatctgctatctcctatagttagtgttatacctgaagatcatgaggctttctggtgttttgttggattcatgaaaaaggctcggcaaaatttcaggcttgatgaggtgggtattaggaggcaacttgatatagttgcaaagattatcaagttcaaggatggccatctgtttagccatctgcagaagctccaggctgaggattgcttttttgtgtacaggatggtggtggtattgtttagaagggagttgacatttgaacagactctctgcctgtgggaagtaatgtgggcagatcaagcagcaatcagagctggtattgggaaatctgcatggagcagaattaggcagcgagctccaccgacagatgatctgttgctttacgcaatagcagcttcagttttacagaggaggaaactaattattgagaagtatagcagcatggacgagatcctcaaggaatgcaatggcatggctgggcaccttgatgtttggaagctgctggatgatgcacataacttggtggtcacccttcatgacaaaatgaaaatagagacatcattccgatgactgcagttgatacttaaaaacaaactactagattataatatggtcaaaagatctttgctttcaagctgcccaatttctccttcgcatccaaaaattctgcaaatgtcgagtttttatattacaacgaagcctgctgctgcatgctgaatttgccacttcttattttcgagactctctgatttcgacaatgttggcgcatgtggggattgaagttgggttagatgtagatggcatggctgcttgctgaaatttgccactgcttaatgcttatttacaagggtctagtttcgacaatgttgccttaatttgggcattgaaattggctagatttagatggcatctttctcttttctttattttcacgctggctccattccttttcttttgatttctttttcagctttctgatttgggacacatctgggagcacctttgcgaaaagcaggagtggtaggtgcatgtaaccgttagaagaggctgagatattgtcgacaattatgaatgttgtcctttttgactgaaaccg

SEQ ID NO: 111134 - DNA, 331 bp, Glycine max
  Clone ID: PAT_MRT3847_71363C.1
gatatcatgcaacaacatctttttcagatcttacacatcactgtctcactctcttctctttctctgcgtttctctgaaataccataacaagctctggagaaaccgccacactggtcagaaaagaaacgcaaacctaaccgcaaacggtaaccccattatgccatgcgtcacaccacaatcctcacatctcatccatcttctcacacttctctctatatccatcatcgctccttccaacgatgtaagaacctcatcattcgaatcattaagtatttcagatggagtcgaagatggtggtgatggagagtactaccacgaggtactaccatgg

SEQ ID NO: 111135 - DNA, 285 bp, Glycine max
  Clone ID: PAT_MRT3847_71364C.1
ggggttgcctggcactctcccttaagattccgtcgggtgaattccacacaacactaaaatttgtggcccgacagagataaacgaaaaattccactctcggagggtgagctgaataaaagcctcacttattgaaagtagctcgcccgttttttaaacaagcggggggctaattttgcaaatctaatacgtgagaaaaaaaaaaaaaactcatgggccgggggaacagaatttagggttaagtttttacccaaaaaaaacaaagggtggggatatttccagtaaggg

SEQ ID NO: 111136 - DNA, 699 bp, Glycine max
  unsure (1)..(699): unsure at all n locations
  Clone ID: PAT_MRT3847_71365C.1
cttgcatgcctgcagatttggaacaggaagagtttggagatacttacaagaagtacaagcagattcagggggagttaaacaggctggaagagcagacaattgacagatttttatcaccccaggaggctaatgctagaaggcagctgcagcaagacttgtgggtagctgcactttctcatgagtcgctgctgaggcaaaaatccagggctaggtggattaaaggagatatcatcaagaagttttggcccacaattaagtctgatatcctgcgcttcttggacgaattttttgttaatggacattttccaaaaggaagcaatgcctcttttattgcattgattcctaaggtgtctgatccgcaatcccttcatgactatagacctatttccctaataggttgtgtctacaagatagtgagcaagctattggccaatcgattgaagaaagttatgcctaccattatagatgaacggcaatcagcctttataagcggtaggcacctgctgcacagagtcattattgcaaatgaagtggtagaggaggctaagagaagtaaaaagtcatgcctagtgttcaaagtcgattatgagaaggcttacgactcagtatcatgggaatttctgaaatacatgatgaggaggatgaatttctgccccaaatggacacaatggattgcangatgtttgtcttctgcatcag

SEQ ID NO: 111137 - DNA, 379 bp, Glycine max
  Clone ID: PAT_MRT3847_71366C.1
gtggaggtaaggtccgcataaaacagaattctagtgaagagatggttagacttggacgtttgtgggtgtctcggcttccatttggatggctcttgttctttagttcagctttcatcagagtacctggtgcccttgcctggagcaaagagggtcatgtcatgacatgccaaattgcgcaggcacttttagagcctgaggcatcagaagccgtgtaccaattggtacctgactatgtcaaaggtaacttatcatccctatgcatatgggctgaccaaattagacactggtacaaatataggtggacaaatccacttcatttcattgacacaccagataatgcttggtcttttcaggattcaaaggactggcatgattccca

SEQ ID NO: 111138 - DNA, 314 bp, Glycine max
  Clone ID: PAT_MRT3847_71367C.1
ggaaattaggcatgaccactattgctgagaatgctctgactatgggaaaaatttccacacctctattaattagacgtaatgatgtgtggacgtgtgtgttcattttaaaccaaactagagataaataaaatgcaggggggggcctccaccttgtgtgttttttgcccggggttttatttcggaccgggtccctgcggccgaacctgttttccttaaagggggcggttttaaacttgggcaaaatattggacagggctgttccttggagaaaattttatcccgtttaaaattccacccaaaatcccccccggaac

SEQ ID NO: 111139 - DNA, 484 bp, Glycine max
  unsure (1)..(484): unsure at all n locations
  Clone ID: PAT_MRT3847_71368C.1
agcggcttcacttctcagacggccgtgtttctcttctggacgagacaacttttcacanaagcttttggtgatttcggattctttcggttccgtacgaccttttagttcgggatgatcctcacttcgattggacttttggcccattgtgctggtgtttttgcggcgcaccatcggatcataccccaccagtcttgatgcatttcctttgttcattgccactttcagcggactcaacagttggtcaccgccgaaaaccaaacactacgccaagctgtacagaatggcagcaacccacagcgggcaccattgcccagtctccttacatactttttcatcaacatccgaatcacatgaacttcgtccgcctctaggccataacgactctcctatcgatcgactcagcgccggagtctgcgcagtccatatttttacccatcaacaagatgatctgagttgcatgcatcactacgtgctcgcatcagat

SEQ ID NO: 111140 - DNA, 490 bp, Glycine max
  Clone ID: PAT_MRT3847_71369C.1
ctgcttgggggggggggggggggggcagcaaagaactaatcgggtgtgaggaggagaaaagccgggataaatcacgggagtgcaaagggtgtaacagtgaaaagatagacactatacggggggggggttaaatgaaacaaaaatactaaatggggccagtatgtgtatcagcgcgacggcgatggcgatataagaagaagggtgaataatagaaagaagcatcacgtgggagcgcataacacagagcttggcgacaaggaagctagtactgacaatggccggactactggcgcaaccagccatatgcgtttaaaatatagatgcgcgcctaggacaataacggttgccgcaggggccaggatataataaccagcggcgtgagatacggttcccattatactagttgtgcgggcttgttataaaattacaggggcaaccccaggcaataaccgtagacacacctggcgaaagcgtcaaaattctaagtgga

SEQ ID NO: 111141 - DNA, 1045 bp, Glycine max
  Clone ID: PAT_MRT3847_7136C.1
tagcagacggggtggtgtgttgcgaattgcaatggcagttaaccgtcctgtccttcgtgtccggctgcataggcatagactagagagagagttgcaatggccgtttctttggcagtgaaccgtcctctgcttggtcttcacgagaatgtaccattagctgttgctcatccccaattcctcccgttcaaatggccacccaagtccaaactcccctccgtcgtcggaattcgatgctcctcctcccctttcaacgacaaaaccctcatttccatcacacctaacacttcccacctcaatcccaaccctctcgcttgtcgctttcacgcttcccagtttggagaacaggagagcaacaaatacgtggaagcctatgctgtaggacgaaatattcgtatgtctgctaataaagctcggagagtgatcgatcagattcgtggacgtaaatatgacgaaacacttatggtattagaactcatgccttatcgagcctgtgaagccattctcaaaatagtgttttcggctggagctaatgctagcaataatctgggtttaagcaaaggaagtttagttatcagtaaagcagaggttaatgaagggaaaacaatgaaaagggtaaaacctgtagctcgagggcgtgcccatccaattaaaaagcgcacttgtcatataaccatcacggtaaaaggcttacctagtgagtccgtcgtggaagcaaagcctgcttaatcctatttgagacaaaatgtatgccttattatgagttcccttcccccatttcatttcatgaaaatttctgcatttcgacattatgtagttcattttctacattgtgacttgtagaggagtaatgaacatgctatttgtgtacgtccatgtaagaactgtttaaatattcaatttaatttaagtcctgaatatgaaatgattttggattgaaattggaaagaaatttttgtaacttcagtaatacttaccatatatctatacagcatttagcacgtaagcttccagtctggtgccgaattaaaaaaagggggggccgccg

SEQ ID NO: 111142 - DNA, 582 bp, Glycine max
  Clone ID: PAT_MRT3847_71370C.1
ggctcgagcgaaaaggttttatgatgttatggtccagttctccctcaggaactcgtcctggaaatcctgtcatggcttccagtgatcgttctgatgcgaagtcttggaattcgttattcttggatccttcttttgtgaagctgttcttgagtcgcatcagaaccatgttccatacactgctgctccatagttgattattgtggctccccattcaagttgaatggattggtctgtttgagacctatttctcattaacagggagactgcgtcctattatgtaatttattcatttgatttgaggattgaaacacacagatgtttgttactgcctgcttggtcgatctaggggctgcttatgcctctgtctttctcattatcaccacggaaatcattatttctctgtttggcaaatgaagcacgattgctgaatgttaattgtgatcatgttcaaatctttaattctcaacgttcatatcacttcccattgtgcatgtctgaaaacagccatgttttgttgctgtcaaccaatgaagatttttaaacttattacgtataaccggagagatgactcttgacagagta

SEQ ID NO: 111143 - DNA, 414 bp, Glycine max
  Clone ID: PAT_MRT3847_71371C.1
cccacacgtccagccgtccttcttgacgatccaaaataacgcacccacccacgcaaggggagagcctttctgttgtggtcaggagactccgggccgccggcctgagaacaccatgcctcgaagaggagaacgctggccccgcccagttacctgacgcaacagccattcaggacttcgtgagctggcctcttagagagcgagacggacaagacccaccaagcctacatcagctcgctcgggcaagggaaaagggacagcgcaacgcggcattgaataagctgatgaagctcgggcggcctgtcagaaaggcacaccgtaacaggtgggggagggaccacccccccacctgattacttgacatggatgcaccgacatgcagacataacggccccgctaaccctaagagcgggagct

SEQ ID NO: 111144 - DNA, 697 bp, Glycine max
  Clone ID: PAT_MRT3847_71372C.1
tgattgtaagccttatttactatctaaacatacaacagctagtatatatttcagtaagattcagacaaaatgttacacaatataagtgccctttttttttttttttcttaataatgctttccatcttattcacaaaataaaagccataaaacatgatataaatgatcatgatcttgcttctctatttctatcactagccatagaactttccttagacacaaaaagcaaaaagcgaagttccagcagtgaaatttccaaggtttaatccaacacctatcttatatccatttccaaaatatatacacccatcactgactgacatgccaccatacactgtcgatccagtctcataagaccattcaattttaccagtcttgccgttaattgcgtaaataggccctttttgatttgtggatcctgcaaagacaacgccgttagctacagtaacaggaccattagcagtggcattactagggttggctatggaccacaaaatcttgccactacttgcttccattgctacccaccctccactggttgtagtcttgttggatggtttaagagtgaagttctggcccttcgaattagcaatgttggtggagaccctttctttgtcaggtggtggtccccaagtttcaccctcctgttagcccaacaaggccccagctttcgtaaaaccaaaaaaaaaattggcccg

SEQ ID NO: 111145 - DNA, 248 bp, Glycine max
  Clone ID: PAT_MRT3847_71373C.1
ccgaaacgcatcacacagaattggcgtgaggattttcaatatgaaaaaaaacaagatttttatcctgtggactatgtataccaagtataggggtccataccctaaagctttgggcccttcctacgaaatccaccaaacaatctatgttagtatcaaaggagagttacgagcctcgctagaacggccctatcaaatcgaatgggctgatgggccaaaaaaaaatcttgccgccggtctaaggccatcat

SEQ ID NO: 111146 - DNA, 1223 bp, Glycine max
  Clone ID: PAT_MRT3847_71374C.1
tttcataaggcgcttgctggtggggttgttccacctttttctttgtctaatgctggatccgaaaattgccttcccgctagagaaaatgggtgggggagattgactaggaagcttgctagtggtatcatgaaaggcttgttcacatcctactaagtgctgtgagtctagtgtgaacatcattgaagaggggaatcaacatatgaatgttgatcctcctttgccaccttcttccaacaatgtgggtggttcgcggggttcctttgagtgtttgggctcggtgacgggaaaggggaatggtcagggctcggctcaggttgttgtccctagtgttgttggttcatcaatgccgctgccaccatcgcctcatcatcgagcatccgattcttttgcttgttttctaaggagcagccccaaattcagttccaactcccccactctgtcgcccaccagttcggattatgcaagttcctttacattttcgccttcatcgactgacttgtcaattgtgtcttctcggcagctatccccttctggtctcccacgcgtccgacccgctcatgtgaaagacgcatcttcctcagagtttcgctccttagttaagaaagaaggtgagacatttctggctaatcacaccttggtaggagcaaagtccagtttgcggcgcaaaggaacttccctctccattgcagagcgcagagggaataaccccccacctcgcatgttgctaccctcagccagcgaatcatcccgtgccagcaaggtccgggtaagatccaggtcattctcattgcctgtcttggatgatactttgatgaaggatgttagttgcaagcaaatctaaccgtgaaaacagtgggaaaacggctaatatgagatgttgatattattagtatagctgttgagagtaaggttaatggcagaggatcattgtaatatggtactgtgtcatgttaaggtaggttgttatgcttgaagtagaagacttctaagagaaagttaactttattacagtggttcagtttcttcctgtataggtaatatagccatagttggctcaaatgatctagttttagaggtgaactttcactcctgtttgaatattggtgcatgcctgcagggtgtagtgtaggctgagcaataaaaaccacaccaaacatgcaggcaatgcactgatagcatctcaagtacataacaattatcaaatttaagtgaatatagagtct

SEQ ID NO: 111147 - DNA, 256 bp, Glycine max
  Clone ID: PAT_MRT3847_71375C.1
gagcgagctgagtggttgtgtggtcgcgtctcggaaaccggtagcgcttgcagcatggctgaccaactgactgaagagcagattgcagaattcaaagaagctttttcactatttgacaaagatggtgatggaactataacaacaaaggaattgggaactgtaatgagatctcttgggcagaatcccacagaagcagagttacaggacatgattaatgaagtagatgctgatggtaatggcacaattgacttccctg

SEQ ID NO: 111148 - DNA, 351 bp, Glycine max
  Clone ID: PAT_MRT3847_71376C.1
ggcacaagtgaatttgttggtcgaaatatgtagaatcagtgtgagtgcttatgaacgtccttgttttctgcgttgctacaattttgggagcatgacactaccatgcttacgatatgtaccatctccgattctccactgcccatggtgaacgtactccggaggtgaattgctcaagttggaggcttgctgtggaagcacacatgatctttggctttgacaccattcctgaagagtgcgttcaatcaacaaaggtatacagccatcagcagcattatagatcagcatcctgaacagttaaatccaaggcttatttctatgccatagatctcgaagtccatcccaaggacacat

SEQ ID NO: 111149 - DNA, 406 bp, Glycine max
  Clone ID: PAT_MRT3847_71377C.1
gaaaggattaaaattgactatctgagtcttagagctcattttgtgacacactcatttgctattacactcaaatgctcatttgaatatttggtacaaaatatagtattaatataagttttacaagaaaatagttcaaaattcaaactttattattttttaatttattatatttttataatcttatattttattttttaaaatataatatataagattaaattctattttcacataaattagaatatttatacttatataagttttattttttttattatatttatcataggtagtgaattttaaaatatagggggactcaaataattaattaaaatagagggaccgatttggtgaaatagacaaaataggaggatcaattttacaatttagcgaaaattgtatatat

SEQ ID NO: 111150 - DNA, 225 bp, Glycine max
  Clone ID: PAT_MRT3847_71378C.1
atttgtggtctctaatccaaaatcaaaaaatataatatgttatttttcttcagataaattaatatatatcaaaggctcttctcggtagaataaattaacaatacatattatctttgaataagaatgaacagactgatcgtatagctgaacccacaatatgggataagaaaattaaggttttgtaagtaaaagcgaataatatataaagtgtgatatagtaatttt

SEQ ID NO: 111151 - DNA, 380 bp, Glycine max
  Clone ID: PAT_MRT3847_71379C.1
ccattctaagatttgtattatgaaaataagggggaatccaaaatatgaaatactacaactttttatcgatacaatggacaagaaaaactactggcatcatggtttaaaaatttaacaagttcataaattgtgtgctgagcaagcataaatgattaaatgtaaaaaggccagcaggaaaaacgatcacacacaaaggtagctttttgcgatcaactgtgttctgtgggaatccttaagtggattccccacatttagggggacgaggttattgacatatacgtacagtgaatgtttcagttgctataaaacgaactgaaatggggaagaatgctgatgattcggcttgtggaacaacacattccattgacccactgcggttt

SEQ ID NO: 111152 - DNA, 479 bp, Glycine max
  Clone ID: PAT_MRT3847_7137C.1
cggctcgagtacggctcgagaagacgacagaaggggagagagagtggtgtgttgcgaattgcaatggcagttaaccgtcctgtccttcgtgttcacgagaatctaccattagcattaactgttgctcctcaccaattcctccccttcaaattcacctccgttggaattcgctgctcccctttcaacgacaaaaccctcatttccatcaaacctaacacttcccacctcaaccacgacactctcgcttgtcgctttcacgctgcccagtttgctgaacaggagagcaacaagtacgtggaagcctatgctgtggggagaaatattcgtatgtctgctaataaagctcgaagagtgattgatcagattcgtggaagtaaatatgatgaaacactaatggtattagaactcatgccttatcgagcctgtgaagccattctcaaaatagtgttttcggctggagcaaatgctagcaataatct

SEQ ID NO: 111153 - DNA, 256 bp, Glycine max
  Clone ID: PAT_MRT3847_71380C.1
tacacattgaaggtataaacaagttaccaacaaaagaaccatttgacacaggaaatgacccttcgacgaaagagatagtgtccggtctatttgtgacaggaacgcattaggtattcctttctctttttcctcttccattaaaatttggaatctttaaatcatagattgcgtgaagataaaatagatatttatgaaaggtataagagaacatgtcatgatgtcaagcttttgcattaagttgaccacaccctatacc

SEQ ID NO: 111154 - DNA, 655 bp, Glycine max
  unsure (1)..(655): unsure at all n locations
  Clone ID: PAT_MRT3847_71381C.1
ccacgcgtccgtgtttcctaccaaaatggatttgctggctaatgttgcagtggagaataagaggagagtgtgtctggtttgggaagatttgacagtggtggcatcaagtgttaacaatagtccaaaaagggaattgttaaaagggttaagtggttatgcagaacctaaccggattatggcactcattggtccttcaggatccgggaaatctactgtacttgctgcactggctgggatacttcccaccaatgttagcatgacaggaaatgtactactcaacgggactaccagaagtaccggctgcagagatatttcttatgttactcaagaagattattttttgggaactctaacagtgaaggaaaccctgacttatgcagctcatttgagacttcctgctgatatgactaaaaatgagattgataagggttgtaaccaagatattggctgaaatgggtctgcaagatagtgcagatagcagacttgggaattggcatttgagaggcataagtagtggagagaaaagaaggcttagcataggcatttgagatcttaaactcaacctcatgtatgtttctggatgaacccactangtggttggatagtgcagctgctttctatgtgatttcttctctgtcaacattgcacatgatgg

SEQ ID NO: 111155 - DNA, 421 bp, Glycine max
  Clone ID: PAT_MRT3847_71382C.1
tgcctcccttcctgttttttatcaactaatagttgggtttattcaatgccaggggcgctttaaatattggacaaaagccatttttacaagcagcagcaaccttggaggcaactgtcacaccccattggctgaaatgatgatgaccacaacgaagacgaggtacaaacattgtggaaaggggaatataggacagaaaaagtttctggtggaaaacacaaaaagatgccttcaaatgattccttggcaaaccactacaagagttgcattcaatcagatgatactgaaaaaaaaaaaaagatcaaaaagacaagggaaaagctaacacacacacacacactattgtaaattaacggggattgatgcactcctcccaagactttccaaagatttgaagccctggggatagatttatgctagctac

SEQ ID NO: 111156 - DNA, 2460 bp, Glycine max
  Clone ID: PAT_MRT3847_71383C.1
atttcacgtccggtttactatttccaattaaggcttcccgatctcaagccgcaacattattcctatttccgtctcttcttttgatctttacaatattcttttacttcctccgattttgtgccaacttcaaatcttcaacattcacaacttccaatgtgctgtctttgcagtttttattgggtaacaatgcaacatttttcacatcgacatcaggatgttgggtgcgacagtagtagaaatgggtcaaattttgatttttccgatgatctttttaacaatctacgtggttcagatattttcccatcttcacattggacctatcattcacagaccactgaaccttcttgtattggattaaggccgctaaattctccaaatacagtttctggtatgggttcgtatgaccagctcatccagcaatatcaacagcaccaaaatcagtcccagttccgccttcaaatgtcagctgtaaatcagtcttttagggatcagggcatgaagtctattcaaactgcacaaccggcaccagatccatttggtttgctcggcctgttaagtgtgatccggatgagtgatcctgacctgacgtctcttgctcttggaattgatcttactacactggggttaaatttgaattcatcagaaaatcttcacaagacctttgggtctccatggactgatgaatcagctaatggcaattcaaagttcaatgtgctacaatttgtttgtgaatgattgcaaggtactattcgtctaaggtatggtgtgctttcttaagggtaaccattggttatctaattttacagcatgtcctaacatgaagcacaattttacgccgccagtgagctttacaacagaggtaggttttatcacaaaaaacgtctgtttgaggattagaagagttcccaccatagacccgttgataaaaacaaacacatacgagagaggatcttaccactgtttcgatccaggcatatttgaaaccgtccgaaaggataattttgttcttcttgatgtaatgttggagaccagaccacctctgcgtctagtattaagagggaacacttccctgctattccaggattcaaaggtggtaattcagattttgctatggatatgtaccagaaagaacaacttcatgataataccatgtcaatgatgcaatctcaacatttctcccagatggggaggactgctggtttcagtttgggaggattatatccatcacatcgtacacaacagcaacagcagcatgccccttctgtcagtagcaatggtgtctccttttcatctgtaaacaatcaagatcttctccatctgcatggaacggatatttttccatcttcacactcaacatatcattcccagaccagtggacctcctggcattggactaaggcctctgaattctccgaatacggtttctggtatgggttcatatgaccagcttatccagcagtatcaacagcaccagaaccagtcccagttccgccttcagcagatgtcatctgcaaatcagtcttttagggatcagggcatgaagtctatgcaaactgctcaatctaatccagatccatttggtgcactgggcttgttcagtgtagtccatataagtgatcctaacctgaaatatcttgctcatgggattgatcttacaacacttgggttgaatttgaattcaacagaaaacctttacaagacttttcggtctccgtggtctgatgaaccggccaagggtgatccagagttcagtgtgctacaatgttattatgctaaacagtctccttcccttcatcaaggttatttttcaaagttttcagtggaaactttattttacatattttacagcatgcccaaagatgaagcacaactatatgcggcaaatgaactttacaaacgtggttggttttatcataaagagcatcgtttatggtttataagagttcccaacatggagccgcttgtcaaaacaaacacatacgagagaggatcttaccactgttttgatccaaacacttttgaaactgtccggaaggataattttgttcttcattatgaagtggtggaaaagagaccttctgtgcctcaacattgaggagggaaaaagaaaccttaaatgtaaagtttttatttatggatttaatttttaggacgcaagtcattttgagtcattagtgttccttcaatttggcgtatttcttacattctcgtaaatcttgatgcactgagggctgttatccctttccccccagccataatgtagttaaataatggacgttaggataatctggctgtctggaagtggcggatatggatgtcttcccaatgcacagtgacacagttatacacctgactcctgggtgtctagtatttttttagcaatttactgcatgcacaatcataaataaaaaaaaaaaaaaaaaaaaaaaaaaaaaaaaaaaaaaaaaaaaaaaaaaaaaaa

SEQ ID NO: 111157 - DNA, 1298 bp, Glycine max
  Clone ID: PAT_MRT3847_71384C.1
cggacgcgtccgcccacgcgtcccctcttgcttctttcaacaacttagcattgtattgtcttcaaactttgcttcttccatactttcttctttttccttagccatcattgattgttgcctttcttggctttaaaatggagttcgaggaccgcttcagacaccaggctcagagaccaaaatatgactgccttctttttgatttagatgacactttgtatcccctcaaatctggtcttgcaaaatcatgtctccaaaatattaaagactacatggttgagaagcttggcatacaccctagcaaaattgatgacttgtccaacctcctttacaagaattatggaacaactatggctggtctaagggcaattggatatgactttgactatgatgaatatcacagttttgttcatggaagattaccttatgagaacctaaaaccagaccaagttctgaggaacctgttgctgagcctaccctatagaaaacttatcttcacaaacgcagacaaagttcacgcggcgaaggcgcttaacaggcttggattagaagactgctttgaaggaatcatatgctttgagacccttaatcccatccacaagagcattgtttctgatgatgaagatgacattgagtttgtaggttcaagaaccaccaatccaaccaccacttgtaatggttcaggcacctctcaaatctttgacatcatagggcattttgctcagctcaatcccagtgcagtcttgccaaagacaccaattgtttgcaagccatcagaaaatgccattgaactggccctcaatatagccaatcttaacccacagagaactttgttcttcgaggacagtacccgcaacatacaagctggaaaacgtgtggggcttcacactgtgctggttggtacatcacaaagatgtaaaggtgcagattatgctttggaaagcattcacaaccttagggaggctgtgcctgaactatgggaggctgatataaaatcagaagttgcataccctggaaagctagctgtggagacatcagtcacagcttgagattattattaagtgcatgaaattaattaagccccttcaaaattgttcatttaatcaaaattgaaaacccgaccaccaacaaaaaaaaaagagagagagagaagaagcccccgggaattcccccaacttcagatgatgtagttgtagttgatgtagatgctttgtaagttgcaataaaatagtcattcaaataagtcctccttttttgccttactatattaagaatgtataactaattgccttcttcattca

SEQ ID NO: 111158 - DNA, 686 bp, Glycine max
  unsure (1)..(686): unsure at all n locations
  Clone ID: PAT_MRT3847_71385C.1
aacttataacttagcattgtattgtgttcaaactttgtttcttccataccctcttcttctttggccttaaccgtcatatttggctttgaaatggagttcgaggaccgcttcagacaccaggttcagagaccaaaatatgattgccttctttttgatttagatgacactttgtatcctctcaaatctggtctggcaaaatcatgtctccaaaatattaaacactacatggttgagaagcttggcatagaccctagcaaaattgatgacctgtccaacctcctttacaagaattatggaactactatggctggtctaagggcaattggatatgactttgactatgatgaatatcatagctttgttcatgggagattaccttatgagaacctaaaaccagacccagttctgaggaacctgttgctgagcctaccctataggaaacttatcttcacaaacgcagacaaagtccacgcggctaaggcgcttagcaggcttggattagaagactgctttgaaggaatcatatgctttgagacccttaatcctatccacaagagcactgtttctgatgatgaagatgatattgagtttggtgggttcaaggaccaccaatcctaccactntgtaatgggttcaggcacctctcaaatctttgacattataggggcatttttgctcagcccaat

SEQ ID NO: 111159 - DNA, 633 bp, Glycine max
  Clone ID: PAT_MRT3847_71386C.1
ggctcgagcaaaatccaatattcaccatattcttgaaccaaattaacaagcaaggctagtgtactctacttgcagcctgaagctactagcaagcatcgtataggaagatggagaagaacaaagttgatgaaaatcctgaagaatttaactatgagatgaaatgggttcgtgattcttcattggatcacaaaggaagagttcctctccgagcttcaactggttcttggaaagcttctctcttcatcattgcaattgagtttagtgagagattgagctactttggaatagctactagcttggtcatttaccttacgaaagttcttcatcaagaccttaagacagcagttaaaaatgtgaactattggtctggtgtcaccaccttgataccattgttaggaggattcctagctgatgcttacttaggccgttacaccgctgtgatagcatcatgcattgtttatctcatgggtttggttctgctttctttgtcatggttcttaccaggtttcaaaccttgtgatcatcccagtacatgcaccgaacctaggaggattcatgaggtgggtttcttcctaggcatctatttaatatccgtaggaactgggggccataaaccttccttggagagctttg

SEQ ID NO: 111160 - DNA, 432 bp, Glycine max
  Clone ID: PAT_MRT3847_71387C.1
ggtcgagccgacacggcgcggagggaggaagacttggttttggtggtggagaatgatggtgaggaagagagggaccgagtgtgatgaatatggggaccatggggaggaataccggctattaatcgaaagcaaaccatcttgttcaatgaatccaacgatatgtgacaaacgaatgacaaggattcttcaatctcataaatcatcctattatgaacctaaagcaagctattgtgaaccgcataccttttcttgtcttgtgctgaccttagatctatttatttagggaaatgatactttatcttatgtaaacgctactataacaaatctttcaaatcgtctaaaaaatgacacatgtagtgtaaaaagggacaaacgaattggttaaagtgatcaggatattaatttagcttcataggaaatcaatttagcatc

SEQ ID NO: 111161 - DNA, 545 bp, Glycine max
  unsure (1)..(545): unsure at all n locations
  Clone ID: PAT_MRT3847_71388C.1
gctctcggcctgggaggagcatcaggctctgttgcctccggatcggggcctggtgcctgggcttccactcgcggcgctgtgctcgggctcgggtgcccactgctggagctgttcccgccccacagaccggccgctcaaatcttcaaagaaggattaagcctaagcaaatttgtctctgccatggatgagaatgaagtactaaaggttgccgatcgaagtcttattgttgattatgaatattcaactcaaagctctatcaccggtgatcaaagcagtggcattggcagcaacacacattggattcgtaaagctgaggagtgcatacctggtgtgataagagttgggttgtgttgcacagctcaagaacctaaagatcgatggagcatgagagaggccataacaaaattgcaagcgacttgtgctctctatgttggccttgtgaagtaagcctcaagcctggatgcactcattgtagaaaatcatatcatatgtagtcanngatgtggccataaaaacaaaattgagtagttagacatataattata

SEQ ID NO: 111162 - DNA, 291 bp, Glycine max
  Clone ID: PAT_MRT3847_71389C.1
aggacaaaaggaaaaggccccaaattcaatttaaggggaccctggaactcgaaattattgaggacaacgggccagattttaaaaaacttgctagaaccttttaaacttggcatattttatttgcgcctaaaagattggaaaagcttagaatgttaccccccagtttcatcataatttattgggctcggatttggtccacaaccttaaggaaccggaacatttacttgcccaagttgtttttgctgcaaatacaaactgggagaaagtatccctctgaataacgttcttctt

SEQ ID NO: 111163 - DNA, 246 bp, Glycine max
  unsure (1)..(246): unsure at all n locations
  Clone ID: PAT_MRT3847_7138C.1
ccgacgcgtcagnctacacatccattctagtaacatcatagtatacgcagatgacgcgtgtgatgcacaagctcggtctgcacgtcatcttcatggatctgagaagcaagctctctgtacttaggctgacacggacgctcgcccccgggatgcatcttatgcgaagcaggatcactttactgatcgtgttcttcaagtccaccccgatgaggtcgcaagcatctctcagtatgcataggctggctt

SEQ ID NO: 111164 - DNA, 349 bp, Glycine max
  Clone ID: PAT_MRT3847_71390C.1
gaactcaacacatctgacactaccgtgatgcatttagtttaacacacaatccttctgggtgcacattaactggtcagggggtgtaactactagtgtgcggtggaggatttacaaagaggtagattatatatttgcgccatgtgaacgcagatgtggcgacgctctagtactgttgaagaactaatgacaggcttgtggggctgacttttgcgggtggaggcgttccgggtgttactggcattatgattactacaacatcagcagcagccatgatgacacttgcagggcgagccagaagcgtgttagcctaccccaccaataggaaacgggctggtgccaggtgtgccca

SEQ ID NO: 111165 - DNA, 1765 bp, Glycine max
  Clone ID: PAT_MRT3847_71391C.1
ccttattgtacgtatagcacaaagtcgatccaaatcctgaagaatttaacgatgagatgaaatgggttcgtgattcttcattggatcacaaaggctgagttcctctccgagcttcaactggttcttggaaagcttctatcttcattataaggtctggctatgctttgcatgtcattgttcttactagggttgaagccatgtgatcataataatatgcgcactgaacctaggaagattcatgaagcggtatttttcctaggcatcataaagcttccttgcaaagctttggtgctgatcaatttgatgataataatgccaaagaaagaaggcagaaaatgtcctttttcaactggtggagttgtggtttgtgcagtggattcattctagggtcgaccgtgattgtttatgtacaagatcatgtaaattggggagttgctgatatcattctctcagtggtcatggttgtatcattgctcatattcttgataggaaggtctacttatcgttacaggacaccaattgggagccccttgactcctatgttgcaagttattgttgctgctatttccaaaagaaagcttccatatccttccaatccaactcaattgtatgaagtttccaagtctgagggcaacaatgaaagatttctggctcacaccaagaaactcaaatttcttgacaaggcagcaattattgaaaatgaagggaacatagcagagaaacagagtccatggagacttgcaacagtaactaaggttgaagaactgaaactaatcatcaacatgatccccatttgggtgttcacattaccatttggaatatgtgcttcccaaacctctactttcttcatcaagcaaggtgccatcatgaacagaaaaataggcaatggatttgtggttcccccagcttcaattttcactcttgcagccatagggatgatagtttcagtgatcatctatgacaagctccttgtgccagtgctaagaaaactaacaggaaatgagagaggaatcaacatcctccaaaggattggcattggaatgatcttctcagtcatcacaatgatagctgcagctttggtggaaaagaagaggcttgaggctgttgagatgaatggcccattaaagggttctttgtcaatgagtgccctttggttggccccacaatttctcatcattggatttggtgatgggtttgctcttgtgggcttgcaagagtatttctatgaccaagtgccagactcaatgagaagccttggaatagcactttaccttagtgtcattggagctgcaagttttcttagtagtttattaataacaattgtggatcatgtcacaggcaagagtgggaagagttggattggcaaggatttgaatagtagccgcttggacaaattttattggcttcttgcagccatcaccacattgaacttgttcgtgtttgtgttctttgctcgcagatataactacaagaatgtgcaaaaggtggcagtggctgattgctatgaaggcaaaagtgatgatggtggaccagagactaaggtttgaattaatgaaattcagttttattcagcatagagggccaaggtttcatcttctggtgatcaattagaatccttcaatttcatccttagcatagtgtcggtaacttgtgatccaaaccaagattttttgtttgtcttagttgtttatggtgtccatgtaatcatgtaatattatgacaataaaattatgtatgtaattgcccaaaaaaaaaaaaataaaaa

SEQ ID NO: 111166 - DNA, 2206 bp, Glycine max
  Clone ID: PAT_MRT3847_71392C.1
agccaatattcatcgtatacttgaacaagcaaggctagtgtattccacttgcagcctgaaaccactagcatcatacgaaaagatggagaagaacaaagttgatgcaaatcctgaggaatttaacgatgagatgaaatgggttcgtgattcttcattggatcacaaaggaagagttcctctccgagcttcaactggttcttggaaagcttctatcttcattattgcaattgagtttagtgagagattgagctattttggaatagcaactagcttggtcatttaccttacaaaagttcttcatcaagaccttaagacagcagttaagaatgtgaactattggtctggtgtcaccactttgatgccattgttaggaggattcctagctgatgcttacttaggccgttacaccactgtgataacatcatgcatcgtttatctcatgggtttggttctgctttctttgtcatggttcataccaggtttcaaaccatgtgatcatactagtacatgcaccgaacctaggaggattcatgaggtggttttcttcctaggcatctatttaatatcagtaggaactggagggcataaaccttccttggagagctctggtgctgatcaatttgatgataataatgccaaagaaagaagtcagaaaatgtcctttttcaactggtggaacagtggtttgtgtagtggaatcattctaggagtgactgtgattgtgtatgttcaagaccatgtcaattggggggttgctgatatcgtcctcacaggggtcatggctgtctcattgctcatattcttgattggaaggtcttcttatcgttacaggacaccaattgggagccccttgactcctatgttgcaagttattgttgctgctatttccaaaagaaagcttccatatccttccaatccaactcaattgtatgaagtttccaagtctgagggcaacagtgaaagatttctggctcacaccaagaaactcaaatttcttgacaaggcagcaatccttgaaaatgaagggaacatagcagagaaacagagtccatggagacttgcaacagtaaccaaggttgaagaactgaagcttatcatcaacatgatccccatttgggtgttcacattaccatttggaatctgtgcttcccaaacctccactttcttcatcaaacaaggtgccatcatgaacagaaatataggcaataatggatttgtggttcccccagcttcaattttcactcttgcagccgttgggatgatactttcagtgaccatctatgacaagctccttgtgccagtgctaagaaaactaacaggaaatgacagaggaatcagcatcctccaaaggattggtattggaatggtcttctcagtcatcacaatgatagtggcagctttggtggaaaaaaagaggcttgaggcagttgaaatgaatggcccattaaagggttctttgtccatgagtgccctttggttggccccacaatttatgatcattggatttggtgatgggtttgctcttgtgggcttgcaagagtatttctatgaccaagtgcctgactcaatgagaagccttggaatagcactttaccttagtgtcattggggctgcaagttttcttagtagtttattaataacaattgtggatcatgtcactggtaagattgggaagagttggattggtaaggatttgaatagtagccgcttggacaaattttactggcttcttgcagccatcaccacattgaacttgttcatgtttgtgatctttgctcgcaagtataactacaagaatgtgcaaaaggtggcagcggctgattgctacgaaggcaaaagtgaggatgatggatcagagacttgggtttgagttggtggaattcagttctatgcagcttaattggcaaaaggtttcatcttctgattatcaaaatatatatatatttttctactattagaatccttaagttttatccttagcaaagcgttgataacttgtgctcctaaccaagagtttttgtttggtttagttgtttatggtgtccatgtaatatgacaataaaattatgtatgcgattgtcatttcaaaaggagtcattcatgttttcatcttattatctcgtgttttgggaaggtcttgccttttttttttttaagctaccttaacttcaccatcttgcactctgcaaagtctgaaatgacatat

SEQ ID NO: 111167 - DNA, 399 bp, Glycine max
  Clone ID: PAT_MRT3847_71393C.1
tgttttacggctgcgagaagacgacagaaggggggggttataaggagaagattcatgtcttcactcaagaagaagaacccccactacgcgcttccgagaattgctatgtattgctactgctgatgcaaagggagagaggaacttcttctgccacgagtttaatgcatgctactttattctctattatcggggaattgaagcgcagaggaccgattgtttgctagaccaagcaaatgaacctgcatactggaatatatattttaacctggcaccttcatttgtctctatctatctgtctctctctatatatatatacggggttaatcactgactgcctgtatcttttcacttattggaagaatgtggtttgatttaattactgtgaatgaagatcacata

SEQ ID NO: 111168 - DNA, 415 bp, Glycine max
  Clone ID: PAT_MRT3847_71394C.1
tggaaatgaataaggtctccaaccacggattaatcttcagggatatcttctatttaaccggataggtgcaataaatgagggggatgatcaaatcccatttgctcatgttatgggacttatttcttattaactatatacttcacttcatataaattgtaaaggatagtttgaaaatttatattccagaattgagttgtgtattattagatctaatcactattattagttccttttttgtaataatatctttctttattttgtaagtgtcatatttaaatcttcattccttcttttttatcattgttatctttattttgagtatttttatttgtattaataatttttaattttcttttccatatttacttttttttttatgtatttatcattcttatcataatattttttttttttt

SEQ ID NO: 111169 - DNA, 304 bp, Glycine max
  unsure (1)..(304): unsure at all n locations
  Clone ID: PAT_MRT3847_71395C.1
ttggngttttgtcaattacaaaaaaaaatgtaaatcttataaaaaaaaaaaaaaaactaaaaaccacatgcaaactgatctagctaaacatcttgacttgataacaaaattgtagtgcttgggaggcgaaaaacctaacatcaacatttggatcctcactgggctcaaccaaaaagggacaaaatgtactttcaaaaacaaactgaacaaaattgggatgaaaaactgcaacactttaactacattgaatttaatattggggaccctatcttttgatgcattaataaccaaaaggaagcagttt

SEQ ID NO: 111170 - DNA, 367 bp, Glycine max
  Clone ID: PAT_MRT3847_71396C.1
cgatcctaccgaatacggggcgcaagaactgagcaggcaggagttagttgtaggatccggggagacgcgattgcttggggcaaagaagagagcagaccggaaacaaacaatggacaaaacccaatacaaagcactaaatggacgaacagcaaccacaacaagtcacacgtgaatcatcaactactaaaagggtcactgcctacgcgtaacacgaattcaaaaagcgaaatgcaacaacaaaacaacaagatagtcacatagtgagcgacagttaaagatcttactcgaaagaactggaccacaactgatcccacaccagctcacgatcagagcccgccctcacttagtcccaaggcaaacgcaccaa

SEQ ID NO: 111171 - DNA, 464 bp, Glycine max
  Clone ID: PAT_MRT3847_71397C.1
aatcacgaggcacggtaacaaggatgggtgttttaaaaagccgatttaaagtttcaagctaaaactttttacacttataaacttaaaaaaatataattttaaaaaaaaagttttaaaaaaaaggttttttttgcttggcccttccaaaggggcggccactataaagtgggccaataacaaaggggcagggacggcgctgaaaagggaaccttgaaaatgttgggggcagggtctttggggttggaccaatcttggtggccaacgagcgggggctttccaaagcggggtctgaaaactgactttaacttattttcaaaaagaatttgcctcagggccttgggagcaggcccttcttggggataaaaattgggcttaaaaaatgtaccttgaaaagaaagggatctttgaacttggagctttctttccacccccttttgtgaagcccttttcttaggacccaatgc

SEQ ID NO: 111172 - DNA, 313 bp, Glycine max
  unsure (1)..(313): unsure at all n locations
  Clone ID: PAT_MRT3847_71398C.1
acgtcgcangcacgcgtacgtaagctcggaattcggctcgagccacaagggcctgaaaganccgctcatgtctgtcaacggagcggtgtgggggcgtgtgcggagccgnctccgancctttcccgagaatctngcggcctgcggagtgaggcctcggcgtatgggaantgcgtgcaggcntccactgccccaggangccgcctgagtnaggacctgtgcgtncgcnanttcgangccctgcggagctgacttcgcngncgcggccaagaagaccatgatggganaatcctaggaagagcaatgggcacagatn

SEQ ID NO: 111173 - DNA, 175 bp, Glycine max
  Clone ID: PAT_MRT3847_71399C.1
gttggggggggacccaaaataattttttttaaggttcttggcaaaaccattggtaaccggggggaatatttggaggttgacttgcttgccttgagaatttccgccttaaagccttaacctggggttaacaagttcctcctccctaacaatttacattatggaaaatttttacata

SEQ ID NO: 111174 - DNA, 301 bp, Glycine max
  Clone ID: PAT_MRT3847_7139C.1
gggagaacaacaacttaatgcaaataataggggcctgagggtacaaaggaaaataaattgaaggggtacccaaaacaggggaaaaagaaaaagaaccaaaaggggaaattaacggttccattcaaatattttatttccaggaccaaaccctgtctagaaaacaaaaaaaaggttggcccaacccaaacctaaccctcctaaaacctctttaaaaaaaatgttggtcttggttcccctctaatcgttggaatcaaggacaggcccagggaaaaaagcccccccctttaaacaaaaacccccc

SEQ ID NO: 111175 - DNA, 137 bp, Glycine max
  Clone ID: PAT_MRT3847_713C.1
atatggttggtgactaaacagagaaaataaataaagtaagagcacaatcagagcattaagagaggaataatgcatatggcaatttcgttaagacgaggtgcacttggggattctagcttccatctgagtacattaac

SEQ ID NO: 111176 - DNA, 431 bp, Glycine max
  Clone ID: PAT_MRT3847_71400C.1
aataattttttcttttttttttttttttttttttgtttttttttattttttttggggaaaaacaccccacctaaatttcattggacccacctaccatgcattactaaacctttctattccacgataaataaaaaaccttagcaagaaagtcccttgatcccccccctttataagaattattatagaacttgggtgtttaacaatttaccccctggctaaaatatcattggttgttctttttattcaaaatcccaatgaatttcccctttcccatcaaatgaatagaatcatcccctcccggaggcataaaaatcattggctgcttctcacccaccggggaaatgtttcactttttcggattgaaccccttttgtttttaactttaaagctcttaagaattccccaacgtaaatacttgagaacctttttcc

SEQ ID NO: 111177 - DNA, 801 bp, Glycine max
  unsure (1)..(801): unsure at all n locations
  Clone ID: PAT_MRT3847_71401C.1
acgagaatccctgctggtttatttttaatttttaggagaatctttgttagcttggcaagaaaataatttcgttttattattttcttactcgatcaatcaattaattgcatattacatgcacctcgatgaatgttacatgttttaggtctctgttagtttttttttaggttaatcattgttagcctggaagaaaacaatttctttttattattttcttctgaacattattaattaattgcatatatcatgcaccaatataaattattacatattttaaaggtaattctcatgacattttcatttgaaatatgactccttaataagattaataatggcttaaaagtaagcaatattctatcataatatgctcattctcctgtgaataacaatttcttaattttttcttctctttcagggtaaactccttaattaatagtttcctaaattaatgcccgtttatgacttgtaagtatatttaatggatacgcaattagtcctacatgaaattagtgctttgattgacataataaactttcatttacacttatttctcatggaaatttcactaaaatgacctatgattaagtaactacaggctaaactgaaggaacattatgtcataacatatttaatatgcttaccactagcatagtgtaagaattaacgaacacatttcacggttaattggtcatttgatttgcatgatcaatattgntttgcagcagtaatctatttatttgtttattttaattaacgccgctcaaacattggttatcaattgatgaacaaccctttggagtt

SEQ ID NO: 111178 - DNA, 187 bp, Glycine max
  Clone ID: PAT_MRT3847_71402C.1
ttttatacaactcttgacatatacaaggctttattttttttatttaagtacatcccccaattccagctacacaggaaaaactcgcttacgggagggaggcctctatttaatctagactccatcacaccttacactcacttcaaataaaaatgtttcaaaaagggtatacctctcgacaaaaacctta

SEQ ID NO: 111179 - DNA, 392 bp, Glycine max
  Clone ID: PAT_MRT3847_71403C.1
ctttgccttgatttttgggtcaaataaataaggatgttacattggagtctgtgccattgcttccttccacccaaacccacaacatagacgacatcttcttctgcaacacaacaaccaaaacacccttcacttgttttgtttacttaactcgcacttcctcttctccaatttcgaggtctcaattccggctttgaacagccacaagcacgcattgcttgttcaaggttcaaaccatcattcaagacattcatggaagcagttaatgaaactagacctgtttccttctgatatataagaaaaaggttcacatggtttctacagacaaaagtgcggatcaaaatatcccttctgatgaattgcagcagagagtgagtcctgattgtggtactaca

SEQ ID NO: 111180 - DNA, 319 bp, Glycine max
  Clone ID: PAT_MRT3847_71404C.1
gagagacatgaaaaaaaatgctttaatttatttaaaaaaaaaaaaaaaaaaaaaaaaagaaaaaaaaaaaaaaaaaaaaaaaaaaaaaaaaaaaaaaaaaaaaaaaaaaaaaaaaaaaaaaaaaaaaaaaaaaaaaaaaaaaaaaaaaaaaaaaaatggccgccctttttaaaaaatccaacttaacttacccttcaatccaacttaaaacctttttatttgggccaccaaaattaaataaactgccccttttttaaaaactattgcccttaaaaacccttgcctttcccaaatttaaatcctttcaaaaaaatcccct

SEQ ID NO: 111181 - DNA, 521 bp, Glycine max
  unsure (1)..(521): unsure at all n locations
  Clone ID: PAT_MRT3847_71405C.1
gcatgggtctagctatctcgatcgaactgtccaaggtcctgtcacaatttagtgcagagttgtgatgtaacaatggtttaatggaagggtggggatagttaggcctaacgcgcgaagatataaaacggaagcccccggccaccaggaggngcgtgtagggaaggccaacgccgtaagccgaaattattaatatagcgagtagcaataacaactaaggatacattcgacactgccaacgcagcagccaggcgcatcctgcgcgctgtaaccggaacaacgtgtgtgtggtaggacagccacgaaaagtcgccacagaaataccacgtactacaacggcatacgaattccggagcgccaattaaataccagtggaaacaaccttaaggtaatacccaacaacctgcacagggccttggatcgcttaggtaatagccgcctgaagttagacgtgcggtacgtggagcataacaaacgtgttgatcccagagcgcaacacacgccataatgtggtgcgtattagg

SEQ ID NO: 111182 - DNA, 449 bp, Glycine max
  Clone ID: PAT_MRT3847_71406C.1
gaaactcctcagagccaaagctgttctcttttttcatctgggtatgcaatttccttcttgttatcctctttggtctcctggattccataatctgtgttaggaaaacttccacatccaaggtttttctttaccatcatcagcataatcgagttcttgttttgttttttagctttgtaatttcttccttgtaaattaatgaagttctctgggtgttgtcgtttgatttaatttgtattgggtagatcttgtgtttttgctgactttttaacattgatcttaaactctcgatgattggtgagatatgttgacttattccatggaagtgtctgggacatctttccagagagataattggtggcaatttttttgtttttttacacttatgaagcctttttttatcaaagcattctgggcaagtggatgcttcttgattctgggttatagacatg

SEQ ID NO: 111183 - DNA, 204 bp, Glycine max
  Clone ID: PAT_MRT3847_71407C.1
ctcaagcacttttgctcatgttcaagaaatcccgacacaaagttgtgcctatatgaactgcaactatctcttttcatattacgcctatcctcactccataggatatgacatcccaatacctctgataatccccttctcaacaccctcaagctctcctgatgcacaactattcatatgtgaattagaattatttgatttcttaat

SEQ ID NO: 111184 - DNA, 1191 bp, Glycine max
  Clone ID: PAT_MRT3847_71408C.1
ggagtatcaaatatatagcaagacatagcaagacaagatatgggagggagaaaagaaaagggtggtgaatgtgaaaatagagggagcatgtggaatggttgtggtcactattatatatgttgtctcttacgctttgcatgtgactttctttctttctttatatcctttatatattaagtatatgctgcaatatatttaattaaagagagaagtaacatcaaggtgcagagagaggaattgaagcatgggaagagggaaggtggttctggagagaatacagaacaagatcaatcgccaagtaaccttctcaaagcgcagaaatggtttgctcaagaaagctttcgagctatctgttctatgcgatgctgaaatcgctctcgtcatcttctccagccgtggcaagctttttcagtatagtagcactgacattaacagaatcattgagaagtatcgtcaatgctgcttcaacatgtctcagactggcgatgtagctgaacatcaatcggagcagtgcttataccaggagcttttggtattaagagtcaagcatgagtcactccagcggactcaaaggaatcttctgggagaagaactagagccacttagcatgaaagaattgcatagtttagagaaacaactggatagaacgcttgcacaagctcggaagcacctgacacagaagctggtatcacgaattgacgaattacatggaaaggtgcatagcctggagcaggctaacaagcatttggaatctcaggaaagaggtaaatgtacccagatttgtgaaggttctcctaatggccatattttgcaagataaacaagtcaatcagtttgaatatggaacagcaggttcgtttcggcttcagcaagagcaaactactgcttccaaaggaaaagaaatagagacgatcgaggactggttgaggccaaagcagtcataatattaatatattgcaactttgaatgttcatagagttaaaatatattgttcgtggtcgtgtgtgtatccatcaaatatatagttccaagcctcaaaattctagctatatagtacgttaagcgtccattgatgtagctttgattaatttagtgtatgtttgatacaagatatttaatttagagaattaatagttttatttttatcgatttcctaaaaagcttttacaaatgaagctttaaagaggttacg

SEQ ID NO: 111185 - DNA, 240 bp, Glycine max
  Clone ID: PAT_MRT3847_71409C.1
tccacgcgtacggagagagcttacgactcaagtgtaggaggggatgactgactgcacaccttaccggagcactgtctgagtctaccgaggtgtcccttacgtcactaaatccagtgcgctctcgcatggtgctcgacgcagctgttgggacaccaatgcgaataattgactcgattaactgagacctgcttaaacgcattgacagtcaagacccggctaccgatgaagctcaccacatgc

SEQ ID NO: 111186 - DNA, 1557 bp, Glycine max
  unsure (1)..(1557): unsure at all n locations
  Clone ID: PAT_MRT3847_7140C.1
tacggctgcgagaaatttatattgggtgctagtgagtgatggcgatgagggtgtgaattctaaaaggaaagaacagctgagctggtcagaaaatcaatggcatcatccttgggttttgagttcctgacgaagaagccttacagtcctccatcctgggcatcccatctccaccctttaccttcccacttcttctctcttgcccatcttcccactccaattcacagatggaaccttcccaatctgcccaccaataccgagctgtggatcaagcgagacgacctttccggaatgcagctgagtggtaacaaagtgaggaaattggagttcctgatggccgatgccattgcgcaaggcgccgactctatcatcacaatcggaggcattcagagcaaccactgtcgcgccaccgccgttgccgccaagtatttaaaccttgactgttttctcatcctccgcacttctgacctcctcgtcgatcaagatccaggacttactggcaatcttctcgtcgaacgtatggttggagctcacgttcacctcatctccaaacaagaatatgccaaaattggcagcgtgacactcaccaatgtcctaaaagaaaaattgatcaaggaagggaggaggccatatgttatacccgttggcggatcaaactctttgggaacatggggttatatagaagcagtacgggaaattgagcagcagattcagaaggggacaggcaatgtcaagtttgatgatattgttgttgcttgtggcagtggtggcacaattgctggtctgtcactaggatcgtcattgagtgcattgaaagcaagggtacatgcattctctgtttgtgatgacccagattacttccacaactttgctcaaggcttgcttgatggactcaaggctggcgttagctcaagagatattgtccacattcaaaacgccaagggtcttggctatgcaatgaatacatcggaggagcttaattttgtaaaagaagttgctgccactactggtgttgttcttgacccagtatacagtggtaaggctgcttatgcaatgctgaaagatatgtctgaaaatccaaagaagtgggaaaggagaaagatcctcttcatacatacgggtggcctcctaggattgtatgacaaggtcgatcagttggcttcttttgttgggaattggcaacgaatggatgtcaatgaatctgttcctaggcaggatggtattggaaagatgttctagagaaggaaaatgaaaaaacctgacgttgccagcatctatattttgtactatcttgctctaaataaattttatacttatatttaatagccatatgctcacactgaatcctgcctgaagttaccataagatagtaaagttccaaaaacttaagtgacaaataaatcaagttttatttatttttattgttggtgcttgttttagattagaatgccattaatttgtcggttnnnnnnnnnnnnnnnnnnnnnnnnnnnnnnnnnnnnnnnnnnnnnngnnnnnnnnnnnnnnnnnnnnnnaggaggggnngggnaggggcgaaga

SEQ ID NO: 111187 - DNA, 2070 bp, Glycine max
  Clone ID: PAT_MRT3847_71410C.1
gaaagagagaagtaacatcaaggtgcagagagaggaattgaagcatgggaagagggaaggtggttctggagagaatacagaacaagatcaatcgccaagtaaccttctcaaagcgcagaaatggtttgctcaagaaagctttcgagctatctgttctatgcgatgctgaaatcgctctcgtcatcttctccagccgtggcaagctttttcagtatagtagcactgagtatttttcttcgatctctcatcttttttatcattataatcctaggttttgatttttcaacatatattgctggttggtttgggttgtttttttagtattacacacacacacatatatatatatatatataggcaataaatctctgaaatttgcgtggttccgattgttttcttctattaattgggatgtagctagggttttccaattcttcatccaccccctttcccctctttttgccactttttatttatttatttgtcattaaaacagaaaagataatatcctctcattattcatatacgaacattatgtatcttatatgaattaaatagaggtggccgggggtattgtaatttggtgaagggtaatttttcgtacgtctaaaagaaagcaatactcagtttttctttcttttcttttttccatctcaattttcatgcatgctgttatgccacggtatttgtcatccgatcaattactcttgccatattaagaattaaaaaatagatgctattttcagcagaacaaaagtattatgctaattagtcacttgtagaaaatatcaactttctatgagaccccatgtttaactttcatgaaaagaatgttaattgggagctctagaaatagtattttcctattaaaagaaacattttttttactcatataataacttggtagctgtgcagatctgtttgtcgcttacttcgtttcaattctaaaaaaaaagaacacagtaccgtttccctttttttaagacataatattttactcataaatctaattactagtatacaagctttaccaaaaaaatactatattcaagtgcatgtcactgtccaatatgatttaatttgtttgtttattagaatgaaactatgattacccagcttgttagaattatattatttatttaagaataagtattttcttataaattaaaactaaataactaatattatttgaatagttaacattaaaaaatattctttagagggtggtaattctttgtttgaattaggtgttttgcatgcttttagtaggtttagattgtttcgtttatagagaaaattaacagtaaaatcactatttcagtattatggctaatttttttctcctcaagtcccaaatcactaggataagtataggtcattcatgtaggggtaaaggctcttttgttagggggtagagtagtcactacctgtaggtacaagacacacacagcttccttcttctttttactcttttttaactaagggttattttgtaattaagttttcatattagtattgtcatattctcttctagctcactttcatcctttttttcccttcatatttctatctttattttttatatttatcatatcacataggcggaggaagatagaaaaaaaccaaaatatgatttgttctttctattttcctgcacctatatatacaccaaaaaatgggatgtatatatattggtttttttcttgtatccggcccgttcataatcataatataatgattcaacaatattaattcatgttttgtttcaagatagttaaaacaggataggaaagcaactgaaaaactcttgattgattatttatacatataataattttattattaggtctccctgtaaatctacatataaaactgtacgtaaactgggacagattggttcaaatatttcttttagtcacgcactactaaaatatttcttttcagcattaacagaatcattgagaagtatcgtcaatgctgcttcaacatgtctcagactggcgatgtagctgaacatcaatcggagcgggtttgcactacctttaattaattctccattaatatctattg

SEQ ID NO: 111188 - DNA, 1981 bp, Glycine max
  unsure (1)..(1981): unsure at all n locations
  Clone ID: PAT_MRT3847_71411C.1
gctcttttaaattaggtcccttgctgttggatctatttggtaattccagatttggggcctgcttttttaatttaaggtctgagaccaattatttatgttttgtctagtgatcctaattctttgggtagaaagtagctgttagaacacttgactgtaagtttatttttttaatctcctgtatatagaaagggactgtgttcgagaaatcagtggaagaaataaataatgatggcaagcatttgagatatctgagtttggattggtttccttattttcaagttaatgactttctgttgtgtagtaactcgtaggcaggttgggaaaatcactctattagagtatatggttccaaatggagggaagcatactactaaggtgtacataagtactaagaattttcaattgagaagggatttaactttattactaagaccctcatgcaagcataacatggataatcagaaagtatatacttactagttagactgtagcagggtggtacactgctatcctggtttaacaacacttaactgtttccgctttgtactttntagttgtgaaatttctcaaaaagaaaaaaatcttgcttttgcaggatggtnggggtttatctcttgccgcacatcacttcgttgtgtcatcttctttcaacaatcaatcaccgcttcctctctcactttccctaacttcgaagtcaccaacttcttatatttcaagacaaaaggaatggtgggtttatctcttggagaaacacatttcatccaaggtggcattgctcaagatcttcgttgtgatggtagaaagagattgacatatcgaccaatctctgttgaaactggagtgattccccagaccaatggttcagcaagagtcagaatgggtgccacagatgtcattgccagcgttaaggctgaacttggaaagccaagcttgttgcaacctgacaaaggaaaagtctctatatatgttgattgcagttcaacagcagagccagcttttgagggtagagggggtgatgagttggcagcagaactgtcaaatgctcttcaacgctgtctcttgggtggtaaaagtggaaaaggtgctggaattgacctctcatcgcttattgttgtccaaagaaaaatttgttgggatctttacatagatgggcttgttgttagttcaaatggaaatttgttggatgctctaggcgctgccattaaggctgctttgagcaatacaggtattccaagagtcgaagttgctgctggaacgtcaaatgatgagcatccagaagttgacgtaagcgatgaggagtttctgcagtttgacacatcaagagtccctgtcatagttacactgactaaggttgggaggcactatattgtagatgcaacatcaaaagaggaatcacaaatgagctctgctgtttctatttctgttaataggcaagggcacatctgcggcataaccaaacgtggaggtgtagggctggatccaagcatcattcttgatatgatatctgtggctaagcatgtaagcgagcaattaataaacaaattggattcagaaatagcttctgctgaagctgaagaggagtcatgacagagaagcacttagtgataactagggtgtaccgaatacttcaattattttggacaaaattttgtaactgagtagagggattaaagatattaaatgtatgttcgaaattgttataaattctgagctgtggtcctgactttagctttgagatggttgtttaatgccatgcaaaactgacattgcattgtgacattaaagactgacatggctcacaatgtttggatcaggtttgtaatagcaagatgctgcctttgcaaattgcaatagtcaggtgatatggaccatgtgatttaaattgtcactttttttgttttccatactttagcttacgtgtaattttagtctctctaggtctaactgcttgaacttagtcaatagtcattgtagtttttta

SEQ ID NO: 111189 - DNA, 543 bp, Glycine max
  Clone ID: PAT_MRT3847_71412C.1
catagttacactgactaaggtgggtaggcactatattgtggatgcaacatctgaagaggaatcacaaatgagctctggtgtttcaatctctgttaataggcaagggcacatttgcggtataaccaaacgaggaggtgtggggctggatccaagcatcattctcgatatgatatctgtcgctaagcatgtaagcgagcaattaataaacaaattggattctgaaattgcttctgctgaagctgatgaggagtcatgacacagaagcacttaatgataactagggtgtaccgaatgcttcaattattttggacaaaaatttgtaaccgagtagggattaaagatactaagtgtgtccgaaatagtaattgttataaaaaaacgtatatgtgagattctaattatgagtttattctaaaaaaatcctactaaaaaaaacgtacatgtgtgtgtgttttccatccctacagtgtataagacaaatgtatccatttcgattagggtcatggttacgattctacaatatatgtttttttcatttcgttg

SEQ ID NO: 111190 - DNA, 604 bp, Glycine max
  unsure (1)..(604): unsure at all n locations
  Clone ID: PAT_MRT3847_71413C.1
tgttgaaaggttaccnncgagcgttagtgtcagagacagattgtgccttctacagttgattgacctatcaacataaaagattccttacaatggattcctcccctaactttatgacacaattaacgtagaaaattgagcagtgatagtcagaaacagttaagaacttctaagtagacaggaaagcaccgggaagggttccagtggtaatgctctgcatgttctatctatctgtttcttggttatcagattcttttctgggagagccattgtcatgcaaactttcgctagattcctcagcatttggtttgcccttgtttctgtcacgccagccaagtccaaaacttagcagaccaattttccgggagggattttcaaaccttgggctttgtacacgaccagtcctacaaaaataactccaatgaaattgagcaaacagaatgtgnnntccaacaataaaaggatttagtatatatcatatatgcaacacgctccctnnnntgacattcctttcccacaatccatggaaattaagttatgtctnnagtccaggattcanntgacagagcaggccttatttacnnnnnngtgannnagtattnncacc

SEQ ID NO: 111191 - DNA, 251 bp, Glycine max
  unsure (1)..(251): unsure at all n locations
  Clone ID: PAT_MRT3847_71414C.1
tttttnttttttttttttttagctgaataacnaaacacctacactctccaaagaagcaagtcttatataacaagccccaattccaaacacaaactaacttacctacctttatacttacaccaccaaaaaccaaaccttcatccatctctataaagagacaaaaattgcccccattaacttaacacacccaaaacaagtcccaaacacttgtactttcttaaagacaacaaattaccactttattttaaacc

SEQ ID NO: 111192 - DNA, 143 bp, Glycine max
  unsure (1)..(143): unsure at all n locations
  Clone ID: PAT_MRT3847_71415C.1
aagtctcactcncncgtaaacgtnagcnctgaagtcggctcgagnnaacacaanccaanngaaagtgagaannaatagnnnntcngagagcatnggttgtcatngatcattcanaagagnggggagaccctgcatntggtnan

SEQ ID NO: 111193 - DNA, 678 bp, Glycine max
  unsure (1)..(678): unsure at all n locations
  Clone ID: PAT_MRT3847_71416C.1
aaaaatttgcttctctctctgtctttctacaagacaacagaggaacactcccaaacaaaccatggacgtgggtcagatgcagagacagtggatcgactacaccaaatccctcttcctcgagggcttcctggatggtcagtttctgcaacttcagcagcttcaggatgagaacaaccctgactttgtggtcgaagttgtctttctcttctttgaagattctgaaaggcttctcaaagatctcacctttgccctgtcagtactattactatcataccactctcgttttccttccttccacagttcttgcattcattattccatggttgtcatcaaggttttaaatatccatcgtttgcattgtgatttcgtcgcgtttgttgatatcacaccacatcgcagacaaatgcagccgatgcggtccctgttatggtcgcgaacaattaaaaaatgttgatgttagggtccaaattacggtagtggattgttttttaaaaccttgattgttgtaaatgggccatgcatttaaaaaggcaacttccagaggtttagaatttttttcaattatgctntattttattgttttaatgggtaggattcagaaaatccacgcttggtntataatgtgctactgactgagtgtgtggatgcgtgaaaaattgattgcactgaatctgcttc

SEQ ID NO: 111194 - DNA, 2339 bp, Glycine max
  Clone ID: PAT_MRT3847_71417C.1
acgagagacaacagaacttgccgtcaacaatgcccttgaggtatatatatagggcgccaaactcgtcgtcgtgttcttgccgcacaccacttcgttgcgccatcttctttcaacaatcagccacagctcttctcccactttcccttacttcgaggccaccaacttctcatatttcaagacaaaaggaatggtgggtttatctctttggagaaacgcatttcatccaaggtggcattgctcaagatcttcgttgtgatggtagaaagagattgacatatcgaccaatctctgttcattccccaggtaatgctttaatcaattgacatttggcagggtattctgatgacttgacccttgtggagcattgatttttttttctttaaatagttttaatttatgtatttgataaaataacttcatgtctgaccaactctcctcccaggctttgtctgcgtcccactgctatcattgtcggcgtgaaggcagctagatgcaacattttatttagctgttgacctcttatttttttccctcaacatctcaactgctcttctacgttacaactatcttttaatttctattttaaccaatttttgaatggtggttttctcacatggagaaaaacattttattcaaggtggcatgtggcaagctctacgttgtgatgttagacagatttgagcaatacagccattccatgaggagacggtacttcttgcccgtccaattggtagcggtgtccttgccacgcatgccaccgttgtgttatctactttcaacaatcaatcaccgctgccactcttactttcactaacttcgagatcaccaactttttatatttaaagacaaaagaaatggtaggtatatcttttggagaaacacatttcatccaaggcggcagtgctcaagatcgtcgttgtgatggtagaaagagattgacatatcgaccaatctctgttgaaactggagtgattccccagaccaatggttcagcaagagtcagaatgggtgccacagatgtcattgccagcgttaaggctgaacttggaaagccaagcttgttgcaacctgacaaaggaaaagtctctatatatgttgattgcagttcaacagcagagccagcttttgagggtagagggggtgatgagttggcagcagaactgtcaaatgctcttcaacgctgtctcttgggtggtaaagtggagcaggtgctggaattggcctctcctcgcttattgtcgttgaaggaaaaatttgttgggatctttacattgatgggcttcttgttaattcagatggaaatttgttggatgctctaatagaataatctactataaaaagctagaaaagatgataatgatggattcctggctaaaataattagcgtttcagagatcatgcttttttgttgatgtcaattttcaatgttgtttacttttcaagttttctttttcatttaacctgagtttagctattgatgttacatacatgccatttggactctttgaaatatgtaatctatgacttcaaggaaatggttagaagttattcatactttcattaagctaaaattaaaaatatccttttactagctgttttctttaatctttataataagattatcctcccaaacgaatctgcaatcagtttcgtggaggttttccacatggatttccttaataccatgatgttgagaaaccgagaaacctatttccagaattaactggaaaaccccaatgcagctaataactgttgttcttttaggctgctttgagcaatacgggtattccaagagtccaagttgctgctggaacatcaaatgatgagcaaccagaagttgacgtaagcaacgaggagtttctgcagtttgacacatctggagtccctgtcatagttacactggctaaggttgggaggcactatattgtagatgcaacatcagaagaggaatcacaaataagctctgctgtttctatttctgttaataggcaagggcacatatgtggtataaccaaacgtggaggtgtagggctggatccaagcatcattcttgatatgatatctgtggctaagcatgtaagcgagctattaataaacaaatcggattcagaaatagcgtctgctgagctgaagaggagacaggccagggcaccttcgtgggataaccaggcggacttcaattattttgtaactcggctaaactatggtaaatttgtgtcggaaattgttgtcttctgagctatgtggtcctgacttatcattctattagtattagatacaaaatactgcaaagcagctcgagcaacacaaaaacacgtaagtttacaatttacaatttt

SEQ ID NO: 111195 - DNA, 696 bp, Glycine max
  Clone ID: PAT_MRT3847_71418C.1
agtgtcaaagatagaatatgcttaactttaaatgtataaatgttaccagcgagtgttagtgtcagagacaaagtgttccttcaacagctaattgacctatcaacatataaaacattccttacaatggattcctcccctaactttgtgacacaattaacacagaaaattgagtagtgataatcagaaacggttagaacttctaagtagacaggaaagcactgggaagggttccagtggtagtgctctgcatgttctatctatctgtttattggttatcagattcttttctgggagagctatggtcatgcaaactttcgctagattcttcagcatttggtttgcccttgtttttgtcacgccagcctagtccaaaacttagcagactaactttccgggtggggttttcaaaccttgggctttgtacacgaccagtccttggagaagaaagtgctttggattggccagattcatattgaagggtagcctccaacatactttctgccataacaactcgcttttgcatctcagcaattgattgcatggccttgtcatacttttcctgcatatttattatactggaaatagatgtaatcatgtctagtaagatccttaacagttagcagcgtgggtacttatttctctttgggaaatagatctacccatcttattataaaagctcttcatgccatggacatg

SEQ ID NO: 111196 - DNA, 203 bp, Glycine max
  Clone ID: PAT_MRT3847_71419C.1
cactgttaaaaaacagatccttgggggggcttttattccaactgtgggggttataaccttcacataaacaaataccaaccaggtggggctcccagaacaagagatggtgggaactccaattaacagaagaacaaggcatatcttttgctgtccaggaatggtggccattaacttggccccatttatgcttcaccaaacaatgc

SEQ ID NO: 111197 - DNA, 204 bp, Glycine max
  Clone ID: PAT_MRT3847_7141C.1
gaggatatattcgattttgtgaaatgctgatgactgtgcaactagatgtagacttgccattatttattggacattagtatcatctacagcctcgtatatagttttgacttcagatgctttctaactttagtcagtagcaactccatcttcgagcaaaattttttattttgtcagatcccttggtctattgtacatattgctact

SEQ ID NO: 111198 - DNA, 802 bp, Glycine max
  Clone ID: PAT_MRT3847_71420C.1
cggtagagctcccttgcaaatcgtcagtcggagactgcgcagcaagggtttcaaccgatgaggaaacaccacggcctagggtttctaaattggactccgtacgaggctcgtcggagctccgtaactcgccacgctgcgactcggcggcggaaggcgattcggcgactcggtctgtttccttgttgtgttgcggtttttggtgggaatcgtttcctttggtgtctggctctgggagaggttgggggctgcggcgctgggccatggcgcagagtagcggaaggagagaaaagggaaggtttggagatgctgtgctgtgctgtgctgtgcgttttatggtgttgaaaagagaaacgtctcgggtttcgcgaaacgccacagtttgtgtgagagagagtttgcgggggaggggtgcgtgtctctgaccagcattgactcaggtgcctctcttttcccccccttctgtcgtcttctcgcagccgtacggacgcgtgggcggacgcgtgggcaagattgatgacaataataaacagaagtgtgaacaaagcagctgccttattggtataaatactccagtttgtgataagttctgaaagcattgcaccaagaagtccaaatagagcaccagaagcaccaacagagatattgtttctaatgaataaggaagacagtacactcccgccgaatccagacaacaagtaaatgattcctatcctcactgccaatgttttcaaaaatgtgaggtcataaccattcaaaagcaaaatttgaagaacacaaaagaacatgaacacttccaaatggg

SEQ ID NO: 111199 - DNA, 238 bp, Glycine max
  Clone ID: PAT_MRT3847_71421C.1
tgaacccgaagtatggtggtggtgttgggaggaagcaggaggagtatttccctggtcctctgccgctggttcggttgaacccacggtcagattgggccgatgatgagcgtgacacagggcacggtttgagctcggaggtagggaacatggttttcccaagggggaagttttttgggattttgatattcctagggttggtggtttgcctcataagcatgagaagaggggactattgagg

SEQ ID NO: 111200 - DNA, 304 bp, Glycine max
  Clone ID: PAT_MRT3847_71422C.1
caaacctataagaccacccaatgctttctttgtgttccctgaagaggtaaagaagagctttaatgctgagaatactaatgcgaaggccgcatcaaatgatgctaaacctggatgatagaaatgtaaatcctagtccagtgctgaaaaagctccatatgaaatcattgctgcgaaaaggaaatctgactctgaaaaacttatccaagcttatgataacaagtatgctagctcctcaaatgatgaagaatcatacgagtccaaatctgaagtgaatgatgaccatgatgccagtggagacgatgag

SEQ ID NO: 111201 - DNA, 262 bp, Glycine max
  Clone ID: PAT_MRT3847_71423C.1
aagactgacaagaatgcatgcgtggttacaaaaagtcatgaagaagcatgacactttattctacctgtcaaaccaagaagacgatcgattggctaaggatgaccaagacgtgggaatgaaaggatggagaccatgcttggaattctgttaggaacacggttttaagtaccgggagcacgactggtggccgggatactaggatggaatctatatgacaatgtggaatctgactatgttattgtgcactgatacgtctcaggtg

SEQ ID NO: 111202 - DNA, 379 bp, Glycine max
  unsure (1)..(379): unsure at all n locations
  Clone ID: PAT_MRT3847_71424C.1
ttcttcattcatcttttcatcttcttgtctgagagttgtgttgattgattggtgtgacccaaaaaatggctcaattgccaccaaaaattccaaacatgacacccaattggccagacttctcttctcctcaccaaaagatgccttccctcaaaaccatgtcacctaaccaaaacccttcatgggtggatgagtttcttgaattctccgcggcgagacgtggggcccaccggcggtcggtgagcgactccatcattgcaaaggtggcagtgttggtggtggtggcggtagcggcgacaacgagttcgagaggtttgatgatgaacaaatcatgtccatgtttaatgatgaagcttcanggaataattataataataataat

SEQ ID NO: 111203 - DNA, 332 bp, Glycine max
  Clone ID: PAT_MRT3847_71425C.1
gtacgcgtgcgttctggcgtgcggtccctactgtacgtccgatccactactcacatcctaataacaggcatgtgcgtttcacaagcatacagcatggccgatggatctatcactagacattccgactacgaatagaccatgaggacactggcaattacggcaaaaagcactttcatatttaccaaaacggcttcattgttggaaaatcgactaatgtgacctacctaaaaccgccaagaagtggaccaatccgttttccactcaaaccctgggccaaatttatggggccggattaaacaacaaccattccaagttctataatgcatgtaatt

SEQ ID NO: 111204 - DNA, 686 bp, Glycine max
  unsure (1)..(686): unsure at all n locations
  Clone ID: PAT_MRT3847_71426C.1
atagttctctctttcattcttgttcttgttcattcatcttttcatcttcttgtctgagagttgtgttgattgattggtgtgacccaaaaaatggctcaattgccaccaaaaattccaaacatgacacccaattggccagacttctcttctcctcaccaaaagatgccttccctcaaaaccatgtcacctaaccaaaacccttcatgggtggatgagtttcttgaattctccgcggcgagacgtggggcccaccggcggtcggtgagcgactccatcaccttcttggaggcaccattgctggaccaccatcattgcaaaggtggcagtgttggtggtggtggcggtagcggcgacaacgagttcgagaggtttgatgatgaacaattcatgtccatgtttagtgatgaggcttcagggaataataataataataataataataataataataataataataccatgatggaaaacgcgttatcctcttccaacccttctacaccttccgatcacaacagcatcaatgatgagaaggaaatgaacaacaaggaagaggaagggaagaagcaagtgaagaatgagtccgaggaggatgaggatgaaagccaatgcanacaagatatcacgcaacttgcccaacatgatgatagtaaaaacaatagtgatgcanatgcaacatgttctag

SEQ ID NO: 111205 - DNA, 267 bp, Glycine max
  unsure (1)..(267): unsure at all n locations
  Clone ID: PAT_MRT3847_71427C.1
cgttcaatagaattttacgagtaagctcangcactcgaggcgctacgtagcacaaaggatccagagtgggagctcacgagccaagtactgcgtcgtgtgcgagaacttaatcgcacagtagtagagtacgcgaaggcatatggtatcacgctgcatcgtacacgagacgatccagatcacaagtccacgggcgcaatgcagggttatggtcctgcagatcaaagcactgtactggagttgacttacaattatggactcctgcatacg

SEQ ID NO: 111206 - DNA, 1525 bp, Glycine max
  Clone ID: PAT_MRT3847_71428C.1
ggaactcaccacttcttcaattggtgctgtttattcatggaccagaagaatacatcatagcttctttctcatttcacacacacaagaaccttgagacatcatgaagatttcaagttccaagcaattggctgtgggatttgcacttggaaatgaaggataggcaacgttggagagctgaagaggatgctttacttcgtgcatatgtcaaacagtatggtcctagggaatggaatctcgtgtctcagcgcatgaacacacctcttaacagggatgccaagtcatgcttagaaaggtggaagaactacctcaaacccggcattaaaaaaggatctcttactgaggaagagcagcgtctagtcatcaatcttcaagcaacgcacgggaacaagtggaagaaaattgcagcacaagtccctggtcgcactgcgaagaggttagggaagtggtgggaagtgttcaaagagaagcagcaaagggaaaccaaggggaatagctgcactattgacccaattagcgatagcaagtacgagcatatccttgagagttttgcagagaaactagtgaaagaaaggccttcaccatcatttgttatggctacttctaacagttcttttctgcacgctgatgcaccggctcctccaccggccttgcttccatcttggctttccaattccaatggcactgcacctgtgaggccaccttccccttctgtgactcttagtctttctccctcgacggtggcagcgcctcctccatggttgcagccccctgtgagaggaccggacaatgctgctcctcttgttttggggaatgtggcgccctcacggggcagttctagcatttggtgagaacatggtgatgtctgagttggtggagtgctgcaaggagttggatgaagtgcatcatgctttggccggacataagaaggaggcggcatggcggttaagtagggtggagctgcagttggagtccgagaaggccggccgaaggagggagaagatggaggaaattgaagcgaagatcaaagctctgagagaggagcaaacagctgcattggatagaattgaagcagaatatagggagcagttggcagggttgagaagagatgcagaaagcaaggagcagaagttggctgaacaatgggctgcaaaacacttgcgccttactaagtttctagaacaggtagggtgcagatcaaggctcactgaaccaaatggaagatagagtgacaccattcacaattgggaaatctagtttgcttttacttattatgtcttgaatttatatgatatgaactttatagtcatagtagttttgttcctgtcattattctgaaaaatgttgttacatatggttattaatatccctatcttttcatacaacttgaggacttgcattagtggttggtgtatgtttacatataacgtcctttatgaatatgaacttttgttattattcatcctcctgccgccttctttattatgttttcagtgtattgatcagagaattaaaataaaaatgcgct

SEQ ID NO: 111207 - DNA, 182 bp, Glycine max
  Clone ID: PAT_MRT3847_7142C.1
gggagaccatgatcacacttcccttctgacgggttgtccgagccggacccttctggggtcttctcgcagccgcacccttctgaagccttctcgcagtcatacccttctgtcgtctttttggagccgtacccttctgtcatattctcgcagccgtacccttctgtcgtcttcttgcagccgta

SEQ ID NO: 111208 - DNA, 401 bp, Glycine max
  Clone ID: PAT_MRT3847_71430C.1
cattgttatcaacaagccgacaatcgggttttggaggataggtacaagcaactaaacgactggctgtccaatgatccaaatacctgatggctggcgttgacgcctctcgagtccaagttatttaatcgttcctttgccctcatgaaggcgaaagcgcatgctccgccaggagtgccactcgaaacaagcgccgagttgtcgcaaaaagatattgacattattgctgatgtcttagcgcgctggccatccttgcagaggttccctgtcgttgatctcttgagacttcttattgcttattctcccaacacatttgaagcccctcagacattgcagaaactgattgatgctttgttcgaagcatcggaatggaaggaatcatggccatcacccctaccgaagca

SEQ ID NO: 111209 - DNA, 468 bp, Glycine max
  Clone ID: PAT_MRT3847_71431C.1
ggctcgagcccgacccgagcgggataacggccatctcgcttcttgagctgcaccaccatccatgatgcctggcgtgttctggtctatcccgtatgagttgctggctatcatagcttctgatgtggcggtggttttgatctttctcggagctgcgactctggtggacacctgtcctttgctcatgtttatgatcccacctcacccatttagtcctcgtttgctgcacagggtcttgcccctgctggactcggcgacactaaagctgaacattgttgaggatccttttttgtcaaatacactcatgcccttctggcctgccatgacctctccatcgaggatatgagggggcttgatggtcttaaagaattaggacaccatgaggaatgtgaagctgcctattcgacatgacgttgacaagagggtggaaaggaaaagtgctgctcattagactcatcttcctacctcgat

SEQ ID NO: 111210 - DNA, 238 bp, Glycine max
  Clone ID: PAT_MRT3847_71432C.1
gctccctgaagagagcgtatcgtggcggttgcagaagatgatcgcaagatgaagttcaacatcgcgaatcccaccacgtgacgtcagaagtagctcctaatcgaagacgatctgaaactgccagcattttgggaacagattatctcacaggaggacaccggacaggcactctgtgacgcatttaacggcaatgtcatcataattaccggaggttacgacaaacaaggatcgccaatga

SEQ ID NO: 111211 - DNA, 439 bp, Glycine max
  Clone ID: PAT_MRT3847_71433C.1
aattcggctcgaggaagacgacagaagggacagcaagaggatataaacagcgtaactttactcacagtgcacaaatgctacagatacgactcctttttccacaaggtaaaatatgtataactaattaactgccgacgttacagttacactccttaatctatactatagcagtacctaaattgtagtgtatattaatataatataatgttaggatgagcttataaaggtgtaaatatattctaaaatttaaatgacaaaaagattatatcggatgctcttaatatttattggattttttattttagaataatatgtattgacacatgaataattagtattcgttcattaatatcaattagccctatatgtaaatgtatctccttttaggaaaattaagtaataaatgaatgaagaatatcaattttatggttatttctag

SEQ ID NO: 111212 - DNA, 207 bp, Glycine max
  Clone ID: PAT_MRT3847_71434C.1
aatctcaaatgaccaaactaacattgcaccataccatatctttttgtctcgggactttcttatctatccagagcctttctttttagtttcggctttaaagataataagatccaaaacttattatacaccgagaaattatatttggtgtttaaccactgatgactttacacaatggagtattctaaacttcatatatacttttattat

SEQ ID NO: 111213 - DNA, 203 bp, Glycine max
  Clone ID: PAT_MRT3847_71435C.1
cacgcgtccgctctctctctatttctttctctttctttctctcttatcagagcgcgctcttttatcttctctatcctaatagcacagcatatcgaatgtcgccaacgattaactactcgaaacatctcgttctgtgtccgctcacggatcgatgtccgataaactcgattctgtccacaccatggtgtctttctttacttagc

SEQ ID NO: 111214 - DNA, 483 bp, Glycine max
  Clone ID: PAT_MRT3847_71436C.1
ggctcgagaaaggctctctctagtctcttgttcagatctcacctatgccacaattttcactcagtggtagcctctcaaaacgaatattctttgcttaaattttcataatatttttatagaatcactatctttttctttctccaaccgccactgcatccgatgctgtttccctcatcatcttgacggcaattttgctggttcctcaccaaaagttcaagacttcaagaaatggatcaacaagttgagaggcagaagcgtagcaaggagatgaagaggaagagtagtagtaaagtgaacaagcgcaacaagttaatgatatgttgtcgttgcccctgtcgtgcagcaacgtgcatgttccgaggtatagggaggtgcatgtttgtcacatgttaccctgttgtgcagtgcttgggcttggatgaacatagacatcgccaccatcattgcaagcactttgattggtgacaccaaccaaaatggtta

SEQ ID NO: 111215 - DNA, 340 bp, Glycine max
  Clone ID: PAT_MRT3847_71437C.1
gggtcgagcactgacaggataatgggaaggttgttaagaaagtgcaagcactctacaaccaaggcgcgcgtgggactaactaagacgaacccttggctacgcaaaccctctctgtacgttacacccaagttctgcagtacacaggctcgagtccttgtgggactacacgcgggtccgatcacaccaacatacattatggattggggccagtctgaccctatctctcttgcggatcttatattacgattctcaaaccagttggacccagcctcctcgctcgtagaataccactggcgagcggacctatgataagaatccaggggctgggaggtgtgcgcct

SEQ ID NO: 111216 - DNA, 270 bp, Glycine max
  unsure (1)..(270): unsure at all n locations
  Clone ID: PAT_MRT3847_71438C.1
tnngtttggtttttttttttttttttttttggggattcccatattcgggccccttaacttggggttaaaacacagtggtaggccctactcgggtcctaactcggctaaaaactaaaattggcccaaatggttggctcttggcttcccccctatttaaaataacttctgctttttcaaaaagttggtggggttcttgggggtcaaaggcactaccctttttccgattatttacttaaacaagggtctcattattggttattttagcaaaac

SEQ ID NO: 111217 - DNA, 1420 bp, Glycine max
  Clone ID: PAT_MRT3847_71439C.1
aattcggctcgacgtggggtggtatagctttttttttaatctgttgttagtttggttataaatattagttggaagattaattagaatctgtaattttttctttctttctttttttctcaaataatataaactcgaaagcaacggctgagattggctttgagggttgacacgtcccttttatcttccacactcagttcccacctttccttctcagtcacacaaactcacaccatgttgtgtcaagtgtgaactcaaaacatatttctctctttctttgtttcgattttggagtggtgttgctatctctagctccatgaactttttctaacacacaacacaagaagaggaagaaggggaacaagaagatcgaagaagaagaagaagaaagttaagatatgttgcttggaaaacgtcctcgggcaccgattatgaaaagaactacaagcatgagtggtggtttggccgtggaaaccaaaacaagcaaggaggaagaagtactcatgtctgataacatgaaactcgtggatccacatgttaacgttgttgccatgggaacaccaaatgatcaattcgtgcctaaccacaccaaaaatgtttctcaggccaacggttcatatgtatatggtgaccgtttgatgggcatgggcgtcaacatgagcatgcctctttccccgacaacctcaaataaccatcgtcaccacatgactcacaaccatacaacaaacactaacaacatacatactacttctcactttcttcggacttgtggcctctgcaactgtcatttggcacctggccgagatatctatatgtataggggggacacggcattttgcagtttggagtgtagggagaagcagatgaagcaggaccagaggaaagagaagtggaaggcggggtctaataaggagcaccaccgtgcatcgccaccgggcgccaccgcgaaggcttcttgtaattgaagggtaatttgaaaggtcattgcacaattataaggtgaaatagtacaatatatttgaggagaaaattaagaaagaaaaaggccaagcaagctaattaactggtgcctcatgtcatgtgcacttaccacaaggctagctatatcatctcatatcttccgccgtccctcttaatttcatctatatatggttcttgatttcacacctacgctacttgttcgttcttattgacataattctgctaggaattaaattgtacaaaattaaggtgtggtacgctgttgctgtattgcttatgtcaattttaatctttcaatctaaaattccccctaaatctgtctagcatctagttcatcatcacaagccttttccttggtgtggttgttgtgtttaactcaaaccgttgcaaacaaaaacaaaggattaacgtatgtatatagtttccaggggcaaaaaaaaaa

SEQ ID NO: 111218 - DNA, 422 bp, Glycine max
  Clone ID: PAT_MRT3847_7143C.1
ctcagacccaattacttctatataatccacattacagtttttttttcaccgcccggcaaacttatgcttaggtattcattactacctaaacggtgcaccccaacataaacacaactcccaattatttactccctttaaacccttgctcttaccctggtcactacagcaatgaatcagaacaccatccccacatattaacatccaccaacatttcaaaccaagtctcatgtttgcacaaatctcctaaattgctcgacagactgagccccccttatgcctcatgcatcagtatcaactaaacctcttatgaatcagatgagcaacatctaagccgtttcaattttagtgaagcccaggaggatgatattaaacctcgagacgtctcgcccgtctctcatgtcgaaacataaacacctttttta

SEQ ID NO: 111219 - DNA, 964 bp, Glycine max
  Clone ID: PAT_MRT3847_71440C.1
accaggaggagtccagattataaccttgtcagatttttcttcactttagctgcagctttcttggtggggacagtattttggagggttggaaaaaacagggataacacaggagatctgaatactattataggagcattgtatggttcagtttttttttgttggtgttaacaattgccagactgttcaaccagtagtagccgttgaaagaacagtattctatagagaaagagctgctggaatgtattctgctttgccttatgcaattgcacaggttatttccgaaataccatatctatttgttcaaactatatttttctcattcatagtgtatgctatggtgagctttgaatggaaagtggccaaggtcctttggttttgctttgttagtttcttttccttcatgtactttacatattatgggatgatgactgtttccattacaccaaaccaccaaattgcatcaatccttggagcagcattttatgggatcttcaatctcttttctggtttttttatcccaagaccaaaaattcctaaatggtgggtttggtattattggatttgcccagtagcatggactgtatatgggttaattgtctcacaatatggagatgtagagatagagattagtgtgcttggtgccagtaaccaaactatcaagcattatattgaagaccattatgggtttaaaccagacttcatggggccagttgctgctgttttggtcgcttttcctgtcttctttgcctttgtatttgccttcgccatcaaaacactaaacttccaaaccagataaaaaaataataaattagtggaaaaaggaagttaggtttttgcaagttttactagtgaatgtacattgtgcatttttacagctattcttaatgatacttttttttatagctatttttaatgatactttgaatgtaactaatcagtgtagtattaagatttcttttctcac

SEQ ID NO: 111220 - DNA, 180 bp, Glycine max
  Clone ID: PAT_MRT3847_71441C.1
aggcgtcagaacacgactcagtggggttgcaaaactgcgacaccatgcgaccggacacaattaaggttttccatatcacagcgtatcacaatgaaccaccactggtgcagcctcagtggcaatcgcatcagtctcaagggtcaacagttcatggagcatgtgcagtgcttcaggcacaat

SEQ ID NO: 111221 - DNA, 294 bp, Glycine max
  Clone ID: PAT_MRT3847_71442C.1
cctgtatagcgggcgccctccacgcgttcgctgacgcttgcaaagagggtgaatcgtgaaacagtttccttattttaaatgtgtagaagaaaatctttatccttatagataaaacgtattttatcctttaaaaggtgataatgtatgtagctgcttttcttcttaaaaatcactcgcattgaagaaaaatatcatatccttttgtttattcataagttaaatgaaaaaaagatcgttctttgaatcctcacaccactcggttgatgacctttgccaccaaagatgctctatcgt

SEQ ID NO: 111222 - DNA, 271 bp, Glycine max
  Clone ID: PAT_MRT3847_71443C.1
ggccggccttttttttttggtgtcccagttttgcaatcttaatcgttgcctccttctcaggcggaggttgtagctctctacccaagtaaagaaccacggttgtgatggccaacaaactgaatccttaggcctcgctatttttcaaaagcccttctgttcctggtacctaattcctttgagtgggggtgcaggtaaaatccctggctgatgaaggccatgttgtcacatgggcaaggaccggtgtttaaacatatacgtccatgctttaaaa

SEQ ID NO: 111223 - DNA, 1112 bp, Glycine max
  Clone ID: PAT_MRT3847_71444C.1
gggtgtcgcgtccgctatatattctacccgaatttctgcattttccttcttccatcggcgcggcacacacagacacacacatttcgtcggaatgggaagggtgattcgcgcacagcgtaagggtgcggggtcggtgttcaagtcccacacccaccaccgcaagggtccggcgaggttccgcagcctcgacttcggcgagcgcaacggctacctcaaaggggtcgtcaccgatatcatccacgaccctggtcgcggtgctcctctagccaaggtggcgttccgccaccccttccgctacaagaagcagatggagctcttcgtcgccgccgagggcctctacaccggccagttcatctactgcggcaagaaggccaccctcgtcgtcggcaacgtcttgcccctccgatccatccccgaaggtgccgttatctgcaacgtcgagcaccacgttggcgaccgcggcgtcttcgccagagcctccggtgactatgccattgttatcagccacaaccctgataacgacacctctaggatcaagcttccttctgggtcaaagaagattgtgcctagtgggtgcagggcgatgattgggcaggttgcaggtggagggaggactgagaagcctcttctgaaagctggtaatgcttatcacaaattcagagtgaagaggaattgctggcctaaggtgcgtggtgtggcgatgaacccagttgagcatcctcatggaggaggtaatcaccagcatattggtcatgccagtaccgtcaggcgtgatgctcctcctggccagaaggttggtctcattgctgctaggaggactggtcgtcttagggggcaagctgctgctattgctgctaaagcggataagaccacctgaagagattgttagagttttttttttttttttataagttctcaaattttgtttctctgatagtctatgctcatctgtttgggttctattttgatcaccatttctgccataaatatgaaagcttgtaacaggcggtgttttacattggttttaagatctattcaatcctgcaactgtttgaatttggaatgcacttatatagctcccgcttttttggtaaaaaaaaaaaaaaaaaaaa

SEQ ID NO: 111224 - DNA, 1040 bp, Glycine max
  Clone ID: PAT_MRT3847_71445C.1
cttcctatccttcttccatcggcgcggcacccacacacacagttcgtcggaatgggaagggtgattcgcgctcagcgtaagggtgctgggtcggtgttcaagtctcacactcaccaccgcaagggtccggcgaggttccgcagcctcgacttcggcgagcgcaacggctacctcaagggcgtcgtcaccgacatcatccacgaccccggtcgcggcgcccctctcgccaaggtggcattccgccaccccttccgctacaagaagcaaacggagctcttcgtcgccgccgagggcctctacaccgggcagttcgtctactgcggcaagaaggccaccctcgtggtcggcaacgtgttgcccatccgatccatccccgaaggtgccgtcatctgcaacgtcgagcaccacgtcggcgaccgcggcgttttcgccagagcctccggtgactatgctattgttataagccacaaccctgataacgacacctctaggatcaagcttccttctggtgcgaagaagattgtgccaagtgggtgcagggcgatgattgggcaggttgcaggtggagggaggactgagaagcctcttctgaaggctggtaatgcttaccataagttcagagtgaagaggaattcatggcctaaggtgcgaggtgtggcgatgaacccagttgagcatcctcacggaggaggtaatcatcagcatattgggcatgcgagtaccgtgaggcgtgatgctcctcctggccagaaggttggtctcattgctgctaggaggactggtcgtcttagggggcaagctgctgccactgctgctaaagcggataagactacttgagaagatttttagggtgttatttgttctcaaattttgtttctttcatagtttatgttgaactctttgggttctattttgaacagcatttccgccataaatatgaaaagctttgtaacagacggtgttttatattagtttgacatctattcaattctgctgtttgttaaaaaaaaaaaaaaaaaaaaaaaaaaaaaaaaaaaaaa

SEQ ID NO: 111225 - DNA, 1284 bp, Glycine max
  Clone ID: PAT_MRT3847_71446C.1
ccacgcgtccgattcatcatcaaactggtgcccccaacaccaccacccatcctccgcacgcggtggtgcagatttggccagtgacagcgcgtggtggttgtcgtgcgcgcgaaaccattgtgacagaggatcatgatggggtcccgattgcgtagaggaggaggtggcaggcacggtggttgatggtagttgtggagttgtgagaaggtagtgtgcgctatagcgacggggctggtgggataggtggttgcgcgtgctgatctggccagcgaatctcacgatttccagatctgaagaagggatggtgattcgtgatttccagatctcgtcaccgttgtcgtgcggttgcagttgttgcttcctttgacgacattgtggtggtagttgcagtggtagcgatggtggtctgcggctatgaagaacaggaagaagaaagacagaggaagaggaaagaatttggtcttggacttcacttgagtgctgacaacaccttgagaccttttgaaaaaaccactatcttgaaggccctctctatctctgatgctactaaaccatgttacatttctcacaaaacaagattatcatcttcatcttcaggaataacaatgatcccacgagcaacaacagttattggtactgtggaggatggaaatcaaggagaggctgatacttttacaattataacgtagttattcatgatcacgactctgctagtttgcgtcagcattgggagcagcttttggacgatcgcctccaaaagagcaggttgacgtagacatagcaacccacataaacatttctgatgatggcccagatcgaagcatgctgtatgtggagacagctgatcggcctggattactggttgatcttgtaaagattattactgacattaacattgctgttgaatcaggagaatttgacactgaggggctcttggctaaggcaaagtttcatgtcagctacaacggtaaagcaatcagcaagcctctccagcaggttcttgctaacagcttgagatatttcttgaggcgtccgacaactgaggaatctagtttttgagtggcacttcatggaaagtagtgcaggacattgtattctcttttggagtataaccaccatgggattgtacaatgtttgcattcgttttgtcattcgaaggataaatgaaaaatatgactaaccgatagccacagcacaaagcattaaatcataaaattaaatcaacatggatggataggattgtaaatccactcttacataataaatttgagtatttattcttga

SEQ ID NO: 111226 - DNA, 706 bp, Glycine max
  unsure (1)..(706): unsure at all n locations
  Clone ID: PAT_MRT3847_71447C.1
actcagaagctcctcactctatnagattgtcaggaatatcagtttattttactatcaattcatcactccatctaattcattccccaaaatgattccaaaaccaaacatacaattagtcaactaatctgttcaattggtcaagaaattgttcttagttggtcaaagattgaagtggggaagtgcttcaaaaaaatttgtttcgtatttctaactgatcataaagataaagaatttttctttctataaggattacaataaaaataatcattaggctaataagtaaaagaaacgacaatgataaaagttttgcacagtggttaaacgtatataaaagagcaagctcctattaagtgaattcatcagtaaaatgagccagtaagagtgcattaaccctcagtgcatggtgaatctgtgatcttaacctaataaagaattaatctactctttgcaagctcactttagagaacacttgacgtaaaaaatgagtaattgattatggttcaaaatgccaagacaaatagtgtgtttggttccacattccagacatgatttcttacttctcaacaaggtttccaaacacgctaaaaaaaccagagaattatgtaagnnnnnagctacctnncnntaaagtggctttnncttctgctcagtcaattcatttctcnnntcanngagatncttgatctnnnnctcgagcgccntnnnc

SEQ ID NO: 111227 - DNA, 748 bp, Glycine max
  Clone ID: PAT_MRT3847_71448C.1
gggcagccgcgacgaagctcggaattcggctgcgaaaatctaaatgcctctttcttatttcccgtaatttgtgtccttctctctaatcccccttcaacattttcgcttcttctctttctcaaatccctatcttcaaaatttcaagattatcactttaaagacagattttttttttttgacaaaaaaaatgactctggctatggctgtttggagtgctggtcttcacttcagtgctgctcgtagtagcttgagacctttggagaaaaccatttgcactgcccctttcttgaaggcgtcatctgggtttgctgctactaagccattctgcatccttaacacaacaagattgtcatattctggaactacaattatccctcgagcagcacctgttactgatgtgaaggatgggaatcaaggtgagactgataccattccaactcccgtagttataattgaccaagactctgatcccgatgctaccgtggtggagataacttttggtgatcggcttggggcacttcttgacacaatgaatgcattaaaaaacttaggtctcaatgttgttaaggcaaatgtctttctggattcatctggcaagcacaacaagttctccatcacaaaagctgatactggcagaaaagtggaagagccagagttgttagaggcaattcgtttaacaattataaataatcttattcagtaccacccggaatcaagttcccagttagcattgggagcagcttgtgga

SEQ ID NO: 111228 - DNA, 1251 bp, Glycine max
  Clone ID: PAT_MRT3847_71449C.1
ggcccgagtcttattacccgtaatttgagttcttctctctattcccttcttcaacatttttagcttcttctctttctcaaatccccctatcttcaaaatttcaaggttatcactctaaagacagatttttttcttaaatgactgtggctatggctgtttggagtgctggtcttcacttcagtgctgctacgaagcctcatagtagcttgaggcctttggagaaaatcatttgcactgcccctttcttcaaggcctcatctgggtttgctgctactaagccattctgcatccttaacacaacaagattgtcatattctggaactacaattatccctcgagcagcacctgttactgatgtggaggacgggaatcatggtgagactgataccattccaactcccgtagttataattgaccaagactctgatcctgatgctaccgtggtggagataacttttggtgatcggcttggagcacttcttgacacaatgaatgcattaaaaaacttaggtctcaatgttgttaaggcaaatgtctttctggattcatctggcaagcacaacaagttctccatcacaaaagctgataccggcagaaaagtggaagagccagagttgttagaggcaattcgtttgacaattataaataatcttattcagtaccacccggaatcaagttcccggttagcattgggagcagcttttgggcttctgcctccaaaagagcaggttgacgtagacatagcaacccacataaacatttctgatgattgcccagatagaagcttgctgtatgtggagacagctgatcggcctggattactggttgatcttgtaaagattattactgacattaacattgctgttgaatccggagaatttgacactgaggggctcttggctaaggcaaagtttcatgtaagctacaatggtaaagcaatctccaagcctctccagcaggttcttgctaacagcttgagatatttcttgaggcgtccgacaactgaggaatctagtttttgagtggtacttcttggaaagtagtgcaggacattgtattctcttttgaagtacaccatgggattgtacaatgtttgcattcgttttgtcatttgaaggacaaatgaagaatatggctaaccgatagccacaacacaatgcattaaatcataaaattgaatcaacatggacggatacttatataacaaataaaagtaattttacatgctaaatttgagtatttattcttgaa

SEQ ID NO: 111229 - DNA, 396 bp, Glycine max
  Clone ID: PAT_MRT3847_7144C.1
ccaaaaaccccccccaatttttttttttttgaaaatcatggccccaaaaaaatgccctcctgggttcccttggggccccccccctaaatccccggttccccgggggaaaatttttaaaaaaaaaaaaaaaacccaaaaaggggccccgggaaccccccaaaaaaaaaacttgttaaaacccctgtttttggtaaaaggggggccctttttttttggggcaatttttggtttaaaaaaaccccttttccccccccccccggggcttggacccttgggggccttctttttgttttgaggcacccttttcgcccctttgtgacctgggccacaaaggcccacctttgtccaaaaaaaaaaatattttgttttcccagataatggggaaggccccttttt

SEQ ID NO: 111230 - DNA, 559 bp, Glycine max
  Clone ID: PAT_MRT3847_71450C.1
gcacaaaaatagattctcttcattaaccctaccatttatatccaccagaaacctaaccaacagtaatttcgaaccattattacgaggaaaaactaaaaactattaaactaataacctcctatggcaacacctgaatatcagtataaggaaaagggacaagataagacaaaaaaaaaaactcattaggagctctgtgacaatcacaagagtgataacctttctcagcccctagcaccagctccctccctctccaatttctgcgagaagaacttggtagcgaacatgttgtcctcgaaatagtccttgtaaggatggtccttgggaacaagcctgcgaaacttattgaattgtttatcagcttcatctttcttcctaaggagagtataaataataccctgacacaagtaaggtctaaaatccctaggctcttccttcaccaattcctgataagccttgagtgcttcagtgtaatctccttccatgactttaatctgcgcaatcaagagcctgaagtctctaacatcggaatccttcttttgctttttgcacacctcaattg

SEQ ID NO: 111231 - DNA, 101 bp, Glycine max
  Clone ID: PAT_MRT3847_71451C.1
gcacgagcacagttgattaatgtagcgtaatcaatgttgcttagcatgtatgtgcagtaaaataaaggttcacgcacaagctttcaattcccatcgtgttt

SEQ ID NO: 111232 - DNA, 647 bp, Glycine max
  Clone ID: PAT_MRT3847_71452C.1
aaagagacaaacgggcattattgatcttgatcatacatagtagtattaaataggaaaaatacaaaaaatgaatgaatggcacacgcaagataatcctgattaaagctataaccaaacgagactgttaacctaacacatttttatattaattattagtactattctgggacagaacttcacatccggctcttgagattaaaaaccaaaagctctaataaagcctatattcagaacaagaagacaggggaggaagaataaaatattaatcatcatcatagctggcccataatcggagagcatctctcaatgttaccggccaatagaatagaagtatcttaaaacgacgcaaaaggtacgttctatttgcgggttgattctcaaaattaacaacctttgtttatcaatgatttggacttcggaggagttatgaatcataataaaaccaaatcgcccgctccattgtagtatttattggtcaatacagaaccacaattttcttcaatcaaatttctttttctattcaattaaagagcacaacaaataacagtgagtctcacaaaatattagtctttttcaggaaaacttaactaataaaagagagtatatcttaccagcatctttgtccactagagaatgtccaacatgcg

SEQ ID NO: 111233 - DNA, 540 bp, Glycine max
  Clone ID: PAT_MRT3847_71453C.1
aaaaaaaaaaaaattttttccttttttgcccaaaacaggacatgaaaaaacagggggggggaaaactggggcttaaaaacaaaaacggaccccggacacctggggggggtaaactaataaaaagggtggactttgggggaacaatttttggggggggttcccctttaaaaaaacaaaaagggggggcccccctgggtagggggaccctttttttttacttttttaggccccaaggcttttttttaaaaaccccccggggggaaaaaaaaaattttgggggaagctttaaaaaatggggtttcctttttggaggacacccctttgccctttgctcccggaaattttttctttcccctccaactgagaacaaggggtgcaaggggggggtttccgggggaaaaaaaaagcaataaacttgtcctttggggggtgttaaaatcctggggacttaattccaaaggggggaaaaaaagcttttttgggagaagcgggtttaaacccttcaaccctgatctgggttggggtaaatgtttgaattcc

SEQ ID NO: 111234 - DNA, 546 bp, Glycine max
  Clone ID: PAT_MRT3847_71454C.1
atgtttgttggtgggacagcagcaccagcagcagttacagtatgggcaatgtcagaactcataaaaaatccgaaggctatggaaaaggcacagactgaggtaagaaaggtcttcaatgtgaaagcattattactcccaagagaaaacagtgaggcatgtgtagtcaatggatataaaatccctgcaaagagcaaagtcattatcaatgcttgggccattgggagagaatcaaagtattggaatgaagcagagagatttgtgccagagaggtttgtagatgactcttatgacttcagtggcacaaactttgaatacatcccttttggggccggaaggagaatttgtcctggtgctgcattttccatgccttacatgttgctgtcactggccaatttgctttaccattttgattggaagctgccaaatggagcaacaatccaagaattggatatgtctgagtcttttggcctcactgttaaaagagtacatgatctttgcttaatccccattccttatcacccaacatccaaactgggccatctataa

SEQ ID NO: 111235 - DNA, 336 bp, Glycine max
  Clone ID: PAT_MRT3847_71455C.1
ctcgagccgattcggctcgaggggttctggctacctttttctagttttcccccgggagggacccccagaatttctttttcggtaccggtcaagggggtggtgaccaataaaggggtttcaactgtgggggccttgggggggccaggtcaatgggggaataacaaggtttggaaaaaacaatccttttttattaggcttaccatggagggaataaacttaatgggggtttggtttgtggggggtgggggtaccccttggtggaatggggttttgggccctaaacaccagaaaaacttactttgacctaaccatcttttaaataaaaaaattgaaaag

SEQ ID NO: 111236 - DNA, 1537 bp, Glycine max
  Clone ID: PAT_MRT3847_71456C.1
acaacattacaacatttcatttcataacatggagcttcttattcccttctctctcctattcacctttgcttgcattctccttgcattgttcaacactctgaaccgttcaaattccaaaatcttaccacctggaccatggaaactgcctcttcttggcaacattcaccaatttttcgggccacttccccaccaaactttgacaaacttggctaaccaacatggaccgttgatgcacctacaacttggtgaaaagccacacattatagtctcttcagcagatattgccaaagagattatgaaaactcatgatgccatctttgccaataggcctcatcttcttgcttccaaatcctttgcctatgacagcagcgacatagccttctcttcttatggaaaagcttggaggcaactaaaaaaaatatgcatttcagagttgctaaatgctaaacatgttcaatcactaaggcacataagagaagaagaggtatctaagctagttagccatgtatatgcaaatgaagggtcaattatcaatcttactaaggaaattgagtcagtgacaatagctataattgcaagggcagctaatggtaaaatatgcaaagaccaagaagctttcatgtcaacgatggagcaaatgctagtgctgttgggaggtttctcaattgctgatttctacccttcaatcaaagtgcttccattgctcacaggaatgaaaagtaaacttgaaagggcgcagagagagaatgacaagatcctagaaaatatggtcaaggatcacaaggaaaatgagaacaagaatggggtgacgcacgaggattttattgatattcttctcaaaactcaaaagagagatgacttggaaattcccttgactcacaacaacgtcaaagcactcatctgggacatgtttgttggtgggacagcagcaccagcagcagttacagtatgggcaatgtcagaactcataaaaaatccgaaggctatggaaaaggcacagactgaggtaagaaaggtcttcaatgtgaaaggttatgtggatgaaacagagcttggacagtgccaatatttaaattcaatcataaaagaaacaatgaggctacacccccccgaagcattattactcccaagagaaaacagtgaggcatgtgtagtcaatggatataaaatccctgcaaagagcaaagtcattatcaatgcttgggccattgggagagaatcaaagtattggaatgaagcagagagatttgtgccagagaggtttgtagatgactcttatgacttcagtggcacaaactttgaatacatcccttttggggccggaaggagaatttgtcctggtgctgcattttccatgccttacatgttgctgtcactggccaatttgctttaccattttgattggaagctgccaaatggagcaacaatccaagaattggatatgtctgagtcttttggcctcactgttaaaagagtacatgatctttgcttaatccccattccttatcacccaacatccaaactgggccatctataa

SEQ ID NO: 111237 - DNA, 185 bp, Glycine max
  Clone ID: PAT_MRT3847_71457C.1
ccacgcgttcgcagggttcttagaactagtaggaccttgcgaccatggcagccaaaaaggcgtgtgagacattcgcaaagtccttgaaagaggaggggcatagatggacgttgcttgattccccaggggaccgtctaaagttcatgatgcattttgggtccgcacccactgccaaggctttgtat

SEQ ID NO: 111238 - DNA, 164 bp, Glycine max
  Clone ID: PAT_MRT3847_71458C.1
tcggctctgagctaggttcaagtggacttaatgcataataataacctaacattctcacttcaaaccttctagaccacgaaaaaacaaaaaaagacaagcgataaatatagggaaagaaagaaaaaccgaggctttgctcaatttcagtgaagaaagtgaaagat

SEQ ID NO: 111239 - DNA, 2295 bp, Glycine max
  Clone ID: PAT_MRT3847_71459C.1
agggaatggaagattttattgctttctaggaaacgatacactactttctattgaaacttaaactcagctttagtggaggccaaggcaaaaccaacaaaatattcaaatataaagaagctgaagatgcctcataacgacaattgaattaacaaggatgagtttgtatatatacacatgtgacagctgatatttaccaccacaaccacctatgaccaccttcattttataaaaccaaattacccaccaactaattctccaaaattggattaaagaatgaaaaacaatgttaaaagaaacctataaaatccaatttgagctttctatatcctttcaagtttccttctaaaccattctgatattctcctgatcttgcccaccagctgaacattctttgtaattttaaaatattcttccgcatttgataacattatcattatatcatggttgacaccttccacactccgatagtagtcattcttcaaccttgattgaattagttcaggatagaatggggcaggaaacctgtttgcaaactctaatttctcagctacttggttcagtgcttggatatcaaacctctccctgcggtctaatttggtgaaataggaaagcagcttatctctgatctcatgatcaatgtggggatgctcccatagcatctcagaatcatatagttcccacggactatgcagatgattctcggtgggatcagtcttgtactggacccgatacctttcccaaggactctctgggaagtcatcagatttggcctgcacttgaataattcgaccatcccaccaacttccacctttcccatcttcatttctccaccagaccatgcatttatctcttgaagaccaatttctcttcatggcagtatcataccatgttttctcaataacaaaatcagtgaagttaatcaattcaggtagagttaatttaaacgatttgccatgcacacacgaagaaggatctagaaatctaagtttaagtttacaacagctatccccagagcctggtagctctgcatactcaagttcttcaaccttgcaaatttcagaagcacctagccctgtaaatgatctccatggacctgattcagataatgaatatgactttatgtactcttgatggccctgtcttaagtacacaacttcatcaccaagttgaggaatatatcggtaaccctcttcaggctctgacaacatcagccatgacaattttttgacatggtgatttgacacccttcgagttaaagtaccagaatcattggcaatatattcaccattcctgtgtctggctgtccttattcttcgatgaagttgatctgacattctggtagaagagtcttcccgatcagattttcccctggaactttgaccctgtcgaattttaattcttctgtttgaagtgcttggctcctcagaagttgtcttcatccttataaaccgtgtttgacgcataggatcacttgtaacatcagacaaaccaattcctaaaccatgttggttgctgaaaacagaagtatgttctcccatatcacaatcaaaagattcaaaaccatcttgattgactttacctttatatgacttgtcccttttatggaaatgatcataacttctcttgtcagaatatgaatgcagtagctgtggagaactaaattttctgtcatcttcaccttctggtacttctgtgactagattaggccccataaaggaggaacttccagatcaccagttgagccttgtttgagattgaaacttacttagcagcagtcgctgacattttgacagtatcttcagtgtctgctgaaatttgtttatttttaataactaacttggttgatttcacaggtgctttcattttgaggtcatggcaatggcttgagtgaacaacttcattgttttctagtgtgtcctctgcacatttgtcagttccagactggcctttatcaccttcattgaacttatcataaccagatgtcaaggagccatcagcatttggctgaggattgccaaacaatgaaggttcaagcgatgaaaatttaggtgcatcttcaaaatcagtcagctctgtattaaccatactcccgacagtctttaacttgccaatcacatgttctgatctcccattagcattgtgttcaagaaggccatcaatttcagcatcagtcagctaagcctcccctgatcttgaaagttcatgtgggggggtcttcatctttctgcaccgatctctgttccccacaacttttttgaatgcctacagatttttcgtagcatttaataattcgac

SEQ ID NO: 111240 - DNA, 318 bp, Glycine max
  unsure (1)..(318): unsure at all n locations
  Clone ID: PAT_MRT3847_7145C.1
gtgtctttcatgcttggttganagatattctcccttcacatatgtggagtaagacttcagatccttcaacagtgttgggtgaataagaccagtgatctcttatggaaaatattgtcatcaaaggctctcatcaatgcaaagcacctgattcaaatgggaggtccatgaacaacaaactagattagactagtactcaggatccaaggtgagactagtttaaccaacagatccttcatagtgttccatcgtatgcaatcttcaagcatatcacatgccaagatcaatggggtctgagttgcctcataagcagtctccacg

SEQ ID NO: 111241 - DNA, 411 bp, Glycine max
  Clone ID: PAT_MRT3847_71460C.1
gcaactgactttgtttaaacattttgttttgcctcctcttaatcatgttttttcacaaactacctttgttttactttttctaaaaaaaacgtccggtgttactaacagctcgaattatactaacttttgcaggcttaacagttttatccaaccaaaattaaaatttttatctaaatattacagccctgtaataactcaacattggtcctctacccaattattttggactgcaaattcatatctcacatggaagcatttgactgttttaaacatggctcgcaaacagggtcccttttggccttcacaacctatctttctaaggattgttttcttataacctctaatccctgccctatcacatattccaaaaagttctaacgcttttcttggttaacaaggtttacataacag

SEQ ID NO: 111242 - DNA, 339 bp, Glycine max
  Clone ID: PAT_MRT3847_71461C.1
atgattgatcttgcattttctgtttgtcgtcggttccgttggggaacccgatcccaggggaaaaaaattttttgcccaaaaattttgtttacgaaaagccgcccccccttttcaccctccccctgggccccaaagaaaagggggcccagagggaaaattcctttcccggggcccccccgctttgagggggcggccccaaaaaattcccacacaagaatagctccctcccggaaacaaattccggcccccgggggagattgccccaggggggcctttacaaaaaaatccccgagcaggaaaacagtttgggggcaacacccccctctggggacccccccc

SEQ ID NO: 111243 - DNA, 392 bp, Glycine max
  Clone ID: PAT_MRT3847_71462C.1
ctaaaccacccattttaagctttaaaagtaaaactttaaattttgggcgaaaatttttggggctatctccccaccatttaaaaggggggcccacaaaattccaaggctttgggaaatcatggggggggggcgggagtcaaaccccaccccttttttaacaggacagggcaactagtgggggccctcctaaagggagggaaaaacaaagggcaacccattggactaacaccccttggacccggaaaaaaaagggacatttcaaaaataaggggggcatcatttaaaccctttggaccattcggagcatcccaaaacgggggaaccggggcattcgggtatgggggatttaaaacacccggaccttgagcataaaaatttggaccattcggatt

SEQ ID NO: 111244 - DNA, 199 bp, Glycine max
  Clone ID: PAT_MRT3847_71463C.1
ctctcatgccacattacaggggtctccttttcctatcactatcaaaaaaaaaaagggtataacctattaatacctacccattatcaccctcctctcggaggtgtccactccttttataccccacactttgatttcaacaatcgtccaactcttcaactatcccccctctttaactcactaataaaatatcaaaattttt

SEQ ID NO: 111245 - DNA, 238 bp, Glycine max
  Clone ID: PAT_MRT3847_71464C.1
ctaccctcactaatataaaaataacatctatcttctatacattccaaaccatatctcattgattccatatcaagaattatctaattacatcattaaacttctcatgttacatctataacacgcactcaccaacctacaatttcaatttttttaaatatattatatacccttcttcaattaaaaaaaaaaaattgatttcatacttatcatccttcatccctttaataatacatacaaa

SEQ ID NO: 111246 - DNA, 196 bp, Glycine max
  unsure (1)..(196): unsure at all n locations
  Clone ID: PAT_MRT3847_71465C.1
tnnnnnnnnnnnnnnnnnnntnnnnnttttggaccgacgttcctaaatgaaaaattctacggcaatttcgggactttcaacaaacactattggacaacaccgaagtaaatactaccgtaccagttcaaatgacatgtatgcacaaaacaaaagtcaatcaaaatgaaaccccttttgtcgttttctcgcagccgta

SEQ ID NO: 111247 - DNA, 280 bp, Glycine max
  Clone ID: PAT_MRT3847_71466C.1
aagtaaactaaactgaagaaaatgttgttaggtcacttgcaaaattgaagagatttaagacctctgtcttttctgttgaattagattccataatcttccattagtttccattctgccactttgctacaaagttcttctcctctttggaacacgcaattttaggcctatgcatttcagcaagttctgcaaacaaaattgagagttgttcggtcattgcggcggtagctctgtctgtgcctctgtggagctgctgcaattctattgtcaatgatggactgct

SEQ ID NO: 111248 - DNA, 467 bp, Glycine max
  Clone ID: PAT_MRT3847_71467C.1
agcttggataaaaaaaattaacaagtgtttatagtagaagaaaataaaaataaattaaaaagataaaatgaatataatttctctcaatttaaaattatgcatcccaactttttcgaaagttaaatgaaaagttgaagtacctatgttgattttaacttgtgaaagaatgattcactctatttgcataattcattttaggtttaattactgttttagtcccagaattttgggggtgtgtgtcttttttagtccctgaaatttaaaaattttattctctaaattttgaaaattgcttttttagtcctgacataattaattgacaatttgtgatggtttttagctatcttacattaatttttattttttaaccacttgaatttacatttaaaaactaccacaaagtgctaaaaaaacccgctacagtacttaaaaaccatcacaaaatgtcaatttattatgttagagat

SEQ ID NO: 111249 - DNA, 996 bp, Glycine max
  Clone ID: PAT_MRT3847_71468C.1
ggctcgaggagatattaaatgatgtgcgaaggaagtgggttgaaaggatatatgatgatattaatgctagtatcacaaagaggagtattgatggggacttcaaactaagtaaattggctgttgtgataacaagagtaactgcattgatgggaatcctgaaagagactgaaacacctgaactggaaaggggtgcagttagggctgtgcaggatctgtatgacgttatgcgacatgattttcttagcataaatctgagggagaattatgacacgtggagtttactgagcaaagctagggatgaagggcatttgtttgaaaagttaaaatggcccaagaatacagatttaaaaatgcaagtcaaaagattgtattcactgctgactatcaaagagtctgcctcaagcattcctaaaaaccttgaggccaggcgacggctgcagtttttcacaaattcactttttatgaagatgcctcgtgcaaagccagttcgggagatgttatcctttagtgttttcactccttattattctgagattgtgctatatagcatggctgaactcctaaagaaaaatgaagatggcatttcaattttgttctaccttcagaagatatatccagacgagtggaaaaactttcttgcccgaattggccgtgatgaaaatacacttgagagtgaactttatgataatcctagtgatattcttgaactgcgattttgggcttcatatcgggggcaaacattggccagaacagttcgggggatgatgtattataggaaagctcttatgcttcagacctatttggagaggacaacagcaggagatttggaggctgcaataggttgtgaggaagtaactgatacacatggctttgaattatcccctgaggcacgtgcccaggcagatcttaagttcacttatgttttgacatgtcaaatttatggtgagcagaaagaagagcaaaagcccgaagctgcttatattgctttacttatgc

SEQ ID NO: 111250 - DNA, 685 bp, Glycine max
  Clone ID: PAT_MRT3847_71469C.1
cccacgcgtccgactgaatctaacacgaggctcatgacggaatatgtcttagagaccagtggcgttgaaaccgagaagtgaatagtcttgcggcaatgcattagcccttcattccctctgctcgaacaggagctagggcaatgtatatgtacaggaaagaactcgtctacatggttttcgaccaattttatactccagtattggcatggctatgattaaaaaaaaaaacagttagatcataaaatggttgggataagttcgtgttacaaattgataatgaacaaaatatattgttaagccctccatgataattttgggatacttggagcaccaaaattatagtggtaatgttttcaaggcttggttctgaagacagctttgaccaatttgtgtgtaatcaattttctttacatctgaaagtgaaaatactgtccaacgatgaaacaagcaacaagcattgccatcaatcctcaatgttcaaggaccaattttctatttggtagtttacggtttacacttcatgatctccaaccaacacaactaaatttcagaagcagtagcaccttcttcactaagaataagatatagggtttgttgtcagtattgtaagtacaaatattacattacattgtacagcttgaggcttaccaagcatggactattcattataacttttctcctatgc

SEQ ID NO: 111251 - DNA, 228 bp, Glycine max
  Clone ID: PAT_MRT3847_7146C.1
atgcttctctctccatcgcgaggggggctttcggattttcatgatatcctcaattcattcaccctcgtcacctgcaatagattctttcatgcaatcgagcattgaataacacaccattacaattcctctctcgatttgttttgcacgatcgctaatcacaagcgccctgtgaacacctgtggtatttacataacacttgcttttcaaaatgaaaacgctttgccacta

SEQ ID NO: 111252 - DNA, 1166 bp, Glycine max
  Clone ID: PAT_MRT3847_71470C.1
gcttggattctttaaaacgggccgcctttttttttttttttaattaccaaaggtaattttatttatttaaacccagaaggaccgggcaatggaccaaggtatttttattcccaaacctaaaccacctttggcccacctaatggcttaccatacccattaaatttttggattcctccgtttggcttgcttcctgaggggggctaatttttatccttattaaatggaaaggccttacccaaggacttacctttccattaccacctttattattttttaaattaaaatggcaggacccttttttttcccactcacattaccatatataaaaaggctaaaaaaattagagtttttcacataagaaaataataacaaaagtaaatataatttattcaaaccaagaggaacaggcaaatgagcaaagtaattttcatccccaaactagagcaactatagtccacctcaatgcataacataacccatagaattctcgtatcctccgcttggcatgcatactgagtggtgcttatatatatccttcataaatcgtaaagccatacccaaagacttaccattacaataacaacattaataatatataaaataaaaatgcaagaacctcttttttcccactcacaataacatatatcaatgggcttaaacttcagtcttctcgacagaaacttgttctgttttgggttcctctacggtttcagctggtttgttctcctcctgcttctcttcctccactggtgctgattcggtttctttagtctcctctttcacttcttcttcttcttctgttttctcagccttcccttcctctgtaacttctgttgcctcattagtctcaactgctgcttcctcttttgcttcttcgttgactgtttctggggcagtaacctcggtggctggctgttctggggtagtttcctcaatcttggttacctcagtcgttgtttcattctctgtcacagttgttggtgtttgctgtgcaacctcaacagtggccatttggaatgcaaagagggaaagtaataataggatgaagtatgaactggaaaggaaagctaagaataagagagagtggttgtgagttgatccaagtaagagaggtttaaatatatagttgtagagtcttcaacactaatatcttcttagagactgtg

SEQ ID NO: 111253 - DNA, 210 bp, Glycine max
  unsure (1)..(210): unsure at all n locations
  Clone ID: PAT_MRT3847_71471C.1
gcgatggggagaggagaaagatggaagagtcgcactcaaagagagcatttccagcagaacagagagagtgcttggactcttcctacgctctgatcagatcttcctccgacatacgattcgatctgcatcctacgcagtcacacgcgcatcgacatatacgcgagaggatcgtcncagcgatggatgatcggaagtccgatctggccgaga

SEQ ID NO: 111254 - DNA, 226 bp, Glycine max
  Clone ID: PAT_MRT3847_71472C.1
caagtagccaatggaaaaattgggattctaatttaataggcaacatttgggggagtgggtccttttttctttccccccctatctgtttgaaaaataaattatttcataacctgttgtcatttccaaattcttgcatccatagctccttaatgatgtcaaacctattttgttgtctgtttactatcatatgtcataagtaacctgaatttgatagaaatatgaagca

SEQ ID NO: 111255 - DNA, 468 bp, Glycine max
  Clone ID: PAT_MRT3847_71473C.1
gaaagagggtgtctttaatttcacagtttcatagcaattatcgacaaaaaatccaaaatttccactcacatctctctttgtttatgacatctcaaacatttatctactctctacccactttctcagttccagttgaagtgtggaaaaaatcttaagctaaaggcaatttgggaagctggaacaatgggttctgtttgttgttgtttgagttttgatgattttgaagattatgtaaatccaaatagtcctgtatataggaactgtgtgtgtctcagttgcttgatacagaaccttttgattgtgtattcttcaatattccgtagaggggatgcacattcaattccttcatctattcaaggggcagcatctataacttcagcagcatcactcgataattctctatctgacatgtatcgctcccctccagccacattaccatatgatgcagaacccagatatttccgctcg

SEQ ID NO: 111256 - DNA, 516 bp, Glycine max
  Clone ID: PAT_MRT3847_71474C.1
ctcgagccggcaaattttgccgaaaactccaaaaccctcttttagtaaactcgattaacgacaatctcaatcttctacagcttatcctatatctctctcttttcttctcttcccccaacaacaatttcaatcaaaactctctctcaggatggaggcatcgtttgcttttacgtttaaggttgtttgcctaaacggtaaatagtaaaaattagtgattgtgatttttcagctgaaaggtgattaagagaatcagagtttgcttatccatataacagatcacccgaacagaagagggagggtactggtttgcggagtcaattggacttctgcgagcttagaatcctctctcctttatttattaacgaaatcatagtcattagtcttggctagtgctgttggggactctttttcacaaagcgtgcatgtaacagcatccatgttttggtgatctttgagttgagaagagagaaaaatttaagttgaaaaagtgagggatattgaagctaaaacaatggg

SEQ ID NO: 111257 - DNA, 644 bp, Glycine max
  unsure (1)..(644): unsure at all n locations
  Clone ID: PAT_MRT3847_71475C.1
gattcctccacccacctaccaccgaagaacggatattacaagagagagagagtgaaatgttttgcttcctctaatctggcgaatcattcgttctagcaaattttgccgaaaactccaaaaccccccctttagaaaactcgattaacgacaatctcaatcttctacagcttatcctatatctctctcttttcttctcttcccccaacaacaatttcaatcaaaactctctctcaggtgattaagagaatcagagtttgcttatccatataacagatcacccgaacagaagagggagggtactggtttgcggagtcaattggacttctgcgagcttagaatcctctctcctttatttattaacgaaatcatagtcattagtcttggctagtgctgttggggactctttttcacaaagcgtgcatgtaacagcatccatgttttggtgatctttgagttgagaagagagaaaaatttaagttgaaaaagtgagggatattgaagctaaaacaatgggtgcagtttgttgctggttcaatgttgatgattttgaagattatatgaatccaaatagttctgtatataggaactgtatgtgtctcagttgcttcgtacagaacttnttgactgtgtatgaatcaatattc

SEQ ID NO: 111258 - DNA, 2109 bp, Glycine max
  Clone ID: PAT_MRT3847_71476C.1
ccggtgccggaacttcccgggtccgcacccacgccggcctttttcacctatagcgcggggaataacataaatggctcgaagattcctccacccacctaccaccgaagaacggatattacagagggaagagagagagatgttttgcttcctctaatctggcgaatcattcgttctagcaaattttgccgaaaactccaaaaccccccctttagaaaactcgattaacaacaatctcaatcttctacagcttatcctctctctctctcttcttcgcttcccccaacagcaatttcattcaaaactctctctcagatgatgaaaaaatactaaaaaaaaaaaaactacacttcacccaccaaaccaaagcaaaagggaaagaggacgatcgggaaagagagtgtctttaatttcacagtttcatagcaattatcgccgaaaaatgcaaaatttccactcatatctctttgtttatgacatctaaaacatctatctactctctacccactttctcagttccaggtcagcaagagaaacagtacttatccatattacagggttatgtgaactgaagagggagggtactggtttgcggaggcagtgacacttctgcaagcctagaatcctctctcctagttttttgtgaaaacagatagtgtgatgcttttggaggatccttttctcaaagcttgcatgtaacactatctacattttggtgatcagttgaagtgtggaaaaaatcttaagctaaaggcaatttgggaagctggaacaatgggttctgtttgttgttgtttgagttttgatgattttgaagattatgtaaatccaaatagtcctgtatataggaactgcgtgtgtctcagttgcttgatacagaaccttttgagtgtgtattcttcaatattccgtagaggggatgctcattcaattccttcgtctattcaaggggcagcatctataacttcagcagcatcactcgataattcactatctgacatgtaccgctctcctccaaggccattaccatatgatgcagaacccagatattttcgctcacaacgtgatggactagtttcaaggcgtgagaagggttcaagtcattcaaatgaggaaacagaacctctaagaagtgatgcagatgtggatccagaatctttaaattcaggagacaaatggaatgaaagtgcctgtgaagctggatcaaaggaataccattctaagtcctcactaagacttcaatcaacaaaatattcaactggagttggccttgtctatgcatcatcagaggaggaggatgtctgtccaacttgtcttgaagaatacactaaagagaatccaaagataatgacaaaatgctctcatcattttcaccttggttgcatttatgagtggatggagagaagtgacaactgtcctgtttgtggaaaggtgatggtattcgatgaaacgactttcacttgattacaaggtttgtgttgtggatgaagtcagcaactgaggcatggaagaatataagtatatagacattgtgaatactacatattaagtgtttgtcatgtatagtaagaatgaaaagtttccttaaccattgttgtgagttcattctaatcccgcttgtttttgtgttttaaaatttccacatgtccaaaactgtgaagaaagaaagaatatgcaattttagatggaaactttgtgatggcttcaacatctttccccttaattaatttgtgattaagagaatcagagtttgcttatccatataacagatcatttgaacagaagagggagggtactggtttgcggagtcaattggacttctgcgagcttagaatcctctctcctttatttattaatgaaatcatagtcattagtcttggctagtgctgttggggactctttttcacaaagcgtgcatgtaacagcatccatgttttggtgatctttgagttgagaagagagaaaaatttaagttgaaaaagtgagggatattgaagctaaaacaatgggtgcagtttgttgctgtttcaatgttgatgattttgaagattatatgaatccaaatagttctgtatataggaactgtatgtgtctcagttgcttcgtacagaa

SEQ ID NO: 111259 - DNA, 1280 bp, Glycine max
  Clone ID: PAT_MRT3847_71477C.1
gcaagtaaggattacataatggaatttttcaaggattttgggctgccaaaagattctattcatattataaatggattcaaaaggaagcccttctggggaggcttatgcagaatttgcaagtgctgaaaattccaaaacatcaatggtaaaggtcaggaagacacttggcagtcgctacatatagttatttatttacattcatacagagagggaagcagcgaaaccaagacaagagtggcatccttgttgttcgcttcaaattcaatgttctacagaggtaaatttgccgatggtggtgatgggcgtgaaatggctgcaaaacgccagcgcactgttgatccaggatcttcattctatggtgcttccaccggttccaattttatgtacaatccatctccttacggatatgtcagccaacctcctcctcctccaccttttcctgttgttcgactgcgtggccttccttttgattgtactgaaactgatgtggccgagttcttccatgggctagacatagttgatgtcctttttgttcacaaaggtggcaagttcactggggaaggcttctgtgttctggggtatcctcttcaagttgactttgctcttcaaagaaacaggcagaacatgggtagaagatatgttgaagttttcagaagtaagaggcaggaatactacaaggcaattgcaaatgaggtttcagatgctcgaggtagcttcacctcgtcgaagtgcttcccgggctaaatcatatgatgaaggaaaagaatcagctgagcacaccggggtgttgcgactaaggggattgccattttctgcaagtaaggatgacataatggaattcttcaaggattttgggctgccagaggattctattcatattataatgaattcagagggaagaccttctggggaggcttatgcagaattcgaaagtgctgaagattcaaaagcagcaatgataaaggataggatgacacttggcagtcgctacatagagttatttccttcatcacacggtgagatggaagaagcaatttcaagaggacgatgattccttggtgggatctctgattttctcttctgtagttatacttgttagcttgatcttataattaaagattttggtcaaggatatattttgttgctgtatttgttttaggatccatatatttttttaatatgcagatgagaaaaatgagcagctgctaagattgaataatgtgggggagggcggcggggctctgggggttcctcggcgtcctgcctctgctcttcttcga

SEQ ID NO: 111260 - DNA, 356 bp, Glycine max
  unsure (1)..(356): unsure at all n locations
  Clone ID: PAT_MRT3847_71478C.1
ttttaatttttggtcccatagtgactattaaggggcaactggtgatggaggaatggttgacagtgatcatgacagggcactagctgggcttgacggnccctcatttcaggatgttaaggaaatcactattctccgatcaaatcttgccaaatggcttaaggagcctttttttgaggagttaatagatgattgctttgtaagagggggaactaggaagaccaaaaactggcccaatctaccggctctgcatggagaaaaatgtttatgcttcaaaacctgatcgacagtatattttttaaaattgattttcctacctgcatttgcatagtgtttggggaaatgagagcttctgctgc

SEQ ID NO: 111261 - DNA, 524 bp, Glycine max
  Clone ID: PAT_MRT3847_71479C.1
acacaagacaaatttatctatattttcagcttaacaatcagcctgttggctcacatttactgccacaagcttggatttattttcctaccatttctttacaaaataagagaaatctagataaagtctaccaagatcaattgacaatgtttgcagcagaagttcttttctcttcaagagagattacagcttcaaaggcatcaatcagtgctttaaccttgcccttctgagtttcaacaagtttagttgctgtttcctcaatcacattattgtacaattccttgtccatctttcttgacctgcacattttgacgtctcaaaacaaccttctctggagcagttatagcaacagccttgacattagtgacgctcgcccccaacacttttcctttctggattttaaggctcctcagaactacccttttctatttgagtttcaaccaattctccccctaactttttgcactccttggcttcagaacaaacaatcccatccatttgaggctttccattctcctcagcttcca

SEQ ID NO: 111262 - DNA, 580 bp, Glycine max
  Clone ID: PAT_MRT3847_7147C.1
tggatcctggtagagcggccgcttttttttttttttttttttttttttttttgccatctaagcaaattgttattattttaaaattaataatacactatgccacagagtttaggtgacatctggctatatgatttatctgtgaataaaaaatgcagaagggaatcaattagcagaagaatttacagtatccacaatacaaccattggggacaatatgtttcatgtctatgacgaaattgtccgaaaggaatccaaatccaaaagtaccatttcggtactgccaaatccttccttctgcactccttggattcaatgttccggcaaggtctggaacaactaaatcataacttgaacttatgtgaagaattcggtctaccacattgtcggacaattggaactgctgaatttgatttaccacttcactatccgagaaagggaactgctcaagaactttattgcccggttgaagtggtcgaagatgaacacgactgtcatacaaagattcttccttcggagaaaagggagattccagaaacgtagcattagaagtccagaaaactggggcatgttccgaaaaacgg

SEQ ID NO: 111263 - DNA, 184 bp, Glycine max
  unsure (1)..(184): unsure at all n locations
  Clone ID: PAT_MRT3847_71480C.1
ctattatagtttactactctactacgatgcttcnctnagaggtagatcagcactgctcatctcatgccttctagccatgctcattttaatctcctcagatgggtcagccatagaattgagagaggtcactggtgctggcttgtgcggtccttcgtggggtcatctatggtggctttggtggtgg

SEQ ID NO: 111264 - DNA, 695 bp, Glycine max
  Clone ID: PAT_MRT3847_71481C.1
gaggacctgctgtatctggaatttttggagaagtttgagaggaagtttgttgcccagggagcctatgacacccgcaatatattccagtcacttgatcttgcatggactttactccggattttccctcgtgaacttcttcatcgtataccagccaagactcttgaccagttttacagcagagatgctggtaattgatgattaagcaagcaagttcatataccttggtctcctgctcaaccaatgcctactgtcatcagcaatttatttgtttctttgctttctcccccccaccacccaaatccacatttcttctatgcagcataaatataataaaaggattgagtctgtttgagggcctcatattttgagtcggtcggtagtcggaaagtagaccccatagatgctatatgattcctgagccattttttcttttggtgggggaaaatgagttgtgttagtttgggatggcgtcgattgcattgtgggatgttcatattccctgctgtttgaatttgtggacactgccttcccaatgtatgttgcttgtttcataattttattttttttatttatcttgtaatttgattgtttactttaggatattcataatcaggatagttgtcttttggacacatccttgatgtatttatctgcatgagtttatgaataattcaaacaagcatttatagtctggc

SEQ ID NO: 111265 - DNA, 297 bp, Glycine max
  Clone ID: PAT_MRT3847_71482C.1
aaaaaaaggggtttggaaaagttcccccccagggggggaccaaacgggggggtttgatcaaaaatccaaacctccgaggggcaagggggggaaaccccgagggaaaaacaactatatgggcccggacggggaacaggcccaattgctccaacagaggccacatgaaaacggtcgtgcaaacgagaaactcccccttggaacccctgtgatttatcaaaacgcccaagggggggataaaaagattcacatggccagcatatgggggtggaaccctcccatttgtccctgtcaagaaaa

SEQ ID NO: 111266 - DNA, 628 bp, Glycine max
  Clone ID: PAT_MRT3847_71483C.1
tgcccagggagcttatgacacccgcaatatattccagtcactagatcttgcatggactttactccggattttcccccgtgaacttcttcatcgtatacctgccaagactcttgaccagttttatagccgagatgctggcaattgatgattaagcaagcaagttcgtataccttggtatccttctcaaccagtgtctactgtcatcagcaatttatttgtttctttgctttctcccccccaaatccacatttcttctatgcagcataaatataataaaggattgagtatgtttgagttcctcatattttgagttggtcggttagtcggaaagtagaccccatagatgttatgattcctgagccattttttcttttggggggaaaatgagttgtgttagtttgggatggggtcgattgcgttgtgggatgttgatattcccttctgtcggaatttgtggacactgccttcccaatgtatgttgcttgtttcataatttttattttttatttatcttgtaatttgattgtttaggatattcataatcaggatagttgtcttttggacacatccttgatgtatttatcggcatgtgtttatcaataattcaaacaaaaaaatatagtctggc

SEQ ID NO: 111267 - DNA, 149 bp, Glycine max
  unsure (1)..(149): unsure at all n locations
  Clone ID: PAT_MRT3847_71484C.1
tnngcncgcgancgtgagnggngnantnggctcganngctcncgccgnggnnnggngaanctcttggttatnaatcggctgcancaagtgtngaggnccngtngnagttngtgaggntnatagncagncgtgtcnaagggngtgcctgt

SEQ ID NO: 111268 - DNA, 524 bp, Glycine max
  Clone ID: PAT_MRT3847_71485C.1
tgttttttttttttttgaacacaaatataaagttgacatttaagaagcaaaccaacaacgcaacggcaaagccctaaaactcgctgcgcttaacaaaaatgtaatcaggggttctcacaaacacaacacattacaacagaatgataaaaggagtcttgccaccgtcgatcaagaacccaattctgggaacaaaagttgcgagatgatggtggagacttcaaactatgtccgaaaaacaagctacctagaaacgaagacacaagggcaagaaaccaacattgattgtaaccatatgaaacgacatcccctgatgaaccaaaccgtacgattcacttcttcttctgggcagccttggtgaccttggctccagtaggatccttcttgtccacgttcttgatgactcccacagcaacagtttgacgcatatccctgacagcaaagcgaccaagtggggggtactcagagaaagtttcaaccaccatgggtctggtccgaatcactttaacaaaccagcatcaccattc

SEQ ID NO: 111269 - DNA, 363 bp, Glycine max
  Clone ID: PAT_MRT3847_71486C.1
acagctactagcgcggcgctttcttttttttttttttttttttttttttttttttttggggttttaccaccttttattgttccgaagacaatgccccgggcacgggtttttttaacgacccccttttttaataatggggtggcttaactacagactttttggacccttaccacaatatgcagggggatagctctactaaaaaacctcccccttggccccctttcaaagggcgttctttttttcccaaactacccgaaataaaacccccaccacggggaccccgggacccaaaattaccagcccctgagggggggggccccccccggtggcctttcccggggttttctcccttctggggtgggg

SEQ ID NO: 111270 - DNA, 492 bp, Glycine max
  Clone ID: PAT_MRT3847_71487C.1
ggaacacaaatataaagttgacatttaaaaagcaaaccaacaacgcaacggcaaagccctaaaactcgctgcgcttaacaaaaatgtaatcaggggttctcacaacccccacacattaaaacagaatgataaaaggggtcttgccaccgtcgatcaagaacccaattttgggaacaaaagttgcgagatgatgggggagacttcaaactatgtccgaaaaacaagctacctagaaacgaagacacaagggcaagaaaccaacatttattggaaccataagaaacgacatcccctgatgaaccaaaccgcacgattcacttttttttctgggcagccttggggaccttggctccagtaggatccttcttctccacgttcttgatgactcccacagcaacagtttgacgcatattcctgacagcaaagcgaccaagtggggggtacttagagaaaggtttcaccaccatgggtttggtcggaatcattttaaca

SEQ ID NO: 111271 - DNA, 341 bp, Glycine max
  Clone ID: PAT_MRT3847_71488C.1
gaaagaaattgtggtattaattaatccggccgtgggggttcaatgaacttacccgaacgtgcaaggcacgctacacgagttagaataaaagaattgctacacgcctattcaagcgtaaagaaaaaacctattcattccacgatcatttacttggagtcctattggattaaagaggaccttgttgcgagctactggagcaccctaaatagtggacggtgctccagaatgcataccaggtacatattgttcaaagccacctggcactgcctgctttacccttccaaagggtatgatttgacgcacaagccttgcttagaagggagagcggcatacagtctagc

SEQ ID NO: 111272 - DNA, 379 bp, Glycine max
  unsure (1)..(379): unsure at all n locations
  Clone ID: PAT_MRT3847_71489C.1
gngttttgtttttttttgttttttggaacacaaatttaaagttgacttttaaaaagcaaaccaacaccgcaccggcaaagccctaaaactcgttgcgcttaacaaaaatgtattcaggggttctcacaaccccacccctttaaaacagattgataaagggagttttgccaccgtcgatcaaaaacccatttttgggaacaaaagttgcaaaatgatggtggaaacttcaaactatgtccgaaaaacaagctacctaaaaacgaagacacaggggcaagaacccaacttttattgtaaccataagaaacgacatcccctgatgaaccaaaccgcacgattcattttttcttctgggcagccttggtgaccttggctccag

SEQ ID NO: 111273 - DNA, 603 bp, Glycine max
  Clone ID: PAT_MRT3847_7148C.1
ttgcctattcatttgccccatggcctttgtcacgcctttcatagcctcacccattgcttgtgtagatttcatagtctgaattctgagtgatactcttaaacaaattgttattatttcaaaactaataatacactatgccacagagtttaggtgacatctggctatatgatttatctatgaataaaaaatgcagaagggaatcaattagcagaagaatttacagtatccacaatacaaccattgtggacaatatgtttcatgtctatgacaaaattgtccgaaaggaatccaaatccaaaagtaccatttcggtactgccaaatccttccttctgcactccttcgattcattgttccagcaaggcctggaacaactaattcataacttgaacttatgtgatgaattcggtttaccacattgcctgacaactggaactgctgaatttgatttaccaattcacagtccgacaaagggaactgctcaagaacttcattgcccagttgaagcggttgaagatgaacacgactgtcatacaaagattcttcctctggagaaaagggagattccagaaacgtagcattagacgtccagaaaaccggggcc

SEQ ID NO: 111274 - DNA, 1662 bp, Glycine max
  Clone ID: PAT_MRT3847_71490C.1
cggctcgagcggctcgagcgcggacgcatgatatcaaatcaccctcaacttgagagagagagagagagaagtggatgatggagagagaggaagagaaagaggtggttggtgtgagtgtgctgcacggtggtatgatcataacgatggacgaggagcagcgagtgtatagggacgggggaatcgtggttgaacatgataaaatcaaagcaatcggacaatctgctgatatccttgcggagttttctgatgtcgccgacagtattgttgatctgagcggacatatcttactcccaggatttattaacacccacgttcatagctcccaacaaatggccagaggcatagcagacgatgtggatttaatgacctggctgcatgagcgcatctggccttacgaatcgaacatgagcgaacaggattcgtacctctctactttgctttgtgggattgaactcattcactccggtgtaacctgttttgcggaagctgggggccagcatgtttctgggatggctagagcagttggcttactggggttgcgagcttgcttaacccaatcaaccatggactctggccacggtttgcccccatcctgggccactcgaaccactcaccaatgcattcagtctcaaaaggacaattatcacaagtaccacaatacagcccaaggccgcatcagaatctggttcgcgattaggcaaatcatgaactctactcctcgcttacttattcaaacaagagatgctgcaacacaactcaatactggaatacacatgcatgttgcagagataccacatgagaaccaactagttatggatgttcacaaaatagatcacggaactgttacatacttggacaagataaatttccttcaaaacaatctgttagcagctcactcagtttggatcgataataatgagatatctcttctttcacgagcaggggtcaaagtgtctcactgtcctgctgctgcaatgcgaatgcttggatttgcaccagtaagggagatgcttgatgctggcatctgtgtctccctgggaacagatggggccccatcaaacaatcgcatgagcatcgttgacgaaatgtacctagcttctctaattaacaaaggacggggagtttatgctaatggaactacagatccaactgcattgcctgctgaaactattcttaggatggttactgtcaatggtgcaaagtcagtattatgggatgatgaactaggttctcttgaggttgggaaaaaggctgacattgttgtagtggatccttcgtcttggtctatggttcctgttcatgactgcatttctagcttagtgtattgtatgcgatcagaaaatgtggtttccgtcatgtgcaatggattatggataatgaagaacaagaagattatatatgtggacgaggaagaagttattttgaaggcaaaacaggcttcagttgaacttctgaagagggcaggcataaaattaccaaccagaatgaacataatttaactgttgtttatcagtatattgtctatgataagcgcttgtatccattgaacttgtttccaagaggcgtcaactgtttgatgctaagcgtatgacggtgcaatcatgatctggccattggatctttgaatattatttagcttttcaattatcttttttttgcttc

SEQ ID NO: 111275 - DNA, 199 bp, Glycine max
  Clone ID: PAT_MRT3847_71491C.1
tatggactatgctgcaaaacatgtgactgagaagatgatgcttaatgctggtgacatttacccgcacaacacatcagatgccaatgaagcatattactactgaatggtctttgagaaggtctttcgttagaactcagctaagctcactgttcctggatgagctgtggttgctgtagcaccacccatgctagttaattgg

SEQ ID NO: 111276 - DNA, 772 bp, Glycine max
  Clone ID: PAT_MRT3847_71492C.1
tccaaggaaggtttcccgtcatcactgtatgacgtcctccttctttggggggggggggggggccaaaaaaaagggactgggacggaggtaaatggggacgatacaaagtgaagaagtaaagaggataggggatcccaaaatcgtacatagcacggcacagctggagcgctaggctatacttggtgtatggtgtatgatttaaacagtgctagacgctggagatatctaggctggcagtgttataaaatggaggtacgggataagataaaggattgcgcgcttaggaaggtttcccgtcatcactgtatgacgtcctccttctttgggggggggggggggcgactaaagttcaatactggggtgaaagataacgccaaagatggaaaaggaaagaccaaaacgggagatgaataaccatgtggctaacaaggaggtagtgcggcaaaagtaccttgtgggttcagagcttgtgattaaacggttacggcgagtgctgacatttgtgataacgttaaaggtaccggttaagttacctatgtgtgggctgggtgtaatgcagctgcttgaaggttgcctggatcgatgtccgtagcgtcatcgtagactgtggtgagacgcgtattgaaaggtaaggtatgccttcgtcggggataatcgtcgcatgcccaaaatttgccatcggatttaatggaagtcttggctactatagtttttgggtcttcgtgcctcgaagactcaacaccgtttctattcagatctttggtttaatacg

SEQ ID NO: 111277 - DNA, 744 bp, Glycine max
  Clone ID: PAT_MRT3847_71493C.1
ccacgcgtccggtctcactgtcctgctgctgcaatgcgaatgcttggatttgcaccagtaagggagatgcttgatgctggcatctgtgtctccctgggaacagatggggccccatcaaacaatcgcatgagcatcggttcatcttaactctaaactttgaattctttcttatttgttttttataatttcactaaattcaataattccacattagtatttactatttagttagctcatcatcactcatagtcatgtatgcaaatttggtttgttatgtgaagaatttttattttcaatatagtattaaatagaacaaggaaacaatctacccgcccaaggtgggataggtcataggttcatgtaagactgtacatcaaaccctcaccagaccgtaaagttgcgggagtctcttgctcggatggagaatactgggcagtacacattctataaaataccaagtacattgtactgggtggaaattttcattaataaattatatttgcagttgacgaaatgtacctagcttctctaattaacaaaggacggggagtttatgctaatggaactacagatccaactgcattgcctgctgaaactattcttaggatggttactgtcaatggtgcaaagtcagtattatgggatgatgaactaggttctcttgaggttgggaaaaaggctgacattgttgtagtggatccttcgtcttggtctatggttcctgttcatgactgcatttctagc

SEQ ID NO: 111278 - DNA, 186 bp, Glycine max
  Clone ID: PAT_MRT3847_71494C.1
tcccaggatagcagttgagcagtatcctcaaactgccgtagctcctcctcaagctgatcttcaagacggtgccatgctaggaagctattcttacaggtgataggaggaccaaatagatccagtaaccaccaggtctattaaccccgggaacttgcttgatggactttaaatcgtttggaccccatt

SEQ ID NO: 111279 - DNA, 652 bp, Glycine max
  Clone ID: PAT_MRT3847_71495C.1
ccacgcgtccgcccttttctccttcaatggaaggtgaggaggggaaacagtcttcccaaaaaaacccttacgttgaactagaagaagttgactttgattttattctagcaatgagcatgcaagaacaagagagagagttcacaatgctttcaactattgaaagtgaaagtgatgaatatctaagtgactcctctatagataatgatgatgatggtgatcctgactttatagcgagtcaagagtttgaaaccgaccttcggtttcttgaaggtgaaggaagcgacgatgatgatgaagacatggaaatggaagaagatgagattgatccagacgaattatcttatgaagaattgatggagttggaagagtttataggagaagaaacaagagggttatcagcaaatgaaatctctttgtgcttgtacccttatacctgccaatgtgctgaaagcaaaagtggcattgatcgttgtgtgatttgtcaggttgaatatgaagaaggtgaagcactagtggcacttcaatgtgagcacccttatcattcagattgcataagaaagtggcttcaaattaagaaggtttgtccaatttgtggaaatgaagtttcaactcccaacttggcttcgaacccttagttatttagtttggattg

SEQ ID NO: 111280 - DNA, 533 bp, Glycine max
  unsure (1)..(533): unsure at all n locations
  Clone ID: PAT_MRT3847_71496C.1
ccacaacacagcctcaaaataaaccatgcagatacaaaccctcccacttgcatccccggctccaagaatcacccggcaccactttccgcggccaccgaaatgcgcagttaccgccacaccgccgccattgaaggagaggagaaaccactcaatgccgccggaaaagatagagattttcaagtccctggagggatgggcctcacagcgggtcttaccgctgctgaagcccgtggagcaatgctggcagccccagaagttcctccctgactcgaccctacccttcgatgagttcatcgaagcggtgaggtcgcttcgccaccgcaccaaggagctatctgacgagtacttcttagtgctggtgggtgacatggtcacggaagaagcgcttcccacttaccagaccataatgagtggcctggatggggtgggagacaagtgcggatcaaacccaagcccgtgggccgtgtggacccgggctctgtccgtggaggaaaacagacacggggatgtgctcangactgattggggtgtgg

SEQ ID NO: 111281 - DNA, 441 bp, Glycine max
  Clone ID: PAT_MRT3847_71497C.1
gcttggcgttcgtacctacaaatactttccatgaatgcggggaaggtctttgctactgaaaaaacacttaacgaacacacagtgtcattatgtatatcttcaatccaaacgcattcccattcacattcaatcaatgatggctcaacttctgcacactcccttaatcccttcctactactgcgcgctgcgttgggccgtcaccattcctcagcgcaaaacgacctctctgctgatggctctggccaagatccgggagattttcatgccaccactgagctccaccatgaccgacggcaaaatcgtctgctgcaccagatgcggaggcgacacgctctgcaagggcgacagcgtcggcggcgtcgagtccgacaaggccgacatggacgttgagaccttttacgacagctacctcgccgccatcgtcgacgaggaaggcggcgt

SEQ ID NO: 111282 - DNA, 377 bp, Glycine max
  Clone ID: PAT_MRT3847_71498C.1
cctttccatgtttaggatgatgaatgctcctgattcaaatgatatttttgctctactgctgagcattgatttgttggggttacacagagcagggcaagctttccctaactagatggaattaaaagaatagcttgtgttggctaacacacaataatgctcatgatggatatggtccagcggcatattggttaccaatggttgtgaattggctgtatactgtaagtcaatttccttcacaagctgtcgttctaaatgtcacatgatggaggcggacgtggtgactgacccaccactgattggattagtcctgcagttcacacttgatcctgagacatcaacaaaaagattcacacatcacttggcaaaggtaccaaaat

SEQ ID NO: 111283 - DNA, 380 bp, Glycine max
  Clone ID: PAT_MRT3847_71499C.1
gaatcatcacaattttccgttgttttttctttgatcttttcgatccacacacgatttttttttatttggatgcgtgcgtgcgtgcaggtttgggttcgcgaagggttttgatttttcggcggcggaaaatcttggtaaaaattcgtcttcttaaccaaataaaaaagaaaggttttcttctttaaagttggagggttgggtctgatgagaattgttaggggaatgcagagatcgctttgcgaggaatactactgctgctgcaacaaagattcgatcttaccaggggttggtatcactgcgcccaaagccagaacccgcgacaaacttatcattcaaaccctctgaaaattcattcaaaattagggttggtgatgcattac

SEQ ID NO: 111284 - DNA, 666 bp, Glycine max
  Clone ID: PAT_MRT3847_7149C.1
atcaaatgccaaaagttcttatattgaaaacgaaatccatacatatagtatatctaaacaaaaaaatagaaatagacatgggccttcaaaacagtttgggccaaaattacaacaaaaaaattataaataaaaaacatatttggcataggccttcaaattggtctaggccttcagcaacaattaatattcttagtagtgcctttgcctctgcctctgggccttcatccttctccacttgggccttgttaagtatgtctgatatcatttgttggagggtatccactgactgtttggtcctactcctggtcataagtccttgtatttgggtagttaaaactgcccaaatatagggacctattgtcgcaacctacccttcggcaggagggcgacgcgggacttgcgggtgcatcttccaaagaaggaaaaccagcaatatctgcaagtgtttctgcacatggaacactatgcttcacagctgcggctgatagtgcttccctaccttccatggattctgcagcaattttatcaaaactaatgtctgtgaaacatcttttttgcactttcacttccttgtaaccctgcaaagccttctgatgcttcatatataattcctcagcctctatagtagcaagtagtgtccggtgaacaataatatccggataccga

SEQ ID NO: 111285 - DNA, 1839 bp, Glycine max
  Clone ID: PAT_MRT3847_714C.1
attcatccaatagaacgcgcccctaccgagagacccgaaacacactcattgcgcggaagcagttatcgctgcaagaacaacaatggaagacggcgatacgacggaggaggcggttgtcgttccggtctcaaacggcgacgagcaatcgttttctcattcttcctcacggcaacgcgattcggaggaggaatctccgcacgaaacgttgcgtaacacaaaagcttcaatagagaacatcgtagccgagattctctctctgaagaaccaggcaaaacccaaaccactcctcactctccgactccgagagctcctcactcaaacgttcctccacttcgtcactctccgccaggcaaatcgctcgatcttgctggaggaggagcgcgcaagaacggaaacggagcgtgcgaaggtgcctctggaactcaccacacagaagcttcagaacctgagttatgagaagagtcaattcgtgaaagcgataaaggtgtgtaacgatttcaagtcgaagtatcctgatattgaagtggtgtcggaggaagagttttttcgcggcgcgccgcaggatatgaaggattccgttttgtccaatcacagtgagcataatctcgtgcttaagaggctcaatttcgagctctttcagcgcaaagagctttgcaaacttcatgacaaactggaacagaaaaggaaaacccttctggatacaattgcaaaccgaaagaagttcttatctagcctcccttcacatctcaagtctcttaagaaagcatcgttgccggtgcaaaatcaactaggagttcagcatactaagaaactaaagcggcatcatacagcagagttgcttccaccacctctttatgtgatttactcacagttgttggctcaaaaggaggcgtttggagaatctattgatgtggagattataggaagtgtcaaagatgctcaagctttttcccaccatctagctcacaaggacactggcatttccaccactgtggagagtcctaaattggaaaacaatgaacctgatgaagatggaaagggacagagtaaaaggccaaggaggtttcaaggcaaggagagccttgaccaggaaggaatatttcaaattcacccacttactgtcaatctccatgtgtatgatgacgagatttctgatcttgagtctgcaaaactcactactctaaagtttgagtacttgatgcagttgaatattatatgtgttggaaacaaagcatctaatgatggtcccgagaatgacatcttaagcgatttattccctgatgacacaggccttgagcttcctcaccagtcagctaagctctttgttggggatgctataatgttcaatggtgatagaacttcacgtccttacaaatgggctcagcacttagcgggtattgatttcttgcctgaggtggctcccttgctgcttgctagccgtgaaacttcagacagtgatgaagcagccaaaggtgaagaattcataactagtctttcacaatatcgccagcaaagccgattacagacagttttgcaaaaaattcgatcagggagaaaagctcagttggctcttcaataatgagtcacttcccttgtgtatgtttacagttttacaataggaagtgccgtccggggtattcattgaattaaaaataatgcagtcaactgaaaagcttgtttgtggtctatgctttggttgtattattgtaatgacatcttagtttttttttgtctgcctgctgtaaatccttgtaacccatcttttgtaagatttgtgtttttgtccatttattgaaattcaattctattttggagcataaaaaaaaaaaaaaaagaaag

SEQ ID NO: 111286 - DNA, 307 bp, Glycine max
  Clone ID: PAT_MRT3847_71500C.1
aaaaacataaacccaacttcacatagtataaaaagagagaacatatcaccttaatcatgacatgcgttttttaaataaaaaaaaaacttattcctcgtttttcgcaatttatataacattcccctttttcctttatagtaggcttgggcaaaaaaaaaatttacacgttttacccgggccattaaacaacaaaagcggggggttaatagaatttttcaaaaccccctcagaaaccgaattcccccccccctcttttatacattcccccgcttaagaggtttcgtgccccacgacccaaattttcaac

SEQ ID NO: 111287 - DNA, 777 bp, Glycine max
  Clone ID: PAT_MRT3847_71502C.1
ggtccggataccccgtcgacccacgcgtccgcggacgcgtgggaccagctcaacacgggttttccatttttcagtagtaaattgggggcaaattagattcttgacatcacagttgttgagggctttgacagatgggtcattgtacatggtgagaagaacgtcttctcagattcaattcaaattcctcaaagtcactcacacccttttctccaatcagattcgcaactcgctcagcttccagctagggtttccagctcaatttgcaagtttccactatccctcaatttcgaccgttgctagttaatttgaaatccgctgcccctgtagatccgtggcgggattctgttgacttcgaatttcggtttctgaacaaaaacaaaaagaggtacaaggttgaggggtttcctcaaacaaaggaggcctggtataaaatccagtagttgtggttaaattctctgcctttttaactggccgaggaagtaacttaccaatatttaagactactgtaaaatgatggagtgcaacaaagatgaggcagttagggccaaagaaatagcagagaggaaattttcagaaagggaatatgttggtgcaaagaagtttgctctcaaggctcaaaatctgtatcctgagttggaggatattacccagcttttgacaacaattgatatttatacatccgctgagaataaagtaagcggagaaatggattggtatggtatacttggagtgagcccctttgctgatgaggagactgtcagaagcaatacaggaagc

SEQ ID NO: 111288 - DNA, 203 bp, Glycine max
  unsure (1)..(203): unsure at all n locations
  Clone ID: PAT_MRT3847_71503C.1
acccgaaatgaggccgaagagacagtgaaaccgtgaatccacatgccggcacacgggcttagatataagacgggacttgaacatcgattctcaaacctctgaaactcaaatgacngatgaaaacttcagagacatcaacaacactccctccggaaaaggttctgacagaacggtacagacatagtgaactacaactctcaata

SEQ ID NO: 111289 - DNA, 210 bp, Glycine max
  unsure (1)..(210): unsure at all n locations
  Clone ID: PAT_MRT3847_71504C.1
tcggctcgagcggatctccccccaggaatngacggcgnncnctttccgcctcaggaggaagatgctgggcccgttncccgatccaagcccgctnaggtcgncgttnngccccagagaggcccttgttggcnccagcntgttggctgcttggnngctngggcccgatctctggattcatctcttgtctttnaagagctcttctctggttgc

SEQ ID NO: 111290 - DNA, 328 bp, Glycine max
  unsure (1)..(328): unsure at all n locations
  Clone ID: PAT_MRT3847_71505C.1
ccccccccccccccccccctcccccccccccttccccactccctttccccccctgaggccgcgggcccgattttccattatccactatcccttcccctgtcttgtgtgcgccctatctatgcttctctctttatnagcactactactgatctctctgccaccccatgccaatctttcagggctcatgatggtgccccgaactactgggcaaataaagaccaccgtgaaaacagataaccccactagtcataaaagggagagaacagaaaagacacaaaaaaaaagagaggggctttatgacgtatgaattatcatcctcacccgactt

SEQ ID NO: 111291 - DNA, 408 bp, Glycine max
  Clone ID: PAT_MRT3847_71506C.1
ttattcattagtttttattcatttattttctttgaagttctatttctgaatccttttttacaagacgatgaagggtaataaggcaaaaacaaatgggaaggtaatttaagttcttctttcgtagtggggagcgctacagatgctttgcaaatttttaaatgacttagaagcctggggtcttttaggcaaggaatttgatgcgctgcacttggcgaacgttgtcaaatccaatgatgcggatgatggcatcggggtatgcagtcctagcctattgtagctccttttacacctgaaaaggatttgggcagccaaacataggctgattacacatggtccagtatcgtcttttttagaatccaggcgacccgttttgctcacggtacacgaaaccgtgctccaacttgtatt

SEQ ID NO: 111292 - DNA, 241 bp, Glycine max
  Clone ID: PAT_MRT3847_71507C.1
gctatttaattttttgaaaaagtccaactgtgctccaccttttattctgaacaaaattggccgaaaaaaaaaactcttctacaggatctcgggtagggacctctgtttttcattgcttgggaaatattcacatatattgctatttgtttaaacagagcatacttgggatacatatagcaagtttccattatattgtcacacgaaccttccattgctcatttcactaggggccgaagggtaa

SEQ ID NO: 111293 - DNA, 422 bp, Glycine max
  Clone ID: PAT_MRT3847_71508C.1
gcaccacgtgtcaaaacattcagaggatccttttccaagtagagaaaccaacaaaatcctaatccaacaatacgacatctctacaaagctatcaaacaccaaaatggaggtttcattggcagttcatgtaaactttgtcattctaaacaaagagtgaaaaatcactgcagtgtctagaattatgtgatcttaccgatttctaagtgatatgtaatcatgtttgtcaatctaggagaaaaaactaataacataatgaataaaagttgacaaagaaaatgtagctgtgaacaaggttttaaaaaactgcgatcgtgatttcagccaaaacatcaaaataatttaattgtccataattgtaaaggcaccgtaattagaatactacatctgccagtcatttgggagcagatcaattaatgaataaa

SEQ ID NO: 111294 - DNA, 109 bp, Glycine max
  Clone ID: PAT_MRT3847_71509C.1
agtggctgtgctggatctgggggctgggaggttttatctgattgtcctgccaacgctggtggtggcgatccatattttacggggccattttggttgctgggtgcagcat

SEQ ID NO: 111295 - DNA, 901 bp, Glycine max
  Clone ID: PAT_MRT3847_7150C.1
cgaattcgggtcgatcacgcgtccgctcctcttttctttttattctttttgtttcttccttcatgcaggcgattccggctccatgcacgcaagttgctgaggatgagtttttaccgtaacacattgaccttagcttccttttctctgtgagtatttttcgctatggccaaagaatttgtgaatggctttgttcatcaaaatggcatcgctgtcataacccacaatccccccaaaggcgattccggctccatgcccgcaagttgctgaggacgagtttttaccgcaacacattgacctcaggtatttccttcttttttcctttttttttcttgatatctaatgtttttaagcttctttttctttgccttttcatcaaacgcatcgcgcataatcccaggcgattccggctccatgcccccaagacgagtttttacagcacatggacctcagtattttccactatggccaaagaatttgtgaatggctttgttcatcaaaacggcatcgctgtcataacccgcaatccccccaaaggcgattccggctccatgcccgcaagttgctgaggatgagtttttaccgcagcacattgacctcagaatttgtgaatggctttgttcatcaaaacggcatcgctgtcataacccgcaatccccccaaaggcgatttcggctccatgcccgcaagttgctgaggacgagtttttaccgcagcacattgacctcagggacattccccaacatagatacagatttaaatgtcttgaagaagagaatagagacgctgcatttgtaataaccttgagttcttttgataaaatttatgttcaaaaaccttggacgggttgctggtgttctttttcctgttactttattctttgaaattaatgttactattattc

SEQ ID NO: 111296 - DNA, 380 bp, Glycine max
  Clone ID: PAT_MRT3847_71510C.1
tgttttcgggcttgaccagctcactaggctggggccgccctatcctttcatagtgctccttttgctgttttgatctaccattacacaagatgtcgggggccaccggatctgatcaacctcaatctctcaaattgcacaggacagatcgttgctgggtacatatgggcaggtggctctggggtggtccttacaagcaaagccaggactctggctgggccaaagagtgaccctgctaagccttcaaagtggatactacgatggttatagcacagaccaagcttcgggggatgacagtgaaggcatgccacacccacacgctattggcaaggacccctgtaggagaggcaacaatattcttgtgatttgtgaagtttacaccc

SEQ ID NO: 111297 - DNA, 463 bp, Glycine max
  Clone ID: PAT_MRT3847_71511C.1
ttgtaaacgaactgatgctctacaactgttaaagtaaacctccgacctgcattggtgataagaggaactataggtgcacctattataacatgctgaacgattcctgaatgcgctgatctccattgagacattaccctcgctagctagttatttttctattcttttaggccacaggataccacaacaaccgctcatacaagctcttgctgtgctgtacactatcaatgactacgccctggggacctgattgagatctacacagcggagttaatgctgtgtgaccataccaataattgtccgaagatgaggctgagaatatcattcccacatgcacgcactctgaaacctacccatgtgcctgattatttttttttaggcaatggcttctctttagctccttgcagtgagcatgttcagaccagaccaaaacactattaattttacactaatgcaccagatcatg

SEQ ID NO: 111298 - DNA, 656 bp, Glycine max
  Clone ID: PAT_MRT3847_71512C.1
agatcactaggactagctgtcgacgtgtgggtagcaatgtaccagagtcctgtcacgggcacgtggtggcagttggtgggggtgttggcaatgtaaatagcctacagcaccgccggtgctgacagggtgccttaacgttagggcccagcacccgtaccaggctatggctgcaaaacccgagtaaagagcacgataaacaacaccatggcaccaataacacgttgtggtgttgttaaagcaatttccggtataacaacaggttccggtgtagttataagcctaaatttagggcgcaagtttgtaggctgcggtacgataggcaccaccgggccaagcatacaaagtttggcggcttggtgcatttggattacacactgtacctgacaggtgccctgcaggagcggcagaacaaccgatttggtgcgctggtaagctggaggcaggagggtaggcgaaggttgggattaggcaggggaacggggctggggacgagacaagcagctaagggccggcgggtaggattagcggctgcttgaggaggaaggtggatttggagggacagctaagtgccaagagcccacagctagaagcggaccaacagccgtattaggaccaggaaagatgtgatgggtgggacagttgggggtttgacagtg

SEQ ID NO: 111299 - DNA, 260 bp, Glycine max
  unsure (1)..(260): unsure at all n locations
  Clone ID: PAT_MRT3847_71513C.1
gtnntncattgtgcattantcaatggctcancacagcagctctatccggaacnatggtgagcacntctttcatgaggaanacaacctatggacgaccaagagccctagagacattccccaacgcttctttttgntgctggaanagtggancnangtggtcgtgtaaacttgnaatggcctncgtaaaaggtggaagctnataacccccacanggncaaggggantttgagtgccnanttgaggtttcnaggnnanaaagg

SEQ ID NO: 111300 - DNA, 520 bp, Glycine max
  unsure (1)..(520): unsure at all n locations
  Clone ID: PAT_MRT3847_71514C.1
cggacgcgtgggcggacgcgtgggtttcttacttgcaattttttaaccctttcttcttttgggtcttccactttctttccaaccatgccagtactagaaacccttggtggtgctctttttggtgctgtccttcaggtgctgtttgacaagctggattctcatcaagttttggattactttcgtggaagaaagctcgatgggaggctgctgaaaacgttgaagtggaagctgatgtctgtcaatgctgtgcttgatgatgcagaacaaaagcagttcactgataaaaatgtgaaagaatggcttgatgaggtcagagacgtgttgcttaataccgaggatctgttggaggaaatagactacgaattcaccaaaactgagttgaaagctgaatcccagaccagtgctagcaaggtatgcaattttgaatcaatgatcaaagatgtncttgatgaactagattctcttttaaatgtaaaggatactctacgtttgaaaaatgttgggggtgatgggtttggat

SEQ ID NO: 111301 - DNA, 227 bp, Glycine max
  Clone ID: PAT_MRT3847_71515C.1
aaccaaatactcaaatctacttggccacagctatgcgcgacactaagcgagagcgcggtacttcttcctgcactgtcaccccctattatttgtcatcaaaaggatcaaatcgggatgagatcgactaataattcttgatgaactctgacggttacccatccatccctcacaccaatgtactcactcccatccaaattccctaagcagctcacacattatctatgcct

SEQ ID NO: 111302 - DNA, 305 bp, Glycine max
  Clone ID: PAT_MRT3847_71516C.1
acgtgttcgcgggggcggactcatggggtcaaatatgacataattggtgctggttcacattcttcagaagatattcctgaaaaggaagatcaagaaaaacccaaaaagattgatgccagattgagacactgaagacaccctcaatacagtggggttcacgctcaaatgggaacaaattggagagattgactctagaggatggtggaactcctaacgggtccatgttggatacttaaaattcatcaatctaaaattgcactatccaaaaacacagttggaggaaccattctgcgtgagtgatctat

SEQ ID NO: 111303 - DNA, 302 bp, Glycine max
  Clone ID: PAT_MRT3847_71517C.1
agccttcgggcggaacccattttggatttaacccttttggcattaataatttttttgaccactcttttcttgggccatggcggccattccacatttggcttgacccctcttggattatctaatagcttaaacttggaaattccaaagccttaccaccttgcaatcaacgagcggttcaactttttaaatggagtgcaccaaatttggggattcttcacggacaagccttatattccagggagcaattccaagccaccaactgagaatcgtatcgctggataccattattcattcggggtgtg

SEQ ID NO: 111304 - DNA, 276 bp, Glycine max
  Clone ID: PAT_MRT3847_71518C.1
atgtaagcgcttaattcggttctagagtgtgtgtgggagagatggctatggcttcttggaagaatctggttctgttgttgtttatctttctcggcacttttaatgcagatgatgaacagagctctaccccgttgtatctggagcagaactgttccggcggcaatagcatcgtcaatagtgcctaccaactcaaccttattaccctcctcacttccctgtcttccaactgcttgaggaccttattctcgaacaacaggtggggattgggatgatccg

SEQ ID NO: 111305 - DNA, 1028 bp, Glycine max
  Clone ID: PAT_MRT3847_71519C.1
gaaagatgcgcctgcctatgaactattgagtgaagatgaagactggggtcctggcaaaagaaagcgaagagaaaaggagtctgatgctgttgattctcttatgactttgcatgaaagtgagaataggcatcccaataatgagcacaacatgacaagtaaagattcttcaagcataaagatcaaaaggcattgttttaggattccacgtgatgcagttgagaggcttcgccaagtttttgctgagaacgaacttcctccaagatctataagagagggtctttcaaaagagctgggccttgacaccgagaaggtcagcaaatggttcaaaaatgcacgttacttagcacttaaaaacagaaagcatcaagcagaaggagtagcagatcagcttcagagtatcacttctacaaagaacagattacaaaaacaggagaatgtcgatcctttgaaatcaaagaccccaaaaattactaggacacattcccagaaggatgttaaaaatgtcaatggaagaaagaaaatgaagtcatctaacaagaaaagacaaccagaaattcctccacctccaggagaaaatggcaagaaggactttatggagatcagtgatgatgtgagcttgaagaaactgttgaagaaaagaaagaagaggttgataaattttacgtttggaggagactctcagttggcagagttggaatttgaaagactaagcgaattgaagactaaagtagatagtatgaagcaaaaattaactgcaattcaaaattacagagttaagggttcaccctattcgaatgaaccatccattgtatatgtacccacagctgtgttaagggaaaaggttgaatgataactttaattgaaaaatgcacagtgggggaatacatgatttgtagttagttcctgtctttcctttgtagtattcaaagaaaggaactgttttgaagttaatgatattaatacttgtctcacataacttggtattaaatattaatgatattggcttgctcaaagccaccttcagtatg

SEQ ID NO: 111306 - DNA, 866 bp, Glycine max
  unsure (1)..(866): unsure at all n locations
  Clone ID: PAT_MRT3847_7151C.1
tcttcngaatcttcttctctttttcttttattctttttgtttcttccttcatgcaggcgattccggctccatgtaccgcaacacattcacctcaggtattttcttctttttttctttttttttctttcacgacagcttcatatctaattttttttaaccttccttttctctgtgagtattttccgccacgcgtccggaactttctcttcaaaatcttcttctcttttccttttattctttttgtttctttcttcatgcaggcgattccggctccatgcccgcaagttgctgaggacgagtttttaccgcagcacattgacctcaggtatttccttcttttttcctttctttttcttgatatctattttctttaagcttccttttctctgcaagtattttccgctatggccaaagaatttgtgaatggctttgttcatcaaaacggcatcgctgtcatatcccgcaatccccccaaaggcgattccggctccatgcccgcaagttgttgaggacgagtttttaccgcagcacattgacctcagtatttccttcttttttcctttaattttctaattgtcttgttcttcaaaacggcatcttcgtcataacccgcaatccccccaaaggcgatttcggctccatgcccgcaagttgctgaggacgagtttttaccgcagcacattgacctcagggacattcaccaacatagatacagatttaaatgtcttgaagaaaagaataaagacgctgcatttgtaataaccttgagttcttttgataaaatttatgttcaaaaaccttggacgggttgctggtgttctttttcctgttactttattctttgaaattaatgttactattattcc

SEQ ID NO: 111307 - DNA, 275 bp, Glycine max
  unsure (1)..(275): unsure at all n locations
  Clone ID: PAT_MRT3847_71520C.1
caaagattggaaaaagagcccatcaacaatcatcattctctatcntgccctcttttcccgcctatctccctatttgatttgcccttctaactctctctctaatttcatttccgtcgtcttacctttacatttcctgtcctgttagtgctgaatgctatctgaatagttcattctcttaccacctctctagagctattctaactatttactcagttcactttcttttttaaatattacatctttaacagagcatgtttgatctgtcttccatttgc

SEQ ID NO: 111308 - DNA, 522 bp, Glycine max
  Clone ID: PAT_MRT3847_71521C.1
atatattttttcacttttatcctctgtatatttattcattttttattatattttttaaaataaatcatgattttattattatttttagttatttcaacaattagttttatcaaatatttaatttaataagctagtttttaactttcatttactaactaattttttaactttcaattaaattttcagcttccagctaactttttaattaattttgttaaatatactctagaaaacaaatatttgctacaaatgatgcttttgattggggatgagaataagacagatcaggctttaaaaggtctgagtctagcctaagataaatttcttagatctgagtttggcctatagcctaaggtttttattttgactcgatctgacctttttaaaaacctagtctggcctgatagtccttttaaaagtctttttcacattaaacctttaatattcctttgatagttgtttttaatataactttaatatataatttggcttaatttttaatataactttaatttagttggt

SEQ ID NO: 111309 - DNA, 256 bp, Glycine max
  Clone ID: PAT_MRT3847_71522C.1
tgctaccgattcctttccaggaaggtttcccgtcatcactgtatgacgtcctccttctttgggggggggggggggtagtaaaaggttagtatcgcgatgaacctaatagcatgcaggaaaataagagtatgagtaaaaggaaacgtgttgactcaatgactaatgccgaaaggcttagaattcagcaacccgtgaaatgacgtagtacaggttatcccgaagtagcttccagcgacggaaaattagttcgggttaa

SEQ ID NO: 111310 - DNA, 224 bp, Glycine max
  unsure (1)..(224): unsure at all n locations
  Clone ID: PAT_MRT3847_71523C.1
attcccttttcatctcacgcgcccgcgagtaatagccctcaacattgcgaatcccacgaggggttttttgacgaagctntgcatttattaccacctgaagctacgagcattttgggacaagaggatctcacaagaggttgtcggtgatgctctgggtgaggaattcacaggctatttctacaaaacctacttggaggttcgtaccagcccggctttccacccca

SEQ ID NO: 111311 - DNA, 393 bp, Glycine max
  Clone ID: PAT_MRT3847_71524C.1
aaatcttcatttgcatacttctacgtttatgttattttccacttaaaaggttagatctatgttctatagtttacatgggtctgtatattttctttcacttacaggttctggtaggttttatttctgttaatgttcattaagtctttttatcgatgtgaagatctttcatatttatgttttgtaattgtaatatactttgagtttgaaaacgtgggtatttggttgataagcttgagcagattagtcatgcaatgtggttggatttgttttttgacttttcaagtttttactcatttctgatctttttccatatatgagtcagtttctgccatagcatttgtggcctaacatgctctttataaatatgttagctataatgacatttaattacta

SEQ ID NO: 111312 - DNA, 242 bp, Glycine max
  Clone ID: PAT_MRT3847_71525C.1
caagaactagcagagcatataattccatttctctgctcactctcacaacagtgactgaacctgttagccaaagtttcatttgaaaatggtacttccctgccctgcccaaatactagttggcctctccttagacccagatgacagcaaggagcttctgtcatgggcaataagagttctagccaatccaaatgacaccattgtggctgtgcatgttcttgttgctgcggataagaagaagcgtg

SEQ ID NO: 111313 - DNA, 240 bp, Glycine max
  Clone ID: PAT_MRT3847_71526C.1
ttttctaaaaattttaggcttttaccgggaaaactttaatcaagtctctttttaattcataaaaaaaccaattttttaccatctttcaacatcaccaaacctatggctacggttaaaaaaaatcagtctacccttcatcttatacctactcataccaacacctataacccttcacaaattatttcctattttggaccaaattttctttcatcccccctgatcatcacattttctaacatt

SEQ ID NO: 111314 - DNA, 318 bp, Glycine max
  Clone ID: PAT_MRT3847_71527C.1
ctaaagaataaacccctgtgaaatgactggaagtatatctctttggaagccatacttgcattttgaaaagctctctcgtaactaaccttaacaccttcaatagaactccttgctctatggagaccttgagctctatgctaaaaaaactcctacaggctggactgttgatcttgcccgggggatgctaacatttccccttgtaaaccaccaccacccttttttgttggaccttagcttacagatgtctgtcttgccttatcaagctctgaaaatttatacattgaccctaccgtaccatcttcgggtcgagctgatggc

SEQ ID NO: 111315 - DNA, 205 bp, Glycine max
  unsure (1)..(205): unsure at all n locations
  Clone ID: PAT_MRT3847_71528C.1
aaatagaaatggaagcattagccttgacatattgaaggagcagtggagccctgcgctaactatttcaaaggagttgctgtcaatttgtttactgtagacagactctaatcctgacgatcctttgntctatgtaatttatcacatgtgcaaaacagacacgatcgcctacgattcaactgtcagaaactggacccacaaatatgcc

SEQ ID NO: 111316 - DNA, 469 bp, Glycine max
  unsure (1)..(469): unsure at all n locations
  Clone ID: PAT_MRT3847_71529C.1
atattcaactctgtttttatttaaattataaataaaattacatttcaaatcatcattcatatgaatttacattatttaataaattttattgttaaactcaataagcacacactcactctttaccatgcatacccacccgaaagagtgcattcccatgttcgattcacaacctgaagcggttcaaggaagattttccatcaagggcctttgcatagtagtatgccacgaaatcttttatggtagtgtctctgtacattggcggattttcttctgaaattagttccttaattggaccatataacttctgtaaaccttcaactgggtcatccgaatgtccaaagaaggtcccaaagaagcttgctacagaaattcttgggcatgtcttctttgataagacccggtggcacacacttgacaacttgtcatttgtgatgagctgganaaagtctcctacgtttacaacaagagc

SEQ ID NO: 111317 - DNA, 265 bp, Glycine max
  Clone ID: PAT_MRT3847_7152C.1
cacaaagctagctaaactgagcatactctacctctactggaccacggtacgaaaactagcgatgatgtttgtctagcccaaggtgagatagtgtcgactcattaggctggacggtatggttcaatacatgatggtcaatatggactactatggtttaaccggattgatgtgtacatccagagaaccttaaaggacagccactgaatagagaacgaagcctagggcacctacataatacgagccaactgacgtagaggagctctgt

SEQ ID NO: 111318 - DNA, 413 bp, Glycine max
  Clone ID: PAT_MRT3847_71530C.1
gagaattgatcatgaatcaaatgtgtttgattagatgttgtgtattcatatttatatccatttttgcctcaaatacccaaaagaacataaaagttagtcattgatgctttagcattatccagtttcattgttcatggcatataaccaaacacatgataggtaaatcaaatttacctaatttaatcaattaacaagctttttaagaattataggttaaaaaatattctcaagttttttgttgtccctctttatttccacttcacaatgaatacatataagttatttttattatttttacttgcatgataaatgtgtaaattaattaaaaactaaataaagaataaaaagtgtaattaaaaaattaatattattttaaactttaaaaatgacaaataaatacatttttttcaaga

SEQ ID NO: 111319 - DNA, 710 bp, Glycine max
  Clone ID: PAT_MRT3847_71531C.1
cataacctattggatggcagggtccggtcccaaaattcccgctttcgacccacgcgtccgcaccctcttactccacgtcttagtctacaaggccttggcctcgccctcggcgccactgtgatggaccaaaaagctgcaaccacacttgcctcagtgctcatgctgtgtttcttgcttgctggtggtttttatgttcagcatgttccagtgtttatttcatgggtgaagtacatttccatcaactactacaactaccagctctttatcgcgtctcaatatagcgatggcgagacatacccttgttctactggccagtgtcgagttgccgaatttccttctataaagcaaacagggtttcatttcaatctgcaagagcaagtcatggctgcatcagctcttgtgataatgatgataggttacagacttatagcctatgttgctctcatgaggattggagtgacaaagaaatagatagactagtgttcttaaattagaaggaaataagattttgattttattcaatagtaggttacagacttatagtacttaagtaagattttgatgttcttccatagaaaatgttttattctaattctgtggtgtggaacattgcttcacgcgcaagggaactagctagttaatgtgaaacttctggtgcagaatagtgtgtgtttgatttaagcaatttcatatattgaatctgttgattg

SEQ ID NO: 111320 - DNA, 341 bp, Glycine max
  Clone ID: PAT_MRT3847_71532C.1
ccccaggccccccccgaagaaaactataacccacattaagggaactgacccctcagcaaggggagttcgagggggcccaaaaaaagtttagggggagccttcaaacgggtaaaaagaaaaaagggtcgccaacccgggggagggggcaaaattggataaacacggggggcctgcatgtggggggccccaaaaatgaaaaaaacgttaaaaaccaaccaaaaaattgggggggccgctagaaaagataaatagcccccgtttggggggcacttcttccccctaccaagggggggatatgacttaggcggggggggccccctttttttggacccccccaattt

SEQ ID NO: 111321 - DNA, 197 bp, Glycine max
  Clone ID: PAT_MRT3847_71533C.1
ctaagccccaaaagtaggagagatagaagaagtaaacactcgagaaacttctcacataggggttggattttgcgagcaatcttctctttcccacacttgatcacacgcgatctcgttcccatagcacacgtgttcatgatcgaccgtgtccccatgctctgattcggtactaatctcttcttcgcctcacctcttct

SEQ ID NO: 111322 - DNA, 224 bp, Glycine max
  Clone ID: PAT_MRT3847_71534C.1
aggggatatgttaaagcagttggcaaatgttttcccaagcaaatggcttgaaatgtgagaacccggccaagtacgcaacaatactatgagtcaacctgccaaaaaggaaaaaaatgtcctcggggacatagaggcacatatgcacccacataacgcgtaccgaaaaccatcaaaaggacctacaggggtgccaaccggtcccattgggttttacactcaccaaa

SEQ ID NO: 111323 - DNA, 724 bp, Glycine max
  unsure (1)..(724): unsure at all n locations
  Clone ID: PAT_MRT3847_71535C.1
aatacaaatgtatctctcattcaatgatagcaatacatagattataaaccaaggcaaactggctgagtcaatgaaaagcattaaggttacattctgaaagaaagaaaccaggaacaaggagttcaatttgaactcccattcttattcttatttatatacatacgatatctaggaaaacaaactcaccatgtctcactatgaacttatatatatttatgtacatgaactaagaaaaccatctgaatgaaagggaagagggtaaaactgcctagatgtcacctaagataggggagatactcagtaaacacaagaatgttccttcaccttagaagaaaatgcatgaagaaccatcctgctctttcttcagctggctgacaacagaacaaagtcttctaacaaacaaggctagtgaaccaatgtggctttacaacatgtgtttccctcttgaccggttgaacactgccaaataagtttgctgcgcctggctttcaactatgtacttataagaactgagatagccttgtcattttctggtgccgtgtcctagannntgctgctggattggcctgcaagactggcgaggcttgcattgaatggtttttgtcatcatgctttgaagggaaggctttaaagagagttcccccaggaactgagtcagccttgtcatttttaatccccagtgttgcccatatagagctttttgccgcttctgagtcatcaatcc

SEQ ID NO: 111324 - DNA, 227 bp, Glycine max
  Clone ID: PAT_MRT3847_71536C.1
aagcgcggaacccctagagcggccgcacatcccacccttttgttacaaccccccagcgaagaccacgaggcaggggataaaaaaaggaaggggcggaacccccaccaagaagcaacgggggcagaggggccccgccaaacacggcggacggccaagaaaaccaccgggacagaccgcaacaacggccgaccggcccggagagaaaaaaacccccgcccccggccgcg

SEQ ID NO: 111325 - DNA, 489 bp, Glycine max
  Clone ID: PAT_MRT3847_71537C.1
cttgtcctatggaatgagatgatcaattgatcaaactcaagttaacccttgttgggctttagatcaggcaagcagtttacaaagaacttgaactatgataaatcttgaagagtattgcatcagatcctcctgatcttggatttttgtaagtgtgtgctatggaaagtatgctttatacaatttaatttagtgtgcttcttaaatagatcccgatggccgaatttttatctccttttctctttcatcctccatgtgcttttgggagtaattgatattggactatcaggtccccgtaccccctgaaacgtattcctaccgagttaatgtttttgcttaccctgaataacctgtttgttctacattattttaagagacaggtgaaatttccctccttgatttataaggttctacaatgttctcttctctcattcaatggttgttctcatactagtcaatggtgtgctatagcagagtagtggagtagcccta

SEQ ID NO: 111326 - DNA, 278 bp, Glycine max
  Clone ID: PAT_MRT3847_71538C.1
gaagtagactgctgacatagacggatggacgtacgccacgtcagtccttacgtgccgttgggcactctttcatatgcgcgttcataggcatggtcccaacactttctcacggccatgctttcaggccaattactaatagcatctctaccgttccacagtcagcagtcggtgatgtgcgcttctctatccaactaacggccgtctcagttgaccagctgtcgtagtctcagccgattcatctcgttacatatgtataactggttgagctccgtgtatgg

SEQ ID NO: 111327 - DNA, 298 bp, Glycine max
  Clone ID: PAT_MRT3847_71539C.1
ggtggtgctaaaggtgtgtttgttgcttcttttccttgtgggggttacagctgcacacatggaactgatcttcttcaaaagtgatcaatcatcaagttatgataataataattattcaaaaccatgctgtaatctctacatgtacacacactcaatgcctcctcaatgcatctgtaaaaatattaagctgaattcatgccactcatattgtaagagctgtatgtgcacacactcacatccaatacattatcattatcttaacaccaacaacttctactacaaaccttacaagtccaga

SEQ ID NO: 111328 - DNA, 433 bp, Glycine max
  Clone ID: PAT_MRT3847_7153C.1
gtatctgaaacaaagtcaaattctgttcaacaatgcagggcattagcaagttgagatacaggatatctagtctgttgaaaattaaaaggatttaggtagggaaagaaggaaaaaaaaactcacagttataacctgaaattgcatcaatttgatgtcatacgaaacacaaagtactaacctaagtatcacatgagaagaaagataattgctgttatcttagtccatgacattcattatatgtctagacctcaactgaggcaatcttccatgataaatcaaaataatgttattttaaacatttttatctgtatcttctcaatcaaagtgaaacagaaggtacctttcactttttgtctatgttgagttttggaatcattctaggaacatgcagcaatcatagtaaggtttccatcttgagggactctcatgatat

SEQ ID NO: 111329 - DNA, 929 bp, Glycine max
  unsure (1)..(929): unsure at all n locations
  Clone ID: PAT_MRT3847_71540C.1
gcctgtnggggcactaccgnatccaaagaattcggcacgagtagattctgattctgngnttntatggagctaggcctnatgnatggggggggnaantttntgctngaacaaattccccccccccnaggtngnnttttntatgtnaccnnccacgcctcgttattgttcgctctgcctntcctgtgtantntancatntgtcgcatttgattttctnncgttccnggtgcnnactnngctnttttgattgntttctnncnnngacttctncctnngctctccgtcnnattcttctnccncntcntacctcnngtactcnnccccgcncnttctgttngtntnntntttttnntannagtnnttctcnntcctnttttncnctcncnncnnattngggnntccnnnatntctcgtntttctgtttcctnnctccatatccgntntgntcncctnccntgttcgtgagtcatncacncnnnattnccattcnnnntcnannncncgntgctcgcctcttncttctctctntcatnntnngctntgtacntngtnntgtctctnncnttcttcgcttnctngccccngtncntcnttctgcttacagcnnccnctttcnctnttccgtcntncnacgnnnttcctcnnacctatnttcctttcnncgtcggnccttntttacattctctctctnctntctctttntntctngttcttttctattcctcctnctntcnnnttgnttaatcgtntctttcctcncacgnnntcnacgatngtctntnacttactgtcngtctnaatttatcctcnggatntanttgcctacncttttccctccttgctcnttntnttantctngcgcgntntctccatcncttttttcttctttttcgntcgntccctgtctctcctcctactctctcttcttct

SEQ ID NO: 111330 - DNA, 1008 bp, Glycine max
  unsure (1)..(1008): unsure at all n locations
  Clone ID: PAT_MRT3847_71541C.1
gttttacggttggaagtaacagcgagaagggatttttctcgagaaaagaatcttcacgttgagaatcgagttaggatgaaattgtgtggaagtatatggttatggctgatacttctgctggcttcagttcaatcactgggatctgagaggacggatgtggcatacgtgactctattgtacggagatgaattcttgttgggtgttcgagttctcggcaaatcgatacgcgacacgggatccaacaaagacatggtcgttttggtctctgatggtgtctctgattatgccaatacccttctccaggctgatgggtggatagttgagaagattagtttactggcaaatcctaatcaagtacgtccaaagagattttggggtgtctatacaaagctcaaaatatttaacatgactgactacaagaaagttgtttatcttgatgctgatactattgtggttaagaatattgaagaacttttcaaatgtggaaaattctgtgctaatttaaaagcattctgagaggttgaattcgggagtcatggtggtgcagccatctgctaccattttcaatgacatgatgagcaaagtaaaaactctgccatcttacactggaggggaccagggatttctcaattcatattactctggatttcccaacgcacatctttttgaaccaaatttgtccccagacatgttggatactagaccagttcctgaaatggagcgactttccacactttataatgcagacgttggtctttacatgctggctaacaagtggatggtggatgagaacgaactccgtgtaattcattatacactaggccctcttaagccttgggactggtggacatcttggcttgtgaaacctgttgatgtctggcagaatgtaagggaacagctggaggaatcccttcctggaactggagggggccaaaatcctaaagatattatcttgtgaagtttctttttctgctacccatttgtgctgngctgttctgctgctatcgt

SEQ ID NO: 111331 - DNA, 1165 bp, Glycine max
  Clone ID: PAT_MRT3847_71542C.1
cttatgatgaacttcgtctggcaactgaggagttcagccaggaaaacctattaggagttggaagctttggctcagtttataaaggccatctaagtcatggagctactgttgcagtgaaagttcttgacaccctaagaactggctctttgaagagtttctttgcagaatgtgaggctatgaagaactcaaggcatcgaaatttggttaagctgatcacatcatgctctagtgttgacttcaaaaacaatgattttctggctctggtgtatgagtacctgtgcaatggtagcttggaagattggatcaaggggaggagaaatcacgcaaacggaaatgggttgaaccttatggagagactgaacatagctatagatgttgcttgtgcattggattacctgcacaatgatagtgaaatcccagttgtgcattgtgatttgaagcctagcaacattctattggatgaagacatgacagcaaaggttggagactttggattggctaggtcgctgattcaaaactcaacaaatcaagtttccataagctccactcatgtccttaggggctcaattggttacatacctccagagtatggatggggagagaaaccatctgcagctggagatgtatacagttttggtattgtgttactagagctcttctctggtaaaagcccaacagatgagtgtttcacaggaggcctaagtataagaagatgggtgcaatcagcaatgaaaaacaagacagtgcaagtcattgaccctcagttgctgtccctcactttccatgatgacccttctgagggaccaaatctgcaactcaattatttggatgcaactgtaggagttggcatatcttgcactgcagacaacccagatgaacgcattggcattagagatgctgttcgccaactaaaagctgctagagactctcttttgaaactgtctgatgagagtcctagaagagataccgagcgttacttccatgtttcaataaagtgaactctagactctagtcatgtatgtatggtggaaatagaggcatttcgaccaccaacctttaaatagggtattaataaataacaattgtgtttatgtttatgtgtaactctgtctcttgtaaaacttacttatgactataaagaagaatggtggatcatttatggctt

SEQ ID NO: 111332 - DNA, 157 bp, Glycine max
  Clone ID: PAT_MRT3847_71543C.1
tggggtgggaaaagtcccccggcgcatattgaattttcaccaaccttggtctatattcatggtgcggtatcccgcaaggaggaatatggccccattgtattcgcttctcttgtgtgacagggtgtttaacacaatccaaagagaaagacaattttct

SEQ ID NO: 111333 - DNA, 768 bp, Glycine max
  unsure (1)..(768): unsure at all n locations
  Clone ID: PAT_MRT3847_71544C.1
gatcaattgggagacaaaaataagatacaagtttaaataggaacatgtataacatgtttaagaattaagaccatgccttccccagaagttattgttccattaattcttatttgcaactgcatttcttcccttagatagcctaataggacaagacaagatattntaactatttacttgtaaaaagttcttgtagctattacacaacttaagaaaggacccacacttatctgtgactccctttgtatcgtgtgtgcttgctggatttgtacagcattcacagtgtaatgaaatttctctttctcccattttagtgctaattcttgtgtggtgctgcatgtatagtcaaaggtgtctccacttcccttcttaccattcattatatgataacgcgatgatcaagttgtcgtgttggtttgataccaaaacaagcatagttgtaatattttttcagtatcttttaactgtgtcacctcattttatgggataaggttttgttgtttgtttattttcttcgtacctttcaataataatggtttaaaatagatacaaaccgtaattaatgataacaaactcttaaaattactaggaatctcctaattgtttgtgcctaaaatctcctcatatgactngattgttatttcctaaatatctacaagtatataattacatgaaattcacctaatataatttgaaatgaattgaatgtcattgtaattctgggtgttaacgtgcagaaccaagccatgaatgaatctatttctgagcttc

SEQ ID NO: 111334 - DNA, 225 bp, Glycine max
  Clone ID: PAT_MRT3847_71545C.1
atttccgaccctgcaagtaccgcacgcgcgatgacgtctagaaggtccgccacgatcaggacccgatcgagcaggggcgcaaccgcctgttgaccgccaaggccagcgaggacgatctcaaggcgatcgacgcccaggtgcgcgatatcgtcaacgcgcctgccgactttgcccagcatgatcccgagtgggatgccggcgagctctgaaccgacggttaccgcg

SEQ ID NO: 111335 - DNA, 402 bp, Glycine max
  Clone ID: PAT_MRT3847_71546C.1
cattaggttggagatcagaatggctagcaccacaggctctggagcggatgcaaaaccggaaacgggaaggaaacaaaccaagatcgggatctggtgggggctcgagagtgagacttgctgaggcatgcatagcgagccgatgcttgtaggcttctaccagatacgggtcatagatgacacatgacactactataccttgagaacagacaggcacttctgaatgactctcttcccttcagaaggccaactagtcatggaccctggacctgatcaagaaacagtacgcgcggcttggcctttctgcttcaaaccgacaagggcccgatatgactacttagaggaggccgatcacaatgaaacttctataggtgccctactctgcgaccctattaagaaatctgt

SEQ ID NO: 111336 - DNA, 482 bp, Glycine max
  Clone ID: PAT_MRT3847_71547C.1
ccaaaagaaaatattagtctaaaaatccaattccacccaagtaaacattggggggcactacatttctagttcatttccattgtttgaatcttattttggggaggaaggaaaaaaaggtgcctaattttttggaatgaaaaaccagagaagggatatattggtaattgcacttgctttgggggagacatgacgcctaggaacttgttgcaaaaaaagagccccacccgagatgaggggtaaacttgtactgtactggagtatgggctcgagccatttatgtctctcattttctctcctcaagttagaacttggaacttgaataacacttgcaacatttattacaaaagagacagttttatctcggatacacaaacccttgatgtcatgtttttttcaaaaaaacacacctaaacaagctacaaaccttaacctaactcttattggaaaactgtgaagcccatttttaaaacaatattttgtca

SEQ ID NO: 111337 - DNA, 543 bp, Glycine max
  Clone ID: PAT_MRT3847_71548C.1
gaattttgctgggattgaaaacggattctctcgtccttacactcatctttttttttttattgttaataattttatttctataaattgtcattatatagtatattatagtttacactttaaaaatcaaggtaattattagtaaaatttcacaaatttactatagttgactctgatatctgatattaattgaaaaaaaaaagatatgcactaaaattttacaatcttattcaattaatattactgtgaatgataaatttgttgataaatatctttaaagtcaaattaaatattatttttaattgcttttacacttacagtatatgctaattaatattattaaattattaattatcaatttttacttttaatttaattgaaatgcactatattgacatatataatatatttttttataataattattttaaaattcattaaaattgaaaaaaaatagtgtaaaattttacaccacaaaaaactttcttttttctattttcacttcaataatcttattttgatgtatatccagtttaaatgcaacaa

SEQ ID NO: 111338 - DNA, 334 bp, Glycine max
  Clone ID: PAT_MRT3847_71549C.1
aggcgtcagtacaggagagaaagggacacagaacggggagatcggaggacaaaatattctcacgcggaacacaatgtctatatacactcaaatctacgcagcaacggctgatcggaaaaatcgggccttacatcgtacttcatgactccgccatctacactcaatccctctgacgacgaccccatcaccaacaatattgcagctcagcagcctcaaatgcccaaaacagttccttcaaccgaaaccgtctccgaacgagacgattccgtctacggcttcttcagaaatgccgttatgaaagtataatccgcatagtcaagtttggatgattcat

SEQ ID NO: 111339 - DNA, 257 bp, Glycine max
  Clone ID: PAT_MRT3847_7154C.1
ggagctgagcttctatgggtcccgcatgagtagacagccgcatctttaggggcgggctcgcgtggaccaaccaccactatgcttttgagtaagccttatctccatcaggtgaaattgtcttattgggggcaccatatggggacgctttgcctcggattgggatattttcatctatagggaccagttctgcgggccctgatgtgatcaacccggatggctctgcacctggtgagaacattatggctgcttggcctccc

SEQ ID NO: 111340 - DNA, 321 bp, Glycine max
  Clone ID: PAT_MRT3847_71550C.1
aagattgttgtttgttgttgttttttttttttttattttgtgttttattaaatttagtctaaacagggccggaggcgaaccgggaataaagggacaggaacttacaaggaaaaaaacattcaaaaggggggcatttattaaaaagcctggaaagcctaatgaaagagctaaactaagaaaaacgagatgcgctcactgtccaatcaaaaatcgggaaacctgtggtgacaaatgtaaaaaggggggggcccaaaagcggagaaaagcaaaatgaattttgaagcgacaaagtagggggtaaccaaaaggaaaacacgggct

SEQ ID NO: 111341 - DNA, 1723 bp, Glycine max
  Clone ID: PAT_MRT3847_71551C.1
ataaaatgtcttataaaaaaagaatcatatcaattccttctaaactagtcttataataaggatcagagggagtaatataattgactgattccaataacacccaactaattaacaacgtaatcagacccaatctggaaaattcaaaagagtaaggtttcactttggcaagttaaagtgacctctacttggaccaagacagcttccagctatgtattatacatcacatggatggggtaaccgactaatcaactttgtctattctttgtttctttaattatgacttttaaatttaatatatatcccacttggctacttccttaaccacacggaatataaacagaaggagatatatataatagatttttgtggagacgcttacatagctagctatagccagaagggaatggagaaaatcatgaggacagtattaatggctttgttgatggctttcacgatgcttatatctaagggtgaaggccaattagtagagaatttctatagttcatcttgcccaaacgtggaatccatggtgaaacaagcagtgactaacaagtttacagagaccatcacaactggacaagcaactctgcgtctctttttccatgattgctttgttgagggctgtgatgcctccgtgataatctcctcgccaaatggggacacagagaaggatgccgaggaaaatatttcactgccaggagatgggtttgacactgtgatcaaggcaaagcaagcagtggaagcttcgtgccctggagtggtttcctgtgcagacattttggcacttgctaccagagacgttataggcttgcttggaggtccttcattcaacgtagagcttggacgcagagacgggcttatttccaaggcatcgagtgtagaaggaaaccttccgaaagcaaacttcaatttggaccaactcaacgcgcttttcgccaagcacggtctgacccaaacggacgtgattgcgctctctggggcccacaccgttgggttctcgcactgcgatcagttcgctaaccgtttatattccttttcatcctccaacccggtggaccccactctggaccccacctatgcccaggatctaatggcggggtgccctaggaaccccgacccagccgtagtgcttcccctggacccgcaatcccctgcggcgttcgacaacgcgtattaccaaaacctgctctccggaaaagggttgctaacctcagaccaggttctgttcgaggatgccacgtcacagcccacggtggtgcggttcgcgaacagcgctgcggattttaacgatgcgtttgtcgcggccatgaggaagctcggaagggtcggggtcaagactgggaaagatggagagattcggagagattgcgcgacgttcaattcgtaaatcatactatctttttggttctttttataagaaataaattttagtgtataatatgctaaaacttattacttataaaatggacaggagggagtatgatatatggattaatttgtgaaagtgaattgatttgaattatgtattctcgaggaaattaaggttcgggtaaataaggttttggttggccgtgttgaataaagtgatttagttgtgcagtgtggatgtgcgtacgttttgaaatgcgtattgcatatttaggtagtaataatactaatatgcatgtgcatgtacaatcttaatagtcctgataatttatataaatgattgcgaagatatgct

SEQ ID NO: 111342 - DNA, 221 bp, Glycine max
  Clone ID: PAT_MRT3847_71552C.1
ggtcgatctagagctcaaaacaatgtctaaaccaaggtaccctcaacttccaccacgacagacaacgtcgtcttccacgctgattctgactctgcatctgggatgaccttactattgcactgctgcagggtgtatggatactgagcacacctagcagcactcgaggaacattgaccctacctaacgacataggatccagtgctacaagaacattccggact

SEQ ID NO: 111343 - DNA, 944 bp, Glycine max
  Clone ID: PAT_MRT3847_71553C.1
attcccgggtcgacccacgcgtccggattatttttactctaattatatatttcaatcatattactttttgaattgtcctatacattttaatgaaaaaaatatttcaataataattatttagttatatgttatgtttttcccttgatttgttgtttgatacaaattttgataattgaggataatagcttatttcctttttctctattatcttattgctttctgttttgtaagtatacatacttggatgacttgatgtgatttatgcgagaagatgaagctgcaaaaaccatgaatatctttgaaggagcatctaaaactcagagaattagcaaatcagccttgaagaactaggaattagcagaaccgtcaataagagatgcttttgaatcttgcattgaacaaggtgttcatcacattattgtttgtccctttattctctttcctgggaggcattggagtcaggatattccttccttaagtgcagaggtagtgaaggaacacccagatgtgtcatacaatgtaactgcacccgttggactacatgaactatttgtggtcttctgaacaaggcacatttgaacaggttcataaacatcaatttgtgcctatggcgtttattgctttggaaaagtattacttgaggtgacaaaaattgttgatccgccaatggtcattgatgaggatttcttagaggaaatatgggctatatccattgttgttgggtcttgcctaaaagttatgacatcagagttctttcgatgtaacagttactccaacatcctctagtacaaaacacaaaagaactagcagtttaaagaggccaggaactaccgattcgtagtcacagggtagtgatataggaaaactttctattcttttaggtcttaaactttttaactctaacgaacttataaattttatatatcttccttttttcctcaatc

SEQ ID NO: 111344 - DNA, 146 bp, Glycine max
  Clone ID: PAT_MRT3847_71554C.1
cggaaatgagtgatgtgccaaaattacttaagtatatactatcttttgtattggttgtacgagttttagttaaaaaataccgcaatggaattactaatgagtatggggttttcagaattgtaaccttaagatataagctaatattg

SEQ ID NO: 111345 - DNA, 177 bp, Glycine max
  unsure (1)..(177): unsure at all n locations
  Clone ID: PAT_MRT3847_71555C.1
tttggttttttctaaataaaaaacataattggggccaggtttctttataaagggactcatacttattctcanactcaaatcttttctttcactgaatgacttaccactctaaataattttcaatcctgtcacatctcattctttttcattacaaaatatatatcacccacaaatcta

SEQ ID NO: 111346 - DNA, 366 bp, Glycine max
  Clone ID: PAT_MRT3847_71556C.1
acatacttctccgatacgatctcataaacttaagctattaatatcggttgaatgagacattaaaatgattgtcggtggttcaattaatcctcagaacatctcacaattctcagctgctttattaggaggtgttgtacaggatcaagcggttatcggaggtaacaatggcgatgatccgctcataataaacaatttgctatccgatctatcaagggaatagtactacatttatacacaattaccttggctgcagttccaggccattaagctctggagataacatgacgattggtcggataagctatacgacctgaatatcatagttatctatgtgattaactcactgcatcaatctgggtctactaa

SEQ ID NO: 111347 - DNA, 248 bp, Glycine max
  Clone ID: PAT_MRT3847_71557C.1
cctgcaagtcccgatccgcaagatccggaatcgaccggacccatccgcgcgtacgctgatttttgattttggatgaatctatgtgaggatcattggcctatctagcaattaaaaacgtgcttcagtctgtgactgaagtaattaggcctgctggacattaaaggccacactttgagatgtactatgtacagaataacctagcagtgtccgcattgttgcatggttatgctagttacctaaaaagtaaa

SEQ ID NO: 111348 - DNA, 455 bp, Glycine max
  Clone ID: PAT_MRT3847_71558C.1
agccaactttgctgtcatcattggaagcaacgatgtaagttttcagctttgacatcaatacacattccaatcggttttttttttttggtggtaggcaacccgatttttccaaaacattagcatacctgttcaaattattttaccagataacggtaaagattccacggttcttctataagaaatagggaaaaactctaggtgtaactgttatcattgaagacaaacatgggaattttttctctgccaacatcttaatagacaaaaccaaggggaagaaaattgtattttttggcgacaacatacaagacttttggtagcgttaaatgctggaaaatcttttggtatcgtgggaatggtatgtttgggattgggtggtactagttttgtaaaacattcaagttggtagagggtgatgtcctgcaccttatcaaacctagtcatgaagacgacattgc

SEQ ID NO: 111349 - DNA, 685 bp, Glycine max
  Clone ID: PAT_MRT3847_71559C.1
ccctccccccccccccccctttcccttttttttttttttttttttttcgggccaaataatatggaccatgttttattactttagcaactgactattgtaactgagaacaatcagagagtacaacagagattaaaacttaatcccaccgattacatagtctgatctcatataacattattatgagaagcactacacaaattactccttaaaaaacatttattcctaatagcattccagcttcatgctgctccaacttcattttgtcacatgatgtcacatggttcaaagttagctgtgcacttgtccgggagctgagaggccatattacggtctaccccagaaattggagggccattaacaaggacacacaaacatggctgccctagtgccttaagggcattacaacaagaatcacttggaggaatagggctaaaaggagcaactgctgccctacaaggaatgagttgcacaagtgcagagaagaatgtgcttgtgcaaggactgctttgaacttgtgcaactaaccctgccatgatcaacaaaatccacaacaatgacactgccttgtaactagaaaacttcatcattgaattgctgcgcatttccactccctaataaattaattaagtgaaactattttttttattacttttgcggacggcgtgggtcgacgcgggaattccgg

SEQ ID NO: 111350 - DNA, 338 bp, Glycine max
  Clone ID: PAT_MRT3847_7155C.1
accactcgtacgtgccctgcgagaggaccacgaatggggagctggctgtagacgaacaagtcgttgagagcttataaggagaagcgaatggcttgctgaatgatctcttccgcagctgttaccactgtcaaccgtgccggtgccgacatggctgcttcattcactggcctgaatgtcatgactggcttccccaccaggaagaccaacgatgacagcaccttcattgctcgcaccggatgcagagcgcaatgcctgcacgtgtagacaccagttggccagcagaagtctgagactatggcctacctgtcagaccttgctgatgcacaattggccaacga

SEQ ID NO: 111351 - DNA, 871 bp, Glycine max
  unsure (1)..(871): unsure at all n locations
  Clone ID: PAT_MRT3847_71560C.1
gagatcccttatnctttgccacatananctccaccgccgtggaagccgctctacaactnctggatcccccgggcngcaggaaancggcacganggaggatggtgtaataccaccacaacttgtgtctttaaaaaaacnactcgncntggttcctcaaaatacatggaaaaacaactancatccacaggganattgancaatananctgaataaaacccngatttctttnantggaacngagttcatnctncgttcctgtgatggggcnnctttcactggaganagtcaanatgaggctgcacaccttcctattccnangaccccataacatctcngtcnacgcncgcnatgccnngtaatcattggtgnccaaggggnnatgcctgatgggcccaaccactgcccccccctttttgttnccgggatgtctccngcncgnggtgtgtccctgggctatcctacttcaatancnttnggtggatngaantttcccggnaancctttggtttctccncncnttcctnnccaaccaatttnnaaanntgntttntggaantncgaattgccctnggngtntttttccccctaacnatncccggccncgaaanattntctcttngngggggntccncctcccntcccaangaaancttcttctcttgngaagagngtttcnctantctccctctttcttattatattttctttnaatanttcntttctcccctcnctccttattttccctatctncctattttttaaacacaacccccnccncttttntntcctntccctctccctntattctntttctttactctntcttcctcttagtgtacatctattttttctctctttctctcatattttc

SEQ ID NO: 111352 - DNA, 451 bp, Glycine max
  Clone ID: PAT_MRT3847_71561C.1
ccaagctttttttttaaccccacccttttcgggtttcaaacccaggaaccaagccaccgcgccatggaaaaaatcttcaaccttttctttttcaacttcaaagcccctcaagttctcgcaaacaatcaaagcagcacccaccgaccaaaccacaaaggcaccggtggggttcaccccaccgaaactggacccaaacaccccttccccaatcttcgaaggaagcaccggggggttcctgcgcaaggcccaaggggaggagttttatgtcttcccatggaactccccaaaaaaccaaatctttgaaatgcccactgggggggctgccatcttgaggaagggtcccaaccttctcaagttggcaagaaaggaccatggcttggttcttggaactaggttcaggtcaaagtacagaatcaggtaccagttttacagggccttccccatgggggaa

SEQ ID NO: 111353 - DNA, 521 bp, Glycine max
  Clone ID: PAT_MRT3847_71562C.1
gttccaaggaaggtttcccgtcatcactgtatgacgtcctcctgtctttgggggggggggggggggacccaacgtaatgacccaaattaagggaggcgatagggataagaatcaaaaccggccaataaacgtggagtaacggatgataagagggttggggtttttccaacgccctctactacacgggaggaggttagtagcaccgttgaagtgatggctctgcacatggcagtgttgcggattggtggggttggggtgggtaacctgggtttagaaacgtgcaggaatgtggtaatggtgttaccacagagaagagagccgccgagatagtagcagcggagtgtttgtaatatgaatgaatagtttacgtggtgtataggcgcgtgttaaaagaccgtgttgaggttttaggtaccaccaaagccagtaggaccgcatggcggcgtgcgcaatgtacgctttacaagtaacgttacggttttcgagtgtgttaagcagcccatgcgtacaaaaactgggga

SEQ ID NO: 111354 - DNA, 245 bp, Glycine max
  unsure (1)..(245): unsure at all n locations
  Clone ID: PAT_MRT3847_71563C.1
gaccgtcgcactgccacgccgtaccgttaatctttggaactcctcttagaaggcggcacgccctttttctttttttttttttttgaacatttacaaccactaggccgcttgatagactcntcattaatataatttaaatgcaacattataatattcttaggggaaaaagatatggtccacctccctattactgctggctatatttgaaaggtacatgactattattaccataaacacaaagggca

SEQ ID NO: 111355 - DNA, 392 bp, Glycine max
  Clone ID: PAT_MRT3847_71564C.1
tacggctgcgagaagacgacagaaggggtctcacttctcctttcctctttcatgacgcccataacctttcgatatacccttctctctgtctcttgaggtcactagaatttgttaaccttctctctcgaattctcttctctcgaaccctgcggctgcgcctcgaggccttgcgtccgtcgccattgctcgtgatcgcgagtgagctgaattgaagacaacttcagaatcagagatttggtgtagtgtcgtggttgtttctatttagcggtgatggccaaagcatcgatatattcatttacatactcgtcgcagtggcacaacgaggaacttatggatcctttgatttttgcaaagttcaaatcgttcctcacaaaggagtatgatccttcatg

SEQ ID NO: 111356 - DNA, 501 bp, Glycine max
  Clone ID: PAT_MRT3847_71565C.1
gttcgttcttactcgctggatcgtaatttaacttggggtttggtcagttatctaacataggcacatactttgctctgtgtgtggtttttagagttttccatcggacatctgaggtttgtgattaatccttgaccggagtactgatgctccccctctgtatgtaattgttgttgtggcgaatgtaactgcatcacatcttttatggagtttgccacaaggataagaagaatatctgatttgagagcgagcattgagagacagagagatacagatagaatcgaagtatcacgcgatcgatgtgtcttaaaatgagcatagttggttcacatttgtctgaagtctacatttttgtagttgtttgtggggtcagagctgtaagcaaggtcccttgtgccatgtgtgattagcatttgatatcccatactttgaatcgtagttatggcggtttgtaacttatgccagacttatattttatgttcgccttaacattttactgtcttc

SEQ ID NO: 111357 - DNA, 352 bp, Glycine max
  Clone ID: PAT_MRT3847_71566C.1
gtttcaataacagctaaatgtgctaatgtcaagcccacgcttacaggaaaagctactacttgagcagaactataatgagcagcagcaataatgcccatttattgttaacaatcactcttttactatttttactatgtggagaagcaagccctcccgattaaaagaggagggggctagtattcgtttacctatggtgaataaattcttgaatgtggctatggtaaaatacagatcatatgtgtcaggcttctgcactaccaaacgaagtcactgttatgcatcttattaatctatactaggaatatgctccaaattcatacccagatttacagttttgtacactaaaactaag

SEQ ID NO: 111358 - DNA, 411 bp, Glycine max
  Clone ID: PAT_MRT3847_71567C.1
ctcactcgttctactgaagtatctactatactatcaagggagcgaatgaaggagagtaagaagagagctaagaagattcgtgcagttgctaagactgctgcttacgatgctgccaaggctggagaaatgaaacgtgctgtcaaacatcctgtgttgatttgatggtgctattgctatagggacattctaatggtcattatacttcctattagctatctagaacgagatatgttgctgtaagtgatacattaattgatgatcactagagatataactcgagatctatcactggcacgatcaatgttgagaagctagttgaatgctatgtactaaaatgtttactattgtgattaaacaattaaataaacaattaaaaaaaaaaaaaaaaagtaaaataatgaaaattgaatt

SEQ ID NO: 111359 - DNA, 577 bp, Glycine max
  unsure (1)..(577): unsure at all n locations
  Clone ID: PAT_MRT3847_71568C.1
tggctcgagatgaaattcatcatgatacagtaaatggtacacaaaatatgctcaatgcagcacgtgctgctggggtcaaacgatttattcattgtagtactgaggctgttcttgctggtggttctggtcgtattgtcaatgcagatgaaaaaacaccgattccaaacgcacctaagaactatgtctattcccgaactaaagcactagcggaaaaacttgtagttgcagcaaatagtgaagaaatggcaaccataacatgtcgtccacgttttatatggggacggggtgatacagtagtattaccaatattagcaaaagcatttcaaacaggaacatttaaatggtgtaataatggtgattatcctacctctcatgtacatattgaaaatgtatgtgaaggttttgtattagctgcaacacgtggacgacccggtggcgtgtatttcttagctgatggtccacctactcattttcgtaccttatctcacgttatgttggaacacaaaaggttcccactaccgctggtaatgttcccttccctatcatngttggtttagcattcttattggagtggatc

SEQ ID NO: 111360 - DNA, 601 bp, Glycine max
  Clone ID: PAT_MRT3847_71569C.1
atccacgcgttctattaaatttttttttttatttttttttttttttattttttttttaaatttttttaaaaattaatttttataattttttttaaaatataaaaaaaagggggggcgttttaaaggaaaaaacttaacgtacccttgcatgcaaacaaatatttttttttataggggcacttaaaaaaattgcactgaccgtggttttaaaactttttcattgagaaaactttgtcgtttccaaatttaatcactttgcaaacatccccttttaccaaatgcctaataccaaaaaggcccacacaaatccccttttctaacatttgcccaccctcaattttaaatggaaaaaaccttttagcgcccctttaaaaaaaaatggtgaaacggttacgcaaagggttatcctttaaatttgccacaggccttatttctcttttcctttggattacttccattattttttttccactttacccggttttccctaaaaagttttaaaaggggggctccttttatggtcccaattaaaaaattaacggttccttggcccaaaaaaactggataaaaaagaaggttcacttagggggccatcacccta

SEQ ID NO: 111361 - DNA, 187 bp, Glycine max
  Clone ID: PAT_MRT3847_7156C.1
tttagtacacgtttgatttatcattaaaaggggcaaaataaaaaacatctaaaaccccttttacattcaatttccattgaactgtgattttgtctcaaaattcagacacaagttagatgataaaccaaacatgctcttacttgttctattactggtcttgtcttggtttaagacttcttggcgaata

SEQ ID NO: 111362 - DNA, 432 bp, Glycine max
  Clone ID: PAT_MRT3847_71570C.1
ggaaaaaaaaaacccaggttcccaattaaatttaaacccgggaaaaggtcacctgggaggctgggaccggtttgacccacaagggcagcttcggggaaaggaaaaaaaaaaaaagggttgaaacaaacgggggtcaaaagggcccccggggaaaaaagggtttggcccaaagggggtaacccccctggggggtaaccaaatcgggtggaccccggaagggccgagcatgcccaaggtccccccttacttcccccctgggggggcgctcatcgggttccaatttcaagcctttttgggggaaatttgaaaagactttccaacaatcgggggcaatttttccccgggaattcagaacaattttccccccaaaagggttccccaaaaattctttttcaaagggggaaattcccaattgccttcccccaaaacttt

SEQ ID NO: 111363 - DNA, 357 bp, Glycine max
  Clone ID: PAT_MRT3847_71571C.1
gaatagatagggtttgacttttgtttttagaggaatgtttatttccacttcagtaccttagatctaagttttgttgtaccagtacaagtatcatttcttaaaacaaatgcttgaaaacaatctttctaaggtaattaaaacttgtcgggttataacccttacatcatcatttgcatattatccatctttccttttatgaatttcaatatataatttcccacaattcggtagctttttagtttccaacgacaaagatgtataaaggttatgttaacattagtataagtttttaaacagtataggttttcatacagtgtaactaccaatcgcgtttcttcttatggaaattaagcttta

SEQ ID NO: 111364 - DNA, 206 bp, Glycine max
  Clone ID: PAT_MRT3847_71572C.1
gggggacctaacaaggtattaaacttaaatcaattaatcaaaaccgttttggacagtttaaatgcatttttaccgcccttgcaaaacatcgaaaggttggtttaaaatgcggaatccccaacattttcgaacttgggttcacaaaaaattttttaacaacccaaacttaatcgttgttccttttgccgggttctcaaaacagcaaa

SEQ ID NO: 111365 - DNA, 221 bp, Glycine max
  Clone ID: PAT_MRT3847_71573C.1
ctagagcacagtctgctttaccattgagctacgtgaattgtagggaacggttatcactgagctcttgcaaagagcctgattttactatcagttcacagattgcattgcacgagcaattacattagtggtaacactacgaattcggggtattacatgtttctcacgggaaaatgctatcaacttgctcaacaagggtgcctcctgcaataacatattcagca

SEQ ID NO: 111366 - DNA, 351 bp, Glycine max
  unsure (1)..(351): unsure at all n locations
  Clone ID: PAT_MRT3847_71574C.1
tgaaataaaaagttcctactccttggtttggcataaaattcaacttaacttgcttggaagttttaaatgggcttaactctaaccttgggaaaggataacaggtccaaaaaaccccctaaaaaaatttaaggattataagttttcctggaattaactggcctggcgaccttaaaaacaaaggaggctctcttccaaaccattatttgacttttgaagggaggaaaattgggttgaaaaagttanggttgatccttaccctacctaaaaccctggagtaccaaaaaggaacggttttagaatttccttctccaggcccaaaaggcaccagaacctggtttcttccacccaaaa

SEQ ID NO: 111367 - DNA, 727 bp, Glycine max
  unsure (1)..(727): unsure at all n locations
  Clone ID: PAT_MRT3847_71575C.1
atgctcacaccctctcactctctattccaagtctttttttgagccttagcttagctatagctttcccatttccattttcttgagcctttcttagccttgtcactcatccattatcatttataacttttttttttcatcaccccacaaacatggcctctaggagggtgtctttgagagttcaagctaaggtggtgaaggatgctcgttccgtcgtagacgacggtggtgtagtgtggtggaagggtatttccgtaaatatgcgtaaaagctgatggtgaatgaaggaaacaacacagcacaaaggctttgcaattgcactctcccgagtttctacctcatcacaatattgtgaagaagaaattgggagagtgttatcattgcatcgcggggaattgagggtagcggtccgaattacctttaaagtttaggtccttaaattttgtattttacttcttcttacgtatttgccaatgatttttttttctttgggttatttatttttatgttaatgttatgatggaagaagaatcatgggatgtaagagatgcatacgaggttgctttgttggttgtggtgtggttttggtcaaatgggtatcatggggagttttgttcttagtttgttggttggttaatttaggaacttaatgcttctggcatgcatcacttacacccatcaatgtattttccttttgttgtgagttttatataaaggngatgaattaagc

SEQ ID NO: 111368 - DNA, 518 bp, Glycine max
  unsure (1)..(518): unsure at all n locations
  Clone ID: PAT_MRT3847_71576C.1
tttccgtcatcactgtatgacgtcctccttctttggggggggggggggggttgggggggtccgccctagcaggacaaaggaagggaaaataaaaaagaaaaaccaaaaactgcctgcaccaagtcctcacgtcatgtaccactactaattatcaggggcgactacggcttatatccacgcctaagtacccttgagcgcttagtttaatagcacatatttagcggtgtggttatgtgagatttagttttattttcaaacacagcgtaatagctgcttgctgcgatctcggcaatttacgcaatccacaaaattccgtcaattaatccggttttatccggtaacgtgcgctgggtatctcgtaggtttgctatctattacggctcaggctggtttgaagaaattgtcataccttggcgcggtccggatactcaatttgtancacgcaagcacgcaagagacctaccatgcccaattcgcataaatgagttgcccggctgggctgcatatccacagtgact

SEQ ID NO: 111369 - DNA, 334 bp, Glycine max
  Clone ID: PAT_MRT3847_71577C.1
cagaaacaaaacaaactattgtcaatttgatagacacgtagctacggttagcacgaaaagggcctgcatgtgcacattaagttgtaaacaaactaggagttataagattgacttagtggtaaagtggtaaagagaaagagaaagaaggggagagatagtgtgttcgaatccctcactaataaaaattaactagcatttgtctactataaacaaactctatagttatgattgagtttaggagtaactaagtgtgtatatatatatatatatatatatataccatccgtgtttctgtatccctgcagaccttgtccaattcctcaaaaacaagctc

SEQ ID NO: 111370 - DNA, 496 bp, Glycine max
  Clone ID: PAT_MRT3847_71578C.1
atttggtgaagagaaaagcaagcaatagtgttaagactattcatacagaaaattaaaaaagaaaagaccaactgcgaatgatctttattgttgtacccacaattgtttcggtgtcactcttcttcattggctactatttgctgaattgaaaagcaaggaaaagtgctaagactattcttagagaaaactttggtcatgaaagtgtcactttagaacccttgcaattcaatttggttgtaattgaagcagcaacgaactacttttcaaatgaaaataggatcgggaaaggtggatttggagaagtatacaagggcattcttctcgatggacaacaaataacagtaaagagactatcaaaaagctcaaagcaaggtgcaaatgagtttcaagaatgaagttttatggatagcaaagtttaacagaaatcttgcggcattgattggtttttgtgtaaaagatgaaaaaaaatacatatttatgaatgtgtcaaacaaaa

SEQ ID NO: 111371 - DNA, 351 bp, Glycine max
  Clone ID: PAT_MRT3847_71579C.1
ggggaggaaaacatatgccaacactagcatgaaaatgaatcatgtcaaacatagaacacagatgaccttaatcgaggaaataggcggactcttgtgggggtatgagcctatcgtgccggctggctatgcacattggaagccctagggatcatttaagaggtaagcactgaccattccgctgcgcgtgataacctccttgacaccgttgacgctaccaatggcgataatggccatgccaaaggccaattcaaaagccctttttggcggggcatattttttggcccaaattttgatggggagaggggaacagctcaacatggtcacaaaaaaaaaaaacattctccccccccg

SEQ ID NO: 111372 - DNA, 496 bp, Glycine max
  Clone ID: PAT_MRT3847_7157C.1
cttatggaatgttgtcaagcatgcgaaacagaaccgtgcaatcattctcaccagtattctctcactcttttgtggattttgatttagaagcacgttattctgctcgttctatttagatatactcagcttgttatcatctcatgctaacataaacattttgagtctctctacaatattgataattcttggttttatgctctcagcacattccatggaagaggcagaggccttatgtgatcgattgggaatatttgtaaatggtaacttgcaatgtgtaggaaatgcaaaggaggtaacattgctcaactgatttgctgtatcaaaatcttttgcaaaataaatctgttggatcaatgcaatttatgagaaacccatagattgcacatgattcttggatgcagctttgaatgtaactgctcaaaattcctatctgatcaaatactttcactgtctattcttttactgcaaagtagaaaatgcaaatttgaactgtgca

SEQ ID NO: 111373 - DNA, 178 bp, Glycine max
  unsure (1)..(178): unsure at all n locations
  Clone ID: PAT_MRT3847_71580C.1
gangnagcgtacgtaagtcggaattcngctcgagccttctgtcngctgcgactcncnttncttcccttnnttttccgaatcngcatcgnaatggcttcngaaactgngacgnttgnctttcaaggcgagatcnaacangntcctcaagnnnatcattcnagaccttncncccaaaatn

SEQ ID NO: 111374 - DNA, 460 bp, Glycine max
  Clone ID: PAT_MRT3847_71581C.1
ggaaaaataggaccattttgcagaatgttggccaccttcccgagggataaaaccaccccacttggtcaatgaaatggcctttcatttgtttggccgcagccataatatgcccaacaagatgtgaaccccattgttatgccactccaaaaaatatatttgaagggaaaactcaaacatcctggtatgttggtgcttcccacccggactaacccctgccgttggaaaatccggctggtttaggggatcttggaatccttgggaactcagacataacacggcccgctttccataaatggaaccacccttttcttgaacaccaattacatactttgcagagttaaattggacaccaggagcgtgtgtacacaagttaagctctcttgaacttgatggatcccccacttttgcagtgggactccaacccttttttttttccccccaacaaaacccatcattgggg

SEQ ID NO: 111375 - DNA, 221 bp, Glycine max
  Clone ID: PAT_MRT3847_71582C.1
gagattcattctcaacatgccaatgcttcgttgcttcttcaacaaagcctttaaagcctccaaatgtgcaaccttgttgcaactcacaattccacgcatcaagttatagtgaaacagaagagaggttcatctgaagcagatgcgaagagacgttgctaagctacttgaggctggtcaagaagccaaggctagccttaaggtggagcatgttatgagagagg

SEQ ID NO: 111376 - DNA, 377 bp, Glycine max
  Clone ID: PAT_MRT3847_71583C.1
ccaaccccattagcccaggaggctcttcggctatgcgaaggtgagggggagggatgtcgtacgcaccctaacccttgcatatgcaaagaggttgattccggattcaaacccatatgccaatacacattcagttaaggataattgtttagaaaatggacactggacaggagttagaggaaaattaaaaataaccactatcactctgggagagcatacaacctcacctaattccgaatgatcccaacgcataaagacggccttgtgtaacagcagatacctttagaagtatgcacccctgactcaaaccctccaaacatagatgcagctagagcttgaccgccactgttaccaaagtaccccaaccaacttaccctggc

SEQ ID NO: 111377 - DNA, 266 bp, Glycine max
  Clone ID: PAT_MRT3847_71584C.1
ctggttatcgaataaactatccctcacactttactccaacttggaattgtttgaattgcagtgaacacttggaagcagataatgaaccaacgcactccacgccttcaagtcttcaacctccactgtcaagcgagaaaactcacctagagaaatgacaagagttcagcctcctcttctacctggtcttcctgatgatcttgctgttacttgtttgattcgagtaccccggattgagcacaggaaactacatttagtttgcaagagtg

SEQ ID NO: 111378 - DNA, 514 bp, Glycine max
  Clone ID: PAT_MRT3847_71585C.1
cccaagtccaacacgaacggcgacaactgccgcgagatcacgtgtctggccgacggctgcgaggacgcctacaactaccccaaggacgacaccaagacccactcgtgcacgttcggcacggacttcgaggtgaccttttgcccgtcgggcgatgcgtccacggcccagcaggaccaggagcagcaggagcagcagcagacgtactcggcctccacctctgcctccgcgtcgcaggacgccacccagcagcagaccacggaggagacacccgctcccgagacgaccgaggctcctgctacggaagcccccgccaccgaggcccctgccacggacgcccctgtgcagcagtcgtcgggctcggacgctggcaaggtgcactcgcagaacgaggacgtgaacggcgagtcggagacgaccgcccccgacgtgacccaggccgagacccccgctccggagccgacccccgccgtcacgccggccgccaccaagtccaagttctgcgtgtaaacgactc

SEQ ID NO: 111379 - DNA, 422 bp, Glycine max
  Clone ID: PAT_MRT3847_71586C.1
ttcaaggcccgcttttaattgaaccgttcctgaaaatgtttcaagttgttattggggggattgctcctaacttaggtggggctttttttgtccttaataaccgactttcttaaagggaccggttcctggggctttcttccgttgggctttaccaatttttcagcattgaaaaggtagttgcccatgtaacatggttaatggaaaatgttcttgaaggtgatcctgcccaatacctaatcgaaaagctttttttccttgcggttaaaagaaacggattggattttaatgaatggttggattttcctaatgggaataggcgtaaatttaataataatgttcttgtattggtggttccgttggagggaaggatttggaaatcatcgggataattaattaattttaaatgactttttaatttttgg

SEQ ID NO: 111380 - DNA, 265 bp, Glycine max
  Clone ID: PAT_MRT3847_71587C.1
ggcttttaaaacagtacctgataatcctttgcattaaccagatggcatcttcgctatttcgattgatggcagcatttggaagggatgttatagttgcaaacactgctggaagttttgcattacttatagttctggttttgggaggatttgtgatttcccgagagaatgtgcacaaatggtttctgtggggttactggtcctcaccactgatgtatggacagaatgctatagctgtgaatgaatttcttggtcatagttggagaaa

SEQ ID NO: 111381 - DNA, 296 bp, Glycine max
  unsure (1)..(296): unsure at all n locations
  Clone ID: PAT_MRT3847_71588C.1
gttagtgttcatgggccttggtataaacacttgactgataacatgtgatatttggtggtaagtgcatgcataataatataataaaaaagacacatttgtacataggagcgtgtaaaattgtaagctgtgtatcttaggtttgtagagaagtgacattatttgtagaattcttttgatgtaacaaacagaaatgtatataggtatctaaactttttaacattgaattgctaatgtatgattggatcttgaacttttctnaaaaaaaaaaaaaaaaaaaaaaaaagaaccaaaaataa

SEQ ID NO: 111382 - DNA, 260 bp, Glycine max
  Clone ID: PAT_MRT3847_71589C.1
ccgggccggaactgccggtccgacccacgcgcctgctaacccgaagacggcagaaagaagacggcggaagggagagaaagcacccgaaacgcccaccaaagcaaagcgaaaccagagcacactcaccaacgaggcacgaaggcgagccagagaaacccgcaaaacggcacaaccgacaacggcacgaagaacaaccgaacaaagccccggacgaaccccgagcgaaccggctgaaacaccaaggaggggagagccaacaa

SEQ ID NO: 111383 - DNA, 374 bp, Glycine max
  Clone ID: PAT_MRT3847_7158C.1
gggcaaaacgatttatattaaacttttctgcgatccacacattctgtctgcttataaagttgatggacaaaacgagcctgaagtttcttcaaacgtgacatatgcaaaacatcctagggccggaacctattcttggtccgagggtgccaacagcttttttagcgcaccttgatgaagccaatttccttggcattgctacgggagcactgtctggggaacataagggcatacttgctgatcaaaccatgcggattcccacacactcggcaagtgcccgaaccaggaccggccttttttgggtgagcattgcaaacgttggagtgagccattgatacgccgcacaaaaggttccgatccagaattggactttctga

SEQ ID NO: 111384 - DNA, 350 bp, Glycine max
  Clone ID: PAT_MRT3847_71590C.1
tacggttgcgagaagacgacagaagggggccacattgcaaaacacaaacacatacattgtctgatcactttggtctcagaatttgttcttttgagttatggcaagcttaaaggttacatgcgtgagtttgatatgcatggctcgctaagagtgcaccaatgatggtgcaagcccgtgctattgcaatgatgcttctgtgaacctaacaccgggcctatattatctgatgcacggtggaaatgtttcaaaatcttgctgtaccagagcgaggaacattctgggttctgctaggaccaactttgacaaacaaaccgcgtgccaatgttttcagaaagctggttatttctatg

SEQ ID NO: 111385 - DNA, 267 bp, Glycine max
  Clone ID: PAT_MRT3847_71591C.1
cgcctcgagtctagatcgcgagcgccgcccttttttctttttttttttgaaataaacacaaacatcctttattacatagatctcaaatctagtttggactcaacatatttaattccaataaagggagcaaaatcgtttgaaacgttttttttcaggaaaacctcaattttatcataagccgattgcagagcatcaaaaagctaaactcttaacaggccttggtccccggggaatttcaccatccaatccggggttcagggcgctaaa

SEQ ID NO: 111386 - DNA, 264 bp, Glycine max
  Clone ID: PAT_MRT3847_71592C.1
gtgagtttcataccatttcagtagtgtatttctttcttaatctgaataaaccagaatgatactctcagcacagaagaataaagggagcgagtcattaacgttttctttttaaacctttatgatgacttccttatgaattactgaacgaacactggaatgggactcaggtatcctgaggacatctctcactctggccttagttccccctctgtaaaattagggtgccaactaaatgatctacaaggtcccttccagcgccgccat

SEQ ID NO: 111387 - DNA, 379 bp, Glycine max
  Clone ID: PAT_MRT3847_71593C.1
ctcgagccgatagacttggcaggtaatgaagataacagaaggacatgtaatgaagggattcgtctccaagagagtgccaagataaatcagtcattgtttgcgctgtcaaatgtgatatatgcattgaacaacaataaaacaagggtaccctaccgagaaagtaaattgacccgtatattgcaggactctctaggcggaacaagtcgtgcactgatgattgcttgcctgaatccaggagaataccaggaatctgttcatactgttagtttagctgctcgatcaaggcatgtctctaattttgtgacttcaggtcacaaacaagagaccccaaaagttaaagttgacatggaagcaaaattgagagcttggctagaatcaa

SEQ ID NO: 111388 - DNA, 775 bp, Glycine max
  Clone ID: PAT_MRT3847_71594C.1
agcatactttgacatcttctacagccgccctcttccgccagggttgcttccatatctgagactggtagctctagggggcactgatgcattcctgttggagtcaatatttagaaactccatctggggtcatcttgaattgcctgtgagccgcgacaatgaggagctaatatgcagagtggttagagagacctgcaaaaccgcccttgctggttatcatacaaccattgaagaggatcaaaagttgaaagaagcaaagctagattcaaggcatgctatagcagttggaattagagaaggggagaagaacctcctacagcaaattgacgagatcttcaaggaaaaagaattggaattggcccagttagaatattatcaagaaaggaggctcaaggaccttggactttgtggggaaaatggtgatatccttggggaccttggaaaattcttctaggaagcagaagcagttgcaaccataaaggacacgcttttgtgtacatttccaaaaggacgagaaaacataaacatcttggtaaatcacaaaaggaggcttccaagacaaatccatgccatttattcaattgatttttgaagatcataatcaagtttttgactcacccccgtttattacaacttattgcttgattattgtttgtaaagagaaagatgtaatgaactttggagtgcctggtctgaatttaaggctgagacatgaactattgtcatataactatactgacctcataaataaatcaattaagggtgaaattgacgattc

SEQ ID NO: 111389 - DNA, 300 bp, Glycine max
  Clone ID: PAT_MRT3847_71595C.1
cgcgcgcggtattctgggtcgacccaccccggccgttgtgttttggaggtccgattagaggcctggtttgatgtagacggattattaaagtaacggcctgtctgtgcttggggtccaaagtcccacgaattgctttaccttcgaatgtctggtcgtggggcgcaccacatattctattgaagatgggtacgacaggtgatgtgtgtacctcctgtggctctttctaggctgtttattgcgatcccatctgtcatgggttgcttattggattacttcacctactcttacatcaggaggata

SEQ ID NO: 111390 - DNA, 246 bp, Glycine max
  Clone ID: PAT_MRT3847_71596C.1
gacaagcgcgagcgcatgcgtgcgcacacgcgtgcacactaggagagccagttctgattcgcgatagtagcggagtgcaagcgcagtcatgtgtgtcatgtcaggcctgctaacacacatgtagacgtgtacaagctagggctttaatcaccattcacttaagctaaattgaatgcatattcaacgatgtatcctgatcgaggtaatgcagtatctcgcacattacctaatactggataacctcta

SEQ ID NO: 111391 - DNA, 430 bp, Glycine max
  Clone ID: PAT_MRT3847_71597C.1
gtgtaatagagttcaccgaagcccaacatgagaacccttgacaaaggcttactgattgtattcactctctagcacctttcgctattcaagcattcccatgctgcaagaatggatatctactggggccaaaacggcggagaagggaccttagcccatgctggcaccactagaaactaccaatatgtgaacatagccttgttgcacacttgtggcaacgggcaaactccacaactgaaccttgtaggtgattgtgaccccgacaacaatggctgcactgtgctgagcagagacatcaaaacttgccaagacctaggcatcaaagtgaggctctgcctaggtggcggagctggaagctactccctgagctcaccagatgacgacactcaagtcgcaaactacctgtggcagaatggacttggaggacaaaccc

SEQ ID NO: 111392 - DNA, 1261 bp, Glycine max
  Clone ID: PAT_MRT3847_71598C.1
gggaaaaataggtgtttacttggtagtcatattaattgtcattggcaaatactgcctaagagactgtgaaggtctggttgttagaaatttggcatgtatttgatttttttcccacgcgtccgcgttttactacgctctcttggactcagttcagtttcacgaccgatcctacaatggcgacagtcacgttttccttttccgctaaaaccctaactctaccttatcaccccaaaaccccaatctccaactttaccccggtaacgaatcttcgcctccctccttctatcgtgacccgaacccgcaattgtaaccggattcgggcggcgctggatggggatttctcggcgaaaaggagcagcagcagcaacaacaacgaccagagggagacgataatgttacctggttgtgactacaaccattggctgattgtgatggagtttccaaaggaccctgcacccacccgtgaacagatgattgacacgtacctcgacactcttgccactgtcttgggaagcatggaggaagctaaaaagaacatgtatgcctttagcaccaccacttacactggatttcagtgcactgttgatgaagcaacctccgagaaattcaagggtttgcctggggttctttgggtactgccagactcctatatagatgttaagaataaagactacggaggtgacaagtacataaatggggagattattccttgtaagtaccctacctaccaaccgaaacgtagcgcaccaaagaatgagagtagaaggtatgagagacggagagatggccctccccctgaccgcagaaggccaagacaagaggccgctgcctccgattcatcctctacatgagccttgcaggtgagtttcagttttgctgatagtaactaatgccaagtgaaagctgctccttatcacagctctatcatgctcatggtcattttatcaaatagaagattgaacttgggttgaattctcatcagatgcatacaatgtttcttgcaagctcaaactggtattttcacaattcatcttgaggaatatgtgcttttggactatgagtatgacatgtgggacaattgttaggtttatttgtctgtgtaatttggagagctacttatcgtgcaaccagtttgttttcgtgataactttttctgcaagtttcatggcagctacaatattaacacataaagtgactgatatgaactgtacaagtttagataatatgcatatatagccttttgtcattatcttaagcagcc

SEQ ID NO: 111393 - DNA, 1194 bp, Glycine max
  Clone ID: PAT_MRT3847_71599C.1
ccttatcatttatttgtcatccaatttcgctctttcggtctctccaaattgagttcagagtcaccaccgaatccgttcctacaatggcgacggtgacgttttccttttccgctaaaaccttaactctaccctatcaccccaaaacctcaatctcgagcttcgctccggtaacgaatcttcgcctctctcattctatcgtcacccgaacccgaaattgtaaccggattcgggcggcgctggatggggatttctcggcgaaaaggagcaacaacaacgagcagagggagacgataatgttgcccggctgtgactacaaccattggctgattgtgatggagtttccaaaggaccctgcacccactcgtgaacaaatgattgacacttacctcgacactcttgccactgtcttgggaagcatggaggaagctaagaagaacatgtatgcctttagcacaaccacttacactggatttcagtgcactgttgatgaagcaacctccgagaaattcaagggtttgcctggggttctttgggtactgccagactcctatattgatgttaagaacaaagactacggaggtgacaaatacataaacggggagattattccttgcaagtaccctacctaccaaccgaaacgtagcgcaccgaagaatgagagtagaaggtatgagagacggagagatggccctccccctgaccgcagaaggccgagacaagaggccgctgcctcggattcatcctctacatgagtcttgcaggtgattttcagttttgctgatagtaactaatgtcaagtgaaagctgctccttatcacagctctatcatgctcatggtcattttaacaaatagaagattgagcttgtgttggattctcatcagatgcatacaatgtttcttgcaagctcaaactggtattttcacaattcatcttgaggaatatgtgcttttggactctgagtatgacatgtgaggcaagtcttaggtttatttgtctgtgtaatttggagagctacttataatgcagccagtttgttttcgtgataatttttttctgcaagttcatggcagctacagtattaactcataaagtgactgatgaactgtacaagtttagataatatgcatatatagccttttgtcattatcttaagaagccaattaatgaatccttaagttagtcatgttacaat

SEQ ID NO: 111394 - DNA, 479 bp, Glycine max
  Clone ID: PAT_MRT3847_7159C.1
tggtggacgtgtggatgctggggagggctacatatgttaagcatcagcctgctgtgtgttaatccttatcctgaggctggtgggaacagcttcataggtaaccatatttagcgtggtagtaagccccaagaacagcaggattggtttccatccagcggctatatcacacaggaccatatgccatcacaggatcccaaaagtgatcccagctattcattattagaacctggctaagactagctaactgctgcgaggtagtcagaaacagctggttagtcgcaaatagcctgagtggagagggtaacctcgcaatgcaattaaagtgcacagtttagcataaccgtcaatgcatctaagcggcgcttccgcagacagtacttttaactagcaatgtaaccagtaaccgaagaagaacatttcctccatggggctgtgtgcgttggccaccaagtaacgtgcggcagttggccctcaaaaag

SEQ ID NO: 111395 - DNA, 118 bp, Glycine max
  unsure (1)..(118): unsure at all n locations
  Clone ID: PAT_MRT3847_715C.1
gagtgtaacaggatgtncataaaaagccttaccacttgagcattgatcccaaaatttataggaactagccagacaagaacacccacaagagtgtttcaaggtttggagaggactataa

SEQ ID NO: 111396 - DNA, 672 bp, Glycine max
  Clone ID: PAT_MRT3847_71600C.1
gagaacatgtatgcctttagcaccaccacttacactggatttcagtgcactgttgatgaagcaacctccgagaaattcaagggtttgcctggggttctttgggtactgccagactcctatatagatgttaagaataaagactacggaggtttctttttaatttctacactaattgatttctgtagtatttcatattctactgcttgattatgttgttcttctttggatttaggtgacaagtacataaatggggagattattccttgtaagtaccctacctaccaaccgaaacgtagcgcaccaaagaatgagagtagaaggtatgagagacggagagatggccctccccctgaccgcagaaggccgagacaagaggccgctgcctcggattcatcctctacatgaggttgtggattgaattatctattccactctttggatttttttggtctcccgttacttaattgatgcccgagtcaagtatcaccaatccttggcttcatttttaacttacacttaacgtcacacggtttcattagtgtttcttttttatccctatgcatgttattcatgtaatcttattaagctctgcagattcttgatttggctattattgcagtcttgcacgtgattttcagttttgctgatagtaactaatgtcaagtgaaagct

SEQ ID NO: 111397 - DNA, 419 bp, Glycine max
  Clone ID: PAT_MRT3847_71601C.1
aaccacgcgtccgaaaaaataaaaaaaaaaaaaaaaaaaaaaaaaaaaaaaaaaaaataaataaaaaaaaaaaaaaaaaaaaaaaaaaaataaaaaaattaaaaaaaaaaaaaaaaagtaaaataaaaaaaaaaaaagggggtgccgctctatgggtttaatgcttatttacgcttgtatgctaacttcatacctcttcaatattgtcacttaatttcatttcactggccttctttttaaaacttcgtgattggaaaaaccttggttttacccaacttattccctttgcagcaaatcccctttttgcaacctgggttattaccaaaaaggcccgctccattgtcctttccaaatatttgcccagcttaactggtaaatggaaccctccctgttacggcccattaaccccggtgggtttg

SEQ ID NO: 111398 - DNA, 811 bp, Glycine max
  Clone ID: PAT_MRT3847_71602C.1
acgtcagctcgcaatacctctcgagacggctgcggacggctgcgagaagacgacagaaggggacaagcacgaggcgcaaacgaacccaccaaacgagtattggaatcactctctttctgcaaaacgaaaatggcgcagaagaagaaagctagggtttccgacgacgaggaaatggaagtgcaacatgatcaaaccagcctttaccaggttcttggcgtggagagaacggcgtctcagcaggaaataaagaaggcgtactacaagttggcgttgcggcttcaccccgataagaaccctggtgatgatgaggaagctaaggagaaattccagcaactgcaaaaagtgatatcgattctcggggatgaagagaagcgagctctctatgatcagactggttgtgttgatgatgctgaccttgctggagatgttgttcagaatcttcaagagttctttagaacaatgtacaagaaggtgactgaagctgatattgaggagtttgaagcaaactatcggggatctgactcagagaaaaatgatttgattgatttgtacaagaagtgcaagggtaacatgaataggcttttttgttcaatgctttgttcagatcctaaacttgattcacaccgattcaaggatattctcgatgaggctatagcttcaggagaactaaaggcaaaaaaagcctaccagaaatgggctaagggaaagtatctgaaatcaaaccgcccacaaatcctttgaggaggagggaaaagtcaaataagcagtcagagacagatctatgtgcaatcatagcacaacgccgaaatga

SEQ ID NO: 111399 - DNA, 311 bp, Glycine max
  Clone ID: PAT_MRT3847_71603C.1
ggctcgagggatgtgcaacgtctgttagaaattcttaaagatcatgatgcagataagctagtagtgcagtatagaaatgattatgcacatgcagattatgttatgggtgaaaatgctcaccgagatgtatatgaacctcttatatctttctttaggcttcagtgatatcagtgaagagtactccttatagaatattgtcattacctgtctctaaatcatagaattgaatagcacagaaataccagcatgtaattttacagaagatgatattattaaaggaaattcctgaaatcttacttcagtgtgttatc

SEQ ID NO: 111400 - DNA, 1977 bp, Glycine max
  unsure (1)..(1977): unsure at all n locations
  Clone ID: PAT_MRT3847_71604C.1
atttatcacctcattttctgatgaaaaaagttacacctttggaaacgcccaagagaagaaccaacgagatcgaggaccttcttctgcttctgcttccgccttttccttcgcgcttcggtgctgcccacctacactcattccgtccaaacccctttttgtctgaaaaatcaaaccttaatttctgcgtttttttctattggatccaacttcactcgccggctagagtttcccgaggcactaccctattgggtctaatcattcgagttcttcgattaacgtgaatttgggtcagagacctcatcatcagagctggcaggtggcgggtaaaagaaaatttgcaggttgaccggtagatatagcaaaggagagtagaaaccctagaagaagaagaagaaaaagaagcaatccccatataagaaaaaggatctaaaaccaaaactttctccgtgaggttaaatgcccttaaggttattttccctctaagaaatcctcgagtcgtttaaggttcccatgccggttgacttggacaatgtttccacagcttcaggggaagctagcgtgtcttcctctggcaatctgacagtgcccccaaaacccacaacaaagaagaagcgaaaccttccaggaatgccagatccggatgcagaggtgattgctctgtctccgaagaccctgatggccacgaaccgtttcgtgtgtgaaatttgcaacaaggggtttcagagggaccagaaccttcagcttcatcggaggggtcacaaccttccgtggaagctgaggcagaggtcgagcaaggaggtgagaaagagggtgtacgtgtgtcccgaaccaacgtgcgttcaccacgatccttctagagcgttgggggatctcacggggattaagaagcacttctgcagaaaacacggcgagaagaagtggaaatgcgacaagtgctctaagaaatacgcggttcaatccgattggaaggctcactccaagatttgcggtacccgagagtataaatgcgattgtggcactttgttctcgaggagggatagcttcatcacgcatagggncttttgtgatgcgttagcagaggaaagtgcgagatctcagcctcagactgttgcaaaggctagttcagagtcagattcgaaggctgtgaccggtgattcgtcgcctccggtggcggtggaggctccgccgccacttgtaccgcctgttagttctcagtcaaacagtgttgttgtaccatcatctagcttgcagacacaaaaaccagagttgcctgaaaattccccacaaatcatagaagaaccaaaggtcaatactgctatgaatgggagctgtagcagtaccagtaccagcactaccagctcaacaagcaacagcaacagtggtgctagcagcagtgtatttgcaagcttgtttgcctcatcatcagcatccgcaactgcaagcctccactctcaaacaccagcattcactgacctaattagggccatggggcatccggatcatccagcagacctctcaaggccttcatcttcagagcccatttctctgtgcctagccaccaatcatggctcatccatttttggaacgggaaggcaggaacgccgtcagtatgccccaccgccacagccagccatgtctgccactgcattgctgcagaaagccgcccaaatgggtgcagctgcaacaaatgcctcttttcttcgtgggttaggcattgtatcatcttctgcatcaacgtcatcagttcagcaagataatttgcaatggggccatcagccagtggaaccagagagtgcctcagttcctgcaggtcttggacttgggcttccctgcgacagtagctctggactaaaggagttaatgatggggacctccctccatgtttggtccaaagcaaacacccccttcgatttctcgggttgggggaatgggctgctgggggcaccccctgggtggagggcttatcggcactcatca

SEQ ID NO: 111401 - DNA, 529 bp, Glycine max
  Clone ID: PAT_MRT3847_71605C.1
ttttttttgttttttttttgtgcgcaaagcaaagtgcttatggataaaaaaaagttcttaataataaactactaaaataatggactgtaaaactaggttataaactactaaaataattatcaaacacattagactacggtggatagcacaattctctgcaccactgaattccaattactacaagccctgataaccttcaaatcacaaatccaccacctaagccaaacaaaaccacacccagccagagacaaatacagaaaacgtgaaacccaccttgccactgacgcgtcgaacccgcggtgggaaccagcgagcatcgtcgtcgtcgtttacgaagttcttccatgttcccccgcggtctccaagtggcggtcgtgaagcattctcctttccgccaccaccgtccgagttcgacaccacgtggaggcctttctccgccgagtctttgccgcttcaaacttttccaactcttcctctccgacgcgtcgccgagtcgctgttcatcttcttcctcttataacggactcgt

SEQ ID NO: 111402 - DNA, 279 bp, Glycine max
  Clone ID: PAT_MRT3847_71606C.1
cagccacaacataacacaatatgtcacttgcatttttaccgcatttaatcttcctgttctctataattagtaaaatactaccattctctctctgcctctttatttttcccatcaaaataagatttttgtctggcattcccttgcatttttttaaaatgtattttcatttattgttttaagtgtgggccacttattagctactgtcgtgccactaaatcttttgcagcatctggcgtttgctgtagggtatgtgtgttgctcatcctcaggtattctttg

SEQ ID NO: 111403 - DNA, 469 bp, Glycine max
  unsure (1)..(469): unsure at all n locations
  Clone ID: PAT_MRT3847_71607C.1
ggtttccggtcatcactgtatgacgtcctccttctttgggggggggggggggcaaagaagtatgtaaaagatacgaagctatttcgagaatagagtaaacacctcgctccaaaatatatacctgttagcaagagggtttcacactatcagccaccaccaccaccacgtaaatataatataaagataaaggaaaacagaagtacgatgatgacctacaattcaagggaacacaaggtcacttaaagagtggagtgaaagccgataacactgcaaacataaccgaagggtggtactttgcgaattggtattatatggatgttgttgtggtacttgttgttagttaaggaataaacccggttagcgttggtataaaccgggcgttgcgtttggccacgggcggttggggtncaattaagcaacaagccgagtggtacttagtatagttgccgtagaaacacagtgaagaagt

SEQ ID NO: 111404 - DNA, 1135 bp, Glycine max
  Clone ID: PAT_MRT3847_71608C.1
gtccctgcatcatcaaataaaataggagttcctgttgaagtatcaaaggaaaactatgatttgacaactgatgaagtagggataaaatctaagcaaagaataaccacagactgtgggggaataattgagtcagttgataagccaacaacatctgaagtaggtttagaatcaacccccttttctagtgatattggtcagcaaaatcccaatttactagatcttggcgatgcctataagctagctgtcagtaacagcagaggaagacctggcatgcttgtagagcattggcttggaaaggattctacaagaattagtgaagatttgaagatattgctgtcacaattttcagctactcgagggactgatctgtctgttaatgatatcagtcctagattgtctataaacagtgatgaagtgaagacttgtgatgtttctaactctgctggaatccagatacttcaaaaaatgatttcacttgagcgaaatgaatctggtttgtctctagatggaagccttgttagtgaaattgaaggtgaaagcgcagtcgacaggctaaaaagacaagttgaccatgacaggaaacttatgaatgctttgtataaagagctggaggaagaaagaaatgcttctgcagttgctgcaaatcaagcattagccatgatcacaaggctgcaggaagaaaaggcaacattacatatggaagccttgcaatacttaagaatgatggatgaggagtctgagtatgaaacagaagctttgcaaaaagctaatgaccttcttgttgagaaggagaaagagatagaagagttggaagctaagcttgagttatataggaagaagttccctgatgaatctgtgctggaaaacatggtggatacaaactctgaaatgaaggtgaaagatattggattggatcattgcattgaaaaggatgaaagtatccttggaaagtcagtttctgaaaatactaatatatctgacaaatctgaatttctacccacatctctggaaaaacagaatgttcaatctgtaaaaaattcaccattggagtttcaagatgaaaggttatatatttcccaacgttttgagaaagtggagaagcaagtttactttttcctgaatattcatcaatctc

SEQ ID NO: 111405 - DNA, 512 bp, Glycine max
  unsure (1)..(512): unsure at all n locations
  Clone ID: PAT_MRT3847_71609C.1
aaaataggatctccagtcactccattactttaancactatctgtgagaccatactgtgcactancaatggagattcaatatccaaaaattanagagaaatgggaccancatggggcaatattctnatnctnatactgatactggggtcggatatngggtatggaaaaanttcaactcattatggctcaccccaaagaggggttgaaaagatcttaanagaacaaggccttccaggcactccatacagggttaagggtggggacaccaangagacattaaagatgcaaatncganccatctccaggcgaggggtctcttctctaataacatatgacccgntgtgtctccctatnatcattacattggcaacaaacatggcaaaaattcttttatttggagatggcagacaccaaggggaaaaaaaaacaaatcccgagctaatcaaagatgtgttcaacaagatttatgactttggaaaggctaatatggggccaaatatcaaatcacttatt

SEQ ID NO: 111406 - DNA, 344 bp, Glycine max
  Clone ID: PAT_MRT3847_7160C.1
atggtttcttgccattatctatttcatagcaggggttcctggaacatctgaattggggtcccgcaaatctctccatgtctctacctctccaactcacgcatcgtggggatggaaatttaagcaatagtgtggcttacattgctataaagaaatcgaggtttcagcatttcaagtcatgacatgcttcacgagaatgaatgcacagatgatgatgtggccctggatgatcatgtggaatctaagatattggcttgtagataaatcgaccatcttttctctaacaagaaattcaggacaagacacctaattgaggcaattaatggagcatgggcaattcttggtcc

SEQ ID NO: 111407 - DNA, 184 bp, Glycine max
  Clone ID: PAT_MRT3847_71610C.1
ggccaaaacacgggctggggactaattttctgtttagaaaatttttgaaacaaataaatatccgtggttgcctggttttaaggccaaaatcaactgtgttaaaaaaataagtataatttatggtctataatatccctactaaccaatttcgggcttaaaaagttttaaacatttaacaacggag

SEQ ID NO: 111408 - DNA, 165 bp, Glycine max
  unsure (1)..(165): unsure at all n locations
  Clone ID: PAT_MRT3847_71611C.1
tgaagtgtncggattgcggcgacgtgagcngttcgctgcccgcgacgtngtgagaagtccactgaaccttatcatttagaggaaagagatgtcgttggtttcaagcatgttcgggtgtggagtggtgatngcggcgtcgcagcaatgggaattggaaggagaagc

SEQ ID NO: 111409 - DNA, 568 bp, Glycine max
  Clone ID: PAT_MRT3847_71612C.1
ttgggaaaacatttcgctcactcagattaacataagaagcaagcaattaattaagaagaagagaagatggggatggttgtggtgatttctcttcctttcataatcttctgctttcttctgggttttggatgttacttctttggaagagccagaggaaggaaagaggttcaaaccaacccacaagtttatgggatgccaagtccacccccaggtgcagttgcttcaaacaccttcttcccttcacctcctgcaccccactcccactccaagccagacaacactgataatgtttgatttcaacccaaacaccattcacatatatacatatcaaattatcctaatcgctcacctcaggttggctgttgtgttgcatatttactttaggtatattggtgtaattatttggtccttgtagtaattcactccaataagatttagacccctcccccattttattcattaatttgtataacctcttttattttaattttgtctgttattttatgtatcccttgtttccaggttgaaagttcaatccacttttatttatataaattcaattttgctc

SEQ ID NO: 111410 - DNA, 166 bp, Glycine max
  Clone ID: PAT_MRT3847_71613C.1
gctgccagaagactacataaggggtcaccaaaatataagaagaccacaagtttctattatttgtggggggattacaaattaaagccaccgtttgttatccaccaagcatatttgcacgaattgaaattcccagatggaaaatgcgaaggattactattgattttgt

SEQ ID NO: 111411 - DNA, 199 bp, Glycine max
  Clone ID: PAT_MRT3847_71614C.1
ggcaggctgcacacactgtcatggcctaaggcctatctagaagggacagagcgcgagatagctataccatggctgtacttgagcccattccagatgtggcaggcactcataacaactctgaagactactgacaaggctattctgctgattgagaacgcaacttacgacttcatacctttaatgagcaccattaacttgt

SEQ ID NO: 111412 - DNA, 299 bp, Glycine max
  Clone ID: PAT_MRT3847_71615C.1
cacactcgccgccatcgcacgctcgttgccgtcgagccgtcctgtgacccacatcgtcgctaccgtcgtgccgtcctgtgactgacgtttgtatttggtagtggttcgtaatatttttcttgactccagttttgtttttcttttttacccattggctaactctttgtgtgttttgcgcaggtgaaagaagggggtctgcctgcaaggagaagaaacggtaagcttcgcctgcaaggagaacaaaaatggaagtttcataggtaaatcaatctactctctctggtttctatctcagcttg

SEQ ID NO: 111413 - DNA, 1075 bp, Glycine max
  Clone ID: PAT_MRT3847_71616C.1
gcaaggggtcatcatcatcatcattaaacatgggtggcagtgttagcaagagtaggaggatgagttctgagaaatatgtgatgaatttgaaggagaaagtgaggctcttgcaagaggagataaaggagatgatgtatgagagggagaaggagacaaggagatatgagagggacataatggtgttcactttcaaggaggcagattcgaagcaagaggggaagaggctgagagaggaagtgaagcaattgaggaagtttggtggaagagaaagatgagaagataagagagattgaggttggaatgatggagaagaacagtgagaaagagtgggaattgatgggaactaagctcttggttgagcagatgaaggaggagagagcaaggagagatgaagctgtggagaagtggaagcaactttatcttgcaattaagactgagctagatgaactcattcaaagaacatatgatggggatggtctgtattggaaagcagaggaaaatggcatccaaatggaaaatctgaagaaggagttgcaagaaaaggaagaaaccatcaaggccttaaaaactcaattgctttcaatggagaaagaaaagtacaaaaaggagagggagtttgacttgttaaggcaaagcctgaggatcatgaatggcaagaagaattcaattcaaacgaaagagaagctcttgaaaagcaaattgggaaaatgaaatgcacaaaaactagttttcatatccaaaattgaacaatgtggttgaatatgtattattgtatactgggatggtttgtatctttcaacagcacatattttccttttactttttccccctcctttttcttcagaaaaaataagcaagccaatacttccagaggaaaaaaaaaactcttcttgaaccttgaaaaaaaaaaaacagaacatggaggaagattagcaatttttccttgtggactagcttagttattgagtatgccaggtcaggtctaaggactggtgaaggaaattaagatagaaaaaaattgttttacttttgctttcattatttagattcaaacaaagttcgtttctaaaaaaaa

SEQ ID NO: 111414 - DNA, 507 bp, Glycine max
  Clone ID: PAT_MRT3847_71617C.1
cttgttggtcttttttcctttttttgtttctttttttttgattctttttttcaggaaacaaaaacctaggattctttggtccctgggggtatcccaaatccccacgcgcccaaactccatttagggtttaattggccttaaatcccaaccacacttttttttagaaccacatgtcttttccacaatcatttctaaacacttttttttggagcacgacggctttcttttggggatttgtataaagcaaaaagggtgtctcttggaggaaggacatcttttacacccgggggagttgtccactcttggctccattttaagatcttgagacttttttcacctggtaataattgcaccccctcttcttcttggaaaattgggtttgaaaatgcccttgagaccccagcgatttcttcaaattcaaatttatctttttcaaaacaccctttttgcttgtatttattcttaataaacagggaggccctccaacatatttttaaaagttttttt

SEQ ID NO: 111415 - DNA, 360 bp, Glycine max
  Clone ID: PAT_MRT3847_71618C.1
acgagtacgcgtgcgagtcaacccgcgaggcgcccggaaacggactgggaagatgcctgtggggatcgcaccgtcgaccgaacctgataccgtgcgtaagcttctagggagagcatacgtgtcagcacacgtgtcatgaccagctataccttgaactatgcatgaccgaggcaactccggaggaagccctgatggatgctcacatggatactgacctgctgaccggtcgattgactcgaatgactgatcgaacgacttagcaaaccgtttagtacctagtttccttcaagatatccgtaacgctaggtcgagccctatcgcgaaaagtctatgattaaaggcatgattagcggaatgggc

SEQ ID NO: 111416 - DNA, 413 bp, Glycine max
  Clone ID: PAT_MRT3847_71619C.1
aacatcaaggctggtttccattcctttaacactccattgtcaatgcatttgaaattaccacttaccaaaacctatttcagtttcaacattctgaaaggctttatctcaatcggtacacattcaaagcaccaaattcacgcattaacacataactacaaacctaatgtaccaaaccgaaccacaaaaaactgcaacaagaaagtagagcagcacctcttcaaagcactgagaccactccttcctcaacaagccatacaccaaaggctccctatcatcctcatcaccaatcctcagcgccaccttcaactccttcaacccttgcgccgcgaattcgaatcttccactcttcaacgcttccctcacactccccaatctctggttcagcgccacaacggttccgaccaatcccagca

SEQ ID NO: 111417 - DNA, 553 bp, Glycine max
  Clone ID: PAT_MRT3847_7161C.1
ggtttcggcattccagcaagaattcagggtgaagaggaactcgtcggggtataggacaagccgtcatttgcttcctctgattttcgccattgatttgagaagcacatcaaaaaccccaactttgttcttcctcagggtttgtgggttgcattgaagatgtttaaattgatggagggcccatgcatttggaagattaggatggttgaattttcaagctgcaatgggaattcaagagagttgggtttggatttcaaatgtgtttattttaatggcctatatatgccgtgggaatgaagaaaatctgaggtggatattcaggttttccaatcccccggtttgttatgctttttatgtttcacttacgtttttctgtttaatttaaatagaactaggagtattgtgtttcttttgtttcatctgtattggattgctatgtttccatttgttaagtgattgtgtctactttgtacttcttcagtttcttgtttcttgtagtgatttgaaaaccacccaaattaaataaaagagcatagtttgctctagtgtattgtat

SEQ ID NO: 111418 - DNA, 1265 bp, Glycine max
  unsure (1)..(1265): unsure at all n locations
  Clone ID: PAT_MRT3847_71620C.1
cttcaactgtgccctactttctcactatcctgtccctgaagaatatgagcacccacctcgtggcttcagtacaaaatttgatggatcttctatccttaagagatgcagttccaatgccaattctaggaatgttgactcggaacgagtcgggttcgattccaactggttaaaccgttggatggaattagataacaagtgtagccaaactggagatgcttcattgaaaaataatggacgccctgatgatgataaaagtgacaagattctcgaagtggatacttggaggccacacttcaagtcccaccacaacagtagcagctcctctcaagcagcacattattatctgaatgctgattacaataatgagaactttgcggcggcacacgagtctccatcaaaacgttcagcaaaggctctaaaccaaagcttctcatcaagggaggtgttgcagctaagatcattgaagggcaaggagggcattgagagcacttaaagcattggtgaagttgcaagcattggtgaggggtcacattgtgaggaagcaaacttcagatatgctaaggcgcatgcaaaccttggtgagactgcagtcccgggcacgtgcaactcgtgggaacttgtcagataatatgcattctttcaagtcttcactttctcattaccctgtaagcaaagtggacatatatgtatatcttttttgttcttttaattattgccatgacatgatccttatctaattaagctgtagttaacttgttacaaaggctatgtgatggcattggcatggcatttcactttcttcaaacgtgttatctttattaatgtacttttctttttctacttttttctttctttctatcaccccaccaaatgtttgcaattaggaatctgttacagaataactttccaccctgtataaaacagcgtgttgcaaattaaaccggtgctagagcatgcttctatagataatctttagggtggatcgtgccattgtgataatgataatcattcatatgtgactaatcaaatagctcataataaccattaatcctttctttgaacctttttttggtcttctttcttttgaataattggaggggcctgaagattatgagcactcacttggggcctatagtgcaaaatttggtgggtctattgtgaaggggcacatgggaagttggtggtggtgtggctnnnnnnnnnnnnnnnnnnnnnnnnnnnnnnnnnnnnnnnnnnnnnnnnnnnnnnnnnnnnnnnnnnnnnnn

SEQ ID NO: 111419 - DNA, 444 bp, Glycine max
  Clone ID: PAT_MRT3847_71621C.1
ggacccaaaaaggttgcttcaactaaataaaacgggaacaaaaagtgggccaaaacaattcccaagggggctgcccccccggaaaaaaaaccaaaaataagggggccaaaaaaatcaaatccctgccaaatttttaacaacccaaccttaacaggggtttaggcagtttttgcccatgacaattaatttgactcccaaaaaaacccctttttttccctaaaaacctatgggctcaaacaaaaaaaaaacttaaaaacaaaaacccttccgaggcccccaaaaatcctttttaaaaaacccaaaacgccccaactaaagccccccccccaaaaatccttttggccagggaaatttcctggggcataaaaacccccccctgggggggaagggcccccaagttaggggcctcaaaaaccccaacaagggatgcctcaacagcctttt

SEQ ID NO: 111420 - DNA, 276 bp, Glycine max
  Clone ID: PAT_MRT3847_71622C.1
gcctcgcgtgcactcaccttttcgattcaattttaacaccgacatcgacatgctgagcattagtgtgcatttcaacgggcatggcccgtataatcatgctgtgagggcatctacaaacctaacgctctttgatgctaatagacttgatccaatgtgtccctttcatacttaattaagcgatcacaattgaccatgctcaagatgcgcctttgcatctcatccaaactaactccaagctttccatagcttaaacactgcatatccgcatcctatatc

SEQ ID NO: 111421 - DNA, 716 bp, Glycine max
  Clone ID: PAT_MRT3847_71623C.1
ggctcgagctcgagccgaatcggcggggggggtttgttttgcgaaggatcctataccttgcgcggtggaccgagttgacggtgataacctcctcccttctcctccgccagatctcatcctcgccgccgccgccgccgccgccgctgccgccgaatttctcctcgtcgttttgtctccacctctcactctcgctgaagcttattaaggaccgacagcatgtgccggcaaaattctccggtacaccatgccggtgaagaagaaattgcagctgatgagagtcttttaatttattgcaagcctgttgaactgtacaatattctctaccgccgcgctcttcaaaatccttcttttcttaggagatgtttgctttataaaataagagcaaggcgtaaaaggaggttgagagcaggaattgtgattttcaattatagggatcactacaacattcttcggaaaactgaagtgaccgaagacttttcttgtccgttttgcttgatgcagtgtggaagctttaagggtttgcgatttcatctttgttcatcacatgatctattcaactttgggttctgggttactgaagattaccaagcagtgaatgtctccgtgaaaattaatatatttgagatcagagaatgttgctgatggagtaattccacaatcgcaaactttcttcttttgttcaagacctcgaaaccgtagaagaaaggactctgttc

SEQ ID NO: 111422 - DNA, 1838 bp, Glycine max
  Clone ID: PAT_MRT3847_71624C.1
gcaaaattctccggtacaccatgccggtgaagaagtgatggcagctgatgagagccttttgacttattgcaagcctgttgaacttttctattttgaagaagcctaggtctattcttaccttgcgcggtggaccgagttgacggtgataagctcctcccttctcctccgccagatctcatcgtcgccgtcgccgaatttctccttggcgttttgtctccgcctctcactctcgttgaagcttattaagtaccgatagcatgtgccggcaaaattctccggtacaccatgccggtgaagaagaaattgcagctgatgagagccttttgatttattgcaagcctgttgaactttacaatattctctaccgccgtgctcttcaaaatccttcttttcttaggagatgtttgcgttataaaataagagcaagccgtaaaaggaggttgagagcaggaattgtgattttcaattatagggaccgctacaacattcttcgaaagactgaagtgaccgaagacttttcttgtccgttttgcttgatgcagtgtggaaactttaagggtttgcgatttcatctttgttcatcacatgatctattcaactttgagttctgggttactgaagattaccaagcagtgaatgtctctgtaaaaattgatatattgagatcagagaatgttgctgatggagtaattccacaatcgcaaaccttcttcttctgttcaagacctcgaaaacgtagaagaaaggactctgttcaaattgaaaaacgcaccaatgtaaaattcctggagttggactcaccagaaggcatacataatggatttctacaaaaagatgatgatatcttatcctgcaaaggagagaatgtgtctagaacatctcgtagtgagaagattttccctagtggaagaaatgacggaggaaaatttggtcctgatcatcctggcaccatggacaacctggagcatgtggaatccagtttcaacattccaggtgtttcaattgccatgccccaatcttctgtggaccctgaatgtagtaaatcaatatgtaaaagtgatcctgctctgcctgctaaaacaaagaagctaagcatggatcgatcagactcaagaaaccgaatgcttctgcagaagagacttttctttcactcacacagagtccagcctatggcactagaacaagtgttatcagaccgtgatagtgaagacgaagttgatgacgacattgcagatcttgaagatagaaggatgcttgacgattttgtggatgtttccaaagatgaaaaacagctcatgcatctctggaactcttttatgaggaagcaaagggtgctagcagatggtcatgttccgtgggcctgtgaggcattttccaagcttcatggaaaagagctgatctcatctccagctttattttggtgttggaggttattcatgatcaaactttggaatcatggtcttcttgatgcctgtacaatgaacaactgtagcatagtattagatagttacagaaatgagggatcgggtacaagaaaaaattgaagaccataaggaaactgactcaacaacaagaatatacagtcttctccgccttgtattttgcttaactgcaggttcccattttcgtatttgcataatttattatgattttttgaactgttattggcctgttcattgtattaatgttcccaatgtattgagattgaaatttagggtattccctcacagtaattttacttctgaattgtagcttgtctaacaaatataatatttttatataaaaaatgtataaagtactgaagtttttacatcatataaaattttaataggatattt

SEQ ID NO: 111423 - DNA, 359 bp, Glycine max
  Clone ID: PAT_MRT3847_71625C.1
acggaagggccccggggaaaaacacaggacaaaacattaaaacatgagaaaaatgacattacatttatagaacaacaaagggtaaattggaaaaattaaaaaccgcctaaaaatcccttcccaaggggaacaggaatttacaggacttgggtgaaaaccaaaaatatatcaccgggagatggggggaaattctggtaaaaacattccccaaaaacttaactgggctggtaaaattaaaatcatcaagggaaaggaaaacctagatgaacaccattgttaaccaagccttaaaatggggtcaatataagggttacccccaaaaaaacgggtaaaaaacacaggataagctttgaccgaaa

SEQ ID NO: 111424 - DNA, 700 bp, Glycine max
  Clone ID: PAT_MRT3847_71626C.1
ctgaccaagattggtttatgatattaatactattaccttccgctttatgtcttctgataataactcactctttcgctcttttccctcaattctaattccttaactacgcaatagtgttttttatcaattaagtcgtttcttttcacttgcaacaatttttcatcagtctcttaaacaatgttccctgactcacatttttcctctctcttttttagctctttaacttcaattctcattaacatctccaccttccttttttgtcttgcgataatgattgctcggacattacgaagttaaccataattatgttatccatagatcaaataattttatggattgaattttaccttgattgcctattgcctatgcatccaacaaagcctcctctcccacacccattagccaacaatgtagtgaaaataatttgaaggtctatatggaaatgtagcatgttggattgtctgcaattattgcattttgagggttatgatgcagctcaaacaccacttctttaacaccactttcaacaccagatcttgttgcttccacaaaacaaaacgcagccgcaagatccaattccttctgtagagaacacatgcattctacaactcccattaaaaacaaaaccctcataatatttaaaaaaaaaaatctttttttggacccttgcaattctaaatccattccatcccaatatttt

SEQ ID NO: 111425 - DNA, 497 bp, Glycine max
  Clone ID: PAT_MRT3847_71627C.1
ctcctctacataaatactttgcgagaaggccctcttcttgctactcacatccacataccaagcaactctccaagaaataaaaaaaaaggcaggctcctttttatcatccgcaatgaagtacgccttcggtctcgctgccctggcagccctggctaccgccagcgatgtccacgacctcaccaaggacacctttgattcattcgtcaaggagaacgacctcgtcctcgccgagttcttcgcgccctggtgcggacactgcaaggccctcgctcccgaatacgaagaggccgccaccgagctcaaggacaaggacattgcgctcgcaaaggtcgactgcaccgagcagcaagagctgtgccagagctacggcgtcgagggataccccactctcaaggtcttccgcggtgtcgacaaccaccagccctaccagggtccccgcaaggccaacgccatcatcttctacatgaccaagcagtcccttcctcccgtctccgtcc

SEQ ID NO: 111426 - DNA, 317 bp, Glycine max
  Clone ID: PAT_MRT3847_71628C.1
ttcacgcgtgcgcttagagaaaaaaaaaattgattaacatactgttgatttgatttattttgatctgcttctgctgggtgggtggcaatgtctgtacctacgatcattgaccctatggtgatatcggcaccagaaactcattcaatatcagcagctgcttgcatactagctgcacatagtgaagttgaacttgctgtgtgtgactgctgtggactaacagaagagtgctccccagcctacatggaacgattcactgagaggtttttcggcaaatgggtaagcgggtagtgtgctatagctgccaaagatgaaattgt

SEQ ID NO: 111427 - DNA, 485 bp, Glycine max
  Clone ID: PAT_MRT3847_71629C.1
gtgggtttttttttttttatttttttttttttttttttttttttttttttttttttttttttttttttgggaacggaagtccccccttccacaataaaaaaaccccaggggatcccctgttcactttctaacaatgattcaaaaaatcatattttatcttgggccccccccctaccgttggggaccttcaacggttttaccatcatatggtctttttgatgaattctaaacctagctcccccccaaagtctttactggggggcccactggcccctttgggcccccccaggcatgtaataacccccataataggcccccggggctggggggggtttcccccaagaccccccccccagggggacatcagggggggtggttccctaacattcatccacccccatgttttgaaattggaaaaaaggttttggggggaaaacaccccccagggccttaacttgataagggttaaaaaaattgggaaaccc

SEQ ID NO: 111428 - DNA, 303 bp, Glycine max
  Clone ID: PAT_MRT3847_7162C.1
ggctcgaggcactatcacactggacatgttgtttagccgatgcgacgtgcgcattatgcatttctcgggctgttgaagttcttgaattttcttcgcactcacatcacctttgctgccgcgctagattgtaggacaggccagcaggcttggacaggagacagaagatctcgcttctgtgtctggatggctggaatggtgaacattggttgcaatcaccaaccacggattggtcgatacgtgcgctgcaagatactcacttggcgactcggaatcaacgattgccagttatgataactccatgga

SEQ ID NO: 111429 - DNA, 234 bp, Glycine max
  Clone ID: PAT_MRT3847_71630C.1
gcttgttgcgagctttaagctagttgatcgagaggcgaatacgaaggagctggttatgtttgtggctgcagactgtatggtagcatggccattccatgtagcctgctaccaaaggttgcttatacgaatgacaaccggctatggtgggcgcgcttcggaagtataatgcacgaggagcaggctcgctgaacacgcacacatcatgcgctcctttactaccattactgcagagtg

SEQ ID NO: 111430 - DNA, 419 bp, Glycine max
  Clone ID: PAT_MRT3847_71631C.1
caaattccggccaccgtcgccacctgcttttcccgaataacctgattgatacctttgaacatgtaatcaaatataccattgaagaaaagcagactttccattccaatttgaaatcatcacttcacttgcaatggcgagtaccacaccctctgctgactctgcttcagcagatgaagttaccgcaaaagccgttcacaagcgctaccaagggttgctcacggttcgaaccaaagctataaagggcaaaggagcttggtattggccgcacctggaacccatgttgctgcacaacaccgaaacgggcctccccaaagcggttaaactcaggtgctccctatgcgacgccgttttttccgcttccaatccttcacgcaccgcttctgagcatctcaagcgcggaacctgccccaattttaatt

SEQ ID NO: 111431 - DNA, 363 bp, Glycine max
  Clone ID: PAT_MRT3847_71632C.1
ttcattcttacgaggacgcgtgggcggacgcgtgggagtaaatctcgctctagactggaaaaagtctcctctactaaagcacactatgctagtgcaaaaaccttcaaatataataccactggtgctggttcacattctccagaagactctcctgaaaaagaatatcaagaaaaacccaaaaagagagatgccagattgcgacacagaacagatcctcaatccacagaggtacaggctcagatggcaacaaacttgtctaaattgtctctagatgaagacgaaacccccaaaggccccatgtcggatcttaacatctgttaatcaaaacttgcacttccccaaaaacacaagtggaggaaccat

SEQ ID NO: 111432 - DNA, 401 bp, Glycine max
  Clone ID: PAT_MRT3847_71633C.1
tgttttattttgttttttattttctattttttatattgtttattttacattgtgccttttcagggacagcttactttaccatgcttcttgcggtattcatttgaagaagagaagcctcctcttttccccaaaatgcgggcaaaaggcccccccctggggacaaatgggggaaaaaaaacagaaaatttttttttaaacccaaaaaaaatcttcccccccttttatattaaaaaccccgccaaaaaatggaatccccccgccacaaaaccccccccaagggtttccccccccggcccgggggggtttttaccccccgtgaccaaaccatgggagttacccccccccgaacccccctcgtttttaaaaaccccaaaagccccccttgaaaccccacgagcccc

SEQ ID NO: 111433 - DNA, 3324 bp, Glycine max
  Clone ID: PAT_MRT3847_71634C.1
ccggaattcccgggaacggctcgagcgatatctccctggctctctctgacccgaaccgaacaaaggaattatgattttcggcttggacaatgaatcgataaattaaaaaaaaaggaagggagaaagccccctctatttctccgaaaggaatgtgaaaatccagccgggccacgaaacgacacctctctgcgcttaaaacgactgcggcccacgatcgcgttcttcagttgaggcatgttattcgctgctcactcctcctcctactcttgttcttcttcttcgtcgtcttggccttcgcatcttcacaatcacatccaatagagacacgttgactttagtggaagaagaagaagaagaagagaatggaacaatcggttttggatgatataatcaatcgcctcctcgaagttcgtacccgaccggggaagcagcttcagctatcggagtccgagatccgtcaactctgcgtagtttccagagagattttcttgccacaacctaattttttaaatctcctatgaagtgccaacataaagctggtatattgaaatataaatctaattgttcaggaaaaaaaatgatcttatgtattacggaccaaattagaaatttacagcggcccacagatgttcctgacagaagtctgctgcctgatctatgaaactcagaccccaacaaatctggggcaggatggagttggaatgcgaaaggagttactaaaacattcggtggtgacaaaatcttgcaatttatgctccttaccgacctgggtcccctcaaataacctactcagtttgtggaatccctggtatgccacgcgtcctgttacgaaatccgtttccttcctctaacctaatcaaatcctctcctctcaaaccaattcccacttttcctctcttcgcctcccctcaggaaccaatgtccataatcaccccacgccgtcatcctcaaacgacacccttccgctagcaaaacgactgcggtttggtcgtcgtcttccccgaggcatgctcttgggatattattattcatcatcgtaatcacaccctacagagacgttgactttgtgctttttctgggaggggaacaaatggaccaagctcttctggacgacataatcaatcgccttctcgaagttcgcagccggccggggaagcaggtgcagctgtcggagtcggagatccgccatctctgtgcccgcttccagagagattttcttgcagcaacctaatttcgttggaagcttgaagcacccattaaagatttgcggtgatgtacatggtcaatattctgatcttttaaggctttttgagtatggtggactaactccctgaggccaacctacttatttttgggggaattatgtagatcgagggaagcagagtttggaaacaatatgccttctcctagcaatataaaataaaatatcccgagaatgtatttaccttttgaggaggaatccatgaatgtccttctttaaaccgtgtatatggaattgcatgacgagtgtattggaaggttcaattttagcctatggcaggcatttacagaatgctccaattgcctccctttggcagcacttgttaaagaaaagattatgtccatcccctcgaggactgaaatcgggttcgaattaagtctagtgaaattagcggccttggagtcggaacagacatggctgtatcagtgtgggttggagcttttcaaataaacaaaacccagcaacagggaaaaaagattgagagtcaaagagagagatgttacaggtacatctagtgatgacatgggctccgacttacagcagaaacgtgattgggttgattatgtatcatccaaataatgtgctagaggtatgggtccccgtccttttctaaccgtcagtttgaaacaatattttcagcacctaattattggtggagagtttgacaatgctggcgctatgatgagtgttgatgagacactaatgtgctctttccaaatattaaagccagctgataaaaaagcaaagctcaactttggaagtactactactactaagccaggaaactctccagcaggcataaagtccttcctgggtacaaaagtatgaagttaattttggtgaaattgatgccacaaccgtcagcttggtcttgaagatgtaatagttgaagaaaaggaaagtagagttccatttaatcatgatattttggaattgtaaaaacaaagggaaacaccatcatgaactatgtagactgttgttttccactggtacaaatttgcattttgaggtagacagcctctccttgttttcttttgtacactagtagctggtatatgtcattctgacttataaggttctcaagcattgatggatacatctgcatgtgttctgcaaactaattaaaaatgctcgtacaattggtttatgaatggcagtgaagccagtaaaaatggatatggtcctcactttggatgtctcctggtattttttggtagtcattttgactttggtcttaatcctctgttacatatacggatggtagttgtccttttacttggataactctgaaacctgattcaacccttgggatctaccatatgagacaaaggtcctcgcttttgctgatgtgcctgatacaggtttgctttgtgatctccctctggtcagacccagacaaagaggtccaaggttggggaatgaatgacaggggagtttcatatacatttggtgctgataaggtctcagagtttcttcaaaaacatgatttggatcttatttgtcgtgctcatcaggtggtggaagatgggtatgagttctttgctaaccggcagcttaacaatattttcagcacctaattattgtggagagtttgacaatgctggcgctatgatgagtgtttattcgatgagacactaatgtgctctttccaaatattaaagccagctgataaaaaagtaaagctcaacttcggaagtactactactactaagccaggaaactctccagcaggcgtaaagtccttcctgggtacaaaagtatgaagttaagtttaagcttggtcttgaagttgtaatacttgcaagaaaaggaaagttgagttccatttggtctcctatgatattttggaattgtaaaaacgaagggaaacaccatcatgaactatgtagaccgttgttttcaactggtacaaatttgcattttgaggtggacagcctctccttgttttcttttgtacactaaaaaaaaaaaaaaagggttctgacttctaaggttctcaagcattgatggatacctctgcatgtgttctgaaaactaattaaaaatgctaatacaattggtgt

SEQ ID NO: 111434 - DNA, 224 bp, Glycine max
  Clone ID: PAT_MRT3847_71635C.1
ctttcctctccttcttcctctttcagatctccgctgaggacatcctcggagaaggcgttcgtactcacattggatccactctaactcttcacgacactgttcagcaagcacgatttccatcagtcgtccgcagttctacgtccccactggtgtggtccactgtacgcaagacttgctccggagtcatgagcacagcctgcttctatcttgagtagtcatgactc

SEQ ID NO: 111435 - DNA, 1767 bp, Glycine max
  unsure (1)..(1767): unsure at all n locations
  Clone ID: PAT_MRT3847_71636C.1
gtcgccatgccaagccgttaagttaagcctcggaaattcggcctcgaagnaacgcgtccgctccctggctctctctgacccgaaccgaacaaaggaattatgattttcggcttggacaatgaatcgataaattaaaaaaaaaggaagggagaaagccccctctatttctccgaaacgtccgtgaaaatccagccgggccacgaaacgacacctctctgcgcttaaaacgactgcggcccacgatcgcgttcttcagttgaggcatgttattcgctgctcactcctcctcctactcttgttcttcttcttcgtcgtcttggccttcgcatcttcacaatcacatccaatagagacacgttgactttagtggaagaagaagaagaagaagagaatggaacaatcggttttggatgatataatcaatcgcctcctcgaagttcgtacccgaccggggaagcaggttcagctatcggagtccgagatccgtcaactctgcgtagtttccagagagattttcttgcaacaacctaatttattagagcttgaagcacctattaagatttgtggtgatgtacatgggcaatattctgatcttttaaggctttttgagtacggtggattacctccagaagccaactacttgtttttgggggattatgtggatcgagggaagcaaagtttagaaacaatttgccttctccttgcttataaaataaaatatcctgagaactttttcctgttgaggggaaaccatgaatgtgcttctataaaccggatatatggattttatgatgagtgcaagagaaggttcaatgtaaggttatggaagacatttacagactgcttcaattgccttcctgtggcagcactgattgatgaaaagattttgtgcatgcatgggggtctttctcctgacttgcttaatttggatcagattagaaatttacaacggcccactgatgtgcctgatacaggtttgctttgtgatctcctctggtcagacccaagcaaagaggtccaaggttggggaatgaatgacaggggagtttcatatacatttggtgctgataaggtctcagagtttcttcaaaaacatgatttggatcttatttgtcgtgctcatcaggtggtggaagatggatatgagttctttgctaatcggcaacttgtaacaatattttcagcacctaattattgtggggaatttgacaatgctggtgctatgatgagtgttgatgagacactaatgtgctctttccaaatattaaagccagctgataaaaaagcaaagctcaattttggaagtacaaccactgctaagcctggaaactccccagctggtgtaaagtgcttcctgggtgcgaaagtatgaaattaaatttggcaaaaaggttgctgctacttcgggtcagcttgggcttgaactcctaatggttacaggaaggggaaagtcgagttccatttcgtctactatgatattttggaattgtaaaatcattgggaacaccattatgaaccatgtaaaattgttttttattggtacaaatttgcatatcaaggatggagagccataatctccttgtcttcgttgtgcaccaatagctggtatattttcctaactgtgagcttttcaagtgtagatggatacatccgcatggcatcagttgctgagaaccatttaaaaatgctttatccgatttggcatatacggatggtagttgaggctgttgaaacagaaagtcgtcgaatctcttcgtttctcgtttt

SEQ ID NO: 111436 - DNA, 1025 bp, Glycine max
  Clone ID: PAT_MRT3847_71637C.1
tttttcctgttaaggggaaaccatgaatgtgcttctataaaccggatatatggattttatgatgagtgcaagagaaggttcaatgtaaggttatggaagacatttacagactgcttcaattgcctgcctgtggcagcccgtgttgatgaaattatttaagtcgggagaaagtcctccatgcatacacaaaatcttttggatcagattagaaatttacagcggcccacagatgttcctgatacaggtttgctttgtgatctcctttggtctgacccgagcagagatgttcaaggatggggaatgaatgacagaggagtttcatttacatttggtgctgataaggtctcagagtttcttcagaaacatgatcttgatcttatttgtcgtgctcatcaggttgtggaagatggatatgagttctttgctaatcgacaacttgtaacaatattttcagcacctaattattgtggggaatttgacaatgctggtgctatgatgagtgttgatgagacactaatgtgctctttccaaatattaaagccagctgataaaaaagcaaagctcaattttggaagtacaaccactgctaagcctggaaactccccagctggtgtaaagtgcttcctgggtgcgaaagtatgaaattaaatttggcaaaaaggttgctgctacttcgggtcagcttgggcttgaactcctaatggttacaggaaggggaaagtcgagttccatttcgtctactatgatattttggaattgtaaaatcattgggacccccattatgacccatgtaaaattgttttttattggtccaaatttgcatatcaaggatggagagccataatctccttgtcttcgttgtgccccaatagctggtatattttcctaactgtgagcttctcaagtgtagatggatacatccgcagggcatcagttgttgagacccatttaaaaatgctttatccgatttggcatatccggatggtaaaaaaaaaaaaaaaaaaaaaaaaaaaaaaaaaaaaggg

SEQ ID NO: 111437 - DNA, 2206 bp, Glycine max
  Clone ID: PAT_MRT3847_71638C.1
tacgagttctttgctaatcgacaacttgtaacaatattttcagcacctaattattgtggggagtttgacaatgctggtgctatgatgagtgttgatgagacgctaatgtgctctttccaaatattaaagccagctgataaaaaagcaaagctcaattttggaagtacaaccactgctaagcctggaaactctccagcaggtgtaaaggttggaagatattagtccttcctggatgcgaaagtgtgaaattaaatttggctaaaagattgctactactacggatcagcttgggcttgaactcctaatggttgcaagaaggggaaaatcaagttccatttcgcctactatgatattttggaattgtaaaatcaaagggaacaccattatgaaccatgtaaaattgttttttattggtacaaatttgcatatcaaggatggagagccataatctccttgtcttcgttgtgcaccaatagctggtatattttcctaactgtgagcttctcaagtgtagatggatacatccgcatggcatcagttgctgagaaccatttaaaaatgctttatccgatttggcatatacggatggtagttgaggctgttgaaacagaatgtcgtcgaatctcttcgtttctcgttttgattgtcttcttttttgtgtgagaaatcttgttttgatttgggatcatcttcgtttacattttcctcttatcaaaggtcctcactttacatgggcactggtcccgcgacaaaactttcatgataatggtcccaatatatgtcagtacatgcatgtctgaatatcgttgttgctgcttgccccccattgaaaccgcattccatatctgagcttggaatttccccctttctggggcaaagtaaagttggcattccaagctgaacctgagtcgtgtctctgaacaatggccagtccattccgatcgggggcattaatatcttctcatacaataaatgatgtcagaagggagcctctagtgattcatcccaaacttctgcactaccgttagacatcctctacatcttcttcattgaaagcctaatatattcagagcaaagcgatcccactctgtcaatgtaacgttcctgacggatcaaaaatgggtcacgagtttcaaaggccatgaacttatttagattgaacaggatgttgaaaacacttcctgaaagtttaccacctttcaggtcccgcaaagttataacactctcatcctgcaaagcaaagaatttcaaatgattaaaaaatgataataaatcagtaatgacattatactgaccaaagatataataagaaaagggggacaatatgtttgggatatgctatattccagaaaaaaaaataattataaacagctcactagagttgtactctcttttccaggtaagattatttctgtaaatgtatgaatacaggttttgatgatgccaaaagtataatcaaataagattgtttcaacaaacatttaaggttaaacaaacagaaattgattaaagattgattaaaggtcaagcaaacaagatcaagaaaaagataaggccttagaatatttgttaagagaatatcactggttgatcagctttttccttaaacacattgtttccaacaaaacaagagactcggacgcgtgggagacccggatgaattgtactttctcctaaataattaaattagattgccagatgttcctgatacaggtttgctttgtgatctgctgtggtctgacccgagcaaagatgttcaaggatggggaatgaatgacagaggagtttcatacacatttggtgctgataaggtctcacaatttcttcagaaacatgatcttgatcttgtttgtcgtgctcatcaggttaaactcctgcctttggtgcttaatgtgttaccaggtcttcaggattgagtttgtatacccatttctatgacaaaatgactgtgaaatgtatttctctttcccagcaattttaatctatcaccccacgccgtcaccctcaaacgattcccttccgctagcaaaacgactgcggtttggtcgtcgaggcatgctattcgctgctcactgcctttactcttcatcatcgtaaaaatcacacccaatagattagagacattgactttgtgctttttttctgggaggggaacaaatggaccaagctcttgtggacgacataatcaaccgccttctcgaagttc

SEQ ID NO: 111438 - DNA, 391 bp, Glycine max
  Clone ID: PAT_MRT3847_71639C.1
gatccaacacatccaaagtgtccattgccgcatcataatcggcgcctaataaatggaggaggtatgcgcagaacacaagatcaaacctaccgaaatgttccgtggggactcgagtaaccagatcgagaggatcactgtatacgactacgaggacagaaacactctgttcatacagcacgcagctgtaaaagacctggaaccacgacactaagacaacgaactgtacatgaccagcgggcagatcctggagaccgacagctctgagaatcggcagacccggacaaggaacaactaggccatggtgcatagcactgaggttgctggatttatcgactcccaactacatgttgagcgacacgtagattataactacaataacttgcatggatac

SEQ ID NO: 111439 - DNA, 448 bp, Glycine max
  unsure (1)..(448): unsure at all n locations
  Clone ID: PAT_MRT3847_7163C.1
ncctttttaatttttaannagcaatgtaataaagaaattcttttacaaatagtacaaaccatacattataaaatagattattggtgaactttatttggtgcctaacttttcctggtgcccactttaggttaaggtaaggcaagttgcaaaaaaagtaacataaaagaaatctaatgaattgaatcctcccttaatacaaatggactgtaatcaagagcttcaattgtctgattaatttatgagaaatgtctatgcaaggcatgaacatcaatcagtctaaccgaaaattcatgaaaaggagcatccacttgattgtactcacctaatgggtaggttatagggagtcaatctcacaaagaatccaagaataccatatacctaggaactttgatcctctagatgttactttgtgcacctccaagctacttactacactctttttagaata

SEQ ID NO: 111440 - DNA, 259 bp, Glycine max
  Clone ID: PAT_MRT3847_71640C.1
gctaggtcaaatagtgttattaatactttatatttatataaaaacaagttcacactagacaatctactcaagttgagtcagctagataaaagtattctaaacgaaaagtcttgtttacgagtattttaatatagatgataaatcgaagacagataataaagaatttatataacttacacattcggttagcctaattaaatacgttggtggttaaattagaataagtttgcatgagtcgatatatgcagtgagtgatatc

SEQ ID NO: 111441 - DNA, 283 bp, Glycine max
  Clone ID: PAT_MRT3847_71641C.1
tcgataggattccggtcctattgtgttggtcttcgggatcggagaagctgctacggcgggggcttgtgcagacccgcagagactatgtcagctgggacgggatacatgccactgaagctgcaaatagtatgatagcgtatgctgtgatcagcggctcctattcgtacccacctttcgatctttcaaagctatgtagcccttaagcatcatcagtcgtgaaagggagtacagtatcaccatacaccgcattttctctgaaacaagcaggcacatttttttcaaa

SEQ ID NO: 111442 - DNA, 202 bp, Glycine max
  Clone ID: PAT_MRT3847_71642C.1
tgcttcatgtatacggagattgtcattaatagactgttaccttgaacacatcgttgagaaccatcatgtacatcaaaaggttatgggaggatattctgattttggtaaagatgctggtcgatatactgctgatagggaactttacaaagctcaggaggatgttgcagcatgttgtcttgattatggacatactgttactcta

SEQ ID NO: 111443 - DNA, 616 bp, Glycine max
  Clone ID: PAT_MRT3847_71643C.1
cctgtgccgccaacaacgaaaatggaaaccattttgagggcactttgctggattgcatttcttgtcctattaacatgtattccaagaggaagtgctcaagatagctcttgccttaataagctttcaccttgcctaaactacctcaatggcaccgaagacccacctgatagttgctgtgaaccacttaaatctgtgattgaatcagatgcagaatgcctatgtagcttggtgagcaacagaggcacaaggcaagcagaacaagctggcattaatatcaatgaggctcagcaattgcctggtagatgtggccaacatgtcaatccattgtcctgcctcacaaattcacctggtccgacgaactcagatagaaactcagcaacaaaattggtgcacgtgtctagtggaattgttatgatgatcttatttttctcaattattgcacatgtatagccagcattggtttagggacatcacactcctggcagagatttctaaaggaacagattgattttcttttcaccgttattctttttgttatactagagtgtggattataaattgttgaatgttgaaatatacctctatttatttctagtgttctgaaatttggtactag

SEQ ID NO: 111444 - DNA, 649 bp, Glycine max
  Clone ID: PAT_MRT3847_71644C.1
tttgctcgagagcgcacgctcaacatgctcggtcgcgccaagaaggtgatgatcgacaaggagaacaccacgatcgtcaacggcgccggcaagaaggccgacatcgaggcgcgcgtgtcccagatcaaggcgcagatcgaggaaaccacctcggactacgaccgtgagaagctccaggagcgtctcgccaagctcgctggcggcgtcgcggtgatccgcgtcggcggcgcgaccgaggtcgaggtgaaggagcgcaaggatcgcgttgatgacgcgatgcacgcgacccgcgcggctgtggaagaaggcatcgtcccgggcggcggcgtcgccctgctccgtgcttccgagcagctcaagggcctgcgcaccaagaacgacgaccagaagaccggcgtcgagatcgtgcgcaaggcgctgtcggctcccgctcgccagatcgcgatcaacgccggtgaagacggctcggtgatcgtcggcaagatcctggagaacaagacgtacgcctacggcttcgactcccagaccggcgagtacgtcaacctggtcaccaagggcatcatcgacccgaccaaggtggtccgcaccgcgatccagaacgcagcctcggttgcggcgctgctgatcaccacggaagccatggtcgccg

SEQ ID NO: 111445 - DNA, 682 bp, Glycine max
  unsure (1)..(682): unsure at all n locations
  Clone ID: PAT_MRT3847_71645C.1
gcccgctcgagggccggcctgggccgacnnttacnaaaannnnnnaaaaaaaaaaaaaaaaaataacaaaaaaaaaaaaaaaaaaaaaaaaaaaaaaaaaaaaaaaaaaaaaaaaaaaaaaaaaccggccctttgggggttttctttgcaaacatatcttggaaccccattcccatcaggccagggcctaggaacttttttcaaaaaggtggggggggacgggggattgttaaaaaaaaaaagggcaactccaacaagggatattcttctttccccccacccccctttttatggggaggaaaaggaatacttgttttgcaaaaagtggggcaaggaggaaaaaccaaaggctgagggaccggacctttttgtggcttccattcccaacaaaaaaaaacaaaccccacttgggaatcaaaaggctagcaaaaaagctgagggggggattcaaggggataaccaggaaattggcatccaaaaaaaacaaggagctgcccccccacaaggggggaactaaaatccaactcttccttttccttcacctcaaccatcataggggccggaaacaattcgcccgcctttccagcttttttcggataataaaaaataattcaaagtggggcaggccccgctattcctccgtggttttgcctcggaaagaaaacacatgaaagatcctggg

SEQ ID NO: 111446 - DNA, 192 bp, Glycine max
  Clone ID: PAT_MRT3847_71646C.1
tttttgggtttttaacagaacaaaattgtattatttaataaaactgtggaaacacatgtcaagcgacaagaaagattggagataaacaagaatatttgtaaatggttgagaagatccaaaaagggctcagattataatgacttaactcattacctttttttaagaattggccaaattaaaaaaaaaggcggg

SEQ ID NO: 111447 - DNA, 141 bp, Glycine max
  Clone ID: PAT_MRT3847_71647C.1
aggctacctaggcacctttagactaggaaggtcgtcataggcgacaaattgcttcggggagtggaaattgggcgttaatccgggaattcccgttttaggtcaactctttaaactgctgctaaatccactaacaggctgaaa

SEQ ID NO: 111448 - DNA, 612 bp, Glycine max
  unsure (1)..(612): unsure at all n locations
  Clone ID: PAT_MRT3847_71648C.1
cgacccagcgtccggatctttttgccaagaaaatccgggacaactcagcaaaggtagagaggatagagagaagtgatgcgaaagagaatttatgtcaagcctgtggtgaaaatgaaaatcttgtgagctgtggaacgtgcacatatgcttaccatcctaggtgtttacttccaccccttaaaggtccccttccagacaattggaggtgccctgaatgtgttagcccacttaatgatattgataagatattagattgtgagatgcggcctactactgctgctgacaatgaagccacaaaattagggtcaaagcaaatttttgtcaaacaatacctcggtaagtggaagggcctatcctatttgcattgcacatgggtgcctgagaaagagtttctgaaagcatttaagactcatcctcgnctaaagaccaaggtgaacaacttccatcaaaaaatggcatctgtcaatacttctgacgaagactttgttgccattcgacccgaatggactacagntgatcgaatacttgcttgcaggggtgatgatgatgagagggaatatcttgtgaagtggaaggagcttccatatgatgaatgctattgggagtttgagt

SEQ ID NO: 111449 - DNA, 235 bp, Glycine max
  Clone ID: PAT_MRT3847_71649C.1
tacagatgcgacgagacgacagacaggaactcagcaggattcaagctactatgcgttgtcgtctcactgcaaggtgtgcatgcaagagttcatggtcacaacatcggaaatgaagtgtatggagcatggtgaagccacagaccctcaatctgatgtgtaggcttgtgtaccttatctgataaagtgaacatgttggcgactgcgtatggagaaaactttatatcgttatggcctc

SEQ ID NO: 111450 - DNA, 361 bp, Glycine max
  Clone ID: PAT_MRT3847_7164C.1
ctcgagccgctcgagccgcaaggactgcaagaagtacaagcatgattattatgacgataagtatgagaagtgggagaaggagaagaaggagaaagagaagaaggaaaaggaagagtatgagaagaagaagaagcttctctgcaagatcttccacaagtggtgctgagtgttcaacactgcaagaatctactgttctcttgcgtgatggggagagacagtgcgattttttgctcgagtcggcgtttgtagaactggaagattgtgtgggagaattccaagtgtaatttcaattagttgctggggttatgacggatttgtagtgctttgtagcgagactgcaatgaaacgagtgtttcctgac

SEQ ID NO: 111451 - DNA, 435 bp, Glycine max
  Clone ID: PAT_MRT3847_71650C.1
aatataaaatgatgaattcagattttctttaatcactgtcagctatgctaataataagttattctccaaatactttggactttgaatgttatgttttctcgcagtgtacctatcactaattgagcttagcttcagatcaggccattccaagattgtaaatgcttttacaagagtaaggagtaataagaagggataatataaataaaaaagcattaatattttcatctgttgttaattctcatatatcatagcatagttaaaaacaaagggtgtgcacttatactatgtgtagtgtatttatattaaggaagaattgcatttgcagctattatagaggatcaatgatctacatgcagttattgtaggcactcgctcagaatcacgcaaaaaggtctgcaaggctctctttcactggtgagatgtaagaaatgtagc

SEQ ID NO: 111452 - DNA, 390 bp, Glycine max
  unsure (1)..(390): unsure at all n locations
  Clone ID: PAT_MRT3847_71651C.1
gtaccatcaaagatgcanagtcttgaatgcttgtaatgtttgttgtgaagggaaaccctattaaaatattgaccttgggtccatttaaagggggacctccttaataaaaacatttggagaccagactttaaccaaatccatttgggaactgaatttattggttgaattttaggaaaaaaacttggaaggtagttgaatgacaagtatatggtgtggttttttttataagaagaaggttatatagtttccctattccggacatgcaattctcattcacatctaatacaggtggggtgatgtaacaccacattactatgatgtgtctaatttcccccaatgcgaggcaaagcgtgttctagagagactttacaagacgcgaaaaaaggaaaa

SEQ ID NO: 111453 - DNA, 482 bp, Glycine max
  Clone ID: PAT_MRT3847_71652C.1
taaagtactaacaaaacataaatttacaatgacttcatacagaacacactcctatgataggcttttagcgtttctcaatctacgaagaatcctttacggacacgggctacaattgaacggccatcttattacttaaaactttttaatcccaccaacacgaccttaagactggaatttaaataacccatatcaaagttgtcaacactgaaactgcgaaaaactttgggcactcaaggccccagacccaaatccacttgaaaaaatttttggaaggaaaaccaaaaaaattcccctcgcctagaccgtgggaaaaccatacccgtagcggctggtgctattaacccttttcaagttaccccgcctgaaatgtccattgaccctttcacttgtgggaatatgctgcggaagggggtgattcttaacaaatgccgactcctcccaaaaaaaaacccttctttgccaaaaaaataaattagaatttt

SEQ ID NO: 111454 - DNA, 478 bp, Glycine max
  Clone ID: PAT_MRT3847_71653C.1
ccaaactcaagttcaccacttgcaagctgctctggcacatcacggacatactaccacacacgagtggagtactacaagcgctgccactcgagatagctctgtaagcgcgtcagtcgcccatcactgtcaccgaatgaatgaaagcctcatgacaatcgctgcagctttcaaagagggcacctctgaccataaggaactgcaccaagctgcacagcgtcaagctgcagctgctacactacacattcccctcattgaaaaacatgtcgaaattgctgaacaacatcttactgtgatacaacaaactcgtcctcgtcattattcacaatctgatgtatggcatcttctagaggaatcaagagtcacagatccatttcgcatgaacgttcatgaccatttatgtgataatgagcacagaacacgtaagcttcttggcctaccacctgatatgagaggagaagctctcattcaaatgatgact

SEQ ID NO: 111455 - DNA, 185 bp, Glycine max
  unsure (1)..(185): unsure at all n locations
  Clone ID: PAT_MRT3847_71654C.1
ggggtcgagatactanttgntcaaccctatcaacatctattttctcacattaataacactctccgtagccgttttcaaacctaggagatttcatattttcttcctatctagcactgaatctcaacaatcctactttcaaatattcatcaagaacattttatatgccttctactattaccaaattc

SEQ ID NO: 111456 - DNA, 595 bp, Glycine max
  unsure (1)..(595): unsure at all n locations
  Clone ID: PAT_MRT3847_71655C.1
gggattatggtgaactagatggggatagttggactgatcaagaaactttgctgcttcttgaagcaatggagatttacaatgagaattggaatgaaattgctgagcatgttggtaccaagtcaaaagcacaatgcattcttcattttctccgtctacccatggaagatggaaaattggaaaatattaacgttccaagcatgtctttgtcatccaatgcaataaatagagatcatagtggaagactgcattgttactcaaatggagatactgcaggaactgtccatcaaaccagagattctgacaatcggcttccttttgcaaattctggaaatcctgttatggctttggttgcctttttagcttctgcggttggaccaagagtagctgcttcttgtgctcatgcagcattagcagtattgtcagaggataattctggcagcacgtcacaaatggaagcaccgggacatgataataggacaaattcagaaaacatacatntgtcgagatggtggccctcatggagaaacagcagtttcaaataatcataatgaggataaggcaaaggtgcgtggttcatggggtctgaatgaaggta

SEQ ID NO: 111457 - DNA, 1465 bp, Glycine max
  Clone ID: PAT_MRT3847_71656C.1
tgagcatgttggcaccaagtcgaaagcgcaatgcattcttcattttctccgtttacctgtagaagatggaaagttggaaaatatcaatgtttcaagtttgtctttgttatccaatgtgaagaatcacggctcgagagatgatagtggaagactgcattgctactcaaatggagatactgcaggacctgtctatcaaaccagagattctgaccaccggcttccttttgcaaattctggaaatcctgttatggcactggttgcctttttagcctctgcggttggaccaagagtagctgcttcttgtgctcatgcagctttagcagtattgtcagggaataattctggcagcacgtcacatatggaagcaccgggacatgataataggacaaattcagaaagcatacattatcgagatggtggccctcatggagaaacagcagtttcaaatcataatgaggatatgtcaaaagtacttggttcatggggtctacatgagggtaggacaaccccactctctgctgagaaagttaaagatgcggctaaagcaggcctttctgctgcagcaatgaaagcaaaattatttgccgatcatgaagaacgagaaattcagaggttatgtgctaatatagttaatcatcagctgaaaagattggaattgaagctgaaacagtttgcagaaattgaaacattgttgatgaaagaatgtgaacaactggagagaacaaaacaaaggatagctgctgatcggtcccgcatgatgtcagcacgtcttggaactgtgggagccacacccacaatgaatgcatcgggtgttggtacttcaatggctagtaatggcaacaataggcaacaaataatctctgcttcttcctcacaacccagcatttcaggctatggcaacaaccaaccagttcatccacatatgtcctttgccccacgaccttcaatgtttgggttggggcaaagattgcccctatctatgatacaacaatcacaatcagcttcttcaactgccatgttcaatgcccctagtaatgtgcagcccactaccaatcatccattgttgaggcctgtatcgggaactaactctggtttaggttaaatagaggagtagatttaagttttggaacttaaaagctgtaatcagaagtgaagaggaagttaggtggatgtgccaagaaagttatttagcctgtagagcctgtaattggttgcagttgattgtgaaactgttgcttaaaggaaataagtagcatttgatattccataaaaatttcttctttctttcttgtggtctttaggtatcttgtaaatagattaaggcacaaatcttgtttggttagattgcactaaaactacttggatgaataaggaccacgctatggtgacttttgtcttggaggctgtattctggatttggttagtatccagcgtttaaaaatcgaaaaaatgtttcacttggaat

SEQ ID NO: 111458 - DNA, 655 bp, Glycine max
  Clone ID: PAT_MRT3847_71657C.1
atcatcagctaaaaagattggaattgaagctgaaacagtttgcagaaattgaaacattgttgatgaaagaatgcgaacaactggagagaacaaagcaaaggtgtgctgctgatcggtcccgcataatgtcagcacgtcttggaactgtaggagccacacccacaatgaatgcatcgggtgttggtccctcaatggctagtaatggcaacaataggcaacagatgatctctgcttcttcttcacagcccagcgtctcagggtatggcaacaaccaaccagttcatccacatatgtcctttgccccacgaccttcaatgtttgggttggggcaaagattgcccctatctatgatacaacaatcacaaccagcttcttcaactgccatgttcaatgcccctagtaatgtgcagcccactaccaatcatccattgttgaggtctgtatcgggaactaactctggtttaggttaaataggggagtagatttaagttttgaaacttgaaaggtgtaactgtatttggtaattgatttcagaagtgaagaggaagttaggtggatatgccgaggaagttatttagtctgtagagcctgtaattggttgcagttgattgtgaaactgttgcttaaaggaaataagtagcatttgatgttccat

SEQ ID NO: 111459 - DNA, 812 bp, Glycine max
  Clone ID: PAT_MRT3847_71658C.1
ctcgaggtcggactggccggcgtttctccatcacgatagaaattcaatccacatgattttgaatatgagcatgttaccaatctttcgttggacttacattttcattttttataagcactctagtctagtgccattcaagtgttctataaaatggcactccccatatcattctccttaaccctaatccagtatatgccaaattttctagaaaaattgtttccactctacaactgaaaacagaggactctgtttttgtgctgagaaaacaaaaaaatggcttccctttatgatgtgcttggtatttcagtgggtgcaagctgcatcgaaataaaggctgcttacagaaagctggcaagaacataccatcctgatgttgtggccatgaatcagaaggaaagctcagcgaaccaatttatgatgatccattcagcttactcaactttatctgacccagagaagcgagctcaatatgacagagaaatctatagatacagaagatcagcaaatatggaagcaagaaatcagacattttcctatgctggaagtgcaaggaaatgggaaacagaccaatgttggtagcagatcgtgtaatcatgttactcatgtacattattattattaaccattttgttcttttttttcttcttttcttttaagtttttgttatgtcattcatttatgttatccttcttcacaatactatcctagactgtatagttccaccatacttactggatctcctgattcaagcttcatgtgattttatgccacgctgatttgatccgtctttgttctcttttttcttcttctct

SEQ ID NO: 111460 - DNA, 794 bp, Glycine max
  Clone ID: PAT_MRT3847_71659C.1
tcccgggtcgacccacgccgtccgcacaaactaagtttcaacaaatgtggcaacttatctagccatcttaacggatcatctttcaaattggataaagccaacattaagtaaataagacagtcaagttttgaaatccaattaggcatcttctccaatcttgctttcaatttaagtcgtcgaagttgggatatggatgatatagagttcaagcgcaatgatttcatcctcatatattgcagtgatatcaagtgattccagattaggtctattccccatgatctacctccaccaccgcagttacgggggtgagggagtgtaaggtgaagtcagtgaagccgggaaaagctgatgatggaggtggatctggtgctcggcattagttaggtcgattttgtttttccggttcggatatggattcagaggatttttgatccattatggagagcgcaggcgtccacatttgggccttcatggatgccaccatcgcggtagcctctgtcaaccatgccgatgacttgaagcgctggagagatagaatcattgagtgcctttaggctgccagttcaccgccgccgcaatgtcggaactgcgatgtcggcaatggcggacaaatcatgacgcatagcatttcctctgcggaggaggaaaaggatccttatggaggcttgttcgaagacgagcagaggaagattttagacattaaagagaaactccgaagacctcaccaaatcttatttctcttaatttcacaatttatgagtcttttgttccgccttaaacgtgtttttgatttt

SEQ ID NO: 111461 - DNA, 286 bp, Glycine max
  Clone ID: PAT_MRT3847_7165C.1
tttcggattttcttcctccctcacatcatgaacgttacagaaccatcatgctcttaccttagcaaattttccctgcatctttatgctaagatgctggtattgctaactctgtccctctcataagaacctacctaagaattcagggcaccctcaactgttctgtccttactaccccttcttcaggatccaacttgcagccatgcgcacccccttgaagagggctttatctctggggctatatcagacaagggcctcgaatctgccacggagccgccgattgagaaag

SEQ ID NO: 111462 - DNA, 372 bp, Glycine max
  Clone ID: PAT_MRT3847_71660C.1
gcaattttaaagtaaacagtcttgaaattacagagggtttaatatatacgtgttttttgaattgtgtgctgattggcaaaatgttgtcaacagaagtttcctctatggatcgtaaattcattttaaaaatttattctgtataatataggtcaatagaaaaatctttgatattggttctcaaattagtatacaagggaaatcaaaatgatgaccagaaccaagctgaatttcagtctcatataaatcaggaatgatcctaaattgtctcagaattggtatttagtggaactgaatctattcaatccattattgtgcaattcagcattcagcaattgatattaaccttgctttttccagcctggtttatgatag

SEQ ID NO: 111463 - DNA, 282 bp, Glycine max
  Clone ID: PAT_MRT3847_71661C.1
tacggctgcgagaagacgacagatggggtcttagtcaattccaatgttgtgatgacatgttgatctcataacatcctttgcacacattcgtggtctgtcacttgcagtaggcataatgcaaaaacccgctaagatcagttagacttcgatgcacctggagataccaatggtctggtagacctatgcgaacaatcttgcggatgcagcagttggtattactcaaaggcaggcatgaatcctctagtgtggtatctgctgttgaatatcttgtccatatatgtg

SEQ ID NO: 111464 - DNA, 230 bp, Glycine max
  Clone ID: PAT_MRT3847_71662C.1
caaacccttcatttcttttaaaatgccggtgggtgttttttcctgacagaaattccccatgaaatgaaacccagccgggggggcccgatctttattacttttaggacaatggccccctttaaaaaaaaaaaaaaagaattcccctttttgtttaacctgcgggcctgaaccccataaatttattaattttatgtcatgggtaattgggggacccacaaattttcctgatc

SEQ ID NO: 111465 - DNA, 739 bp, Glycine max
  Clone ID: PAT_MRT3847_71663C.1
actttttcatcagacttctatccaagctcaagtttagtagttcccacttttgtagcactttgttcaatattcattcagagtttacatatatttcatctcatggcaaacacaacaatggttactcgagtatttatacttgcactaatcatcctctccaccttcttcatgactttgcaggctcgtaatctccatggacatccctccattcgcgaaaataatgttgcagataacaaccatcgctttcttcacaattatttagacctattaaagcatatacatgttgatcatcaagatgctgatgatgcccctcacaaggatggaaatacacatagactcacaccagaaggaccagatcctcatcataattttgcaacaccaccaagaaactgaagctagctttgtttggagctaggtttcagttgtgcatgcctcatacatatctatatgtttatcttcaaatagaacttgcaaaagttgtgtgagcttagctgcacggttgagttttagtatctttttcttcccttatttaaacttcatggtattttcaaataaacctacttgttgctttggaaacccatgccagtgctctagagcatatatatgtaggtggagtgtatgcattatttttgtttgtgttatttgtcagcagtagtggtgtggaatctctgtttctctcttttctacgttcttttttcctcctttttgtgctgtattaatttttccctttctaatgttagag

SEQ ID NO: 111466 - DNA, 333 bp, Glycine max
  Clone ID: PAT_MRT3847_71664C.1
gtatggtaggcataccgcggtcactggtagcggggcctttgagacggatgcaggtgcaatacccactagggtacaagaggatatcaagttctttctaccacgtggtgtacgaactgttaaggggaggaaaaatactctgtgtgctggtcacagactgcatgagtgagctattgaaacactcttagatagtttgctgagcactgaccgatacgatataggagcacgggtcagagttgaacctcatcagaccaattctgagaactctgtttaatgtcaagttgaagctggtgaaataggggataagcgcttccactctgctacatggtataggac

SEQ ID NO: 111467 - DNA, 314 bp, Glycine max
  unsure (1)..(314): unsure at all n locations
  Clone ID: PAT_MRT3847_71665C.1
tacgctgcgagaagacgacagaaggggggcgtgagtacgcctgttgagatccgcataagccaatcaatcatcctgatccttccttatctctgnctctgcatttccctccctaacaccctaatcaaagcatttggaaaggaaatctcacatctaatgactatttattcaaccaatcgcattaatcacccatctatcaaggatggagcccgaactcaaagaacccaacttcgacccccccatctcgcacggcaatccccaacaacgtctgcgaccgcccgactccgctgaaaccgaaccctccggacccccccgac

SEQ ID NO: 111468 - DNA, 351 bp, Glycine max
  Clone ID: PAT_MRT3847_71666C.1
gtcaaaacctgtgttaaaggtgggtcagccatactttactgacactctctatggcaatctggatcaaatttaactatggctactgaagagggtttggttgacgaaatgacttaccataccgcgatcactactacttatcccctatgtctgcttggccatggaatcaccggcctggagattcacttcatccatgtgaaattctattcactcagggttgatttgtagccaaaactaataagtgacttggaccagtataaaggataatctgcaaaggagctgtgcgataatgaatagtgtttcaatgctctaatttttgactacgtggagaaacctattagactggtagtgatc

SEQ ID NO: 111469 - DNA, 262 bp, Glycine max
  Clone ID: PAT_MRT3847_71667C.1
tttttactagtcgggcacaaaagatcttggagcaaattttagaacaataccccaagtttgctaatgaagtggcaaaatctaattcagtttctgatcagattgatcaagtaattaagcgattggagacagaacttgtcacagtgtccaaaaactacgacaagcctgctttgcgttactttttcttgatgaataattggaggtgtgtagagctagaggcaattaagttgagattaaaccttggttgtttccataaagacacaac

SEQ ID NO: 111470 - DNA, 324 bp, Glycine max
  Clone ID: PAT_MRT3847_71668C.1
atttgcgcgaggatttatttgcagggaagcttaaataagggaatgtgataaaggaagcactgaataggcatgacgcggaattattaacctcctcggggagttatgctgaccatcaacttggatacaggaagccagctctaatattgatagttggtgttaactgtcgaaggatgactacatatccggcaaatgctgtcctatagattgaagaatgagcgtgctaagatatcgcaggctgctgatgatgcatgtagagcagctgctagcggtcaggttgaaatatcctccgaacggactggctgcgatattgatgtggctgagatc

SEQ ID NO: 111471 - DNA, 399 bp, Glycine max
  Clone ID: PAT_MRT3847_71669C.1
tttttaagccatcaaacaactgcctaaaaaggctaatagggataataatacaaatccacctacagaaatgaaacgactaggaaacctaattggtgtgacaagactatttatcgtcccaccacacgccattgctactatttttccttcccaggagatcatagtaaagcccgggctttctgtgctctcgcatgcatatagcctgcattgcatacgccaaatggatcagtgtggactaagaccaaggccttccgctaaactgaagcccaataggcgcacccaatctatagaataccaccggaacagtgacagcgggaagtccaagaaagttgcctgctgtggaataactaacaggggcggccccattctcgtagtgcagatcaccgttctgcaaggcgtcat

SEQ ID NO: 111472 - DNA, 366 bp, Glycine max
  Clone ID: PAT_MRT3847_7166C.1
ttgatcggttgcaagaggccaccagagggggaaggggcaagactaggttgtgagctataagctacatgatcgtgaggagaatatgaagctgtttgttttctttgctgctgcaggagttttggtagcatggccatgccatggcgcaggctaccaaaggttacctatacaaatgaaaactggatatggtgagcgttctacaccagaaaaatgctcaagttttaagcttgctgtggaagcacacaacatgcgaccctttaaaaccattcctgaagagtgcgtcgaaccaacaaaggactacattaatggacaacaattgagatcagactttaaaacagataaccaacacgctttctttgatgctaatga

SEQ ID NO: 111473 - DNA, 429 bp, Glycine max
  Clone ID: PAT_MRT3847_71670C.1
ggggagggatgatataagaatttggctgtttatgcgtgttgttgttcaccccttcgttacgccggatcatagcattccaagctgcctgtgataggtacgtgcccttaaagtgataatacctttctctgtctagttaacattcaaaatcttggatcaatcagcaatgttgcagcctggaaacgtaagcctatatttaaatccatcagctcactcaatgatccatcgaagataggtgctgcaaggtatacaggcagattgtctccagcaccatgctacatccaattctcgaaactagtgccctgaatgttatcctggtagctacatgtaagtacacgctcgttacagactttgatcacttttatatcctttttttctgactatgcctgtgatataggtctctacgttctgataatgcgtttcatttcattg

SEQ ID NO: 111474 - DNA, 1084 bp, Glycine max
  Clone ID: PAT_MRT3847_71671C.1
gttctttgttagcactgttgaaatttctaatccgcagtatctaaagtatgtctccaacagtcacacacaaatgtcctcttctctgaaacgctgcacatcctacaccaaatacgagatcagaaagcgaaaccctgaaccaaaatcatgtgccctattggtaatcgacgtgcaaaaccacttctcatccatggccaccccaatcctccataacctcaacaccaccatctccctctgccgccgcgcctccatccccgtcatcttcactcgccactgccacaagtcaccctccgacgccggcatgctggaggagtggtggtccggggacctcatcgtcgacggcacggcggaggccgagctcctggaggctctggaccggaaaagcagcgaccttgtggtggagaagagcacctacagcgcgttcaggagcactggcttggaagagaagttggtggagatgggtgtgaaggaggtcatagtgacaggtgtcatgaccaacctgtgctgcgaaacgacgtcgcgtgaggcgttcgtgagagggtttagggttttcttctccgcggacgccactgccacctctgacgtggagcttcacgaggccgctttgaagaacttggcttatggttttgcttacttggttgattgccagaggcttcaacatgccctctctggtgccaagtgaattcatcaaccgtgtgttaattggacgaacaattttgagaggatcgaatgttgttcgcggtcatgttgaggaaattgacaaggcaattagtgagtattcttaggaaatgggcatcaagtcgatttactagtctatgtagtagcaggtttttatagtttttggattattagaagcacaactatgggtttttgtgatgtatgttgtctaatcaaatccttcaaggatggtattgtaggatttggatttcaactgcccggttaccaatgcatgtaaagtgattaattatacattcatcatcgtcatagtacaccaatatagggagaatttattgtatgagaatgattatcttatcttaaaatgaaaatgattaattttatcaaaaagattaaaatgacaaacaaaaaa

SEQ ID NO: 111475 - DNA, 242 bp, Glycine max
  Clone ID: PAT_MRT3847_71672C.1
gcaggagaacaagtagttgataactgagaaggagaagcagatggcgtcctcagtgatctctgccccagctggtaccactgtcaaccgtgccggtgccggcatggttgcgccattcactggcctcaaatccatggctggctgccccagcagaaggaccaagaatgacgttagctccattgctagcagcggtggaagagttcaatgcatgcaggtgtggccaccagttggcagagaagaagttt

SEQ ID NO: 111476 - DNA, 227 bp, Glycine max
  Clone ID: PAT_MRT3847_71673C.1
tttttttttttttttttcttttatttttttggggggatattaaaatactgttataccattccaattaacaatcttaatctaatatatctattttttttttttaatggcacccgtaaataatgaaacaggcaatctactttacaactccccaacataaaatgacacaataatcccaaccccatctttaaaatatcttaaaagtacaccacataatacacatctatacg

SEQ ID NO: 111477 - DNA, 439 bp, Glycine max
  unsure (1)..(439): unsure at all n locations
  Clone ID: PAT_MRT3847_71674C.1
ctcacgcgtacgcattaacagctagaatggctcttaggcgcttgctgacgtccatttactggctctacactcatggtctggcgagagaaaggcatgccagagactaagattttacggcatgctagctgcccaaacaactgtattccaagatcattgcaagatcatctaaagcctgacccttcaagtgatgaaatcgatgatcaccctatgctgattgtagaaacacagtgctgcgtaacctgcttgtataaagaataccgttattcangcataacattgaacgtacaattcagcaagactctctttcaacaaccatggggtgtcggtacatggttaaaggaaattaatgacactactaacgaaggatatactttcgaagacctatgcatcaagaacgaagcccttgagggagaaagaaacgtttcggcataatccttgg

SEQ ID NO: 111478 - DNA, 583 bp, Glycine max
  unsure (1)..(583): unsure at all n locations
  Clone ID: PAT_MRT3847_71675C.1
cccacgcgtccggtctttgatattgaacggtatgatggaaacgatctctatgaaactgcaactacggaaaattacaagggacctgcatataaagggaagggagcgccacatagacttcccccacctctgctacctcgactgattcatcaccagtatgagggtaacgaccaggaaagtccatgcacgatggtcctatgatagaggtactagcttgcactccatagggcttcatgatacatctaaccagtctggccaactctgtactatactcttcctattgtgggcagtgcatacgcaagagacagatcatgggtgacaaaacattgcatataatgctgtcgacaccagcgaagtgaatcttagcaatagatagaagcgagttagagattccaacgacangaagaacacagcacacaacattacttgcatgaatagtaatgatccctataatattgatgataaagagaataaccttaatatccatacactgccataaccgtgggagtgcttaagctgagtgtcaatccattgttaaaatgccatccattgaaaatgctatgatctgcaagctactgatatatat

SEQ ID NO: 111479 - DNA, 295 bp, Glycine max
  Clone ID: PAT_MRT3847_71676C.1
acttttatcttgtcccatatcttctttcttctgtggacggggtccttatatataccttcagccaccgctgatgatgatcatgtgtactacactgactgtgataatctttaatacggtgtcatatattacgcgttgccagtgataagaagaaatggcggtggtatacaagttgaataatcatgaatctaaacttgccctctgactgtggtgcaatctggcaacgagctctttgaggggctaccgaatatgattgcatttcgttcagcaggagtctttttcattacctaatggccat

SEQ ID NO: 111480 - DNA, 148 bp, Glycine max
  Clone ID: PAT_MRT3847_71677C.1
tggggactatgaggctgagagacattgggtggagatgaccaatcacctatcacgtagggaaaggtgtatgaacagctcgaacgctgactagagatatagaagactcgacgacctcgctctgaccgcgtaccagagttatatacatggg

SEQ ID NO: 111481 - DNA, 523 bp, Glycine max
  Clone ID: PAT_MRT3847_71678C.1
cgagctcactagtttgtgggcgccctttttttttttttttttttttttttttttttttgagattctgaatgacatccatgtttaatataaacccaacgagttctaatatacaaccaaccaataaattctcacccgggaagaatgcctacattttatatctgttaatatattgagaatcctttaaaagctacagctataagccaacatatgcatccaattgcccccaccaaccaataaaaaccaattactctaatcccctgtagctcaattgccgagacctaaatgctgatgctaccaactttctttaccatcaaaattcaaatttaaagctatattccttaaatcctgcttttgaacaatattttaaaaaacaacaattaaaattgagcctttatcctatattggcacctaaaacttactttttaaacatgattgctcaaaacatacttacttttttattagaaggggggtcatgaagaatatacttgatttatggccctgaattaacaccatgaacctcaag

SEQ ID NO: 111482 - DNA, 402 bp, Glycine max
  Clone ID: PAT_MRT3847_71679C.1
gccaggaattttcttctatgattgataagcatccaaactgatacactgtaggattacgagctgccataccatcgactgacagatggccttcaccattacgcatacttactcacacgctgtgacgtaaaacatcttcctcacagagacacttagttcgcgacgaacggtcatagttactaggcctaaagattgtgagcaagtacacggccttattacccttatatacggtgcgcttgtccaggtaatcgtacctgacatgcctgcccgctaggtgaatttcgctgaccgcgatggggggctgacagtcgccacgggcatgcctagaagacatctgggcatgctagctgtcaagatccctgatgcaactgtccaggatgccaatggccctgctagtgattccag

SEQ ID NO: 111483 - DNA, 470 bp, Glycine max
  Clone ID: PAT_MRT3847_7167C.1
tgtcgatggagcttcatgtcaaaaacagggagaagctcctcacttcccttcgtcaacacctgtccgagtcttctcgccctccttcaagatggcgaagagcaaacgcgttacgacaccgatcacttgaagctcttcatgtatcctaatcctgaacctcgccatttcaatttatcgatccctaattcgatttgcttcgcgcttcgcgggcaggagagtttcttcgcttacttttttggagtcattgagcctggattctatgcagctattgttcgttctctttaatttaaatgcacgctaaatgttaagcttatcatcaattaagatcattaagattgatcactttcctaataattatttgaagttatatctaattggttggtagttcaattattactattattattatgcacacaaacgcgatccatgtgtagaaatcagtgattttcatttatgcttgctattggtttttg

SEQ ID NO: 111484 - DNA, 274 bp, Glycine max
  Clone ID: PAT_MRT3847_71680C.1
ctttattcatttatttttgtatcatatttatccatttattggaaacactcgtgtgagtaatcttgagagggggttactatattctttctgcataaaacttgcaagaacaatcattttttgtatcagccaataaaaaatttatgttcggacgaaactcatcctaatacacaaaaaacgggggggaattcattatcaaccgcgggaaaaaaataacacgtttgtgctttgagatcagactccttgggaagtctttacgactacgaaactaagaagc

SEQ ID NO: 111485 - DNA, 1019 bp, Glycine max
  Clone ID: PAT_MRT3847_71681C.1
tacggctacgagaagacgacagaaggggatgcttagaaatgtacaactcagagcacaacaagggtgatcatcaacatcatcatcaatgcgctcctccaatgagcccaagaatctctttctcaaatgatttcgtggatgtgaaacaagccatgaagcaagaacaaagaggctcatccagatcagacgcgccagtatcttcagatttcgagttttcagtggcaaactactccatgatgagtgctgatgaacttttcttcaagggcaggttgatgtccacgtataacaaggacaattgcaacaacaacaacaaaaacaaccacatgatgatgatgcagcagcagagggccaccaccaccaccaccaccactctcaaggaagagctccttataaatgacgatgatcatgatcatgatttttctctcaggcctcccaagccctcctcaacgaggtggaagggacttttgggtcttagaaagacccacattggctctaagaagcctcacaaaagtactgaaggtggttcttcagatgcaacaaggtctgcattggtcaatgattcacctccaactagtatcacttcttctcaggaggtgttgaatgaaggaggctcaagttgcagagatttggagattggcatataagctatggttggtggtagtgttgagtatttgtagaggaatggactcttttttttctcctttctttctttttgtttttcttgccttgccgatgacaaggtggaggggaaaaaaggtcatgctcttttttgtttttctcttcttcattggggtgggatgagttaagttaatttgtgttaggaatttgcttgtcaatgtcgattcttcttatcttctctcttctaagttctaatttctcttgattccgtagaatgtaggatttggctatatgttgtacaaattatttgctttcttgcatttccgtgtttgactcttgtcgtcaaaagaaaaatatttatcgattttgctaggctccactatcaacattaatggatttccccc

SEQ ID NO: 111486 - DNA, 391 bp, Glycine max
  Clone ID: PAT_MRT3847_71682C.1
aaaacaaggttttaggatattacgtcaaaactgttggcataaaccttttaatcaacctaaatccaacaacaaggacactaaaaaaaaacacagtggatcactagcaatatataatcaaaaaagtgatccgaaacaaaacaacccaatggaaaaacagagcttaaacctaagcggtgagaagaacaggcccaccggctgacttaattttacttgtccgcgatcttggaaataagccaggccttaacaccaaaagggtgattttggggcacaacaccttttacgaggaccatgaagtacccgtgctgtgagacgccgattagaggggcagtggccttcgattgacggctttttccttcgcgcattggggtatgagagaccatatgttttcgac

SEQ ID NO: 111487 - DNA, 268 bp, Glycine max
  unsure (1)..(268): unsure at all n locations
  Clone ID: PAT_MRT3847_71683C.1
gcgngagactttaggtttngaattgggaattagggttgttcgcgtcangaanatngatcgaggttgtgttgnacgatcgattggngnagaatgtgcgcgtgaagttnnacgtcgatgacaccatcggcgacctgaagaagctggtatgcggctcanacggtcacaanaggccgncaagatccgnntccagaaggtggganaccnntntangagnctcacatnantntcaggggtttngggtgtcnngtgtggngatggnttgnagntt

SEQ ID NO: 111488 - DNA, 169 bp, Glycine max
  Clone ID: PAT_MRT3847_71684C.1
acatacaaaagaccagctatcctgtgacgtctccatagacagccgccagatcatgtcggcctctaaagaccgctcaatcaatctgcgtaaccccctgagtgagtgcttgtccacgatgtaagatggcgatactcattagcactgtgtaaagtgcgttcgtctcagccct

SEQ ID NO: 111489 - DNA, 759 bp, Glycine max
  Clone ID: PAT_MRT3847_71685C.1
tgttggcgcattttggcatcaaaccaccaagccctaaaaaagcattatcctccttctttgttctttgcttttctcttttctcttttcctctgaaaacacaccctctttacagatcctgttatttctctctctctctctccacaatttcttttctttcttgctttgtagctaccaaaacaatttgctcaatatttctaaaggtttcagctttagatctgagggagctaaggttgtttgaagcaatggagacaccccatgtctcttgatctttcacatgagatgaaagtttcttgctttcttcttctttgacccttcttagtctttctttattttttttcttcttcttctactactactactaccaccttacttggtaactttcaattaaagtactacctctgaaagagggtctcaggtttttgtaacgatgctggccattgggggacatggcactagtatccgcacaagctctacttgcactgctttgctcagagaacttgagatcctgttatgtgtgcagcaaatatggaacgatattggggagaccgaagtggagaaagatcgaatgctgatggaattggagagggaatgcttagaagtatacaggagaaaggttgatgaggctgttaacaccaaagcacgctttcatcaaacagttgccggcaaggaagcagagcttgcaacactaatggctgcgcttggcgaacacgatattcattcaccgattaagacggagaagcgatcagtatccctgaagca

SEQ ID NO: 111490 - DNA, 2712 bp, Glycine max
  Clone ID: PAT_MRT3847_71686C.1
ggagcataacagttgaacttggattatcacatataacaaacataaataatgagcatgaggtatatagcatggacgctcctacagttatgaatcaaaataatcttagttacttatactacatcaccatcacaatgaaaacatatatacacatggaacacaaacataataaatacatcatggtcaaacactgtatgatcgatctccactgttttgtttaccctctctacaaatgagtccctaccagtatcaacactcttcccaaagctaatgtttcttcaaagcatagaccaccctaattcgtatcctcaaatgtcagttatcactgtccacgtatatctcagctttattacaaccaaatatagtgtacaatccatctcgtgtattcacaaggttctgtgctgctttcaatcatgtttacagccactgcccaagaaaatcttttttaccctattccatttttttttctttttatcatttaaacttggggaggggaatcaggctctgaaccacaaagggaagcataagacattgtatcttccttggatatagccacaaagttcagtggtgcagtagacaatcttctcatttccttaaaatatccattctgacggccagagtaggaccgcggtgtcagtagttcagatgtcgttccaccacttaaggagttacggcggggtgtaggaggcatagatccatttccatttgcacggtaactattagtctttctaaagctgttattttttcttggactaggtttagaaccatacatggcttccttttgatttaggagtagatcttgcatcttcttaaggtccctatgtcgtctcttatcttcctctttctgttgtctggccagtttataatcgtccaaaattgacaccaaacgtaccccatcatatagaaaatgagtcttcttttcagccgattcccaggctagtgttttgtttataagattgtcaaccatagctggaattttgcttatagttattctagcgcgttctgcacgtttaagattaatgtgagcgcctcgcccagcacagtatctgttgtcatcttgattatattcgtcaagccaattctcctcttcacacgcagcaaaccacttatcaatcctatctgttacttcttttctgctcaaagcttcatcttttgcctttattatctgtgcttcaatgttggctaatagctcagaaggatccaccagtccagaatctattaatgcactagctttctcggctgtagtacttgtatctggttcagtatgagtcaatttacatatttcctctaactctgacctcttcttaaaaacaagttctttcattctgcttgcttttagtttggcaagcctgtccacttctgccgaagccttctctatcatttctgttgaaagaacacctcgttcagtgatttctgattctgaggttccaacaatagaagtaatcttcataaaacagtttctctcttcttttgatgagtccatcaaattccaaagttcaaatagtttagatacaacatccttcagcttctgaattctagttttcctttctatttttaacttgagaatggcctgctctagaccttccaatgtgctattgctaatattagttgactgttccacctgagtcccatgcaaacttggatgtacatcacccacggtctgaccaaaatccaacccaagcacactacaaagagaatgcacctcattcacgcattgcaagaccttttgaaggcgatcagacttttctttttgaagtgttcggagatgcgtttgatattcattaagtctcctaagtgacaagtcctgttcatcctcaactgctgtgctgctcaaagcattattgacagaatggaatccaaaaatctctccacttatcttttctatttgagtctttacatcttcaaattgcttcaatctttcatcttttttcttcttcagttcttcaaccaaaggtgtgatggacgcaagtttctgcttcagggatgctgatctcttctccatcttaatcggtgaatgaatatcatgttctccaagtgcagccatcagtgtagcaagctctgcttccttggcggcaactgtttgatgaaagcgtgctttggtgttagcagcctcatcaacctttctcctgtatacttctaagcattccctctccagctccatcagcattcgatctttctccacttcggtctccccaatatcgttccatatttgctcaagttctctgagcaaagcagtgcaagtagagcttgtgcggatactagtgccatgtgccccaatggccagcattgttaccaaaatctgagacgctcttagtgctaatttatgaaagttaccaagtaaggtagtagtagaagaataaagactaaataaagactaagaagggtcaaagaagaagaaagcaagaaactttcatctcatgtgaaagaccaagagacatggggtgtctccattgcttcaaacaaccttagctccctcagatctaaagctgaaacctttagtagtctctttctctctctctttatgttgagcaaattgttttggcagctacaaagaaagaaaacaaattgtgtgtgtgtgtgtgtgagagagagagagagagagagagagagagaaacaacaggatctgtaaagagggtgtgttttcagagggaaaagaaaatgaaaacggaaatgataaagaaggaggataatgcttttttagggcttggtggttt

SEQ ID NO: 111491 - DNA, 522 bp, Glycine max
  Clone ID: PAT_MRT3847_71687C.1
ccccccaaaggggtgataataaaggaaccaaagccccaattaacccctaaatttttgggggaccccgggggggtattttttaaaaaccgggatcggggtcccaaaacctttaaaaaaaaaagaaagctcctttttttttaaggccaaccccggacaaccctttgggaccaggtctttgggccggaaggccaaaccctttgttggaaacactggggtttcttcccttggggggggattttttttaccggttttcccaaggaaccttccattggaagccttttacgggcgggggcccatacccaacagaaaaaacttgggctcccattttttaaagccttagggccccaccccttagaaaccctggttttttttttgaaaacaaaatctttacgccccaaagaaattttttccccccaaaaacggtttaactggggcggggcccccttttggggcccccccattaaaaaccttcatccctttctttggaggaaaaggaaaataattttttgggggaaagaaatt

SEQ ID NO: 111492 - DNA, 209 bp, Glycine max
  Clone ID: PAT_MRT3847_71688C.1
ctgtccccttgaaaaacccaacctaaaataaagggtttttttggggatgtcgccattttttaaccaaatatatgggatgttctcctttggggccttgggagctttttaaaaactgttgcaacattgtttaaaacacctgggttaacagttggttttatcgaatccccaaaaaggggaacatttttgaaattaaaaccacccatcctatt

SEQ ID NO: 111493 - DNA, 361 bp, Glycine max
  Clone ID: PAT_MRT3847_71689C.1
ggcaccaaaagcagagaagaagcccgttgaggagaagaagtccactgtgggagacaaggctccggcggagaagaagccataggccggaatgaagcttcttaaggagggaggcgccggcggagaagggaagaacatgaagaggatcatgaatagcgtggagacatacaagatctacatcttcaatgatatgaaacaggttcaccctgacattggtatctaaagcagagccatgggagtgatgaacatgttcattaacaacatttatcttaagctcgtctcaaaatcttatttacttgcccgctacgtctagagacttatcatcacttgtagggaggtagagaccgctgtcaagcttgagctg

SEQ ID NO: 111494 - DNA, 253 bp, Glycine max
  Clone ID: PAT_MRT3847_7168C.1
ttcctttatttttttatttcctggaacaaatggctggagtgacaaaggaggacgagtcgggtagtcctagttggggtgcttcattttttacacagacaacagaggatgtggctagagctgttgctgctgcaatgaattctccgaggccatctgtggtatattcatcgaaaaatgatcatggtggaagccatctttaaaagctacagttttatgttactaaaattatatatggattttttcgccctacaaaatg

SEQ ID NO: 111495 - DNA, 120 bp, Glycine max
  Clone ID: PAT_MRT3847_71690C.1
aacataagataggccagggcattgatcatagtcaatgtgcacaggggggacttctctatagttcaggagcacaactcttatttgctttataggtcatgcgcccttggtcttaagggaaag

SEQ ID NO: 111496 - DNA, 1888 bp, Glycine max
  Clone ID: PAT_MRT3847_71691C.1
ctcgccgctaccctcagcatggccgatcggtacaacggaagcttcaagagcttagcatatgtcctggttgcccctacattatgtgaccagccaaactatcctcgcacaccttatattcgaaagggttggctgtttcgccaacttgtcaagctgataatatttacaggagttatgggatttataatagaacaatacattaatcccattgatttttgcactgccacgtgagtgccgtgtggcgaaagagtaaacaaaaccgttactccctgccgatggcgatctccgatgtgcctgcagccgctggcacgaccgccactaccaccagcgactcagatctccgacagccttctctgcggcgcaggtcctccgccggagtcctcttcgacgctgccagagattccggctccgacaattccctgaccggcaaaatcaccgacgacgacaacatcaaagatcacaagccgaataatcacgcagcctccgacgacaatgtgggcgccgccgccaatgacgctgggcaggagcaccgacaaccggtcgccgatttcaaatacgcttaccgtccctccgttcccgcgcaccgcagaatcaaggagagcccccttagctccgacaacatcttcagacagagtcatgcaggactgttcaatctctgcatagtagtgcttgttgccgtgaacagcagacttttcattgagaatttaatgaagtatggttggttgatcaagtatggcttttggtttagttcaaaatcattgagagattggcctctcttcatgtgctgtcttagtcttgccatatttccacttgctgcctttgttgtggaaaggttggcacaacaaaagtgtatttctgaaccagttgttgttctacttcatctaataatatcaactgttgaactgtgctatccggttttagtaatactcaggtgtgattctgcttttgtatctggtgtcacgttgatgctattaacttgcattgtgtggttaaaattggtgtcatatgcacatacaaactatgatatgagagcacttactgtttcgaatgaaaagggagaaacattacccaatactttgattatggagtatccgtacactgtgaccttcaggagtttggcatacttcatggttgctcctacattatgctatcagacaagctatcctcgcacaccttcagttcgaaagggttgggtgtttcgtcaacttgtcaagctgataatatttacaggagttatgggatttataatagaacaatatatgaatcctattgtacaaaactcaactcatcctctgaagggaaaccttctatatgccattgagagaattctgaagctttctgttccaaatgtatatgtgtggctctgcatgttctactgctttttccacctttggttaaatatactggcagagcttgttcgatttggtgatcgtgagttctataaagattggtggaatgccaaaactgttgaagagtattggaggatgtggaatatgcctgtgcacaaatggatggttcgccacatatattttccatgcttaaggcgtggtatacccaagggtgctgcttcattaattgcattcctggtttctgctgtgtttcatgagttatgcattgccgttccttgccacatgttcaagttgtgggcttttataggaattatgtttcaggttcctttggtcttgatcactaattacctccaaaataaatacagaaactcaatggttggaaatatgattttttggttcatattttgtattcttggtcaaccaatgagcgtactattgtactaccatgacttgatgaatagaaaaggagaagttgactaaggtagcattacactgttcatgtggatgagcttttgcgttttttgagtaaaatcgatgttgat

SEQ ID NO: 111497 - DNA, 163 bp, Glycine max
  Clone ID: PAT_MRT3847_71692C.1
tcgttcagcatccgataagacgacgcatgggtacagcatgatcaataataaacatgagatgctgcagcatcatcgtggtgctataggtgtggtaatcgtctctttatcttgggcctgttacagctgcgcgcatgtgactgggcttcttcaacagaggacgaac

SEQ ID NO: 111498 - DNA, 698 bp, Glycine max
  Clone ID: PAT_MRT3847_71693C.1
ctcaagccggtgaaatgtgtgaccatacgcagaattccaagggttccagaaacgatgccactatatgatattttgaatgagttccaaaagggccatagccacatggctattgttggcaaacactgtgacaagacagggtatcaatcttccaataataatgcctatgactcaacgagagatgtgaaggtggatattgatggtgagaaacctccccgaaagaaaaatttgaaaaccaagatgtcatgccataaacgtaaaagctttccaaacgcaaacaacttaaacaagggtagtcctcagagcagaaaatggtcaaagaatatgtactcagatattttggaaatagatggaaattcaattccaaagctaccagaaaaagaagctgctgttggaataattactatggaggatgtcattgaagagcttttacagggagagatctttgatgagacggatcatgattttgaagtctcgtgaatcgtgacaataatcttttcataagaccagccagctgtctttcacttacttagcatttaatagttaataaatgcttctatttgacatggcaaagtgctcacatgtagcagtatttcgaacaaaattgtatataccaagaatccagaatatattccctaaaaaatagacaaggtatattgttgcaatgggcttggagtatcatttctgcaaatgctgtcccc

SEQ ID NO: 111499 - DNA, 234 bp, Glycine max
  Clone ID: PAT_MRT3847_71694C.1
cgtacctcacgcgttccgttgagtcattcatatttgtttctagaacactgtttcccaactgggaaggctcatgtttcaccacgtaggagaccagcatactacagtcttcattcatgttttcgaatgctataggagattcacaaaggattgcctccttcttgtcaaatttgatctgtctggaatttcttcatccctaatgtgtactccttatatttaagttaccttctaatttta

SEQ ID NO: 111500 - DNA, 934 bp, Glycine max
  unsure (1)..(934): unsure at all n locations
  Clone ID: PAT_MRT3847_71695C.1
tctcccacgcgtccgtacggctgcgagaagacgacagaaggggaagacagttagcatgcaaaagagggatccagataaacaaattataccctaaggagttgctaaacccaagctgtgggttttgcagtttctttgggttgaagcacttccgtcttcgagttgaggcattgagcagagcaacgaagctcctcccaaaccaatgactttggtcgacggcgcttccttctgaatttcctagacccttttggcttcacgatgggccctcgacagtgccaagtctgcaaccaaactcagtccaaatacaagtgcccttcatgttacttaccttattgttctctggtctgtttcaagaaacacaaagaatctccatgcgtcaagccacagccttcagagaccaaagcaactgctgtttcagaatcatttgtagaaaagccattagttgctgatgaatcaagtgaggtgttgcaaaaattccaactggaggccatagcctcttccagtgagattcgtgatgctttgaatgatgaagcccttcaagaactaatttgccgtattgatggttcctcaaatgcagagaatgagcttgataaagctatggcagaggaggcttttcgcttgttcactgacgagattttatcaaccatcaacccctaattgcaagcaatggttactgaaacaagagtttgtcgaatatgaaaggaacagcagataagcctccaaatttttgtaggatttggttattatttctttttcatctgtacagctttgccctgtgattcagcttttgatgtatgataaattttgtatcttcattgaggcattgtattggtaacaattgattttgatgctcagatagtaaacctcaaatctgtgaagtgtttcctttggctctcttgatgagaaccnnnnnnnnnnnnnnnnggntttnccnnnc

SEQ ID NO: 111501 - DNA, 286 bp, Glycine max
  Clone ID: PAT_MRT3847_71696C.1
tttttttttttttttttttttttttttttttgggccattttaaagttttaaaatttgatataaaacaaaataaccagggttaaactgtaaaaaaacccaagccgccccctttacataaaccccttttaactaacatttcaactaaaatactacccgccgttgattaaatccctaacaacccggttgaggcttccattgttttttttaaccagcctttttttcatttttgtcacgggaacccatttcccgtaactttggcaggaaatgggtgggccccctaccactt

SEQ ID NO: 111502 - DNA, 492 bp, Glycine max
  Clone ID: PAT_MRT3847_71697C.1
cccacgcgttcggggttttgcagtttctttgggttgaagcacttccgtcttcgagttgaggcattgagcagagcaacgaagctcctcccaaaccaatgactttggtcgacggcgcttccttctgaatttcctagacccttttggcttcacgatgggtcctcgacagtgccaagtctgcaaccaaactcagtccaaatacaagtgcccttcatgttacttaccttagtaagcaataaatatcttttttttttttcctttattattggtggtggtgctattatttttattttttgaaaattgttatgttgttccttttgctttcagttgttctctggtctgtttcaagaaacacaaagaatctccatgcgtcaagccacagccttcagagaccaaagcaactgctgtttcagaatcatttgtagaaaagccattagttgctgatgaatcaagtgaggtgttgcaaaaattccaactggaggccatagcctcttc

SEQ ID NO: 111503 - DNA, 231 bp, Glycine max
  Clone ID: PAT_MRT3847_71698C.1
atccaaataacctgatacactgatacaaacatttcaccacactctcaccatcttcatcactacttttttgttttttttccccttcaccctatttaatcacccccctcattttaattttgacgaaagttctgaagaaagattaggaaagccttgggggtcttttcaggtctcctcttttgggtcccttcaacagggttgaggcattaccatccccctttccaccaagtggct

SEQ ID NO: 111504 - DNA, 561 bp, Glycine max
  Clone ID: PAT_MRT3847_71699C.1
aaaaaacgagtttgttacaactaacaaggagaagcaaatggttccctcagtgatctcttccccagctgaaaccactgtcaaccgtgccggggccggcatggccgatccattaactgccctcaagtccatggatggctgccccacctaaaacaccctcattgactttacctcctttgctagcaacggtggaagagcgcaaaacatgcaggcgtggccaccggttgacaataaaaaatatgagactctttactacctgccagaccttgatcctgcacaaccggcaaaggacggataataccttcttaggactggatggactcctcgcttggaattggagctagaacacggattctggtgccgtgagcacaacaggccacctgaacactacgacggacgctactggaccatgtggaagctgccaataatgacttacactgatgcttatcacgcgtcgaaggacctgtaggaggctaatactgcataccccaacggcttcatccggatcatcagattcaacaccgttcgccaagtgcatcacatgaatttgatagactacaagcc

SEQ ID NO: 111505 - DNA, 268 bp, Glycine max
  Clone ID: PAT_MRT3847_7169C.1
ccgcaaaagttgaaatttctaactgcatacaccagatcccggaaacgccatatttaagcgatggataaactaattatctctatgagcatattccacctatgtctcctatgtcaaacttcatgctaaagtacaataacttacctaagttgcactaaattgacaagatttttctgcaagctacttcctttttaaagaaaaagatattattagaaatatgcagaagacaagttgaatcattgcattgtatataaacattgtacttcgctag

SEQ ID NO: 111506 - DNA, 241 bp, Glycine max
  Clone ID: PAT_MRT3847_716C.1
tatgaatctaatgatttactttcattttcttgaccgagttagtgtatctaataagtgtttgatattcactttgcttcttgtctatttaattatttcaattgatcatcctgagatggaaatatagagactgtcttttgtcaataatttattatgtatacagcttttgatgcatccaggaattttttgctttcaggtcgtagttgggcctgagtttgttgttcctccatattcaaatgtatct

SEQ ID NO: 111507 - DNA, 522 bp, Glycine max
  Clone ID: PAT_MRT3847_71700C.1
ccctccccccccccccccccccccccccccccccccccctccctcctccccccttccctccccttccttttttttttttttttttttttttttttttttggggggttcctttttaacatataaaaaaaaagcttgggacccaacttcatattttaatttggatttgggcctttttcccccctgggcctgctttaacttttatttttttttggcacccctttttccttttacccaaaaatttttccctttccccccatgttaaagggttcccccttttttttttcatttaaaaacaaaaaaaaaaaaattgccccaatcccagtccttttatttttttccaaaatccctttacccattaaaaacttttttaggggcaaacttttccctcccccccaaaatttgtattaacaaccgttctttatatacccccttttggaaaaaccccaccccctttgggagttgccccccccccccccccccgttttattttttttccccacaaacccggggttttcccccccc

SEQ ID NO: 111508 - DNA, 1109 bp, Glycine max
  Clone ID: PAT_MRT3847_71701C.1
cccacgcgtccgacggctgcgagaagacgacagaaggggagcttcagcagcactcactgcgctaaccccttctctctctctctctcgctcggttctccgatcgccgtcttcgccttgcccattcctgatcaatatgtctagaagatatgatagccgtacaacaatcttctcccccgaaggacgtctttaccaagtggagtatgcaatggaggccattgggaatgctggaactgcaatagggatcttgtcaaaagatggggtagttctggttggtgaaaagaaggtcacatccaagctgctgcaaacctcaacctccactgagaaaatgtacaagattgatgatcatgttgcatgtgctgtggctggaattatgtctgatgccaacatcttaatcaatactgctagagttcaggcccaacgctatgcatatgcttaccaagagccaatgcctgttgagcagttggttcaatctctttgtgatactaagcaaggttacacacaatttggtggtcttcgtccatttggagtctcattcctctttgctggttgggacaagaattttggctttcaactttacacaagtgaccccagtggaaattatggtggttggaaagctgcagctattggtgccaacaaccaggcagctcagtcaattctgaaacaggactacaaggatgatatcacaagggaagaagcagttcaacttgcacttaaggtactaagtaaaactatggacagcacaagtcttacctcggaaaagcttgaacttgcagaggtttttctgtcacctgctggaaaagtcaagtatcaagtttgctccccagaaaacctgactaagctgttggtgaagtttggggtgacccaaccggcagcagacactgcttagcttctagtttcatgtaatatgccgtttaattatgcctatacaatgcatttgaacgttcttcctttcataatagacgtcagaaagtgtcccatgtcccaaatttatttcaaagttcaaactttaagcattgtgtatcttggtgtatgctaattggtttttagttcgcatttattttaatttccaggacttagatctatgatatttgcataaaatcattgctctt

SEQ ID NO: 111509 - DNA, 342 bp, Glycine max
  Clone ID: PAT_MRT3847_71702C.1
ggaaaaacattacacaattctgatttcgaatttacattttggcataaaaaaaagctatttctagcaatgatatgatgtaatgacatctcaaaattcagccgggatttttaaccaaaaccatgcctaatatagtttaaacatcaacaattcaattaccctagtaactcaactgtgattaattcctaacatggaaaatcaatgaatctttttaggaggacacaaacttgctagtgcaaatgctggtcaccttggcaaacacccacaataatttttaaagccgggcttaaaacttccttcaataacttctgggattctaaagcatcaccccaggactttttttac

SEQ ID NO: 111510 - DNA, 735 bp, Glycine max
  Clone ID: PAT_MRT3847_71703C.1
ccacgcgtccgaccgtttcttccttataaaacctttgctaatgtagttgtttgcatatcaagtgtatttaatttagtttactgccatgttgattttatcagcaaaggtaaataatatatattaaaatgatataaggggtgtcaaaaatccatatacagagacaaaaaactagacatattcttgttgtatctccccttgattaattactatgttatattgcttgtgaatataaataaagagtacgtaaccacatttacaaaaagaggaaagctatccttgtttaccatacactgccataaacaacatgttagtgctaaaaaactactccacttcttatcctaataaaacaccataaaagactagaatttttttttataaaaagataaataagataaatttcatatttttttgattgattgatttcctaaaagaaaaatatatttatattgattagccagactgaatcattcttatttaattggtgtaattgttgaatcagtgggctattgctcaaatttgctgcatatattgcctgttgcatttgtttttgtttctcagtcaatggtgaagctcaattaaaatattttcactcacaataatttcttaaaattgataaaggtaggtggtaaaggtagacattccaagaaaatgagaataagagtaagatagttagagaaaacagagaatagggtaggtggtaaaggtagacattccaagctcaattcattataattt

SEQ ID NO: 111511 - DNA, 688 bp, Glycine max
  Clone ID: PAT_MRT3847_71704C.1
caatatgatgattttgggaacctatataagagcaatatcggtttataaaatatacagctcatacctcttcagaacccaaaggaggttgccttggttttccccatactaacgataaattatcaaactgccagaagagaaacaaaagatgatgtcattaatattataccagtgtaaaatggaccaggggaaataaaggccctataaatttttgcaaatatgagcagtatcataaatcaattcataacaatagacaccaaatatgatattatctcccatgacaatcagattattcataacagctatatcaacacaaatttacagaggccaccaagttaccatatggacaagcaaattgacatatcagacaatttttaatactgccagtatgaccttgaacaaatcctagcaccttacaataatattcacacattttaaattccaaagttgtgcacatgttgccaacttattgattgagatgctacagatggtaaaatactctgaattttaaaaagctagttgttagtctttgggactgggctttgtaatattaaaatactcagaatttttaccatgaatgttttctccttttctaatattaatgtctctcttcaatgaagcacttattgatgcctattgcctcaacgagttaaaacaccttgcgttttgtttgactaccttgctagtagcc

SEQ ID NO: 111512 - DNA, 478 bp, Glycine max
  Clone ID: PAT_MRT3847_71705C.1
ttttttttttttttttttttttttttttttttttttttttttttttttttttttttttttttttttgggggccccaaaagttcattatttatccctaaaaatttaacaggggattttcccttggggtggtgggagggcccattctaaccatacaataaaaactggcgtgatattggaaacattaagctcaacccgggggggggggatccatttttttttatagaactcaaaaaccccgggttaaaaacctttttttacaaaggcctcccttgcatacaaaaacaaaggtccctgggaaatcattaactccccctaacaataccggtttagccggggcaaaatggtgtattttaaccaaacttaagagatgaagcccctgtccctttttttttttttttttgaaacttaaattggaacacaaccacctaactttttgttgatgctttgcccagggaatttggaatctttctggccatac

SEQ ID NO: 111513 - DNA, 392 bp, Glycine max
  unsure (1)..(392): unsure at all n locations
  Clone ID: PAT_MRT3847_71706C.1
aagctcggaacccggctcgaggagagcaccaccgggaataagcaaacgccccaaaaacgcccaacagggggagaggaaaaaccaacgccccccctaagaccggagccagaaaaacagaagccgaagcgggccgcaacaggaccaaagcgaaagcagccacaaccccacaacggaggaagggggcggagacaccaacagcanggccaccagagangcacccaacaccaagcacacaccagcaacaagcagagaaccaaggagcaaaagcgagcacaccacaacnaggagcacgaccaacgggacngggccaaaaaagcgcaggcaccgcaggcaaaaggccaggcagcaacccacgaggagaggaccaaagcgacccccccacagaagaaggg

SEQ ID NO: 111514 - DNA, 392 bp, Glycine max
  unsure (1)..(392): unsure at all n locations
  Clone ID: PAT_MRT3847_71707C.1
gttactacctactataactatttctctctctctctctctcacacttgctgcaggcacttgattggaagttggaaatcaacaaaacttatcaatctctctttctctctgcggcacctcttgttaaaaatttgttcttttcaccgaaacccgtaaagggtcgtgagctagcttcttctcgatccatggtcctggtttttcttcctcttgttttcagcttctatatgcaaaaggggggagaccgaatgatgcaaaatatttataatgtagttacctcactaaccacctaagccatgaaaacaaccttcttctcgtttgggtattctgcgaattggtgcatttgtttaaccctctaggccctgggtggatctgcatttggggtgcaagagtntggg

SEQ ID NO: 111515 - DNA, 381 bp, Glycine max
  Clone ID: PAT_MRT3847_71708C.1
ggctcgagcagggacttacggtggacgctacatcgaccctactcaaacgcatgtgcgccgggccgttgcttacttacacggcaactgagacgcaagtcgttgcggcaactcacacacaggtgcacagacgccatacgcacgaatgaaccgcaggcgcaacatcattggcaagatgccagtcggggcacaagctacagcagcatactcgaaactggactaatacacgcacatcgaggagtgagctccaacagcacattttgggtatgtcttacgccagcgcatatatgccaacagatgatggcgccaaagagctacagggggcctacactactatgagaaggtgatcatggcatgagcttggaacaggccatgactattgtc

SEQ ID NO: 111516 - DNA, 181 bp, Glycine max
  Clone ID: PAT_MRT3847_71709C.1
gggaggactcgcgacgctcattatgaacttctaattggaaccggacacgtggactggcctgaggttctgggcgccagtctttgcgattcccgtggacatgaaacccagaatggtacattggttcattgacggtctattagcccgtctcgccgtcacgtagaccgccatgccgtattacata

SEQ ID NO: 111517 - DNA, 205 bp, Glycine max
  Clone ID: PAT_MRT3847_7170C.1
agttgactccttctgttccatcctcaatctccttgatgagaattggcgaatgaagtaagtaaatgctatctcccagtcttttcatgatcctaacttggtataattggagagacttaattcactcgctgaatctcattacttccaagaaagatggacagatattgttaatctctatcatcaccttggaaagccgacacgcagaggc

SEQ ID NO: 111518 - DNA, 388 bp, Glycine max
  Clone ID: PAT_MRT3847_71710C.1
ttcggttgcaagaagacgacagaaggggaatggtgatgaagggagacttcttctgagaggacggagacaactaaaaccgaggctaggtttagactgacttgcctgaaaactaaatgagagcagttgccactttggaatcttacatcgaatgtattggcgacgagaatgccggtagggctgacatctcttttcttgtttcacacaacaagctggaaaaatagttgccaaaagcaactgaactatattacaaatcattatattgaatctgttcaagagcagagaatccaacaacatgctcatcgagattcgccacttattcagattcaatgacctgctccagcataccatctgcgatgtatactacagatttgaacctcatttgaataac

SEQ ID NO: 111519 - DNA, 418 bp, Glycine max
  Clone ID: PAT_MRT3847_71711C.1
attggaggtggctgttacagcagcgcacatggcgtgttccctctgccagagattgcaggacactgcgattggcatcgctcggacagatcatcctcatgctcaattcaatgacgacaattctccggttacagctgcgaattgcagtgtacacacaattgtcagctggatgttgacagaatgtctacggagtcaaaatgtctcaattgctgctgaagaagatgctcgaactctttacaagagctatgcatccgaactgtctaaagctgtggtggacactgtgaatcaatgtctagccgaatcacctctatttgtagttcaggagccttagtcaactctcataacttcatatgttcttgaattcattaatcgctgtatctctacttggggtaccactcgtagattaaggtgctggatcctg

SEQ ID NO: 111520 - DNA, 548 bp, Glycine max
  unsure (1)..(548): unsure at all n locations
  Clone ID: PAT_MRT3847_71712C.1
gcttgaggtcgcggcacgcgcaccggagctnggaagcggtcgagcggccgcccatcccacgcgtccgtctcttgtcaactgccccccgcacgatggggctcgcacggcaaggcgttccttagggctaaggagactccctagggtcacccacagtacgagccagtggggggccctggggcgctactgccggacggcttacggaccgtggacgctcgcgtagtacactccgcggattccctctgataggcgaaaaaccttatcacgcaacgacaggctgcttgccgccacggccttttaaaccacacgcgaggcccaagagagcgaaccaacgctccctctgctactgggatgaagtactcgagccccactgccatcgctggggctgacctagcctcgtaaaccaccctctaaactccagagaggtggcctgctgcagggcgcacaggccagcgctcgcagaatgctgcttcacaacgatcggaagagccgacatggaaagatcaacacgcaccgtcgctatgaccgcgaggctggcacagagccagggg

SEQ ID NO: 111521 - DNA, 1267 bp, Glycine max
  Clone ID: PAT_MRT3847_71713C.1
caaacaccattcgcctcctcctttctcagctatcttcatctgcttctgtcacatcaagcattctcataccgcctctcagtgcttctttcacatcatcaagcattctcacatcgcttctcagtttctcgttttcccaatcgcagctaaaaaatcctctgtacccttttacccttttctcaataagaagaaattaggaaacgcaacaatggctcaagcggttgaagaatggtataagcagatgcccgtcatcacgcgctcctatctcaccgctgctgttgtcaccactatcggatgctcccttgatataatttctccgtatcatttgtacttgaaccctatattggtggtgaagcaatatcagttttggcgcctggttactaatttcttgtactttcgtaaaatggacttggatttcctgtttcatatgttttttcttgctcgttactgcaagcttcttgaggagaactcgttcagggggaggactgctgatttcttttacatgctcttatttggtgccactgtattgactggaattgttcttcttgggggcatgataccttatttatcagagtcgttcgcaaaaataatattccttagcaactcattgacatttatgatggtttacgtgtggagcaaacaaaatcccttcattcacatgagcttcctgggtctctttactttcactgctgcctaccttccatgggttctcttggggttctctgtactcgttggtgctagtgcttgggtggatctactggggatgattgctggtcatgcatattattttcttgaagatgtttatcctcggatgacaggtcgtaggccactaaaaacaccatcattcatcaaagcactatttgcagatgacccagttgttgttgcacggcctgctaatgtcaggtttgctcccccacctgctgaagaacttcaccaagattgaatgaatgcccatcaaaatggttagaggattagcaaaggaacagcaaagcggttgaccgtgtaatatatagattttaaacatctttttttcgcgtgcatttgttaattaattaggatttaaggggcaactatgtcgaatgttcagggttttaactgaatgagatcctcttttctcatcgtagtttgtcagacactaccttgtagatatgatattatatcctcttgtattccacaaagttttttttaagctagttaagtcaacaaatttggttcttctatttaaaactctaattcttattttattttttatccaaatatttgagactta

SEQ ID NO: 111522 - DNA, 204 bp, Glycine max
  Clone ID: PAT_MRT3847_71714C.1
gacgacagacgggcaacagatgtcatcgcgaggatctcaaagaccgatcaaggcacgaaagccgggctctttcatacagtggcttcctattccaaaggtgtacagctgcatggataagctcacacggtaccgtcgctttgggatcacattcggttcctgatgaggtaacaggaaggaagtttgggctgtcataatatcaaatca

SEQ ID NO: 111523 - DNA, 175 bp, Glycine max
  Clone ID: PAT_MRT3847_71715C.1
gtttttaccaaaggcggctaacgctactttgaatggaccacataggctaatccgttggcaagtacccattatccttaaactttacaataggaccatccttttttgaaatattggcagtgaaaaaatgaagattgggctcttttagactgacataatctttgtacgagaatttgtc

SEQ ID NO: 111524 - DNA, 250 bp, Glycine max
  Clone ID: PAT_MRT3847_71716C.1
gtttttagtttaggtgaggaaacaagagaaatccaaatcctattgacacgtgttttacgtgaggagatgctaggagaaaaaacgaagcactgagagaactaagagattggattgtaagatgaatagtaagagatttaccaatcttcttccttcttcttctgtttcctatgctctcccacccattgttcttcttgccttttgcattttcttttactatctctcagttacttcatcaccagaaaatcacctt

SEQ ID NO: 111525 - DNA, 304 bp, Glycine max
  Clone ID: PAT_MRT3847_71717C.1
cttattaactattttgctttggttttttttatttgtttttttttttttttttattttgtccaaagaaaaaaacacgccgccccaccccctgttgaacaaacgggagaccggccggggggctcccccaacaaagtggagggcggccccacgggctggcgtttattacccacccccaggggggatgcccccttgtctctcccccccccccgcaaaatttacttgacccccgggctgcggaagacattgttgaagactgtaaaaccccccaaagaatccctttccccggtgtttgtgttggaacaag

SEQ ID NO: 111526 - DNA, 307 bp, Glycine max
  Clone ID: PAT_MRT3847_71718C.1
cataatgatatctgttgattctgctgctctcattaatcatggtctacatcccatgaactcacaccacttgtttggtacccgctatgaccatatccatatcgtcctttgtcctctgtccttcatacctcgcttggttgtaaccctagatacctcggtaatagcactgactgggatacctgtcatgctcgttctgcttctctatacatcctctatgcctgaaagaaactattgctgtgactttactgggactcgtatcgatcttagtaagcatgggcatctcacataccatgcacctgatgatcagtat

SEQ ID NO: 111527 - DNA, 201 bp, Glycine max
  Clone ID: PAT_MRT3847_71719C.1
tggttatcgggttggctatcaagcatactctactgctaatcagaattgggtgaattgctctgaatacttagatagagctaatgccgcatcgaattccacgtcttaaaaggttctatctctattggaatcggcaatatctcatccagtgctatgtccagagtactgactaatcatgtacctaggacttccagaagatcttgc

SEQ ID NO: 111528 - DNA, 900 bp, Glycine max
  Clone ID: PAT_MRT3847_7171C.1
cttctttattttcaaaaggttttggaatatctcctgaaaaccaggaggaagatggaaccctcaatacatctggagatgcaagtgggacaggcatgggagagggtgtcggattaaaggatgtaagtgatcagattgccgatgaagatcagctgcttggaacacgggaacagcaaaatgaaaagcaagatgactctaatgaagtgcctagtagcaataatacagggattgagatggaacaggattttcaggctgatgcaatgagccttagtgaggactctggagaagatgacgatattgatggcgaaaatgaggaacttgagtctgaaatgggacccactggaccagacagtgaagcagtgggtgagaaagtttgtgatgagaatgaagatgaaactcccaatgatacaagagaaaagtttgaatctggaccttcggtcaaggacagagatggaggaaatagagagttaagagccaaggatgactatacaactaatgaacctggggatggtaattgtgatgaagatgatgctcgggaagatgatactgtaaccccagatgacgtagaagatggagagaatgctgatgacatgactatggacaaagaagcagcacattcagatcctactgggttgaagcctgatgagctggatcaaactttggatatggatttggacataaatgaagatacagatctcatggaagatggagaattggatgagcaaggtgatttagctgagaatgaaaatgaagggaatcaggttgaagagacttgctctcctgatgaagttatggaagaggcacatactgaagttgatgtgaactctggaaaagatgatcaaggtcaggagcatcaagagaatgcaaacatgaattccacagaatcaaagaaagatgtatcta

SEQ ID NO: 111529 - DNA, 497 bp, Glycine max
  unsure (1)..(497): unsure at all n locations
  Clone ID: PAT_MRT3847_71720C.1
ggtccgnattcccgggtcgacccacgcgtccgatgcgtatatgctctaatatgcaccgcaggcaaagggccgcttaccttctcaagcaacaagcgcatatacagagggaggaagggagagagggacactggcaagtgcattcctttgtcatatggggtagctacaacattaacgcttcttctgcctgtcaagaggagaatgttggcaaaaccctattatctagtactccaggttccaagattgcttatggacgactcacgcatacagtttttaaagtctcacatgctgttcttaaaggctatgaggatcatgcattaaaaatgatttttgattgtgctgaacatctgcaccggaacaatcttacgacgcatttctcacgcactggattaaacaacaaacaggatccagtcatccgtaccatgatggtctgctacctattactagcacatgtgcactgccatgtacatactgctatttacacataaggggagtgtgtt

SEQ ID NO: 111530 - DNA, 136 bp, Glycine max
  Clone ID: PAT_MRT3847_71721C.1
cgcattgcacccatgggagcaggaacttcgcaaggatccacatctcatatctccgaaagcactacgatacagatggaccctgtgagaaaatctgtgaaggacgagaaactaaaacgccggaatcatcgctgaccat

SEQ ID NO: 111531 - DNA, 940 bp, Glycine max
  Clone ID: PAT_MRT3847_71722C.1
caacacccaacattccttaactccttggctcgagtgcacgcagaaaaattttctgggaaaatatcttggtatgggaaagggatcttttcaggactctgttaaagctctggaagctgacattcagtatgctaataccctggcattaggctatccaagggacaaagatggaggatgctttcagatgaggatatcatacagtccagcagcccctctttttctgtttcttgttcaatggaccgattaccgcctcgccggtgctctgggtttgctgagaattctaatttatgtgacttatggaaatgggaagaatactatgtcaatatatgaaaggaaagcaagcattagacaattttactcgattatatttcctgctctgttgcaacttgagaaaggcatcacagatttggaggaaaggaaacagaaagaagtatatgcccttagataccaaaggaaaagtgagcaatgagagaagacaatctgaaattgacattgaaagaagggaatgagtgtgcttggtgaaagcaaaagttgattgttatatttgcccttgccactacaaaatcagaaagtgatccctagtttgttgttctctagatgtgacaatggtgcttgttgattcaggtgtcaaaggtctcagtcttgccccttttgccgggatagcctaaaaagaaccaactttggggacctttggatttaccctgacaccagtgacattgttgatgttgggacaattttcaaagaaaattgtaagatgctgtttctgtacataaaaaagctgcctctaattgttccagatcccagatatgtgttctatgatccccttttgaaatgaaggaattgcctacagatttttggaaaatagtgtgtatgtttcactttacttgtacatgcattttagcccataatttaattgtgtatatatttaactggcttttttccc

SEQ ID NO: 111532 - DNA, 1369 bp, Glycine max
  Clone ID: PAT_MRT3847_71723C.1
ctttctgtctctgtttttggaattttgtgggacatctttgaatgagaaattctgtttttgttcaggagtctgttatctttgaatgagcaaacattcagtatgagcttgccctgtaaattccttcctatttgggaattaaaaattgaatattttttctatgttgttgaagtttcaaacatgatgcatcactggaatttttattttttttctagaattgagtcttttttcttcctcttatgcatcattttgtgtaaactttgtgagtgttgttttcatgttgtgtgggactcttttgttatttggagctgaatgctactgtgtttttcttgaagtggtagagttggactttgaagctgagaatttgtttaaagaagatgttgatgaactgcacctgtgaatttgcatgacactcagttggaaaattgaattagataacacttttcaatatccaaaaacttcattgatatgtttatgatggagtctttcatactaattctttaagcagagtttagcacttttctcatgtgagtgagattgtatgctttcttttcgcctctttgttagggcattaggctatccaagggacaaagatggaggatgctttcagatgaggatatcatacagtccagcagcccctctttttctgtttcttgttcaatggaccgattaccgcctcgccggtgctctgggtttgctgagaattctaatttatgtgacttatggaaatgggaagaatactatgtcaatatatgaaaggaaagcaagcattagacaattttactcgattatatttcctgctctgttgcaacttgagaaaggcatcacagatttggaggaaaggaaacagaaagaagtatatgcccttagataccaaaggaaaagtgagttcaatgagagaagacaatctgaaattgacattgaaagagaagaggaatgtggagtgtgcttggaggtgaaagcaaaagttgtgcttcctaattgctgccactacatgtgtttgaagtgctacagagattggtgtcagaggtctcagtcttgccccttttgccgggatagcctgaagagaaccaactctggggacctttggatttacactgacaccagtgacattgttgatgttgggacaattttcaaagagaattgtaagatgctgtttctgtacatagagaagctgcctctaattgttccagatcccagatatgtgttctatgatccacttctgagatgaaggaattgcctacagatttttggaaaatagtgtgtatgtttcactttacttgtacatgcattttagaccataatttaattgtgtatatatttaactggcttttttccaatcggcttcaagttggtgatttatttctaaccc

SEQ ID NO: 111533 - DNA, 2642 bp, Glycine max
  Clone ID: PAT_MRT3847_71724C.1
gcccctgcgtccgtctttgtctcacgttccggggcacacttcttctctattcatgtctctcttcggtagctcaatttggccgacaatggcggcctccgaggctctccacggcccaaccaccacccccctcatccactcttacggcaacgtcctccgcgttcctcgcgttttcttttttcttaatttaatttaatttcatcccttttttttggggggagaaaagaaagaaagtatttccttcaatttttctcagatctgcgcaacctcgttgccccccgaacatgggaaactgctgcgccacgccgtccacggacgaaacggcgaacaagaagggcaaaaagggaaaaaaggaaaaccccttcgcgatcgactacggtttcaacgccaccgccgcgaacgggtcgaagctcaccgttttgaagtccccgacgggccgcgagatcgaggcccgctacgagctgggccgtgagctgggccggggcgagttcggcataacctacctctgtacggacaaggggaccggagaggagctggcgtgcaagtcgatctcgaagaagaagcttcggacggcgatcgacatcgaggacgtgaggagggaggtgggagatcatgcgccacttgccgcagcatgcgaacatcgtgaccttgaaggacacctacgaggatgacaatgccgttcatcttgttatggagctttgtgagggcggggagctcttcgaccgcatcgtggcgcgaggccactacaccgaacgcgccgttgccgtcgtcaccaagaccatcgtcgaagacgttcagatgtgccacaagcaaggtgtgatgcatcgggatctcaagccagaaaactttttgtttgcaaataaaaaggaaactgcggctttgaaagctatagattttgggttgtcggtgttctttaaaccaggggaaaaatttaatgagattgttggaagtccatattacatggctcctgaggtattgaagagaaattatggggcaaaagtggatatctggagtgctggagtaattcgatacatcttacttaatggtggtccaactttttgggcagaaacttagcaagtaattgaacaagaaatcagaaggtcggttaagtctacttaaagggatccatggccaaaagtttctgataatgcaaaagaccaattgtgaatgtctctagatcctgacccgaagcggcggcttactgcacaagacgttttagatcatccatggttacaaaatgcaaagaaggctcctaatgtttccttaggagaaactgttagagcaaggctcaagcaattttctgtaatgaacaagcttaagaaaagagctttaagggtgattgctgagcatttgacggtagaagaagctgccgggctaaaagagggattccaggttatggatacaaacaacagaggcaagattaacattgatgaattacgagtagggttgcataaacttggtcatcaagttcccgaatcagatgtccaagctcttatggatgctggtgatgtagacggggatgggcacctagattatggagagtttgtagccatttctgttcatctaagaaagatgggaaatgatgagcatcttcgcaaagccttccaattttttgatcagaacaaaagtgagtatattgagattgaggagctgcgtagcgccttatctgatgatcttgacacaaacagtgaagaagttatcaatgcaattatgcatgatgtggacacagacaaggatggaaggataagttacgacgaattttctacaatgatgaaggctggcacagattggagaaaagcatcaagacagtactcgcgagagaggtttgccagtctcagccttacgttgatgagggacgggtcattgcatttaaacaatgaaaaacaatgacggtagatgactactttagaaatgtcaatttttactttggaaaggaaaatttgataaagaagtctattttttaattttaacttttctcttaattgtaattcttttcccgaataccccatttttgggtgaaaaaggataggatattggccccagcagtgttgtttgtgatttgaagtatgtatttttttggtttgttgaggttgtgttaggagacaggagagggttggttggagggagaggacattgaacaagttttcatttgtggctgtaaatatgttaaattatcacgctttatttgtatttcatatgccatttttgtagagacagatggtaaggcttttgacagagtgaggcagacagaaattgggaagaaacatttcaaacttacgcattttgaagaggtgttcacaactcaccattggatggttcggatttacaagttgaaaccaccaaagaacaggattcgaggaaagattaaaaaatcaaaatttaaagcaagctcaaaatctgcctcgaaaagaaaaggattaaaaaggaaccccttttagtttagattttcatttcttttggtagatgactttatttcttagtgtgcgtttcatgtatacatgtatacaactaatgcaattgccatgataaggattttgccggcattattagttactttcttgagtaatgaatgatgaaacaaaaaattttgaaactatatattttgactgaatgtttaaggtctcatttttctgattgaaaaaaaa

SEQ ID NO: 111534 - DNA, 419 bp, Glycine max
  Clone ID: PAT_MRT3847_71725C.1
gggacaggaggaaaacaaaaagaagcaggggccaatttttttaatttaatttggaaaagggggcccaggggggcaaagggaaaaaataatatgccagggagcccggacaaaaaatttcaaaaaaaaattaaaccaaagaaggggggaaaatttttcctgggatcccggggggcaaagggcaaacccgccccccaaaaagaaaaccgaccttcggaaaaaggggagtattcgaattcaggccaaaatttttttccccaccccaaggactttaattctggaagcaagaaaaaacaatcttgggagggggcacccaacgggaatggacaggggggggaaaaacatttggaaaagctaagaaaaggggggggccatcgaaaaacaaaaagaaaaccgggggtaaaaaaggccacggaaaaact

SEQ ID NO: 111535 - DNA, 1553 bp, Glycine max
  unsure (1)..(1553): unsure at all n locations
  Clone ID: PAT_MRT3847_71726C.1
aaaaaaatcaccagtaatggccctatctgccccaacaagtacgctatgaagattctgcatacacccttcagggtaacatgacacgaaccactcttcgtcctcactcttcttcactactactccactctcttattctttctctttctctcttctctcactgaacccaaaacccaaacccaaacccaccaattcagatcacaatgaagcccaacgacaacatggcaatgctggccaagaccgactccgaggttagcagcctcacgcagtcctcgccgacgcgatccccgcgacgggcagtgtactatgtgcagagcccgtcgcgagactcatcgcacgacggggagaagactacgaactcgtttcactcgagtccgctgcagagcccattgggctccccgccccactcccactccaactcctccttgggccatcactcgcgcgagtccgcctccacgcgcttctctggctcgcgcaagagcagctcctcgggcaacaaccgcaagggcccgtggcggccctggaaggaccagttccatgccatcgaggaggagggcctcatcgatgctcacgacaatgcccgtggcttccctcgttgctgctatttcccagcatttgtcatcggcttcgtcctcctcttctccgcattctccctcattctctggggtgctagtcgcccccaaaagcccgccatttctctcaagagtctaacctttgatcaattcgggatacaagccggagcggacatgtcaggagttgccacaagtttggtgtccatgaattcatctgtgaaaatgacgtttcgtaacaccgctacatttttcggggtccatgtgacctcaactcccgtggatctcaattattatcaacttactctagccactggaactatgccaaagttttatcaatctaggaagagccaaagatctgttagagtgatggtgattgggagtcatataccactgtacggaggaggagcaaacctgaacagtgtgaacggtaaaccggttgaaccggtgccactgacgttgagcgtgatggtgcggtctagggcttatgttttgggcaaattggtgaagccaaagttctacaagaaaatagagtgttccatcgttatggatccgaagaagatgggcaaggccatttcactggtcaagaaatgcacttaccagtaaagtcagctacatgattattattaattaatgaaatcaaacaataaggtaaatttaagggtatggttgcattacacgaaatttccatgaaacagccgaaagggtagtttggatctagtcggtggctcaattcccagctcaagataaaattattatttttaatttttaatatttttcttactatctcagtttctctttcctttttttcctatctaatgtatcccggagtacgtagttgcggtagtcaagacaagaaataaaatattgaatttgggaattgtattgtatcccaacccaaagagagagtagattgttgggtcaaataatagaatacaatatgctttattgttttacaaaaaaaaaaaaaaaaaaaagatanntcta

SEQ ID NO: 111536 - DNA, 224 bp, Glycine max
  Clone ID: PAT_MRT3847_71727C.1
cttctctgctattttatcggtggttgggtgagtataaaccgttgaggatctctatgtttagggggaggtaacagggcacggggtgtaggagaataggggtaacgatgagaaggaggcactgctactcggtaattaaggttgttggcggatcatagagagcacaaatgcagatatgcatattatataatgtatatctgggaactgaggatgaactgtgcactgta

SEQ ID NO: 111537 - DNA, 557 bp, Glycine max
  Clone ID: PAT_MRT3847_71728C.1
tgaggatcgtaacattaattcttcactaaatgcagatcatccatggttacaaaacgcaaagaaggctcctaatgtttccttaggagaaactgttagagcaaggctcaagcaattttctgtaatgaacaagcttaagaaaagagctttaagggtaatgttctgaacaatatttgaataccagttggcactcgggcaatcatccgtgaaatgttaatccatgtaataatcattataattcatgagttactaattttttcttgatggttgatatttcacatgaacaggtgattgctgagcatttgacggtagaagaagctgccgggctaaaagagggattccaggttatggatacaaacaacagaggcaagattaacattgatgaattacgagtagggttgcataaacttggtcatcaagttcccgaatcagatgtccaagctcttatggatgctgtgagtattactttactatcaccttttatctcgaacctttattagacagctgatatttaaaaataaagtaactttatataagattgaggtattttattttttttt

SEQ ID NO: 111538 - DNA, 728 bp, Glycine max
  unsure (1)..(728): unsure at all n locations
  Clone ID: PAT_MRT3847_71729C.1
ctttttntgcactgagaaggatagcttaaaaaaatctgtgcctatcatagtcacttctgcattttttaaccctcntgggttctctccatcatttggtgttctgcacctatatggtgctgcatagtgaacttagtgtgttttaaatttaaaaaaatgttataattatactcttatttggaaccttccattaatctcttgtcctcatgaaattgcaggatggaaggataagttacgacgaattttctactatgatgaaggctggcacagattggagaaaagcatcaagacagtactcacgagagaggtttgccagtctcagccttacgttgatgagggacgggtcattgcatttaaacaatgaaaaacaatgacggtagatgactactttagaaatgccaatttttactttggaaaggaaaattcgataaagaagtctattttttaattttaactctcttcattgtaattcttttctctaataccccatttttgggtgaaaaaagataggatattggccccagcagtgttgtctgtgatttgaagtatgtctttttttggtttgttgaggttgtggtaggagataggagagagggttggagggactggacattgaacaagttttcatttgtggctgtaaatatgttaaattatcaagctttatgtgtaatatgccattttgcacaaaccttgccctaaaaaaaaaaaaaaaaaaaaacttgctctataac

SEQ ID NO: 111539 - DNA, 477 bp, Glycine max
  Clone ID: PAT_MRT3847_7172C.1
tgtcatgtgcgtgcctaggcccaacattcccggggttcaaggactgacggccggcgcacccaacgggggagggttataacaaggcgcaggtccagacgcgatgcccggtgaccctttcaagcggcagcgggagccgtgacaacacctgcaagaacagtgtcggtccacgggtgctccgatgatgaaccaacagcgtgcatggggaaacaacagactccagccagcgatgtgcactcggccggatcctggcggaaaataaatgtatccttctaacactaaggctcaaacttacccacagacacattgttataggcatgctatgacctgaatgccaccatgtggtgtgagcccccatgggaagacaaggtccttttcaaggagaaataccatgaacgaatgggaaactactgccttggagatatagattctggagagaacaactctttaactaaggagcactgctagagatcttgccct

SEQ ID NO: 111540 - DNA, 586 bp, Glycine max
  Clone ID: PAT_MRT3847_71730C.1
tgcacgcgtgcgcgcgctcggaatctggctcgagctcgagccgaatcggctcgagtcgggagtcaaaaccaatattgaactaaagcaacacctgtgggtggacactggacacaaacaagatatgttgtacttatagaatctattgtaaaagttggtagtatcttagcgttaggtggtgtgggcatgtgggtaagacttgtagaggtcccattaaggagagtaaatcagatggagggttgtacaataattaaggaacagggagaccaagacagggataggccatatcatcaagaaggatttacattatatttacgacaggatattatggcattgtttgattcatgtaccttatcccacttggtgggagaaggcttttgttcggttttttttaagcttgatgctctggtactaaacctgatggtcatgtaacctatgtagctgacctcacttagtgggataaggataaggcttttgttgctagtgaaagtttttgctcttgtaagacagggtaaaatctgtgacttataatgtttgtttcaaggtggtgagcctgacttgatgactgcggaaaagttgatacttcatg

SEQ ID NO: 111541 - DNA, 3197 bp, Glycine max
  Clone ID: PAT_MRT3847_71731C.1
tttgttagtcacacactgagactcagaagaaacacacactctctctctcttcctctctctcttcggagctcaatttggccgtcaatggcggcctccgaggctctcaacggcacaaccaccacctccatcaggcacgcgttcggcaacgtcctcgcgttcttcatacttctcatgatcggcgttctcgccttctcgatccgtctcttctccgttataaagtatgagagtgttattcacgagtttgatccttatttcaactatagagtcactcagtttttgacaaagaatgggatatatgatttctggaactggtttgatgatcgaacttggtatcccctcggtcgtgtaattggtgggactgtctatcctggtttgacgttgacagcaggcaccttatggtgggtactgaattccctaaacatacctctctcagttgaaactgtttgtgtgtttactgcacctatattctctgcctttgcttcatgggcaacttatcttctgacaaaggaggttaagggtgtgggggctggcttgacagcagcagttcttctggctatggtcccttcgtatatatctcgatcagtggctggcagctacgacaacgaagctgttgctatatttgctttgatattcactttctacctctatattaagacgctcaatacagggtccctcttttatgccactttgaattccatagcatacttttacatggtttgctcatggggagggtacacttttatcattaatcttattccaatgcatgttctcttgtgcatagtaactggtcgctattcttctcgactgtacattgcatatgcacctcttgttgtattgggaacattattggctgccttggtgccagtggttgggtttaatgctgtaatgacatcagagcattttgcatcatttctggttttcattatcatccatgtagtggctcttgtgcactatatcaaaggaattctttcaccaaaaatgttcaaagtagctgtggcactagttgtttctgttggcctggcagtgtgttgtgcaatggtggcagtacttatagcattggtagcttcaagcccaacaaaaggatggagcgcgtccggtttaagtctgcttgatcctacttatgcaagcaagtatataccaatcattgctagtgttagtgagcatcagccacctacttggccttcatactttatggatatcaatgtcttggcattcctcgttccagctggcattattgcatgcttttctcccctatctgatgcaagctcctttgtggtactttatattgttacgtcggtatacttttctggagtcatggttcgcttgatgcttgtacttgctccagcagcatgtatcttgtctgggattgctctttctcaggcttttgatgttttcacaagatctattaagttgcagttgcccagcctattgggtcattctcacgttgatgcaggggaagccagttctgaaagtgttgtgacaaatgattcgatgaagtctgataaaagtgaggacacatcaaaggaacgaacctcaaagaagagcaagaagaaggaaaaggaacctgtggaaaagcctccgagcaagtcacaaattaagaaaaggcttttggttttacctctggaaacatccatcattgctattgtcttgcttgtgttgctaggtgccttctatgtggtaatttcctaaccacaatttcagttcatagtgtatgggcagcagcagaagcttattcagccccttctattgttctaacatcacattcacatgatggacttcatgtttttgacgattttagagaggcttatgcttggctgagtcataatacagaaatagatgataaagtggcttcttggtgggactatgggtaccagacaactgccatggctaaccgaactgtcattgttgataataatacctggaataacacacatattgctactgttggtactgccatgtcttccccagagaaggcagcttgggaaattttccactcattggatgtcaaatatgttcttgttgtctttggaggactggttggctatcccagtgatgatatcaataagttcttgtggatggttcgtattggagggggtgtattccctcacataaaggaaccagattatttaagggacggtcaatatcggattgattccatggccacaccaacaatgctaaactccctcatgtataaactttcatattacagatttgtggagactgatggtaaggcttttgatagagtgaggcggactgaaattgggaagaaacatttcaaacttacgcattttgaggaggtgttcacaactcaccattggatggttcggatttacaagttgaaaccaccaaagaacaggattcgaggaaagattaaaaaatcaaaatttaaagcaagctcaaaaactacctcgaaaagaaaaggattaaaaaggaaccccttttagtttagtttttcatttcttttggtagatgactttatttcttagtgtgcgtttcatgtatacatgtatacaactaatgcaattgccatgataaggattttgccggcattattagttacttgcttgagtaatgaatgatgaaacaaaaattttgaaactatatagtttgactgaatgtttaaggtctcatttttctgattgaaatgcccatcagcaaaatgatttgatcgaaaggttcctggcgtggaagaagtttcagcactagccaaactacataacagtgtgctttctgtggaacttgaaaagttaaagaaacaactaaaaggttttaaatattcatacgtcaattattttaatttaacctttgatgttataaacaacccttctaaatatgggtttaaagaaggcagcgtggcatgctgtggcagcggcccttacaagggatattacagttgcgggggtaagagagcagtgaaagattatgacttatgtgagaatcctagcgaatatgtgctttttgactcgcttcatcccactgaaatggctcatcagattgtttcccagcttatatggagcggaaatcaaactattgctggctcatacagtctgaaaacactatttgaagaataatccaaccgttttcaattaaataaatgacatgcttattatgttttttgtattataaataaggcaaaataaatgtattcggcagttaaattgtggcatcttgatggattaatgaagcaatactttcat

SEQ ID NO: 111542 - DNA, 329 bp, Glycine max
  Clone ID: PAT_MRT3847_71732C.1
attactctaaattatcattataattcaactatagaaggacccggggcaacacccaatcccaaacaacctaaacaagcaaaaaataaaatcttataggggcccctttgggggcaaccccccaaaacaaaactaaatattcttaaatggaaaacaaaaagggaaatgtgccggggcaaaaatcccaaagccccccacaaaaagaaccacttgggtgggccaacaaaaaatttaccaaaaccacccaatcccggaaagccactgccaaaaacatgcccgggtaaaaaagaaacattaccaagagaccccgcgccccaaaaggaaccgccaaa

SEQ ID NO: 111543 - DNA, 1649 bp, Glycine max
  Clone ID: PAT_MRT3847_71733C.1
ttgaaatcctggccagagcagctttattagatagcaatagcatattgcatatttcttggtttctcctgttgcagcggaccatgatttagtagtgtttatgccacgcgtccgcgagagtctggcgttttgcgtgtctgctgtctaaagatggagttagactgttgaataacagatggagggacaatgacgtctgaatcaacgcatctccaccgtccacgtctcagaatcaggttcagttccggtccctcttgcaaaccaacgatctgccactgtgatgtaactcggaaagttaacgaagaaccattcggtggaaatcggcgacgaacgaagatcatcatcaacaacctcacaccctcatcaattcaattcaattcttcgccctataaaatcaaaatccgttacatcacttttcacatccattcctaacctccccaacctgacaattacacgtttctttcagagaagctgacatgccttcagtttacatgggagataggatggataattctaactcgagcttgagttctaattctaaagaaagcagcgttgttgttaatgggaaagaaacgtacaaaaaacttctggttgcatcacggcctaaaggctttgcacagagaaattatgaacaccttgtgtcattaacccatggtgactttggaagcagtgctgtgggacgtgtcacgttttttctactaaaacttgctgcattagaaaccgtgaggagattctccaggagtaaatgtccgtgtgtatggcgaggcctacagggtctccaaatccttgtctatccaccattcaaatggattcagaggtgggcacccttcaggggtttggtgaaaagcatgcaggtactatcaagacctctattagtcctttctattgcaaccgtctttactgatcaaccacaatgtagtgatggaacctcagattgtgttgcttcgcatgattctgaagcatccgccgaactatctccagcagaggctaatttgaatacaagtcattgtgagatagatcctgaagttttagaatatgaaaactggttgactctactcaatcaagagctggaaaatcaagggattagtttgccagaaagaatcaatgatgatgagctccacagattttacacagcttctaataatgactcttcatgcttccttacctcaatcaagaagacaataagttggcgggacagttacagatttctttcaggggaagagctggaaacgtggtcaaatatggttttctggcatggatctgatttttcgcacagaccttgcctcattgtaaggcttgggatagcctgtcgctctttggcatctgaagatagacttcaatttgctcaggcagttatatcacaggtagaatacggagtcttgcacttggttgatgcaagcaaccctcaaattacagtattggtggattgtgaagggttatctctggtgaatactcctatgaaaatgttgggatattgttcctcccttctgctagaacactttcctaatcaacttggttgattgtttatcatccgacttccagcaattgttcgtgttattgcccagactgttatgcaggttttaaagccatctactaggaagaagttgaaagttaggaggagagggatatatgaggtactgtatgacagtatgcaa

SEQ ID NO: 111544 - DNA, 510 bp, Glycine max
  unsure (1)..(510): unsure at all n locations
  Clone ID: PAT_MRT3847_71734C.1
cgtggctctgtcacatggatgtgctcattgcagctgcgaacaaacgcactgaattcgtactctgtttactctgcantgagagctgccacctctaccgcatttcagaagggaatgatttctttgagacgagtctgatgctgatgacttcattctgctggagaagtatcttgagatgctggccaaggtgaagacttctgatgcgatcgccaagctcatgaacttgacaccgcacacgggggttctgatgactctggacggtgatggtagcgtctttggagaagaagaaattgatagcacgtaggttcagaagaaccatgtgattaaggctagccctgtggcaaaaggggctccagatggatttgacgtgtggggacataatcacagtgaacgacagcatgaattcgggagaagcccgacccgtggcgaagaggaagggagacactgttcttgtagggactgtaaatgagactggagtcttgcatgttcttgcaacaagagtgtgatcagaga

SEQ ID NO: 111545 - DNA, 327 bp, Glycine max
  unsure (1)..(327): unsure at all n locations
  Clone ID: PAT_MRT3847_71735C.1
aantngaacanacacgtacgcgtnngtngntcagagtnctgntncgtcgtntngttnnaaacaagatgagtgcacctgaacnatgtgtccaccnttnatntntttgnccnctngtctctgcncnngctcagcttccnaanaattcctcaattgcttattccatncaccccncnatgtnnnanagggtnttgaanttcccagtgcccgtggagcattgtttaatntgtgagcaanntnaagnngcgnntgnngtaaanggngtatantgtccatcnngttatnagaaaggntcggttctannggnagtannngcattagaagngnntc

SEQ ID NO: 111546 - DNA, 1791 bp, Glycine max
  Clone ID: PAT_MRT3847_71736C.1
tctcgggcccccgctccgcgacgccgacagtcgcgaggtggggagtgacacattcagctgcacaaagaatcccaaagtagagaaacagcacactctcacctcactcacttgtccttgttatatttgttttatattttgtcacaatctgtgactgttcgagttatccgaggcccctcttttatatggtcgttgataaaatggcttcgacccttttaacaaagatgcttttgggccaccgattgatacacccttcttcgttcctcactcaccagccacagattctctcttctctattcagtaaacggctgttttgtatacgagctgtcccggtctcagcctctacatcccaaaacatcaaaacaactggttgggctccttgtatggcttcttcctcagttggtagaagagctacatattcaacacaatctgtatcgacaaatgagccagttgtatctgtagattggctttatgataacctgaaggagccagatatcaaggtactagatgcttcgtggtacatgccggatgagcagaggaatccaattcaagaatatcaggttgctcacattcctggtgcccttttctttgatgtagatggaatagcagatcggactacaaaattaccacacatgctgccatcagcggaagcgtttgctgctgctgtttctgctcttggcatagagaacaaagatgatttggttgtttatgatggaaaaggattatttagtgcagctcgtgtttggtggatgttccgagtatttgggcatgacagagtttgggtattagatggtggcctgccgagatggcgtgcatcaggttatgatgttgaatccagtgcttcaagtgatgctattcttatataaaggccagtgagtgaggctatagagaaagtatataagggacaaacagttggcccactcacatttcagactaaatttcagccacatcttgtttggaacattgatcaggtaaagaaaaatatagaggacaaaactcaccaacacatagatgctcgatcaaagcctagatttgatggaactgtacaagagcctcgaaagggaatcagaagtggtcatgtacctggtagcaaatgcatcccttttgcacagttgttagatagttcacagacattgttaccagcagatgagttgaagaagcgatttgaacaagaaggcatctctctggaaagcccagctgtgacttcatgtggaacaggcgtaactgcttgcattcttgcattgggtcttcatcgtcttagaaagtctgatgttgcagtttatgatggatcttggactgaatggggagcacaatcaaatacacctgttgacactttatgaattcaatacagctaaatttgcatgccaccaaaaagtatctgcaagtgaaggggctgttttcatttgtcaaacattttgaacacaccaatttttgtatgctttactgtttgttgttttggtttagttgtggttgagattcttgagaattgctaatatgttcaaatgttactaatattaaatcctatcatgtggcttataaaaataatgatagggttgttcaaaaatgtctcatagaaatgggaaatggttgggtttgttaaaaattacaaaataaaatttaagatcatatatcacacacttatgcactaatgattaatcagtgctgttgggacactgttttggggtgtgtttacccgtggaaacttaatccacacgtgccatcttgatagaaatttgaatgagacaattgttactcaatgaaaagttcttgttatagtctgatttgactataaaa

SEQ ID NO: 111547 - DNA, 102 bp, Glycine max
  Clone ID: PAT_MRT3847_71737C.1
atcattcacaaagcttcattcttcatagttcagagttcagatccattcttgtcctatgtgctggttcgtcttgccagaggtctctttaaaattgtctatcga

SEQ ID NO: 111548 - DNA, 479 bp, Glycine max
  unsure (1)..(479): unsure at all n locations
  Clone ID: PAT_MRT3847_71738C.1
gcgagagcgtacacatacacacttttcacgtagcatggtcccacacaatgattcgagtcccactcttctgttataccccatcccggagtccttcccaacttgtgcgcagggtcctctcataatcnttcttcttcttcctactacttcaatggctacctatccgccgcagcaccaccaccatcaccatctcctctgctattcaaaccctaaccctacttaccctcaccctcagcccgctcttctcatcttttcccttgggaccatcttcaacagcatcacttaatagctcaagaatttcaccacccgcatccctcacgttctacccgttttcgaccatcgatgaagcactgatgacattgttcgtgttctccatgatcctgctgatacatacataccatccatgtgcctgaggatagctgatcagaataccgtttaagctctcgcacttcgtaatttgctagggcatcgtctaccacttg

SEQ ID NO: 111549 - DNA, 843 bp, Glycine max
  Clone ID: PAT_MRT3847_71739C.1
caatttgcaggcgttcaattatatggtggaccaagagccagtaacttattaaatatttctgaaacacactctttccatctggagtatagctcactggcttgtacagttgaaattgtagatgatgtatttgctgccattgaccacatacatcaccatggaagtgctcatactgaatgcattgttgcagaagactctgaagttgccgaaactttcttaagtcaagttgacagtgctgctgtattccacaatgcaagtacacggttttgtgatggagcacgctttgggcttggcgcagaggttggaattagtacaagtcgaattcatgctcgaggtcctgtaggagttgaggggttgttgacaaacagatggatattgagagggagtgggcatgtggttgatggagatcaagggatcaattacacttacaaagagttgccactaaaagcataactttgcatgcagaacttagctcactttcaagctataacatgctcacctcaacaaagcagcatcacttttctgttctgttatgatatgcagaagttgctgagatgctggccatgtataatcgtaactatcacttgaccctttccagggcctttttcttacctggagcaagctcaaggggggaggaaataatcgtaggaatgctactgtttgattatacttttataacatattccgagtttgtaaaacagcaatgctgtgacagttacaaatattattcactacgtactagtgaacttgaataattacggagaagttattattatagagaattcaatttgttttgtgcaaaattgttgttagtcaagtgctgattctgctgcaagagattaattc

SEQ ID NO: 111550 - DNA, 300 bp, Glycine max
  Clone ID: PAT_MRT3847_7173C.1
atattggttattttgttttttcttttaaaaggaaaaagggaaaaaccgataaaaaaggaataacttaacggcccccaccaagggacaaaatggcttcaataaaaaaaaaggtgaaaagggcttttgattttcgcccgcccaaaaatttttcaaaaaaccttttatcctttcaggggaacttgaaaaggggcaaaatgcttttgggaacgggggcaccaaaaggacctatgagggttatgattgggccaacccctggtaaaagagttctaacaaagaaacccaaaattgccaacaaaaaca

SEQ ID NO: 111551 - DNA, 363 bp, Glycine max
  Clone ID: PAT_MRT3847_71740C.1
aaccgtgcatgctgattgaaacacaccaaggacccttacaaaattcattggatggaaaggtcatcatgcaccccccattaatctgatagaaagactgcttgccatggggtttttgcactgtgagggtggcattgggatgattgatcccttccctagctagagtttttattcaaccacttaccaaagaaactacctgcttggtgcaacaagacactatgtacctcagaaaaaaaaaccctctcaaacattaaattaaactggacattttcccttttaacgttcttttactctgttggaccctttgaagccgcaactgtgacctactcatttttctcagcctaagtttttacaaacactgccttc

SEQ ID NO: 111552 - DNA, 325 bp, Glycine max
  Clone ID: PAT_MRT3847_71741C.1
ggctcgagctacagccgaatgggttcgcgctcaaccctattatgcttgaggaactgccagacaggctcaccaaactgttcatacagaagcgcggatgaaccatccatttcaaccggaaaatcatactgccagccataagagcaatacatggaaaatgacagatcttggaatcatcggtaatccattattaatggaagaaacattaatcggagatactgagtaaaccattaattggctattaaataacctttattgaaaggattgagcatcattaatgcactatgaatggaccatgattcccagttttgcccataattactttgtt

SEQ ID NO: 111553 - DNA, 452 bp, Glycine max
  Clone ID: PAT_MRT3847_71742C.1
tcctcctgcttgggggggggggcgggcaggggggggttaagaaagaaggaaagatgtaggctgatcacaacgttagggagcaaagataccaggtaacagaagttatggttattaaaaaggttattgagagcaagttacaagttctggctgcgagcatatggtagcgttgaacagaagtggaggtgttgaaagatagaggcaaacactatcgtgtcgggtggaggcgtaagggataaatgcaccagcatgctagtatagcaggggactgatgtagtagatggcagtaaaacttatgttactattaagaaaccagaggaagcacagatgaagcaagtcaatacatgaagagcacaatatgtcccatcggctaatttgctcagctgacatgcgcgtggataagcccaaagaatataagcgggcactaaatgattaaagtggtaagtaggaagtag

SEQ ID NO: 111554 - DNA, 591 bp, Glycine max
  Clone ID: PAT_MRT3847_71743C.1
gtacgctcggaattcggctcgagctcgagccgaatcggctcgagaaaaaacagaaacaaactcccatcatttcttcacttctttctgttgttgttgttgttgttgtccgtgttcttcttctggttggtctcacaactgaaccacccaaaactcactctcggatgcattagacaacaatggaggattccgagaaattgacggcgttgaagaaggcctacgccgatatcatcctgaacacggcgaaggaggcggcggcgcgaatcatggtgtcggagcggaaagtcacgcgctttcagcaggaacttgtttccactaaggaagaggcgcttcggatgcttctcagactcaaacaaatgttcgattctaaggtcagtgaagcggagctgatgtcattgaatcagcagaagaagattgaggagcttgaagctcagctccaggaagctgaggaaatagttagagatctaagggcagagttgagagaaacccatgctgagctggagaatgtgacaaaacaccaaatgcaacccctagttgaacaaaacacaaaggctgaagttgcagctcaggaaaggtttctgcaaaagaacagac

SEQ ID NO: 111555 - DNA, 538 bp, Glycine max
  unsure (1)..(538): unsure at all n locations
  Clone ID: PAT_MRT3847_71744C.1
gagcnttgacgncgaaagcacgggggcggaagcacggaacccggcncgagcaaacccccagctttactgtaaaggagaacccccaggggggagggggagagcaaaggcgatgcacgagagtggggaacagaaggaagtctccaaagagcaaggaatcgagacaaccaacgaagcaaaagagaaagaaacaggaaacggcaaaggaggcatcacaaaaactactgaccagaggacaaccttaacctcccgaccggaaagcccgggaaatccaagggcagataagccgggaacgaaaggaaagccagacgaacctaagagagaggccagaaggaagggagcagaaatactccagcaagaaaaagagcccgacgagagactcgacatacttacagaagaagaagcacgccaagggctcaagaggaacccaaacaggaccaggcaaccccaaccgggataaagggggagcccaatggaggggcagaaagtgtgggggagaagcaaaaaagcggagaacccaggaagaagtaacacgagaaag

SEQ ID NO: 111556 - DNA, 1443 bp, Glycine max
  Clone ID: PAT_MRT3847_71745C.1
atatctatacaatgaaattaattggaatccctaaccagttcattagaagaccgagaacgatatcgcttttgtcaaacttggtgtgttaatggagtatttgatacttgagtccctaatttaatttgctagggaaagctacggttggaccaaaatcaaccagtacctacttgaaaccgagtgaaaaaacctactactcccactcccagtgactgagtgaaaaaccacaacctagaaagaaatgaagaaaatacagcactctgaacaaaaagcaacggaaccaaccaaaaaggattcaaagggcaacaaacaagaaggcacagactcagagtcagagcaataccaaaacgaagaaaatcaactccacacgctttcggaaccatcaccatccttctctctccgttcccgcaaatccccttcgccaccactccactccctctctgactcccccatctccgatgcccacctctcccctgcgccgcagaagccgccgcccgattcctcgccggactcctcgatctccgacggccacttcacgatcggtgaacagcgcctctccccggcgccgccgaccgtggtgacggctcatcggttgaaggtggagcccgcggtgttgaccagggtcgatcccggcgccgaagagggtttcgtgaaagacgtcgaacaagccaccggcagcgccggtagtcgacgcctcagaccggatatgaccggtttgttgaggtcgaaaaaaatcgccacgtggagcaagctcttgctgggtcttcgagtaaccgcttttgttttctgcttggcgtctttctcggtgttggccactgataagaaacagggctgggctatcgactctttctatttatacaaggaattcaggtatagtttgtcagtgaatgttattgggtttgtgcattccgcgttgcagatatgtgatcttgggcggtactttgcaacgggaaagcacttggtggagcaccagctaaggggttatttcactttcgcgctggatcagatcttgacataccttctaatgtcagcatcatcatcagctgccactagagcttatgattgggtttccaattggggtgaggacaagttcccctacatggcaaatgcatctgtggctttgtccttggttgcttttgtggcctttgccttagcctctcttgtctctggttctattgttgtaaggttcacataatttatacaagtactatgtgtgaggtgtgcaaactcttatctgagatactggattaagctttatcctttctcgattgaaaatcgtcccatattttcagaaggcagactgactcactttgtacagaagggaaactcactttatttctctgtcaactttaatttgtatagatgcaggtggatttacagcttgctgaactggcttgtatatgaacttttgcattattgagatggtattaagcttacttttttatc

SEQ ID NO: 111557 - DNA, 486 bp, Glycine max
  Clone ID: PAT_MRT3847_71746C.1
gggcccaaaaccaaattccggccattacctttaaaagggaactaaaccccaaaaaaatttttaacccgggcccctccctttcaatttcgggcaaaaaaaaaattcccaggaaaacccttaaaaaaaaacaaaaacctttttggtaaacccccccaatttcacggtaaaagtttttcaaaaggcccacaaaaccaactttggaaaaaagggttaattcccccccaaaccccaaaaaaaaaaaaaaaacttttacaatataaccaaaaggaccccgcccaaaaaaaaataatctttttttttgggcccttctaaaaaagaagaaaaaaaaggggcaaaaaaggttggggggagggggccacccaaggggggggcccaattgggaaacggcccccttccaagggggggagtttggtccgtaaaacccaaaaaacccaccagtgggaaaacgggcgccctttaacccccccaaaagaaagggggcttttt

SEQ ID NO: 111558 - DNA, 352 bp, Glycine max
  Clone ID: PAT_MRT3847_71747C.1
gcagatcttcattaagaccctcaccaacaaaactattaccctataagtcaaaagctccaacaccatcgacaacatcaaagctaagattcaagacaaagaaggaatccccccataccagcataaactaatcttcgccgaaaagcagctcaaagacgaacacacccttactaactacaacatccagaaagagtcaactctccacttagtattacatcttcgtagtaatatacagattttcataaagactcttacgaataaaactattacgcctcgaatagagagctctgacaccattgacaatatgaagaccaagattcaagacgaggaaagcatgccaccgggaccagcgaaa

SEQ ID NO: 111559 - DNA, 382 bp, Glycine max
  Clone ID: PAT_MRT3847_71748C.1
accacgtaagctcgcaagagctctcgagaacgagggtgtaatgtctggacctatcattcgtaatttctctttattccatgtcactgaacaattaacacattaacaagaacaagaacatgacatgggcggacatattaatggacacagtcttaacaatatccatgtaccgaacatgtatgacagggtgcaagtgtactactgcatcaagatggcccatttcccgagttggagttagtttgagttggatgagcttgtccttggagccatgcgcactgtaggcatattatgattctgaataggagaaataaaagcatctacttctgacctgtgtccaagacacgccaaggggcctcttatcaacttctgatcaacgctcttgtta

SEQ ID NO: 111560 - DNA, 696 bp, Glycine max
  unsure (1)..(696): unsure at all n locations
  Clone ID: PAT_MRT3847_71749C.1
aaaaacaactcttcgcctaataattaattaaatttagctaaattaaattacaaaatgcgtatactccgctcttgcaagatgaagtatcaaatttttccaagtgatgatgatatgaggcatttaaccattcattcatagagtgtttttgcagattgtactctactttttttgctttcattcttcgacagtttctcaattgacttctcattagcggataaagcctttgctattgctttcatctttcggacattttttgatctcttcataggccttcctttctgcttcatcttcctgttttacaaaatgtcaagttaaaaggtagcagtttagaacaagtagatattaaaggagcagacacttctatataagaaagcaaatagaatgcagtcctaatggttagagagaattaatcttgcatgtaaataaattcactctcgaggtataaaactgttttatcgagttaagatctctaccatacttgaggacataggtaacaattaacacatgacccacatcaaaacgggagccaacagagcagaaatatcaaagaaaggagaatgttaacaaatgcttttatgacactggttaaggaaacaaaaatagaaacagttaatggaaaaaaaaaacatttattatacttaaagcacanatcatttaatacttactttttttaagtaatcgagagctaatanaatc

SEQ ID NO: 111561 - DNA, 466 bp, Glycine max
  Clone ID: PAT_MRT3847_7174C.1
atggggaaagctgggacgcctcgcgggtcccggttcgggattcccgccacgccccagtcgtacgttaaaaactaattccaacaagactgcgaagggaatgcgcctgtatctattttgtgacaaagtgctttgcagcttgactacattggataagggactgttcgggccaaagcatgacggatatgagccttacgttggctgtcaaaaggagtacgagctggactttaggacgttgcgctacgaaaacatttgtagcgaggtgacccacactgaggctgtatacagtagacaagcagcggtgaggaccgacaagctggactacggatacttgaggcggagcctgctaaggctgtggcgtgtctgcactgtgatccacagggacctcctggccagaccggagggtccggctaatacggtgctcaggacaacaacggagcgcccggtattgcgagaacgccctgacctt

SEQ ID NO: 111562 - DNA, 207 bp, Glycine max
  unsure (1)..(207): unsure at all n locations
  Clone ID: PAT_MRT3847_71750C.1
tttactcgcatgcacgctcttcacctgatcctcttagcggccgagagcgttcnnttttttttttttttttttttaatttttaaaaacgtttatatataatcacgattttaaaccacagaatatgaaaataattgcattnnntgatgccagcttggtatagcaataccataatataaagctaaatggacataatgttgaagtgtagta

SEQ ID NO: 111563 - DNA, 406 bp, Glycine max
  Clone ID: PAT_MRT3847_71751C.1
tacggctgcgagaagacgacagaaggggataaaagagtgtttgatactaaagatgttgaggctaaactaaagcaatcaaattgagattctttaaacaaatttactaagttcttatcttagatttacttgatcttgttcttttgacttgattcaatccatgctcatcaagtaacctttttggcatcatcaaaacttgcatgatatacattcacaaaaatatatattagatcagcatgacgaaatacaattcacgatttcgaaggaaaaatatgtatttgaccaaattcactttgcacatattcaggatttcaaaaactcaaagttcattgcatcatgatatgtcataaactctcaaagccttaacttattacaatgcaagaaaagatgtctcactccttcttacctc

SEQ ID NO: 111564 - DNA, 3029 bp, Glycine max
  Clone ID: PAT_MRT3847_71752C.1
agaaatgctaatgtgcggtcacgattgagagatggttttggcccatcagtagctcacgtttgtgcctatcatggtcaaccagattgtatgcgggaattactattagctggagctgatcccaatgcagtggatgatgaaggtgaatctgttctgcatagagcaattgccaagaagtacacagactgtgctcttgtgatattggagaatggaggctgtagatcaatggccatcttgaattcaaagaatctgacaccgttgcaccattgtgtggcaatatggaatgttgctgttgtgaagagatgggtggaagttgctacttctgatgagattgctgaagcaattgacataccaagccctattggcactgccttgtgcatggcagctgcttctaagaaagaccatgaaaatgaggggagagaactggtgcggatattgcttgcagcaggagctgatccatctgctcaagattcccagaatgggaggacagctttgcatacagctgctatgactaatgacgtggacttggttaaggatgatgatggtgacaatgctttccatatagcagcagagacagcaaaaatgattcgtgaaaatcttgactggcttattgttatgctaatgaagcctgatgctgacattgaagttagaaaccacagtggcaagacactacgtgacattttagaggctctcccccgagaatggttatctgaagatctgatggaagcactcgtgaataagggagttcatttgtttcctacaatatttaaagtgggagactgggtgaagtttaaaagatctgtcacaactccaacacatggatggcaaggtgctaaaccaaagagtgttggttttgtgcaaagtgttccagacagagataatctcattgtttcattttgttctggagaggttcatgttcttgcaaatgaagtcataaaagttgttccattggataggggacaacatgtacacctgaaagaagatgtaaaagagcctagatttggttggcgtgggcagtcacgtgacagcattgggacagtattatgtgttgacgatgatggaatcctccgtgttggatttcctggagcatccagaggatggaaagctgacccagctgagatggaacgtgttgaggaattcaaggttggagactgggttcgtattcgtccgactcttacatctgcaaagcatggactaggatctgtgacaccaggaagcattggcattgtatattgtatccgaccagacagtagtctgttaatagaactgagctatcttccaaatccatggcattgtgaaccagaggaggttgagcacgttgctccttttaggattggggaccaggtatgtgttaaacgatctgttgcagaacctagatatgcttggggtggtgagacacatcatagtgttggaagaataagcgagattgagaatgacggtctcttaataatagagataccaaatagacccataccatggcaagctgatccatcagatatggagaaggtggaagatttcaaggttggagattgggtaagagtgaaagcttcggtgtcttctccaaaatatggatgggaggatgttaccaggactagtattggggtaattcatagcttggaggaggatggcgatatgggtgttgctttttgtttcagaagtaagcccttttcttgctcagtcactgatatggagaaggttcctccatttgaggtgggccaagaaattcatgtgatgccatctgttactcagccacggcttgggtggtcaaatgaatcaccagctactgttggaaaaatattgaaaattgacatggatggtgctctcaatgtgagggtcactggtaggcagaacttgtggaaagtttctcctggagatgcagaacgggttccgggatttgaagttggggattgggtacggtcaaaaccaagcctgggaaccagaccaagctatgactggaatagtgttgggagagaaagtttagctgttgtgcatagtgtacaggattctggatacttggagttggcttgctgttttcgcaaagggaagtggatcactcattatacagatgttgaaaaggttcctagctttaaagttgggcaatatgttaggttccgaactggtttggttgagccaaggtggggttggagaggagctgagcctgaatctcatggggttataactagtattcatgctgatggagaagtcaggttcgcattttttggtctgccaggattgtggaggggagatccttcagaccttgagattgaacaaatgtttgaagtgggagagtgggtgaggttgaactacaatgcaaataattggaaatcaattgggccaggtagtgttggtgttgttcaaggaatagggtatgaaggagatgaattggacagaagcatttttgttggattttgtggggagcaagaaaagtgggtaggaccaagttcccatcttgaaagatttgacaaactctttgttggacagaaggttagagtaaaacaatatgtaaagcaaccaagatttggatggtcagggcatacacatgctagtattgggactatacaagcaattgatgctgatggaaagctccggatatatacaccagcaggatccaaaacatgggtcttggacccatcagaagtggaggtggtagaagagaaggagctctgtattggagactgggttagggttaaagcatcaatttcaaccccaacccaccattggggggccatacatgtattgatgttaataaacagaaggggtggaagaatggaagctgtggagataggaaaactgtcttgctgaccgagtggtggagatttaaaggcagctaaaataaatatattggcagttggcccatttatatattcattactcacaagtttgtagtcccagattttgaggtttatatcgtatgtatgtttatttcatattgtacaaattgtattcaactgtcaacttaatgcatttttttgactcgattatgcagttgcataattcttgaaatagaattgattccattatacagcttgtgc

SEQ ID NO: 111565 - DNA, 3708 bp, Glycine max
  unsure (1)..(3708): unsure at all n locations
  Clone ID: PAT_MRT3847_71753C.1
agaaatgctaatgtgcggtcacgattgagagatggttttggcccatcagtagctcacgtttgtgcctatcatggtcaaccagattgtatgcgggaattactattagctggagctgatcccaatgcagtggatgatgaaggtgaatctgttctgcatagagcaattgccaagaagtacacagactgtgctcttgtgatattggagaatggaggctgtagatcaatggccatcttgaattcaaagaatctgacaccgttgcaccattgtgtggcaatatggaatgttgctgttgtgaagagatgggtggaagttgctacttctgatgagattgctgaagcaattgacataccaagccctattggcactgccttgtgcatggcagctgcttctaagaaagaccatgaaaatgaggggagagaactggtgcggatattgcttgcagcaggagctgatccatctgctcaagattcccagaatgggaggacagctttgcatacagctgctatgactaatgacgtggacttggttaaggttattttaggtgctggggttgatgtgaacattcgcaatgtgcacaacagtatacctcttcacttggccttagctaggggtgcaaaggcatgtgttggactgcttcttgatgctggagcagattataatttgaaggatgatgatggtgacaatgctttccatatagcagcagagacagcaaaaatgattcgtgaaaatcttgactggcttattgttatgctaatgaagcctgatgctgacattgaagttagaaaccacagtggcaagacactacgtgacattttagaggctctcccccgagaatggttatctgaagatctgatggaagcactcgtgaataagggagttcatttgtttcctacaatatttaaagtgggagactgggtgaagtttaaaagatctgtcacaactccaacacatggatggcaaggtgctaaaccaaagagtgttggttttgtgcaaagtgttccagacagagataatctcattgtttcattttgttctggagaggttcatgttcttgcaaatgaagtcataaaagttgttccattggataggggacaacatgtacacctgaaagaagatgtaaaagagcctagatttggttggcgtgggcagtcacgtgacagcattgggacagtattatgtgttgacgatgatggaatcctccgtgttggatttcctggagcatccagaggatggaaagctgacccagctgagatggaacgtgttgaggaattcaaggttggagactgggttcgtattcgtccgactcttacatctgcaaagcatggactaggatctgtgacaccaggaagcattggcattgtatattgtatccgaccagacagtagtctgttaatagaactgagctatcttccaaatccatggcattgtgaaccagaggaggttgagcacgttgctccttttaggattggggaccaggtatgtgttaaacgatctgttgcagaacctagatatgcttggggtggtgagacacatcatagtgttggaagaataagcgagattgagaatgacggtctcttaataatagagataccaaatagacccataccatggcaagctgatccatcagatatggagaaggtggaagatttcaaggttggagattgggtaagagtgaaagcttcggtgtcttctccaaaatatggatgggaggatgttaccaggactagtattggggtaattcatagcttggaggaggatggcgatatgggtgttgctttttgtttcagaagtaagcccttttcttgctcagtcactgatatggagaaggttcctccatttgaggtgggccaagaaattcatgtgatgccatctgttactcagccacggcttgggtggtcaaatgaatcaccagtccgctgttggaaaaatattgagaattgacatggatggtgctctcaatgtgagggtcactggtaggcagaacttgtggaaagtttctcctggagatgcagaacggcttccgggatttgaagttggggattgggtacggtcaaaaccaagcctgggaaccagaccaagctatgactggaatagtgttgggagagaaagtttagctgttgtgcatagtgtacaggattctggatacttggagttggcttgctgttttcgcaaagggaagtggatcactcattatacagatgttgaaaaggttcctagctttaaagttgggcaatatgttaggttccgaactggtttggttgagccaaggtggggttggagaggagctgagcctgaatctcatggggttataactagtattcatgctgatggagaagtcagggtcgcatttttcggtctgccaggactgtggagaggagatccttcagaccttgagattgaacaaatgtttgaagtgggagagtgggtgaggttgaactacaatgcaaataattggaaatcaattgggccaggtagtgttggtgttgttcaaggaatagggtatgaaggagatgaattggacagaagcatttttgttggattttgtggggagcaagaaaagtgggtaggaccaagttcccatcttgaaagatttgacaaactctttgttggacagaaggttagagtaaaacaatatgtaaagcaaccaagatttggatggtcagggcatacacatgctagtattgggactatacaagcaattgatgctgatggaaagctccggatatatacaccagcaggatccaaaacatgggtcttggacccatcagaagtggaggtggtagaagagaaggagctctgtattggagactgggttagggttaaagcatcaatttcaaccccaacccaccattggggggaagtgagtcattcaagcataggggtggtgcatcggatggaagacgaggatctgtgggtgtcattctgttttacggagaggctatggctttgtaaggcatgggaaatggaatgggttaggccatttaaagtgggggacaaggtaaggatcagagacggactggtgaccccacgatggggatggggaatggagacacatgcaagcaagggacaggttgtaggggtagatgcaaatggaaaactgagaataaaattccggtggagggaagggaggccctggataggagaccctgctgatcttgcccttgatgaggactgatatgttattttaggaacatggaaggttgtatcataagtaaattttctcattcagctctttagcctatgtttttctgggctgagcttgtgcaaagtggaaagctatatatgcggtctgctacttgatgtgctctaaaccataactcctttatgaaggttgaaatgcagtttggccatacatgtattgatgttaataaacagaaggggtggaagaatggaagctgtggagataggaaaactgtcttgctgaccgagtggtggagatttaaaggcagctaaaataaatatattggcagttggcccatttatatattcattactcacaagtttgtagtcccagattttgaggtttatatcgtatgtatgtttatttcatattgtacaaattgtattcaactgtcaacttaatgcatttttttgactcgattatgcagttgcataattcttgaaatagaattgattccattatacaaaaaaaaaaactaaaaaaaaaaaaaaaaatnnnnnnnnnnnnnnnnnnnnnnnnnnnnnnnn

SEQ ID NO: 111566 - DNA, 422 bp, Glycine max
  Clone ID: PAT_MRT3847_71754C.1
gcaatagcctcatcctcttcaactcagagagagcgaaacgaagcgtctaaggttaaaaaaaactaaaaagggaaccacaaatactaccaccagctagcagaagttcagcaacgaaggtcatatattagatggcaataacaccttttagtagtacatctgctgcacaatggggaattcatcctcagctgttactaagatccagtatcacgggcaaggttgcatcatccagccacaattctactggcagggtaagttttatggctgcaacaagttcaagctttttttctcaagattccacactactcaatgtgggtgcaccccaaacttttaatcatcgcaagggatcaaggttaattgttagagcaaatgctgattattattctgtccttgggggttcaagaaatgctagtaaatctgaaatt

SEQ ID NO: 111567 - DNA, 3987 bp, Glycine max
  Clone ID: PAT_MRT3847_71755C.1
tctttaatatttacaggagcgacctgcactcattgtaacttttgtggacctcgactgggaccatcccgcctggttggaaatgcgcgcagaatgtgaagccaaaatcaacgcaatgagacagaaaattggtcagcgggagacaaagttagcactggtgttgatccaacctccaaaggcaacatccatggacgacccaatagcgaatgaaaaagcgcttgaattgtgccagcattgtcgtttgaactcacgtcttttgttcgtttttccccgcctatctgatgatcgggctctaattgagcgagtcaatcgcttagagaaggcttttcacaatattgcacaagagttttatcatgcttgtttcaaaagaattcggtctcggaatgtgccgaataatgatgcccattttctagtcagacaacagtacaaactggcattcatttcggagctccgtgaggaccggcattctgctcttcggtacatttgtctgctgagctatttgccatgagtttgacgtgtcggatgttgatgtttacgagcagtgttcagtcgcgagtctgctcaatttcaaaatatgcgaactgaactttgtgctaaacagcgccgttgaagccatcaatcagttcaggcgacaccacaacttctttttcaagcgcgagtcggccttttacccaagccgagagttggctgctattgaactgacttggtggaaggcacaacagtgtcgactttttgctgaactgttcagccgtgcggtttccaatggactcgcggcctatccttcacaaaatccaggccgtttcctcggcgaggcggcgacccattacaaaaaggccaactctttgattagaatattaaagtcgaaattggccgcagcaccgcaacaaagacagaaatcgctgttggccggcgaccctctccaatcattcgacttttccatgacaaccacatattacgggcaaaggccatggcgaatgacaacgcagttgagtgattcaacagcacaaaatgtgacaaaattaccactgttgagcagtgtgaaccttcaactattggaacacggtgccaagctgtttctggagaacaacattcatgaaaactatgcccattctctgcaattgctttccgcggctgttgctcaatgtaagcgctacggttgcgaaaggtttgccaatttgtcgctgtttgacatggccgaggagtgtgttgcctcgcaacagttttcaaaggctcttcaaattctccatcgtttatgcattgaggacacaagtgtgttattttatccatttttacgtgaagcattggtttcatttgccaatgccgctttttgttcgctaagtctcaacgaatggacgtgggcattgctccaacttctccacccgcaattggccaataaatccgtaactttgcgtgttttttctgtcggcgaaaatgaccaaagcatttggatggaaaatcttcggcgttttctattaggtgatctgaactttctaccgtttcccttaacgagttctgcaaacgatcatcgctcaattttctccatagaacagctgaattcattccaaagtcaatggcgccaattggttgcccaatcgtcttcacctctgcagttccaattggaaatgtccaacctgaactactcgcccattaagttcaacgctcgttttctcgttataaattcgtctgctaacaataagcgacaaacaaatgaaaaatttgcttttgacgaagaaatagccgacgggtttcaaattgcaactgccgatgactctcttctgatagaagttgtgctgtataatatttccaatgttccattgcgctttgaatattgttcattgactctggatgaaattttaaattcatccggtgccaaaaagtcgaaaacactgtccgaatggtctacggcgggaaattcgtcaaaaaattctacgttggtattggttcccaaaagaccaagccgcgttttctttatctacaaaactacatttgcaacatctcttaaacaattgatgcaattgccagcctcaaaggcaccgactagcagatgccaaagtccgttgatggatgaacagaatgccaaggaaattttaataacggtccgacacttttcattgcgtacatcgtccggatcactcagctgggacatcgatcaccgatcgacgagtaatagacatcaccaaaattcaattgaggagatggacaagaacaactatgcagtgaaggtgcgaccacaacggtgcaatgtgttactgacctgtccaattttggctgatagcaccgaattggaattatttgttgacgaatgcgttcaattgactttaaccctttgtaatgcggagcgcaacggaacactgctgaagaacatttggtgagcctggtacactttttccgatggcgcttaacttcacctaagataaattgatttcgttaaattttatgagaattgatcatttttttatcaaattgaaaaaaactattttcaaattgaactagtaattactctttacacttctataaagggtaatctgccacaaagtctgccgtgaggatgaagagttcgccaaccagcagcagaattcgcacacactaaactcattggcagcaacaaaatcaccaatccctggcgtcattcgacggacttttgttcttccgtcttgtaaaggccataagcaacagcagcaggtgtccataggcgacgaaaaggacggaaagacaacgacacttttggtgccaatgtttagccaggagctcgcttcattgcttgcgcctgaacaatcgactgacttctccattcggcttcaatccaaatctaacaattgcatttcccttcgcgttcaagtttgttgtacccttccttcaaaatcagaaaatgaaggtcaaccgttggaagagcctgccgaattggtgcagcactttcccatccgttgcgttgatcccttcgaaccgaaaatcgcaattttttgtgaaaatgcgagaaatcgaatttcatcggttacgtttggtctttgcattttagggaggaaaggcacaatgtttggtctttgggcaaaagtttcgggtgcaattacaactcaaatgcaacggaagagtggcagtgcataatgtacattggaaattgaatgacgcatttgaacatttcgacgctattcctttggattctttgataaagcaacacttcgaaaaactcaaaatttcatctgttgactcaagcgaattcctcaacacgcattctgtttgggtgaaagtaacaaatggcgacggccaatcgccaatgagagagacgggacaaagcaatggaggggacgacgagcaccagacacagctcggagacgtggtggtggagtggagcagcactctttcctttgaacatgttcgttccgtgttggcattgcccacaatgccacccattttggtcattccgatgacactaaatgtggaattggccaacgagaacgacggggaagagactaatgaagcgattagtggatgttgtttcagaattctgaaaccattccgcatcagatattacttgaggaacacttctgggggaccattggctgtgcatttaaatttcgagcagtctgctggcacttctatagatggaattttggaagatagttttttgtttttccccaatgatgagcgtgtcattgagcagtgcgttgtcccaatttcgctcggcttcgtcaatttcccaaaacctaccattcgctgtgtctcttccattcctgactatgctgatttggaattcggcagtgaggatttggaacaacttaatcatttgattatgaagcacactttcaattctgtgccgaaaagcttgttcattttgcctaggtgactgacaaatcgacaagttcccgatgttacaaataaaagggtgaccgtatcacgcccagattcagtgagacatgtgattaatgttgatagattgctacattatttatgttaaggtatttattttcatttatttgataaaagttttgaggt

SEQ ID NO: 111568 - DNA, 427 bp, Glycine max
  Clone ID: PAT_MRT3847_71756C.1
ctccgcaactcgcgccgctccgccgtgataacggctgctccagccacgacccgaaaccgccctgctacacacatgtacgttgcggatgggtgccgctccgctccgcctgacaactatgctacagacataaattacagtaggtaaaagtaaaaaaatacttatacctataattgtttgtcataagtaaaataaaaaaatacttatacctataattgtttgtcataagtaaaattcaagatttgtatctactcttatttagtgtagataaaactcaaaataatttttacttacaaaaaaaaaaaaaaaaaactcgactctcctccaccaccaccttacaagaagccttacatctatgcatcacctccccctccttaccactattagcatacctcttatcgatatgaagaatatgtgcaacgaataaaag

SEQ ID NO: 111569 - DNA, 1984 bp, Glycine max
  unsure (1)..(1984): unsure at all n locations
  Clone ID: PAT_MRT3847_71757C.1
ggctcgaggtgtcatcctataagcaaagcaaataagagtgctccatttcctacaacactgtaacctcatcctccaattcccacacccactccttcccacaacactgtagcatagcagcagtggctaagctagcaggatttcatcgagaaattttgtattttttggcatattatcttgctgaaaatatattagatggccattgcaccttttgggtatacatcagctactcaatggggaattcatcctcagctgttactaagatccagtatcacgggcaaggttgcatcatccagccacaaaatggtagtagaaaagaaactggggaatgctttcagtcctatctgtctttgagtattgctagatttagagggagaggaagaaagagaaaggtaagttttatggctgcaacaagttcaagctttttttctcaagattccacactactcaatgtgggtgcaccccaaacttttaatcatcgcaagggatcaaggttaattgttagagcaaatgctgattattattctgtccttggggtttcaagaaatgctagtaaatctgaaattaagagtgcaatatcaaagctctttacttttgatatttcagcatatcggaagcttgcccggaattatcatccagatgtcaacaaagaacctggtgctgaacaaaaatttaaggaaattagcaatgcctatgaggtgttatcagatgatgagaaacgatccatatatgacaggtttggagaggctgggcttaaaggttctgcaatggggatgggggatttcagcaatccatttgatctgtttgaatcactgtttgagggcatgaatcgtggcgcaggttccagaggttcttggaatggagcaattgatggtgaagatgagtattacagtcttgttttgaactttaaagaagcagtttttggcatagaaaaagagatagagataagccgattagagagctgtggaacttgcaatggttcaggggctaaaccagggactacaccatccagatgtagcacttgtggaggtcaaggccgggttgtctcatcaacaagaactccattaggcatcttccagcagtcaatgacatgctcttcatgcaatgggactggagaaatttcaacaccttgcaatacatgttctggggatggtcgggtaaggaaatcaaaacggataagtctgaaggttccagctggtgtggactctggtagtcgtctaagggtccggaatgaggggaatgctggaaggaaaggtggttcccctggtgacctctttgtagttattgaggttatcccagatcccatccttaaacgtgatgacaccaacattttatacacctgcaaggtttcgtatattgatgcaatcctggggactacaattaaggttcctactgtagatggaacggtcgatttgaaaattcctgctgggacacaaccgaacacaacacttgttatggctaagaaaggtgttcccttcctgaataaagacaatatgaggggtgatcaattggttcgtgtgcaagttgaaatccctaaaagactgagcaatgatgagagaaagcttattgaagaacttgctgatttaagcaaaggcaaaactgccaccggtaggagataagattttgctggaagctgcgtatctatccaaatatttgtacttcttcaaatattcttatttctcggatgcgtgattcttgattacacatttactgaggacaggttaacagctattttactctgggagggattaaattgtgttggcggaggttgcttatttgtccttggaaacaggagatgaagagcgaaagaacctacagatctgttttttcgttggaacttaaactctttttgtaatttattttagggtggggtgagattgaattatgatgtangttcaatgctatctttatttccaaaaaaatagatgctctgagaacaaaacaaataattatgatttgatcccatatatcgaaagagtatatattc

SEQ ID NO: 111570 - DNA, 503 bp, Glycine max
  unsure (1)..(503): unsure at all n locations
  Clone ID: PAT_MRT3847_71758C.1
ctcccccaaaggcagcatctcggaggagaccaagcagaagctgaagtcagccatcctttctgcccagtctgctgccaacgtgaggaaggagagcctatgccagccagccctggaggtcctggagacatccagccaggagtcctcgctggagagcgagacagacgaggacgacgactacatggacatttgaggggccactgcagccccaccgccacgccccaggggaccagccaggcctggaatgccccctgggcaggaccctgggcaggaccagaggcccacatggatgccactccccacacagcccccaggcctgcccagcccacctcctcatggcatcctccctgtacccaggtcaggctgtccacaccacatgggagcccagaggaggaggggcccgccttagccatgtgaaggtggattggtcgccatctgcacgccaggcggcatccttttctatgaagtgttgactntgtaaatctgcccacacccagctggccata

SEQ ID NO: 111571 - DNA, 489 bp, Glycine max
  unsure (1)..(489): unsure at all n locations
  Clone ID: PAT_MRT3847_71759C.1
tgcggattctaggccccctaagctaccaaagaagctttatatacggatgatagactaccctgctttcaattccattgggcttattatgggtcctccagtcacaccctanaacgctggagaaagtaaactgctgctaaaaacgggattcaaggtatgggatcggtgaatgagggttggcttacgcagcaagaggggtttgaaacctgaccctccagataatgaaaattagcttgtgttaggtgaagaaaacacgccgacgtcacttgaggctgctgcgggtctggtggagaacctctcgcaacctgaggatgaggttttgattgatcataagaggcctcagttcatggagcttgctgcgtaaaatgggacgagcactgatgaggattatggccctttgcgcattgaccctgctaatggacagaatgcgtgctctactaggacgtggtgggacaagagagaaactggcccaagcacattggggatggtggg

SEQ ID NO: 111572 - DNA, 432 bp, Glycine max
  Clone ID: PAT_MRT3847_7175C.1
aagaactgacgatcaaatgatttgaccttcaggaaagacgtacaagtcaaagaattgcagatttcagctcgagtttgctacatttaaactatacacattgaagtctcaatcttctagaacgctgaatgaagtatttcttgatcatatgaacatataagggacgtttacatcattcagtaacataattgaccccactaagcacgaggccagagggtgtgaagatgatcagatgcatcccacggctgctgctttcctctccaattgaaacggtggcaagggacttggaagcccatgctctagcattcattgctccttcctgcagattacgtctcttgcatggctctttcaaacagttaaatgactgtgttaggcgcttcaaataaaccaaaagatgttcaagcaagctccatattctaatattttggatgaccc

SEQ ID NO: 111573 - DNA, 338 bp, Glycine max
  Clone ID: PAT_MRT3847_71760C.1
aaattttaaaattgattattcatcatcacattataacactatatcaagttctagaaacatcaacagacatatatatctttataaactatttaaaatctatacaactctttcattacataatattataataatcttctgcaacattattaatcccatcatttttttcatcatataatccctaatttggagtactctcacaggaatattctcttcatacatacctctatcctcataatttactcttttactcaaaatttaacatcaatacttcttattcaactttcatcaacatcattcattattttcaccttcttaaaacaaatttttgtaaccctaat

SEQ ID NO: 111574 - DNA, 475 bp, Glycine max
  unsure (1)..(475): unsure at all n locations
  Clone ID: PAT_MRT3847_71761C.1
gaattcggcacgagaaatgcatcaacatcaaactccagctgcccaattgatttgtggaaatagtggctgctttatatatcggttttgggtacatactaattatagggtacttagctaaaaacatcacttgcaagtactgtttaagtgcctgtacataataaacgtaatgggcgaaactttaactattgtggagcttctcgttccactacttctatctaagcttctagcatattcaattttaaaaaaaaagttaatggaaggatcaaatagttaggcaaaagccatctatatttccctgaagatggaaagctttgcagggttaaaagttgcaatattgtttgctacggatgcatgatgggttctactacatacatatgtaagccaaggtccaacagccacatccgctgttttcattggattatgaccgggtggtcgatatacatatatctatgtctgtatgttacanntaaannna

SEQ ID NO: 111575 - DNA, 308 bp, Glycine max
  Clone ID: PAT_MRT3847_71762C.1
cccaaaaacccctccaattttaaaaggccttgtttttccttaaactaaaaattgttttttgggaccaagccgtttttaccatccaaaagggttggggcttacccaattgggggtttaaaccaacccgggtttaaaacttaaggtggaaaaaaaggggtccttattcggctgttttcaagttttttttatgcgggcttactttaacagggggggggggtttaacttttttaatttttttgacccttttaagggggcccatccttaaagggggttaaaaataaaaagattggtttttttttgagccaaat

SEQ ID NO: 111576 - DNA, 1838 bp, Glycine max
  Clone ID: PAT_MRT3847_71763C.1
gcaagattcaaattttgtaaatgcatttcgcttcttatctgctgaaagtgtcctaaagaatgaaggtgatccctgtgttccaactccctgggagtgggtaaattgtagcacaactacacctccaagaattacaaagataaacctgtcaagaaggaatatgaagggtgaaattccacgggagctcaacaacatggaagcattgacagaactgtggttagatggcaacatgctcacaggacaacttcctgacatgagaaatcttatcaatctaaagattatgcatctagagaacaacaaattgactggtccattaccatcttacttgggtagcttgccaagtttacaagcactgttcatacagaataactcatttagtggggtaataccatcaggattactgtctggaaaaatcattttcaactttgatgataatcctgctctggttctgaaatacataaagtattttcaattggtgctatgattttctaatggaatgtgattagtattattaatatttttcttatcaagattggtgatactgattattcttcgaaggaagacaaattaaccaagaaatgtggagaaaaacgtggcgggtggaggcagagcttaaccttgataattatggttatacgggatgcttcggaatataatgaatggacggactgctaactatatcactctctcagagctggaagttcaaagccaaaattttcacgaaaaaatttactggcaagctttcttgtgagttaactatgggacaagtcaaatcggagaatagctggaagtaaagactatgacttattcatccatctttgggaaccagcaatttgtaaatgaggtagccctcttatcaagaattcatcacagaaacatggatcctctgattggatactgagatgaacaatatcagaatattctagtttatggttatatgcacaatggcactttaagggagtacattcatgaatgttcgagtcagaagcaattagattggttagctcgccttcgaattgcagaagatgcagctaaaggtcttgaatacttacacacaggatgtaatcctagtatcattcaccgcgatgtgaagacaagcaatattcttcttgacatcaatatgagagcaaaagtgtctgactttggactctcaaggctagctgaagaagatttaactcacatatcaagtgttgcaaggggaactgtaggttacctggatcctgagtactatgcaaatcagcaattgactgaaaagagtgacgtgtacagttttggagttgttctgctggaattgatatcaggaaaaaagcctgtatcatcagaagactatggtcctgaaatgaatattgttcactgggcaagatctttaattcgtaaaggagatgtgataagcatcatggatccttctcttgtggggaatgtgaaaaccgagtcagtttggagggttgctgaaattgccatgcaatgtgtagaacaacatggtgcatgcagaccaaggatgcaagaggtcattttggctatacaagatgcttctaacattgaaaaagggtcagaaattcaactgaagttatcttcttcaggtggttcaaagccacagtcttcacgtaagacattacttgcaagctttcttgaaattgagagccctgacttgtcaaatagttgcctcccctcagcaagataatttttgttttctcttttttcatatcaaggtgggttttgtacattacttaattataattattttcttttgccttttgttaatactagtgacactcactgacttgtgacggtataatcttcaattcttagaacaaatcaacgaaagtgtaatattcttactc

SEQ ID NO: 111577 - DNA, 501 bp, Glycine max
  Clone ID: PAT_MRT3847_71764C.1
aattaaaattgttttaaaaaaggaaaaaaagggtttaaaaaaagggaaaaaaaaaaaaagaaaaaaaggaaactaaatccaaaaaaaagggaagaaactcgcccaaacaaaaaaaagaaaaaaaaaaaagaaaaacttgaaaaaaaaaaaaaggagcaagccaaaaaaagggggaaaaaaaaaaaaaaatggccttcgggactcaaaatttgaaaggcctccaaggaaccaaaaaaccggattagtttttcaatccaaaacgaaaaatccacaaaagccaagaaggtaaagctgaatttggaaaaaaaaaaaaaattcctagcagggaggacagaagaaacttaaacagcaacttggagttcaaaagcggaaccattggtggcaaacagaggggggaaaacaggaccttccgtaggcaaaaaatgcccccaaatgaaaccaatcaattgggtcaaaaaaaaccaaaccaaaccctttttaaaggaaaaaaaaaaaagatct

SEQ ID NO: 111578 - DNA, 562 bp, Glycine max
  unsure (1)..(562): unsure at all n locations
  Clone ID: PAT_MRT3847_71765C.1
gggaagggagtcnaggnnccggaattcaatctccttgcagggcggctggcactgccgctncgaagttcgttcatatattcgacgacggcgtggcangnttcggtgggccggtggactgagcacagaaccctcataattctgttgctagagggctaacntnnggaataaaagaagaaccgnnngaagttcccagaaagaagggagggacgccacgaattagggattaacgaaccatgcgtggagaatatgcgaagaagaaagcanttcggtggaaaaaacgtgtaccgtatnnggcacgccgatcacngggttatctggggggaggggttcgtccaggnggtgaaggaaatgngaagaataccggctccgtaatgaagtancccgaacgtgtncgagtggagtaacccagagaacgagcctcacgtggaaagggtggacccttagcnggttcacggggttgggccctggttgaacccgaagaaggtgttcacgttttacgaccaattacacagttatctggcgtccgcgggtgtcgacggcgttaaggtggacgtgcaatgca

SEQ ID NO: 111579 - DNA, 1035 bp, Glycine max
  Clone ID: PAT_MRT3847_71766C.1
cgacgtaagctcggaattcggctcgagcagaaacaaacccacccgggacaacctcctcctatcattacactaccgccatggtcgaaccaaagtcccgaaccgtgggcaacaccgagcgaagctggtgccaagccgtccgcggtggcaccggcatcgccgtcctcgccctcctaacctcaaaaccccccgatatccccaagctccaaacctccctccgcaccctccaaacctcccacccaatcctcagttcccgactccaaaccaacgcaaccacattctccttcctcacctccccaaccccctccatcaaaatcttaacactcacgctccctactaacctcaccgaccccctgacccagatcctcgaactcgagctcaaccgtaactcgtggcaagattctaccaccgaagaaaacgtgttcttcaccaccatctacgcgggccccaccaccaacacctgggtggtggcactgaggctccacgtctccgcctgtgaccgcaccaccgcgctgctgctgctgagggagttactcactctcacggaagagaataataataccaccagtgaacaaaataatcttgctaaccaatgtcctaaggaaaaagaaatgagtttggcaatcgaagatctcgtgccacgtggcaagggcaagaagtccatgtggacgcgcgggcttgacatgctcgcgtactcgctcaactccttcaggctcaccaacttgaagttcgtcgacgcaaaaaaccccaggttttcgcaagtggttaggttgcaactcaaccaaaacgacaccaaagaagttctagcagggtgcaagtggagtgggattaaactgtgtggggcacttgttgctgcgggattaatggctgcccattgctcaaaacgaagctccaggaattatggggttgtaaccctaactgattgccgatccagtcttgaatcatctctcactgacaattttggattttaccactctgccattctgaattcccacgagatgaagggaggggaaaccctatgggacttggcaaagagag

SEQ ID NO: 111580 - DNA, 1002 bp, Glycine max
  Clone ID: PAT_MRT3847_71767C.1
gcataatagtaaaaaatgacacttaaatatctaataataatgatttgcttatggagataataccatcatgtggtatccatccatccatggacaaaaagttatcagaggatatgaatttaaacatgaaagagaagagtagtgggagccaaggaaggtggagaaaagccagtggggtcccgcgtcaaccaaaaacctatcatctatctcatctccaacatcactacggctgcgagaagacgacagaaggggactcactgtccaatccaatgtgtgactatcaaactccccttttcccatgaaaccctcttccaccaccgtcacatacccctaccaccatggccacactccacaacaaccaaccaattccccgtccagcgccgccgtttccatccaatccgcctaccgcgcccaccgcatccgcgtcctctaccggaaaatcgccgccgtcgatgccgaagccgatcggctgcagcgcctgatccagcggcaggacacggtggacgccgtgcgcgccaaccacctcgagaaactgcgaatgaacgaggcgctcatggccctgctgctgaggctggactccgtgcccggaattgatccaacggtcagggacactcggaggaaagtcacccgtcggatcgtgggcctccaggagatactggactctgtctccgaggcccaaatcgatgagtccagttggtggcccatgaagaattgggacgaagtcttggccgacatggaagaaagtatttgtctggagaacggtggcgatgaaatggaacggttttgcgctcagaatctcggatttcgctgcctacaaaggtttcttcgtgaaccctgattcatcccccttttaattatgtatgtacgattgtacgtacacacacgctttcttatgtgtttttgtaattgtacaatataattaatctctatagttgcttaccttcaaaactttctgctttagctattgactatagtaagtacaaggcagtgaaataaacatggtct

SEQ ID NO: 111581 - DNA, 180 bp, Glycine max
  unsure (1)..(180): unsure at all n locations
  Clone ID: PAT_MRT3847_71768C.1
tttcaagaacaggatgtagtatatcncccaagtctncgaaaaacatatccacaatgcccaccgaaaaaccatatttgtgaccaacttaaaataaaggggttatcgaataaatccactatcactctatatggtttttttatccaccactaagatctcacaaggccatcaaaagttgccctc

SEQ ID NO: 111582 - DNA, 194 bp, Glycine max
  Clone ID: PAT_MRT3847_71769C.1
gcattatcatatgccttttttgaacacaaaatacccattcaaaattttgttcgggacatcccaaaataatatatacataatggatcaacagcaccaatattaaatcttcgaaacaaaaattgaagttaagaagaaacccttatatccttgtttaaaataaacggtaagacgaatacgattaagttcaaattaaa

SEQ ID NO: 111583 - DNA, 2226 bp, Glycine max
  Clone ID: PAT_MRT3847_7176C.1
gccttattgtcatgtgtaaaggattctgatttcaagacaacaatctatcctttgaggttaagttcaatgactttgaatacaagctctatgtctatggcggaggagaatccaacatccaaagaaccaccatctgctcaaggtcatggtgcagaactgcagcttagtgatggcagtagcatatatgcaaagttggtggttggcgctgatggaggaaaatcacatgttagggagttagcaggaatcaaaacaactggatggaattactcccagaatgcaataatctgcacggtggagcatacttatgaaaatgaatgtgcatggcaacgttttctaccaacaggtccaattgctcttttacccatgggtgataagtttagcaatattgtttggaccatgagcccaacagagtcaaataaccgcaagtcaattaccgaggaagaatttttaaaggatgtgaattatgctttagattatggacatggacctcatccgttttaaaccaagagaacacgggctcgaggttgcgttgtgtgtgccattcccattcccgccaccgctaccgccagcaccaccgatcactctctcacccaccccaactgatacccgtaacctcttcaccttcctctccttccctaacctaatttaaaactaaaaaaaacacaaacaaataaaacaaatgtcccctaaggttggggcacgtcacccatgcttctgaattagggtttccatttggatttcgctgttctggtgcccaattgagcgacgcaaaagggtaagaggaaagggatgaggattatggtttggggatcggagatcgtgttcgccatattgctctgtgggaccctctcatgcaccgctcaagctcatcataatagggtttctctctccatcaccaccagcatctgtcccgctcgctccctcctcgatttcatcttagggttttcagattccacctgcccccttcccaattctcttggatccattgccgtcaccgagggagatgaggtttctttgcagaaggctctgaatatggttcacaagaataatcatgagtatgtggctgtgctcttctatgcatcctggtgtcctttctcgcgggtgtttagaccggttttctctgttctctctgcgctgcacccttccattcctcattttgccattgaagaatcatcagtttggccgagcacactgtccaaatatggtgtccatagtttccctacactgtacatcttgaattctaccatgcgggttcggtatcatgggtcccggacgcttggctcgctcattggtttctacaatgatgttactgggattaggattgattcacttgatgaactatcacttgagaaaattggtcgttcatctgccgatgagagtcatggtaacactgagccagaaagttctccattttcacgggctagatctccagaaaatttactacgtcaggaaacttatttggctctggccactacatttgtggttttgagattactatacttgtttttacctacgctgcttatatgtattcaatatgcttggagaagggtcatccaaaatattagaatagggagcttgctggaacatcctttgatttatttgaagcggctaacacagtcatttaactgtttgaaagagccgtacaagagaagtaatctgcaggaaggagcaatgaatgctagagcatgggcttccaagtcccttgccaccgtttcaattggagaggaaagcagcagcagccgtgggacgcatcagtgagttgactgtactgagtggattttccttcttgaaattggagattagaatataccctatgaaaggcttggctgcaagttatgccatgtacttttgtttcaggatcatcttcaccccctctggcctcgtgcttagtgaggtcaattatgtttctgagtgatgtaatcgtcccttatatgtccatatgatcaacaaatacttcattcagcgctctagaagattaagacttcaatgtgtatagtttaaatgtagcaaactcgagctaaaatctgcaattttgtgacatataggttttcttgagggtcaaatcttttgatcatcagttcatatatttatttttgttgggaatgaaatgattgtaaatcccacataaaactgattggatgcattgttgatgtaattggtgcgtggttatttgctaagttctaaaataataagatggtgataatctgatcatgtcgatataagtaattt

SEQ ID NO: 111584 - DNA, 148 bp, Glycine max
  unsure (1)..(148): unsure at all n locations
  Clone ID: PAT_MRT3847_71770C.1
agctcggattcggcttgagncaagaaagaaagtcgatgcctgcttattcaccactgacgggaaacatatcatctgagttagcgaggattcacatgtatgtatctggaatttctcctcccatgataggggttccttcaaagcaaagaaa

SEQ ID NO: 111585 - DNA, 464 bp, Glycine max
  Clone ID: PAT_MRT3847_71771C.1
ggaccccgagcaaatttggattattatattacgacaacaccgaggaacgcttattccatttgaggggttaagtagactagtggatacaggaaaccggcccgatgaatcttaatgtttgattaacaagtactgaaaattctccttggcttgctgactaaaatcccgggcttctgcttaatatactggggttgcaaggtttacctttcgccggctggccatgctacgtgtgcgatgatttggattgcaggccttaaccactttcaccggaaatgcaatcgggggcaagcccttattcctaaggtgcggttcctgggcaacatatgattggacctccttggttcccgttctttggacaaggtggactttgacttacggggagcttattcccgacctcaggaaactctttggtcatcaggcaaacacgtgattcttggagcataaagaaacatctcgggtggggggtc

SEQ ID NO: 111586 - DNA, 112 bp, Glycine max
  Clone ID: PAT_MRT3847_71772C.1
agaacacacatgtattatgctagagtctgacactgaaacaccaacataaaaatttgacttcctgaggtgtcaaccaccggggagaaattgcgtcgctgtcgaagtgattgat

SEQ ID NO: 111587 - DNA, 230 bp, Glycine max
  Clone ID: PAT_MRT3847_71773C.1
gaacccatcctaaataagcatcgtaattcatactccctcggtccttccttccttcttctgcgcaataactgtgtgtgggtccaatcaacttaccaccctcttccagacgtagttcttctccctctgttctctattctctatactgtgaaagcaacatgaacgtcacattttcagctgttctacttaaatgccatgtcctcagctcctccatgttcgacgtgtcaatggca

SEQ ID NO: 111588 - DNA, 115 bp, Glycine max
  Clone ID: PAT_MRT3847_71774C.1
ctctcagcgtacgcactagcactggctcgcagtgaaagttgttcagacatttgcactgttcgaactaagttatcgccatgaatcaccagcagcatgcccatcccttcgaagaaga

SEQ ID NO: 111589 - DNA, 244 bp, Glycine max
  unsure (1)..(244): unsure at all n locations
  Clone ID: PAT_MRT3847_71775C.1
gtcgcatgcacgcgtacgtaagctcgggaattcggctcgagngaatantnnnccnnangnnnnagacctttcncnnncgnngntnnattntnggnnanntctgtnggagnagtntgncaatngncccggatctngcncngcangttaaaanctgnnctagatntgtnnangtatgcatgnnncnagggcaagcnagatggnngcttatggnntatancgtantccgtcgttctncngcttcact

SEQ ID NO: 111590 - DNA, 164 bp, Glycine max
  Clone ID: PAT_MRT3847_71776C.1
agagatttgagaggtctcctcctccaatagatactccccatctaagtgaccgtgaagggcgggctttatattatgattctctgtctctctctaaacgttcttatgctgctattgatgaagttcctccactatatgcttatactgttgcttttcttatctagatc

SEQ ID NO: 111591 - DNA, 726 bp, Glycine max
  Clone ID: PAT_MRT3847_71777C.1
ccatcataaaaccatgtgtactatttagataatctacattagtacgtattaatttctcaattcatgttacagttttcgcaacaagggtgggatcaaaaggggaaaaaaataaaacaacatatttacagaaaatgagagccacttggatgcctctaaaagtagacatcccaaaagcccctaacaggattttgttggacctgtgatgatattgacaacgcacaaaactgagttcttccttttcccatgaaaaaatatgaaatcatgaaggattatgagtctgttagattacaaactgtcctacacaaccatttccatcacaaaatcctgtatactgtttagataatctacattagtatatattaatttctcaattcatgttacagttttcgcaataagggtgggatcaaaaggggaaacatttacagaaaatgagagcaacttagatgcctctaaaagtaggcatcccagatgcccctaacaggattttgttggacctgtgaccatattgacaacgcacaaaattgagttcttccttttcccatgaaagttcctgtatgccaagttaaaaaagcaagcatagaggcagccttcatgaatgaaaaaactgaagaaggctcggtcggaatctacgtcctgtacaagagaaacaatcatatgtagttccgcacacatttaggttggaatgtaatgccaagcctgccagccaactgggtgggcaccgcccaa

SEQ ID NO: 111592 - DNA, 1128 bp, Glycine max
  Clone ID: PAT_MRT3847_71778C.1
cgcccacgcgtccgtacggctgcgagaagacgacagaaggggatagcgcagtttcatttctttggattagaaatttttcccaaagctgatcgagaagccagccaggccaggagttgaagaatgggaagggggaagatcgaaatcaaaagaatcgagaacacaacaaatcggcaagtgaccttctgcaagagaagaaatgggcttctgaagaaagcttatgagctgtcagtgctgtgtgatgctgaagtttccctcatcgtcttctccagccgtggccgtctctatgagtattccaacaacaacataagatcaaccatagagaggtacaaaaaagcctgttctgatcactcaagcgcgagcactaccacagaaatcaatgctcagtattatcaacaagaatctgctaagctgcgacagcaaatacagatgctgcaaaattctaacaggcacctgatgggtgatgccttgagcacactgactgtgaaggaacttaagcagttggagaatagacttgaaagaggaatcactagaatcagatctaagaaacatgagatgctattggctgaaattgaatactttcagaaaagggagattgagctggaaaatgaaaatctttgcctccgaactaagataactgacgttgagaggattcagcaagtaaacatggtttctggaccagaactgaatgtcattcaggcattagcttcccgtaacttcttcaatccaaacatgttggacggtggaactgtttaccctcagacagataagaagattcttcatcttgggtgatcaataatatgatcttcgctatagcctatagctatctatccaattagccggaggctaaatgcattattattactactcttttgattgctcattaactagaccaaatgatctatatacattacatatgaattatggattatggatacttatgtttaatgattgtatgatatcataacaatatgttagaaataataattaaaaaatagagttgtgttagaaaaaaaaaaaaaaactggagtgtgtaaatctttgcctccgaaaaaaaaaaactgacgtggagaggattcagcaatgtaaacatgggttctggccctgaactgaatgcccgttcacgcatta

SEQ ID NO: 111593 - DNA, 134 bp, Glycine max
  unsure (1)..(134): unsure at all n locations
  Clone ID: PAT_MRT3847_71779C.1
gnacatagcaccctcctctgttttgaaacagancaagaaacagagtgaacaaaganacnancgccatgnttgatccaaggancacaccaccccaccanttcttttgaatngtaacgacgacgagttcacanaaa

SEQ ID NO: 111594 - DNA, 723 bp, Glycine max
  Clone ID: PAT_MRT3847_7177C.1
gcgagaagacgacagaagggggaacgcaaaggcgatgaaacaacaagagataaagttttatcatcattctttcatctgggttgtgttgttttgtgtgtgcaatcctcattaccattgccgccgccaccaccaccgcctatcaccctctcatccaccaactgatacccgtaacttcttcaccttcctctccttccccaatttaaaactaaataaaaaaactgtccactaaggttgaggcacgtcaccatctcgtccttcccctcgctcatctcaaatccatggttcggaattagggtttccatttggatttcgcaattctggtgcccgatttcttgactccgagagagggaaaaggggaaagcgatgaggatgaggatttgggtattggagatcgtgttcgccatatttctctgtgggaccctctcatgcaccgcccaacctcatcataatagggtttctctctcaaccaccacaagtatctgtcccgccggctcccttctcgatttcgtcttagggtttccagattccacttgtccccttctcaattctcttggatccattgccgtcatcgagggagatgaagtttctttgcagaaggctctgaatatggttcacaagaataatcatgagtatgtggctgtgctcttctatgcatcctggtgtcctttctcgcgggtgtttaaaccgattttctctgttctctcttcgctgcatccttccatt

SEQ ID NO: 111595 - DNA, 311 bp, Glycine max
  Clone ID: PAT_MRT3847_71780C.1
aaaacaccaaaacccttttattcttttcttaaaaccaaacccagattaagagggcattcttcttaattccactcggaccttaaagccctttgcgcttaaccaaaccctttttaactgggaagccaattaaggtccactttttttaaatattccagaacttaaccgtgaagtttatatggttactattttaatctaaaacattagccttttggtaaaaagtttttcacctttttgttatttaccaaataggatctctaacctgtgatgcaaactactctacctatcatcattcattatcagtataatattcc

SEQ ID NO: 111596 - DNA, 269 bp, Glycine max
  Clone ID: PAT_MRT3847_71781C.1
gaatgcctcctggccgtggccctggcaggcgccccttaccaggctgtgggcttggtccaaggcactacacctgtactgcaggggctcaatggagctgtataagaagccagaagtgcctctccgcagggacctgcccctgctcctattccggactcagacctctgaccctgcaatgctgcctaccatgattggcctggcagaggcaggcgtgcggctgctgtcctaccagacttcactggtgtcagatggggagacctggcacgtcatgg

SEQ ID NO: 111597 - DNA, 277 bp, Glycine max
  unsure (1)..(277): unsure at all n locations
  Clone ID: PAT_MRT3847_71782C.1
taatttcttacaatccaatctgcaaactgagtnagntatntaacttgtctntgctttcttccncaacattttggcatattacaaagattaaanntggaggggtttttgggaantggcttnaataatnattttcccngntgtggggcttnaccacttgagcatagcctttnctcaaagtcatatgaatggatttggagancagcnantggccaaagattgccattcacaggaccgttttggcgntacacngtnctgcttccatatngcagtcctttgg

SEQ ID NO: 111598 - DNA, 143 bp, Glycine max
  Clone ID: PAT_MRT3847_71783C.1
gcgagattatggtaaaacgttaggcatggattataaactatatcgctatatatgtgtcgcgggatcgctttgaacaatacaaacgtcccttatctcaatctaacacattgaatcttttattcatttttttactaactctatta

SEQ ID NO: 111599 - DNA, 323 bp, Glycine max
  Clone ID: PAT_MRT3847_71784C.1
ggaaaattaaaacaaaaaggaaaattaaaaaagggtcccgggttgaacccacattaggggcccctaatcgaggtctcccaaaaaaaaaaaaccatggggggacctgggatataattcaccaacggttggggcgatttaaacctgggagacctttttgggccccttacaggaacccattcccatttaaaaaatggggggtttcaaatttcaaccgggtgccacgggcaaagcttggggctctctcggtttcgggggggcccccaacgattatcggggaggccaaactccgcgggggggggcttgacaaagggggcgataaaccc

SEQ ID NO: 111600 - DNA, 520 bp, Glycine max
  Clone ID: PAT_MRT3847_71785C.1
ccggggtcgacccacgccgtccggcagctcaacactagcttcccagcgccgtctcccccgtttgtgcggtgaataagaagaagatgggcgtcaaatcgaacaaagagaatgaacaccttgaatcttctcctacggtgccaccttactactatccatgagaccctgcaggggtttggatcacaacgccgccatcttcttgttccgacaaaggctcctgtgacgatgtcattaagatggctgaacaagtcttaaatcaagctaccaccgagggaatgctgcggactggacagaagccagatgccaaagcagttgaggaaaacatggcattatatttgaacaccctgcagggattgcttttactttcccatggccactcagaaggcgcagggcctaccttggcttctgctgttcatgcgtacggaaagcaagtcgttgattgcagcttcagattgatgaaagaaactgcctctttatacgggtaccattctaaagacctgagatatcagtaccacaattggtt

SEQ ID NO: 111601 - DNA, 330 bp, Glycine max
  Clone ID: PAT_MRT3847_71786C.1
aaacgagtgacttaattgcatgtgtcatgcgtgcatcaagtccaacttgtgcacattataaggtctctctataaccatatacaatatcaaacaatgacaattacatagaccatcatcaacggcttatacttcagaacacagcctaaaagatctttggttagcaccactttcaatacctaccacctattgacattctacagctgaatgcacctcaactgctatcactcaatcattataggtccagctactgctggctcctggcatcagctgttttggcttctgtacgtccaattttctcttatcacaggagcctaccttctggctcaagaa

SEQ ID NO: 111602 - DNA, 273 bp, Glycine max
  Clone ID: PAT_MRT3847_71787C.1
atgcagcagcaagctgtctgcttgcacattcatatcgcctccaggcaaatctgatctccctgtcttcaaagactatctttgacaaactagtgagctcacgcccatcacgaactgcaatatcgcctctgcaacccaaccctactccattagctgtcaccaaaccatgaaaaactcacaagagaagaaacatgtcgcatagtacgggaagggagttgccaaagttccttatctaatacagctggtctgcctgatgatacagaaggaactcatgaa

SEQ ID NO: 111603 - DNA, 259 bp, Glycine max
  Clone ID: PAT_MRT3847_71788C.1
ccttaaataattcgggagtttttttttgaagactcttgcgttccccccagcaccaagtgtcgcttgcatctttccaggcccattttcttgggagccaaaaatttcccacccaaaaataaatcgccgatggggtaaaaccgggtccaatgctgggcctgtgaaaaaggctcgggctcattaaatttccaaagcctggcaaagccctaaaaaaggggaccatgtgggttctggggcccttaaaaaagctggaaacctcaaa

SEQ ID NO: 111604 - DNA, 231 bp, Glycine max
  Clone ID: PAT_MRT3847_71789C.1
aagcatatatttaacgcttttcttaatcgtaagaaaaatacgggcataagggccaacatgtgtacattatcaggtctatttataaccatatacgatattaaacaatgacaattagataacccctgattgacgtcttatactaaagaactcagtctaaaggatcattgtttaacaccacattcaataccaacaaactatttacactctacatctgattgccagctcaactgc

SEQ ID NO: 111605 - DNA, 616 bp, Glycine max
  Clone ID: PAT_MRT3847_7178C.1
tatgtattcgatatgcttggagaaggggtcatccaaaagtattagaatatggtgcttgcttgaacatccctttgatttatttgaagcgccctaacacagttcatttaactgtttgaaagtgccgtgcaagagacgtaatctgcaggaaggagtaatgaatgctagagcatgggcttccaagtcccttgccaccgtttcaattggagaggaaagcagcagccgtgggatgcatcagtgagttgattgtactgagtgattttccttcttgaaattggagattagaatataacctatgaaaggcttggctgcaagttatgccatgtacttttgtttcaggatcatcttcacaccctctggcctcgtgcttagtggggtcaattatgttactgaatgatgtaaacatcccttatatgttcatatgatcaagaaatacttcattcagcgttctagaagattgagactttgatgtgtatagtttaaatgtagcaaactcgagctaaaatctgcaattctttgactcgtaggttttcttgatcgtcagttcataaatttaattttgttgggaatgaattgattgtaaatctcacaaaagtgattggatgcattgttgatgtaa

SEQ ID NO: 111606 - DNA, 179 bp, Glycine max
  Clone ID: PAT_MRT3847_71790C.1
tcggtattctgctcgaggtggttcccagttcgtccttgcagctcggccatgtcctttgggtggctgctcaattcccatggccggcgctctgctcggattctgccccccaagctcccagccgagtcttcttccatggcttgagccttcctgctgctcgcgtcttggcctggccccaactt

SEQ ID NO: 111607 - DNA, 866 bp, Glycine max
  Clone ID: PAT_MRT3847_71791C.1
gattatttcacacatttatgcctcccttcactactgggggcttggcttctacttgggaggcataaatgtgtgaaataaacagaatggaagatatcaagaacaaaggataagccaagcccccagtagtgaagggactgtcatattctttctattacaaaacatgccccaagcttgagtccattgtgaggaaacatctcaagaaggtgttcaaggatgacaatggccaagctcctgccttactccgcattttcttccatgatggttctattcagggatgtgatggatcattgatgctagatgggagaccaagtgaaagagaccaaccagccaacggaggcattccgcccacgcgtccgacaaagatggctaggtctagtgcttatcctttgttcttgatttcttccattctgtttatttcacacatttatgcctcccaagtagaagccaagcccccagtagtgaagggactatcatattctttctattccaaaacatgccccaagcttgagtccattgtgaggaaacatctcaagaaggtgttcaaggatgacaatggccaagctcctgccttactccgcattttcttccatgattgttttgttcaggtaattttttttttatcgaaaaatgttaattgttagaattataatttattaataaaagagatcaaattcactacttttcttacctttccttaatcatctatgttttgctagaataatataatgctattcgatcaggcaaaagtgattagttatataaattccatgataaaagaaaaaaatattaaaaatgagtacccatgaagtattttaactcatggatcaaacttctgaagatcgagtaacttattttggagaataaag

SEQ ID NO: 111608 - DNA, 265 bp, Glycine max
  Clone ID: PAT_MRT3847_71792C.1
ggaacaggagagaagtgaagcgaataatataacatatcttgtaactcgtgacaaactatatttgactccgcgcgtaggaatacatgcttagcttttctactctaactatagggctggcgtgggtaccgagtacctactcacctttgttgtgtctcttcgggcacagcgcaagacactgtaagcttccaattccaacatatctcctgttcgtgtgatcgattgggaataatctggtgctggcaatgctaactatgcgtttctgact

SEQ ID NO: 111609 - DNA, 413 bp, Glycine max
  Clone ID: PAT_MRT3847_71793C.1
aaagggatccggaaaaaaaaagggtaaccgcaaaaaagtcccatggggaaagactaaaaaaattgggcaaaaaaataattttggtggtaaaaaaaataatatttttcggggtaaagggggggaaaacaatattttaattatttcaggggattaaatccaacccatattttttttggtccactaaaatccccctgggaaaatttcttttttttcttgtaaagggcccgaattttttcccccttaaaaatgggggagggggaagaaaaaataaaattttcctaaatccccgtaatttttttaaaaatgctttgcccaacacaatggatttggcaccccaaaagctgtgcgggggttcccatttgatatttcatttatcggctggaggataaaaaggtaatgacctatttttgtat

SEQ ID NO: 111610 - DNA, 614 bp, Glycine max
  unsure (1)..(614): unsure at all n locations
  Clone ID: PAT_MRT3847_71794C.1
gccaaataagaaaagaggaaaaaatttattggttcgattctctctgttatcaaaattaacaaattaacatttgttgataaaaaaagaaaaaagagggttaggtttttcatagaacacctatgataaaagactgttctcccaataaaataaactcagaaggctgctgattcaactaaactaagcaatatgcagagaatcattcttctcattggcatatatgtcatgtcttcaggatatggtacaaggacatgtcagcaagggaagatgacgtggcagactaataaagagtttgaagacacacaaggtccggtctttgtttggtgaaaaagagcaagacaaatgatagggatgtagggaaactgaatgaaaagatacttggcttcccaaggatatgttgttccaattaactttttattcaaacctgtcactgtcagtattctaaatcagccttatatatttgcttctatagcatttgcttatgattggggtgaatctaaaacttccctacatgttctaggcttcttatgccttttgcttttagacttccaaatcccatacaagataaactgcagcattattcttgttgcagctatgagccacangaaataggagac

SEQ ID NO: 111611 - DNA, 696 bp, Glycine max
  Clone ID: PAT_MRT3847_71795C.1
gaggtcatcgatttagaaaggcattggaggagctagtgtggcttagtcgctaaatttgttacgataaagaaattaattcagcaacaaatacaatgggttctcttatggcaggatgggactctctgatcttggatcctgaatcagctacaatagagaggaatcgatcactcaccaaagaagaaattaatgcttactggagagtaaagaaggagacagagttagaacacctcagagctatgtccaaactatctgagactattcaggcccgaaaatttgaggattcagagaattctcataagtcaagtaccgtgaccttggccagcataaaggagtccttaggcatggacgttgaccagaaaagtttagagcaacttatcaagaaaaatggctggtggaccaaaagcagctgggcatttctgaatgaaccgccagtgatagaagctgcttccaataagtatgcatcacagtttcacgtggccaacttggggtctacgaaacttagccccggagatggaattaatgcttgatatgagtttttttcacgttttatagtttcgtatctatatgtgtaatggcttctattttgtcacttacaattctgcataagaactctgtatttctggtttgtttgaaaagggatgcaaaaatcccaacagattttaaagagagaatattgaactgatttgactttgtggc

SEQ ID NO: 111612 - DNA, 106 bp, Glycine max
  Clone ID: PAT_MRT3847_71796C.1
ttctcaggcactgacagtagttagggaagaaacacacaggctgaacacagctgaaacaaaccaaaacagaagtcggttgaacagagggggcaaagcaacctagcac

SEQ ID NO: 111613 - DNA, 1084 bp, Glycine max
  Clone ID: PAT_MRT3847_71797C.1
cccacgcgtccgtacggctgcgagaagtggaggagctagtgtggcttagtcgctaaatttgttacgataaagaaattaattcagcaacaaatataatgggttctctaaggtaaagaaaaaaaattctgcaacaaaaacaatgggttctcttatggcaggatgggactctctgatcttagatcctgaatcagctacaattgagaggaatcgatcacacaccaaagaagaaattcatgcttactggcgagcaaagaaggagacagagttagaacacctcagagctatttccaaactatctgagactattcagacccgaaaatgcgaggattcagagaattctcataagtcaagtactgtgactttggccagcataaaggagtccttaggcatggacgttgaccagaaaagtttagagcagcttatcaagaaaaatggctggtggtccaagagcaactgggcatttctgaatgaaccgccggtgatagaagctgcttccaacgagtatgcgtcacagtttcacgtggccaacttggggtcaacgaaatttaaccccggagatggaattagtgcttgatatatgactttttctatctcacgtcgccctgtatctatatatatctccacgagtattcagtatagttgctatctatatgtgtaatggcttctattttgtcacttataattctgcaaaagaactgtatttctggtttgtttgaaaagggatgaaaaaatcccaacagatttttaagagagaatattcaactagtttgactttgtcgttaaggaaagcatgcagtacgtttcgtttgtctgctttctaatcctaagatgtagagctattatttgctacgtagcattgattaactcctacaattaaggcttctattttgtcgcacacaattctgcataagaactgtatttctggtttctttgaaaagggttcaaattttctgaacagatttgtatgagaaaatgttcaactggtttgactttgagctttaaagaaaaaaaaaaaaaaaaaaaaaaaaaaaaaaaaaaactaaaaaaaggggcgacccccaactggggggccggccaccccgga

SEQ ID NO: 111614 - DNA, 257 bp, Glycine max
  Clone ID: PAT_MRT3847_71798C.1
tctttcttactcacgtatagtaattgtttcactggggcttttttaaaatactcgggggctgtctttaaccttcttcagatgggttttaaactgtttgaaatccgggatgaaacccagaataggttcctctacgcggccaatgccccctggaaacaccttgtttttgggaaaccccacagcaagggactccttccacccttgtctgccggaaacgggtttaaaaggaccggtggtgactccccttttggcgggcacct

SEQ ID NO: 111615 - DNA, 254 bp, Glycine max
  Clone ID: PAT_MRT3847_71799C.1
gcaacattgaatagaaaatgcacctcagccttcctccatttgtcatatagaagtgtctcaaaatcttgcttagccgactactcaaaccttttaggacgtgtgcaaatttttttatggtcatccactaatcaagtgttgatcaaaatggcttctatttgtgagatggtattgtagtcctgacataaagaagggttcctgagtgataaaaaaaatgatttacgacacggtactagccaaaagctttagtcgttatg

SEQ ID NO: 111616 - DNA, 172 bp, Glycine max
  unsure (1)..(172): unsure at all n locations
  Clone ID: PAT_MRT3847_7179C.1
ggtatccagctgcagtagaaagatcaaggaaggaaggaagggagatgttttttgttataaggcacaccattcatacnccctgcctattccgtaatcagacacttgtattctgcatctaaagagattacagtcagggagcctctgaacttcccactcattgaggaaatgtcat

SEQ ID NO: 111617 - DNA, 390 bp, Glycine max
  Clone ID: PAT_MRT3847_717C.1
acacaaaaagttttttcctttttggaaatttcgttaacaaggcctcaaaaatgaattttaccctaccgcgggggggacttgtttcacctacaaaaccttcccatgttgaattgccgagggaatcaagttcgtttttcaccgaaacaaacaggttttttgatctgctaaggcattggggggggaagaggggaaagtcctattttcaataggggttgaataactagatgccccccctccccttttttttgaaccggttttttttttaaaaaaaacattttttttgttccgggggggagcaaagggaaaactttttcatgaatttggcccaaacatttcagggccaatagcaaattttgttttaagcaaaacaaatttttttcagatcccaaa

SEQ ID NO: 111618 - DNA, 353 bp, Glycine max
  Clone ID: PAT_MRT3847_71800C.1
tttttaactcctaaaaaaaagctaagaacaaagaatagattctgatgtaaaactcccattctgtgcaggtgattatagtcctaatccactggcgtttaatatcacatacatacttggaaataaaaaagaaaggatttcattattgcatcataccaatattctagatcagatctgcgagctatgaataaaatttcagaacattatttgctgaatatgagggcttactcaacataatggaagaaagaaatgctttacactgaatgaaccccttggacccgctgttgagccgagtatccctatgttctttctttccattcaaatatgacacggactgtcctggcaacacggggacc

SEQ ID NO: 111619 - DNA, 1701 bp, Glycine max
  Clone ID: PAT_MRT3847_71801C.1
ccacgcgtccgccccgcgtccattacccagagcatcggctcaagttcttctctctactccgtgccatagaaactcattgttttcctgcattaatctgcttgtcaagtcagcaactgacgcttctaatacggctgcgagaagacgacataagggggtgcttcaacatttgttctgtctggcagaaactggtgccctaaccgagcctctttgggattctgctacaaatccgtatccatacccaagtaatgcagcttttgtacgcgagtttactataaaccttttaagcacttcatttcccaacatgactgcttccgaggttactcaatttgttaatggacttttggagtccacaaatgacctccccacatttaaaactcatatacgagattttcttgtacagtccaaagaattttcagctcaggataacaaagatctttatgctgaagaggctgcagctcacagagagagggaaagacaaagaatgctttctattccaggacttgttgccccgagcgagttgcaagatgaaatggttgactcatagatataggctatacaatatgggcgtaagcacatacaccaagggcattttgacttggtcacaagctctatgtgtaatcgaatccggagggcatgggaagacatacagcattttaatcctttaaattcctttgttttttgccccaatatcatgttgggaggtttggctgagcttctccataaacctaggtttgagtgaggtcatagtcttcagctttgtttgttactttatctggtgcccttctgaacctctttgggatgtgctacaagtcaatattcgcctcaagtaatgcagtgtttgtacgtgagtttaccataaaacttctaagctcttcatttcccacatgacatcagccgaggttacccaatttgttaatggactctttgagtccaccaatgatctctccacatttaaaaatcacatacgagattttcttattcagtcaaaagaattttcagctcaggataacaaagatctatatgctgaagaggctgcagctcagagagagagagaacgacaaagaatgctttctattccagggcttattgccccaagcgaattgcaagatgaaatggtggactcatagatgaaatgggtgaaaacatagtacaacaaagggcattttgacttgtgtcacaagcgcttgattcaatcaaataccagatggtttgggaacacatgcatcattttcgtctttaaaatttagtttccctgcttttcccaatatatcatgttgggactggtttggcataggttcatgatttcagaggttttgccggctggtgatagtgccttgtctattggtgagtgtagattattcagttgctaatttaggatgataatagtcatttgtgggattcatcaaggcagctttcgatagaatcacaggatggatgactccttaggtgtgacctaatctctcgcggtttgtgcagaaaaacccttgtttcatattttgtattttttttcaccaattaattttaggggaattgatgtaccataattgcagtaatatatggttttcgtggtattaatgtatgttcatttcctcccaatagagagaggataaaaaaaaaaaaaaaaaaaaaaaaagagccatcaaaataaaagaatccaagcaaaaaaacgtactcgataggaaaagtttttattttactacc

SEQ ID NO: 111620 - DNA, 421 bp, Glycine max
  Clone ID: PAT_MRT3847_71802C.1
gtttcatgaggatagcgcggagctcattaatcatctcttctctgattccatactctctctcagtagctatctggacaatccgacacaatcaaacaccacacacactcccaaatatgaacggctgccttcaaatcaaaacaaaaacccctactttctctctgaaagctctatcttgtgttgatgtctctcgcctgcaccgccattgccgacgatggcgtgttcatgtaaaagctcgcgaaggcgctcatcccacctccacccgggtggacggggagcatgttgtgacaatggacaggcgtgcagtgcaacgccaaccgcgtcaccataatcaaaagcgctaatcagacactcggaggaactctttctccggatctgaactcgctgttccaactcaacaagctctctctgtggaacaacaagc

SEQ ID NO: 111621 - DNA, 452 bp, Glycine max
  Clone ID: PAT_MRT3847_71803C.1
agacttgcgagcatgcatgcacgcgtactttagatgatactttggctcaagcacaataacttagttctaatacttatatgtgcacggatggtgagatattagcatcactgatcctctgcagttactatgtgccatcctgaacacagccagagaatgtacagtaatgcctaaactacttgcacacatggacctttgatcacatcagatatttcaatggtgatatagacattgagattaatcgtgacatgatcactgctactgtgattcaatccgaaaggtcatacttgtttgttcactaaagcatgtacatcatgatggttactggagattctgctggcgcagatactgatttgtatatatcttgccaaaacacagagcatgatgagatagactttgagttcttacggaacatatcaggacaaccttacattctgcaaactaatgtgtgtcac

SEQ ID NO: 111622 - DNA, 1401 bp, Glycine max
  Clone ID: PAT_MRT3847_71804C.1
cgtacggatggatcctgttctaggagattatgccaggaatgtgcctgatgcgagggaatcagaggttttgtcactttttgccacaattgaaaacaatgatgaagctgccatggttgaagatgtcccacaaatattggaagctgaattccagtgaacactggagatgattacaaaaaattttgaagattatccagagcataggctaaagttcttctatatactgcgagctatagctactcattgtttccctgctttgatctgcttgtcaagtcagcaactgaagcttgttatggattcaataatatgggcgtttcggcatacagaaaggaatattgctgaaactgggctgaacctgttgttggagatgttgaagaagtttcaggcatcagagttctgtaatcagttttatcgaacatactttttgacaattgagcaagagatatttgctgttctgacggacacttttcataagcctgggttcaaatttcatgtcttggtgcttcaacatttgttctgtctggcagaaactggtgccctaaccgagcctctttgggatgctgctacaaatccgtatccatacccaagtaatgcagcttttgtacgcgagtttactataaaccttttaagcacttcatttcccaacatgactgcttccgaggttactcaatttgttaatggacttttggagtccacaaatgacctccccacatttaaaactcatatacgagattttcttgtacagtccaaagaattttcagctcaggataacaaagatctttatgctgaagaggctgcagctcagagagagagggaaagacaaagaatgctttctattccaggacttgttgccccgagcgagttgcaagatgaaatggttgactcatagatataggctatacaatatgggcgtaagcacattacaccaagggcattttgacttgtgtcacaagcgccttgattcaatcaaataccagatggtttgagaacacatgcagcattttcctctttaaaatttagttttcctgcttttcccaatatatcatgttgggactggtttggcataggttccctgatttcagaggtttgggtggttggcaatactgccttgtctattggtgcgtgtagattattcagttgctgatttaggatgataatagtaatttgtgagggattcatcaaggcagttttcgatagaatcacaagatggatgactaattccaagtattgatgactccttaggtgtgagaactcctaacctctggcagtttgtgcagaaaaacccttgtttgatattttgtatttttttcaccaattaattttagggggattgatgtaccatgattgcattaatgtatgtttttcatggtgttattgttaaaaaaaaaaaaaaaaagcccccta

SEQ ID NO: 111623 - DNA, 431 bp, Glycine max
  Clone ID: PAT_MRT3847_71805C.1
agaaaccacgatattattaaagatgaagagagaatttttccttcacagatattccatagctgcaagctcaaaggaaatgccacagtaacttcatcatcttaattatgccatcagaaaaacaacagcacaatgattaacctaaaccataatttgcaaaagcacagccatccaatgcaaccagaattcaacactcaaaagcaagtggtaacatccaaacttacatataaaacacgagtggctctcaatcgagatcttcctgtctggtctccgagtcaaaattctgattcccccggtttccagagttcgattgcccaccattatttccactactgtcactattgctattgctgttgttgttattgttgctatcattgttgccactcccaacattacttgtctcagcaaattgcctaaacggccatggcaaagac

SEQ ID NO: 111624 - DNA, 430 bp, Glycine max
  unsure (1)..(430): unsure at all n locations
  Clone ID: PAT_MRT3847_71806C.1
ggctcgagaaaaaaattgtcatagattgttgacattaaaggcatggcacaaacacctgcaccagacaattcaattctttaatcatcattcacaacctatctaaaagcatggggcttctgtggctgcacataacataccctatctgaggagagactttttctgagcatggggtatcataaaaggtgatgattagggtagtgggtcagttttctgccgccatgaactatattcagatgtttaactccaaaaacagccacatgggccagcaaagcagctatagtgggggtgtacaatgtgtttcggactgataaaataccaataatgttttcttaaaaaaattgtacaaactctcaatgggggaactataatttgattctcgaaaatgcaatngattgtaactttaagtatatgaaagtataaaaaatttcaa

SEQ ID NO: 111625 - DNA, 679 bp, Glycine max
  Clone ID: PAT_MRT3847_71807C.1
agccttccgaccggttgcaaaaaaacgttctagatcgcgatctagaacaacctaggtcacaaccgaggcagtcttttattttatagtataattcattctgtcatatatctgtgtagcaatggtggtctttatttgcaaggaagaatatggtgtgctcttgggcaatgactgggctgcaactcatgaatttggccacaacttttgtatctcaaatgaaggtgacgatgacgatgatgataatggcgtcattgatgtggccccagcggcatagaagaatttcgcaaaacatgcataaatgaggaggatgaggagggatatagtagtagtcagtgtaagcttcattctgtagtcttgcttagtaattacattacatttgtgtttactcttggaataggttctagtgttatgcttaattacggtcactataaatttgagacataatacatgttttattagtaattaatgattaattccactctctctctctctctctctctccggacccagtaattttcttgtcgatcgtctttgactctattatctgatcatagttttttatttataataatttgatggcaattggcaatgtacttgtaatggggtgcaggcaaatttgataaatttgacatgacccaattataaaaggtttcctttaataaacttattatgatgatttaag

SEQ ID NO: 111626 - DNA, 810 bp, Glycine max
  unsure (1)..(810): unsure at all n locations
  Clone ID: PAT_MRT3847_71808C.1
cccacgcttccgtacggctgccagaagactaaagaagggggcttccttccttttacttcacttatcaaaaaattcccctctctttttctctctcttcctctcagccatggtcgaccttcaaaccgtttgctgcatgtgcggtgacgttggtttccccgacaagcttttccgctgcaacaaatgccgccaccgtttccaacactcgtattgtagtaactactacggggaattagcagagatagagctatgcgattggtgccaaagcgaggggagaaattactcgaggcatagctccaattcgaagaaattaccagtggccggaaatgacgccggaacgacgacccgttctgagtattccggcgagaaaatcaagcaccatgatcgtcatgaagagatgagtggttcttcggagaagggaaagagccctgtgccttcgccgagaatctccacgcgcaggtataagcttctcaaggatgtaatgtgttaaaccaggaaaaagaaacaacaacaacgcatcgatccttaaacaataagagaaaacgagtatatataatattagtgttaattaggcgtgtcaaaagggttaattttgtacgtttatatataaatagtagtagctttgtaaagactttgtttatgcgtgttgtacttgttttgttaattttgagtgtcccttttcatcaagttgtgaatagaagaactgttaaacttcaagttcattgcatcattagnnccataatctctctctctctctctctatatatgataaaagtttcaagctcttctcaaaaaaaaaaaaaaaaggcccct

SEQ ID NO: 111627 - DNA, 271 bp, Glycine max
  Clone ID: PAT_MRT3847_71809C.1
tttttaactaacaaaataacattcctttcaaggagggtctcttctaaactgacgatgaccacactcgataccactcctaattgtaacgagaatcaattccccattgactataatgtctgcagatagaccccataatatatccactgctacacaccatcatactctaccatataatacacaatcactttatacaaaccgctagcccaccatataccatccactccctcacctttctcatgattctactctcactattcccacttacgctttt

SEQ ID NO: 111628 - DNA, 420 bp, Glycine max
  Clone ID: PAT_MRT3847_7180C.1
aaaaacaaaaataaaacctcgaaatgtttaaagagtttccctcaaatgaagggtgtatcatggcgttttttacattctaatattttcttggaacctaaatcgaggaacatttttctcaatcctggcatgagttgaaagttttattttttacaagaggtcatgagttgcctccaaaaatttgggatctgaatttatccagctcagggagccccttttcctttgggcatatattatatttttatcatcccccatatttggggggggccccctccaccccttctttcacaatctttaaaaaccctaccatttggccatgggtcaaaggccttccaggggaagtcaacaaccttgtccctttgccccgcatggtaaaagaataaacccggggggggttttggtgctttttaactaacaaagttt

SEQ ID NO: 111629 - DNA, 347 bp, Glycine max
  Clone ID: PAT_MRT3847_71810C.1
aaaaaagaaaaccggcggggcttttttggtttaattattaggaatcctggggggccaaaaagggttaattttttccacactgttattgggttttgataaaattataaactcaaattttcactgtccctggaaaaaaaaaaaaaatgacccccatttttaatgaccctaatatcatttttttccgcattttttggacaaaatacttttggggggttgggggcaccaaaattttttccccaagtatggagcaactctttttttgaataaggggggattatcaacttcccttgctgttcctgggagggtgttttttccttgcttaaaaaggggacgaaaaccctcttttt

SEQ ID NO: 111630 - DNA, 341 bp, Glycine max
  Clone ID: PAT_MRT3847_71811C.1
aagaggttattctatcatttctatgcaaggatttctgagttctcaatcaaaaaagccaataaactgcgcacaatcctgctaatttttgcaatgtgtgggggcaacagtagtttgtcctccactcctctttctgagtgctgtggtccacttgtctatatattgagacatgcttctctatgctccctacgacttattacagcaataaatttatttgtctggtggaactcgtgttgttcaaaacatgcaaattagatatggatctttctgattagtattcttagtattgattaaaacattaaaaaatgaaaatatttatggagaataacataaaaaaaacatta

SEQ ID NO: 111631 - DNA, 264 bp, Glycine max
  Clone ID: PAT_MRT3847_71812C.1
tcccaattcccgttcgacccactcgtgcgagttattgatatttattactgaacaaagtacacactctgatttcatcgatccaaccgaatcgaagcctcagtttctctgaaacgtgctggctcacttactactgttcgacgctttcatcaacatcgaacggaccccttacgtcatcatcctcacctgccagtccttcaccgtcctcatcttctacttcttcatctcctagatcaaccttccaatcgcctgcaccagatcaaacac

SEQ ID NO: 111632 - DNA, 705 bp, Glycine max
  unsure (1)..(705): unsure at all n locations
  Clone ID: PAT_MRT3847_71813C.1
cgaatggggaaactaggtggtgaagagctgttattctatcacctagcttctcctttctcaccttnagaggtggttggcttgaagatggttggctcttagtcttcttgtaaactccagcagtggctgtgctattacactcggatgtgtatctggtagttggttcttcctatgatctgtcttgttgtaagtgaaatccaataaattattactactgaagctagcaacactagacctaggggaagaagaaattggcaccatatgtgaccaaggtgccccagaaacctgaaattcctgatcatgtccatggtgatataagctgccactttgggaaacctcttgctttattacatcaggcattggaactataggggacggaatattaagcatttggtcattccattcatccaacttttttgattgaaaaggactgaatgcaattctctcttcctctcctggtaaaccagtgaaaagaagttggctcaatgactgagggggctcttggttttgtgtagaagaattaaaaggaattgaagaagatccaaacacatactggggagggatcaaagatggtggatgcatagtccaccagttagggttcccagccatcatttgctgaactaaagaaattttttgtgtggaattaataatactcaattcatggcttgcaaatgaaccatatgtaggaaatgaaatatttaatatcct

SEQ ID NO: 111633 - DNA, 423 bp, Glycine max
  unsure (1)..(423): unsure at all n locations
  Clone ID: PAT_MRT3847_71814C.1
gcaaaacacaacactcaaagctttagccaaaggcttgtttggttgcacatacaaggaaatatcacaaagcaaatgatggctgggaaccctaactggtggactatgcatccaccatctctgatccctccacagtatgttcttggatcttcttcaattccttttaattcttctacacaaaaccaagagccccctcactcattgagccaacttcttttcactggtttaccaggagaagaagagagagttgcattcagtcatttccaatcaaaaaagttagatgaatggaatgaacaaatgcttaacccatcctctatcgttcctatggctgatgtaataaagcaagaggtttcccaaagtggcaacttgtatcaccatggacatgatcacgaatttcangtttctggggcaccttggtcacatatg

SEQ ID NO: 111634 - DNA, 2514 bp, Glycine max
  Clone ID: PAT_MRT3847_71815C.1
ttgaccctgaaggaatcatatgtatccaatggcttctaacaagacagaagctgtgtcagtctttccgaacggggaaactagctggtgaagagctgttattctatcacctaacttctcctttctcacctgatttttaagagatttcataatatttaagaaagttagtacatgaattcatgtgtttttctctctttcaactatcatgcacatttaccttgagaggtggttggcttgaagatggttgactcttagtcttcttgtaaactccaccagtggctgtgctattacactcggatgtgtgatctggtagttggttcttcctatggtctgtcttgttgtaagtgaaatccaataaattattgctactgaagctagcaacactagacctaggggaagaagaaactggtaccatatgtgaccaaggtgccccagaaacctgaaattcctgatcatgtccatggtgatacaagttgccactttgggaaacctcttgcttattacatcagccatcgttcctataggggacggaatattaagcatttggtcattccattcatctaacttttttgattgaaaaggactgaatgcaattctctcttcctctcctggtaaaccagtgaaaagaagttggctcaatgactgagggggctcttggttttgtgtagaagaattaaaaggaattctttccatttgctctctctagatgatggctactccgcggtggtaaggtttcgatcttacggcgtgagggcggtcgcgtgtgttcttctgctggtgggccgtccatcccacgcgcccgaacaatattattcaatagaaaagaaagaaagatgagtccaacatgggtttttgtgttaggtattattgcagcattgacaaatattattattcaatagaaaagaaagatgagtccaacatgggtttttgtgttaggtgttgcagcaatgttggtggttgtgagtggacaatcatcagtgaagcctttggtgaagacagtgaaggggaagaaggtgtgtgacaaagggtgggagtgcaaaggttggtctgcatattgctgcaatgagactatctccgactacttccagacataccagtttgagaacctcttcgcgaagcgcaattcgccggtggcacatgctgtcggtttctgggactaccgttctttcatcactgctgctgcactgtatcagcctcacggctttggcaccactgggggaaagaccagtggccagaaggagcttgctgctttctttggccatgttggcagcaagacctcttgtggttatggggtggctacagggggacccttagcctggggcttatgctacaacaaggaattgagtcctgataaattctactgcgatgactactataaattaacctacccttgcactcctggcgcagcatactatggccgtggtgccatcccactttactggaactacaactatggaaaagccggggaagccttgaaggtggatctgttgaaccatccagaatacatagaacaaaacgccactctagccttccaggctgcactctggcagtggatgaacccaccagagaagcacctaccatcaccccatgatgtctttgttggcaactggaaacccacaaaaaatgacacattgtccaaaagggtacccggatttggtgccacaataaacttgctctatggggatcaaacttgtggtcagggatcagataatgaggccatgaacaacatcatttcacactatctttattatcttgatctcttgggtgttggcagagaagaggcagggcctaatgaagttctctcctgtgctgaacaagctgcttttaagccctctggctcaccatcttctgccacaaattgagcattccttggctgagattcttggccggtccattcttgaatctttcaaaaaattcttaataaagaaagcaacaagtagacaagatatttcaactactttggccttcaaatgagagtgaaatgagtttggagtggacactactcattgttaatttgtgtatagattatattactttgccatatatcttggcttttgatgtttcctttctcttctataattcgaatatattttggtatataatgtatgtatacaattgagtatttgatcattaaggattttctgaacaattttgttgatgtttgcatgttgtgcatttcactaatcaaatgatacaatgtttcatttggatgaacatactggggagggatcaaagatggtggatgcatagtccaccagttagggttcccagccatcatttgctgaaataaagaaaatattttgtgtggaattaataatactcaattcatggcttgcaaatgaaccatatgtaggaaatgaaatatttaatatcctttcccatatacttttcctctttcacctttgtgatatttccttgtatgtgcaaccaaacaaacctttggctaaagctttaagtgttgtgttttgccttcttactagctgttgaagaaacttaaagttatggggtatcagtatt

SEQ ID NO: 111635 - DNA, 223 bp, Glycine max
  unsure (1)..(223): unsure at all n locations
  Clone ID: PAT_MRT3847_71816C.1
gaaagcaccagatacangagggggacattttaaattagatactgctttgaacaaacaggattactcttgttgattgctaagttaaatgtataggggatacttcaagcgtagacgtgagagcatacgcctagagcatcgcatgctatacatctagcacacggaggcaatacgcaggctcgtgctcagtattcaatgggtgggcaccatgcaattagaggacagg

SEQ ID NO: 111636 - DNA, 278 bp, Glycine max
  Clone ID: PAT_MRT3847_71817C.1
aagcaaatgatggtatacaaaaccttccaggtgggaaattatgcaagatcaaaaaggagatttgtttctcgggagcaagttgagtgtcaacctttttctaaccacacatacaagggtggtggcaaggtagagttactttgtcaagatagggggatcagagggtggtgggtcaagggtgcaggtgttcaagtgggccggaaggaggtggaagtccaatatggttatttccaagatggagattggaggggaaatcttgagggatgggttcctggtttcaa

SEQ ID NO: 111637 - DNA, 510 bp, Glycine max
  Clone ID: PAT_MRT3847_71818C.1
tgaaatgtctaggtttcttttgaagaacgatggtctcttccttgggagttcttctgcaatgaactgtgttggagcagtaagagtagcgcaagcaattggccctggtcacacaattgtaaccattctctgcgacagtggaatgagacatttgagcaaattctatgatgctgaatacttgtctctgcttggtttgacaccgaaagcaactggtttggagctcttaggcatcaaatgagaaggtttcttcagatttttgaaattttaatgccactgtctagctgctatatacttgagtgcttagtgcctgccttggatgagagtggccacctagaagttagtttagttatattgatatatagaagatattacacttattaatacactgttttggggggtattacagggctcattctttgttagtcttcatggtttattaactaggccaagatcaccaaattgttgtaaactaaatatattcaattcaaactgtttcagtaaaaaaaagaatac

SEQ ID NO: 111638 - DNA, 226 bp, Glycine max
  Clone ID: PAT_MRT3847_71819C.1
aggtcctgttgatagaactccacattagagggccaggggcaactacaccacttaagctttcctctgctattagacaacactaaggttcagctgcgaaatgaccactgaacggtactgctgatacaaaacgacacaagggtaccgctgctagattgacaacatattgtggagaaaactaatgagagattgattttctgacagacacagcagattatagatcctcttc

SEQ ID NO: 111639 - DNA, 1184 bp, Glycine max
  Clone ID: PAT_MRT3847_7181C.1
tccggccccgtcacgcccactgttggcgttcccggtcctgttactgctgttgtgccgtctggccacgctccggttctccttcagctctctctcttcgaccttctagcctccgcgtgggctagtgcctcgttgcgactgacaccctatcgtgagactgtcaaaccccctcaatgcccgctttcaacatccgcctcttctccatttccttccttcaaaacattgcttacccttctcttttttcccccaaagtttcgttcttttgtatcttctctcattcaaagtttgagtcttccgcatttggggtgccctgaattgccgtgcaagttcagatctgcttacagaattcatatttgaatcggtgaagattttgaaaatgatcgtgagaattgtcatggggcgagcaaagtcactgcttttgctgcttatggtgcttttgttttcctttgccgcttgttatttgggtccttggggcttcggccatcaggccggtgggggggtctctttgcataggctgagggtgggatggggaaccataaagccagtgattttgagatgaggactacaaataccatatcaaaaatagattagtttaagcaaataggagttgtgataaatacaaatgatgcttgtgctttctatgaaaatagatttttttttcttttaatggccaggaaattcttttacattcaaacgtatacaagaccttcccactcttgtagggaatcgagatgatgcaagctctgttgagggttatgttgtcctaaatagaccatgggcttttgttcagtggctggagaaagcagatattgaggaagaatatattctgatggcagaacctgaccacatatttgtaaatcctttgcctaatttggctcatggaaccctgcccgcagcatttccatttttctatatgaactcatatgagaatgtagacataatcaggaaattctatcctgaggaaaagggtcctgttactgatgttgaaccaattggcaattctcctgtaatcattaagaagtctttgatggaggaaatagctccaacatgggtaaatatttcattgagaatgaaaaatgatccagagactgatgaaacttttggatgggtgcttgaaatgtatgcttatgctgtgacatctgcattgcatggtgtagagcataatcttcgaaaagactttatgcttc

SEQ ID NO: 111640 - DNA, 141 bp, Glycine max
  Clone ID: PAT_MRT3847_71820C.1
ctagtgttggtatcaatactgcgtgggggcttctaatggctagcatctcagtagatacgggtcgtgaaacaccattgcagttcgcttatatgtgagtactttcatcggtatgagactatgtgtgtatgtctaattgtactg

SEQ ID NO: 111641 - DNA, 239 bp, Glycine max
  Clone ID: PAT_MRT3847_71821C.1
ggtatgtgtatgttgatgttggagctacaatctatggttccagcattggaaggtgggttatgaaacagttcccgcaacagaacaagacctttcatgtgtgtgcaaatgaggctggtaaaacgtttcatcaggagggtgaaacgaaaaagggggtttctttgttgccctatgctgcatgggggaagaaagaaaggttggggtttgagattaaccgcgacccgccggagaaagggaacgag

SEQ ID NO: 111642 - DNA, 406 bp, Glycine max
  Clone ID: PAT_MRT3847_71822C.1
gacaatcaggcctggagggccgtcacccacgcgttcgggagaaatgagatgccataaagtgattaactttggccgtgaatgtgctcaaacctaacaccaaactgaaaacataaatactgaccactcctatgttcggacccaagcaagttagctaaaccaaaccaactcctctgctttgtccctcaggtggaaaagagaggtagtttagaactctctgcatcatggtggcaattaatcaaaaacctcagatgcttgaaattcctaatacctatactttatagcggttatagtcagctcatttgcatgccactatttcccataatgcttctgagagccactaacttgattgataaagatcctgcctctgctgagtgtacctgaacagtatctaagatgaaagagttta

SEQ ID NO: 111643 - DNA, 378 bp, Glycine max
  Clone ID: PAT_MRT3847_71823C.1
aaaaaaaaatcccatgcaaggaaaaaaaaaatcaccaaaaaaaaaaaaacaagatcttaaaaaaacattgtccttttaaaaaaagtacccccaccatggggtttgggaagacattcttccactcgaacacatttgaaccttaaacaatctttcgaaagggaactttttcagcaaaaaaaaatatccccccccaggagggggaacaacgttgaaagaaaacagggaaatcatttaaatttgcttaacgggaaaaatttcttaaaaaacaaaaagggcatatgatctatccccgatctttcttttttttttaaacccccgcaggggtggggagaattaaaaaaaataaaacacttttttgtgcccaaaaaaaccagttaa

SEQ ID NO: 111644 - DNA, 517 bp, Glycine max
  Clone ID: PAT_MRT3847_71824C.1
ctcctcacataacctgtttatttgcttaaattgggtcgtatgcacactcctggtaagggtattagctccagtgctattccctacaagagaactcccccaccatggcttaagactagcacatctgaagtttgtgatcagatctgcaagcttgctaagcgtggtcacactccctctcagattggtgttgctcttcgagactcgcatggtatcggacaggtcaagaacgtgactggttcgaaggtgcttagaatcctcaaggcttctggactcgctccttctttgcctgaggatctctatcaccttattaagaaggcagtctcttgccgaaagcatttggagaagaacagaaaggatgctgactctaagttccgccttattctcatcgagtctcgtatccaccgtctggccagatattacaagcgcacaaagcagcttcctgctaactggaaatacgaggccgacaccgcctctgccttggtcgcgtaaagtaataaaaataacctgagtacaatacaac

SEQ ID NO: 111645 - DNA, 168 bp, Glycine max
  unsure (1)..(168): unsure at all n locations
  Clone ID: PAT_MRT3847_71825C.1
cgattcggntcgaacatggatgngaaatcgncggagaaactaatantggttgaaccgcgagccaaacggngncgcactggtgacgnttaaccgtnccggttcccttaactcgttgacccgnnccatggatgngtggacctggcccggntttcaagaggctcgaccggg

SEQ ID NO: 111646 - DNA, 554 bp, Glycine max
  Clone ID: PAT_MRT3847_71826C.1
gagagagagagagagaactagtctcgagtttttgtgaaaccgcattcctttgagcaattttcatttctaacaaaggatgcacccaaatttgggtacaatacatgtatggattcgctcaatttgagtaacccataatttgtataccatgatttaaaacttaccaaacccaagtagcccttaaatgagcttttggtgaataggcatctaaacagacaaagaagttatagtaatccacctttctactaatccaataactacatttttgggaactataaaaatgccaagccgaacagaagcttatctagctaggaagagaaaaatcatagcaaaaagtcccaggagcactgtgaaaaggtccaagctatgtcccaaagtagaagctgcagaaaaagtcgaatgcgtcttctgcaagcttttgaggggaccacaatttaaaaagttttttgacctaggtaccacctgtccaggttttctgctctcatattccatgatccaacattgtcaagcgatataaggatagctgtccatcctccaggaaaaacctgagttgtgca

SEQ ID NO: 111647 - DNA, 341 bp, Glycine max
  Clone ID: PAT_MRT3847_71827C.1
gggtcgagattcagttcctttgaatcttgttctctcttatctttctcactacaatggatactgggttagccactgtaagacgaatcacgagatcccaaatcgccttcaacaacaacatccccgtttcaagaaaaaagaacgcggactgtccagacaagagcgttttaaaaacgcgggatacaaacagcctgcaacaacaagaacagtgtgcgctgaccgacatatcggacgattcaccgatcgctgggctaggcgactggaaggacatcattgatacgcgcttgtacatatttgacattaaaagaagggttcaagagactatgaatacttcggtgtcacct

SEQ ID NO: 111648 - DNA, 300 bp, Glycine max
  unsure (1)..(300): unsure at all n locations
  Clone ID: PAT_MRT3847_71828C.1
gccggggtgcggcggcggtgcaagagccggacggcggcgtcggcgcaggcagcgtcgccgaggagcttgcggaggtggagaagggaggagaaggagggagtggcggtggaggaggttgtgaaacanangaagaggaggcacagtgggagacataggaaggagagactcagcttggtgccttttcaaccaccttctacttcttctccaacaacttttgcgggtggggagaatattcgctcnttttatcgcgncggcgcgcttgtccggcatttgctagtgtgcggcggtggcccccccccc

SEQ ID NO: 111649 - DNA, 307 bp, Glycine max
  unsure (1)..(307): unsure at all n locations
  Clone ID: PAT_MRT3847_71829C.1
agtcgcangacgngtacgtaagntgggaattcggcnngntcacaagtncatgncaactcnnnataagagnctntgtcnttgcnatggagagantgngaatgngtngtcgctgaatgtatnacacctgatgntntnntgngaagtgggngnaacaagntcnctntggnaagttnacgntagcgganaaagnannananncnagatgatantggaatnanatgaganagantnactnaatcgnctctctgacatagcaggaggncttcaatctcgagaaaccgnganannntgttacgggtaattcgag

SEQ ID NO: 111650 - DNA, 512 bp, Glycine max
  unsure (1)..(512): unsure at all n locations
  Clone ID: PAT_MRT3847_7182C.1
tcatgcgtccgagatattgcagcctcccactggcactaagaatgatgtcaataaatgggaacaatctattctcatgaatgttggccatttcatgcagtatctacctcatggtggtcaaatactgctttttatggaccaaataacttcaagcaagatgagggataccaatgctggttcttcatttatctctcagttagctgctgatgaagggtctagaaccggaatcaagggcactgggattttgagttccataagcacaatcaatgcagtcactgagaaaacttcatctattcttggtggcatcagaccaaagcctgtgactaacatagacccagagtcttccacacctttgaagtaaattttattagtatagtttcccaattgccctttacgtttttacctggaaaatggattttatgcattttggtattgactgcagtcaacgtgggtcagcatctgccagcttgtaaatcactattntttatggaggtcaaactcatgtgtttgatgat

SEQ ID NO: 111651 - DNA, 421 bp, Glycine max
  Clone ID: PAT_MRT3847_71830C.1
tttcgtgcatttacgcgttcagatctatggatatgattttgttgccggggatgtaataccccataatattggtaaccaggcacctgttgatggaatcctgatcactggacacgtttttgcaagggatcaaacatggatcactggagagagcaaaaatgtcagggttgatctttatcttcaggaacatgggaaaatggatacgctttcatgataactatgttgggatgcgcaggttcattaggatactaaggaacctcgcctggagttaggatgacaagttgaatatgggagcacaccctatgctggtccttggtgttgaccttaacactgagtgggggcttctattgtttaacgtttaagaagatacaggtgaagaaacatcatagtatggcaaacttataaaggaggggctaccatgatt

SEQ ID NO: 111652 - DNA, 1904 bp, Glycine max
  Clone ID: PAT_MRT3847_71831C.1
ggaacatgctcatcaatgtgttgaccactaccaggcatcgcacacaagtatcaccatcgtgtccgtacgatcaaaataatttcaacagtcagagctgaaacaccaagatgccaagatgagaaattggggatgcgaaaggaggatctttgtgacgttaggaggtcacaggtgagtaccagtgagaagctcaaagtgtggattgaaggcgtcgcatgctgagcttatagtctggtcacagttacagagaaaaagagagagagagagagaaaagtaatggcaatggcaacaatggaagagattccacaaagcccagaagcgaagttggggatgcgagtggaggatctttgggacgttcaggaggcacagttgagtcccaccgagaagctcaacgcttgttttgaaagcatccctgtctctgcttttcctttggatccttcaaacacagaaattgagattaaatcagacgccaccctagcagatgctgttaagatattggcaggacacaacgttttcagcgcgcctgtggtggatgttgaggcgcctgaagacgctagttggattgacagatacatcggaattgttgagtttgctggaattgttgtatggattttgcatcagtctgaacctacgtctccgaggactccgtccactccatccagtgcaagggctattgcagctgcagctaatggagcggcttttgctctagaacttgaagccttaggccttggatctgctgcaacaactgcagggaacttttttgaggatctcacttcttctgaactttataagaataccaaggttcgtgatatttcagggacattccgctgggccccgtttcttgctttagagagatcaaactcatttctaaccatgctcttgctgctttctaagtacaagatgaagagtgttcctgtgttggatttaggctctggtgcaattgataacattattacacaatctgctgtgattcatatgctggcagaatgcgctggacttcagtggttcgaaagttggggaaccaagaaactatctgaagttggtcttcccctggtgacaggaaatcaaatcatcaaggtttatgaggatgaaccagtcctccaagcatttaaagtaatgaggaaaaaaagggtcggaggggttcctgtaatcgaaagagagaccaaaaaagcagttggtaatataagtttgcgagacgttcaattcttgctaactgcaccagaaatctatcatgattatagaggtattacagtaaaagacttcctaactgaggttagaagctacttggagaagaataaaaatgcatccccaatgttaaatgaatatgtcacatgcaaaaaggactgtacaatcaaagagttgattcaactacttgatcaagagaagattcacagggtctatgtggtggacgatgatggggatttgcaaggactaatcacactaagagatatcatctcaaggctagtacacgaaccgcgtggctattttggtgatttctttgatggtgttctaccgctgcctgcaaacagcagagtttaacaggcaaggttacaagggagaataacctgctggtgcagcttttttttttttaaaaaaagaaaaatttaagtaaaaagggaaaaaaaaaatacaaatagatcaatgcgcttctcttcagggttgaagacgtgtgcttgggtctttgtataacgagtaggcaatttgcaagttaattgcatccgttttattaagtgttagagtgagatttgtgtgtactgtaaattctggtggaagtgtaagtaaccataagttttgttaacttttgaaatgtaatttcttttctcttcaaaatgtgtttccaatattttgatttgccaaatatatcacccctcatcttaataaggaggaagatgaaatatgaacaggag

SEQ ID NO: 111653 - DNA, 162 bp, Glycine max
  unsure (1)..(162): unsure at all n locations
  Clone ID: PAT_MRT3847_71832C.1
agcttacgttttcaaagacgagtatctcaatacattacgggattcattcggacatccgagaaaaaagttcttgtcgtgggattgtgctcagagcctctgttctcaattaagagcgtctcgtcttgttactggctggtctgcagccggtgnngctcnnnaaaa

SEQ ID NO: 111654 - DNA, 619 bp, Glycine max
  Clone ID: PAT_MRT3847_71833C.1
agtaaagaacttcctgactgaggttagaagctacttggagaagaataaaaatgcatccccaatgttaagtgaatatgtcacatgcaaaaaggactgcacaatcaaagaattgattcagctgcttgatcaagagaagattcatagagtctatgtagtggaggatgatggggatctgcaaggactaatcacactaagagatatcatctcaaggctagtacacgaaccgcgtggctattttggtgatttctttgatggcgttctaccgctgcctgcaaacaccagagtttaacaggcaaggttacaagggagaataacctgctggtgcagctttttcttttttgtttttgaaatatttttttcaagtaaaaagggaaaaaaaatacaaatagatctatgtgcttctcttcagggttgaagacgagtggttggatctttatataacgtgtaggcagtttgcaagttaattgcatcacttttattaagtgttagagtgagatttgtgtgtactgtaaattctggtgtaagtgtaagtaaccataagttttgttaacttttgaaatgcattttcttttcccttcactatgtgtttcccttgctacgatttagaataatatttggc

SEQ ID NO: 111655 - DNA, 220 bp, Glycine max
  Clone ID: PAT_MRT3847_71834C.1
gtgctgcaatggcttcaagtcaggaggaggtgacccttttccggagctactggaagcccatgtgtgagcagggttcatattgcgcgcaagttgaagggatcgcaatacctatatgtcgaagtcaattcgaggagcacgagggaactgcctcgcagatccaacccagtgcgcaagaaggttccactgttgatgcactctgtgatgcccatagcagagcctc

SEQ ID NO: 111656 - DNA, 194 bp, Glycine max
  unsure (1)..(194): unsure at all n locations
  Clone ID: PAT_MRT3847_71835C.1
annnntnnnnttattttttttttttttttttttttttttttttttttttttttttttttggggaaaacacaaattttggcctttggtgttgaaaatcccaaattacttcagtcaacgactgaaccccgttctaaattgttagatgggtaaatgatcaaccctttttttcttacaggttccaacttaaccggccc

SEQ ID NO: 111657 - DNA, 416 bp, Glycine max
  Clone ID: PAT_MRT3847_71836C.1
ttttcaacttctaattaggggcgcattaaaggaaagggattcctgcctcggatggaaaaatacttcgccccattgacaagggtaccccgcagacctgaaaactgaatcaatgcgctccatgtttacaggcctaattaaaacctggaaatgtcaaaaattgccttcctagagggaccttacctatgtattgaaatgatcctcatttctctcacattttattaccaccactcaaaacgtgtgcacgctgtggcagcctatattaacattggccatcggccatgacttcgctgcgtaatgaggttcctggggacgtacggcagaatgcccccgttgatactgtggcgaggcccacctcagcttccctgcggactgtgcctgtgaaagattatccagaaatggttggtacagtgacatgt

SEQ ID NO: 111658 - DNA, 1031 bp, Glycine max
  Clone ID: PAT_MRT3847_71837C.1
ccacgcgtccgtacggctgcgagaagagacagaaggggctccaaacggtcctagctcaacaacaagcatatccttcatcattgtcaccacccctttgcacaatggagagggagagagcattgtttgagagggtgagaaagaatagcacagtggaagaggaagtggaaaatgaagtagaggaggaggatgaaagtggcgttagtattactgaagaagagaagaagaaaggggttggtagtagtggtgggagaagagggtcaagtggaggtagtggaggggtttctccaccttcatgtcaagcagagaggtgtggtgctgatttaactgatgcaaagaggtaccatcgccgccacaaggtgtgtgagtttcattcaaaggcacctgttgtggtggttgcagggctaaggcagaggttttgccagcaatgtagcaggttccatgacctggcagagtttgatgaatccaagagaagctgccgccgccggttggccggacacaacgagcggcgccggaaaagcaacccggaagcttccaatgagggcagcaccaaaggccatcaccctaaggaaacaacacactgcaggcttgcaaatgagagggagagaattcagatgaacctaccagggagttccggctacaagtctttcaacatcagatgaagccaaagtgttcacaaagctctctctcttctgtcaccctttggtttcttacaacccaaggtatataataaaaacccctttgtattgtatgttcacatgagcaagaatcaaaaatcccaaaaacttccaacagccaaagcctgatgtcttaatatgcaatgtaagctagctagtttcctgagctctgtttttcttatttggatagagtgccttttttttctgtttgccttatcaccattgttatcctatagaagcacccttcttgattggggtgtgctcttatcttccattgggttagaataaaaagatattgcttcttttgggtaaaaaaaaaaaaaaaaaaaaaaaaaaaaaagcggccgctttagagga

SEQ ID NO: 111659 - DNA, 305 bp, Glycine max
  Clone ID: PAT_MRT3847_71838C.1
cagcgatgacaaagaaactaggcttggacttttgtgtttatgaaagaccacgtgcacatgcgtgaagggtcatagctatgctacaatctcaatcatattcatgtcactggctgtgtcttgataaatgtaatactgtgaaaatcgtgatatttgacaacattctaccattgctttacaacagtgtttaagaatctgccgttctatcatataagactgaacttatcatctatacaaatagaaagtcagtctgaatatcatatgacacttaccctttacatgtccagataattccttagatgctgtga

SEQ ID NO: 111660 - DNA, 581 bp, Glycine max
  Clone ID: PAT_MRT3847_71839C.1
agctgtcctagtgcaataaaaaataccaatcctataatatccatgctctagatgtccaatcctgggtgtgaggggggtgtattgactattgagatcccacatcatggccacactaggggttataaaaagctttagacaatcctcacctcatgagatagcaaaatggagttaggcctgacccaaattctagaatatgcatatacttttcacacatacagaggttataaattcattttttgttcttttgcttgaaagcttagtgttgaacttgcaaagttaaccagaattgtagttcaactgatgactgttatttagctatttacttttaaaaatttgtaagtgtatgctgtatcctgtatgtaccattcaaatggttaaaagactggttcaagtggtacatacttgatttcccttaaccaaagttttgggttcaactggtttgccttgtgtttgtaaagatacccgctgggtgagctagcctcatcacgttttggatggttcctatcttgaataggattgcctcctatggagaatatctgttgtctagaccaaacaagtggtataaaaaaacctcatattag

SEQ ID NO: 111661 - DNA, 213 bp, Glycine max
  Clone ID: PAT_MRT3847_7183C.1
agcaaagagcctggtcacgatggatgatactgatcgagggcagctgtttttgtcgagtccattggagaccccgtgaaggatgcatattggcctacacacacacagccttatgaagcacatgaacgaagtgcttctattggtcactcattgcttgtgcgcacatggtggcctgcttgtcaagagttaaatagtgtagatagaagaaagagcatc

SEQ ID NO: 111662 - DNA, 311 bp, Glycine max
  unsure (1)..(311): unsure at all n locations
  Clone ID: PAT_MRT3847_71840C.1
aaaatngnacacncacaccacncgcgacganacnnannanaannaaacnggcnnnaaaanagaaannacanaaaaanacanaaananaaaatcaatantcnaannacagcaactcacnnganaacaacnnnngcggacanacannccaccagnaacccnnaacacnnacgccgcncaacanccaacananncgggncnnacagtncncccnncanccacngcacggnncccccccananacacngcgncccancnncccagnncncgagcngnngccncnncgngccggnnccnnanccancacgcccccn

SEQ ID NO: 111663 - DNA, 339 bp, Glycine max
  Clone ID: PAT_MRT3847_71841C.1
cgcactggatagcaccgatccggaatagccggatccatccaggcgtacgcggtccatacatatttttgattgacagacattgatattttgttaaaaaaaaaaaaaaatattaatttttaaaatataaaatatttttttaatataattaaaaaaaggggcgcctgttcaaaaatataaaaaggggccggccgttaaaaaccaacgacttacctaccttattgggcgagcaaaaaacaacttttttggccgacttttaaaaaaaaaaaaaaggcaaaaactttggcctttcccaacttttccccctccggaatgacaacttttacccccctttagattaat

SEQ ID NO: 111664 - DNA, 181 bp, Glycine max
  unsure (1)..(181): unsure at all n locations
  Clone ID: PAT_MRT3847_71842C.1
cacaaccactcttaatttctctctgcattgctcacttacacanctctccaacctttcactttccagttcatttcaatgcgtctctatcctttccaaatgcgcagcgttgaggttgcacatcacacaccaacaacagcttcagaacatcaaacaaccgagcgtcatcaagatccaggaacca

SEQ ID NO: 111665 - DNA, 961 bp, Glycine max
  Clone ID: PAT_MRT3847_71843C.1
cagaaagcagcacaaaattaactggtgatgttgacgtcgatggatggacaatagtagtcacacgttcaaagagaatttagagaacaaggatgcatgtgaaattccagcaaagaaaaaaacagatgcaaatcaaccaaccgatgtggagataccaaagacagaaaccaaaggtgtgcatgaagatagatccgtgcaaccaatacctgatgaaacattgattagcaacgaaacagttgctgagagtgatcaagatgagagacagccagaagcagaatttacagagaagattaacgatgaggtgaagactccacaaaacgatactttggagactgcagaaataaataaaaatgataccaaaaacaaaacaagccaagtgaaagagagaagaaaagtcaaagacaatgtcagggatcattcacaagattgaggagacccttcatgtgggaggccacaagaaggaggaggagcacaagggtgagcagcaccatggtggagaatacaaaggggagcatcatggtgaacacagtactgaatacaaaggagagcatcatgttggtgagcacaagccggagcaccatggaggagaagagcacaaagaggggttcctagacaagatcaaggacaagatccacggcgaggagggtggcaccgctgagggcgagaagaagaagaagaagaaggagaagaagaagcatgaacatggccatgacagcagcagcagcagtgacagtgattagattatctcccactgctgcatcacctatatatcttataaggtgtatgggaccatagtagcgagggctgtgtctttctctttttttccttcttgtcatttatatttatgagcgagagaaatagtgctgtggtttcgttggtttgtaacccctctgctttggttatgctggattgtatattatccttaaagaaataaaagattaaattatcagtaaaaattagtagt

SEQ ID NO: 111666 - DNA, 1713 bp, Glycine max
  Clone ID: PAT_MRT3847_71844C.1
gcaaatctccaggatttgatttctatgaatgtcgatgggaaggtgcaaaatggtcaaaacaatctgattgaagatggtttcttgctaactttcaaggttttacatttttgggggattaaaagttgtttttcttggaccaaaaacaaaacaagccaagtgaaagagagaagaaaagtcaaagacaatgtcagggatcattcacaagattgaggagacccttcatgtgggaggccacaagaaggaggaggagcacaagggtgagcagcaccatggtggagaatacaaaggggagcatcatggtgaacacagtactgaatacaaaggagagcatcatgttggtgagcacaagccggagcaccatggaggagaagagcacaaagaggggttcctagacaagatcaaggacaagatccacggcgaggagggtggcgccaccgccgagggcgagaagaagaagaagaagaaggagaagaagaagcatgaacatggccatgacagcagcagcagcagtgacagtgattagattatctcccactgctgcatcacctatatatcttataaggtgtatgggaccatagtagtgagggctgtgtctttctcacaagagagagcaggtgcatggtgaagaatacaaaggggagcgtgatggtgaaaacagtactgactacaaaggagaacatctgttggtgagcacaagccggagcaccatggaggagaagagcacaagaggggttcctagacaagatcaaggacaagatccacggcgaggagggtggcgccaccgccgagggcgagaagaagaagaagaagaaggagagaagaagcatgaacatggccatgacagcagcagcagcagtgacagtgattagattatctcccactgctgcatcacctatatatcttataaggtgtatgggaccatagtagtgagggctgtgtctttctcttttttttcctacttgtcatttatatttatgagcgagagaaatagtgcgtgtatctggttgctaattcgagtgctattagtctgtggtttcgttggtttgtaacccctctgctttggttatgctggattgtatattatccttaaagaaataaaagattaaattatcaaagcgtatgaatagggagaaaactggcctcacaagagtcttgcaggaaataaaggaatcagagctcgcaagctacgggatgattgttaatagcttttacgaactggagcaggtgtacgcagattattatgacaagcagctgctacaggtacagggaaggagggcgtggtacataggtcctctttccctgtgcaaccaagacaaaggcaagcgaggaaagcaagcttccgttgaccaaggagacattttgaagtggctggactccaagaaagcaaattcggtggtgtacgtttgttttggaagcatagccaacttcagtgaaactcagctgagagaaatagcgagggggcttgaggattcggggcaacaattcatatgggttgtgaggagaagcgacaaagacgacaaggggtggcttccagaggggtttgagacaagaacgacaagtgaagggagaggagtgattatatggggttgggcaccccaagtgctaattctggaccatcaagctgtgggagcctttgtcacacactgtggatggaattccacgctcgaaattaaattatcaataaggacgaccgctggacggccgctctacagg

SEQ ID NO: 111667 - DNA, 297 bp, Glycine max
  unsure (1)..(297): unsure at all n locations
  Clone ID: PAT_MRT3847_71845C.1
cctctgctcgatcggtcgggtgtattactgatgttaggattgggaatctgattcatggagccatattggattcgaaatgagagccatattgtatgctaccggggaggttttaagtaatggagaaccaattttattagggtactggtttgtcagaggctactgggctctaagaacggttatcagattaaattctgcagattaatttaacagattcatctggggggggctggtgaagacaagnttatattactggatgtatggctttggttgcagagtttggatactgggatgtgatga

SEQ ID NO: 111668 - DNA, 268 bp, Glycine max
  Clone ID: PAT_MRT3847_71846C.1
atcgggggaaggtttttttttcttatcttaacacacacgcactacacaaagctcggagtgaagaaggaaagagaaaagaaatccaaacagtcacaagcacgcgaaagaagaacaagatagagcagtcgtcactgatcggagaaacgggacatccacaacaatggctggggtcggaaggaaagcaatcaggcgccatcgtcaagaccgccaaccggtgcaaggggaaccacccgccggtgctggagaaaggcgccccccccccccgacc

SEQ ID NO: 111669 - DNA, 666 bp, Glycine max
  Clone ID: PAT_MRT3847_71847C.1
gccttcagtcagttacgtaagaactctgaaaaatgagagtctaaaccattcagtggatggtcaaaatgtgggctccatcacatcaaacgggaaactagaggcatttaaagatctcactatctgatcaaatcaaatacatccatcaggctaaagacacgtgcgtattacccagtttggatgcttataaaaccaaacggcatttcatactcccagaaacgactgcgttgcaatttgcagcaacaaaggtcacagttttggtgcgggttatggcaaattctacactagccattccaatgtattttctttgcatgatttctccctctcagctgtgaaatttatttggtttgcaaatgtgtataatttgcctcaattatgttttaggattgactttttcaatttgttcacccctttttttgagaggtggtagacgggggctcatgggcttgtaccattgtcgtagattttcattttggtcgttgggagagttacagaattttaggtttctgttcctgcattcagccaacatacatgtagggagagcatgttgtatctttcctattttattggcttattcatcatgtataaacattatgtgaaaattttgctactggatgccaaaatgacattctattttggatgaattcagtaaaaaaattggaggttcag

SEQ ID NO: 111670 - DNA, 224 bp, Glycine max
  Clone ID: PAT_MRT3847_71848C.1
cggaattcccggctcgacccacgcctccatatgcatgacaaaaaacgacttactgtcagtgtctatcaaaataaaaccaatgtgaacattgtaatttctgaaataacttaaataatatacatcatactatatcaaaatacctatgatccgcaatttatgaagacttctaattaaagcttataaattatactgccccatctgaccctgtttacaataaatcaaaa

SEQ ID NO: 111671 - DNA, 373 bp, Glycine max
  Clone ID: PAT_MRT3847_71849C.1
tcacatctaagccttcattactggggtccatatgtcgctgactcgatcgacaaaggcttctgtccagcagttcagtgcgctgtgtctgcagcatttgggtgaccgtgtagctgctggcgaacctgattcaagcgccttcagtggccgccacagctgtgttttcacggaatgttctatacacatatcggaatgtcagaagcttagagttacaagctgtgcgtctatcattgtcatcatttccaactgggtgcatgtgacatattcagcatggacttactagcattgaacaacttccaaagccgattcctagctatgcctacgattgacattcgagtgatttatgtcaggcgctaacctcatcgtagagtctcac

SEQ ID NO: 111672 - DNA, 318 bp, Glycine max
  Clone ID: PAT_MRT3847_7184C.1
ctctacccgttcgtctccgtggtggcatgcatatcgtcgtcaataatcacactggtatcttcggtaccctacaggtctagagctctgaaaccattgacaacgtcgaggccacgatgcaggacaaggatggaatcccccctgagcagtaacgtcgcatcttccccggaaaggaacttgaggactgacgcacccatcggagactacaaaatgcgtaatgaatcaagccttcacctcgtcctccgtcacctttgtggcaggcagatccgcgttcgaatcctcaccggcaagacaaataccctacaagtccagagctccgac

SEQ ID NO: 111673 - DNA, 363 bp, Glycine max
  Clone ID: PAT_MRT3847_71850C.1
tattatatcacacactttacacattattacttcttttttttggaggaaaggaaaaacagaggcagggtgttttttctcttcataagggccatgcctaatcctcctttattgagggggaccaacgagccatcgaaaggtaaaacttatcccaccaaatgctttggaattcgcattacaagaagaggggggaggccccttttaatcagtggatggaaacatattagtgtgaccaaagatgtaaaaaaattagttagataccctggggatgggtacctttgatgcccgtttgggatccccaatcctgggaaacacggggcttaaaaaatatggcgttggcttgcaactttgaccttcaaaagaatt

SEQ ID NO: 111674 - DNA, 117 bp, Glycine max
  Clone ID: PAT_MRT3847_71851C.1
gggggattgcagaatgaccaaaattttacatcggatcgaacgcacgttaatgacccccgatctttacatatgatgaattaaaccctacctatatattccttaacgaggatcttgtaa

SEQ ID NO: 111675 - DNA, 382 bp, Glycine max
  Clone ID: PAT_MRT3847_71852C.1
actgtaggaacagcgggggcggggtgtgacctcaaaataaaaattactataaacctatggacaaatattactgcgtcattgattacgaccagttaaacaaaccgagaattgaattgagggcaggacgtcgctcctcacattgcaaattttttaaattttgtaccaaaatattacacttgcccttattttacaccctattaatagccctttgggaacaaccaatgaaacaaacccgaagtttccatcactactaaagagatcaccttaaatgtggctaaattcaccaggggaaatgtgatcaggaagcttttgctaaaattatagacaaccactggctggaggcgaggtattaacaaagggtgcaaggaattatgtactgagg

SEQ ID NO: 111676 - DNA, 516 bp, Glycine max
  unsure (1)..(516): unsure at all n locations
  Clone ID: PAT_MRT3847_71853C.1
gaagcaacatgcaaagagcacccagatactgtcggtggtgcaatgatgagtggactacgagaggctgttcgcatgattgacatattgagcagtgggaatgattatattgcagacgtggaggcattggcagctgctcggggacagttagacactgaacgggatgaagttagggatataataaagagacttgatgcattagagctctctaacataatgtacaagaactctttagatggtgctcacattttaacccgggaagctttgctgagggaaatgttctttaatacgaaaaccactgctgggcgcttacatgtggccaaacaattgctaactcttcctgttggatactttgaagtcttttgctggaaggaaagaggggctagccattctcaattcatggatgctggactcaatggggaaggatggtacccaactcttgaggcactgtttgcgtcttcttgtccgtgtttcgactgatcttcttgctgtacgattatcangaatggngaaaaccgt

SEQ ID NO: 111677 - DNA, 285 bp, Glycine max
  Clone ID: PAT_MRT3847_71854C.1
cccacgcgttcgaaaaaaaaaaaaaaaaaattaaaaaaaaaaaaaggaaaaaaaaaataagggatactaaaaaaaaaaaacgggtattctattatataatatctactataatgtactaataatcttcattctgtaggcttttgttttcttctttgtcgttgactacataaattttttgtctcattttaaatcgccttttttccatacatttattttctgttgatatgtttgagattaggcattgtagttgttgatgttcttgcatattgtgaaagctggatttca

SEQ ID NO: 111678 - DNA, 298 bp, Glycine max
  unsure (1)..(298): unsure at all n locations
  Clone ID: PAT_MRT3847_71855C.1
angnncncncaagcgtacnnnnacncgnaatacgacncaancnagangccnagnaaatacatagccanncanaaanagancagaacccnagcnanncctnnngnagcaagnnancgganncnagccgnnagcgaatnccaaccacaccncgngcctngctgcaangacnnanaggagncncaggagtangngncnacnncnannnaangcacgngagnnacaannnngangganannagnnnngnanganancgangcnnnngcccacccccagngangagcaaggganagggananc

SEQ ID NO: 111679 - DNA, 180 bp, Glycine max
  unsure (1)..(180): unsure at all n locations
  Clone ID: PAT_MRT3847_71856C.1
atnnggtacgtaagngggggattgaggattgagnngnnggcnagannangattgcgagnagtnggngagcnaattgntnntgnggaggggnggaattaanntnngggaatgatagnnggaggcgtaanaggtttncntatngngagtggtattagngnttggaggnancatggtaatagt

SEQ ID NO: 111680 - DNA, 594 bp, Glycine max
  Clone ID: PAT_MRT3847_71857C.1
ggaaaatatagaaagccaaagccctcatgctacgcctcctgccgccttcggctcgagggttcttgttgccttgccaatacacacaagctctattcctctcttcctttgagcaactccaacaacaaccacatcgtttcatgccaaaaaggtttcacttttaaggtgaggaatttgggcttcaacgtggacaagagcttttggtcaaaccatgtttcctatgtagcacaaaagagaaagggtaatggtagctttgtggtgggatgtgcaagttggagtttggtgagagagttggagaaagagttggaagctgagatgaacacacatgaagagactggaatggcaaagtttaagcacaaatgtggagaaggaaaaggggtggtggagatgttggagtgtttggagagggaagctattatgggtgaagatgtgggaaaagagcctatggattataaccgaagggctcagatatttgatagaagctctagagtatttcaagctctgaaggaactcaacaacaacaatagccagtgaatttggttttactttagttgaaataaataaacctatcaagagaataatgaccaattgtattat

SEQ ID NO: 111681 - DNA, 107 bp, Glycine max
  Clone ID: PAT_MRT3847_71858C.1
acgagcgggtctgaaatttggacccttgtgtgtgaatttagagtacctgtccctttcctttttaaccggatatgggcactggtaagcgaggcatttatgttggtgtg

SEQ ID NO: 111682 - DNA, 266 bp, Glycine max
  Clone ID: PAT_MRT3847_71859C.1
gtcacaatatggggttccgattcaagagtaatccgcaattacgcagagataccagtgcatggagttttgtttttcgatataataatgatgcattatgaccaagttcgttatgtagtacgaatgaaagagtaatgtgaacacgtgcatgcgtttttgcgtaatttgaactttgaaatacatctagggtttggctggtggggtctaacaatcgagcttctgaaagtgattggaaaaattagattgcaatctcttcgaatctaggtgtg

SEQ ID NO: 111683 - DNA, 282 bp, Glycine max
  Clone ID: PAT_MRT3847_7185C.1
tgcggctccggtcccggttccgggttcgaggcacgcccacgcgttcgcgtacgcgtacatgcaggtgtgctgccacgcgcaggtgcacccgttcttccacgcggtcacttacgtggctcataacattgagcaaggccatgaaagagatgtgctgggggagaatgttggctttgatagtgaatgactctttagaatggaaaaagtgtactcttcctatgcccaatttgtgagtggaaagagcctgaaatttgacagaactggggaccgactgcattattaaaa

SEQ ID NO: 111684 - DNA, 465 bp, Glycine max
  Clone ID: PAT_MRT3847_71860C.1
ggtgaacataactcactatgggtcaacgaataaggaatgctttacttctgtggctttaaagggaaacggttggtatcttcttatagatggcccgggactggatgtttcgaccagactagtgcttctttatatatcagaaagaaagcccatggtcattttttcaggagattctttactcaaaaatttaatggctggtgccagtgttataaagacaactgacttttttggccacacattgattatggatcaagtgatactatggaaatgcataaagctaagttagccaatgggctcgccgttttgctgagcactgtgtttctgcagcaataattaaacttgacaattgagaaaggaagctctatgtccgatagaatggctggaaataattggtgggcctcccttaacacatattggactggtccttttactgcaaacgatgatgaatgctactgtctcaaatgataa

SEQ ID NO: 111685 - DNA, 391 bp, Glycine max
  Clone ID: PAT_MRT3847_71861C.1
ggaattatctgtattttgcaatttgcaatgatatttggttttacattgtgtctatctggctaaaataataatggttggattatttttctttgtcatgaattgtttctgcaggtacttgaaaaggggtgtgaatgatcgggggagggttgctaatgatgttgagacagagcagattgtccttgatgaagaatcaggctcttgcaagggaaagatgagttcagttgtgcaaatgcgtggatcaataccacttttctggtcacaagaagcatcaagatttagccccaagcctgatataaatatgcagaggtatgatccaacatactcagcaacataattgcattttgaagacctaacttagaaatattgcaatccaattattgggctgaatttg

SEQ ID NO: 111686 - DNA, 126 bp, Glycine max
  Clone ID: PAT_MRT3847_71862C.1
gtacgtaggtttaattcgctcgagctcagccgtcttattctcttaagagatgggttaaagaattgattagaacaagagatcttgaagaaaaatgagtacgatctgggccaatccctaaacgctctc

SEQ ID NO: 111687 - DNA, 298 bp, Glycine max
  unsure (1)..(298): unsure at all n locations
  Clone ID: PAT_MRT3847_71863C.1
tcgntgcacgcgtacgtaagctcggaattcggctcgagngcaccttggaaggacaggtgtaattgtcagttccctttctgatctgggtttaaaggagagctgtattggagtcccaaggtcatgtgccgttacatccatcacaggcattcagccccacacagcgcagatgaccnggtaaggaccagcttctccctctgtcttacatatccattttgtgtgtgtatgtgtgtgaaaggaggtaagcacagatagacttgtagcagtggcattgctgtgatcctgtgagctcagttgagac

SEQ ID NO: 111688 - DNA, 297 bp, Glycine max
  Clone ID: PAT_MRT3847_71864C.1
gtgagacccccgcgagaagacgacagaagggggggcgcttagaaacgagctgccggtgacccacccaagggggggacagagcaagggccccacaaggacgaaaaacaagaggaggaaaaaccgaaagacaccagacccagagatgaaagtggagccgccctagaaaccggaggaggaagatgaggcgacgcgggcggacacaagcagacaaccgccgccacaaaggaaaaggaggacatgccgacggcgaaggaagagacctcaggcccacagcaaaccatggggaaatccaaggac

SEQ ID NO: 111689 - DNA, 246 bp, Glycine max
  Clone ID: PAT_MRT3847_71865C.1
gccaaaatgaaagtggcaaatacacaccaaatagtgctagcagggacttctttgggagttagaaacacctttcattctattgtagccatcttaaccactcttgtagttgtcaccaccgtttgtctaagacaggatggaggacatttacctccaaaaataaatgcttctggtagtaattcgtcgtcgtcatcatcatcaaagtgtgacttgttctatggtaagtgggtttttgataacgaatcttat

SEQ ID NO: 111690 - DNA, 1157 bp, Glycine max
  Clone ID: PAT_MRT3847_71866C.1
cttcttctcttctctgttacagcaatggcttctttgcacactcctcctctcgttcgccgtcatcttcttcaccgtcgccctcttatacctccgccgcgtgttccgccgccgtcagttccgcctcccgccggggagccacggcctgccgttgatcggcgagacgctgcagctgatatcggcgtacaagagcgacaatccggagcctttcatcgacgagcgcgtggagcggtacggttcgatcttcacgacgcacgtgttcggcgagccgacggtgttctcggcggacccggaggtgaaccggttcattctgcagaacgaagggaagctgttggattgcagttatcccggttcgatatcgaacctgctcggaaaacactctcttctgttgatgaaaggtgctctccacaagagaatgcactctctcacaatgagcttcgccaactcctccatcatcaaggatcatcttcttcaccacatcgaccgcctcatctgcctcaacctcgatgcctggtccgacactgtctttctcatggatcaggcaaaaaagataacatttgagttccacaacatgtgattgctgtgtacgtgatgaaaatgaggatggtgaatcagattccatggttcggtacaatgtgtccaatttccttgcacatgagcctttcataccgcataactttcaaggcaagaacaaaggtggcagaggcactagcgttggtagtgaggcagaggagaaaagagtatggtgaaaacaaagagaaaaagagtgacatgcttggggcactgttggcctccggcgaccacttttccgacgaggaaatagtggattttttgttggctttgctcgtcgccggttatgagaccacctctaccataatgactcttgcgatcaagttcctcactgagactcccctggccttggcacagctcaaggtacggcatgaccctacctgcgcagtgcggcaccctggggcccctctggtctggtcggagttttgttataaataacagttaggaaaggattcaaatctgctacctctcctccttcccaattatatctccaagcagtgtaccttatttaattatatgatcatgagaatattcgttattctctttatatatgtgacttattaaagttttgtttatgtagaactcgattc

SEQ ID NO: 111691 - DNA, 417 bp, Glycine max
  Clone ID: PAT_MRT3847_71867C.1
catgtgattgcgatgtacgtgatggaaatggggatggtgactcagattccatggttcggattcttcactctcccttttcctctcttctccaccacataccgcagagccatcaaggcaagaacaaaggtggcagaggcactaacgttggtagtaaggcagaggagaaaagagtatgatgaagacaaagagaaaaagaatgacatgcttggggcactgttggcctccggcgaccacttttccgacgaggaaatagtggattttttgttggctttgctcgtcgccggttatgagaccacctctaccataatgactcttgcgatcaagttcctcactgagactcccctggccttggcacagctcaaggtacctaataagcctaagctagcactagaccttatttatttatttatggtctaa

SEQ ID NO: 111692 - DNA, 353 bp, Glycine max
  Clone ID: PAT_MRT3847_71868C.1
aagaaaggaaatatcttttttatttttattagatataatggtaaatgataacacaccgtattataaaatgcacgggctacatacgtgagcaataataatagtttaagtatcaagctactactagtcactactaagcttgtctcatgcaatctggagctggatacctaaatattgattgaattggcgtgcctcagccgtagatcccattgtctattttggagaccatcaaccactgcatgctgaaactcagaccactctatgggtttattcaggaaaagctgagccatcaatgccgtgagtgggtcttatagtggctaagacaagtatgctcggtgtccaaccaatgcattgtg

SEQ ID NO: 111693 - DNA, 1574 bp, Glycine max
  Clone ID: PAT_MRT3847_71869C.1
ttttatcctagacatgaagcttttctgttagggggatgctgttgtgatcaatactgatatttggcctgcacatttttatttaaacatttgctgattattgggcaactagttcaagctgatgtttgtataatctggacattcaagtttattagactccctcctcttgctaaatagtcacaaatgtgtcgaaaatttctaattacgcttccaaagataaatgcttgttctgaagaagttacttatcagcaggaataaaattattattatgaaaccagagaacattccgcccgaaaaaaagtactccttctggaagtaagggaggggttgatgaatatttttagttgttcagtttagtttgattcttttccatcatttgttagtattttatctgatatgattctgcaacagaaaccagagaacattccgcccgaaaaaaagtactccttctggaagtaagggagctcaacttagaaaacatattgatgccacgttgggtagtggaaatctgagggaagcagtaaagctacctcctggggaggatttaaatgagtggctagctgtcaacagtaaatatttttgtctctaatgcactgtttaagggcagtgtacagtcttgttgaagttttcttttgccttttattctctagtttcctcaactacgtattcacaatttatacaattctgaaatgcagtaagctgactttttttcttcttcctgcattacagctgttgatttcttcaaccaggtgaatctgctttatggtacccttacagagttctgtactcctgagaattgtcggacgatgtctgcaggacccaagtatgaatatagatgggcagatggtgtacaaattaagaaacctattgaggtttctgctccaaaatatgtagaatacctaatggactggattgaagcacagcttgatgatgaatccatattcccacagaaagcttggttcaccatttcctcccaactttaaggaagttgtgaagacaatattcaagcggttggttccgtgtatatgctcacatataccattctcactttcagaaaaaattgtgagcctcaaagaagaaggcgcactttaacacttgcttcaagcattttatactcttcacctgtgagttcgggctgattgacaaaaaggagcttgcgccccttcaagagcttatagaaaccattatcccatattaaatgaattgggacctaccttctgtgaaaaatctcatcctaggaagcagcataactaatgtattactactctaaatagaaactgctttttagtactatttgacttcagaaagccgccttgtatttattgtgtggatgtgcttgggaacaacaggatctaagttatccttctaaatagcttacacaaagcatcatatatatgcaatggggcatcataggttaaaaaaaagttaatttgtaatggttcatatatgccaaatgttatccttctacgctggaaggttgttgctgaaacaatgttcattattaataattaacgtgtgttgtattatgcagatttcaaaaaaaaaaaaaaaaaaaacccgattgttcatacattttt

SEQ ID NO: 111694 - DNA, 457 bp, Glycine max
  unsure (1)..(457): unsure at all n locations
  Clone ID: PAT_MRT3847_7186C.1
gtccatctgacttgcaaactatttacctagattgttgcactagtgggtgactcaaaattggcttccttcaaattctgtcatagaaaaaagtccagcattcttcaacaaaggagatatatatattttagagacaattcctggcctcccaatgcttaccaaggcaagttacatgtttgatgtttctttcacttgttctattatgtgaatatatacataggctctttttggataaattttccagtacttacagaaaaagaaaattaagaaggtaaatttaatttaatttctctcataagcacaaaattagtttatgcataagcataagttaaaattagcttttagagaagttaaatcaaagggtgatagggtagggcctaagccgaaatgggtaatttgaagattagataagttagatagtatccttttaattaatattatttagttntggtttaaattc

SEQ ID NO: 111695 - DNA, 267 bp, Glycine max
  unsure (1)..(267): unsure at all n locations
  Clone ID: PAT_MRT3847_71870C.1
canaaacnatagatgatcctgatatnaaggnntggctagccttgggcacaaagacaaagaaganaggtggtggaaagaagaaaaaaggtnngaaaggggagaangcagatgagtcngcngaagcngancctatggactcnacaaacgagggccacttcctcannagtgacttaactatccctcncctcttcctctccncccaaacaatganagangttttttcatttcattttacgatacccctttcattttggtncactgttcacc

SEQ ID NO: 111696 - DNA, 411 bp, Glycine max
  Clone ID: PAT_MRT3847_71871C.1
gttagaaaaaaggtagagattaaccataagtgtaacatttataaccgttgtatgaacacccttttgtatatatacactttatactttatacacaaaaagtacgaagagtagccccataagaacgagctcactgtgaccttgtattcgatccatcctctgcagatttcttcagagttagccctggcttgctttgacctcctgctcccttttgggcagtcaatcttcggattgatggagcccgagccacagaggaagcagctgcagctgcagccacacgtattctcttatgaacatcaacatattcatctgtctcgtccactatctcctcttgtaaaagttcttcaaatacatcttctaaagtgataataccaatcacttcaccatcttcaatattatctgaaaaggaaccat

SEQ ID NO: 111697 - DNA, 237 bp, Glycine max
  Clone ID: PAT_MRT3847_71872C.1
gacatctgaaacctccgtgttggtgttgcatatccaaaccctactttggcaattgatttgctcaagggcagaagattaagatggtactggcggagttctgtgcgtgcatttcgcgtgttctccagctgatgagcaatgcgacagtcatcgacgagccggagctccacgatcgcgtcaacgacaatcatcgcgctcttctccactccgatgttcaattcaagcttgctccgcgaaatg

SEQ ID NO: 111698 - DNA, 1127 bp, Glycine max
  Clone ID: PAT_MRT3847_71873C.1
cggctcgagattttggccagaaaaagtgaacagtgcgcgtgcccattgctggcagacatggaatgtggtctccgaacgcttctttccgaatgctcttattgggacttcttcaatagcagcacaaggaaaagaactagtataaaaaacagaaacccaacatttttctcgtgaaacgttcttcgttgaccatggagctctctgtgcccttcagattccgatcacggaacctcctctcaccctctacacacatacccatcacctacccttccaagcatcaaccaccctttttaactaagtttgtcaacaaacccaagatttctaaactaacggtgagagcgcagagaagggcacccattgaagggctgagcgatgagttgaacgctatagctcgttgtaaccttgactttgcttacactcgaagaagggtccgcgctgctttcgctgatatgcagcagcagctggatcattgcttgttcaagaatgctcctgctgggatcagaactgaagaatggtacgaaaggaattctaggggattggaaattttctgcaaaagctggatgccaaagcctggcattccaatcaaggcctctgtgtgtttctgtcatggatatggtgatacttgcaccttcttttttgaaggtatagccaggataattgctgcttctgggtacagtgtctttgcaatggactatccaggttttggtctttcagaaggattgcatggttatataccaaaatttgattatctggttgatgatgttatagagcattatacaaaaattaaagccagacctgatctcagtggcttgcctcgatttatattagggcagtcaatgggtggagcagtttctcttaaagttcattagagggagccaaataattgggatggaatgatacttgtagcaccaatgtgtaaaattgcagaggacgtgttaccatcagatgcagttctgaaggtattaactctcttgtctaaagtgatgccagaagcagagctcatccaacaccatgatatagctgatctgttcttctggataccaagcaacagataatggcgtgcttacaatgttatttagtatgatgataatcccacggtgagaactggcatggtactgttatggaccaca

SEQ ID NO: 111699 - DNA, 340 bp, Glycine max
  Clone ID: PAT_MRT3847_71874C.1
ggagagagaacttagagagaattacagagcattttccaacagtattacacgaccgattcacatacctctttctctccgaagctgcttttaatacacgtactggcacttcgattgttctcatccttaatacatacagtatctctcttcgatttgatggaacagtacaacactctgaacaacggttaacccaactgcacaggtagtctccaagtattggtgcctcatgatgagactggatgctatgctcctgaaggccccattctgttgcattaataattgtggcgtctttggtcgatcatctcacatgaacatgtgttccatgtgttacattgacatactg

SEQ ID NO: 111700 - DNA, 386 bp, Glycine max
  Clone ID: PAT_MRT3847_71875C.1
gccacgatataattattttcttttatttaaaaaatagatataaataagaaaaaaatgctataattaattaagaagattaattgttcagaaaacatgtattgcagaagtattgaaaattactgaggttattatttttttttttattagcttgtcttacatattttatgattaagtcaattcgtctattggctttgtctattttaacacttttacacatggatgacattatcgtgattttaatagtattaacaataaaaaataaaacatattttcatatatatatttttaaaaagttttctttaattaattttgctttaaattagttctctaagttatcaaatatgatgaatttttcagggttaattctattgtcttatatgtcaatt

SEQ ID NO: 111701 - DNA, 306 bp, Glycine max
  Clone ID: PAT_MRT3847_71876C.1
acaattacctttcaaaagccctccaattctaagaattgataaaagacacctctacaaaagggcatcatatttgggaacagaaactataattatcaaagcacccgttgaaacagaggggttccgactacagacaatatatatttacgactcttaaagtacaccacccatacctgatatgagtgccatggacagaatcttaccgcttgtcaaaagcatcaacagagtccgcatgtacatggggcacctctatcccaccgatattcgtggaggggaaacatatggctagaaggcattgaatcctcaaat

SEQ ID NO: 111702 - DNA, 383 bp, Glycine max
  Clone ID: PAT_MRT3847_71877C.1
ctcgagccgattcggctcgagatccttacctgtggatgagcatagcacaggaaaatgggtggcatgtgttgattgatgcttgtgcattgggaccaaaagacatggacagctttggcctctctctctttcaaccagactttctcatctgttctttctacaaggtctttggagaaaatccatcagggtttggatgcctttttgtcaagaaatctgctatcaccactcttgaatcctcatcttgtgcaggaattgtgaaccttgtgccagataggttgctacttcatccatcagaggataaggattcttctaagcaaaaaccattgtctatcttacaagaacaagacctatcttccttgagttctttctctggtcggatacaaacc

SEQ ID NO: 111703 - DNA, 562 bp, Glycine max
  Clone ID: PAT_MRT3847_71878C.1
aacaaaggactatatgaagggggaacaatttagatcacacggtcatacaatggaccaagctactctatgttatgcttattgaacgaaaactgcatatagcgacctatctatatacggaatatgatcacaccgtacgtgctctaatgtgcaatactatgaaaaacatggatatggggtggaggatgatagtgagaccttatatcatgagagggcatacatgggcaacactccggattagactcagactctgaaaactaacaacctgctgttgatgctagggtacacgattgccttctcgtcaagatgatattatgacgaataggtcgcaccatactctctcctatacaatgctgtcaaacacacatatgagcagtggatgattaaagatacacatcttatgactacagatgcactatcgtacaaatcaccaatgatagagagactgtgaggcatggatacagaattgttggaatcatctggagacaaatggagcgatctggttgatgaccacacaagctagagcatgacctttaagctctctaatacgatgtactacatagag

SEQ ID NO: 111704 - DNA, 375 bp, Glycine max
  Clone ID: PAT_MRT3847_71879C.1
cggctcgagtgatgtcccatccctatgacgttggtcaactatatatattaagcacaggccaaggcgagtcccagaaagatgccaaatatgatcagttttttcttggtgattatcgacctctgattcaagacactcatggtaacgtactagaccaggttagttgatcacttgcttgctactcttttcatttaagaaactgttcaaacctaggatgtactgatacaacatgggttacagttacgatgacattgacacagaaatatggcaaatttgaaaatttataggacaccatagctatggccatatataaaactaatttaaaattaacataaaataaaaacattaaatcatgagaattcatgtataaaaaacaag

SEQ ID NO: 111705 - DNA, 457 bp, Glycine max
  Clone ID: PAT_MRT3847_7187C.1
gggtgttactttacaatgaaggcataattaaaagacattacgctgacaccaattgctgacactaccacctactctatagagaatgacacgagaaaatgtttgctacggtgacaagaggagaagggctttgccattcacactatacaagctacagccatataatattgatagtcacgagaagtcggaatgaatggaacgcccaaatatgaaaaagcactatgacgacagtttgggcaccggcaggctgctagcaacaaccttatctggcgaggggacacagaccacagccgaagccaggacgggggccgactcatttaccataggcgcagccaccccaaacggagagaacacctgtgccaattaagagtatgatgactcccagacacagtctggtttatctaccggtgcaggaaccacatgattgtcctaatcatgggttagtgctggctgaaagcct

SEQ ID NO: 111706 - DNA, 219 bp, Glycine max
  Clone ID: PAT_MRT3847_71880C.1
acttcggtcgagtttatttttatgagcgggttatccaaacagatgagccctgggaaatcttgggttttcttagtaattcttatcctcctaggcgatttgaaaccctagattatatttgaaggacctttttttttttttttttgaaggggtttttaaagttttaaaggcgacgtaacaaaaaataatcaacaaattctctttccggatcggaaaggctta

SEQ ID NO: 111707 - DNA, 211 bp, Glycine max
  Clone ID: PAT_MRT3847_71881C.1
ggtttgagcttcttatgctgagcttcaaagttagtacctagaggaacttggttagaataaatatatttgtaggaagacatgaaggttcaagcaaccttttattttatgttttgttttccttgccaagaaactcttggagttttataactcaaaatggaatttaggaaaagaaatttcaataaaggctttgcatctttgttccaataaaaaa

SEQ ID NO: 111708 - DNA, 223 bp, Glycine max
  Clone ID: PAT_MRT3847_71882C.1
gggaccttaaaaattattggaaaattcttaaatgaacccaaatgtttttaaaggaaaaaacccttaatgttttttataatcgcccttaaacaagacttccaaaaacttcgggggagtttaaactttaccattttttttccaggaagcaacctttgctgtaacagttggtttggcaacactggaaaggttgcccttttggtgtttttttccaaccgtaccggcc

SEQ ID NO: 111709 - DNA, 486 bp, Glycine max
  Clone ID: PAT_MRT3847_71883C.1
tcggcaatttgcaaagtgaactctcttctgttagtgacagtgaagaaactctctgttgaagaattcacgcgctcagatttcgatttttctgaatgtggcaccttctcttactcgttgccgtggccggatccaccggtttcgccaccaaacgtttccttactcaccacagaaacaccggtgagggtgaaaacgtcaacctccacgatccaaatgagttagacttttccggttccgaaagcatttctcagacacatcacagtgacggggtcttcacgttttccagttccaaatctgagtctctgacacaacgagatggacctaagagtagaagatcccgagcctccaagaacggagttagggctccgaaggttgaggcgcgatcggagaagaggagcggtggaacgagattacactttcgcttgaagaggggggaaattacaaagaatgtcgctgcgaaggctccggttcgttcttccaaagatgact

SEQ ID NO: 111710 - DNA, 523 bp, Glycine max
  Clone ID: PAT_MRT3847_71884C.1
tgggaaccatgagagggattatatcgattccggttcagtatatgttactcctgactctggtggggaatgtggagtaccatatgaaacatactttccaatgccaacttcagcaaaggataagccttggtactcaattgaacaaggaagtgttcatttcacagtaatatcaactgagcatgactggtcagagaattctgagcagtatgaatgggtgcaaaaggacatggcatcagttaatcgacggggaacaccttggctaatcttcatgggacatagaccaatgtacaccaccaaccatggattcttaccttctgaaaacaaatttatggaagccgtagagccattgctattagaaaataaggttgacttggttctttttgggcacgtgcataattatgagagaacttgttccttgtttcaaaatgaatgtaaagccatgcctgcaaaggataaaaatggtgttgacacatacgatggcagaaattacagtgcccctgtgcatgctgtcattggcatggctggc

SEQ ID NO: 111711 - DNA, 422 bp, Glycine max
  Clone ID: PAT_MRT3847_71885C.1
cagccattaaacaaaagaagacacactctacaccaaactaccacattagaaccagatggggccttatattcggcaaagctaaaaaacaagtaaactttaaagctagtttttcaacatggagaaaaatgatctatttttgaactaagcattaataatttgcccaaaaaaaataaaaaaaaacggccctccatatatatatatttttctctcccggcttttctttttcccctcccccttcaaaaaatgaggggcaaaattaccccaagggctcttttttattaacaacaacaaaattattttcaaatgcttctataaacacaaaattgggggggaagaaaaaaaacgggggagagggagagacaacccacacgcggtccccgccgggttgggtttttttttcctttttctacaacctggggggg

SEQ ID NO: 111712 - DNA, 269 bp, Glycine max
  Clone ID: PAT_MRT3847_71886C.1
aaacgtgtcacattcctctgtatcatccatcaaacaagacgggactacctattgcaaacccattggagcttcctagcttaaaagtttaagactttaccatgcacagcccagactttaattcactgaagccaaaaggcgtcagtccaaatcttgagatgcttattggatggaaacaaattccatcatcaccttgggacgatcctacaagcgagcttactggagcccagatcacgacattctggcaatacggtactcgagctaggtcaggc

SEQ ID NO: 111713 - DNA, 537 bp, Glycine max
  Clone ID: PAT_MRT3847_71887C.1
cccacgcgtccgagattaatttaaaaaaaaaaaaaaaaaaaaaaaaaaaaaaaaaaaaaaaaaaaaaaaaaaaaaaaaaaaaaaaaaagggggggccgccctacaagagcaaccaatctaaccgccgccagcctacgacataacatcttctataatggcaccataaaaaaaataaactagcggccgttttacaacaacgtgactagaaaaaaaaccctgttaccaaccaaaataaccttctagcaaaacatcctttttccagcagctggaaaaacaaaaaaaaggccaccaatgacccttctaaacaatagtgcaacctgaaaaatgaaaaaaacaaccccccttgcagcgcataaaaaaccgcgggggtggtggtgacacccagcataaccactacaatactcaccaccgctatacccccccctcctaataatatccctccttttttacccaccatttccggcttttcccccaaaaaaacaaaaaaggggctccttctatgaggcccataaaaaactttacggcggccaccacccc

SEQ ID NO: 111714 - DNA, 395 bp, Glycine max
  Clone ID: PAT_MRT3847_71888C.1
aaacaaaaaacagtcaacccacctggaagcaccccttttggtcctttacccccttttaacaattccgggcccccctttttttttaaacaataaaggaaaatgtttgcttaaatttgcaaaaggggtgacccctgttccttccatttactgggggactcggttttaaatgctgtaacctagaacccaaatggacaaaattgtcacaacgtttcaaaaaaaagcctttgttttgggggccccaacttccctacaaaatttggggtaaacttggaaaatttttttccaccccacccggggtttgtttccttttaaacccaattttgttccacccccgggtgggcctgggggtggggtttttttccccaatttcggcccctcccataaaaaaaaggaag

SEQ ID NO: 111715 - DNA, 240 bp, Glycine max
  Clone ID: PAT_MRT3847_71889C.1
catggacttgtctggtgcattctccatcatacttggtctacttgcaccaatacttcaggagccatttaggcagattctgaagagactaccaggcacaatggacagcaccatagagagtactaatgagaagctgagtgggcctctcgatgagattgtcaagaagaggctggaagacaagaatagaccttcacagaatttccagtcactcattttgggtgcaagagagtcaaagaaagtatc

SEQ ID NO: 111716 - DNA, 1493 bp, Glycine max
  Clone ID: PAT_MRT3847_7188C.1
actgatgttccctacgacgtcgttcagtatctcaaaaaagcctacgacgatttggaagaacccttgacccgttttctcgaatcttccaaagttgattggctcttctacgacttaattcccttctgggcaggtactgtggcttctaaacttggtataaagagcgccttttacagcatttgtactccaccgtgtatgggcttccttggtcctccttcagttctcatgggtgaagatccgtaccggacaaaactcaaagatttcaccgttactccgccgtggatctcttttccgactaccgtggcatatcgatacttcgagatgatgagaaactctgacgccgtctctgataatgactccggaatttctgacatgtaccgttttggtgcggttatcaagaactgtgatattgtagtgattagagggtgtaccgagttcgaaccagagtggtttcaagtgttggagaacatttatcagaaaccggttcttcctgtgggtcaactcatcaacagagagtttgagggagacgaggataacatcaccacgtggcagtggatgaaggattggttagacaagcaaccatgcgggagtgtggtgtacgtggcctttggaagcgaagcaaaaccaagtcaagatgaagtgacacagatagctctaggtttggaggaatcaaagattcggtttttctgggtgcttagggttcaacgtgggccatgggacccagatgtgttacggttaccagaagggttcgaagagcgaaccaaagggcgtggaatagtgtgcaccagttgggcaccacagttgaagatactgagccacgtagcagttggtgggtttttgactcattctggttggacctctgtagtggaggctgttcagaacgagaaacctctgattttgttagcatttcttgcagaccaagggttgaacgcaagagtgttggaagagaagaagatggggtattcggttcctcgggacgaacgtgatgggtcgatcacgagtgacgcgatcgctaactcaataaggttggttatggttgaggatgaaggaagggtctacagggagaagattaaagaggtgaaggatttatttgtcaatactgtcagacaagaaaaatatatcgatgaattactacactaccttagtaggaatctttcgaattgttaatcttgttggtgttggtttcgcttgagcctctactaaatttgttgtcgaagaaataagatatggtcttaattaccatggtttgtgtggtttgtctgtggggtctatagggtggcgcaaaaaataacattatcttcaaaggcgaggaagtatgtaaaggacatcataaaattttaatcatggtcttggttaacacctcatatgaaggggttctatttttgttgtttggatggcttttgaattataaggtcctacagggccggaaccccgttatggctgtgccctccccccatttaggtggttccataatatttaaaggtggattgataggt

SEQ ID NO: 111717 - DNA, 666 bp, Glycine max
  unsure (1)..(666): unsure at all n locations
  Clone ID: PAT_MRT3847_71890C.1
ggctcgagcaacaacaaaaaaaaaaaaacgtccgcttctctccaaaacgaccaaccaaaggcaaaacgcacaacaacgatgaagaagcagaagcgctcggaccctcaaaacgacaccactaaccccttcgaggttctcacggaggagctaatgttcgtgatcctggacttcctcgaaacggcggcgccgttggataaaaaatccttctcgctgacgtgtaagtggttttactcccttgaggcaaaacaccgtcgtttgcttcggccgttacgggcagagcacctgcccgcgctcgcagcccgctacccgagcgtaacggaactagatctctcgctgtgcccgcgcgtgggcgacgacgcgctcgcgctcgtcgccggcgcgtacgcggcgacgctgcggcggctggacctgtcacagtcgcggcggttcacagggagcgggcttatgagcctcggcgcgcggtgcgagtacttggtggagttggacttgtcgaacgcgacggagctgagggacgcnncggcgtcgcggcggtgggcgcgtgcgcggaacttgcggaggctgtggctggcgaggtgtaagaacgtgacggatatgggatttggggtgtattgcggtggggggtgcaggaagcttgagggtgatttgcttgaagtgggtgtgttggga

SEQ ID NO: 111718 - DNA, 421 bp, Glycine max
  Clone ID: PAT_MRT3847_71891C.1
ggctcgagctcacattccgcagacttcgacgaggtctgggagacatggcaacttctatatcctggagacaactatcatgttctggcctgtggacagtctctctaatccagaatcgcactctgctcctgagctgtcatgctcatgacctctttcggcgtagaccggtcgcgactagtggacacggacaccgtgcggggtatgcggctaaaagagcctgtacccataacaaatgctctgagtgcacttctgctactgggtgcgctcgcgctacgactgttacaggcatcattcaaaagaagacgattgaatagagctgagcttagggaagttatcagctatatggccgcgggaacctacgaggtgatgcgatgtctaacttggaggatgccgctggcaggcaaagctccagtgcctagcttgc

SEQ ID NO: 111719 - DNA, 511 bp, Glycine max
  Clone ID: PAT_MRT3847_71892C.1
ccggcatgaaaaattatcgaatgaacgaaacattgatggaagattttggttggagaaattttttgtagatggaacataagatttttggttgacaagtggctcaccgcttttaggtgtgcacgaatgacattcatagagaattatatgcagggatatggtagcgaagcgtttgagcgagcagcttcggcaaattagtgcatactgtattttatttgagaaatgctagcaacactcttagacacactcttttaaatacactttctcatattggttgaaatttattgaaaattacaaacaaatgactcccacatcttattaaatgattctctcatgattttatagtttccaataaacttcaaccaataatagagtgtatgttaggaggagtgtattagaaaatgtgttgttagcactcaattttattttatatactaggttgagcattttttctttttgggtaaactggagaaatgttgattgctgattagatagaatcaatgttttggaaatg

SEQ ID NO: 111720 - DNA, 368 bp, Glycine max
  Clone ID: PAT_MRT3847_71893C.1
ccaaaaaaaaacatcataaaaggattatttttcatcccaaacccaaaaacaataaaaatagggttggccccggaaggaacggaaaaacccacaaaaaaaaacatggagaaaaaattcaaccccggttctggattctaaacccccccgagggggttttttaacctttttaaaccaaagccgttggggccataaaaattttgttggaaaccaaaggagcataaaaggcggggcaaaaaatccaatccttaaaaagctccttttgcccccatatggaagaaatccaaacccttccagccacttccattttaggccttttaaacctttaagggccactattttcccctaaaacaaaagttcctttgggggga

SEQ ID NO: 111721 - DNA, 1058 bp, Glycine max
  Clone ID: PAT_MRT3847_71894C.1
gttttcaagacagactccagctcactagtattgcagacaatttaaattatcggcacaggaatgcccagtatgctgggcgggcatctgtagagctacatactctaattttttcaggaagaggcctacagacaccgaggctagaatagtgaaaataagatctaatggattttttgtgtttgttcccaaatatggcatagaaggacctgtatatttgacaaaagcagaaaagggaagtggagaatggtatgtagatgatcaacagcagaagattaaaaagatggacggtagcctttcatacagtgttttgcagacagtccaaattcacatggaggttgtggagcctcagccaaaccgaccaaaacttcagcttaccctcatttagagcatgaaaaaattgtcgaaggaaccaaacattgatggagatgttggttggagaatttttttgtagatggaacaaaagatttacggttgatgaggtaacttttagttagtccttttacaactatttacttttaaattgtgaagtgggacgtggaatttttatacatgtgatgctgtaagcaagtgtgaacagctcaggtaaaaaaaaaataaaattacgttagcttaaatgtgccaatattgtattttttgaaagaatatcagaactgttatgttaagaaatatggaatcattcaagaggctccacctaagtttagtttttttggctcaccgcttttaggtgtgcacgaatgacattcatagagaattatatgcagggatatggtagcgaagcgtttgagcgagcagcttcggcaaattagtgcatactgtattttatttgagaaatgctagcaacactcttagacacactcttttaaaatacactttctcatatgggttgaaatttattgaaaattacaaacaaatgactcccacatcttattaaatgattctctcatgattttatagtttccaataaactttaaccaataatagagtgtatgttaagaggagtgtattagaaaaagggttggtagcactcaattttatttatatccaaggtgagcatttttttt

SEQ ID NO: 111722 - DNA, 459 bp, Glycine max
  Clone ID: PAT_MRT3847_71895C.1
ccaaactgattgtttggatgcaacaaatgccccgaagtgtgaatgaaccctctttttataggtttcacgggagtgaacaatgtaataataatttgtctaactaatattctaaaacacaaaataataactaaatcgtaaattaataataactaaacactaatattctaaaacaaaaaataataatttaacaaaattaatttaacatgtataataaattatctaactaaaccgtaaattaataataactaaacactaatattctaaaacattaaataataatttaccaaaattaatttatcatctataataatttatgtaactaaaccataaattaataataactaaacactaatattctaaaacacaaaataatgatttaacaaaattaatttaacatgtataataatttatctaactaaatcttaaattaataataacaaaacactaatattctaaaac

SEQ ID NO: 111723 - DNA, 849 bp, Glycine max
  Clone ID: PAT_MRT3847_71896C.1
acgaggaatatcatcattatgggcttgcagctcctttgtatacccatttcacatcacctataagaagatatgcagatgtcattgtgcacaggctacttgctgcttctttagggatatccaagttaccacctgtatttcaagacagtctccatctcactagtattgcagacaatttaaattatcggcacaggaatgcccagtatgctgggcgggcatctgtagagctacatactctaatttatttcaggaagaggcctacagacaccgaggctagaatagtgaaaataagatctaatggattttttgtgtttgttcccaaatatggcatagaaggacctgtatatttgacaaaagcagaaaagggaagtggagaatggtatgtagatgatcaacagcagaagattaaaaagatggacggtagcctttcatacagtgttttgcagacagtccaaattcacatggaggttgtggagcctcagccaaaccgaccaaaacttcagcttaccctcatctagaggtacatgagcattaaacaacaggcatgcctcaaatataactcctattcagattgccatttgcatctctgctcttttcaattaaggtttctggtattggaattgaccagcatgaaaaaattgtcgaaggaaccaaacattgatggagatgttggctggagaatttttttgtagatggaacaaaagatttacggttgatgaggtaacttttagttagtccttttacaactatttacttttaaattgtgaagtgggacgtggaatttttatacatgtgatgctgtaagcaagtgtgaacagctcaggtaaaaaaaaaataaaattacgttagctt

SEQ ID NO: 111724 - DNA, 2451 bp, Glycine max
  Clone ID: PAT_MRT3847_71897C.1
attgcccgggactcgaacccatcccacgcgtccggagatactgaaactgaggtggttttgatagaaaatgatataaatacacggccattctcttcacaagtgctggcatgcttgccaccattgccatgggtagtctcttctgaagatttgtctaatccaatccggaaggatttgtgtcatctgtgtgtcttcagtgtggaccctccaggctgcaaggatattgatgatgcactccactgtcactctcttccaaatggaaactttgaagttggagttcatattgctgatgtgacaaattttgttcatcctggcactccccttgatgatgaggctgcacaaaggggtacatctgtctaccttgttgagcggcggatagacatgcttcccaaacctcttacagaggacatatgttctcttcgttctgatgtggaaaggcttgcattctctgtcatatgggaaatgacacctgaagcagatattattgccacctcatacacaaaaagtgtcataaaatcttctgcagcattgtcttatgttgaagcacaagcaaggatggatgatagtcgattgatggatccgattactgcagatttgaggaatatgaatagtttagctaagaaaatgagattaaggcgtattgagagaggagctttctcttgcatctgctgaggacaaatttcagattgacacagagactcatgacccccttgatattggaatgtaccagatccgggaggccaatcaaatggtggaggagtttatgcttgctgctaatgtttccgttgcacaacaaattcttaatagttttccattggtctcattattaaggcgtcacaacaccaactagagagatgcttgaacccttgctacggactgctgctgcagttggcttgcacttggatgtctcatcatcaaaagcgttggctgattctcttgaccatgctgtgggtgatgatccttacttcaataagttaatccgtatactggcaactaggtgcatgactcaggcagtttatttctgcagtggggatcttagccctccagaatatcatcattatgggcttgcagctcctttgtatacccatttcacatcacctataagaagatatgcagatgtcattgtgcacaggctacttgctgcttctttagggatatccaagttaccacctgtatttcaagacagtctccagctcactagtattgcagacaatttaaattatcggcacaggaatgcccagtatgcagggcgggcatctgtagagctacatactctaatttatttcaggaagaggcctacagacacggagggtagaatagtgaaaataagatctaatggattttttgtgtttgttcccaaatatggcatagaaggacctgtatatttgacaaaagcagaaaagggaagtggagaatggtatgtagatgagcaacagcagaagattaaaaagatggatggtagcctttcatacaacgttttgcagacagtccaaattcacatggaggttgtggagcctcagcctaaccggccaaaacttcagcttaccctcatctagaggtatatgagcattgaacaacaggcatgcctcgaatataactcctatgtagattgccatatgcatctcagcacttttcaatgaaggtttctggtattggaattggccggcatgaaaaattatcgaatgaacgaaacattgatggaagattttggttggagaaattttttgtagatggaacataagatttttggttgacaaggtaagttttagttagtccttttgcaactatttgcttttaaattgtgaagtaagacgtggaatttttatacatgtgatgctgtaagcaagcgtgaacagctcaagtaaaaaaaaatacgttagcttaaatgtgccaatattgtattttgaaagaatatcagaattgttgcattaagaaatatggaatcattcaagaggctccaccaaagtttagtttcttaaagagaattgcccagtttattttttctccccagcgataggttaccgagtttgggtgttatattatcaatttatcatcaataattgaatctcatgtttgtcagtggccccccgcttttaggtgtgcccgaatgatattcataagagaattatatgcagggatcctgttggcgaagcgtttgagcgagcagcttcggcaaattagtgtatactgtattttattttataaaggttgagcatttttctttttgccctttctcatattggttgaaatttattgaaaattacaaacaaatgactcccacatcttattaaatgattctctcatgattttatagtttccaataaacttcaaccaataatatatagtatgttaagaagattatattagaaaattttttatttatactgaatttttatttatatactaagttattatattttttttttttgggttaactggttaaatgttatttgt

SEQ ID NO: 111725 - DNA, 335 bp, Glycine max
  Clone ID: PAT_MRT3847_71898C.1
cccaggcctcaacaaaaaattttggggccaattttaaatttacgttccgggaaaaacaaaaaatccccctttgcaagccgttttttcttgtaaataaaaaacccaaacttttccggaattttttggggcagttccttattcttttgggggaccccctccttgcctttgccggggggtttaaactttatgctggggggctgagcttggatctttgaggggttatcggggattttgggccccttggttccctgcaaaaaccccttttgggcctcatgggggaacccccaaatgtttttaaaaaaccattaagtcttccacagggggcaaaactgggc

SEQ ID NO: 111726 - DNA, 227 bp, Glycine max
  Clone ID: PAT_MRT3847_71899C.1
cttccgttgagcttttctttccacgaactccatggtcatcttaacacaagcactcagtataaaatgcgctcgaattcatgaaggatgatgatccttatgaccttccgaagagaccacatagaacggaaaccgtcgagcatttaaaccctacaagtatatagcctaggcaaatctaccagggatctgtgatcggatataacataaataagattctttgatatatccag

SEQ ID NO: 111727 - DNA, 378 bp, Glycine max
  Clone ID: PAT_MRT3847_7189C.1
cgttcatgtggagacttttgttggagatctcatctttgatgtttctaagatgacttctccctacattaaatgtacactctctttcttcatagcatttggaaattcggctgatgatcccatcacttttgaggcttttccccacaagctggtgcacgcttgcacagattcagagaaaaagctgcattgaaattttctcaagaggaatttcttacagcttgctcaactcacgtgcgtcctgcaacaactctcttggctgatgggtgtccatatttacatgcaatggtgcatgatagttcagtgcctacagtaccactcgaccttgacattggtgtccacgctgctaccataaacaatatgagagcctatgggctcaatcct

SEQ ID NO: 111728 - DNA, 399 bp, Glycine max
  unsure (1)..(399): unsure at all n locations
  Clone ID: PAT_MRT3847_718C.1
gggccccgagtcttttaaatatgtgaaagagcatagggagcacaaagcataccactaaaacctaaggggtggtcattcgggcgggccagaatcaagcctcaaaaatgaccttggccnaaatccacatcaattgctttntttttggataggaggngggttccggaataagccaagaaaacaatnttcaaaccttccaattcacctcacccgaaccttaaaccgccccccatgacgcaccccttccgaacccgtttttttcttcgggtttctttcggggcttggggtcggggtggttggaattttttgcaccacccccttaagctaaaacccttaatccnnaactcaatcnttngtgttttgtcccaacctggaatctttcaaactctttttttcccactc

SEQ ID NO: 111729 - DNA, 205 bp, Glycine max
  Clone ID: PAT_MRT3847_71900C.1
agtgtttttcttttattatagatataacgaacaataaaacaagagttgaatgcaccgtctccataggaaatcactccaatatccggaaaatgtagcattacatttataatttatgcacggctgttagcctttaatgggcatttgtctgatgtttgtttagatataccgaatgaaactatgatgtaatactatggaatcattgggg

SEQ ID NO: 111730 - DNA, 451 bp, Glycine max
  Clone ID: PAT_MRT3847_71901C.1
agggaaggggaaataaccctttttttaggtaaaaaaaccaaaaaaggccccaccccggggtgtttttttaaaaaaaaaggggccttgaaaagaataaaacggggtgacccccccaccccggggggggaaaaccccccccccttttttttatcccaaaaatacctttttgggaattttggatggccaaaaacaggggaaaaacatttttaaaaaaattccttaagggccccaggggcaacccgggcaagggcaaaaagggccccccttggccttcccaaaagggtgaggggggggaaaaacaaaaaaaaaaggccgggaggaaattttctaaagctctaaaaaaaccccaaaagtttttcccttgggggagtttgttttggaaaccccaacccaattgcccaatggtttcaaaaattttgggtttggggaaaaaaccacccccagggggggg

SEQ ID NO: 111731 - DNA, 211 bp, Glycine max
  Clone ID: PAT_MRT3847_71902C.1
accaactaccaaggctcatgttgagggatggcctcctataagatcattccggataaattcattggctaccacttctaagaacaaggaagaagttgatggtaaagtggggtgtggtgctctgtttgtcaaggtcattatggatggtgctcacttagtctggatagtagacttgaagaattactcgacatattacgaattatgtggtgctcta

SEQ ID NO: 111732 - DNA, 363 bp, Glycine max
  Clone ID: PAT_MRT3847_71903C.1
aggggttgttctttcgcaatcttaacccttttccgccatgcgagcgacacaaccacacgccaataatcgcacaacacaaatcaattcagcctccaattaacgcctccttttgattcggctcggttcgattctgttcggttttccacttctctgaatccgcattttcatgctcaatttgcgatttctgaaattaaacaatgtagctcgtgcatgaatctggcaaataaacctgtgttaacttaggctatgctttgtgtggttactaactagtaacgagtattgatttctttaattaattcaatttgcatttggtaaagtacacaaatcaattaattaattttcagattttgtatgttgacaggg

SEQ ID NO: 111733 - DNA, 137 bp, Glycine max
  Clone ID: PAT_MRT3847_71904C.1
tgagaatttgaaaataatgcagacagatatcggtatctacatagaggctatttgttttggaatttgtaataattactaatgagttgctatatgataaattttattcttggaaatttgaaactcgttgatatacacgc

SEQ ID NO: 111734 - DNA, 3860 bp, Glycine max
  Clone ID: PAT_MRT3847_71905C.1
ccacgcgtccgctctttctcctttctttttctctctttctctacaatctcgagattggtgtgtggagcgtccgaaagaccactgtttcccccctttagtttctcttctaagttggattttgaaggaactgagcagcatctaatgaaggagagtggaggctctcttggagaagagagcctgcccgagactaacaccaagaacagtgaagaagaagaaccaattaactagttcctttttttctttctttctttctcactcactccctccctcccaatcccattttcttcaaatagtgtgcgtgtgtgtgttaagagaagaatagggtgtgtgtgtttagagtgatggcactttctatgcacaaggactcagccaacaaccagatggattcaagcaagtatgtgaggtacacaccagagcaggttgaggctttggagagggtctatgctgaatgccctaagccaagttccttgaggaggcagcaactcatcagagagtgccccatactttccaacattgaacccaaacagatcaaagtttggttccagaatagaaggtgtcgtgagaagcagaggaaggaagcttctcgcttgcagacagtgaacagaaagctgactgcaatgaacaagctgttaatggaggagaatgaccgtttgcagaagcaggtttctcatctggtgtatgagaatggttacatgaagcaacagatacacactgcttctgctggtactaccacagacaatagctgtgagtctgtggaaatgagtgggcacaaccaacagcaaagaccccacacctaaggatcccaatagggaggctaacaacccagctggtccgattcccggcgtcgaccccacgcgtccggaaaggccttgggggctcgtgctcgacgtgtctttgctccgagtgctccgtcctttgccgacggggccctgttgcttccctccgctttccgtgtctttccgctggtgccccttgcagttggtcctgctgcatctaggcctgcagagttacgagcaacaatggaagtaggttctggtaatgctcgtccagctggggaagctgacttgaacggctacaaccttaggtcggtccgtaccactgttctcagtttcatccccgcgggccatgcgcgcgccattgtgcccgcgttcgcgcgcccgtatgcgcctactgctgtggcagctgctcggggcgtcgccacgccgagtgccccttccaggttcaatacccggcgggggccaaagtcactttctggatcacccgaggcccttaccttagcgcgatggatctgtagaagctacagggttcacactggcacagagctttttaaagctgagtccacagctggtgatgcaatccttaagcaactttggcaccatcccgatgcaatcatatgctgttctgtgaaaacaaatgcatctccagtgttcaccttttcgaaccaggctggtttagacatgcttgaaactactcttgtttcccttcaagatataatgcttgataaagttcttgatgaatctggcaggaagattctctgctccgagttctccaagataatgcaacagggttttgcatctctccctgcaggaatatgtgtatctagtatgaatcggccagtcggctcgaggattatttgtttgtttcagtcttctcgccatagctgaggagaccctggcagagttcctttccaaggctactggaactgctgtcgactgggtccagatgattgggatgaagcctggtccggattctattggaatcgttgctgtttcccgcaactgtagtggcgtggcagcacgagcctgcggccttgtgagcctagagcccactaaggttgctgagatactaaaagatcgacagtcgtggtatcgtgactgtcgatgcgtggatgtgttaagtatagtccccactgggaatgggggcaccatcgagctcctgtacatgcagacatatgcgcccacaactttggctgcagcacgggacttctggacactaagatacacgacaagtttggaagatggaagtcttgtgatatgtgagagatcattgacatcctcaactggtggccccacagggcctccttctacaacctttgtacgagctgaaatgcttcccagtggttttctagttagatcttgtgagggtggtggatccattattcatattgttgatcatattgatttagatgtctggagtgtacctgaagtactgaggcccctgtatgaatcatcaaaattcttggctcagaaattgactactgctgcattgcaacatataagacaaattgcacaggaatcaagtggagaagttcattatggtgggggtcgtcagcctgctgtcttgaggacatttagtcaaaggctttgcaaagggttcaatgatgctgtcaatgggtttgtggatgatggttggtcactgatgggtaatgatggggtggaagatgtgaccatagccataaactcatctccaaacaaatttttgggctccaattacaacgcatcaatgtttccagcatttggaggtggggtcttgtgtgccaaggcatcaatgctcctgcagaatgttcctcctgctttgcttgttcggtttttgagggagcatcgatcagagtgggctgattatggagttgatgcatactctgccgcatgccttaaagctagtccctatgcagttccttgtgcaagacctggaggcttccccagcacccaggtcattttaccccttgctcatactattgagcacgaggagttcctggaggtagttcgaatagagggtcatgcattttctcctgaggacgtagcgatggcacgcgatatgtatctattgcagctgtgcagtggagttgatgaaagtgcagttggggcatgtgctcaacttgtgtttgcacctattgatgagtcatttgctgatgatgctctgttactgccatctggttttcgtgtcattccgttggatcctaaatcagatggtccagctccaactaggacattagatttggcatcaacgatggaagtaggttctggtaatgcccgtccagctggggaagcagacttgaatgggtacaaccttaggtcggtcctcactattgctttccaatttacctttgagaaccatacacgggacaatgtggctgctatggctcgccagtatgtgcgtagtgttgtgggatcagttcagagggttgccatggcaattgctccctccaggctcaatacccagttggctccaaagtctcttcctggttcgcccgaggcccttaccttagcccgatggatctttagaagctacagggtgcacactggtacggagctttttaaagctgagtccacagctggtgatgcaatctttaagcaactttggcaccatcccgatgcaatcatatgctgttctgtgaaaacaaatgcatctccagtgttcaccttttcgaaccaggctggtttagacatgcttgaaactactcttgtttcccttcaagatataatgcttgataaagttcttgatgaatctggcaggaagattctctgctccgagttctccaagataatgcaacagggttttgcatctctccctgcaggaatatgtgtatctagtatgaatcggccagtgtcctatgagcaggttgttgcatggaaagtcctcaatgatgatgattctaatcactgcctagccttcatgttcatcaattggtcttttgtatgatggatgaaccatatctagagactactacttattttatctactaatcagatgatactatcacagacagatgtactgatgtcagcttttctttatgccctatgtatgaagtatgctaatgttacttattcgctatatatataaaatatctagttaatttggtg

SEQ ID NO: 111735 - DNA, 352 bp, Glycine max
  Clone ID: PAT_MRT3847_71906C.1
tgtgaagcgtgcgatgacccagagcattgtctactttctaactggtaaggttcgggcagggttggcatcaacagaccggtacgcttctgatagctctgtcaacgcctacgcaaatgtgaaggatatggagatgaatattcgtaatcatgcagaataatctactcgtgcttatagcacgttctttctgagacatcaaggacattgaaatgtatagttgtgccttcaacacttactgatcgagatcattaatcatactctgctgaccaggattctattgcacctcaatctttaatagatgtaataagaactccagcaggttcttatgctgtggcatcaggtatcaatgggtccc

SEQ ID NO: 111736 - DNA, 667 bp, Glycine max
  Clone ID: PAT_MRT3847_71907C.1
gctcaatacccagttggctccaaagtctcttcctggttcgcctgaggcccttaccttagcccggtggatctttagaagctataggttgcacactggtacggagctttttaaagctgagtccacagctggtgatgcaatcttgaagcaactttggcaccatcccgatgcaatcatgtgctgttctgtgaaaacaaatgcatctccagtgtttacctttgcgaaccaagctgggttagacatgcttgaaactactcttgtcgcccttcaagatataatgcttgataaagttcttgatgaatctagcaggaagattctttgctgtgagttctccaagataatgcaacagggttttgcatatctcccagcaggaatatgtgcatcaagtatgaatcggccagtatcttatgagcaggctgttgcatggaaagtcctcaatgatgatgattctaatcactgcctagcattcatgttcatgaattggtcttttgtataatggatgaaccatctagaaactacttattttatctgctactaatttatattcagtacttaattatcagatgatactatcacagacaaatgtactaatgtcagcttttctttatgccctatgtatggagttacttattcgctattatataaaatatctagttaatttggtgaaaaa

SEQ ID NO: 111737 - DNA, 107 bp, Glycine max
  unsure (1)..(107): unsure at all n locations
  Clone ID: PAT_MRT3847_71908C.1
atacattttcgttctatcccgagcgcataggccgtagcgagcgaccatcatctcactatggagtggaangctgagagcctgcaatgtctctgggaatgcttcttcca

SEQ ID NO: 111738 - DNA, 397 bp, Glycine max
  Clone ID: PAT_MRT3847_71909C.1
atctaaatgtcctttttccttcgtgtccgtagtcaataatgcctcttccaactcctccaccactcccccttcttgcttgcatccaatttcacaattgcaatccactaaaaatagaaagccaaaacgccatcacattcctagaaccacatgcagtgaaaaccaaaacaatccaacaccaaacccatccgaaggagaactatcacatattgtaggacataggaggaatgttctacttggcctatgagggctttgtggtgcagttactcttaacaacaacccttttgcctttgcagctccaatatctcctccagacctaaacacatgtggtccaccagacacacccgcgggtgcaaatcccaccaattgttgccccccatcttccaaaatcatagatttc

SEQ ID NO: 111739 - DNA, 426 bp, Glycine max
  Clone ID: PAT_MRT3847_7190C.1
atggagggaggagtagggttgttggagtggggagaaggttcactttatggtggcgatcgattccagttgtggaatgaaagcgatctacgtaacaagcgatatttggacacgtgtgggaccgcatgtcaaaggcgattgacgcttgcagaatatctcagaacaagaagagatacaggcgtagggaagagggtgaattatagagtgagggaaggtgcaggtgaatatgatgcacggaagcactttatttactacttctcaaactctgcaattgagaggcacagagaggttcagtcagcatctgcatctgaacctgaccttttcagtctttcactaaaaagtcacgctgattccttatctactaatttcagtgaagttttgcttattactataaatttatcatcatggttgttaccagctaatgtttaa

SEQ ID NO: 111740 - DNA, 231 bp, Glycine max
  Clone ID: PAT_MRT3847_71910C.1
gcaagaaaacaccccggaactgactgaaacaggaacaaccaggcacagaccagggcaaaaactaaggaggttaccgagttaccaggaagaacggccaagttaaaggcacgcaaacaggggaccgccgccgcagcagaagaaatgtttacccggggaaaaaagtacaacacaaggaaaagccaagcactggaagcacaaaccgagtacaataggcgtggggcagaacaaccc

SEQ ID NO: 111741 - DNA, 406 bp, Glycine max
  unsure (1)..(406): unsure at all n locations
  Clone ID: PAT_MRT3847_71911C.1
tatggaatccttcttcatgataacaccatttcaaaaccacacattccaccagcatgtttccttcacgggaacggatttgtcatggatggtggagtttctgaagggcatggtgaagcccgtggctgccaccgccgtcgtgcttctggccgtgctcttgtcctttatgcagaaactgggactcgagggtgagatggtgtatgccatgttcagagcatttcttcagctttctattattgggtttgtgttgcagttcatattcaaccaaggcaacgctggctggatcattctagcttaccttttcatggtgtgtgttgctggttacactgcaggtcaacgtgcgaaacatgtncctcgtgggaaatatgttgctggagctttcattctgacaggaactgcagtgaccatg

SEQ ID NO: 111742 - DNA, 268 bp, Glycine max
  unsure (1)..(268): unsure at all n locations
  Clone ID: PAT_MRT3847_71912C.1
atggattcatngcatntctgcagnaagatcantggaccttcccantggcnaagtgcttatanncagaangaccatncctcttcttgnaaagatgatngcnccttanngccattngccatgcgaattaagtttgccacatcctacgggagatgagtttggtgccgttagnagagtcgtcttgnccgcagacnaaggtncngnaagtacaantggctaattgncanggcatatgttnttgtcnatgantcctgctatcatcaatcatgac

SEQ ID NO: 111743 - DNA, 167 bp, Glycine max
  Clone ID: PAT_MRT3847_71913C.1
gtgggaactatactcatttattagacttgatgtgtttataacaatcatataatgaatatagttcccaccatatacaggaaaaagcaactgagaacaatatagaccaatatatgattgttataaacacatcaagtctaataaatgagtcattttggtttgaggaacag

SEQ ID NO: 111744 - DNA, 497 bp, Glycine max
  Clone ID: PAT_MRT3847_71914C.1
tgtttcctctatacggccgcttgggtgccttttttttttttttttctttgtctgcttgttttccatcctaggccgcttataaacgcagctcaatgcctcacagtatctttctgctgaagcctggccaaaactatcgttccccaatgcgcactctttttttttaaaaaaaaaaatcaattcctcgggggtgtatatatcaacgtatctttccgctgaagcagggcacaaattaaggggttctttccctacttaattctcaattccgcacgtgtataagcttcccgaacactatctttataacagaaaaagctcaagcttacacacattcaacaccgtctaacgtcaagaactcctctgtgtactagagcttcttatcatgtatcccttcattttcgccaactccgatccactctgtgaacaccaagaggaactctctgaacgtcgacctgtccattcttgcccccaaccatttcttgaaatcctcgtttatatatacc

SEQ ID NO: 111745 - DNA, 343 bp, Glycine max
  Clone ID: PAT_MRT3847_71915C.1
ttttaagactttaagatctaatttataaacaataaaaggccaactgaaaaatgggcttgtcatatgtgaaaagctgcctcaaatcttatgattaaagttgtcagcaagagagctcctaaagagtgactttttgaaacctagtaaagaatacgccaacaatttgttctcttttttattaaattacattttttctttttcttgaacaccatctaactgtttggagcgacttttttttttttttgtagaacatgtaaacttttttcatttcctcatttgtcagattcttggaatgacttgtcgaaatatttacattttttttggggagagtttttttctttttaaa

SEQ ID NO: 111746 - DNA, 557 bp, Glycine max
  Clone ID: PAT_MRT3847_71916C.1
aattttcaagattgtattagccttcgtaagcttccaagaagtatctataagttgaaatctcttaaagcactcattctttcaggatgtttaaagattgacaagttagaagaggatttggaacaaatggagtctttgacaacccttattgcggataagactgcaataacaagagtgccattttcaatagttagatcaaaaagaattggatatatctctttgtgcggctatgaaggattctcacgtgatgtgtttccttcaatcatttggtcttggatgtcaccaacaaatagtctctcatcccgcgttcaaacatttctagatgtgtcatctctcgtttctttagacgtgccaaatagtagttccaatcatctatcatatatttctaaggaccttccactgcttcaaagtctttgtatagagtgtggctcagaacttcaactttctatagatgctgcaaatattttggatgctttatatgccacaaattttgaagaattggaatcaactgcagccacatcgcaaatgcataatatgaatgttttaacattaattgaatg

SEQ ID NO: 111747 - DNA, 581 bp, Glycine max
  unsure (1)..(581): unsure at all n locations
  Clone ID: PAT_MRT3847_71917C.1
cccatgatgtttactgatttctatttgttttattttaggtttttgataggtattgatatcactatagaattgataggagaaaatttagagaacaaagctatgattagaataagaaaacaagtgttgttagaaagatgcataacatactcctgtgcaccctttcccatactagttttattgctcctatctcttctacggtagactttaattatagactgctgtaaattaattttttgttttgtgaagggtttgatagggtcttgtaacttgtatgcattgagttgtgagctatgaattgtacaatcgcaatgagtattgtgatgtaatccactgtgggaacccgatgagttgaatcattttaaggcacgacgagttaaaattattttgaaaacaattgagtagttgtgtgtattgcatagttcaaactccagtggcacatatatgaacataacatattaacattattactgtgtgatatgtatatgatgcatgangcgtgataatgtgatgtcttgggattatgaattatgttagtgtgagatgntgtgttgtacttaagatgtgttgttttgaatacgtga

SEQ ID NO: 111748 - DNA, 1716 bp, Glycine max
  Clone ID: PAT_MRT3847_71918C.1
ggcacagagacgaaatcatcatctcatcatcaatggcgaagctgaagacgggcattgattctgggtcctgggcacacaacgtgagagttccagacgaaatcctcatctgggccaaagcgaatccgggcgacccgtttcagttggacttctgggtcgccagcgtggcgcccccgcagctgcacgaaggatgggtcgagtccgttccgggcgatcccttaacctttcccgggctcgcccccacttcgctcaaccggttgggtcagctctccgtcaagggcatcgttttgactcttcccgacatcgttccctcgctttcaccgactgggcactttggttccaggaagctgattgctgatgttaaaattgtgaactttcctactccgcgctgcccgctcaccatgcctacgcagtttggcccgagccccctgatcacggcccttgacccttacgtgtcgaccgcgcagaattcggctcgaccttcaacatccttgctgcttgctatagaaggccatggtgagaaagaaagattgcgccgcaaaatgatggtttttcacaagcttcatgatcatgatcttacgttggaagcagcatggcctcaattatttgttgaccacaaaggaaaatattgggatgtccctgagtctttatctgttgatttgtcatcccttgtgtctgaatctggattgcgatatcactttgggatacataaaaatggtggtaatccccaggcaatgaatgcaaccgatggtaacccgccactgtctctactgccagggttatgtgcgaaggttgctgttagttatgagaagatcaaatacttctggagagataaaggtgctgcagaacaagagaatgaagaggcgcttccatatgatgtgcgtcttaaggaacctcacgcagcagtatctggaattattggtagcacctttgcttcctggatttggaatggaaggagcttgtctagcgtcgattcaagagaagatcaagaggtgtcaacaagcaagagatctcgacataatgctgatttgtttggctcagtttgctactcctttcagcatggaaaattcacaaaaaaatatggggacttaaccagggtagatgctcgtctagatatatcttcagcttcagcatttgcaaagaagattctgaatggttccagtagttcaactgctgatgttagcaaacaaccatcagcctcaccccggctaaatttaatctttcaacagcaggttgcagggccagttgtttttcgagctgattcccggattgcccttgagtctttcgccaggaaaaacggtgtgtcagtagaggattttatttgcagcctgagttactccttgaaggatcttcagtctggaaagatcgttgcttggtattctccaaaaagaaaagagggaatggttgaatttcgcatgtatgagttttagcagaatgcaacaaccctcacatttttgtaacttacgcttagagatcttacaatgcaagaagccccacatggttgctttataagattcatttattatttaacatttgatctgctaaaacttaacatcactgattttgtaatgccaaaaggtgtttagttagatgttttgttttttattcatctttagcagcaggactagcaaagccaggtacatttgacatataaaattcaaaggtgaatcaagatagcacgcttgagatagggtgtaatgggagttgttattggctcgt

SEQ ID NO: 111749 - DNA, 233 bp, Glycine max
  Clone ID: PAT_MRT3847_71919C.1
cccaaaaaaaataatcaaataaggggagtaaaaattatttaaatctaaacttttgcaaatgcctttgtgcttatgcccagacaaaaaaacaaatgatttttcccgtttgacaatggcttgtaaaaaacctaccatgcaaaattatttctttcctacctacaaagttttcaccaagaggaggttgcgagcaaaaccttcctcctaaaaatccaaaatcctcaaattaaagaaaa

SEQ ID NO: 111750 - DNA, 615 bp, Glycine max
  Clone ID: PAT_MRT3847_7191C.1
ttgcaatagatgggtctaaagtatactttgtagtttatagtttcttgagaaagtataacatagttaaaacttaaaaagtataagattgcttatagcaatcgtattgccatataattcattcacagatcactagccttcaccacaagtcaccgatcaagagtttacgctgccatcataacgtatcagaagtaacatcttgcaaccaagatgtaagagagctgaaaacatgaacactgactacaaggtctaaaaggatagggatcattgtatggagattatagtttcagatgttttgttacattttacgtgtaatatgaggcatttcagtgctgggagagccatattacatcctgaacagcagatgtagccagcaaaaaacagctagtgaaagtgaaggctattgagatggcaacatggtcacaaaaattgtgcaaaggcttgcaaaaatcaggcagagctgtgtgtctaattcctgtgcgattcagattggtcaccccagatgcagcagatccagcactcatcaatgcataagcaaatgcctgatccccagcaaaaataagccatgcatgatttctggaaggaattatagaagacatcctaagaaaatctcgatat

SEQ ID NO: 111751 - DNA, 293 bp, Glycine max
  Clone ID: PAT_MRT3847_71920C.1
gggcaacagcacaagcacaaaaatatatttctatatgcgtgtttcgggggtaaaacaaacggaccccaaaaaaaatgtggtccttatgaaaatcccaatgttttttggctctgctaacgcacaaaaccccccccaacattgcgggggccggaagaatggggggacctgctgacaatatcaaatacccaacccccccaaccttttgccggccccgtgaattatcataaaagaatcaatctcgctgagccacgggaatatataacctggtcacacccccctctgtggtcgggggg

SEQ ID NO: 111752 - DNA, 374 bp, Glycine max
  Clone ID: PAT_MRT3847_71921C.1
gggagaaacataaaagggaacttttccataataatacagtaaaagtctttcaaaaaaaaacaggagaatttaaattgtaaagcaccagtccttttccaggccattttagcttggtgcgatttttttttaatccgtaaacttcctatacccgagagcagaaagcaattgggccgagtttaacttttttgaaggaaagaccttgaaaatggtgtagccaatagggcaaaatttctccaaattaaaagaagtcaacccctttagttagtttttggagcccttgacatggagagactcggaggccccctcagcaggggtagcatcacctttgtaagttcccaaagttgcatgggagtttgcattgccccgggcaaata

SEQ ID NO: 111753 - DNA, 1561 bp, Glycine max
  Clone ID: PAT_MRT3847_71922C.1
gcaccaggaagctaagtccttcttatccatttggcgctgtattcttcttcacaggcatggttgtggtggttcctcttgattggctctcttttcagcattgtcttcgcaatcgcacaacccatttgcccctctcctccagattcaccaccaccaccaccacctctctctgcttccactctcccataattcaagccaagttgccttttttcaccaattccgactcctttcaagtgggtcgacccattggcacttatggcttcatcaacgtcaccagctactctgcctttccctctgggcctggcactgactattctcttgaagacttgggaggactgaagactcaagatgttggagaaggcaatgtcaaaatcaggctctacgaagggagggtttctcggggtccacttactggaactccggtaacttttaaggtttatcctggaaggcgagctgggggagtcgtggctgatgcactcgctgcaaatgagttgaatacacacttgtttcttcagagcagttctaaaggtattggtcagaatcttgtgctgcttgtaggtgggtttgaaacaacgactggagagcagactatgcaaaacttgcaagtgagagggtatcgagagatcgagaagggtcatcctggaacccctttgagcaaggactgacaaccaaaaggagacaaaattttatcataaagatgctccaaggtgtcatgaagggtctagcttacttgcatgaccacgataggttgcaccagagtctaggaccgttttctgtggttctcaacacaatttcagaaagagaaggttcttatttgattccaagactccgagatctagcattttctgttaatgtcaggtacacagaactagatgattcgggacaacttgtggaggggctttggagaagagcaacaggtgctggtgcattcacacaaatggagaaaagagcttttggaatagctgatgacatatatgaagcaggtcttttttttgcatacatggcttttgttccattttgtgaggctggtgtaatggatagcctttccttgcaaaggcttttggagaacactttccaacttgatcttgaagcaacacgagagtattgtctagcagatgacagattagtaaacgctgtcgagttcctggatctaggcgatggcgctggttgggagttacttcaggcaatgcttaatgctgactttcgaaaaagaccaactgctgaggctgtcctcaatcatcggtttatgactggggcagtcctttgaatttcaaggtcaaagaacatagttgtttgtggcttttatgaaatatctagcacatggctcactacataatgtaaatttgtttatcagtttccatgacttatttaggatttttggtatgcaataatttatcgtcatttgttatttagaaaaaaatattctattttggattatcttattgcagcttagaataggagtaatttgttagggtgtttggccgtattaggtcaataaataggcctttaatgtatatatttgagttttttttattatcatataatattgagctttcttcattaa

SEQ ID NO: 111754 - DNA, 734 bp, Glycine max
  unsure (1)..(734): unsure at all n locations
  Clone ID: PAT_MRT3847_71923C.1
atcttcttcacaggcatggttgtggtggttcctcttgattggctctcttttcagcattgtcttcgcaatcgcacaacccatttgcccctctcctccatattcaccaccaccaccaccacctctctctgcttccactctcccataattcaagccaagttgccttttttcaccaattccgactcctttcaagtgggtcgacccattggcacttatggcttcatcaacgtcaccagctactctgcctttccctctgggcctggcactgactattctcttgaagacttgggaggactgaagactcaagatgttggagaaggcaatgtcaaaatcaggctctacgaaaggagggtttctcggggtccacttactggaactccggtaacttttaaggtttatcctggaaggcgagctgggggagtcgtggctgatgcactcgctgcaaatgagttgaatacacacttgtttcttcagagcagttctaaaggtattggtcagaatcttgtgctgcttgtangtgggtttgaaacaacgactggagagcagtggcttgcatttcgtgatgatgggaaatataacgctgcagactatgcaaaacttgcaagtgagaaggtatcgagagatcgagaagggtcatcctggaatccctttgagcaaggactggacaccaaaaggagacaaaattttatcataaagatgctccaaagtgtcatggaagggtctagcttacttgcatg

SEQ ID NO: 111755 - DNA, 347 bp, Glycine max
  unsure (1)..(347): unsure at all n locations
  Clone ID: PAT_MRT3847_71924C.1
ttcggggtttccaaattagatgagttgttgttcttgctctgccatggccttccttctcaaagcaccttcctttctccctcctcttaaccaaaagttgaattatacccataaaagcttttctccataaacctgcaatccaaattttaccatgctagtgtcagaaatgggagatggaacgttcctagcatgacaataaaagctcangcagctgttgaaggggatgtactacttgacgaagaatccatctgtgtcaatgaagaaagtgattacggggtcgtttgtatgcaccatgttggaattttatgtgaaaacctagaaagatcacttgacttttatcaaaatgttct

SEQ ID NO: 111756 - DNA, 424 bp, Glycine max
  Clone ID: PAT_MRT3847_71925C.1
ttccaagataggtttccgtcatcactgtatgagtctccttctttgggggggggggggctgagagggcgttatgcggttaagggtcgagaatgccgaaaccagaacaaaagttgtataaagtatagacctgatggttttacagaaagaaggagtatgttagaggtgagattgtaaaatatagcgtcccagggagagataaaaaaaagcacgcgcaacaacacaaaggtggggcaataatggggccgcatgaaagggttgtttacgttaatagaaagaagcgagttgtacgtgaactgagcgatggaggtagtatggggccatgggcagtgtcatgctagccaggtgacagcagcaggcgcagttattagcacgcgtcatcgtcatccaggtaatcgcgcgaacaacagaggtagagagtggtggt

SEQ ID NO: 111757 - DNA, 207 bp, Glycine max
  unsure (1)..(207): unsure at all n locations
  Clone ID: PAT_MRT3847_71926C.1
tctttctctctccaatagccaaagactctttatcggagattcaaagntattttcctagcaaggtctactattacccacggccggccccattctactacccctcctaactcctaaagttatccttcttcctagccctaatctccatattctacaccaccctccttttcctttacttcaccatcctcaccatcattctctacaaccacc

SEQ ID NO: 111758 - DNA, 274 bp, Glycine max
  Clone ID: PAT_MRT3847_71927C.1
gtcctcttccatctcctccgccacgcccttcacctcttcaacgaatcgtagtcctccaaagacacgccgtggttttcgggtggagtcgttgaagcggagttcgaaaccagcgtctgcggagttggtgaaggaccccaataaggacttgtcccgcattctccgaaccgaagccgccatcagaggcgttcataacaaggccaagtcttcctcccacaaacagctcccgcccaaggcccttctcgaatccctcgacgacgccatcaaacgctgtcgt

SEQ ID NO: 111759 - DNA, 193 bp, Glycine max
  Clone ID: PAT_MRT3847_71928C.1
tgtagttcagcgtcatcctttcattagcataccattatatcagattccaaagttcattatccgcatgaatgacactaagaggatttctgtcattattggagaagggtggggctcttacgtacaatcattaccaactcattccgagtggcttccaagttgcgtatcttagaacataatcaaatggcgtgcgctc

SEQ ID NO: 111760 - DNA, 436 bp, Glycine max
  Clone ID: PAT_MRT3847_71929C.1
gtaggaagaacccaaggccttttttgaaaaaagagcaaaccagtttttttttaaacccaaacaaacaaaaggggtagggtgtaatcaaccccccccctttttgtaaaaaatttgcccgttcccggatttaaagccgccttgaaaaaaaaaaaaaccttgaaccccccttgggggtcgttttttttggttgggccccccacctcaaaggggggggggggtagggccccccttccgggtataatttcccccatcaaagggaaaaccaaaccccattgggcccatcttcccccaaaaagcccggttggtttcgggaatcccaaaaaagggcccggaccaagaccaaaaacttccctgaagcctttggctggggggaaaacaccccccgggggggggtcggcatcaaaaaatttttcacggcacctaaacccccaatggg

SEQ ID NO: 111761 - DNA, 482 bp, Glycine max
  Clone ID: PAT_MRT3847_7192C.1
aattcggctcgagcaaatatacgaatagggtgttccagtaacatttgaatgaggtctcaataatctcatccactgcctcgctcttgtgatcatacactgtaagaagctctccatcaggatgaaattggaaagagtctgctacaagtttgaaggcagaaacctcattggcaatgaaaacaagggtgtaatcagcttctgagatgctcataaacgccatgattctttctctgattttggattctaattccgattcctggccgccgtagagtatctgagaatgcaaagttacaggcttgtaggagataacaaagaagggtggttcaggcaaggatggaggagggcaagaagatgaagaagcaactgaagccgtttgcttttgctgctgagcgtgggagaaaaggccatatccagtgtagtcaaaacaaacattggaaggattcaagtggtgatattcttggtcacgaattcgatcaacttgacta

SEQ ID NO: 111762 - DNA, 307 bp, Glycine max
  Clone ID: PAT_MRT3847_71930C.1
gctctatgcatttacttctctataacatttccaacttgccaacaattagggctgctttggcttggtccgctctggcgtcaacgcataaattgagatgcgaggctcaccattcaagacaacccaatcgcttctacaagatgagcgcataaatggagaaagtaattgccatcggctgcacctaggagactgccgaaccaaaaaccaaactccattaccacttctacttttaacataataactgatatctgcgcatacaagctcaatatctaaattgttattcttaacgctgctagtcgtcgtaacaaaa

SEQ ID NO: 111763 - DNA, 490 bp, Glycine max
  Clone ID: PAT_MRT3847_71931C.1
caaaacacaccgactcagataaagttgaagtttccacgaacagactacaaaactctacatgttttaagtgctgtggcataccaaaagtaagtcctgtgatcttacgtttctctatgatgagacttcagaacaatgagcgtacaaggtacatgtccatatttgtatgctactctattatgcctccttgactcactataacgaggttatggttttttaactaacaaatatttaactgatacagtgaaagaagcaaaggttaattcctgtagcttacactacatgccccggaccgtttccccaacatctttcccataacaccagaagagaaattttgatgatcaaatatgcaaatgaatgccattactactaagtactaactaaaccaaggaattgaaaaacaacctatggtgtctccttctatttcacatttttttcctgtggtgaattccatggcacctcaagctttcaaaggaacagaactattcatatt

SEQ ID NO: 111764 - DNA, 450 bp, Glycine max
  Clone ID: PAT_MRT3847_71932C.1
ctcgagccgctccttccttgatacaactcataactctttttttttttttcttaattaagatgattcggaccatatttgcttgcctcaatggaaaagcatcacataaaaaatctaaagtagagccactggaagtcacaaaacctgtttatagagatgagttaaccaaaaaacaaaggccaaggaaggcagggaagaaaactgtccggtttgcagaatcagaacctaccattttgggagaagatggtgagaaggagtttgagaaaacaagaagtgttagtggtaatgaagtgggagaaaaagaagggataagagtgaggattaaattgacaaaagaagaagctgcacggttcctatcaaaatgcaacagaggagttcttgaattcgaggatgttgctcgtgagcttgggttgatcccagttaatcgagttagcattgtgtccgatggcacaa

SEQ ID NO: 111765 - DNA, 320 bp, Glycine max
  Clone ID: PAT_MRT3847_71933C.1
tttaattttgtagaaccttcactcttctgatggatcaatttcctattcgtcttttttttgtcacatctctcctcagttgcccatttctgctcattgctcaatctccaagtccaattatctcccgtatcagtgtggtaggagctgtttattgtgatacctgctccaccagcactttctctaaacagagctacttcttgcaaggtgttgaagttcacatacagtgcagatttagagcaacctcaccaaaaactagcgagcagataagcttctcagtgaatagaaccacagaccaatatggagtgtacaagttggaaatacca

SEQ ID NO: 111766 - DNA, 445 bp, Glycine max
  unsure (1)..(445): unsure at all n locations
  Clone ID: PAT_MRT3847_71934C.1
caattattggtgttactttcattgtttggattggtgtcaacctgggatgggattggagctttattgtatgcacattaacaattctattcgcaattgtgttcatatgcatgggcaactcgttgtaccgaaacaatgtcccaaagggaagccctctagttcgaatcattcaggtgtttgtggcagcctttagaaacagaaaacttctgattccagataatacagacgagctgcatgagattcatgaaaagcaaggaggagactattatgaaattattaaaagcacggatcaattcagattcttggaccgggcagcaattgctagaagcagcacaggtgcaagaacaacctcaggcccctggagactttgcacagtgacacaagtggaagaaacaaaaatcttagtccgcatgctaccaataatactcagcaccatatntatgaacac

SEQ ID NO: 111767 - DNA, 640 bp, Glycine max
  Clone ID: PAT_MRT3847_71935C.1
ccacgcgtccgcattaacacccctccacctttttcagaaaaacacttacacagttacagagtcttcttcattcattcttcaccaccaccacctctctctctctctctctctctctctctctatatatatatatatatatatttcaagcgcgttcatttatatctttcggtgagttagaaacaaacttagactcgtggcagttgggtgcatcattaatgcactatccattctcttcacaccccatttaatgtttagttgcacaaacctcacctcagttccaaaaccatcactccttttggtcatgtaaaacacaccacaacattatactactcagtctcacaaacatacaatacaatactacaaccttaaacatgacaaagcctgtgtttcatttcatccacgctcgtgcgaggaaattaaagaaacagagacattcctcccaactgagactttaatggatccgttttgtggattgtgttggaattcagacgagacagcgcaacagcatcatgtgcagatgaagtaaagtgaagttcatttcaccatttgattaggtggatcaactagttccagctccagcttaactagtagtctggaattcaagtcctgatatggaactgggtgtctgcgttaaatattc

SEQ ID NO: 111768 - DNA, 1118 bp, Glycine max
  Clone ID: PAT_MRT3847_71936C.1
ccgctcgagcgccggccggatgatggttgaagattgattgattatccacttttcaatccaatctctttacaaaaccaaccctcaataataatcacacaacacacgtcttcataactaccattaacacccctccacctttttcagaaaaacacttacacagttacagagtcttcttcattcattcttcaccaccaccacctctctctctctctctctctctctctctatatatatatatatatatatttcaagcgcgatcatttatatctttcggagagagagagagagagagagagagagagggtccgagagagcccgggagagacccacaggttagaaacaaacttagcctcgtggcagttgggggcattattaatgcactatccattctcttcacatcccatttaatgtttggttgcacaaacctcacctcaattccaaaaccaccaccccttttggtcatgtaaaacacaccacaacattatactcagtctcacaaacatacaatacaatacaaccttaatcatgccaaagcctgtgtttcatttcatccacgcagctcgtgcgaggaaattaaaacaacagagacattcctccgaactcagacattaatggatccgttccgtggattgtgtctgaattcagaagagacagcagaacagcatcatgtgcagatgaagtaaagtgaagttcaatttacaatcgagcacctggatcaactagtacaagattgttccggttctagcttaactagtagtctcaaattcaagtcctggtatccagctgtatttttcgttaaatacttaaaggaagaattttttactgtttatagtagttctatccgacccgaacaagattgtgtactgtaagaatatatttgtttgtgtacaaaaaagtgaagttgagtttgtgagagtgagttttagcattcatgggaatgggaggaattgcagtggagcgtggttacagtgtttgttggtgatgattggattaacaatgggaatgagttttgagttcgagacaggaatggtttgcgttaagggagcttcgacaatcgttggagattagggcaaagtattggccaataaaagccgaaccgtgcgggaactgacccgggg

SEQ ID NO: 111769 - DNA, 440 bp, Glycine max
  Clone ID: PAT_MRT3847_71937C.1
ctcttaaccccaattttctcttcctatagttaggaattaatcttttttgttctccttgtttaattaattgataatttttggtgatgggcaattacatttcttgcaccttggctcctcctttgatgaagaacacaagggcagcacgcgtgatcttccccacgggcgaagtgaagcaatacaaggagcaagtgatcaatgtcgccgagctcatgatggagtgccccactcacttcttagccaactccaactccctacacatcggacgccggttttcgcctctcggcgccgacgaggagttggagtgtggcaacgtctacatcttcttcctcatgagaagactcaattccgttgtcactgccgccgacgtggcagtgcttttcatggcgggccatatgaccgcgaaacggataactaacgacacagatttaatgtcatgtgat

SEQ ID NO: 111770 - DNA, 233 bp, Glycine max
  unsure (1)..(233): unsure at all n locations
  Clone ID: PAT_MRT3847_71938C.1
cttcctttttttttttttttttttttaatttttttttttttttttttttttttttnccaaaagagtgggctcggaaaacggggggggcttaaaaataatcttcattgattgaaccttaaaaaataagggtttcccattttatacatgaaaatacatggctttgcaattgccacatcaagttggagctttgttttcacacccagcagggtaatcaatcccccagctggcttttt

SEQ ID NO: 111771 - DNA, 409 bp, Glycine max
  Clone ID: PAT_MRT3847_71939C.1
gatgaagctcgagatctgattctgcttctgatcaaaccctctctatgatgggctcagataacatgatggaggaccctttttacaggatatgacagatcggtcatgatgagcacagggatgtgattaacacgaatgatcaggaactagctgttgtcctctatcccttgatggcctctgattacatgacatgcatgtgcatgtacgacaccgactatggacccgggaactatttatattatgatgtaagagactttatgaccctattatatcatgagaatcattgtgaccgctttctgcattaagaaccctattgaaaatcctaggcaagacgttatagctgattgtgtggtcgagtcaactggtgtattcactgacaaggacaaggctgctgctcacttgaagggtggtg

SEQ ID NO: 111772 - DNA, 751 bp, Glycine max
  unsure (1)..(751): unsure at all n locations
  Clone ID: PAT_MRT3847_7193C.1
cgaattcgagctcgttacccggggatcctctagagtcgacctgcagccatgaatctttcaatgacaattcatatgataaaccatcaagatcattaacttgagcaatgttttggagtctttggactacttttgctccggaattttctcctgcgtccctgttcaaatcgagagttgtgaggtgtgcacttagtgaagactcagcaagataccctgcaattcctttgtgtccatttgcagaagctaggtcagctggtgttctaccagaaggatgttctggacatggatcagtcagtgctccaggtgctgcgccgagagagatgaggaaagcaactgtgcgctccctgataaagtaagatgcaagaacttaatgaaagatgaagtaagcaagaaaatgaaaaagaaactcaaagcagtaacaatatattgattctttctagtcagtttatcctagatgttttcattcatgacaaaagactcaggtgcgtccaatcatagtatactataggttttttcagtagattttttcttatagtttcttcatcaatggcgttccatcctgcaaacctataatgaagtatatttgagtatcaacaagtaagaacattctaacttctttttatgcacatttcacatatttttctctcagcactaatctattttttctcacatactattcactcttgncaagttgcaattaatatcagtgacccatcgtattaatttaatgtaatgtcaaggatgttgcatataa

SEQ ID NO: 111773 - DNA, 198 bp, Glycine max
  unsure (1)..(198): unsure at all n locations
  Clone ID: PAT_MRT3847_71940C.1
ggaattcggcacgaggaagcagtttaataaattgcgtttggttatcattttaaaaattgtgtagataaagtgaaaaagaaggatnngggnagnagnnaaaatnanaggctgcttttttgatccaanatagaaactaccttaatttttgtagccaactctgnttgaattttctctggaacccttttgtaataaatggct

SEQ ID NO: 111774 - DNA, 533 bp, Glycine max
  unsure (1)..(533): unsure at all n locations
  Clone ID: PAT_MRT3847_71941C.1
tagtaatcaagttgaggcagaatggattgancagtatgaacctggtgtctacataacacttgtggcactgagtgatggaacgagagatttgaagcgagtgcgcttcagccgaaggagatttggggagcaccaagcagaaacctggtggtcagagaaccgagacaaggtatatgaaagatacaatgttcgcagcacggataagtcggccaaccaagcagcacgtagttcagaaggtgctgtttcgcctgtttcccaaacttaggagaagtagggagagggaagtcctccattaacacattttgtcactgagcaacattgtagggcagcaagaatgcatatgaagaaaccaggcatccttgtttgttggtggttcttatgtccatccttattctcttctcactcttcttttttcccctttcctctttttctcttaaattatctgtcttccatttaatttgggcatatgccctttacatgttgtagtttagtgtatataaaatcatcagttctgccaaaaaaaaaaaaagagaaaa

SEQ ID NO: 111775 - DNA, 397 bp, Glycine max
  Clone ID: PAT_MRT3847_71942C.1
ctcgagccggctcgagacggctgcgagaagacgacagaaggggggtgcagtgaagttatgttcatgaagccattaacaattttactctattaaattattagtagccagccccagaagtctcaaacaagatatggccgatttgaatctaaatatctaacagttaatttgctattaaattcaacaaagttcgtttccaatttcatgtcaactactgcatgaaatggcgctacattcactaatatcttgaactgaatccgttaatttgcctccatctcctccaacagtactttcatgatctagaatcttctctagttcttgagggtagcagggaatgaccaaaacccccttctgtctgaaaccatactcttctcttgcccgcttcagcagtcccaaaaat

SEQ ID NO: 111776 - DNA, 193 bp, Glycine max
  unsure (1)..(193): unsure at all n locations
  Clone ID: PAT_MRT3847_71943C.1
aatgtcatgctatagctggatactgactagctcccatgtttttattctgattagtcctagccaatcgctagatgtgtggtgattccatattgttataggagcctattntgagatgcatgcatgcgttcaagtgtgtgccagttctagtatcaatgatagcatagctatgagttatttcttatagcgagtggat

SEQ ID NO: 111777 - DNA, 593 bp, Glycine max
  Clone ID: PAT_MRT3847_71944C.1
aggaattcggcacgagggttgatgcgagcagggcactccccaccaaaatacaaaacgaaacatcttaagacaaatgagtttagggcactggtggagttcaagggaatgcaatttgttggccaaccaaagagaatcaagcaacttgcagaaagggatgcagctatagaggcattggcttggttgactcacacctctgacaataatcagcatgaagatgataagtctcctcctgatataactgacaacatgctaaaactcctagggaagcgtagaaaatcaaagcaaggccatggttgacatgtcgtccatacatggttttatgcgagttggtcctatcctaatcttggattagtagcccagcatcatgcaatttaatgcatgatgatgaaagatagggatttaggtgacatttcatcaatacatggttataggtgagttgatcccatcctttcatcttggattcatagcccagctccctgcaatttaatgtatgatgatgaaagaaagggatttaggagacctggtatgaggtgctcagtcttggcagttgttggcgcttaaaagttcattgtatattttagccgtcccccttc

SEQ ID NO: 111778 - DNA, 648 bp, Glycine max
  Clone ID: PAT_MRT3847_71945C.1
ccacgcgtccgcggacgcgtgggcggacgcgtggggctcggcgcgagatatccttttgccaaaccccacaaggaagttcctatcatatttggagagtggtggaatgcagatcctgaggcaatcataacacaagcccttcaaaccggtggaggaccaaatgtatctgatgcctacacaattaatggacttccagggccattgtataactgctctcacaaagatacattcaagttgaaggtgaagccagggaagatttaccttctacgtttgatcaatgcggcactcaacgacgagctatttttcagcattgcaaatcacaccctcacagttgttgaaacagatgcagtttatgtaaaaccttttgcaaccaacaccatccttataaccccaggccaaaccactaatgttattctcaaaaccaattctcactaccccaatgccacattcctcatgactgcgagaccatatgctactggccttggcacttttgacaacacaactgtggctgccatattggaatacaaaaccccatcaaatactcaccattcagctgcttcactgaaaaaccttccactcctcaaacctattctccctgcactcaatgacactttcttttgccacaaaattcaccaacaaactccgcagctt

SEQ ID NO: 111779 - DNA, 231 bp, Glycine max
  Clone ID: PAT_MRT3847_71946C.1
ctcttttaattgtcgtaatgatgtgtgaagtgtgtgttattttaaaaaaaaaagaaaaagaagaaaaaaagggggggccgccgacaaggaggctggtgaacccgggaataaatccgggaccggtaccggagggggacaaagtttccccaaaggggagccgaataagagcttggggaaaacagggaaaaagcgtttcccgggggaaaatgggtcccggcccaaatttccaaa

SEQ ID NO: 111780 - DNA, 554 bp, Glycine max
  Clone ID: PAT_MRT3847_71947C.1
gggtttacattaaagaaattataaatattgaaatactaagatgtcaatatatactaaatacacaagatattcacattcataaatattgggttctatcattcattttctttttctttttccactttctcctcatttttctctcccatcaaaattcaacttaaaccttctgagctacgagaagcaaaacctctgcaagtataatttccattcacttataattcagcagcgtaaacagcaggatacagaaggccatagccatgtatcagccaacttaagttccagcgagataaagaaaatttttgaacaaaaatgaaatggaatgattgacctcaggatcaaacatccatccaatgaagagttggtagcataggaaaagctttacaagactacaaagggggtatatgactctatgtatataaactacattaccatgaggggttggtgaggccattcttaaccctgcttttaccctcatgtgggttggcatttaccccaaagactgatccttttacgttctcactaacctcactcttgcaaagggggcataaagcttt

SEQ ID NO: 111781 - DNA, 855 bp, Glycine max
  Clone ID: PAT_MRT3847_71948C.1
agaagtaactcaatatgattaattgatttaaaaagatacagcaatagtgtgtaagtgctcatttacagagcttatttctatcaagctaattactcttaacacaagctaccatcaaactaatcttgaatatgccatcgggttagtgataagaaatttaaataatttatacaagatcatatgttcaaatctcattttcatcattgggactacaaattcacataagccatcttttgttaaaagttgaagagaggtttaggcaacagcaccaaaggaattccccccttgattgaagctattcccacttgactggaagtaagaaactgctgcccaaatcacacgcaggaccagaattgcagcaaatacagtacctccaagagtgcagatgacctcaagaagtgctttgacaacagaaagtgaagcaagtagcagagtcccatcaacggcaaaagaaacgagctggggcgatatcactgtgggcaaaacagagcgagatgctttctttgcccgcttagacaccttcttaaacatgctctgcaagaatctgatcaacaaatccacgctactctctgcatcatcctcgtcatcgctttcctcttcaactccatcgtactcgtcaaaacccgcttcatccatcgcatatgcctctcccccacctgagctattcagcttgccatggcaattggtgattatgggctttaaacggtggttgtggtagaatctggaatgaaagggttggatagaaaagggaacgttgtttgcagagaagtggcaaagcttggtgtgcgaagggcgcgtgagattgcttaatggtgttgttgtagttgcagtagctcttgccattgctcgagccgaatt

SEQ ID NO: 111782 - DNA, 291 bp, Glycine max
  unsure (1)..(291): unsure at all n locations
  Clone ID: PAT_MRT3847_71949C.1
cacgcggccggcggtctcatgtgctctccactctattttgcttgctgctgcttctcaaaacctgctgtctggacccaacnttgcctgaagacgcgttacaattacaaatagacaactaagtcagggtagactgtgcgcacaatactgagagagcgaggctttaagaaactgcttcgtagtatatgtctactagagatgccgaattgataatgtggaaggtggtggcttcaccatttcaccatttcactgttcgcttgttgaccaagcacgacttgcattctgcagtggtcg

SEQ ID NO: 111783 - DNA, 389 bp, Glycine max
  Clone ID: PAT_MRT3847_7194C.1
caccggctattatatatatatccatctatattccataaaaaaaaatattgggtagggtttcaaggtttaatccgaaaaaaaaaaaaattggggcttctaatacctataaaaattccccccaattctaataattcccccaaaaggggtttttggtgaaaaaaaaaaattaattaatctttttcccaaaaaaataatgtttccctaacccaattttggttttttataccccgggggccaaagaaactttttttgggaaatttaacctggccaatttccgggcgattggccaaaaaaatccagggccttttggaattccctttttggccaaggaaaccggcgcctttttctcctaccggaatttttttcccgcggcccccttgggttttttt

SEQ ID NO: 111784 - DNA, 919 bp, Glycine max
  unsure (1)..(919): unsure at all n locations
  Clone ID: PAT_MRT3847_71950C.1
cccacgcgtccgcacgaggggggtacgatacgagatagagctatctcttcttcttcctcttcattctttgcctttctattcttcttctttcgctgcttctcaaaaccctcatcatcacgttcacgttccttttaatgccttttcgtacaccataaccttctctcatgcaaaacttcccacgcgtccgtctctctctctctctaacttccttcacacacctcgccggcggctgcgatgaccgactatttctccggttccgttgaattcggactcaacctctctaagcgagtatactacggcaaaggatcggctccgtcgcctgcaccggcgatgtcgcggtccctatcgaagtcgccggaaggatacctcccgacggcgccgatgtgctacgccgtgatatcggatccggagaaggtggagaatccggacattcggagctaccagccgtacgtgctcggtcagtgcgagcctccggcgctgataccgctggagcttcacggcgtgggcatggaagttgaatgctccttggacacggcgttcgtaacggtctccgggaagtggcgcgtgcattgcgtgacagcaagtagtacgtgtgattgccaggttgccatacctataggtgaagagggttcacttctaggtctagaggttgatggttctggaaaatcttatcatactgaattgatctctctgaaagacgaaaaggataaggataaagtggccaaagctaaagacggatactttgtgaaaagccatatatacaccgttaagattccacagtttaggggtggctctgtcttctcaattaagatcagatggtcacagaaaatattatttcatgatggccagttatctctctgtgtccctttcagctntccctcatacgtcaaccctgctggaagaaaaatttctaagaaag

SEQ ID NO: 111785 - DNA, 338 bp, Glycine max
  Clone ID: PAT_MRT3847_71951C.1
acggctgcgagaagacgacagaaggggatattaactgtttttgtcatccaaaacagatcgaataatgagcgtagcggtagtgaacagcttcaccataacagagttcgtaaatgacaaggctaagtttgatggtttcgtgaatgaatggtttgcgaggatagatgagaatggcgatgggaagctttcgcgtgacaaaatccgagggaggttagggatgctcttgcctttcggttcggagttgccgccacagcaagagaacgaagagatattcaaaaggttcgatgaagaatggaatggtgcacttgatctgaaagagttcaaggccttaaatgaccgag

SEQ ID NO: 111786 - DNA, 420 bp, Glycine max
  Clone ID: PAT_MRT3847_71952C.1
gtttcttgcaaaaaagtattggaaacgaagcaggagcttgaagctttggaatcaaatgcaaagtccttgagtgaattcttacatagccactgcaagatggaaggggatcaaagctataccaacaccattaaagctgtttctggttatttgcagaagaggatgccttgcaaatctatatgccagaatttgaagttgtgggaaattgaagattttgagtgcaaggatggttgttacaaagtatgtctcaactattgtggttatgtaacccaaaggttcacagtaaatactggccaatctagcataataatatcaaataacttgaatgatgtgaatattgggaagaccttcccaaacttggatgctgtttctgcatttttgtttgtcctaaatcctcataccacaaagaaatgcagtggttca

SEQ ID NO: 111787 - DNA, 388 bp, Glycine max
  Clone ID: PAT_MRT3847_71953C.1
cctttctttttttttttttttccttccttattattatttatttattttttatttggatattggtactacttgaaaactttcaacaaaaaaaatccccctacactttctctgattcaatatctaactgagaaatttcgctaatatgagacccctatcctttacacggtcaaacttctctaaaaaagaggcaaactcttcccccttctggcaaaacactttaaacaaccatttaacatcattactcatcaaaaacaacctgggcttaaacaatcaatcctaatacaaatctctatatcttcaccatgataaaaatgacaagaactacccccatgggcacaaataccttgttcccccgctaaccaaaaaatggaagaaaaaaacttattca

SEQ ID NO: 111788 - DNA, 610 bp, Glycine max
  Clone ID: PAT_MRT3847_71954C.1
ggctcgagttagaaaatcgtcttataatccttaaaatattttattttttttaaaaaaataaaatacattcaaagacagttttttagagaaccgtcttagaatgtctatattttaagacgtttttttggaaaacctgtcttagaatcctcaatttactggaaattcttttaaaaaataaatacattctaagatggttctctgaaaaatcgtcatagaaggtctactcttctaagatgatttttaactaaaaaccatcttagaaagatattcttctaaaacggtttttagcaaagaattgtcgtagaaaagtaccttttttctaagacagttttttatgaaactatcatataaagtaaagactttctacgacgttgcctacgatgatggtggttgataatcgccatcaaatgtgtcttttaaccgacataaaaagcgctttgtgtagtagtgtattaaggagtgttaaaattgatttctgaaaaattacagaacaatggatttagacaaacaaaattgttagaattgagtgctctgtgttttgcatttctaaattctatcagtgatgtgtgacatttatatatatattgataatttttttcgtacgcactct

SEQ ID NO: 111789 - DNA, 264 bp, Glycine max
  Clone ID: PAT_MRT3847_71955C.1
ggctcgagataacattgtgtctgctagacaaatggataaccgtatcataagtggcgacgtatgttcagtacacctctgcgttttggtggatgtagctatggtatagcgtggtttgatttccgtatgccgagtctagtatagtttatctgttgtattttgatctgcaccattagttacttgtctgaagcgtattttctgtgtttgcatgtgtaaaattatgcaaaatggttcagttttatgtaatgagatgaatgtatgtctgga

SEQ ID NO: 111790 - DNA, 275 bp, Glycine max
  Clone ID: PAT_MRT3847_71956C.1
atgtggcatttaccaaataggatcataataccatattggtccttatatcagtttgatcagtgctcacaaacaggtacaaaaacattattacgacatccaacaaacaagcctaaaaaagaacgtaaaaataaactttaactctcctgcaactctggctttttagcacaacccgacatttgactgaccatgcatgccatacggtgaatgaaaggacactatatgggcagagctctacattttagaggaggcctgcagcaatacaacgtcactgttga

SEQ ID NO: 111791 - DNA, 304 bp, Glycine max
  unsure (1)..(304): unsure at all n locations
  Clone ID: PAT_MRT3847_71957C.1
tctctccaaattgagttcagagtcaccaccgaatccgttcctacaatggcgacggtgacgttttccttttccgctaaaaccttaactctaccctatcaccccaaaacctcaatctcgagcttcgctccggtaacgaatcttcgcctctctcattctattcgtccaaaccccccgccggggggaaaaaaccccccccccgggggggaagaaaaaaaaattttnttttggggggggttttttacaaaccggattcgggcggcgctggatggggatttctcggcgaaaaggagcaacaacaacgagc

SEQ ID NO: 111792 - DNA, 361 bp, Glycine max
  Clone ID: PAT_MRT3847_71958C.1
ctctgataacacaactcacatagattttgacgcgcgagaacaaaaaaacgccaggggttttttgaatggctgtattatcacaaccctcggctggcaagaccacaaaactgaccccatcagccccagaagtggcaggggtgcgcatgagcaagaccgctaccaagcacgattactgaggaagtccgtgtcccgggccataccgagttaagtactagaccccattctaatgcgagcctacatactacctcaccgcgatagacgctaagcgactactgttggcacactgctgggctatacacatacccagaaaccatatgcaagaaccgtgaactatgagtgaaccactccaggatggccatgc

SEQ ID NO: 111793 - DNA, 3110 bp, Glycine max
  Clone ID: PAT_MRT3847_71959C.1
gagaaaacatggcaaatactatactattctccttccttgacaaacaaagaaaattttgttaatcacactgaactgtactatgaatatgataatcaattgtctaaacttccaagtgcgccgtattcctaagcttaggctttcaatctgaatttctgaattctctgctgctgaaaaatgaaactgagtccaagggagatcgagaaactagacctgcataatgcaggctaccttgcacagaaacgccttgctcgtggtttaaggctcaattatgttgaaactgtggctctcatagcaacacagattttggaatttgttcgtgatggtgaaaagactgttgcacagctaatgtgcattgggagagaacttctgggaaggaaacaagttcttccagctgttcctcatcttgttgaaagtgttcaggttgaagccacctttcgagatggtactaagttagtcaccattcatgacctatttgcttgcgagaatggaaaccttgaactagcattatttggttcttttcttccagtaccttcacttgacaagtttacagagaacgaagaagatcatagaacccgacaccctaaatgaagctggatttgtcgaacatagcattgcagcatttaaagggcaataattctcagagttgtcaacaagggagacagaccaattcaggttggcagccactatcattttattgaagtaaatccttatttaacctttgatcgaaggaaagcatatggcatgcgcctcaatatagctgcagggaatgccacacgctttgagccaggggaatgtaaaagcgttgtgcttgtaagcattggaggtaacaaagtcatcagaggaggtaataacattgccgatggtccagttaatgattctaattgcagagcagccatgaaagctgtggtcacaaggggatttggacatgtggaagaggaaaatgctagggaaggtgttactggagaagactattcattaactacagtaatttctcgagaggaatatgctcacaagtatggccctacaactggtgacaaaatccgtcttggtgatactgacttgtttgctgaaattgaaaaagattttgctgtctatggtgatgaatgtgtttttggaggtgggaaagtcataagagacggaatgggtcaatcaagtggccatccacctgagggctccttggatactgttataacaaatgctgtgatcattgattatagtggaatcatcaaagcggatataggcattaaagatggtctcattgtttcaattggaaaagcaggaaatccagacatcatggatgatgtattttttaatatgatcattggggctaatactgaagttattgctggagaagggttgattgtaacagcaggggctatagattgtcacgtgcattatatatgccctcaattagtagatgaggccatatcaagcggcatcacaacattagtgggaggtggaaccggaccgactgctggaacacgtgccacaacttgtacaccagcaccatctcagatgaaattgatgctacaatcaacagatgacatgcctttaaactttggtttcactggaaaagggaatagtgccaaacctgatgaactgcatgaaataatcagggctggagcaatgggactgaagctgcatgaggactggggaagtactcccgctgcaatagacagttgcttgactgttgctgaccaatacgatatccagattaacatacataccgacaccctaaatgaagctggatttgtcgaacatagcattgcagcatttaaaggaagaactattcatacttaccacagtgaaggtgcaggtggtggtcatgctccagatatcatcaaagtatgtggtatgaagaatgttctgccctcatcaacaaacccaacacgccctttaacactcaatactatagatgagcatcttgacatgttgatggtctgccatcatctgaatagggaaattccagaagacgtagcttttgcatgttcaaggataagagaaggaacgattgctgccgaagatattttgcatgatattggggcaattagcatcatatcttctgattctcaggctatgggtcgagttggagaggtgataagcagaacctggcaaactgctgataagatgaagtcacaacgaggaccactgcagcctggtgaagacaatgacaactttcggatcaagcgttatgttgcaaagtataccataaatccagctatagcgaatggtttgtcgcaatatgttggttcagttgaggcgggtaagttggctgatcttgtattatggaagccgtcattttttggagcaaaaccagaaatggtgatcaaaggtggtgaggttgcatatgctaacatgggtgacccaaatgcaagcatcccaacacctgaaccggtgattatgaggcctatgttcggagcatttggcaaggctggtagttcacactccattgcttttgtgagcaaggcagctttggacgaaggggtgaaagcttcatatggacttaacaagagggtggaagctgtgaagaatgtgaggaagctcaccaaacgagacatgaaactgaatgacactcttccacaaatcactgtggacccagaaacatacacagttacagcagatggagaggttctcacctgcaccgcagccaagactgttcctctttcccgaaattacttcctcttttaagctccagctatgtgttcaatagacaattttattattggcaaaaaacaataagcaagcatgcacattatcatcacatttttggatagccaaaattaataatttctttcctgctcccatatttggttgcctgattgcatcctacgactagactatattttactattttataaataatttatgttcaaggtttgtgagtacccattagccatttgcactgggcaagtgtacttgtcaggttatatcagataagatcagattactatttttagttttattttgtgtcgggcgaaaaggacttatattttttataatttgtatctgacttcacgacaaattagtgtgtccctacaaactcaaaaccttctattatcgacatgttggccggccaatggcatgaatttagcaaatgatccaacttactc

SEQ ID NO: 111794 - DNA, 855 bp, Glycine max
  Clone ID: PAT_MRT3847_7195C.1
aaaagccaacacatccaaaaacgtaaaacgaaaaaaatgggacttcttcaacgtcccttgtgttgccactcacaacaagaccaacaacaacaaccaccacaatcccatgatcaccttcatttcgaatcatcaacctcatcctccctctcttcacaagcaagcctcccttccattccctccctcaccccacaaaaactgcaccaccccgaagaacaaccgcaaaccacccaccacaaacttgtaactaccgtcaagggccacacctccacgatcttctccctcgccctgcacggcaagtctctctacagcgcctcctcgaacggagaaataagagcatgcagcagagaccctacatcgaccgaattaaaatatataagtggagaacaacctctacctaataccactattgttgtgaacagcaacgcgccaatcaagtccctcatcgtatcacacgacaagctattcactgttcaccaagaccacaaaatccgcgtctggaaaacaaccgaccaacccggtaataataataacggtattgtctatacaggttctgcggatacgaaaataaagatgtggaagaagttagaaggagataaaaagcattctctaataggaacattggagaagcataaatctgctgttaacgctcttgctcttaactctgatgggtcagtgttgtattcaggtgcgtgtgataggtcaattttagtgtgggagggtgatgaagataataacaataacatggtggtggtgggtgctttaagggggcacacgaaagccatactgtgtttggtggtggagtctgacttggtgtgtagcggatctgctgataacagtgttaggatatggaggaga

SEQ ID NO: 111795 - DNA, 397 bp, Glycine max
  Clone ID: PAT_MRT3847_71960C.1
tttgttttagctgaaagcgctgaagttgactttgacttcttccctgtggaggttgctagccacgagggagtcgctcacattggtgaattgaaatgtggagtctatgttccactgcctacaaaaactaatctggtggaaacttccaaggaatggcaactggatctaccttgcgacaaaattcctagggtcttgactacaactgacgagagattggtcggcccataacatgagggatatgatccttttcttggtggcactcagaaatatgcgactcccacgatgcccctagctgaagaaattattcctaaggttgcacaccacatgggcgcggaatggtttgattgttttgctagggagtctcgccttcaatctcacctactacacgaggatttcttag

SEQ ID NO: 111796 - DNA, 802 bp, Glycine max
  unsure (1)..(802): unsure at all n locations
  Clone ID: PAT_MRT3847_71961C.1
attggattggtctgatgggtgtgttcggggaacgaaactgggttgtgacgatggagatggatttgttaagtatgaaggaatgagattgccagacacgtcttcgtcctggtttgacacaagcatgagccttgatgaatgtgagagtgtgtgtttgaaaaactgctcttgcacagcatacacaagcttagatatcagaggtgtttttagtggctgcttgctttggtttggtaacattgtggatatgggaaaacatgtctcccaaggacaagagatttacatacgaatggctgcttcagagctagaccaaacttggcataaaaggcacgctagcaccaagcttgtggtgattttggcaacaatcgctacgttcatcgtaggcttaatattaggatcagtcatatacatacggagaaaactagggaaaccaggaaagacaaatataatcgaccagatgcatcactctataaaacatgagaagaaagacatcgacttaccaacccttgatttatcaaccattgataatgcaaccagtaatttctctgccagtaacatattgggagaaggtggatttggaccagttacaagggtgtgctggcaaatggacaagagattgctgttaagaggctttccaaaaattctggacaagggattagatgagttcagaaatgaagnntgtgttgattgccaatcttcagcaccggaatcttgtaagatctttgggntgntgtattcaagatgatgagagaatcttgatctatgatttcatgcctacaggagcttggatcttacattnttgatcgac

SEQ ID NO: 111797 - DNA, 392 bp, Glycine max
  Clone ID: PAT_MRT3847_71962C.1
gggggagataaatcaaacttcccataaaaccccggggaacaaatttttttttgtggaaattggacaaattttttttcagggccttgggaaattgtaaaaaaagtacccccttttgttgggggccccaattgcccaaaaaaattcaaaaggggtttttgggctaaaaacaacattttttggcccaaaatttttttggcggggggggaattttttcctttccgggggccccaccttttgggggggtctactggggggggaaaggggatacccaacttggggtttgggctggggaaaaactgaaacaaactgttgggtttaaggggaaaaacatttccagggggggcatttttttttgttgggacaaaaagggggtaaaaaccccattttttttt

SEQ ID NO: 111798 - DNA, 1017 bp, Glycine max
  Clone ID: PAT_MRT3847_71963C.1
cgagaagaaaaggtgagaagatatatacatatatacgagagagtgagtaatcgagaaagagaagaagcatatatatcaaaatggctgcagagatggagagggagtcattgataactgaagctcctaatgcaccagttactgcacagagaagggtcagaaatgacttagaaaattctctaccaaaaccatacttgccaagagcattgaaagctcctgatacgggtcacccaaatggaacagcaggccacaggcaccacaacttatctgttcttcagcagcattgtgctttttttgatcaagatgacaatggaatcatttacccttgggaaacttacatggggctgcgttctattggatttaatgttgttgcatctgttattatggctattgttatcaatgttggattgagttaccccactctacctaattggttcccttctctcctttttcctatctacatacacaacatacacaaagcaaagcatgggagtgactctggagtttatgacacagaaggacgttatgtgccagcaaatattgagaacatattcagtaagtatgctcgtacagtacctgacaagctcacacttggggagctctgggacttgacagagggaaaccgaaatgcttttgacatatttggctggcttgcagcaaaatttgaatggggggttctgtacattctggcaagggatgaggaaggtttcctgtctaaagaagctgttagaagatgctttgatgggagcttatttgaatactgtgctaaaatgcatactactagtgatgccaagatgagttgaaattggattatgcagtgtgcatagttacgtgtgatgtgtcgtttctgttagacatgttagtggtgtaatgtgaaaaaatagtaaaaaaataaacttattaggaactcgtggtctgggattgatcagcataataaagagtttactgtctctaaaatatgttgttctcgagatgtaatcctttcctcacgtgtggaaagaagttactctggttcctaca

SEQ ID NO: 111799 - DNA, 251 bp, Glycine max
  Clone ID: PAT_MRT3847_71964C.1
ccgagatatcatcttcttatagccactcgaaaatgacccaaagaaccaggagggccgctattgttggaaaatacggcacccgatatggtgctagtttaatgacacacatcaagaggatggaagctagtcagcacagaccattcttctgcgagttctgtggaacgtatgctgatccgaggaaggctgtgggtatttgcggctgcaaagattgcagaaaagtgaaagctggatgtgcctacacaatgtacact

SEQ ID NO: 111800 - DNA, 321 bp, Glycine max
  unsure (1)..(321): unsure at all n locations
  Clone ID: PAT_MRT3847_71965C.1
ccctcggctatgattagcagggngccactacatggggctctttttccacgtggggtggttgaacacaagcgtgagttctgggagcagccagatgggttggggtacaagccttgcttggatttcaggagggagtataggagggagagtgaaggggttgcgatgaacaggaggcggctcctcacggcggaggtttttggcgggacctctcccatttgaatcagaccgcgaggcagatgcaaacgccaggagtctcggggccacttcggtcgtccacatcttgcacgagcccgcgaaatgttgagataaaagctcccactgctc

SEQ ID NO: 111801 - DNA, 334 bp, Glycine max
  Clone ID: PAT_MRT3847_71966C.1
ggctacctaccagatattgctaaattatcctccatggctacaataattctagcttagacttccaggaacctatcatatccccaacataccaaggtgcaaaatggaaggactcctcctgatgtcaaatgcaccgcattcgctgacaactgagaaaggttgggcggaactctatttgacgagcccgattgttgaagagactcccgtttcaaacacaacaaaagctgccattactgaccctctccgctccgagaatagaccatactggccaacccagccaccaccgtgcagaccaggcaacagaacagtttcgcctggcgcaccggtgtggccccag

SEQ ID NO: 111802 - DNA, 314 bp, Glycine max
  Clone ID: PAT_MRT3847_71967C.1
ggttagataattactattatacacaaagaaatcaatgtaagttactcaaagtcagttggggaaattaagatttgagaggataaaagaaagatatggaaaatggctggtgattaattatgaagcaatcaactttatgtttttccttctcagccaaattgagtgaagaatcatatgcatcatatcaaatggttttgctggccgattaatcataaagtgtcttcgaactcttaacacattcatgtgcaatctcaagtactttttccttgaaataccttgtaatatacctttgaattctgggattttttggacccaaa

SEQ ID NO: 111803 - DNA, 313 bp, Glycine max
  Clone ID: PAT_MRT3847_71968C.1
gaaaagaagcattttaaatacataaaacattaaatcataactttacatggtaccggggcttatattaaatttcatcatactatcttatcttctttaacataataaattcaagtcacatgctaactaaattaacaaatataacagttaatattcaaaatctagtatagatggtccaaatatccgatgagctcaaccacatcataattctactggccatatatttgaatctcccactcactgttattataatgacaaacttgacgagtcttaatccatcggctgatacaattgaaattaaaaccatagttacaaa

SEQ ID NO: 111804 - DNA, 366 bp, Glycine max
  Clone ID: PAT_MRT3847_71969C.1
accggaattgaattcccgggccgacccacccatccgttcggtgctacaacacaacagaatatgtatttttatcaaatcttctatttctccagcggggattaaaacactggttggtccctctcatcctcaaaccctaacatttccaacacattccgcaccttcaactgcgcttacttgacttgctgcaccaaaggaaacagctatatttttattgtatagactcacaacacttacatcaatactatcatcatctatgttccaccaactaagcattatttgaacttcaaatgtggcactaactacactttcacaaactttacctgttggcattaatcaatatctattaaaatctaatttacatgtttt

SEQ ID NO: 111805 - DNA, 356 bp, Glycine max
  Clone ID: PAT_MRT3847_7196C.1
gacccccgcgcgggccccggcccggaatccccggggtgttccacgcgcgcggtagcgaccactaacgcctacccatttgccagtaacgaataaccagggctgatcgcgtattgggggctcccaaaacgaagctagggagctatccgctgagcgcattacaagggtatctggcgctgcgtcttccgtcgacgccgacaaagcagaaatatacgccggaggaaaacagatcgacggtgacgtgaccggaccacatcaagggcacgcacgatagcgcgatcgggaacttcggggtaccacaatacggaggcaacatgacggggaacgcgttggacccaaaggacaacaaaaggggctgc

SEQ ID NO: 111806 - DNA, 613 bp, Glycine max
  Clone ID: PAT_MRT3847_71970C.1
atatgagactacactgagcatcgtctagctatctcgatcgaactgtccaaggtcctgtcactggcactagcttagtagaacgctaaagcgcgcaggcccaactaaagcaacaactcccggcataaatcagaaattagaaaagacaactaagcgcgcaggccgaggaggagaaagcataatcaggttttagtcaattccattaaattcacacgtccatttgacggaattatttaagcgcatccaattaaatgacggacggaaggagtgagaggataggatagctcccgtgcgtcctactcttggcggggcgatgcgatggcgttaagcgcagcatgaagttaaccgacagtgcggtgaggagacgaggagtgcgtatagagagcagagacgtgacatggatcgataagggacggggagggcgcgcattccgcgcgcaaaccaaaaaaaaatacggtaaaaccgcgggtgctgatatggcaagttagcgtgcgcgtgcgcgcgctggtggggtggggtgtgggttgaggccttggctggccgggtgatgatgggaggcaaacacaaacacacacacacacaccagcgcaacgcaacaagagaataggtggcgaat

SEQ ID NO: 111807 - DNA, 472 bp, Glycine max
  Clone ID: PAT_MRT3847_71971C.1
ggtttgttttttttttttttttttttttttttttttttttttgtttgttttttttttttttttttttttttttttgggaaaaggaaaaaaataaaaaccccctccaaaatttagggtaatttgcaccctccaagacaaaaagattccctcgtcccgggggtttgggaacctaatttttggggtttttccttcaaaccaaaaatttgaggggggatttaattcgcaaaataaaaaattcggccctttcattgaccaaaaaaaagccaaaacccttgggggaccaagggaatctaggggttggcttttttggaggggaagtttgcctttaaggggaaaaaatttctccccgaaaaaccttgctttgggggggagaaaggctttaccctttttggggaatccctgtgggggtaaaaagtttccttttccttgagaaagccgaaaaaagcaaaaaacccaaaaaaaaagaatcccc

SEQ ID NO: 111808 - DNA, 418 bp, Glycine max
  unsure (1)..(418): unsure at all n locations
  Clone ID: PAT_MRT3847_71972C.1
gtcgaatagaggacgcggtggttcagcggggaacaagttccagatgtcactgggtctgccagtggcagcaacagtgaactgcaccaacaatacagaggcgaagaacctctacatcatatcgataaaatggatcaaaagacgtttaaaccatctcccctcgacttgcattggcgacataataatagccaccatgaaaaaaggaaaacccaatctaaggaagaaagttttaccanctgtcattgttcgccagcgcaagccataacaccgaagagacgacatctacatatatttcgaagataatacgtatattattatcaatcccaaaagagaaataaaaagttctactatcactaatcccattaaaaaagagtatgctgatctataacgcaaaattacaantacaaccaatgctatcgtt

SEQ ID NO: 111809 - DNA, 543 bp, Glycine max
  Clone ID: PAT_MRT3847_71973C.1
gatgcttttttctcaagacaatttgagttgtcacgtcaatagaaacattagattttatggataaaaataacagcaacactaatattcggttggcatatttacatattgagggataaaaatatctctgatcacatatgtcaacaaattattacacctttgagggaggaaattacactttgtgggacgaatttgattatttattcctataaaaacaacgtgaagaaagcgtgagcagaacgcgcttcctgtaaaacctggccatccaaaaccagcaatcactccaagtgcatgtaaaatcgcaggtaaagcgaaaccacgttactctcacgcttttctttcttttaacactcttaattctgccctattctcgcattcacccccaaaactccttccctcccacacccacaatcaaaaaatcaaatttcaccgttcaaaaatgcaggttaccttacatacgtgcgaagctcttctcctcctcctcaacatttctgaccacgtttttcttgtttctcgcaggtttaaggtttctgtttctccatgcaa

SEQ ID NO: 111810 - DNA, 409 bp, Glycine max
  Clone ID: PAT_MRT3847_71974C.1
gccatctcctccgtcatgaggcgtttcagaggaactttaggatgcgccgtggatggatttggggaggatcgatgattgaaagtacggtttgggtgcgaaggtgctcgagtgccgcggcggcggtcaagcatcttatcttcctggtgcctcgcaagttctgtagcttgcacgagggaaagaggacggagagcttggacctcacggaggagctccggactcaaccctgatataaagcagctcagcaaacacgaaggggaaagacctaatgttcggttcgcgatatgctcaaaatctgtgacgtaatcactcacagtgccggtctgctggagcttacacaatgctccttgcggatcttcgtaaaatgaacgcgcgaatcatgattcgaatgcctgcaacatccacagacacg

SEQ ID NO: 111811 - DNA, 150 bp, Glycine max
  Clone ID: PAT_MRT3847_71975C.1
ggagaagatgctttcgttcttctccgggaaaagatagttcttgcaacgatagctcacattggatacacaattatacgtacttacatgattacatcgttctgcatcacatgctgaagaaaaatgatggcttgatgagcacaggcgctacaa

SEQ ID NO: 111812 - DNA, 359 bp, Glycine max
  Clone ID: PAT_MRT3847_71976C.1
acggcgagaagacgacagaaggggatggggttcttcagcatcacaaataacggtttaactagaagacattctgagaaattgcatacttaataaatataaatgaatttgatgcttggttttagagatctagtctaccaagtatgaaacaattatcatgcatttggaccggtccatgacaattgtctgacttgtgctcaagatttggaatttagaccatatttatttgacctgaagcacttccaaaactctatccttctttaattgctctcaatcacaagacatgtttccagctaccatccccactggaaactggcagccaacttagaatcactggagtttagatcacttgaggtctcatt

SEQ ID NO: 111813 - DNA, 1161 bp, Glycine max
  Clone ID: PAT_MRT3847_71977C.1
ccgtacggctgcgagaagacgacagaaggggatctttagttggacgcgcaagcctacgacaaatttaaaaccctagtcgccgttgccatccaaccatcttctgtttaccgtcgtcgtcgtcccgccgttcctctgccgtcgtcgcacgaacacccagcagagagcttcgaagccacgcaggcgggaacgaccagccatcccagcgtcgtcgttgcagtcggaaggttgcaccacaccaggccgtcgcgttgtaaggttccaagctttttagacagctgacaagagacaacaagatatggcagagaagagcaaagagctgctccagtttgagcataaaggcacacccctttcttccttagaatccactcttcttgtttgtgataataaaaaagaatcagacacacaaactaggagactcccccctcatggcacaccactcactgccccacatcccccaagccaacttttagggaaggttaaagacttcctaggagtgatgtcagaagcaaataagaggcttgaacttgatgcaaaggacaatcctgagaattatgatattgaagagctaactggaaatgaatcggaagttattgaaatggatttgatgcttggtgtagctgatcttcatacaccagaggcagtggctgctgctgaatctgcaatttccacttgtcagcctgtgattccattggctgctgatggtagtgaaacagattcagaggaaagtagtactgatgatgactgtggggatgatgatattgaaagcagtgatgattatcacgacgatggaaacaacagtgaaaagccttcatctcttgttcaaaaatctatttccagtaaggataatattcaggaaaaacaaaagggaaatgttcattccaaaaaacgtccaagaatagttgagctatcttgagcataacaagattttgaggattagatctttatgctataacaatttactgagattattgcgaccagtctagttggaattttctgtatgatttatgctgcgttaaattataaccaatgtatctacgacctctatgtcaggggcagcggctggtgaagtaacaagacttgctacttggctttattgtagcgttctcttatgtcctctattgggatttttaaattattgcgtaggtgcattaagtttctctt

SEQ ID NO: 111814 - DNA, 540 bp, Glycine max
  Clone ID: PAT_MRT3847_71978C.1
ggacagcggcatcctgtcgccaaacctttaccgacgcgggacgctacacagatctcggtgcccgtgctgcagctagacgcagtagatgaaaggcgaatacctctttatgccttacttggaactgtaccacatcgcaccgacctgcgctcgcctgacctacacctcactgaccctagcgccaccttatcacccacgacctaggttctgcgccggctacgtcggtctggccctagataccatccctgacgcttaaccaaagcaaaccaacttcatgaggcccgcgctttctacggcttgcaaatcgccatccaaaatatccactccgatatgtacaggctcctcttataaacctacatgaacgactccacagaaaaaaatcgactgtttcgcgccataaacaccatcccatgcctcaccaataaagcccagtgtgccctccgctgaatcgatgcctcataatccttcgcggagcgcctcggggcattagcttgcgtggagggaatattcttcttcggaagcttttgcgcgatgttttggctc

SEQ ID NO: 111815 - DNA, 299 bp, Glycine max
  Clone ID: PAT_MRT3847_71979C.1
ctctttgctcaactcaagttgttcactaccgactcctaatgccaagcttcttaacacctttacaacattcacattacaaaaacactcaaaacgatggcgttttaccccaaccctaaccttaacacccgctggaccaccgagcccctcaaccatatggttcttgccatgcaccctttctgccccaaattctaaacccttaccctaattcccaattcaacccttattatacttgtcctaaccctttttttttccgtcgagctttttcttcgtattcttttcaagcttcccgatttttttta

SEQ ID NO: 111816 - DNA, 481 bp, Glycine max
  Clone ID: PAT_MRT3847_7197C.1
tttttgggaatccccacatcaagggtcatttatatgtattgaacaaattatctttttctatctgggactacaatccgggtacatcaagtactggctccgctctatttttctttactaactagctcttatcatcatcccaaattacatgtacttgtggcggaaaaacatatattaaacattacaattacttattaacccaaatcggggtatgaatatgtgggaattaagtcagactagtaaccctgctgttcagcagcaaataaataacttcctacgatattggatgatgcccgcccagagcgagccgttcgccaactcattaccacggaacaagacacctttgtgagaagggtggttgccactaattctttcacacttcgctcctgggcgtttcccttgagattctttctctcctggagatgtacttcggctgctcagtccattgggatctactttcttggggtttccacctgtgtgaagc

SEQ ID NO: 111817 - DNA, 376 bp, Glycine max
  Clone ID: PAT_MRT3847_71980C.1
tgagcatcgtcagctatctgatcgaactgtcaaggtcctgtcacacaaccgcattgggggcgcctccagcggaatatttacggcaacaataacaatagtattatgcagagtaaacgccatattccggttaagtggggtataatgagtgtgcgtaacagttctgttccgtgtacatgagggactgggcacggttcagtaccgtgcaaaccccaacgttacgatgcgtagcatgaggtccaagactattagccccggaatataatttagcgtaatgggtctcgcgacaatgaacgatgcttgccgatcacggtggcatttcagcccacgatgaggaactgcagcaatggattaacacaggccgcttgagcatgccaag

SEQ ID NO: 111818 - DNA, 195 bp, Glycine max
  Clone ID: PAT_MRT3847_71981C.1
tcggctcgagtaataggtgagcacacgagatctggttgccggtagcatcaagcaaagtaagagtttagagtttgaactctgtttatccagtgcacaaagcgtagatcactgtgttagtaatggaatagagtaaaatcaaaaccgagggatgacggagttgacgccgccggaagatcatttttgctgtcagtccca

SEQ ID NO: 111819 - DNA, 775 bp, Glycine max
  unsure (1)..(775): unsure at all n locations
  Clone ID: PAT_MRT3847_71982C.1
acgacccacgcgtccgggcgggcaagagagtttgtttcttctctcttcaatggaaggcggcgaacaggttctcccttcggccaccaccgtcgccgccgccggctatcccaacgtctctcctcctccgctcgctgatcctgtcggtgcttccgatctcgctgctgctgcctcggacgacgttgttgcggaacctgaaattcacgcgctgatttcagacgaagagcacgatcacgatcacgatcacgagcatgagcatgagcatgaccatgacctcgagcacgatcacgagcatgagcatgaccaccacgaggaccgcgatgatcacgccgccgtggcagctgtctccttggaagatctcaaactcaagatcattaagcaggtggagtattatttcagcgatgaaaatctgcccactgacaagtatctgttgggttttgtcaagaggaacaaggaagggtttggtaagggatatgtctcttgagtatcttggaccaatttgattttgacttgtggaattttcacaatttggtctccgatttatttattgcctcactgatttgcatgtgttgcgtattccatttaaaatagtttgttgccaagttgactatgttagtatgaagtgttgaataatctgggttatgtataatatattttgtagcagatcctaagggaagttaaatattagatcttgatgcttctaaagtgccctgactttngaatttgcctatatacatgaagttatgaaagacaactaaggtggatattcgacagcatg

SEQ ID NO: 111820 - DNA, 492 bp, Glycine max
  Clone ID: PAT_MRT3847_71983C.1
tgctccacctgaggttatattcattgcagacccggaagggttaatgatgggtgtgggaagttcaattgggccgcaatatgttggcaatggaaccagtgaaatgcgattggttggtgctcttagggaggtgttggctggtggtcatcttggatttgaggaagtgcaaggtgtgttaaaggatgtccttcccatcaaagagggtgatgaaaagcctcagggagtaagtgaggctttgctttctgcatttttaataggtcaacgcatgaaccgtgaaactgaccgcgaattaaaagcatactgccttgcatttgatgatgaaattggcccccctcctgttgctgatgtcagatcattgactcattatggtgaaccttatgatggtaacacacgcttcttcaggagtacgctattcgttgctgctgttagatcttgctatggagagtcttgcttgcttcatggtgtagattggatggcaccctaagggggttgtac

SEQ ID NO: 111821 - DNA, 2146 bp, Glycine max
  Clone ID: PAT_MRT3847_71984C.1
gcccggtattcccgggtcgacccagcgtgggagaccgaaagaccggaacataaggcgggcaagagagtcgacatccacaataaaaggctctcaagagagtgtgtttcttatcagaacaaaagacgggcacgagcttttgttccctctctccgaaaggtcggaacataaggcggggaagagttagtttcttctctcttcgatggaaggcggggaagaggttctcccttcggccactgccacctccgccgccaccggcaatcccaccgcttcgcctcctccgctcgctgatcttgtcggtgctcccgatctcgctgctgcctcggacgacgtcgttacccaacctgaaattcacgcgctgatttcagacgaagagcacgatcacgagcatgaacatgacgatgacctcgagcacgagcacgatcagcatgagcatgaccaccaccacgaggaccgcgatgatcacgccgctgtggccgctgtctccttggaagatctcaaactcaagatcattaagcaggcggagtattatttcagcgatgaaaacctgcctactgataagtatctgttgggtttcgtcaagaggaacaaggaagggtttgttcctgtatcagtaattgcttcttttagaaaaataaagaagctcacgcgagaccatgcatttattgttgctgcactgaaggagtcttcactgcttgttgttagtggtgatgggagaagggtcaagcggctcaatccacttcgtttcaatgaatctagagatcataagttatatgactaatttcggaaaagaatttacaagatggatgatcctagaaaagtcacctagacaatattcaacgtaggttgacatataaggatgaaaagtaatcatgacttacacataaaatgaaatatgtcaaaagatcaactcagtataagagaaacagataggacgaatcacctcgttttttgaccagttctgtctaaaaaagctgctgagaaggctttgactaggttaaatagtgtacaagactgaacaaatggaatgtgggtaaaacttctaaagggaatggggaagtatggacacaaaaaaataagcttagaaaggacatcattctgagaagaatagctcaaggcctgaacaaacaggagatgaggagaatcatggctctaatgagcatcatgaagatacacatgaggaagaagatggggatcatttgtcaaaggataagggtgggcagaggtatagaaatcaaggaagatcaagaaaacataaatatcgtgctggaaatggaatgggccatggaagtacaccatcaactcatgctgctgaagcatcaaagtcaccccctggacccagaatgccagatggaacacgtggcttcgcagttggacgaggtcggtctcctgtccctgcttcgaattagcaagattggacgcaacaagagggattgtatttagcagtattatgtggtccgatgctttagtgatgtactagtttttacttgggtccctatgcgtgttcgcttgagtcaacatgggtttgttggactggtaaattatgtattcaatctttggaagtgagtgttggtggtgaagtacatgcccattttaagattattaggctgggaaacatagaactgttttagttgtggtaatcctcaccttacgaggaatctgtgtaacaaaatcatatcgagaaatttgttaaaggggatgaaagaaagctgtgtttgataccaattgaaaatttctaggttgactagctcatctcgctgcctaacaccacgcagagttatcatcatattgcatcgatataagggatatgtatcttgagtatgttggaccaatttgattatgacttgtggaattttcacagtttgggctgcgatttatttattgcctcactgatttgcatgtgttgcgtattccatttaaaataggttgttgccaagatgactatgttagtctgaagtgctgaataatctgggttatgtataatatattttggagcatatcctaagggaagataaatattagatcttgatgcttataaagtgccctgacttttgaatttgcttatatacatgaagttatgaaggacaactaagttgaatatatcacagcatgacaatatgttgaactgtcattttagtgactgagtatg

SEQ ID NO: 111822 - DNA, 1274 bp, Glycine max
  Clone ID: PAT_MRT3847_71985C.1
ttttacggctgcgagaagacgacagaaggggggagaccgaaagaccggaacataaggcgggcaagagagtttgtttcttctctcttcaatggaaggcggcgaacaggttctcccttcggccaccaccgtcgccgccgccggctatcccaacgtctctcctcctccgctcgctgatcctgtcggtgcttccgatctcgctgctgctgcctcggacgacgttgttgcggaacctgaaattcacgcgctgatttcagacgaagagcacgatcacgatcacgatcacgagcatgagcatgagcatgaccatgacctcgagcacgatcacgagcatgagcatgaccaccacgaggaccgcgatgatcacgccgccgtggcagctgtctccttggaagatctcaaactcaagatcattaagcaggtggagtattatttcagcgatgaaaatctgcccactgacaagtatctgttgggttttgtcaagaggaacaaggaagggtttgttcctgtatcagtaattgcttcttttagaaaaataaagaagctcacgcgagaccatgcatttattgttgctgcattgaaggagtcttcactgcttgttgttagtggtgacgggaaaagggtcaagcggctcaacccacttcgtttcaatgaatctagagatcataagttatatactgttttggtagagaatttgccagaggatcattcaaggaagaacattcaacaaatattccatgaagctggaaatataaagaggataaccattcatgatccacattctacttcagagtctacaagacacatcaagcaagaaatgttaattagtaataagttacatgctcttgtggaatatgagactattgaggctgctgagaaagctgtggctatgttaaataatgaacaagactggagaaatggcatgcgggttaaacttctcaagggaatggggacgtatgggcacaaaaaacaagcttggaaaggatctcattctgagaagaatagctcaaggcatgtatctgaacaaacaggagatgaggagaatcatggctctaatgagcatcgtgaagatgcacatgaggaagaagatggggatcatctgtcgaaggacaaaggtgggcagaggtatagaaatcaaggaagatcaagaaaacataaatatcgtgctggaaatggaatgggccatggaagtacaccatcaactcatgctgccgaagcatcgaagccaccccctggaccaagaatgccagatggaacacgtggcttcgcaataggac

SEQ ID NO: 111823 - DNA, 829 bp, Glycine max
  unsure (1)..(829): unsure at all n locations
  Clone ID: PAT_MRT3847_71986C.1
gcatgcctgcagaaggtgnttcaaccttatggcttgggttacaagggtcaacattgcaattggtgtagcaagaggattaacactcttacattccctggatcaaaatgttatctttcgtgatttaaaggcttccaacatcctacttgattcggtatgtgacattaaaagtttggtttgtcattttgtaacaactagttcatgtgtgaatttccattctgaaagagtagcctaatgtatatgcaggacttcaatgcaaagctttcagatttcggcttggcaagagacggtcccactggagataatactcacgtttcaactagagttttaggaactcaagggtatgctgcaccagagtatgttgctacaggtatagttcctttgtcttgatcaaagtgttgagatctaaatttagccccaactagttgttttttagttaaaattgtttccaatatatctttctattgttttgacttatgtttttcttctagatactaattcataaaaaaaattccataattcacttggatgtcatttatttattctccttttacttctagttgttctgttccaggaagaaaaaataatactagtaataaactaggttgttccatgcttcttgttaacattatcacctaggtatgctggtagcttaaaactgccacagaaatcattttcagaattgctggttatgcagtttaactgaaatatataggaactggaagagcatatttgctatacaattccaaaatattcatgaaccaactatgctgaaagcttaaactgttcggtttcacacatgaatattgttacatatctaacatggccctta

SEQ ID NO: 111824 - DNA, 505 bp, Glycine max
  Clone ID: PAT_MRT3847_71987C.1
cgctcctgccacaagtgcgagactttgttcgtgccgccctcagcaaccatctgtgactcgtgccgccacatcagatgcacaaagtgcccgcgagagcctgccaagttgaccaaatggcctgctggctaccccggggatgcagaagcaggcagcgacgaagagatggagcaccaactcgagaagttccggcgcacctggcgcaaaccacggaccagggtgcgatgggaatgcgaaaagtgtcaaaatctttttgtctctgggtcgccgcaatgtcctggttgtggccacgagcgatgcgacaaatgtaccagatctcctatcaaaaaagccaagaaagaagaacagtttgacccccaagttgttgctgctgtggaggccaaactgagagctcttggggtggacgacgattctcttccgccttctgagattgagaataagtgaaattactctccctattcctattcgacaataacatggctggactatgtctagtatttttcccccc

SEQ ID NO: 111825 - DNA, 290 bp, Glycine max
  unsure (1)..(290): unsure at all n locations
  Clone ID: PAT_MRT3847_71988C.1
annaaanggaggcggangaaagcgaggaaggcggcacgagnngaggnacgggggggnagannnaggnaangaganagnggananngnaaannagcnnaaaancagagngaaaggggaaagnnnnggagagaagagggacngnngnnanganagaancaanggnaagganganaanagnaagggcagnaanngagacnagaagaagaagaaggaggnnaagggagaagaanaaagggaagaanggaaananggggaaaanaaaaggaggngaaganngaaangaaagngcg

SEQ ID NO: 111826 - DNA, 1342 bp, Glycine max
  Clone ID: PAT_MRT3847_71989C.1
atacccacgcgtccgtacggctgcgagaagacgacagaagggggccaacctttttttttattattttttttctataaaacctaacctcagcctcaattatcacgttcttcttctttaccatagagccctttcttctcttcccccattttttcctctttcttcctcgcctagctagctccagaaaattaggatctgcttcagatctagtgtttccctgtcccaaatcacgagtccattgagtttgattttgtggatgaaaagcatagatagggcttttgcaaaactctccaatgtttcttgaaattatatgaccatgcgtcgaattcgtatgctgcactccttctccgtcgtgttcctctactggttctacgttttctcatgaactccctcttaaatccgtgattaattagatctatctccttagttaatccttgtcttttccaataattaattagatctgcgtctcctttttggattagtttcttttttggttctgttatcaaatcaaataaaaaatctccttctcggaaatggcatcaccgatccaacaacaacaacgctcgactactacaagttctggatctgaaggaggagatccgcatatcatcgatgagaggaagcggaagaggatgctgtcgaaccgcgagtcggcgcggcgatcgcggatgaggaagcagaaacagctggaggatctgaccgatgaagttagcagattgcaaagcgcgaacaagaagcttgcggagaacatagaggccaaggaagaagcgtgcgtcgagaccgaagcggcgaacagcattctgagagcacagacaatggaactggccgatcgattgcgcttcttgaactccatccttgagatcgctgaagaggtcgaagggttatccgttgagattcccgagattccagatcctctcctcaagccctggcagattcctcatccgatacaaccgattatggccaccgcaaacatgtttctgcgttgatcattcctgaggattttactttaattagggttattcagtgcggtagtaactttctctgttatgtgtattatattactattagtgttatctgtctgcatcaaaagtatcgtgtggtcatcaatgcattgggttcctgagagagatgaatgtgaggtacagggtgttgatggctggtagtggcagtgtgtgtccctttgcgcgacttgtaatcattttttatggtggctgttttattttaattaaaagtaatctcatcttctatgtttgttgttttatttttataattaaatctaatcatcgttatcctaaagcaatcatcttcattggtggtgttctaatacaagcggcggaccttctat

SEQ ID NO: 111827 - DNA, 471 bp, Glycine max
  Clone ID: PAT_MRT3847_7198C.1
atatcaaatggttttcatatcttcattacatgttaatcagggggggaacaaggatgcatgggacactagccaaataaaagtaccactatctaaagctctaaactaaacttttggagactagttgctgtgtattaatgctttaaagtacaccgggattcatggttatgcaataatgacttacaaagcttttacttttcaccatgcatagctgtggttgtggtgcaataaccatatgcgtcctttttcagatgcataatgtgttaaccagccttcatcttgttctatccaaattgtatgaccacaattgcattttttcctttccaagctggaagtaataacacaaaccatttcaatggttatagaattcaaattaaactaatatgctcaattatttacacaattacactttctgatacttcacttcactccctaacgccgaacccaacttgctgacccataataaacccaaac

SEQ ID NO: 111828 - DNA, 109 bp, Glycine max
  Clone ID: PAT_MRT3847_71990C.1
cgaattgattcacttcgacgccggcagttagagtcgaattccccaatggcgggttcttcgatcatggagaacactattccatcgcacgttcgaggatctgatcaaaggc

SEQ ID NO: 111829 - DNA, 471 bp, Glycine max
  Clone ID: PAT_MRT3847_71991C.1
atcgattccaacaaagtcttctaaaaatattagtgttgttgggaaccaaggtgtccacaacacaactattcacaaagccacactcacaatcaaagccaagaagtactctcaacataatgagttctgacgcgttgaaagttgctgccgaagggaataacatagacggtctctaccaagagattcagcaggatccacgtattttggagtccatagattcaatcccatttgttgaaactcctttgcatgttgctgcaactcttggtcattttgagtttgctactgagatcatgacactgaaaccttcatttgctcagaaactaaatccagaaggcttcactcccatccaccttgctttacaatgcaaccatgacgaaatggtccttcgccttgtagaaatgaacaaagatctcgtccgagtcaaagggagggaaggccttactcccctacatttggccagttaagaaattaaac

SEQ ID NO: 111830 - DNA, 271 bp, Glycine max
  unsure (1)..(271): unsure at all n locations
  Clone ID: PAT_MRT3847_71992C.1
anngaatngctgctactganccttggttttttagttgttgtgttgttcncntcaactccacacngtnaccncacttctcntccctttgaccattccaaccttccngcncctttgcctncgtttcccgtgatganatggctggaggtgtnattcancagatnttgagncggnaaactacnanccccggntnnacacaancaccntagatcgtcacccatcgtagcaaannaagatgatgctggctcttactggcngtnagtccttaagagca

SEQ ID NO: 111831 - DNA, 1719 bp, Glycine max
  Clone ID: PAT_MRT3847_71993C.1
atggataatgtctgatgtatgcgttggatccaagtttaagagtgatgctgctgaatctcagtttgaattgtcacgctgtagtttgctgccgagtttctcctttacagaaagcacaggtcacgagtatggtcaagaaaggtgcacaaaaaataacacttagtattggtgatggagccaatgatgttagcatgattcatgtctctcatgttggggttggcataagtgggatggagggaatgcaagctgtgatggccagcgattttgccattgcacagttccgttaccttgcagatttgcttcttgttcatggccgatggtcatatttgcgaatatgcaaggttgtgatatacttcttttacaagaatctcaattcggctcgagcttcactcttacccagttttggtttacatttcaaactgggttttctggtcagagattctatgatgattggtttcaatcattatataatgttatcttcacagcgcttcctgtaatcattgttggattatttgacaaggatgtcagttcatctctatccaagaaatatcctgaactatacatggaaggaataagaaatgttttcttcaaatggaaagttgtggccatatgggcattcttttctgtataccagtctctaatatttttctattttgtgagttcaacaaatttaagtgctaaaaactcagcaggcaagatatttggactctgggatgtcagtacaatggccttcacttgtgttgtaataactgtcaacttgcgactgcttatgatatgtaattcgatcactagatggcattatattagtgttggtggaagtatattagcctggtttctttttattttcatatattcagggattagcactccttatgatcgtcaggagaatatttattttgtcatatatgtcttgatgagtacattctacttctatgtcatgctatttcttgttcctattgctgcacttttctgtgactttgtttaccaaggggttcaaagatggttcttcccctatgattatcagattattcaagaaatgcatagagatgaggtagatagcactggtagagcacagctgctggagatagggaaccagcttgcactggtagagcacagctgctggagttaggtaacctccttacaccagctgaggcaaggagtcatgctatatctcaactcccacgcgaaatatcaaagcacactgggtttgcttttgattcacctgggtatgaatccttttttgcctcacagctcggtgtatatgctccacccaaggcatgggatgtagcaagaagagctagcatgagatcacggtcaaagattgggcagcaaaaataactggagtaggatcattgtacattgcatagtttcggttttccaccttgagagccagcctaggaattctctaaaattaggatgtgccatattaaatatttagtcattttcatttaggatatatttttcttttttctttccttttttctttttgggtgacagggggattagttcaggattcgtcagatgtacattccaggatatttcagcaattagtatagtcaattttgtgaagttcagtacttttcttgtgccttaattcgtggagttcagtacttttctttgtattggatttacctaattagtttttggatatctgcaatgtcggattgttttgttgaaattcatgcacaaagtgttatttatgataacctttctttctgtgct

SEQ ID NO: 111832 - DNA, 351 bp, Glycine max
  Clone ID: PAT_MRT3847_71994C.1
ctcgagactcttcaaaaggagaagaaaaggaaacaaaactctcaaaaaacgattatagcagtggcagaacaaaagcgcaaccaaacaactgaagctggaacgcgccatgaggccctgtgcgccgcttcccgaccgcaccgcggatcctttcttttgcccgcacacgtcctgcttgggggggggcgagccttctttttttgtgttgaaaagccccagggctccctggccaatcacggggggagctacttcgcccaccctgaacctccgcgccgcttggggaggatcccccaccacatgggtcgcccggaggcgcaccaggcgctgggccccccccccgaccgcggggagtcc

SEQ ID NO: 111833 - DNA, 346 bp, Glycine max
  unsure (1)..(346): unsure at all n locations
  Clone ID: PAT_MRT3847_71995C.1
ttttaataataatctaaacctgcatntcacttttcactttgtacattgttcaccaaaacaaatagtagggggagattatttttcaaaatgcaaaatgggcatggtaaaaaaaatcttgaggatggtcatgagggtctcatgagagaagtggaccccatttttctgcagccaccttgggagggtctaattgctggggaaatcctataatctgcacattctacaaatgtgaggcccgcttgcctttgtgtgatcggacattgataacgaaagatcgcttccaatacggcctccattgttgctgctgctaggaacctgcatgatcagaattaaactcaactaataaatg

SEQ ID NO: 111834 - DNA, 446 bp, Glycine max
  Clone ID: PAT_MRT3847_71996C.1
acgaacttacaacgatttggaacgcgatatttacgtcatgatgcacagagcaatgtacaatatataacaccagctactttatcgccaagaaacccacagctgaaagtaacaaccatcgctaaagaaaatgtcgcataacgcatgcccccatcctacccaagatgggaaccacggaacgaccgaaatatggcagaatatacaagaccattatatggtgactgaatcaaggggcagacacttaattacgtccacagactagcttacgcttgcgaaactgatattacaggagtaacctcaccattcactcaaaatatctatgcaacacctagtccaaagagctgatttcggaactcggcaggcctcttacggagcactccagtcaagtcgtgcatcacggagtaggttgacacacaatctttccataaagagaggccaactccacccca

SEQ ID NO: 111835 - DNA, 498 bp, Glycine max
  Clone ID: PAT_MRT3847_71997C.1
ttcggccgcccgcaggtttggggagagggtttttaggaacctgccctatgcaagataaagattgcatggggcccatgcttgttctcaaacaacccctatagggccaagcagaacacttattcccatatcatattgttgcccccatccctttttacgagagagttaatctgggttattgaaactatcggaaggcaataaatgaaaacccgctgtgccacgcggcgaataaaattatatgcgctccagttcgttgaaaaccccaaattaacttcctctttcaaagggatgggcgcgaaaaaatcgtatcgcgaataaatgttacctaggccctatagggttaggttaataaaaacctggccccgatgaaatgcttacatgcacatggccatgtcctttcaacccattttacaaacctgacgcggccgaattctagggatacctacgcccccgtactaaatcccggaccgtctattgcggcccctcaatttaatcctatgg

SEQ ID NO: 111836 - DNA, 482 bp, Glycine max
  Clone ID: PAT_MRT3847_71998C.1
ccacgctttctttttaaaattttccatgatgaccttatcgcgtaatagcagcgcataatactctacgtatgaggtagcacgcttgtgcttcccacatacatgacgaaggcttgaacggacaccctctagacagtataatggcttagccattaaaaaggggctactgacacataccatgagccgactgatgctagatttaatatgcggaccatggtctaatttcagggctaaaacggtaaaggtgaaatatgctatcctcctaaaaggattggatgttggaatccaaggaattggcaggagagacaaactctctcgagtgatggttccttggtatcgtataaggagcattatttaaaattgaagctgcacgttgtgagggcaaaccaagggaacctactaacaaggacagtttccacgaaggagcgaggggctgtaatttaggcatgagttagccaatgccttatcctcaagaaagctctttt

SEQ ID NO: 111837 - DNA, 262 bp, Glycine max
  Clone ID: PAT_MRT3847_71999C.1
cttgcccctcacaacattcagcaaaaaaaaatcttgccactcacaactcccacatttactcagcaaaataatctcttatgtcacccgttgttaacacaacaatgaatcacttcaaacccaatgacacaagcattgacattgaacccttaaagagacgagtgtcttttgcggaataccacccaaatgaacaagaaccaccaccccataagtaccaccccattatgattaatgttccattgctccaaaagccatcatatccgag

SEQ ID NO: 111838 - DNA, 158 bp, Glycine max
  Clone ID: PAT_MRT3847_7199C.1
gaaaaatcgttaattttaatttcacatgactcgtcgagaatttaaacaaactacaaatatatgcaaataaaccttactgcgcattattaaccttgatctctctaactttaatcaacttggtcgatctactggcgtgtgctagcaaatgcttacttttt

SEQ ID NO: 111839 - DNA, 644 bp, Glycine max
  unsure (1)..(644): unsure at all n locations
  Clone ID: PAT_MRT3847_719C.1
ngacccacgcgtccgcacagacaacaccaacactccatccacacagtacagacaaacacagatgacaaatcctgctcctgcgagcttctggactcaagcaaacgcgcttcttcgcaagaaccttaccttccagaaacggaacgtgaaaacgaacgttcagctggtactgttcccggtgttcctctgcttgctgcttttcgcgctccaacgcttcatcgacacccaaatcggtgggtccgccttcaaatgcggctgcgtctgcgccaacaacacaacccgagaacactctcactgccctgactcacaaaaagtgtgtggggtccagtactccgattcccttcaagctgccttctgcgccattcccaaccccatcgaatggccaccgctcttgcagcttccggcgccgtcgagccgcgccgtgcgaaccccttctcttcccctttcggatttgcccgatgcctcgtgccggagaaccgactcgtgtcctcttactctgctcttcaccgcacagaatcactcctttgcgaaaaacgtggctgctaatatgttntgggagtgccttgagtgtaagtgactttggtagtgatttcttggctagtttggccatgaatgtactgggatctgaatcacctccctggggaaac

SEQ ID NO: 111840 - DNA, 159 bp, Glycine max
  Clone ID: PAT_MRT3847_71C.1
cccacgcgtccgatcactagtgaacaacctagttcccttagtcattttcgattaataaggcaatggcacttaccaatcagaccactcgtaattccatcgatcgattggatttaaagtaatgattgtgctccgaagcagatagaaaatcattcccgttta

SEQ ID NO: 111841 - DNA, 439 bp, Glycine max
  Clone ID: PAT_MRT3847_72000C.1
cttccccggctctagcaggccggcttctctgtccaatgcccacccggagctgggaggaggagtctgcgtaatgtgcgtgtgaagagactgggggagctggccggggctcacggtgtttgacccgtcggtcgtgcgtgagaggaaagggaaggaggaggtcccgaatagcggtcgccgaaatgttccggtgtggaggcctggcggcgggtgctttgaagcagaagctggtgcccttggtgcggaccgtgtgcgtccgaagcccgaggcagaggaaccggctcccaggcaacttgttccagcgatggcatgttcctctagaactccagatgacaagacaaatggctagctctggtgcatcagggggcaaaatcgataattctgtgttagtccttattgtgggcttatcaacagtaggagctggtgcctatgcctacaagac

SEQ ID NO: 111842 - DNA, 450 bp, Glycine max
  unsure (1)..(450): unsure at all n locations
  Clone ID: PAT_MRT3847_72001C.1
gcttcagaagacaccaaggaatgatctgttgtgaattgttttatgctgtcagagcttataatttgaatgatctgttgtgaattgttttgtcttgtgatgtcaatattctgataagttgctctgcagtgtattcatttattgaagcattaacattattccttaattcaagtaatctttgagatatatcagagtagagttttactctgtaatctgattatgtttaatcactttacttttacagttgctggttaggttctgtcagttgtatatagctgtacaagagaatgcctaaagactaagagttagttacagagtacagctgtcacacaacagacagcctaactgacaacattaaaagtacagtggttacacatattacatagtaaaactctattctaataaaggtagataattgatggttaatgatatttntaaatgaataatagtttg

SEQ ID NO: 111843 - DNA, 371 bp, Glycine max
  Clone ID: PAT_MRT3847_72002C.1
tcgcccacgcgttttctcactcgttcgctttgcttttgcctgaaaattgagctggatctgtcaaaatcacaaagtgcgatccgaaccgaataagccaagctctttttctgttacaaagaagctcggtgcgagattgactgcctgttgcactaaaccaaacccgctggtcaggagccaccacacttgacatgacaggggggctatgaccctgtcgatactgaatgggcaaagactggtgctgtgcagcacgtgccacggactaagtgccgccatctagggcccactggtttggatgaagtgagaaccgcatctgagccgccttttttgaatatgagcgaaaggatgggaaccatgtttggccgccaaccact

SEQ ID NO: 111844 - DNA, 286 bp, Glycine max
  Clone ID: PAT_MRT3847_72003C.1
tagcttgtaacctaagtgggggcattaaagtgatgggacatggctcgggctatgctcggtcgggctgttagatgcataattctggcctgcccgctccaagttaagagctgagtcatgggatttgggcgaaggctcaggtctcttggctcctaaactggagggcacagcgtgaggctggtttaacagagcagcgagcacctccggctcctgacagtggagggataacaggctgcagcactttcagcccaccatgaccgggtgtaccaaagctcttgaccatcatttt

SEQ ID NO: 111845 - DNA, 171 bp, Glycine max
  Clone ID: PAT_MRT3847_72004C.1
tgcagattgatttgggagatattctacttgcaaataattcaacaggtcctcttacatttctattcatcatgttgcttaaatctgcaacgttttttcattgtttcttatagctgtgactgaatatgatgtatgaagagattaaaattgctaggcattgcattataggcctac

SEQ ID NO: 111846 - DNA, 536 bp, Glycine max
  Clone ID: PAT_MRT3847_72005C.1
ggaaaaacccaaaaaaaggaagagctagtttttttttataataatggttaatccatacaagcggggaagggaattcatgatcatccaattagtatgggaaggggtttaaatttaacgggggggaattgtaataaaatcccaataaaaaaaataacttgaagtttaaaaaaatgggaagagtaataatcctcaaacatttttttcagggcaaggccctaattaaagggggattttcccctttacagggccacttatgcaaaacataaccatttttcttaaaaaggcctgggataggaacttcaaggcgttttttcaaagggtgggcccccctgttttcaacccccagggttggatgaacaagtaaaatgcttttgggcctcaaaataaagcgggccaagaatcattattttccggaaagttttatcctgccataggcagacaactttttgggcactcactcaaatataaccgggatgcttggcccatgagggcttacataaatccaaaaaggtaaattttcccagtacaaaacctac

SEQ ID NO: 111847 - DNA, 1156 bp, Glycine max
  Clone ID: PAT_MRT3847_72006C.1
cgtacggaaactcggctcgagatctctttatttttctttctctctctttcatgcttgtccatggcttcttcgttctctgtgtgatcgttttgggtttttttttagaaccctaattcggccgcgacgatctctcgttttacacagattctagtaatctagacagtgtagatcgtttgtagaagctttttcacttggtcacattcttgctccttctccttcttctgttttcgttggtcggcggaaaccagcgcggttccttccgagaacttcttcgaggtttttttggccaattttgggcgtcgtcgttctgctctgatcgaaacgtttctagaattttcaaatatcctttctctttcgtcggaaatttgcgaagggggatgagattcgaaggatgaacgatgccggtactgcgtagcggagcgcgcaagggccgggcagcacccaaacagcaacaacagaaacagcagcagagtcctgtggtggaaggggaggctattgcgacgaggacgcgtcggcggcgtgcggcggcggctgcagcagcggcagtgccggagagtaacaacaacaacaacaataccaataaccagcagcaacaggtggagcaggtggcagtggtaaatgagaacgtagctgttgcggcgagggaagaagataatcgagtcgcggaggaggaaggtgttgttaggggtggtggagcgcacagggaagaggttgcggagaaaaagatgggtgggtgtgacagtgggggacggagcaatggtaaggccaatgcagctggtgaagatgacgccaatacccctcaggttcctcagaagattcaagtaggtaattctccttcctataaagtagaaaaaaaacttggcaagggtggatttggtcaagtatacgtcgggcgacgtactggtggaaatttgaatgaaagaactggacctggagctgtagaggttgcattaaaactcgagcatagaactagtaaaggatgtacctatggaccaccctatgagtggcaagtgtacaacactctcggtggcagtcacggtgtacctcaagtacactacaagggcaggcagggtgactattatgtcatggttatggatatgctgggacctagcctctgggacgtttggaataatagcaatcatcacatgaccaccga

SEQ ID NO: 111848 - DNA, 187 bp, Glycine max
  unsure (1)..(187): unsure at all n locations
  Clone ID: PAT_MRT3847_72007C.1
gggggctgcaccttctcagaangttgccacaatttccgcttccaactcatgatgttattgtaangggtgttattcccttggagtttganataaacnatgtancntaccatgaangncaaaanggtcnactgcnngannanctttantggnagatgccaattccnaacntnctcgggttcnanaccat

SEQ ID NO: 111849 - DNA, 551 bp, Glycine max
  Clone ID: PAT_MRT3847_72008C.1
gtagggtttttgtgatctgcagctacgatgggtaagggaacggggagtttcggtaagaggaggaacaagacccacaccctctgtgtgaggtgtggccgccgcagcttccacctccagaagagtcgttgctctgcgtgcgcttaccccgctgcgcgcaccaggaaatataactggagcgtgaaggccattaggagaaagaccaccggaactggaaggatgaggtacttgcgtaacgtgcctcgcagattcaagagcggcttcagagagggtaccgaagctgcacccaggaagagaggagctgctgcctctgcctaagctttgaatgaatgacagcaatttttgctgggtcagtgaattataggagttaatgtttctgtgttggtgccaaactctttggaacacattttctttctgtcgttttaatttcatttaatatgtagtggctttgtatttcgaaatgaggattgtaaggaattttggtttttcaatgggagtttttgacatccaaaaaaaaaaaaaaaaaaacaaaaaaaaaaaaaaaaaaaaaaata

SEQ ID NO: 111850 - DNA, 942 bp, Glycine max
  Clone ID: PAT_MRT3847_72009C.1
tccgggatagatagctccttcaattagggtttttgtgatctgcaagctacgatgggtaagggaacggggagtttcggtaagagaaggaacaagacccacaccctctgtgtgaggtgtggccgccgcagtttccacctccagaagagtcgttgcgccgcgtgcgctttccccgctgcgcgcaccaggaaatataactggagcgtgaaggccattaggagaaagaccaccggaactggaaggatgaggtacttgcgtaacgtgccccgtagatttaagagtggcttcagagacggtaccgaagctgcacccaggaagagaggagctgctgcctctacctaagctttgaataatagcaatttttgctgggtcagtgaattatataggatttaatgtttctatgttgatgccgagctctttggaacacgtttctttctgtcgttttaatttcatttaatatgtagtggctttgtatttcgacgtgaggattgcaaggaatttttgttttttcaacgagggtttttgacatccatattctggcttatcattctgggcatgtcatttggtactgtggttcaattagataaatttagggtaagacttatttggtattagttttttttattatggtttattgggtgttagttattgtcaaaaattgttgagttttcatgccttggctttagattatgttctttctaaacgtaggtattaattaactgtaatactgaacctcggtagaaacataacgctgctaatctcaagtaatagggtgtgtaatcatatttgcgtatcagggtctcactttattgtatttattggggatttatgagtgttctgatcatgtatgaaaattcttgtacttggtgtagttagtacttgcaaagttcttcagtgacttgtgtttgaaattcttcaggatgagcgttagtttaccattgtgtt

SEQ ID NO: 111851 - DNA, 238 bp, Glycine max
  Clone ID: PAT_MRT3847_7200C.1
gaccaacaaactaacaatttaacaactatccttgccccatttgaacgtccaaaatgccatcctccaaacactggaagacattccggaacacatgaaacttatggctactgcgggaaacccatttgggtgcagggtccagattgcacttaagttcaaaggagttgaacatcaaattctggaatcacaattgggcaacaatagtgacatgcatcacaacaatcatcctgttcacaacaac

SEQ ID NO: 111852 - DNA, 250 bp, Glycine max
  Clone ID: PAT_MRT3847_72010C.1
gtgccttcacattcgttcaactcacaggagcagcgaaccctagacgtgaacggatgaacctcgccgccgcacgccgtctacagaggcggaggcaagctgtcgtgtcttaacttgcgctgagcgtcgccgtcgccgacacaagccctctaaatagctgaatctaaggggtggaagtgttcatagattaaggagcgttggaagatgcagatgcggcccagcgctgtcaggcgaggcctgactaggcgctttt

SEQ ID NO: 111853 - DNA, 551 bp, Glycine max
  Clone ID: PAT_MRT3847_72011C.1
acggctgcgagaagatgacagaaggggactatttttattattattataatattattctctcacgtaacggcgtcttcagctcaagtgcctaacctcttcggcggcgccacctcagctccgccgccaactccggcggcgcaccatgacaacatcatgtcctcatccgacgccgccgatgcgctctcgcgcctcctccagcgcctcccgcccacgctctccctccccacgcgcctcccctcgccttcctccgcagccgccacgtgtcctccctgcctctcccttaacgacgtcctctcctgcgtttccaaactcggttacgcgcaactcaccgatcactcagtcccctccgaactcgccaactcggccgagtcagaagcgctggcactattcgacctttcgcaagaccagaagcagtccttgttccccaaaaactggcctcttggctacggaaacgatgaagatgaagacgaagacggggtcgccgactcggcgcgcgaactggagatgttggctttaaagtccgtcgatgggtcacccaaggacttggggtg

SEQ ID NO: 111854 - DNA, 208 bp, Glycine max
  Clone ID: PAT_MRT3847_72012C.1
tttttgtgtttattttttttttttttttaaaatgaaagcacaccataatttgtgggagaaatattaattaatcccccagaagggcaaaggggcaattacccttgattctttagtgcccgattatacccaacattcccgatcaaaccctgtggatttttccacaatacccagatcttactttttccttggggcccccaactaggcccca

SEQ ID NO: 111855 - DNA, 395 bp, Glycine max
  Clone ID: PAT_MRT3847_72013C.1
gtcagttttttgcaagttctaacaacccttcaagatttgttaactcccaaacatttctttggtttatgtttctatcccatctcacgaggagtgagatagaccttggtcttgttacaagcatgtattggaaacgctcacacttggggaaaatgatagtgcttgcatgcaagattacacaaattacaataccgaaaaggttcctcgtttgagtagctggcaccggtaatgagcaaagtaactagcttgaagaaaagggcgctttccattaacattgaagaggctgctggggactttgttaaccacctcttgaaggataaggctacgacttcaggccttattcctttgattctgattgctatggcaattgagagatgggacttgtctgcctcacttgg

SEQ ID NO: 111856 - DNA, 1502 bp, Glycine max
  Clone ID: PAT_MRT3847_72014C.1
acgcccacgcgtgtccgagaatgttgggtaactattgggttacaataaaagacatggaaaccaggcactgaaatatgcatatctattagttttgggccaaatttagaacaccaaggaaaaaaatgatcttgctgactcaacaagtgcacccacttctcaccttttcctctacctataagtctaattctccattgcacccccatgttcaactcaaggttggggttggtgtggttaccccattttcccaagtgcccattatgcccttttgcaaaggaaggccttacaggaggaggaggaaggggagcaggtgttcctcttctgctgcagcacaggctccgttgccacctgacccagataaggaaaatagggaagacagtgatggtgtagttgttgcacagggtgagagtcctgatctgcagactcttttcagaaggttctggaaggtggcagctccttactggacttcagatgacaagggaccggcaaggttgcagcttgctggtgtttttgctctcactttggccaccactggaatcagtgttggcttcaatttcttggggagagacttcttcaattcacttgctaacaaggatcaagagcaattcacgaagcaactactttactacttgggtgcctttgctggaggaatcccgatttttgtgttgagagattatgcaagagaaactctttctttgagatggagatcttggatgacaagatattacattgatcgctatctgaagaatcaaactttctataaaattcagtcacaatcaatcattgataatccagaccaacgaattggtgatgatctaagttctttcactgggacatcccttgctttctccctgactctctttaatgctgctgtagacttaatctcatttagtaatatcttggatgggatctatcctccactctttgttgttcttatcgtatactcgattggtgggacagctatcagtgttttccttggaagaggactggtgaatttaaatttcttgcaagagaaaaaggaagcagactttcgttatggacttgtgcgggttcgggaaaatgctgaatcaattgctttctacagtggtgaagaaagtgaaatgcaacttcttctgcagcgctttaaaagtgcttttgaaaatctgactcaattgttgattgcttccagaaatctggatttcttcttcagtggctaccgctatctaattcaagttcttcctgctgctgttgttgcccccctgtatttctcaggaaaaatcgagtttggtgtaatcaatcagtcactttctgcttttaatcatatccttggcgacttttccctcattgtgtaccagtttcaagctataagtgctttttctgctgttattaatcggttaggtactgcattatttttcccttatctttcctgtaacattttgatatatgcaaatctcatgatagatatgagcatgagtgaatgaactacaaatttttactctgcggaaaaaggaggatccattttgata

SEQ ID NO: 111857 - DNA, 307 bp, Glycine max
  unsure (1)..(307): unsure at all n locations
  Clone ID: PAT_MRT3847_72015C.1
aatatttttaatatanncctctacaaaccacactggggggaggaccaccagcgcgggctgtacattagaaactcncctctcgaacccagcaagaagaaccccaggcaccggccgagctggacacaagcgggggagcaaaaaaaaacggcacaacaggagggcctcattgaagacatccaccacgcacaccagaggcactgcgacaaacacccgcccgaaggatagaccacaggtgacggccagtgggccgcagcagggccacaagctgagggagttgaggcgcacaaggggcaaggacaacccgggg

SEQ ID NO: 111858 - DNA, 284 bp, Glycine max
  Clone ID: PAT_MRT3847_72016C.1
gagaaagcaataaacccagggggtttttcaaccaatacgacggcgacgacactgtgtccagcccgcagggccgtcttcaccaaattgattatgcattcgaagcgatgagacagggcagtgcagcagttgcaattcgtagcaaagattatgctgatgtggtcgcacttatgcgtgcacaaaacgagctttcttcatttcagcataaagtttgtcaattggacgatcatctccgctttgctatgttctggcctaatttcagatggaccgcattttggcacgcttta

SEQ ID NO: 111859 - DNA, 959 bp, Glycine max
  Clone ID: PAT_MRT3847_72017C.1
tcgagtttttttttttttttttttaaatcttgcaataccatttgtaccatttgttattatgttttgattatttaactgattaatattctccttaattaaaagatgtcggtgtggctgtgtcaccccggacgatggaccttcagtgctgcaacatcatatcataaaaggggagattttagatccattatggaggggtcagatgggtttatcagtagatgaacagaagaaaaagcaagaacagcggcttctgctgaatgacttaagaaacttagaagacaacactcaagattttgttagctgctgccaatcaagtggagttggctgctgccaatctaacggaggagactcttttttccgtcagaatcatgtgttattggaaaggagaatggaccccgatgttattgagtcagaggcaaagctctcagcagatagtaagagcagtgagactgtgatttctcggatcaatagtggtaaaggagcttcacgcaagtttctatccatgacaacttggctggatggctgggagcaagaagatacttatgcagctcttgctgttgtctgtgctgctgtgtcagttgccattgcctataactgctacaaacaactgagataagaggaataaactttggcagtgttattaagtggtttagttaacttaagctttactatatcgggatattagcttcctatctgatattagtgcagttcttctttagaccagtccttactgaacatgcagggaaacgagtagggatgtgtgtgctttagtgcttgcagagtattattggctgaggcacttataatttgccagttagcgtattctgtacatataagaaaccttagccacagaatattcaaattaaacattttaacactttgtttaggtaggatttgatgtaaccttttacaattaaatgtaaagcttttgtgttcctcgaaaaaaaaaaaaaaaaaaaaaa

SEQ ID NO: 111860 - DNA, 391 bp, Glycine max
  unsure (1)..(391): unsure at all n locations
  Clone ID: PAT_MRT3847_72018C.1
aacgcgtattattatttccaatctttttctcgcggttaaatcgcgtaacatagggtaacatatatatcgtgtctatagggagagaccagttcacctcttggggctccaaggggggggtttatccaaccatcatttttcaaacctagggggaacctcgggatgggcaggggaattaaccagggagggtaggggttaatttcattcaaactttttcaattcaattaactatcggcatcctcacttgggagactctatcttgatcccaccaacggtgggaggcgcccttcccaaacgggggcaccaaaggcaccaccacatggggatcatcttcaggacccaaatccttcaacaactcncggtatcccaaggcgcaagggaggcttcatcttcc

SEQ ID NO: 111861 - DNA, 516 bp, Glycine max
  Clone ID: PAT_MRT3847_72019C.1
tttctttttttttttttttttttttttttttttttttttgattgccaaatcaataccctacactttgatttattcttcttctatagcttttcaagtatttaacctaatgtagttacaaatccagccttccctatgaattaatacactcaatctctcaacttttacagctttttactcctcagttggtcctgataaattaatgcactccaactcacccacctaagtcacttccttcatcatgaaaagaaacaactggttcatagctttgtatatgcaagaacaacatccccttttccccctcctccaaaacaaaactgattttgtcaattcacgaatacaatattacaatgtatacattgcatcattgacatcagagatgcatcattcaacctttgctaccacctcgccaggcacactggtttttacaactggttcccttacaaatctttccaatttgtcacgtgacgattgcaatacatagattgaaagggtgaaagacaacatgagccctgaacc

SEQ ID NO: 111862 - DNA, 202 bp, Glycine max
  Clone ID: PAT_MRT3847_7201C.1
tccacgcgtccgtacagttgctagaagaccacagaaaggggagcgtgagcacgaggccacaccaaatcaaagttattttagtacaaagaaaaggagacacattattattgtgttgcactgagtgcagtgaccatgactatttcttcttgctgtgagagaatgggatcgaagaagggaccttgtactgctgatgaagatcaga

SEQ ID NO: 111863 - DNA, 278 bp, Glycine max
  Clone ID: PAT_MRT3847_72020C.1
tggtgatggagctggggtgacatgcttcgcttgcagttataggaatgaatgtttgttttattattgtgcagactgtcaacttcaattcttaacaaccctaatcatatcaacatgacattctcttcataatttctgaaccctacaggctttactttactgctgattctcctgtctatgcttctaccaatgccataagcttgctactgcaccactcttcatcctgtttaagccatcaaacaacctgttctgaacccgctattgagcttttctagctcctt

SEQ ID NO: 111864 - DNA, 652 bp, Glycine max
  Clone ID: PAT_MRT3847_72021C.1
ccgggggggattgaatgattatttcaaaacttggagttcctcacaaaattaagcattttctatggagactcttgagagcattttctacaaagatggcagaagtagtaacttcggtgtgaggttggacaagggtgacgtttcagatttccacgaaacccaccacagatctaaaatgttggagtgtatattgttgtccaacttgatttgggcatgaatctaatttttttttaatgattcctgttagagggaagcgaaagaagagggaagaaggaagggaaaatctagaaacaaggatgacaatttctcgtggttttagccgccataaattgttggatatctttgccaagcattttcttatggtttttaaccttttgaaaatgagtttcattaaattattaataaaaataacacctgactatctcatgagctatcccgtacgtcatcttttaacgacacctaacattaacaaaaatgaatgttagagactttaaccggtcaaaattttgtttagaaaataaaagctaaaatttataaaaatttaaaaattaaaaacttagttaaccattggtttatttaaaaagaaatatgaatatgttttaatggtggatattgggcgggattgatttggtattggataggggggtttttttag

SEQ ID NO: 111865 - DNA, 282 bp, Glycine max
  Clone ID: PAT_MRT3847_72022C.1
aacggcataaaaaaggcagaacaacgcggacctctgaaaggaacaaccataaccacgcgggcctgcagcagcgacaccatcgaaaatggcaacgcaaagataaaagacagggaaggcattcacacggatcagactgggaagaccctggccggacagcacctaagagatggaaagaccatggccgattacaacattcacaaagaatcaaacaggcatgtactgatcacgcttcgcagacagatcacagacccaatcctgaagggtacggctcgcagatacaac

SEQ ID NO: 111866 - DNA, 296 bp, Glycine max
  Clone ID: PAT_MRT3847_72023C.1
aattcggctcgagaccaaacatatcctaattgacgaagtactacctgtatctttttattgtaccaactaactgcctaaatgtcacatatataattgacttggagagactcgaatccatctctcgatgaggtatatatatttgctatcaataaactattctccataacacacgaattgacatcccttatacattgaatgctccatctaccgctccttgagaaacaacctcatgaataccatctacggagctcgtgcatatgagagggttgaaatcttaagtaccacctactcacatc

SEQ ID NO: 111867 - DNA, 281 bp, Glycine max
  Clone ID: PAT_MRT3847_72024C.1
atcacaatgagaataaacttactgtagtaaagatgagaatgcttctgtggaagagtaaacatactatacaaatggattctagccttaccactaaaggggaagggagactgggaaacactgtaggcaaaagcattaagaatgctttagaggtggttgtcgctttgtctactgacaagattcacaaatcacaatggaacactatagtatcatttgattcatgtaaacaatccacctccacctagtggggaaaagtttggctgttgtctaccattacccgtatg

SEQ ID NO: 111868 - DNA, 108 bp, Glycine max
  Clone ID: PAT_MRT3847_72025C.1
ccggaatacataaaatattatttcccttcccacccacgcaaacgaaattgcagcttctgatttttacaaagagaacaacactcaagggtatcaacatttgaaatctga

SEQ ID NO: 111869 - DNA, 362 bp, Glycine max
  Clone ID: PAT_MRT3847_72026C.1
gctataatcatccttgagtgtaaccaagaccaagcactgcaactgtataggttctttgggagttttaagagtgatcacaccctttgacactgatttgagcactgtcgctacatttgatgtcaagagccagggcatcacgcatgctcaattagtgtcatctaccgaatcgcagattgctttgacagaaacctcacatcttgttactaagtgaacgcgtggagaagctgcattctacgttgaaccacttatggtagctctagtgacagaactggcctggttagtgtatcccatcgaccctggagtactttgggaaagattcaaggattggccccaagcaccaagttggcactttgattatcttt

SEQ ID NO: 111870 - DNA, 817 bp, Glycine max
  Clone ID: PAT_MRT3847_72027C.1
aaatcacaatagaggcgtagcttctgtagttttccaatttgattataaattttgtctcagccaatctgttgttgaccacagtttcataacccactttcttcattcttggtgaattttatgtcttattgcaatttccccttcgctttgcaaacaaagatggagttcaattcccaaaaccctaaaaaatctgagataagatggagcccagataatcaaggtggtcctggacaagggaagtcttattcttgttacttttgcaagagagggttctcaaatgcacaggccctgggaggccacatgaatatccatagaaaagatagggcggcaaagctcaagcaatcttctgaggaaaacttgctttcattggatatctcaatcaaggccacaagtgatcatcctaatgacccttctgatttcgaagagaaaattttgtttcggttgggtgctggtgaagagaagcatcctagaaaccataaatatccattcaattttttttcctcgcaaagatgatcatcatgatcatgcaccacaaattccccatcttccttcttttgttttggggcagatggttgaggagaagaaagctgaattagaccttgagcttaggttagggcttcatcctcgggagtcagcaacattgaacactagatcgttcttttgatgagtagcgtttccaagtggaagatcagcgaaaagtggcttttatttcatacctagctcctcttccaccttatctacaatatatataaaggtaatatttgattatgtttaagaatttaattttgatgcagtatgaatattgttttcactcacagta

SEQ ID NO: 111871 - DNA, 859 bp, Glycine max
  unsure (1)..(859): unsure at all n locations
  Clone ID: PAT_MRT3847_72028C.1
tttattanttttttttttttgggaaaattggaaataagagtagacaatagaatatataaaaggtagagataacatgctgtcctgatacgcaacttcaactggtaaaagagaaggagaaaattattgagaataactaggggtgggttatatagcattattcaatctaatggtcaaacatatgacaagtcaaaaaatttataccctatatgaaatcatattggcgtccatttcagctccacctgcacatacaaggtcattgctacctttgatgtttaagtcaaattgaattgaacccccttcaaccttgggcttttggtctctccctacttcctgataatggaaagctgagtcgtggctcttactataaaaatcactcacttctattatgttttctttgctatcttttttcatattttccatgaaatttgacaaaacagagttgaattcagtcaactgagctctcgatgcttcaagactgcctggcccatccagggaaaggcttctctgtgctttctctaacatggcttgcaaatacttcccttgtgcctctattctcatctgcaatttcttctgtacctattgccaatttgcacaagtgaattgagactttctacaattgtactacaaaactttgttaggaaaccacaacttacagaaaagaaggactaggtaaaactatgaaagttaaaaaggataaatacctctagctgctcttccaatctcttttgaacttcaatctgacacctcattgcttctgctattgggatttctctattttggttatgaaaaatcagttaggaaaatgagaaattttcgcaatcagttgtatttacactacttattttgttttctgtttttt

SEQ ID NO: 111872 - DNA, 387 bp, Glycine max
  Clone ID: PAT_MRT3847_72029C.1
ctctcgatgcacgctcgcgcggtcgccagtgcgacggacacctgcagacggctgctagaagacctcagaggggcatgtttaaccacacttacatcatgagacatatagagggtagcatcgagctagtaatcatatatatattgtgaaggtagctctaagccatggcgaatgaacgagatctgttctggggggtgattgagaaccatggaatagaatcgccaggtccaaacgctggtgcgtagacgaaatcagtgcggaagagaaggcgctaaccggtttgttttcactaggcgaaccacatgtgcgtgaaattgggttaccattctctacaaaaccatgtgatacacttggtcacgagtcctatgcttcttgtggtgatactcgctt

SEQ ID NO: 111873 - DNA, 332 bp, Glycine max
  Clone ID: PAT_MRT3847_7202C.1
cggccggcctccattcattgtttatcaggaacacagaaacattcaaaacgcaacaaagagagagtgagagagaatctcaaaccctaattcgattttctgcttttactatctcgaagcaacgcaagcattatggttcacatttgcattgtgagggaatcggcggaaacataatacacggttggatatgctggcagactaactaggaggaggccaatccggagtcttcgctgctcgcacgttaggacacatacgcataacgcccaaacctatgaggacacatgcactatcccctttgatctctaatccgacgataggtctgccaccaacacctg

SEQ ID NO: 111874 - DNA, 1291 bp, Glycine max
  Clone ID: PAT_MRT3847_72030C.1
acggctgcgagaagacgacagaagggggaaggagagggagtgctgaggttgaagcgggaaacaatggcaattcccatgttgagggctgcaatgatttctcattctcaatctcaaccactcattcattccatatctgctatttatgaaaccgctaagaggaggaagagagtggtgttctcttcttcttcttcagaacttaaccctgtaattcggtcagaggtatcattttgtgttgggacttgcctcattccacatccaaaaaaggttaacacaggtggggaagatgctttctttgtgagcaactataatgggggagttattgctgttgccgatggtgtctctggttgggctgaagaggacgtggatccttcgttgttccctcgtgaattgcttgctaatgcttccaattttgtaggagatgaggaggtgaactatgatcctcagattcttattaggaaagcacatgccgccactttctccacaggctcagctactgtcatcgttgctatgctggagaagaatggaactctgaagattgctaatgttggagattgtggattaagactcatccgtaatggtcatgtagttttttccacttctccacaagagcactactttgactgcccattccaactaagctctgagagggttggccaaacataccttgatgcagcggtatgcaatgtggagttgatacaaggagacacaattgtcatgggatccgacgggcttttcgataatgtttttgatcatgaaattgtgccaaccattgttagatacaaagatgttgcagaggctgcaaaggcattagctaacttggcaagcagtcatgcaatggattcaaattttgattctccctattcgttggaagccaggtctaggggttttgagccacccttatggaagaagattcttggaatgaagcttacaggtggaaagcttgatgatatcactgtaatagttggtcagattgtgagttcatgagatttgctaataatgaaagaagacaaagtcctgattgctgagatcactagagaagggtttgccttaagtatactgcggcaactaaattttggtgatgctctgagaaataaggatctattcattgaagtgagttctcctgctttgcctgttgtgctgcatgcattgagaaaggctgtctgagatactcattcagaaatagttttgtttgagatgctataatctaagaactgtctctgatacattggagaagcatgattgtgaataataggagaaaaaaaaatcaaccagtaacccccaacattatctt

SEQ ID NO: 111875 - DNA, 265 bp, Glycine max
  Clone ID: PAT_MRT3847_72031C.1
gtagtattctaagcttattttatacataatgatacaattttgacacttaccaatagtgtctagctcggttgtttatcggtgtgcatgattttttgtaaaccttgatatctgattttgatttttatgtacataatgatacaatattgacattccttttgcttatgtattggaatattctctactagagtctagagaagtaatgttggcttattttatgcattattgtataatttggagaattgggttttgattatagtagataata

SEQ ID NO: 111876 - DNA, 350 bp, Glycine max
  Clone ID: PAT_MRT3847_72032C.1
gaaggagagggagtgctgaggttgaagcgggaaacaatggcaattcccatgttgagggctgcaatgatttctcattctcaatctcaaccactcattcattccatatctgctatttatgaaaccgctaagaggaggaagagagtggtgttctcttcttcttcttcagaacttaaccctgtaattcggtgagttacacttcattttctgattctttttgtttttttggcctttcttaaacatggtttttggcttgctttctgttgctgaggttgtaagtcagaggtatcattttgtgttgggacttgcctcattccacatccaaaaaaggttaacacaggtggggaagatgc

SEQ ID NO: 111877 - DNA, 1154 bp, Glycine max
  Clone ID: PAT_MRT3847_72033C.1
aggtacagcggctccacattctcagtctcagtctcagtctcagtctctacacacacctcagaagaacagaacagaaccaccacataacagtgcttttcaaaggcggtttgagcaatggcgttcttaaataaaattggaaatctgctcaagaattctgctgtcaagcacatcaatcaggatttttcggcgtctaccccttcacttttccaagcaattagatccatgtcatctgcaaagcttttcgtcggaggtatttcttacagcactgatgatatgagtttgcgagagtcttttgctcgctatggagaagtaattgatgtcaaggttattatggatcgtgaaactggcaggtcaagaggttttggctttgtaacttttgcaacaagtgaggatgcatcttctgccattcagggcatggatggccaggatcttcatggtcggaggatacgggtgaattatgctacagaaaggtcacgtccagggtttggtggtgatggtggatatggcagtggtggcagtggtggctacaataggggtggaaactatggaagtggaggtggatatagcagtggtagtggctataataggggtggaaactatggaagtggcggttataatgttactagcagctatagtggtggcaatgctgaaactagttacactggtggtggtaatgctagtaattaccaattcaatgaaaactctggtggagtttttggctcagctagcggtgaattcagcagcaaccaaaatgacacagcaggtgcagacaatgatgaattcattgagccacttgaagacaatgtgagggagaacaatgatggacctaccgactacgctcagaaccgctgatgagaattttcaccttgcctagagcaagtaacacctggagtttatgataaacaaatgtgtttccaatttctttttccaccctcttgattttcatatgttcattggcttgaacttgatagtttgtctgctcaacgactgatgtaaaataagatttttctaggagttgaactccatttataatgattttagttttcaaccattcaacacctggaatgataaaatagtcaaatacatgttttaataaaaaaaaaaaaaaaaaaaaataaaggcgccccccattagggggcttcaaaacccggaat

SEQ ID NO: 111878 - DNA, 1077 bp, Glycine max
  Clone ID: PAT_MRT3847_72034C.1
ttacggctgcgagaagacgacagaaggggacacctcagaagaacagaacagaaccaccagtgcttttcaaagacggatttgatctctagtctgtctaccaagtggaatgaaccagacaccccccctcagacttgatgctgtggagagtggagttcaaccacaagtccaaaacctttaatggtttcagcaatggcgttcttaaataaaattggaaatctggtcaagaattctgctgtcaagcacatcaatcaagatttttcagtgtctaccccatcacttttccaagcaattagatccatgtcatctgcaaagctttttgtcggaggtatttcttacagcactgatgatatgagtttgcgagagtcttttgctcgctatggagaagtaatagatgtcaaggtcattatggatcgtgaaactggcaggtcaagaggttttggcttcataacttttgcaacaagtgaggatgcatcttttgccattcagggcatggatggtcaggatcttcatggtcgcaggatacgggtgaattatgctacagaaaggtcacgtccagggtttggtggtgatggtggatataggggcagtggtggcagcgatggctacaataggggtggaaactatggaagtggcaattataatgttacaagcagctatagtgatggcaatgctgaaactagttacactagtggtgctaatgctggtaattaccaattcaatgaaaattctggtggagtttttggctcagctagcggtgaattcagcagcaaccaaaatgacgcaacaggtgcagacaatgatgaattcattgagccacttgaagacaatgtgagggagaacaatgatgaacctactgactacgctcagaaccgctgatgagaattttcaccttgcctagagcaagttacttcttctggagtttatgataaacaaacgtgtttccaatttctttttcaccctaatgattttcacatgttcattggcttgaacttgatagtttgtcagctcaacgactgatgtaaaataagatttttctagttgaactccatttagaatgattttagttttcaaccattc

SEQ ID NO: 111879 - DNA, 658 bp, Glycine max
  Clone ID: PAT_MRT3847_72035C.1
tcgcgatctacaaccaaactaggcatttttgaataccaatataatataagctttgttaaagagttcaattaagtttcttctttgccctttctaaagctagctagacattattccatctctcttagcaactcgtcaattcaactcaatggaagcaacgaaagaacttgtatctccaattccatgcgatgatggacaccttgttaccgttcttagtattgatgggggtggcattcggggaatcattccaggaattatacttggcttcctcgaatcagaacttcagaagctagatggagaccatgtaagattggcagattactttgatgtgattgcgggaacaagtactggaggattagtgactgcaatgctcactgctccaaatgaaaataaccgacccttgtatgcagccaaggatattaagaatttctaccttgagcataccccaaaaatcttcccacaaaataagtgctggaatttattctcatctatggtgaagttcacaagaactctgtttggaccacaatacaacggcaagtacttacacaggcttattagggaaaaattaggagaaacaccatttactttaccatgcataattaaacttcattccaaatcaaccatgctatatatattttatctatcaatatatactaattta

SEQ ID NO: 111880 - DNA, 179 bp, Glycine max
  Clone ID: PAT_MRT3847_72036C.1
aagcatactacaacaggtatggaggtggtgccaactctggtgctgatggctacaacaacggtactggtttgggtgctgcgattataggcaccttcgatcgtgtatacactgagttctctgacattgactctaagaggaacgctaggtataccaatgacattggactgatgctataatct

SEQ ID NO: 111881 - DNA, 285 bp, Glycine max
  Clone ID: PAT_MRT3847_72037C.1
aaaaaaaaaaaaaaaaaaaaaaaaaaaaaaaaaaaaaaagggcgaaaaatataaaaagattggtgattaatataaaggtggatgggacaatataaaattttatataatgttaaaataaaattaaatttaattcacttcattttacaacgtttttaaataaaaaaacacttaaaataatttaacttaaattaattgaataacattttcatttatccaactttaataatattcgaatattatcgaacagatcaactttacaaacattttcgcaaaattaataatgaa

SEQ ID NO: 111882 - DNA, 342 bp, Glycine max
  Clone ID: PAT_MRT3847_72038C.1
caggttttcggcccgcctttttttttttttgctttctttgttctcatgggactcctttctgtgtgtgatgaccctcttgtgtccgttgtcttcgcttcctctgctgtgtcctcttctcctctctggctcacctctatggtcttgcactccgtgtgccttctctgcacgcctcactggtggacctcgtgggctcggcctcaccgactacctttgcacacgcagcgcgctgcctcgttcccaggtgtgcttccgctgagctgacctgtgtcctctctcgtgtgggtcgagtcctttgtgtctgctgcctccacctgcgctgatgtgtcctgggcccttgtcttt

SEQ ID NO: 111883 - DNA, 516 bp, Glycine max
  Clone ID: PAT_MRT3847_72039C.1
ctgaaaacgggccaaatacaatagcttccaccaaatcaattgtcctgaacgtattggttaaaaaaataacccacaggtcaaccctgagcaaggcaaaaacgttaatggggtaaacagaaaactttctttaaataaaggtggctacccaaaaaattcccatgggggccttaaaaaaccaaacatctactttaaaaaaaactaaaaatcctacccgatacaaaaactaaaggggcctaaccaataattaaaaataaccttgctggccccaacgggttatttccccaaaaacggggaacagttccctgatacccagttaaaagacatttgacccccccgcccacagaaaaaaaaaattaaatgccctaaaaaagacaaacctgatcagcaaaaaacacgcccccatttagggaataaccggggggaacaaccccccccttttaggttttccaacgctttctactttaaacttaacttccttgggccttaagaaaacttgcaatcttgccctggaaattt

SEQ ID NO: 111884 - DNA, 432 bp, Glycine max
  Clone ID: PAT_MRT3847_7203C.1
caccaccggaaggggattctttcaacctcaaaaaattccccacccggcttggaaccggtggggtcccaaatttggtttaaagggaaaaaaccttttattatttaaaatggcggttttttcctttaaaattaaaatggaaaaaccggggggaggggaaccctaaggcccttggaaacctggctcccacaattataattttttttttttggccctctggggtaaaccttccgggggaaattcctttaagtggcccaacctccaccgaaccaaaattttttggcaagggtaatggcttatccttttgggaccccctttggaggtcggatttggatgcctggtggtggaaccccaccttggaggagaagggttggaattgaacctttcaccaccaaagccttttggcctggttttttcgggtttgctaccactttt

SEQ ID NO: 111885 - DNA, 470 bp, Glycine max
  Clone ID: PAT_MRT3847_72040C.1
gaaggtttcccgtcatcactgtatgacgtccaccatctttggggggggggggggggggggggcaaaagaagaaagttaacttaataaataggggaaaagccgatactgaatgtgacaaccatagggttgaaagcgcgcatttttatctaggaagggggagatgatagagagctagtttgtcacgatgcgtggccagagcccgggcatgacgtgcatgggctttagacgtgagcgcgtaccgatgaaatggaaaaacatggcaaaagtagaaattataggggcaggaaatgcgccgcgtaacccccccacacccacaccgattaatccttgtaaggtgaaatagtagcaagttgatgttttcgtggcaattagtggtagtagtagcctaggtagaacatcaatttattagctctgcgtaaagttaggtttctcactgtagtagtttggcaaaggtgtaatacgggtagtgg

SEQ ID NO: 111886 - DNA, 212 bp, Glycine max
  Clone ID: PAT_MRT3847_72041C.1
ttttatcccccaagcaaaaacagcacaaccgggagactttttttgaggattcttttttttttttccaccattggcaaattttttgacttatggcactttaagagcatgtgttaatttgcagctctcttatcgtattaatggattgattttattggcgtccaccgttgttatttctgagaatacaggtattataatttggctttgctattaat

SEQ ID NO: 111887 - DNA, 336 bp, Glycine max
  Clone ID: PAT_MRT3847_72042C.1
atcacgaggatctttttctctgattacatattgttttcctgcactccggtccaagtgggctgggaacattttgtggggttgacacgtgcacatccctgtctgctattaagatcctcaccacgatgttgtgtccacacctaattattactgccggaccattaatcttcacgtgatctgggaacgttaatagcagcttagtcctgggccaccggtcttttgatagggacgtggctacatcgcctcagactttactgtttctggaggcccctttaggcttgttcatgaccgaaaggaattcgttcttgagcctggaatgcaacttgttttatggtgggt

SEQ ID NO: 111888 - DNA, 888 bp, Glycine max
  Clone ID: PAT_MRT3847_72043C.1
aattcggctcgagaacacaacttgctttgacggcatgttgtcttcctctctcaatttctaacgttttcttcttctctctccctctttcgaatttcacaaaacatggtggctttggtttctcaagataacgttgttgcattggtttctcgtacaggcagggagttgcaacgctatagaaagggtcgtcgccaagttgtgggatgcataccatacagatataaaattggtgatcaaacttccttggaggcacaagaagaattagaagttttggttattagttctcagaaaggaaaagggatgctatttcctaagggagggtgggaattggacgaatccaaaaaggaggcagctttgcgagaaaccatggaggaagcaggggtacgaggcactgttgagggtaaattgggtaagtggagtttcaagagcaagacccatgatacattttatgaaggctacatgttccctctacttgttcaagagcaattggagttctggccagaacagaatgttcgtcaaagaatatggatgagcgtttctgaagcaagggaagtttgccaacactggtggatgaaggaagctctagagagactagtaaatcggaaacttggtcgtgtgacacaaatagaaatagtaggttctatacattgcataggagatggcaattctgacttgtaaacagggctctacccccttttaattagcttttcttggtccgaatgaactcaggaatagtacgatccaaacaagtgatggaattagaatattattagtgatggtaaattacatagaagttgtcaattgcccccattaagatatagtacttcatatctgtatagagtgaggcttttgaaaatccattgttcaataaaacatttggatttgtttttt

SEQ ID NO: 111889 - DNA, 1407 bp, Glycine max
  unsure (1)..(1407): unsure at all n locations
  Clone ID: PAT_MRT3847_72044C.1
gtaacctcggaattcggctcgaggccatttcgggctgaaaagtttccacaaggacaatgcctttttacttaccacgagagctgtttctgtggctcaagaagttgtgaggtgtatgttgccgcagagcataaggaacgatcctgataaggctcgagggattcgggtcacggtgagttatttgggtggcaatgtgaggcacccggttcgtgttcttgtgccttctgtggcaagggttagtagccctggtggtggtggtagagttcagaagaggaatagaaacttgcatgagttgtgtgcgtgtactatggtgtggaaccaagcttctgcgctcagggagtgggttacgtaccacgcttggcttggagtggagcgttggtttatctatgataacaacagtgatgatgatattgagaatgttgtgcaggatcttgatcttcaagggtttaatgttagtagaaagtcctggccttggattaagactcaggaagcagggttttcccactgtgctttaagggctagagaggagtgtaaatgggtggggttctttgatgttgatgagttcttctacttccccagtgagtttcagcagccgcttgggnaaggggtgttcctgggggagaattatctgagatcgggtggttgccaatttctcatattctaaatccatcgcggagataagaacagcttgtcatagctttggaccttctgggttgaagtcgcccccgaaacaaggggttactctagggtacacttgccggcttcaaagccccgaacggcacaaatccattgtgcggccggatttgcttgacatcagtctgctgaatgtggtgcaccattttcagctgagggtggggtttaggtaccacaacatgcctgaaggtactgctatagtaaaccactacaagtaccaggtatgggagaccttcaaagccaagttcttcagaagggttgctacctatgtggtggactggcaggaggaccagaacaaagggtcgaaggatagagcaccgggattaggaacagaagccattgaacctcctaactggcggcgacagttttgtgaggtttgggatactggcctgaaggacttccttgtgtcttattttgctgaacctgcaaccgggttaatgccctgggaaaagtcttctctataatggatactaatgagggtgctaacatattggtagctggtacccatgtaaagcacgatgatcacacctgttaagcattcattcttttcatttttttttgtgggggggggggctttctgttacagaaattttgttatcttatttctccaatgattttatagatatgaaacagactcatacagatgtaaatttgcagcaatgtgaatggataatttcctattttacctcgttaattgttggtatcgctcctcgagcc

SEQ ID NO: 111890 - DNA, 641 bp, Glycine max
  Clone ID: PAT_MRT3847_72045C.1
cttgctctgacggcatgttggctacctctctcaatttctaacgtgctcttcttctctctccctctgtcgagtttcacaaaacatggcggctttggtttctcaagataacgttggtgcattggtttctcgtacaggcagggagatgcaacgctatataaagggtcgtcgccaagttgagggatgcataccatacagatataaaattggtgatcaaactcgcttggaggcacacgaagaattagaagttctggttattagttctcagaaaggaaaagggatgctatctcctaaggtagccgcacaccaaaacattggtcaatgaaattcaacacccaaagtgtatattattttggtttatttacattaatattcaccccatcattgtgttatcgttctgaccaaacaatagggagggtgggaactggacgaatccaaaaaggaggcagctttgccaagaaccatggatgaagcaggggtacgaggcactgttgagggtaaatcgggtaagtggagtttcaagagccagacccatgatacattttatgaaggctacatgttccctctacttgttcaagagcaattggagttctggcccgaacagaatggtcctcaaagaatatgggtaggtaactaaaaaccat

SEQ ID NO: 111891 - DNA, 255 bp, Glycine max
  Clone ID: PAT_MRT3847_72046C.1
gccacattttccgagttttttctattgccttcctcgtttcagagtatattttcttcgtcatcattcagtaaacggaaaatctacatcaaaatcggtgctctgcgagcaaattgaactcgttggggctttaatttcaactgaaaaacatgatgggtaactctaaacttgaatttttccgcaaccctttctcagttttaatctttattggataatgcaagagtgttgaagttgataacagattatgcgttatagaag

SEQ ID NO: 111892 - DNA, 456 bp, Glycine max
  unsure (1)..(456): unsure at all n locations
  Clone ID: PAT_MRT3847_72047C.1
aaattaggttttccctttcttcttcttcttcttcttattaccctaaccctaaccttagctattcgaattccactcctcttcgcgaaatcatggcgacgactttggctacaccaaaactcactgaggataaagtcaggcagtgtgttgatacaagactaggaggagaatacccacccaaaactgttgctaagtataaggtcagtctggccccggggagcgggtgtattgaggtaaatttacagctctgcctctgctccgaaagagcattctccaataacggtttcactccttctgtcgcaccgctgcagatataaagaaagattctttaccagctctaagagatatcagagagcgatgcatcaatcaacttgagcaaatgcgatctgaccacatgaggaggcttaacccaactccatataanggtagtgttagtgcannaatatacgacttcattca

SEQ ID NO: 111893 - DNA, 1150 bp, Glycine max
  Clone ID: PAT_MRT3847_72048C.1
gttctgggtcaatgctgtcatgttctctgcaaattagggcttcaatccgtgctctggggtgattgattctggttcgtgtgttgataagtaatgtagctggagaagattgtgtgtattctgaataacaagattttatcttcattgttgcgattgggaaatcccattggatttgagtggattctccaataaaggttggaaattttgacctgctggacccctttgggcacaaaatttggtggtgaaattgggaacaaatctgagcagaaaagactctctgtagttactgggtgtgggtggattgaatgtctgtgatgatggatcatgttattggtgggaagtttaaactgggaaggaaaatcgggagtgggtcttttggggagctttatatagctgttaatatacaaactggagaggaggtggctgtcaagctggaacctgtgaagaccaagcatccccagcttctctatgagtcaaaattgtatatgcttcttcaaggaggaacggggattcctcatctcaagtggtttggagtagagggagactacaatgtcatggcaattgatcttcttggaccaagtctggaagatttgttcaattattgtaaccggaagttaacattgaagacagtgttaatgcttgctgatcaattaattaacagagttgaatatatgcattcaagaggtttccttcaccgtgacataaagccggacaattttctaatgggtctaggacgaaaggcaaatcaagtatgttattgttgaagataatttctttcaatttttgtttccccccgtcttcttatattcccttatctattgtgaaatctgtatacctttttgtgaagtttaatgatcaagaatatgtatgaaccggggggggggggttaaaactggtgttcaaagttcaaacatatggcaggatcattttttagctgttatcttcacgccttgctaatgaaagttcttgttgagcacatccaagagccaattatgtatgccttttgtagaaaacatagtcctagtgaaatagttttttttggtgaaaagtcctatggaaatagtttgtgaaggaataaattgtaaactaaagttgttgggagaagctttagaatcacatggtttatggtggtttatgattaaataaaaatgaa

SEQ ID NO: 111894 - DNA, 875 bp, Glycine max
  Clone ID: PAT_MRT3847_72049C.1
ggctcgagggctgggagactgataatgttgaagaaatagctttaaagatttctcaattgccaaaagcatcagaaaaacataaaaggattactgttatcacccaaggtgcagatcctgtttgtgtcgctgaggatggaaaagtaaaatagtatcacaggatacaatttttttttgatttgtggaattactcttgttcctacctggttcagcacagcctcctcaatctcctcctcttgttttttctctttttgtttttttataataaaaagattcagtttttttgtgttgtcgctgatacctatttgcattttgtgttctgggtcaatgctgtcatgttctctgcaaattagggcttcaatccgtgctctggggtgattgattctggttcgtgtgttgataagtaatgtagctggagaagattgtgtgtattctgaataacaagattttatcttcattgttgcggttgttacggattttgtaaatttagcatctttttctttttttgatttggtccttatcctggatttgtttccttattcccctttttgcggctaatcggatgaatagattgggaaatcccattggatttgagtggattctccaataaaggttggaaattttgacctgctggacccctttgggcacaaaatttggtggtgaaattgggaacaaatctgagcagaaaagactctctgtagttactgggtgtgggtggattgaatgtctgtgatgatggatcatgttattggtgggaagtttaaactgggtaggaaaatcgggagtgggtcttttggggagctttatatagctgttaatatacaaactggagaggatgtggctgtcaagctggaacctgtgaagaccaagcatcccca

SEQ ID NO: 111895 - DNA, 467 bp, Glycine max
  Clone ID: PAT_MRT3847_7204C.1
gaacagaatttgcacgcgaaccaagtgagaacttaatccattccatgttcagaaaggcattggcaacaaaagccgtctttatgcccaaaaggcctctaacagaagcgaaaaaacacttccatccgctacagtgacaactgtgcaaacccatacctgtgtgaacaaggactgaatgaatacacactcaaggaaacgactcttcctaatatggctaccccagaactgttgagtagccctaggggagccccatgaacctctcgtttcccctttgaggtggacatcacaacaccccattcgaagcccgcggtggctcctctcttcacgaccgtgatccttgacattcatacaataggaatggtcacactacttgattgtaccatccacatgaactgcgacagagaactatattgggaggaaacatgcctatacgctcccaaccattgcgttcagaatcacctcttggaagt

SEQ ID NO: 111896 - DNA, 893 bp, Glycine max
  Clone ID: PAT_MRT3847_72050C.1
ccctcgcgtccgctctctctccaaagtccatactttttgatttgtggaattactcttgttcctacctgcttcagcacagcctcctcaatctcctcctattgttctttctctttttgtttttttataataaaaagattcagttttgtgtgttgtcgctgatacccatttgcattttgtattctgggtcaatgctgtcatgttctctgcaaattagggtttcaatccgtgctccggagtgattgattctgtttcatgtgttgaaaaggaatgtagctggaaaagattgtgtttgttctgaataataaaaatttcatcttcattgttggggatgctacggattttgtaaatttagcaccttttttttttctttttttgatttggcccttatcctggatttgtttccttaatccccttttgcggctaatcggatgaatatattggtaaatcccattggatttgagtggattctccaataaaggttggaaattttttatctgctggacccctttgggcacaaaattggtggtgaaattgggaacaaatctgaacagaaaaaggctctctatagttactcggtgtgggtggattgaatgtcatctttgatgatggatcatgttattggtgggaagtttaaactgggaaggaaaattgggagtgggtcttttggggagctttatataggtatgtaatgttcatgtttattgccccctttaccttgtcttatagtaattttaatcttcctttttgcagcattttcatagattgttatatgatttataacttatttttatctatattctctttggcagctgttaatatacaaaccggagaggaggtggctgtcaagctggtatgttaagttctctttaatttttaaccctcttttatgtctg

SEQ ID NO: 111897 - DNA, 677 bp, Glycine max
  Clone ID: PAT_MRT3847_72051C.1
ccatcattatcacccttcaacccctaatatgcagcccagttcaggaagctttggattctcagggtttggaaatccattaatggggtcttacatgaatcaacaatcttccaataatgttttcaccccccactaaagacaaggaggagcctggagatgactcgtttcttgactctttgctatgttaaaggaatattaatttgcttttgcatagatttggatatggttggagttcttggaaggggttggtttaggattttacttgactaataagatacagttcattccatttattttaacttaaatgcagttgtttaagtatttttatgtctgtttgtcggttaaagttagagtttcgcctcgctaatttatggacaaaaaatttgcattagaattcaacatgagttattaaggtgaaattctaattttaactaaagaacaacacggaaattactttaaaaaattgcatgcaagtttcatccatttttttattttgtattattattgtataattccacacccacacagattggtatggtatatactgtatatttcataattgttgtatgttacacaggtgtttgtaaaaatagtttttatcattattttagtaatcatgtggcttcagttgggagctagaaactcattttcaggatcctttaaatttctctttgcatacg

SEQ ID NO: 111898 - DNA, 516 bp, Glycine max
  Clone ID: PAT_MRT3847_72052C.1
tggaagcagaaaagtcgcgccaacaagaggcggagtgtatgcgccgcttggccttcttcggtgttgcgctctccaccgtggcaacattgatcactgtgctgtccgtgccgatggtgtacaactatgtgcagcacgtcaactctcaaatggtgtccgagctggacttttgcaagtcgcgctccggcaacatttggcgcgaggtgacccgcactcaggctcttcacagcaacaagcagcgtgtggcccgtcaagcggactacggatacggcggcggtgcctgctgtggctgtggcgtgtcggcgcgtggcccacaaggacctcctggccagcccggtgtgcccggtgacgacggtgctcagggcaacaacggtgcgcccggtattccggcaacgccccgacctcgtccgtcctacccgaccaccgggtgccagatttgtgagcctgccacgaatggtaacccaggcgaacagggacctgctggttcgccaggggagccaggcaagcctggtgcacctg

SEQ ID NO: 111899 - DNA, 560 bp, Glycine max
  Clone ID: PAT_MRT3847_72053C.1
ccagactccacctgctcacctggatacgtgttttgctttcttttcaacaacaacacatgttttgctttttttccaaaacagcaacatgtcttctttttcttaaagcaccaaaacagctggtgccggagcaagccaaaagccatccctctaaattaggttttccctttcttcttcttcttcttcttattaccctaaccctaaccttagctattcgaattccactcctcttcgcgaaatcatggcgacgactttggtgagctccgcgggtgggatgcttgcgatgctggacacgctctctccaacctcaacaacttagttttttattatggtctattgtcgattctaaaatcctagctgatgaaactgatgacaacaattgatgtatattgtttcaggctacaccaaaactcagtgaggataaagtcaggcagtgtgttgatacaagactaggaggagaatacccacccaaagctgttgctaagtataaggtcagtctggccccggggagcgggtgtattgaggtaaatttacagctctgcctctgctccgaaagagcattc

SEQ ID NO: 111900 - DNA, 691 bp, Glycine max
  Clone ID: PAT_MRT3847_72054C.1
gaaatttacagctctgcctctgctccgaaagagcattctccaataacggtttcactccttctgtcgcaccgctgcagatataaagaaagattctttaccagctctaagagatatcagagagcgatgcatcaatcaacttgagcaaatgcgatctgaccacatgaggaggcttaacccaactccatataaggttagtgttagtgcaaaattatacgacttcattcatttcctgtggctcaatgaggcaccagttggggagctacagtaaggcaaataaaatggcggcgtgccttcagaacccaatgggctacaccaaaactcagtgaggataaagtcaggcagtgtgctgatacccatttgcattttgtattctgggtcaatgctgtcatgttctctgcaaattagggcttcaatccgtgctccagagtgattgattctgtttcatgtgttgaaaaggaatgtagctggaaaagattgtgtgtgttctgaataataaaaatttcatcttcattgttggggatgctacggattttgtaaatttagcacctttttttttctttttttgatttggcccttatcctggatttgtttccttaatccccttttgcggctaatcggatgaatatattggtaaatcccattggatttaaaaaaaacaaaaaaagacctaacttagaaaaaaagggcggcc

SEQ ID NO: 111901 - DNA, 332 bp, Glycine max
  Clone ID: PAT_MRT3847_72055C.1
ttttttttttttttttttttttttttttttttttttttttctttgtttttttttttttttttttttttttttttttttttttttttttgttttttttaaaaaaccccaaaaaccttggttttttaacccaactgggcaatgaggggggacacaagaccaaggtttcggcgcaaaaaaacctccccccatgaaaaaaaaaaaaaaccgccatctaaagggtgtttatgacatttttcctcccccagcgagaaaagggttatgaaagatatttcttctgggtttggccacctggaaaaaacatttttaaaccacccggggggaacacccgggac

SEQ ID NO: 111902 - DNA, 220 bp, Glycine max
  Clone ID: PAT_MRT3847_72056C.1
gctgtgttaattttccataaaatttgtctgagtgaatgttgaaatgaacgtgcagtctccttgttttcactgccctccagactattcactcttttttcattttctgagcattcacattgaagcctgacagaaatcgagactgtggtcttttattatatccttataaatcttttcttatgtgtatgatttgtttagtaatttgtccaatctaatacacaga

SEQ ID NO: 111903 - DNA, 255 bp, Glycine max
  Clone ID: PAT_MRT3847_72057C.1
ggatgagaagaccatctttcaccttaacccttttggccgttttgtcattggtgcccctcatggggattcttttctgactggaggaaatatcatcattgatacctattgtggttggtgtgctcatggtggaggtgccttttcagggaaggaccctaccaaggttgatagaattggtgcctatatcgtgaggcatgctgcatagagtgttttggcaaatggccttgccataatgtgcattgtccaaattttctattc

SEQ ID NO: 111904 - DNA, 389 bp, Glycine max
  Clone ID: PAT_MRT3847_72058C.1
ttcacgcgtacgccctcgcatacggagatggtgaagagatgacattgattacacgaaccagtgttgaagaggcttacaacaagctgatatttgaacttaagagaagtgctcctacattgattggcattgaatgatccaatgatgagaaacttcctcgttgcaaaatttttgacaaacctaagacgcgctgattaactattattcccatggagtttaatgttgcggttcctaagaagtttttaaattttgtgaggatcattatgaagaaaagggacaagcttagctgtaaagttggaatctacccatactacatggaatggactgttttgaccaatacattactgagtaagggcaactatattctgcgatgcgactatgctagtttagat

SEQ ID NO: 111905 - DNA, 248 bp, Glycine max
  Clone ID: PAT_MRT3847_72059C.1
aagcttgcctcgttaagacatccattcaactatcttaccaactcttcagatgatcgtagaaattgatgattggaacgttcttatgacgtctgttgatgctgtcttttggggggtggattacgttgataagtagatttatgcagctgcaattgttcatttgtttgggggtctacggggacgacttgcaggttacagtgtatgcattgtcatgcgcttctttgcgaactgatggaacacttctgtctagc

SEQ ID NO: 111906 - DNA, 228 bp, Glycine max
  Clone ID: PAT_MRT3847_7205C.1
tgctgctgcaggagctctggtagcatggccatgccctgaggcaggctaccaaaagatcctctctccgagcagaaagctggctctggggagcgttcttcggaagaaaatgacacgttctaagcttgctgtcgaagtacacaacatccgagcctttataaccattcctgatgagtgcgctgggaccaacagaggtctacattagcggcgcacaatgtagatcagactcta

SEQ ID NO: 111907 - DNA, 275 bp, Glycine max
  Clone ID: PAT_MRT3847_72060C.1
aatctaatttctttccacgagtttaacatatattgtcaattaatttacatttattgagacaaatttactatcaaattaattataaatgaataaaaaacactttttatatgcaaatacaatttatcatgtgtggttattgagataggatttgtgaacctaacagctaagaatttaaatttatggcaaggccattgctcggcttatttgagtgtatactaatgaatattaattaattatccgagttgcttaatacataaatacattacaggtcaagt

SEQ ID NO: 111908 - DNA, 550 bp, Glycine max
  Clone ID: PAT_MRT3847_72061C.1
gtgattggatatattgaaaatcagtcaaccaaagtttgtatcgtagggatatggggaatgggaggattgggtaaaactaccacagccaaagccatctacaatcgaatccatcgtagattcacgggtagatgtttcattgaagatattcgagaagtttgtgaaacagatcgaagagggcatgttcatttgcaagaacaacttctttcaaatgtccttaaaacaaaggtgaacataaaaagcgttgggataggaagagctatgatggagagcaaactttctggaagaaaggcactcattgtacttgatgatgttaatgagtttggccagttaaaagtcctatgcggaaatcgtaaatggtttggtcaaggaagtatagtaatcattacaactagagatgtacgcctacttcacaaacttaaagttgattttgtttataaaatggaggaaatggacgaaaataagtcccttgagctttttagttggcatgcttttggagaagcaaaaccaacagaagagttcgatgaacttgcaagaaatgtagttgcttatt

SEQ ID NO: 111909 - DNA, 552 bp, Glycine max
  Clone ID: PAT_MRT3847_72062C.1
ggctcgagctctacccattttttttttccttcccccccctcattttttccttcttcaaccagattctagaagaaagatgtgcccatttctgcttacttaaatctcaaacacaaaaccgaatctttgacaacaatttcaagattttcccaccaacccacaccagcaaagcacctggtcgcttcaaagattttatttttagttcttggggtggggtttccaccgtttttccctttcaccattggcatctgcagcatcactcaattgcacaaacagaatggtcaacactttatggtctttttgtgtggtttgaactgtaaagtctctctctttctctcactcacttttttctctctctatgttgcattcttttgtgtggcttagtctctggctgtgtctttcagtgttagattcttggtgggtttagtttaattttgactgaacgaatgagatcttgatgagggttggaaccagtttccttgcactgctctcattgttgccattgcttcttctccgcaattttcaagtgctcagctttcacctgacactggcatc

SEQ ID NO: 111910 - DNA, 488 bp, Glycine max
  Clone ID: PAT_MRT3847_72063C.1
tacggctggagaagacgacagaaggggaacaacataaagtatacacaatatttagtaaaatatttatttatgttttgacaacatttttcgaatgttgcaaaaaatatattttgttgtagtgattactagttgaagtgtattcttcctttttctcaatcaaaatctttttctcaaacagatagatagatagataaataaatttattataattcttgggatgatctactttaacgtatacatctaattaattcttaaagtcaatcaattttgtttaattacaataacctgacgatttggatctattgaatgatttaatatgagccttttgttttttcttattcccgttcgttaacttgaaaatggaataacaagaataatgcaaaccacaaggagtgggatatgaaaacgttacagcgtacgtacctattaattatccgtgggatgcatggttgcctgggctcaatgtttgtcctcagtctcacatgctt

SEQ ID NO: 111911 - DNA, 405 bp, Glycine max
  unsure (1)..(405): unsure at all n locations
  Clone ID: PAT_MRT3847_72064C.1
aggctactgnatcttctatttcttncgaatccagtatagtaagacattatattttacaacatgagtcatattgatgttcatttgcatagaaaagttcccttagaaaagcattgggcgcatcgtgtaaacaaattcgctctaccgaacctgagctatagcgccgtgtcagagatatcttaacatatggcttctttcttggcggagtgtttaccccctaatgccacaggatatcccaaaagatccctttactatgttacataaacatacccattacggagcggggtttgcttattaaaaggatctcatctataatccatcggagtgatggggctctcttttgtggaaataaattgcctacttaactcactgagtagagtatctgctttcataccgccggagggattg

SEQ ID NO: 111912 - DNA, 257 bp, Glycine max
  unsure (1)..(257): unsure at all n locations
  Clone ID: PAT_MRT3847_72065C.1
caaagggccagggccgaggcagcacagcaaacaaaaacaacagccaccaaaaangaaacaaccgaggaaagcaagacccaggaaacaaccccagacaccgaggcgaccgcaacagaacaaccagcagcggaggaaccagcaacagaacaaccagccgccgaggcaccngccccagaaccaaccaccggagcaccaaagggagaaaccaccgaggcaccaacagaaacagcagaaaaaacaaccacagaaggaggccc

SEQ ID NO: 111913 - DNA, 381 bp, Glycine max
  Clone ID: PAT_MRT3847_72066C.1
gtggggtggttttttttgtactttttttttttttttttttttttttttttttttttttttttaaaaccccctcccccttttccctaaaaaccggaacaagggccccccttttggccaaagttgggaaaaaaaacaagccctttttttttccccccaaaaaaaactttccccccaggtttttttaaaagcccccccaaaaaattgaaaaaccccgggaaaaaaacccccccaaagtttttcccccccgggccaggggggtttgtgccacccggggcaaaacccatgggcctccccttgccgggaccttcccatttttgaaaaacacccaaatcccctcaaaaaacccccttggcccccacattttggaacatattttccttt

SEQ ID NO: 111914 - DNA, 635 bp, Glycine max
  Clone ID: PAT_MRT3847_72067C.1
gttatcaaagcacaagaactgtccaaatccaaaggcctttgttgagggaaaggaagagtcgtttactttttggggactccaaaaggtgatttggtccatcctgcagagtgcatgaagcaattgcttgaaaaagttaggcgtcataaagttaatgttgatggcaatgtttgtactgttttggtcgccaccttggttcttgagggttggcagcgcaagcttgatcctgggtatgatgtgatgaatactctgcagacattgctgcttagagctgattgggcaaagtctctttcatacacaattgatgggctcatggccccttgagggggtttccttgttgaggactttaggctcttaaaaaaacaatttcttaccaaaacctgaaacaggatttgtactaatgggcactaccaaatttgccctttattttttgcttgccttcttttgggaaggttatcccctttattcatctttgtcaatttccagcagttattactgtgtgcctgagcatcacagtttacgagaaaaagcttaataaagcagtcaattttgtaccccttatacagttgtacacccagaaccttgatatgtttgataatgttgaaatcttgagatatggttaactgaaaaaccgaggt

SEQ ID NO: 111915 - DNA, 575 bp, Glycine max
  Clone ID: PAT_MRT3847_72068C.1
ggcgtttactttttggggcactccaaaaggtgacctggtccatcctgccgagtgcatggagcaattgcttgagaaagttaggcgtcataaagttaacgttgatggcaatgtttgtactgtcttggtgaccaccttggttcttgagggttggcagcgcaagcttgatcctgggtatgatgtgatgaatactctgcagacattactgcttagagctgattgggctaagtctctttcctacacaattgatgggctcatggccccttgagaggaggggtttccttgttgaggctcttaaaaataatttttgaccaaaacctgaaacaggatttgtactaatgggcactaccaaatttgcccttttattttttgcttgccttcttttgggaaggttatccccttattcatctttgtcaatttccagcagttattactgtgtgcttgagcatcacagtttacgagaaaagcttaataaagcagtcaattttgtacccactatactgtactagttggaacggaagtctccgtttgataatgtcgaaatcttgagatttatttaactacacattccgaggtaa

SEQ ID NO: 111916 - DNA, 822 bp, Glycine max
  Clone ID: PAT_MRT3847_72069C.1
attcggctcgagcaaacatggcagaaagtcctaattggaatccctcatatgctgctttacatgaggaacacttgagagtgtgctgttcaaatctatccaacatctgagggattccaaacatggcagaaagtcctaattggggcaacagttgtgttttgtgcaacatcagggatcccatcagatttccagttgcgtgtacttttggctggactcgcagttgtcagcgcagccatagcttttgccctaaaccaactccaaaagaattttgaattcgtggattacgtgcatgcggaaatcgattaagcacgtccctccaaaggaacttcaactagttagttgtaaatagagttgaagacaagtacatgtacactagtattttgatgaaaagagctcaaatctacctaaccttagtgttatcattaaattcaacgaatacaagtacataacccatggttttgaaatgcccatacacgattccagcaaaacgtgttagacatgaaaacagattttgcattaaaaaaaaaaaaaaaataaaaaaaaaaaaaaaaaaaaaaaaaaaaaaaaaaaaaaaaaaaaaaaaaaaaaaaaaaaaaaaaaaaaaaaaaaaaaaaaaaaaaaaaaaaaaaaaaaaaaaaaaaaaaaaaaaaaaaaagggggggggcctttttaaagaaccaaattttacttccgggggctgggaaggttttattttttttttggggcccccaaaattaatttcctggcccggggtttaaaaacggcggggaggggaaaaacctgggggttcccaaattaaatggcttggaaaaaaatccccttttc

SEQ ID NO: 111917 - DNA, 1001 bp, Glycine max
  unsure (1)..(1001): unsure at all n locations
  Clone ID: PAT_MRT3847_7206C.1
ggaagaggtaatgatgcaggatatggtggaagaggcagtgattctaattatggagggagggggactgctgcttctggcagaggtggaggccgtgggtttgaccatgactcccagaggaatgataggggtcggagcccagacaagggatctagttggagtgatcgcttcaaaagcgtcaaccgggatcgcagtcgtagtcctgacagggctgcactacctcaacattcccaaggtggcagctttcacaaggcaatgatggaacgtggtggtggtggtggtggtgatcgcaataagagctttaaccgggaccgaagccgcagtcctagccctcatagacaggagaagtgcccagcggttcgagatcgttccccagtttacagttttcatcaatcaatgatgggacgaggtcagtcatccccttcatctcaacggcagcgtgcacgcagtcctcaccgaaactcacccccctcccagggtgatggaagatatgctggatctcattcatcttacaatggagaagtggaggaagggatgattcccgaggaagaaggaatgattggtcaagatgatcccgtaaatgtcaattaggattttggctatcctgagaccatttacatataaatatgccaaggttgttttggtcttcttacataatgtggaaggggattgttatttgaacacgagcaagttaggaggatatggtagtggaattcatggcaaatgtatattttgaggggctttgtagaagcctggaaatggcatagatgaacctagtaagtaaagaatattgtgggttttgtttgttatttttggtaaaactcgactttatatggagacgggttctttgttcccatacaatcaaaaaagaaattattcagctactatagttaaaatggttgattccctcacttttctaatgggagcgtganagaaaatatgagntgcttgttgtacttttataaataaaaaagaaaataaaatactttgggggggctgggttt

SEQ ID NO: 111918 - DNA, 4145 bp, Glycine max
  Clone ID: PAT_MRT3847_72070C.1
cctcgttcttccgctctactatctttctttttttgcgtcatactaactattcccttattctacatttttagcttcttattctatcactaatccccttttctttctactttttttcctcattactctttattctcaatattattaaaatctgactcaatttacacatctactccgttctttgtcacaatttctgcggcttcgtaagcttcatggtctcaagctcacttttgtgcagaccaaacactgagaccgtttcaaaaagcctctaccttgacgactctcccattctctcatgctactacgcttcctttcaacctccatcaatgcaattcttcaaacccttcctcctcactaaaaccgttgacgacactccctcactaccatccctgctttaccgaccacaatccacccaactcctcgccaaccaccacacccccgattgctatcccctttccctttttctcggaccaaacgagactccttttaacacctcgaaagccgtccgaaaacacaattatcttgtacgtcccctctgcatatgttgctactataccattttacatttcacacaaaacaagattatcatcttcatcttcagaaataacaataatcccacctgaaacaaccagttattgggtaaatgttggagtataggaaatcaaaggagcggccttataccatccccaaccggccggtatttattgctgatcaagattccgatccaggggcagctgttgtcggagataacctttagtgatcaccttgcagatttttctttacactatgaatgccatgaaaaaacttggggcagaatgttgttaaggcaaaggtcttactaagagtcttctgtcaagcactcctaagttttccattaacaaaagctgattcttggaagaaaagtcgaagataccggagttgttggaggcaatccgtttgacaatattgaataatatagattcagtatcagccgcaatcaagcgtccaattagctctgtgagcagcttttggagatgtgccttgtaaggagcaggttgaggcgtataaagtttttgtgatgtatttttttttgagtactgcaggaaatgatgtgctctatatttagacacaattggactgttgatattcttcgttgattttgaattttgcagtacttatgtaaaatgaggcttaaacgaacaacataacagaaaggagggaaagagccaatcctctgaaattcaagatgaattctcgtggttcatggggcttctctggagctaatgaagggaacccacagatcagtgccaagtttgttgcaccatgttatatgatgaacaagattcagattgttaccaaactccctgtagttggtgaccagaaatgggtagtatggatatgttccttcaatgtccccatggcacccggtaagactcgctccatagtttgcagtgctcgaaacttcttccagttctcagtgccagggccagcctggtggcaagtcgttcctagatggtatgagcattggacttcaaacaaggtatatgatggagacatgattgttcttcaaggccaagagaaaatcttcctttcagaaaccaaggaaggtggagacattaacaaacagtatacaaacatcaccttcacaccaacacaggcagatcgctttgtcttggcatttcgaaactggctaaggcggcatggcaatggccaaccagaatggtttggcaacagcagcgaccaaccattgccatcaactgttttatcaaaacgtcagatgttggatagatttgaacagcacactctcaagtgttcatcatgtaaagcagcatatgagggattccaaacatggcagaaagtcctaattggggcaacagttgtgttttgtgcaacatcagggatcccatcagatttccagttgcgtgtacttttggctggactcgcagttgtcagcgcagccatagcttttgccctaaaccaactccaaaagaattttgaattcgtggattacgtgcatgcggaaatcgattaagcacgtccctccaaaggaacttcaactagttagttgtaaatagagttgaagacaagtacatgtacactagtattttgatgaaaagagctcaaatctacctaaccttagtgttatcattaaattcaacgaatacaagtacataacccatggttttgaaatgcccatacacgattccagcaaaacgtgttagacatgaaaacagattttgcattatgttatttgcacagaaatgtgttcactttcatttcaaaacaatctactgatacttactcaaaaaaaaaaaaaaaaaagggcggccggagttgttagaggcaatccgtttgacaatattgaataatatgattcagtatcacccggaatcaagcgcccaattagctctgggagcagcttttggacttgtgcctccaaaagagcaggttgacgtggagatagcaacccaaataaccatctctgatgacggcccaaaacgaagtttgttgtatgtggagacagctgatcggcctggattactggtggatcttgtaaagactattacggacattaacattgccgttgaatccggagaatttgacactgaggggctcttggctaaggcaaagtttcatgtcaactacaaggataaagccctcatcaagcctctccagctggttcttgttaacagcttgagatatttcttgaggcggcctgagactgaggaatccagtttttaagtgcaacacatcatatttgcctctggattataagcaccatggaattgtagaatgcatgtattcttttccatttggagaacaatatttgcagtacatagttaactttacaatgatatgcaggtttattaaattttaagagttaacatttgtgtttgtttaggttgcctgatgactttgacaaaccggagtttgccacggtcaacattcagcgtgatctgttctatggttacgatactctcatggagaatgtctctgatccttctcacattgagtttgctcatcacaaggtcacaggaaggagagacagagccaagcctctgccattcaagatggattctcgtggttcatggggcttctctggagctaatgaagggaacccacagatcagtgccaagtttgttgcaccatgttatatgatgaacaagattcagattgataccaaactccctgtagttggtgaccagaaatgggtagtatggatatgttccttcaatgtccccatggcacccggtaagactcgctccatagtttgcagtgctcgaaacttcttccagttctcagtgccagggccagcctggtggcaagtcgttcctagatggtatgagcattggacttcaaacaggtatatgatggagacatgattgttcttcaagccaagagaaaatcttcctttcagaaccaaggaaggtggagacattaacaaacagtatacaaacatcaccttcaaattcggctcgaggaccccactacgagaccctttgtggagacttttgcgaaggatcaaaatagattctttcaggtttttgctagggccatgcagaagttgagtctcttgaatgtgcagaatggtttggaaacagcagcgaccagccattgccatcaactgtgttatcaaaacgtcagatgttggatagatttgaacagcacactctcaagtgttcatcatgtaaagcagcatatgagggattccaaacatggcagaaagtcctaattggggcaacagttgtgttttgtgcaacatcagggatcccatcagatttccagttgcgtgtacttttggctggactcgcagttgtcagcgcagccatagcttttgccctaaaccaactccaaaagaattttgaattcgtggattacgtgcatgccgaaattgattaaacacttccctccaaaggaacttctactagttagttgtaaatagagttgaagacaaaaatacatgtatactagtattttgatgaaagagctcaaatcttcctatccttggtgttactagtattttgatgaaaagagcaacaaagttgatcgtgagatatcctttttgaataaaaatttaatcaaagtattacaattgaagggtggctacatgaaacagttgggcccgtgaaggataagtttggtctgtgaaataaattaatttttttttc

SEQ ID NO: 111919 - DNA, 589 bp, Glycine max
  unsure (1)..(589): unsure at all n locations
  Clone ID: PAT_MRT3847_72071C.1
gggacgccacgcgngcgggggctctaagtgtcactttctttgcgaggggggcgcggggtctctgtgactctnagtatcctatcctgttattattatttctaattctctcttatcaggggcattgagtatgtgtccctggggggggcttcctcccaaggggggggtcanttttnagctatgccgaanaaacccaatgcttcaagggggggggtcaaanccccaacctttctcaaaactggcaccactattgtgggggtanttttccangatggggtgattcttngggctnatactanggggactgagggacctatagtggggtggtaaaaactgtgagaaaattcattatatngcacccaaggggggggggtngggagcangcgcatcttctnatacanaggcgggaacanacatgggtagctcacagctgcgattacatcgctaccatactgggcgagaatcaagagtgtggacaggacgaacccttcttaanaaacaccttttcaattatcaagggcgtntgtcanctgctttggtgcttgggggggggnatatcactggacctcatttncatactatttatcctcat

SEQ ID NO: 111920 - DNA, 309 bp, Glycine max
  Clone ID: PAT_MRT3847_72072C.1
tgatgcccaaaaaataatacccacgaaaatgcatttgttactctgtctctctgcaacaattagggttttaaacctttagtccaatccaaaaactcgcgagggatgatcttactgcgattcttacacctcgcgcgatatggcattgtccctgtccatttgccattaccttgttctcctcacgcccgctcatgagccaccatcgcaccaaccacgctgcgctcactgtggcaacccgcgatgcgaatccagatgcctgtcaccaaccggtcgaggctcccctatccgtatcagaacaaattagggttaggg

SEQ ID NO: 111921 - DNA, 248 bp, Glycine max
  Clone ID: PAT_MRT3847_72073C.1
cttattctattttttttttcgttgtttctaattttttctggaaaggcccactccccattgttttctaacccaaaggggtttatttctaaatgcgtgctgtggctttctagaaagagctcatatacccctcttgcccagttccctgggcgatatctaccagggcctttcgggaaaactccgggggggtttttggatttcgaagggggcatttatcaacataaccttttctagttccccaaaggggcgtt

SEQ ID NO: 111922 - DNA, 695 bp, Glycine max
  Clone ID: PAT_MRT3847_72074C.1
tggatcctgtagagcggccgctttttttttttttttttttttttaactaaaagccatacttgaactatccactgtttattgtatatgatcaattcaagctcagagctacaaaaggaaaacacattaaactaaaaatgaagacaacaaaacaaaacaaggccataaagcaaataaaggcaacatagctctatataacttaaatatcattatcatattatatatccataataatttcttcattttaatggcaattgggctcaaatgcaagaggcccaacagtgtagagcacaaagggaagcttcttggacaagaaaggcttctcgggcctgagaagagcaccggtaacaccaccatggagatttgaggccttaagcccatagggtgcactgaccaaaaccacgttgtgtgggccccgtatgtggttatgctctttggtgctccgatgtagaagtagccgttcttgtcggttttgctcgtttggaccagcttgtacttggtgttgttgcattcgagcttcacaacggcacctgcaccacagttattgttgcatttgtcgtttagcagcaagggtggaaaaaagtcacttcacaaggggtgaaaaaagtaaaaaagactcgcaacaaacaatgtcccatacttagtaaccgtgcaagcttgagtaaaacgaccagccaactttcccataaaacttttgc

SEQ ID NO: 111923 - DNA, 308 bp, Glycine max
  Clone ID: PAT_MRT3847_72075C.1
gagaaaatggcctttcttgaccttgcttgctgctttacagaatatggacctatattgcgtttcttgaaaatgcttggtgcttcccaagatatgcactgataatgccttgcctgacatttgtgcggtgataaatggtgaagatataccttggtgcccattattgtgacgaagcggaatagatttgtcgtactggccgaaaaaaattctcatcaacgggacagatgggggagggacctttgccgactttttgacaagggttccccaaatggccctcgtcaatcacccagagaacgccgggaaccataatt

SEQ ID NO: 111924 - DNA, 1465 bp, Glycine max
  Clone ID: PAT_MRT3847_72076C.1
tgcaaaacagctttatgctttttgttaaagttgtttttgtcaattttagcaaagctttcacggttactgagaacacaatagagaagtactataggacattgtttgttgcgactctttttacttttcacttttgaccccttatgaaatgacttttttccacccttgttgcaaaaggacacataaataacaataactgtgtcgtgttaaaaaaaaaactgcatatttaatggcaatttctgtcaaatgcctcgggccacgcccacgcgtccgctctctctctctctctctctctctctctctgcttcacttgcttgaagcaatggccaaagccttggcatcagtgctgctgtttctcctcgtagctgtgagtaatgtgtttgctgtagagcttgaacttgaaactcttccaccctcttaccctcaccctcaccctgttcactcccccacaccagcacctcttcacccaccagcaaatgctcctcacccacaccaccaccaccaccaccaccaccctccagcaccagcaccagcaccagcacctgttccttcaccttctcaccacaattaccctcctacccctgcccctgctaagcctcctactcaccaccatcaccatcaccctcctgctcctgttaatccacctcctgttccggttcatcctccagttaaacctcctgttccggttcaccctccagttaaacctcctgttccggttcaccctccagttaaacctcctgttccggctcaccctcctgttaaacctccggttgttccggttcaccctcctgttaaacctccggttgttccggttcacccctttcctagaagctttgtcgcagttcaaggagttgtttatgttaagtcctgcaagtatgctggggttgacaccctcttgggagccacaccactacttggtgccgttgtgaagctccaatgcaacaacaccaagtacaagctggttcaaacaagtaaatctgacaagaacggctacttctacattgaagcaccaaagagcataaccacgtacggggcccacaagtgtaacgtggttttggttagtgcaccctatgggcttaaggcctcaaatctccatggtggtgtcactggtgctcttctcaggcccgagaagcctttcttgtctaagaggcttccttttgtgctctacactgttgggcctcttgcatttgagcccaattgccattaaatgcaagaaattatggatatatcatatttcaagttattttaagttatatgatagagctgtgttgtctctaatttgccttctttctggccttgttttgtttttgtcttcatttttatttgtggttttgcgtttgtaggctctgggcttgaattgatcatacacaataatgagtgacagtacgtatgaaatggatagttctagtatgaaattaattcttgtgtaaaagaattgttgtttatggcttttagtttaaaaaaaaaa

SEQ ID NO: 111925 - DNA, 428 bp, Glycine max
  Clone ID: PAT_MRT3847_72077C.1
ttgagtgcaatgatgtcaatctatcatacaataaatggttatagagaatgtttcaatatagcttatttttaaaattaaatgctttttagtcaacatcttgagaaagcttttgaaaaatataatacaatttacccaaattgatctccaggtaaatatgcactcagagcacaccagagcaatatttgtaaattcaatgttacactgccatcttgcaactaaatggttaacaacaaaaccaaattctcgtcatttgccaagaaagcaagcaaaccacttatgatttataaatagcttctttcaaagagattaaattacaccacaattaagataaacacgcttttagataacaaaaatcacatctttaatctctatgaaatcatcatgggtaaacgaaacaggccaacaattacattatcctagtaaaaatg

SEQ ID NO: 111926 - DNA, 165 bp, Glycine max
  Clone ID: PAT_MRT3847_72078C.1
tgaattcccgggtcgacccactcgtccgtacacgcgttagaacacgactgataccactatttagtacgaatgtcagaccacgacacagtggccagctatacttaatttcgaacctgataatcaactttaattacataaaacgtctatactttaaatctctacatt

SEQ ID NO: 111927 - DNA, 574 bp, Glycine max
  Clone ID: PAT_MRT3847_72079C.1
gggcagtgccggggttgaataggctcttattgatgcgtactatagaacacatctggtaagcaatcatgattctgatcagaaaattggaatatgtcgggcttagcgtacttggttgatacacctgctgagtgaaagggattgtctaccactcaaactcactcctatattatgggtcacaacgggaaacactgggctcagactaccaactagactcagtttaaagatgctgacataactgctatcatgactgactttaacaagcctggatcacttgctccaacagaaaatgtctctctgctgtgcaccacaaacatggtcatacacagccatcctgtggccgcaatactaggcactatgggggctggtggtaatactgcgaataagaccgatgcggacttgatcgtggtgatgaatcaccaaccagtggctgcagatcagagattactggtagtgcaaaggcttagagattatctcattgaaaggcacgatagtcctgtatatatgtgtagcctatgagcatatgacattgactactgaacgagaagtggcataagaccctaactgctgtgctttg

SEQ ID NO: 111928 - DNA, 424 bp, Glycine max
  Clone ID: PAT_MRT3847_7207C.1
tggagaaagttgttcgtctaagaaataagggaataacatttaaggtactatacttacaaaaaaatatctttacttacattgatttctatttgatatattaaatttattattctatcattattattaggttggatggaatgaaaggggtcaaccaattgaccctaatagtgatatgtttatgagttatattggcgccatttctcgacaagtagtgtcaattacatgtgataatcggaaatcaccaacattgaaagtagtgaaagaaaatatttgaaaggatatacaagtattatacatactcaccatattttataattctcatacaaacatacttaattaagatcacttttgcagacaacattcattgttgatgatagttgtcaaacatgggttcttaaagaagcagacaaactttgtagaaatt

SEQ ID NO: 111929 - DNA, 250 bp, Glycine max
  Clone ID: PAT_MRT3847_72080C.1
tgaagaacctctttttattcgatctaaattgcaacactttctggggtgtcgtaacattaccattactcatggcattaacaaaactagttcaactttctattaataacgtaaacaaacttgttttttctcaagagaaactttaatcaaatttcttatgctatgtttgttgctcctcgagacatagctagtttattagtacaacctcacttatgttttgtgtaataaatctctatatgcactaagcttattt

SEQ ID NO: 111930 - DNA, 1442 bp, Glycine max
  Clone ID: PAT_MRT3847_72081C.1
ccacgcgtccggttagagttgctcattttttctagttcttggaaatgttccaaacttttgtttttgtctggacttttaaaaactaattgttttcctggctgtgaaaatatacatacaaacatggttttaattgcattgcggtgagttaaaaatcctttacattgcaaaagctgcaattgtagtggcaatgcagttgcagtgggtcgaaaaaccatgcatacaaactttagttcctacggctaacactttttctctcttacgtgaaaatatacaatgtttaggcatttctacaagtatatagactaaagcaatgttttaaaagtcttggacaaaaaccccaaaattggaaaaattttcagaaactacaaacgccactaacccttataaaaattaatatttttgctctgctcctgtttttgtcagacgatttttgaattcaattgtggatgctagttattttttctgcagctaactaccaagcaaacacacagttagctctcgctccctggctgatggatggcggtgatcctaccaaactactcaaagtccatctagtcacctgcaccgactcggccgagttcgcgctcctgagctcggcgctgactcggacctcggtggtgggcctggacgcggagtggaagcccgtccgaagattgttcccgagggtggcggtgctccaaatcgcgtgcggcgactcggcggtgttcttgctcgacttgctgtcccttcccctctcttccctgtgggcccccttgcgcgaattgctgctctcccctgacatcctcaaactcggattcggattcaagcaggatttggtctacttgtcatccactttcgcctcccatggcggtttcgataaggttgagccatatttggatatcaagagtgtctacaatcatctacagcataataagaaacatgtacccaagcaaagtaagagtttgtcaaccatatgtgcagaagtattggggttttcactctccaaggaactccaatgtagcgattggtcacatcgtcctcttacagaagagcagataacatatgcagctatgtaagttcataatttgaactactctcatttctctgtgatgtgttttcgagtctggtgccggcgacttgcttccgatggaagaaaaaagtcgttttcactttaatgtatgtgtttttgcagatctattcatgtgatgtagtttatgtgttacacatcgatttggccatcactgccccccctcttggttgttcctgtgtattctactgaatgcaagtgcccaaaccacattgaatttcaataaaaataaataaataggtttaattgtacattttatcacatcaattatcattatttcagttctccaggtttgtttcattttcaattttttataagctattcattcaacttctgcatttggtttacttctatggctatgcttatttgagttatt

SEQ ID NO: 111931 - DNA, 237 bp, Glycine max
  Clone ID: PAT_MRT3847_72082C.1
aaactttgaacggtatgaccattaaccttgtaggtggagtcctccgacaccatcgataacgcgatagctagagattcacgacaaggaagggatcccacctgaccagcagatacttatcttgtgcagggaagcagcttgaggatgctcgaatccttgccgactacactgtcctggaggcatccactctccttctcgagcttcgactttttcgtggcattttttttcgctgtcaagact

SEQ ID NO: 111932 - DNA, 404 bp, Glycine max
  Clone ID: PAT_MRT3847_72083C.1
gaaagcacaacagtagtgattaaaatttaaactcaagtacacaactatcacaatgattggcacatgcagcaaacagaatttccacctattcctccaagttctattctaacttataagcagaacctaattcctagtcattttttttaaacacaagacaatacatattgctaacaagaagttcaaaaatagcctccaagaaactatatatacatggacacatggaaaagtgaagcatatgaacttgcaaggggaacatatttgactaaaattgcttaatttacatgattgaacatgcattaaggttgtcatcactgaagaaggaggggagcttctcattccgtgcgttagggttggggagtgcttgttcaatggttttcacatacccagagggtgccttcttggca

SEQ ID NO: 111933 - DNA, 174 bp, Glycine max
  Clone ID: PAT_MRT3847_72084C.1
atacgttgcggctgctagaacactactgaaaggagacctcatgtcatgcgacgctacccgctgtgtttatgctacatgtctaacacgcactctccaacctccgcggccgctctataggatccaaatttacgtaccctttcatactaaaaaataatacttttttagtgtctccta

SEQ ID NO: 111934 - DNA, 178 bp, Glycine max
  Clone ID: PAT_MRT3847_72085C.1
gcgacgggcctcacgggaaagccgggtggctagccttgtgctccccgaggctgactactgtgccagcggcgcttgatagggacagcgccttccttcctccatgggaggtgccgagtcatgtcgctcctggctcgccggcgaagcggatgcggcagagatagcgcatttgtccaccctc

SEQ ID NO: 111935 - DNA, 553 bp, Glycine max
  Clone ID: PAT_MRT3847_72086C.1
ccaagactggaaacattctgttatggtttgtgctccaatcacaacacaacaatctgtatctgttgagcagattgcgaatgacatgtatcaggcaaaggcagaagatgctgatatagtggaggttaggcttgactgcatcaccaacttccacccgtcatgaactcaaaaccattctccaaaataagccactacctgtgctcattgttaaccagtcagtcatatcatgtcaacaaccttatccttttattaaatcttactctttgtatatatgtaggagggatcataagtgtttcatcattggtcatattatgaattgatcagagcttatcgaataaatatttaagttgtttatagagatgcactttaaaatcatttaaaggtcaagtagctgtattctttctttactttctcatgcttaatcatttgcattcaatgtatttgttttgtttgcttttttaaagaccaaaatgggagggtggtttgtatgagggtgatgagaacatgcagttggaagcattacagcttgctgtggaattgggggctgatttcatag

SEQ ID NO: 111936 - DNA, 433 bp, Glycine max
  Clone ID: PAT_MRT3847_72087C.1
gtggatctcacctatgaggattggccaaaatgccatggtaaataatgagttccttgggaagagatggacacattttctacctatctcaaccgaggcactaagtgttgaaattttgaaatcccgtggattcttcactcagtcatactggtactggataggtgttggggctttgattggatatacattacttttcaactttggctacatccttgctcgcacatacttaaatacacttgggaaacatcaagctgttatatcagaggaacctcaaatcaatgaccagagtggtgatagtaaaaagggaactaatgtgttgaagaacatacaacgtagcttctctcagcactcaaatagagtgagaaatggcaaaagtttaagtgggagcacctctcccgagacaaaccataacaggacaagaggaatgattcttcct

SEQ ID NO: 111937 - DNA, 584 bp, Glycine max
  Clone ID: PAT_MRT3847_72088C.1
gtccggaaacccggtcgacccagcgtccgagccattcaaggttatctttgaagaagagttcaacattgatgctgtggcaactctgccgatgcgacaccggtgaaaactttcttgttgcaaacggggatggctgggacacactggccaacgtcgtgctgaaggttgcggcatgagattgcaagatggcaccctgcatattttatgctgcacatgtctggagacaaggcattatgcactgttaagaacatggcttatcaagatatgaaacaggaatatgtaatcataacacacaaagattaccctatcccagaggatgatgactacacaggacatagcatcttcatgtaacgatcctggtcagagctcgaaataaagtatcccccagctaccgaataacgaagtttttacactgctaacaaattaaatagtactaatgacctagattgacaagcattctaccgaagaacgagctatacagctccaaataaatacaaacggagatgctggttgacaacagatcattctactcaagaccgaggctgtaccactctcaataaatccatgaatcaatggggctggacatt

SEQ ID NO: 111938 - DNA, 209 bp, Glycine max
  Clone ID: PAT_MRT3847_72089C.1
cggaaattcccggggtcgacccacgcgtccgctggactcccacggttctactctacggtctaggccctctctctctctctctctcaagcgatacaggggtttgcccaagcagcagatggtggataaccctcggttcaaactcgtcttttccgagagattgcgggacgcgaagaacagggaccgtgaggagggctcctaccgcagatctc

SEQ ID NO: 111939 - DNA, 653 bp, Glycine max
  Clone ID: PAT_MRT3847_7208C.1
ggcattcggctcgagcttgttatcatggaatcgactctcgccctttcgggagaagccggcttatatcttccgtaaacatcgccttcttcgattcggaacaacgcaaatacaaaatactaccactctcccactcttcagatccgtgcttgtggctgaatcgccatggccatggcgattagggtttttctcatccttctactctctctctcatctactcatctcagttactcgctttacgaagatcaagttggcctcatggattggcatcaacagtacattgggaaagtaaaacacgctttgttccatactcaaaagtctgggcgaaagcgtgttttagtgtccaccgaagagaatgttgtagcttcactcgaccttcgtcatggagagattttttggaggcatgttcttggaaccaacgatattgttgatggacttgacattgccctgggaaaatatgtcataactctttcctcggatgggagtatattgagagcatggaaccttcctgatggacagatggtttgggagtctttccttcagggatcagtggcatcaaagtcaatattatacattccaaaaaacctgaaagctgataaggatgaatttgatcccttgtttttggtaaaaggttgtctccatgctgtttccagcat

SEQ ID NO: 111940 - DNA, 400 bp, Glycine max
  Clone ID: PAT_MRT3847_72090C.1
tcattcggccattctgtctcggccaccgcgctccggtgaggttcgaccagtgatatcatgtcgagcaaccgcatggatgacatgcgtgggcatggacgcgcagcattggagtctctgccgtcgcggtgacaatcgaagctggctgacatgtgccctatgggccgaccataggctctcctggggatgatttccatgacaaaagatgaactgatcggccttcaccggtcattgtgggcacacctgaaccatgatgacagcctttcggacacgaagacataactgactctgcactgggcacatctgactgaaaagctttgtgacactacgcccatgctaggcactggcctccttatttcaacaaagatgactgggtaaaccctgcagtggcccaacttgctag

SEQ ID NO: 111941 - DNA, 443 bp, Glycine max
  Clone ID: PAT_MRT3847_72091C.1
gctccgaactttgggctgatttatctgcttgcatcgtcgtcagaagatcatagcccgggaaccagaaaaaaaagacctcaaagaggcacaatggacacctcccagaagaactaaaaagaacaccaaacctaaacaaaccccagaccgaaaaaagatccaaaaaggaggacccgaaacgtgagactcaaaaatacactcccttgcggtattagcagcaagcatctcacggcctggcgtcccggcgggctctccgacagagactaactgcccccccttagacgtaccgacacctttcccccccctacctcagccaccgatatgcaaaggggcgaagaagaccacagacttaaccaagcaccaaacacacgcaaccaacacgcaaccaactcttctcctcccaccctgctccccaccatccttcccccccataaccgcaacacaac

SEQ ID NO: 111942 - DNA, 479 bp, Glycine max
  Clone ID: PAT_MRT3847_72092C.1
acaatcttgacatggaaaaaaaggaggacccgggcgcccaaaaaagacagcaaacaaggggaagaattcaggcaaaaaaccccacaaatcaaggaaggaaggaaaaagcacgcataacaggaacgaaaaaaaattagggggaaaaggggaaaaacacctaaacgaggggacaaaaaaagccgaagccaaaaagaaaaaaacacgacttccaagcgggcgagggcgcccctccaaccaaggaggctaagggagatcttgcatacactaggaacccaatgaaccccggggaggagggacaaatgtattcccaggggagagggaataaagccccaccaagggattaaaaagctcccacaaaaaaaggggggaaaacccgaaagaggggggaagcccccttccaaaaaggggacagccgaacaaaccaaaggaaaaaaggcggcctcctcaaacgggaggggcggcggcaacataaggacaaa

SEQ ID NO: 111943 - DNA, 1365 bp, Glycine max
  Clone ID: PAT_MRT3847_72093C.1
ggagcagttggccaggcggagggagatgaggtggcggaagggcttggcggcgtcgcagagggtggcattgtggaaggagggttggctagcaccctccgcaaactctccggcgtctggctctccaacctcctgaacctcaccgacctcgccgtctccgacgtcaacgtcaaggcctccggccccttcgtcatcctcgcccgcatgaccaagctcaaaaccctcaccatctccaacgccaacctcaccggatccctccccggccacctccactccaacctcacacacatcgatttctccaacaaccgcctcaaaggcagcattcccccttccataacaatgctcgacagcctccagttcctgaatctctcctctaactccctcgccggagaaatgcctccttccatcggtgacctaatttcactcaaaaacctctccctctcctccaactcattctccggttccattcctgattccgtatctgctttaccgagtttgattcacatggatctgagctctaaccagctcaacggcaccatacccaagttcatttcacagatgaagtctcttaagcacctgaatctcgccaacaacaacctccacggggttgtgccttttaacctctctttcattaagcgattagaagtgttcaaggttggtggcaacagtaatctttgctataaccattccatggtgtcttccaagttgaagcttgggatctcgccctgtgataagttcggaatgccggtcactccgccgtcgaaggattcttctgccgatgatagcagcgacgatgattacgatgagggtgatgaggaagggagtaggcacaagaaggagcatcatcatggacctaacaagtttgttcttggtgtcgccattgcgctctcttctattgtctttctcattgttttcttgatcctctgctccaaatgttgtcgttaattagaggaaattttttatttttggttttgggtttttacagatttttagattaggaatattcataaattcagttgagtgcaacttgtttgatatatttatttatcattattaattaattaattaattattatacagtagtggttacattacagagtaggttcaaggaaaggaaacgtaatgaaaatgtaactgccgaaaaaaatggagatggtgatggagatggtggtgggggggggtggaaggagtgaggatggacgaggctggaaatcaatagcacgtgcagtgcaatgagtttatcatgggatgatagatgataaatgctaggttttaatttgggcaccgtggagcagaatcacaacaaatgctaatgatctcattctcatgcctcacatcagagtctttcacatacaaccttggctctgc

SEQ ID NO: 111944 - DNA, 361 bp, Glycine max
  Clone ID: PAT_MRT3847_72094C.1
caactatggcctcacaagacttacttaaaaacatcgaacaaggaaaagaattaaaacacgttgaccaagtagttgacaaatctgcccctgtcatcgaaaatgttgaaattaagaaagttgatcgacaaggatttttaagtgaaattacttctgaacatcaattgaaacacgctgacactgttgataaatctgtccctgttattgatgcttccgttcacgtcaaagaaagcaacagacccaacctccttgctgaaattaaacaaaaaggtcacgctgaataaatgatttaatattcattttggagcgaaagctctttgtttgttccacaaaataaattaaaactttgtacaaaaaaaaaaaa

SEQ ID NO: 111945 - DNA, 411 bp, Glycine max
  Clone ID: PAT_MRT3847_72095C.1
gaaatagtaacctttgctataaccactccgtggtgtcttcgaagttgaagcttgggatctctccttgtgataagttcggaatgccggtgactccgccttcaaaggattcttctgccgatgatagcagcgacgatgattacgacgagggtgatggggaggggagtaggcacaagaaggagcatcatcatgggcctaacaagtttgttctcggcgtcgccattgcgctgtcttccattgtctttctcattgttttcttgatcctctgctccaaatgttgtcgttaattagatttagaggaaatttttggtttcggggatttacagatttttagattaggaatattcataaattcagttgagtgcagcttgtttgatatatttatttatcattattaattaattatactacact

SEQ ID NO: 111946 - DNA, 2052 bp, Glycine max
  unsure (1)..(2052): unsure at all n locations
  Clone ID: PAT_MRT3847_72096C.1
agacaaggngaagacgggcaaggttggttcttttccttaacaccacaccataccatgtttagttttccaaccaaaaacgttgtctttgatttcttttctctttagctgcttcttttgtctctccaaactaagattgggtagtatacttttgtcattttgtttagccttcatgaaatatatgaattctgcttgatttgaaatattggaaaccctactttttcatgcaaaaggccttctttcctcatttcggacgcacgctccccatccatgtctacttgtgtaaaatcccgaggtgtgaaaataatggaccacctttggtgaagtggacacatatataattgataagaatacttaatctctctctctatctgcattttaacatccagattgctctgttactatcaaaaggccttctttcctcatttcggacgcacgctccccatccatgtctacttgtgtaaaatcccgagatgtttgtattgttggtgttgcacggacgccaataggtggtttacttggcaccctatcatctctttctgccacagagttaggctcaattgctattaagactgctctcaagagagcaaatgttgatccatcactcgtgcaagaggtgttttttgtgaaatgttcttagtgtctgtatagggcatgatagctcccatgcttgcagcactcaccatacaattcggtctcaatgatgttgtagtggctggtggtatggaaaggatgtcaagtgcaacgaagtacattgcggaggccaggaaagtgcatctctatcgacatgataccatcattgatggtatggtcaaagatggcctttgggatgtctataataacttcggcatgggagtatgtgccgaactatgtgcagatcagcatgtcataacaagagatgagcaggactcttatgccattcgaagctttgagagaggaatatctgcccaaaatgctggtcattttgcttgggagatagttccggttgaagtttccactggaagagggagggcttccaaaattgttgataaagatgaaggcctggggaagtttgatgctgcaaagttaaggaagcttagaccaagctttaaagaggtcgggggttctgtgactgctggcaatgcttctagcataagtgatggtgctgctgcattagtgctagtgagcgaagagaaggcacgtgagcttggattgcatgtaattgcaaagataaaaggatatggggatgcagctaaggcgcctgaattatttacaactgctccttcccttgcaataccaaaagctatatcaaatgctggtcttgatgcttctcaaatagattattatgaaataaatgaagctttttcggttgtagctcttgcaaatcagaagcttcttggtcttgatcctgaaaaagttaacgcgcacgggggagctgtgtcattggggcatcccttgggttgcagtggagctcgcatcttagttacattattaggggtattgaggcagaagagagggaagtatggtgttgccgccatctgcaatgggggaggaggagcatctgctcttgttcttgagctcatgccggttgctgtgggacgttctttattatgacaaagatctccttacatcatactactttgcaacacttatactttttatttaaaataacaaaacatgtaataagtttagtcatcaacaaagtttgaatggtactggattcggtctctttaagcaaagtctcggtaagtcttgtggataaaaaaaaaatgtgatttggagaaaatatcaatcaagtttttcgatggagattagttatcaacaaaattgatagatgttccacactaataccatggtgacaaaaaaaattgtaatctgttcggtcaaaggaaaaaaatgatctttagtaaagttccccctaaaaaatagtctttatcaaaaataaatgtactttcatatttttttgtatgaatttgttggaccacatttagtggctataggtaggaagcacctgtgtacccccctagattcaaccctcttaagcaaagtcttgagtttgagtactgtgaatgaaaa

SEQ ID NO: 111947 - DNA, 1545 bp, Glycine max
  Clone ID: PAT_MRT3847_72098C.1
tctaaactaaactaacattaacatcacattcggattgctctgttcatgtcaaaaggccgtttttcctcatttcggacgcacgctccccatccatccatgtctacttgtgtaaaatcccgagatgtttgtattgttggtgttgcacggacgccaataggtggtttacttggcaccctatcatctctttctgccacagagttaggctcaattgctattaagactgctctcaagagagcaaatgttgatccatcactcgtgcaagaggtgttttttgggaatgttcttagtgccaatttagggcaggctcctgccagacaggctgcattaggtgcaggaattcctacatctgtaatctgcactactattaacaaggtctgtgcatcagggatgaaagctaccatgcttgcagcactcaccatacaatttggtctcaatgatgttgttgtggctggtggtatggaaagcatgtcaaatgcacctaagtacattgcggaggccaagaagaattattcctccttctcaaacatttttttgggcaacacggtggacccaagcccaatgaatgttttctttttgactccttttaaacattagttgaatctaggattcataattttgttctgctctgcaatgtatgtcgtttttcaggattcttatgccattcgaagctttgagagaggaatatctgctcaaaatgctggtcattttgcttgggagatagttccggttgaagtttccactggaagagggagggcttccacaattgttgataaagatgaaggtctggggaagtttgatgctgcaaagttaaggaagcttagaccaagctttaaagaggttgggggttctgtgactgctggcaatgcttctagcataagtgatggtgctgctgcattagtgctagtgagtgaagagaaggcacgtgagcttggattgcatgtaattgcaaagataaaaggatatggggatgcagctaaggcgcctgaattatttacaactgctccttcccttgcaataccaaaagctatatcaaatgctggtcttgatgcttctcaaattgattattatgaaataaatgaagctttttcagttgtagctcttgcaaatcagaagcttcttgctcttaatcctgaaaaagttaacgtgtatggtggagctgtgtcattggggcatcccttgggttgcagtggagctcgcatcttagtcacattattaggggtattgagacagaagagagggaagtatggtgttgctgccatctgcaacgggggaggaggagcatctgctcttgttcttgagctcatgccggttgccgtgggacgttctttattatgacaaagatcatactactttgcaacacttgtacttttatttttttctctttttttaaaggacaaaacatttaataagtatagttaccagcaaagtatgagtgatactagattcaaccctcttaagcaaagtcttgagtttgagtactgtgaatgaaaaaaatgtaattgagaagagataaatcactaaagattgtttaccagatttctctat

SEQ ID NO: 111948 - DNA, 714 bp, Glycine max
  Clone ID: PAT_MRT3847_72099C.1
ccacgcccgtccggtctctccaaactaacatccagattgctctgttactatccacgcgtccgaaaaggccttctttcctcatttcggacgcacgctccccatccatgtctacttgtgtaaaatcccgagatgtttgtattgttggtgttgcacggacgccaataggtggtttacttggcaccctatcatctctttctgccacagagttaggctcaattgctattaagactgctctcaagagagcaaatgttgatccatcactcgtgcaagaggtgttttttgggaatgttcttagtgccaatttagggcaggctcctgccagacaggctgcattaggtgcaggaattcctacatctgtaatctgcactactattaacaaggtctgtgcatcagggatgaaagctaccatgcttgcagcactcaccatacaattcggtctcaatgatgttgttgtggctggtggtatggaaagcatgtcaaatgcacctaagtacattgcggaggccaggaaagggtctcggtatggacatgataccatcattgatggtatggtcaaagatggcctttgggatgtctataataacttcggcatgggagtatgtgccgaactatgtgcagatcagcatgtcataacaagagatgagcaggactcttatgccattcgaagctctgagagaggaatatctgctcaaaatgctggtcattctgcttggg

SEQ ID NO: 111949 - DNA, 412 bp, Glycine max
  Clone ID: PAT_MRT3847_7209C.1
gggaaacccaaccctgggagaatcattttccctttttgcttttggaatcatccgggggggattctttttttatttcctcaaacacaattttgggggaaagaaaaaaaaatttttttaacaactcaaagttcctggacaaaaacgggatttagactttttttgggcccttccggggggggatttttggggggaattccaaaaaattttcttaagcccagggggaaattttttgttgcaaaactggtttttctccaggggttccccttttggttttttgacctccccccccataaacaagggggttggggggttatttttcgggggaattggcagttttcctttttttccacgcttttgaccctgaagccccaccttggttttgtttttcctggggggaaatttcccgggcttg

SEQ ID NO: 111950 - DNA, 317 bp, Glycine max
  unsure (1)..(317): unsure at all n locations
  Clone ID: PAT_MRT3847_720C.1
cccacacgtncatgccccctcctaaacctgtttctccaacagggatgcttattaaacccagggggtttattttgcgccatcttttgcccttttatcctacgttcggaacttattcatttgcctacgccaaaacaatgtgcttaattgccctttttgcagggcccctgccggattgcattaccagttttttaaaaaaatccaccaaaaatccgttgcgattggggatttatatgacaacccccatatcctataccacccttgctccaaccgctccaatagtagaaaacctcctttctttttttttttaaatttttccc

SEQ ID NO: 111951 - DNA, 247 bp, Glycine max
  Clone ID: PAT_MRT3847_72100C.1
aggcgtgagaacacctcagagaggactacacaggggggatgatgaatatggagacggatatctaaacgccagtgaagtctcacatttttactatgtgtatgactccgaagctgcagcacaagacgcatcccaaagcagagcagtagagacacttaacagatcagaaagtacacattcttgagccgagttgctcatacacatgtattaagagcataaactctatgcagatgattccttgtacaagtgg

SEQ ID NO: 111952 - DNA, 275 bp, Glycine max
  unsure (1)..(275): unsure at all n locations
  Clone ID: PAT_MRT3847_72101C.1
tatccaccgagttgccttagatccccaagattgcaggatagggaatcctcaacaaaagtaacactaaatggagaataaaaagagacagaaaggaatctccctgaatcttgtttaatagttgtaaggaaggaataaccaaaccattacatcatacaaacagttttcatggggaagccgacagggaaaaagaaagatccttcgactcctcngaaggcgaacggccaccaccacaacccgtcgaaatccttggatgacagcaacaacaacaaacgcgc

SEQ ID NO: 111953 - DNA, 173 bp, Glycine max
  Clone ID: PAT_MRT3847_72102C.1
tcggattgcgactcgagtgtttttttcctaacaggatcatttcggtctcaactgaggaggcgagacacgggacaaaaactgatagggggaacatataagggaaagaaagggagcgttgtagaaccaattccatgccaacatttaaataaaatggcctgaaaagggttgctgaa

SEQ ID NO: 111954 - DNA, 283 bp, Glycine max
  unsure (1)..(283): unsure at all n locations
  Clone ID: PAT_MRT3847_72103C.1
cgacatcgcttgttctgttccacnaganctaanagccnaangngacgggaaagcacctgatgatgtaagttgatgatgtaaancgtacatganncgagcaccgagtttattcatttatcagnggcaagtatctaaggttagtaaaaatnaataagttaganaaacttcgtaagtntatttttgataganaaatagaaaggatccaatttgagcaaggttcaaanaaatggttggaantagtaaaactgttttgatcaaangtgtagccgcaggaattaacctt

SEQ ID NO: 111955 - DNA, 970 bp, Glycine max
  Clone ID: PAT_MRT3847_72104C.1
tcttcttggaactgcaacaatggtgccgcaacccattttgcatctaacccttttgtcattaataatctctctgaccactctttccttggtcgacttggaactgcaacaatggtgccgcaacccattttgcatctaacccttttgtcattaataatctctctgaccactctttccttggtcgatgccgccgatcccacatttggcttcacccctcttggattatctagtagctcaaacttgcaaatccaaaagccttacgacgttgcagtcaacgagcgctacagcttttcaaatggagtgcacagattttgggtatactccacggacaagcctcatatgcaaggcagcaatacgaagccacgaactgagattcgtatcgctggatacgattatacatccggtgtgtggcaatttcaagggtttttttacgtgcctagtggcacaagcggggtgtgcatccagcaagtgtttggtggagtaacttctgccacaacctcgcagactagggtctatggtggttctctcactcattaccaatcacctactctggaaccaaacatctataataggtggatccggtttaacgtgatccatgatgtgggtgccaacaatgtgaagatttttcttaatggggaggataatcccaggtacaatggacctggccgtggagccagcactcactacttcaagtttggggtttacgcacaggatggtgcttccaactacatggaatctcgttggagggatatccagatttttaaaaaatagaaatgcagtgctttcctttcagttccaggtcttaataacacaagcaaagagcttgtttagttaactatatatgactctgaataatttacttggactgtgagaagcacggtttacaaataatataactcttgtattgtgtctgtttgatgatgtcatgtttcataatactataacctttgctactctctctctcacgagtaag

SEQ ID NO: 111956 - DNA, 131 bp, Glycine max
  Clone ID: PAT_MRT3847_72105C.1
atatattggcagacatccattctgtcatgcactatagtggtttgtcctacaatctgttagcggaagagactggattcaccaacgtcgatgtggcgcagcttctcaggagacacgctcatcacaatccctaa

SEQ ID NO: 111957 - DNA, 668 bp, Glycine max
  unsure (1)..(668): unsure at all n locations
  Clone ID: PAT_MRT3847_72106C.1
tgccggcaagctgagcagganacacaaaggtggaaggctgtttcagaaggaaaacatgaaagacaatccttaaaaagcatgttggttaacttgagttcaaggatggatgttttccctggtaatagaggtgtgcagcatagttccacagggtcctcacacattgcaaatgaaccagaccaactttcaccctttcctgatcactatttgcagcaaagaaatggagacttatccattcctgctaatgctaagcgtttggaagattgggtgagagctgaggcagaaaggtatgcaaccttgattgaacagaggcatcacttagagctagatgcttttgctgaacaaatgcgactcaaagatgagaaattagaggcatttcggtggcagttgttgagaacagaattagaaatgaaacagatgcgggcacatgtggaggggcaggtaaaggatgtgacacagctaaaacatgacangatgagattggagaccttacttttggagagagaagatgactggtttcctgaaagagcaatttgtatcaaaattgaggcccttaaaaaatactcaaatttgccttcacaactttgaaattagcccaaaaaggctgtctggtcaagaatcaagggtggcaagagaaaaccaggtgaaaaagtgcttgaaacaatggaaac

SEQ ID NO: 111958 - DNA, 327 bp, Glycine max
  Clone ID: PAT_MRT3847_72107C.1
caaggtcttagcatggattgctcggtgcttgctcatggcatatcaacatcacctgttgctgggtcttggctggatcaggtctccgatactcaagatacattacatacaaccaatgtgatggacacggttgtataggaggctgaaaatgtgaacaacgaatgggatgacacatacaggaaaccgcatgagcacattgtggcacatgcacagtgtggataaccagatggagcaaatgatgagaaaaattctctcaccagactgaatggcattgctgaagatggctgggctacatattcattattgctcttgacacttgatctacttgct

SEQ ID NO: 111959 - DNA, 1286 bp, Glycine max
  Clone ID: PAT_MRT3847_72108C.1
ggctcggctcgaggtttcttccttttctatctcttgctacttcaatcctcttgcttagttctctgtggttaatgttccacggttattaagataaaatggctgagattgagggttctcctggaagctccatgcatggagtaacaggaagagaacaaacattcgtagcctcaattgcttctccaattgtccccacagacaccacagccaaatttgctctcccagtagactcagagcacaaggccaagattttcaaactcttctccatggccaatccccacatgagaaccttccacctttcttggatctccttcttcacctgcttcgtctcgaccttcgcagcagcccctcttgtccccatcatccgcgacaaccttaacctcaccaaaagcgacattggaaacgccggggttgcttctgtctccggaagcatcttctctaggcttgcaatgggtgcggtctgtgacctattaggtataccctttatctcaaggggttctcttgggatcatatcaggcctaactggtgcaggtggaaactttggttctggtttgacccaattgatcttcttttcaacctcaaggttttctacttccactggtctctcccttatgggtgtcatgattgtgtgttgcactcttcctgtgactcttgttcacttccctcagtggggtagcatgttcctccctccttcaaaggatgtcaacaagtccactgaggaatactattacaccgctgagtggaacgaggaagagaagcaaaaagggttgcaccagaatagtctcaagtttgctgagaatagccgttcagagagaggtaagcgtgtggcctcagcaccaacaccaccaaacacaactccaactcatgcctagcttctccactttgcactctcattcatgcgccttcagcgtatttttaaccattggatgaagatcagacaattgaagttgatcgaacgagataaaatatgagtggtctgatcttcatcagacggttttaaattgctgaatgtgggtgaatgtgttgaagagtgaatggagtgattggggaatccggatcccaagttttaaggccttagggtataactactgcagtagaaaataccaccaataatgaggaacaacctaaagggaatctcaaattgaataagttttttttttatcccacccccccaaaaaagttgaaatactagtaatgtttcttgcgcttattttggtgtaaagtttacaccagacttacttatacgtgggccatacatatatatatgcaagaatcaatttgtgattatg

SEQ ID NO: 111960 - DNA, 228 bp, Glycine max
  Clone ID: PAT_MRT3847_72109C.1
cagaagcatacaaatctatatgcagaattggtacttctctgaatcatagagatggggcgcgagttctactttgctgacacttacttggatcgcagccctaaaaacagagactagaagggctgagacatccctgaagatcccagacctcacttaggatagttatgtcagacaacatattggtactatatcaagctttgctccttaaatgtgttcctcaaaacataccac

SEQ ID NO: 111961 - DNA, 126 bp, Glycine max
  Clone ID: PAT_MRT3847_7210C.1
gaacatataaaaagcctcgtatataactgtagaatctggaatggtcaaacattgactggttcttgttctcagtaaagacaaattaccagatataaggaacccaccctgctgttttgaataaatcaa

SEQ ID NO: 111962 - DNA, 2456 bp, Glycine max
  Clone ID: PAT_MRT3847_72110C.1
cctcgccctcggccggctcgagcacactttcttccttaattttctagctcttgctacgtacttgaattcaattagttattaatggctgagattgagggttctcccggaagctccatgcatggagtaacaggaagagaacaaacatttgtagcctcagttgcttctccaattgtccctacagacaccacagccaaatttgctctcccagtggattcagaacacaaggccaaggttttcaaactcttctccctggccaatccccacatgagaaccttccacctttcttggatctccttcttcacctgcttcgtctcgacattcgcagcagcacctcttgtgcccatcatccgcgacaaccttaacctcaccaaaagcgacattggaaacgccggggttgcttctgtctccggaagcatcttctcaaggctcgcaatgggtgcagtctgtgacatgttgggtccacgctatggctgcgccttcctcatcatgctttcggcccctacggtgttctgcatgtcctttgtgaaagatgctgcggggtacatagcggttcggttcttgattgggttctcgatggcgacgtttgtgtctggcctgtcctttatgagcacgatgttcaactgttgcactattcctgttactcttgttcctgctcctcagtggggtaacatgttcctccctccttcaaaggatgtcaacaagtccactgaggaatactattacaccgctgagtggaacgaggaagagaagcaaaaagggttgcacctgaatagtctcaagtttgctgagaatagcggattcttgtcctcactctagggcaggacttgcctgatggaaacctcggggccttgcggaagaagggtgatgtagctaaagacaagttttccaaggtgctatggtatgccataacaaattacaggacatggatttttgctctcctctatgggtactccatgggagttgaattaacaactgacaatgtcattgctgagtatttctatgacagatttaatctcaagctacacactgctggaatcattgctgcttcatttggaatggcaaacttagttgctcgaccttttggtggatatgcttcagatgttgcagccaggctgtttggcatgaggggaagactctggaccctttggatcctccaaaccttaggaggggttttctgtatttggcttgaccgtgccaattctcttcctattgctgtattggccatgatcctgttctctataggagctcaagctgcatgtggtgcagcttttggcatcattcccttcatctcaagaagttctcttgggatcatatcaggtctaactggtgcaggtggaaactttgggtctggcctcacccaattggtcttcttttcaacctccaaattctctacttccactggtctctcccttatgggtgtaatgattgtggcttgcactctaccagtgagtgttgttcacttcccacagtggggtagcatgtttctaccaccctcaaaagatgtcagcaaatccactgaagaattctattacacctctgaatggaatgaggaagagaagcagaagggtttgcaccagcaaagtctcaaatttgctgagaatagccgatctgagagaggaaagcgagtggcttcagcaccaacacctccaaacacaactccaactcatgtctagccatagcacttcaatcaaagaagatcatgaaacataattactgagcagtattgggaatgaagagaataagaatcttgtaacatgcttctccactttgcactctcattcatgcgccttcagcgtatttttaaccattggatgaagatcagacaattgaagttgatcgaacgagataaaatatgagtggtctgatcttcatcagacggttttaaattgctgaatgtgggtgaatgtgttgaagagtgaatggagtgattggggaatccggatcccaagttttaaggccttagggtataactactgcagtagaaaataccaccaataatgaggaacaacctaaagggaatctcaaattgaataagttacttttttattttaaccaaaaaaaaaagttgaaatactagtaatgtttcttgcgcttattttggtgtaatgtttacaccagacttacttatacgtgggccatacatatatatatgcaagaatcaatttatgattatgcaaaagaagtgatgtaaaaaaataataatgtactgtgttttgaattttggtgtgcaactgatgatatatttacatcatcttataatatgtacacatcgaatattctggcgtgtacgatgggagcaatatagagaacaaacttcagattcaggatgggtagttgttaattagcaggtgaatgatatcactaattcactatgaataatacgtcaacgcagatctcgatggtgggtattcttgtttaagttgatgacgtttgattagtggaatgggatcaataat

SEQ ID NO: 111963 - DNA, 373 bp, Glycine max
  Clone ID: PAT_MRT3847_72111C.1
aatatctctcttccaaagtcacacacaccacatgggtctcttttaaaaaccctgtgtgatgttaactcagatgcatcgatggagagtgaagcctaacctttctggtttctcccgggtccaaacctggtggtggtggttaccaatttttgaatttttggcttttttcttccaacttaacatgccaatacgccgcaaatactttaacattctaaccttaatgatggcacctgctccacaccgaaatcccaggtgaaacaaacgagaggtggtccaaagaaaaaaaaatctcctaaaactgcgttttcccttgaggtgtaaaagcaagctaactataaaaaaatgaaaccgctaactgaaaacactgaaaattctt

SEQ ID NO: 111964 - DNA, 277 bp, Glycine max
  Clone ID: PAT_MRT3847_72112C.1
gggatatattttattttcccggtggatagtaggtctccatcccaaccaatttgaaggccaaaccttggagccgacaaaaaaaaaaaaacaatgggaaccccaattaacaacatgtaacacttggacatccaaaaaacatgaaacgaacccatattttccctttcaacaacgggcaaggaaattgcgcgatggtgacccccgcggtaaaaataaggtccccccccttttcgagcgggttgttccccttagcaagccctgaatttggattttttttttt

SEQ ID NO: 111965 - DNA, 891 bp, Glycine max
  Clone ID: PAT_MRT3847_72113C.1
acctctccacaccacagtttcttccttttctatctcttgctacttcaatcctcttgcttagttctctgtggttaatgttccacggttattaagataaaatggctgagattgagggttctcctggaagctccatgcatggagtaacaggaagagaacaaacattcgtagcctcaattgcttctccaattgtccccacagacaccacagccaaatttgctctcccagtagactcagagcacaaggccaagattttcaaactcttctccatggccaatccccacatgagaaccttccacctttcttggatctccttcttcacctgcttcgtctcgaccttcgcagcagcccctcttgtccccatcatccgcgacaaccttaacctcaccaaaagcgacattggaaacgccggggttgcttctgtctccggaagcatcttctctaggcttgcaatgggtgcggtctgtgacctattaggtccacgttatggctgtgccttcctcatcatgctctcggccccaaccgtgttctgcatgtcctttgtgaaagatgctgcggggtacataaatggttcggttcttgatagggttctccttggcaacgttcgtgtcatgccagtactggatgagcacgatgttcaacagtaagattatagggcttgcgaatggaactgctgcggggtgggggaacatgggtggtggacccacccagctcataatgcctttggtgtatgagcttatcaaaaaagctggggctactcccttcactgcttggagaatagccttctttgtaccggagcatcccagtaacatgaacccccttatgcatcatgtatttctcttttcatgcacctttaatgttagacttattattattatcatgccccttgcccct

SEQ ID NO: 111966 - DNA, 544 bp, Glycine max
  Clone ID: PAT_MRT3847_72114C.1
tatatataaaaatgaaagacataggaaaaatattattaaaaaggtggagctattaggctactggccactcactactcacctgttttagctggtttacatggttgctgacgaattgtgtcccaacaaccatgtgcgccttgcatgcatttttttttcatatagaaatatatgcaattaatctgaaaatcaggccattttaatggtaaagaaaatgatgatagtaactttgaaaaatctcatcaacttaaattgtaagcaactagagggtaaaagaagtccattacgccattgattcaataactacgaaagcaacatcagcctgattagatggtggttttggttgtccttgtctttattagtccctcacgacgtcattaaataaatatatgtatgcatattaagattggaataataattaattgtacacctctggaggtgattagtagatcctttacatacttgaaatcgttatgttcagtttaatagcgggctatttttgacaaggttttcccatcaaaattaattacggttagagaagcataga

SEQ ID NO: 111967 - DNA, 316 bp, Glycine max
  Clone ID: PAT_MRT3847_72115C.1
cagacgcgtaagatgtggctgtttccttgtttgttctatcgtcggcatatgacaatagatcatgagcaataattattattattttgtatttttaatggctggcatagtggcatcacttaatcatcccaaattgtagccctcgtccaggattatggccaaataatgggttttggtgtattagggattaaatggccctttttggctatacctatcaaaaagtaattagaggtagcatctacttattctgttggttttgggaattgaatcactatgattgctagggaaaatcctttttaatcaagatttgttatgaaaa

SEQ ID NO: 111968 - DNA, 106 bp, Glycine max
  Clone ID: PAT_MRT3847_72116C.1
gtggaatgaaaattgtctctgttgggactgatgccaaggggaacatttatatataagagcttggggaagcttcttaaacacacaaaggtaacttatctggacttat

SEQ ID NO: 111969 - DNA, 850 bp, Glycine max
  unsure (1)..(850): unsure at all n locations
  Clone ID: PAT_MRT3847_72117C.1
acgaggaactagtctcgagttttttttttttttttttattacttgaaaaaaatataataaaagcaattttgtctgcacaatggactatggaaaaaatgaagaaagaagaagcacccctagactgaactgttgtatactatacacccttttataagtaagatacatattacaatataaaaatacaatatacataaatttatacatggcaagtgacaacagaatttaaactctgaaacacatgttgttgggagaactgagagagtactcagcaaaaacagtggccagagaaaacaattactgaaaaatagtagagaactaggtggattctgaagtgaagatggtgccatcttttaatctgtttcattatcatgtcttctcgtcagacgaatttcaaaaccattcaccaatcgagcagagggaaagaaggacatcctatcttccttgatttgtgtccatctataggtagttacgaagtaatgaagaaaaaaagcaatgtggaggcgagccaactctgttcctggacagaatctagcacctcctccgaagggtgcatagaatggactagttctccaatttctcttttcctcgttttcaggttccatccatctccaaggattaaaatttagagctccactgtatacattctcatctaaatggactnntgaaagaaatggaaccacaaagcaccctttgggaataacaaaatcttggtactgaacgtcttcttttgcttctctcattaaccaaatnnncataccnnnaagtcttagtgtttcatcaataacacattgagtgaatgacattgnnttataatcctgccatgtgannaattatcnnnanaattactctc

SEQ ID NO: 111970 - DNA, 184 bp, Glycine max
  Clone ID: PAT_MRT3847_72118C.1
gctgcgagaagacgacagaagggggatattcatgatcaaatggcaggtcttttagagagggttgagattgaactaacttcaaatactaatattgagatgctatcaagaaatccattacatctggtaaacttataagactaataatttcttgcaacgcggatcttttatattatactgaatctaa

SEQ ID NO: 111971 - DNA, 427 bp, Glycine max
  Clone ID: PAT_MRT3847_72119C.1
tacggctgcagaagacgaccgaaggggatccttccgtccagctagcaccacattgacactgtgtgcttggaaagaaaattcatggtttgtggggtactgtgccaacgttctttaatggatgtcaaaggccaggcaccaaaaaagccggtggtaatgggccaccaagcgctgctacaaatactaatagacctgcctgttgaggcattgcggttgggttggacaaaaaaggggggcagaaaaaccttcttggttttgaccctcgggggggaacctttgcagttaagatttttgccaattgtaaatgagattttgggggtggtcctacaaaaaggggtacctatactcgtgggggagactcttgtcacaccattaggggaaacctaaaaagagttccccaaaaaaggggttttagtggaaaaaccgaggg

SEQ ID NO: 111972 - DNA, 1119 bp, Glycine max
  Clone ID: PAT_MRT3847_7211C.1
gcgtgtcttcccccaacgaaaccaacgaggaagcaagggggatcttgaattctgcgcttaacgcttcgaatctttgaattcattcaaagatctccctctacgcatatcagggcactatggctgccacggtgaaacaaatgtctttgatcgtgtcactgttgggtgtggtgtccttcattttgggagttgttgctgaaaacaagaagcctgtggctggaacacccgtgcctggttcggatggtatctctgtcacctgcaagtacccagccgatccaactgttgcattggggtatctttctacagcatttcttgttgcatccactgtgattgggtatatgtctttgttttacccttacaaaggaaagtctattccacaagggattctgtttaagcacaccactttcacagtgttcttcaacatttctttgtaagtactgtttccttataagtactttgtttaccaattgtcatgattaatttttcaggtattaaattataatacgtgatactttttttcaattgcttttctccttgttcatggaaatggaagattcaaagatagatactgattgtactaggagttgattcttgggggttgtttgagattaaatttctggatctcgttctccactattttaatttatataagcaattctgagtaatgttttaacatgcttcttttgtgtgccatagatattgggtttaggattttactgcctattttgattactgtgattcaatataccatctaaaataggcattcttctttttaaaaaggagcctccatttgatcagtgtatatgcaaaatacctgtgtacgtgttgctccaagtagaatacacctactttgtggacatgctaaatgtagaatggtaatagatgaacttctagtagtaaacagttatgaaaaaatcttaacaaaagattttacagtggatcatgatggcattattagttgcacttggtgtaggaaactaccttgtacttcataaaaaaacagcattggtgatatggttttgattaatgttactgcaaaatgcgatgactatgagattctcatctctattataaatggcttttcttctgggctatggtttctttacttaggttcaccactga

SEQ ID NO: 111973 - DNA, 215 bp, Glycine max
  Clone ID: PAT_MRT3847_72120C.1
cccactcattcgcggacgcgtgggcggacgcgtggggtgattctcaaatactgatggttccagggcgcaaacccatagctcatggacattctgtcaaaaatctgactgagaaagtgtgagaccaaattgttacatttgaaaagagttactggcatgttgtttgatcctgacaagtttcacatgtttgacaaaaatgaaataggtttttattttaa

SEQ ID NO: 111974 - DNA, 407 bp, Glycine max
  Clone ID: PAT_MRT3847_72121C.1
aaaaacaaaaccttgggtctttatttcctcttcattcaaggagaaaagattcattggccatttaaggatcttgcggggcttccgggctgggttatttgtcttaacaggggaaaaaaggggtaaaatgccccattcctaaaaagaaaaataaagccgaggaaaaatggggaaaaattccaaaaatggaaacaagggctagggcaatcaaggaaaaaagagctttcttcctaagtaaagggggaaattatcccctttaagggaggggggaaaagagaataaaagtttgggggaaaatttctataggttggtggggggaggccaaaattgaaaaatgacccttgtatagaggaactcgttccaagggtcaggtaatcctgggaaaccccaaggggtgcaatcggcataag

SEQ ID NO: 111975 - DNA, 488 bp, Glycine max
  Clone ID: PAT_MRT3847_72122C.1
ggagaaaaaaacattgatgaacatgtccaatgccctataattcatattactttcatacgacatttttgtgacctttttttttttgtttcaaactttgagcaaacaaacatgaaactcttttttgatttacaacttttttttttacacatttcaaattttaaaaaccttgctacaattttccctgataaagtagtagcaattcttgcttgccaattccatgttgtaaaaccatgcccgtctccaataaggattgatgtttaaagctggtgcagttaccaacaatgcttttgtgttttacccgacaaagctcacaaaaaaaaaaatacatttcccccaaagttttttagggtccctcagtgtcagagtcatttgggataacaagtgggggggggttgcaactttttggcgggggaagtccccaaaggaacgggttaccctcatagctgcttttatcaaatggggaaaattgtcctttaaattcaggggtt

SEQ ID NO: 111976 - DNA, 128 bp, Glycine max
  Clone ID: PAT_MRT3847_72123C.1
tatctctataacacattttataaacccaagctcatcctttagttgagggagatcaaagaatggtgggtggctctctcatacccatccttcgctgccaagaccacgaatctgtgcccatcatccccaca

SEQ ID NO: 111977 - DNA, 294 bp, Glycine max
  Clone ID: PAT_MRT3847_72124C.1
gtacccttttatgatctgaaacagaaatgattgatccatcgtcatgcttgaggctaaaacggaccatcttaacaaatcggtggaattgatctatgcaacacgacacacaccccacacatgtgatcttactaactccaatattgtggcctattgaaacacgatttcaagtaggcagatgtctatctttccatgatttgttcacttcccatgatgactacgatcccattacgatatatatacatctaattaatccttttgccatcgtctaggacgcaagccatagtgagaggtcat

SEQ ID NO: 111978 - DNA, 337 bp, Glycine max
  Clone ID: PAT_MRT3847_72125C.1
ccggtatcgctgctacactaccatataacggtacagctgccatacgacaatataagggttctgctgcaaaactccaactcacgggtacggctgcaatattcctccttatgggtctggctccgaaattaccacacttggttattgctgctataacacgacatctggttacggctgctacatcactactcaaggttacagctgctaaatcactcacatacgggtactgctgcaaacaatttgacatagggttacatgcgaactcaatggacgtattttacttacccagcttccacaactgcaaaatcaccacctttttcattctgaaaaaaatatcacc

SEQ ID NO: 111979 - DNA, 217 bp, Glycine max
  Clone ID: PAT_MRT3847_72126C.1
ttcttgctatctcagactgaccacacatcttgtagctcaacagtatgctatgatcacaatgggtgaagacaatggattggatgtgcagagaaccataacaatggttggaacgatagcagaaagcatgtgttccatgatgcgcttatctgaaatacctgctaaacagttggatagtgatacaccggagaagatgaacatggccataatgactaggcct

SEQ ID NO: 111980 - DNA, 276 bp, Glycine max
  Clone ID: PAT_MRT3847_72127C.1
gctccgcattcggctcgtgctcaagttctcccttaacacatgacatctatacatacgctcctccacccgcgttcagctcatagtgtgtcactatgctctactgtgcgcatccatctgcgtacgttgcaaattcgaggtatctccgtaccagtggtcatactgccgatctgtaacattattactctagatgggtaggatcgttagctcgacaggtatccgtatgaatcgcttggaggaacaactcttgtgcttaccaggtagccacctagtcagtac

SEQ ID NO: 111981 - DNA, 442 bp, Glycine max
  Clone ID: PAT_MRT3847_72128C.1
gttttgggtgaaaatcttccagccctttagactgacagggatgtagattaaggatacaaggccttacctatcatttgtgctagaaatggttcattctgttaagcatatagcgcgcgagtatctatggaaaaccaaacccaggagtcgttggtatgtccttattccccttattttaattcaagccctcttatgaaagggggctcagaactatagcaccaagtcctacttcagggctgtaaaagaaggatagatgactagatagatgcagctccgggctcccttcactgtgcaaaccaagcatgcttaattacattcattattcaagacctagcattttcctgaaatgaaggacaaactggtagaccttctcaaggtctggcagaactttggcaacagattccctttggaaacatctgttaatccaagctgatatttttggtga

SEQ ID NO: 111982 - DNA, 330 bp, Glycine max
  Clone ID: PAT_MRT3847_72129C.1
ttaagttcttcctataatttctgccaattccttttcagatgatgctagaaagtgttttatgcaatgaaatataacttatttagatatttatactgttggataaaatatgagaaaaagtgttatataaaattcaataaagacaatcttcattttcgtctttttgtgtccacaattctttgttgttcatctggtaaacaactttctgtgatttctttatttctcatggttctgataaatatggtattatgccatattgccatccaacatataactgtgcaccaatgccttttggcatttcttttggaatattggtataatccggattccttt

SEQ ID NO: 111983 - DNA, 529 bp, Glycine max
  Clone ID: PAT_MRT3847_7212C.1
gtcgacccacgcgtccggatatgctaaggcattagagttaattcaggaattgcaacacaataaactgcagatggatggagtgatttatggaacaattatggcagtgtgtgcttccaatactaaatgggaagaagccgaatactattttaaccagatgaaggatgaaggtcacacgccaaacgtttatcactatagctctttgatcaatgcttattcagcatgtggaaactacaaaaaagcggatatgttgatacaagatatgaaatctgaagggttagtaccaaacaaggtcattttgacaaccttactgaaggtatatgttaaaggaggcttgtttgaaaagtcaagagaattattagctgaactgaaatctttgggctatgctgaagatgagatgccatattgtatatacatggatggcctagctaaggcacgacaaatacatgaagccaaactaatttttgatgaaatgatgaaaaaccatgtaagatcagatggctatgcccatagtatcatgatatcagcattg

SEQ ID NO: 111984 - DNA, 413 bp, Glycine max
  Clone ID: PAT_MRT3847_72130C.1
ggctcgagcttctcttcctttatgtcactttgctttccattattggctacaaaaggcagacggatacggcggtatgtggcaccgactgttatggggttggcattttgggcatcgattgggcctttggtggtatgatcttaaatcttgatcactgcactgtcggaattacaggaggacacataaacccggcggagacatttgagttgttcctaggacgcaaggtgccatagataagggcgttgttgtacatggtggaacagtgtgcacgctgctatatgtggtactggataggccaaggggtatcaaaaagcatactacaactggtatggaggtggtgtcaacttctgagctttatctatctatcaaatggactgctttaaatgctgaaataattgtttcaatcaacctttaat

SEQ ID NO: 111985 - DNA, 471 bp, Glycine max
  Clone ID: PAT_MRT3847_72131C.1
accactcgtacgtgacgacggaaggagacgacagaaaggtactcaattggcgatattgagaataaagcctagtttcgaacctgggcgctagtatcgtgctatatatgcgcaattgcaaaccccaaaacatttcctaaagtatatatctcaaactataagggcataaacaggctcatgttcaacacacaaggactcacctaccctatacgatatatactcaggttaattgctagggtgagagatttaagaatgacaagtgaagaaagggaatatgaggtactagatctaaaccttactaacattgtaataaaaattaatctctatcaacttctaaataactattttagaataatcctaataacgatctgtaattaataacaattattatctgtttacaatgtgaaaacgcctgagctaaactctctctctggatataagaaaacataccaacattcctttgcagttgattac

SEQ ID NO: 111986 - DNA, 2168 bp, Glycine max
  Clone ID: PAT_MRT3847_72132C.1
caagcacagaatgtagggatttacctgttttacctctaacttggagattgcctgctctctctgacgagcaaaaaacttcagcgatccaattctctgcatttcaagagatctacgcaaagcttctctcttggttagaagattttttgctaactttcttgaaggccgtttatagttttttccacggtagacaataacagcatggccctctttcagtttatcaactgaaactaaaattccaccactttctgtctccaataattttgcagtgttgattacttgactgaatagtttctgcattgtaatgaccttcactacttctctgtgtttccaatgctgatgtaggccttccaatacaccggcaaagattccacgcctgccaagcagtaaggaacttttcatcttcaatcctatctttcgaaaacattctctctcttcatctgtcattatttccaagtcaatatcctgctcactaggtgtccatgcagcatttaactttgataattccctctctgatctctctattttcttgttaagaatgaatgctctgcgctgttcctccttcaattccctctccactctacatatttctgcttccagttgaatgttcaaatctttgtttacattttttgtctcctcaagctttgtttggattttcctaaattttgttaaagttccacttgtactagtgtcttgtgtcacttcaccaatgggagaaaaggcttgaattgctttcatccgtgcaacttcttcgtgatgttggcaacttttaagctccaattctctcttttccaccaaagatgcaactcttcttggaaggaaatcatttcccctatagagtaatatgtaaaacttgttgcgcaacaacaaaactcctccagtgagacacttcagttcagtggccatcatttcattgtcaatatttggaattccatacttgatagcaatttttgctataagactcttctcccacaactttaagatagcagcagctaatcccttgagtcctttgttccttccaaggacaaaatgagttggtaaaggttgagcaagcttcctgaagtatgttagttcataagcagtttgtttagcactagaatgaggtggacaaagcctaaatggaggctgaaatctaggaacctctacaggaagtaagtcggcatctactggaagtggcttgtgcatccaccaatcaatgaaacgagggcgtaagccatccaacaatctattagtttccctctcttacagtgacccattgaccagttgacaattcacatcttggtgatgattgcatcctcggtaaaccacaagaaaatccttcttactcaaaacaaccaagcctcctgtctcaacaatttctcgagctctatccatgttccggcacaaagggatatcaaatttagtcatggcaagctcatttctcctccaagtccttttaatttgatccacaacatcttgtgtaactctagctttcttaaccttgatccacgttctcattctttcagcttcattcctcaactttcgaagcagcaccttatcaagagtcaactccgcagcagtgacaaccttttcccttttcactttcacaaaaccaaacttctcatccttctcccatggcattctcccccttagttctaacctcatcattttccttcaaatttttcaaatatcctccaaagttttcaacattgagggaaccaactcgagtctcatatgaattctgagtcttgtgaagcttttcaaccctctccacaatcttcttcattgccctcttccctcttacctcctttcccatcaaagctttatcagaaagttcatgtttttccggcttgaacttcttggatttggggttggagaggtgaaagagctcgtggggttggagaagaagaggacccttcttcatccatggaggaatgggggctttgatgggaacatcagaaggtgaagttgaagtgtgttgatgattatggccattgttggagtttgggggcagagaagaggaaatgtgaaagcgagaatatgaatatgaatttgtagatagagaaggatgaaaggaaagaaagagcatgattgttgctgctacctagaaacaccatacgaatacgatgatgattcatgaagcttagcaacccaacgttgagatattcaccaatattctagttattttgttt

SEQ ID NO: 111987 - DNA, 220 bp, Glycine max
  Clone ID: PAT_MRT3847_72133C.1
cgcctgctgtcacgcttcgggggacgcgtccgtaaacacgatgatagtaacgtatatactattgccatatgactcttgactctttgaggttgatcctttatacgtttatcagacagctttaacttgacaatcacttcttgtaacaaaaaattcctttaatgaagggttaacgggatcaacggtcaacaacgtatatatagaagcagcagtgatagctact

SEQ ID NO: 111988 - DNA, 266 bp, Glycine max
  Clone ID: PAT_MRT3847_72134C.1
atacgacagaagggacgcgcatcacttttcttgagacaattcaaaacaaactcaatgcacatttccccggtaaaggctatgtttggatattttgcgaattgaattgcacattttttaattcttagggggggaaaatgaagaatgtgttagtattttagaaataaaagtgtttttgaaaatctcaaacttgcatccaaacatgtactaattcatttagattagaaacaagtttgaggaaacaggagtggggttgcaaaaagtgcagc

SEQ ID NO: 111989 - DNA, 736 bp, Glycine max
  Clone ID: PAT_MRT3847_72135C.1
cacggagtcacactaccactagtttttttgttcctaacgcttgtttatgtttgggggcagatttccctgactgcgcaacctcgtttcgtttccatggcttcaacacttcagaaactgcttcgaaaaccatcacctctaccacccttcagattcatcactgccctcaacccaccgcaaccccaaaaccaaaaccaaaaccccatcctcactctcactcgcgaccctccccaacaatgtaacgctcaacccttcgatgatgcccccaccgtgatctttcccagtttcccctttggcttcttcccaagacccgtttctgaaagcgggtttcgcggcggcgatgatgccggggaggaagaagaagactctggaaccctttgggccgacagcgtgaagaagaagcggaagaagaagatgaacaagcacaagtaccagaagctcaggaagcgcatgaggagacagacgtagaaggtcagggaccagaaaaagcattcaactttatcaattcagttttctttttagtgaaactgtaatgttgtcgtctttgtttctattagttttttttttttttggtagtgaaaagaagaattgagagggaggggggagactgtgacatttagttggaggcgaattgttttggatttcttttttgttcactcttggttaatctaaatgttgttattgcactttaatttgatacttcttagtttagaataaataatacatgcactgcaatccc

SEQ ID NO: 111990 - DNA, 193 bp, Glycine max
  Clone ID: PAT_MRT3847_72136C.1
caaaatctaacccgctaatgctaactcgatccctcaaattatcttcacgcactctctcaaagtccacaaaatctgccctcttccctcagactgcctatgctttcagtcaatcatggaagcccaaggtccctaaacatgaattcctctagacaaatctacatatcgtttagctcatccgatctgggatcctaaa

SEQ ID NO: 111991 - DNA, 914 bp, Glycine max
  Clone ID: PAT_MRT3847_72137C.1
tggcagacctttcttgcattcatcttttctttctttgttgtctatttctaaaatttatacctcaaggcaacgccagcatgtttcacactgcattctgtgataacaaggaagggaactacacagcgaatagcacctacaacaccaacctcaacacccttttatcaagtctctcttcccacacagaaattaactatggtttctacaacttctcatatggtcaaaacccagacaaagtaaacgcaattgggctatgcagaggagatgttgagccacatgagtgccgcagttgcctcaatgattccagagtcacaattaaacagttttgtccaaaccagaaaaaggcacttctgtggttgaacactagcaaatgcatgttgcgctactcaccccgctcgatatttggcatcatggaaattgaacctagccaatccttgatgaacataaacaatgtaacggaaccggataagttcagtcaagctctggcgaacttaatgagaaacctcaaaggtgtagccgcatcgggtgactctcgtcgtaagtatgccacggataatgtaactgcttcaagttttcagaccatatatggtatggcagagtgcacccctgacttgtctgagaaagactgcaatgactgcttggatggggctatctcaaaaatcccaacctgttgtcaggacaagataggtggtagagttcttagaccaagttgtaatattagatttgaaagcgcaagcttctacgaaaatacgcctattttaaacccagatgtaccaccaccatctccagcagtagcaattcctccctccatcaatagcacttccccaaaagaaagcagcaacacaatacgaattgtcattgccatagttgttcctactgttgttgttgttcccctcatttgtctctgcatatattca

SEQ ID NO: 111992 - DNA, 393 bp, Glycine max
  Clone ID: PAT_MRT3847_72138C.1
ggctcgagcaacactatccctatatttcgctttaacacgctcacatgaactgatgttgtgtacccatgttggctttggtacaatccacttgactggggaagtgcatctcctgacaagatgagagcgttcagaacactcgacatcacgaatgggagcttgcccatgttgactgtgatcggcgcatggagccagctcatttgcactgtcactggctctattgacagcctattagctcaccttgcctatgctgttcatgctactatggtcagctgctgtcactaccaagtgatacaggttgacactactctatgagtgcaagccgcggatagacattcgagaacttgtgtaactgagttgtgacgcatacatgtctttagggaggagatcgtatgt

SEQ ID NO: 111993 - DNA, 459 bp, Glycine max
  Clone ID: PAT_MRT3847_72139C.1
gcatggtaggtgaagggtgtggttgtgacggcgtgatggtccgaatggttttgatatctgatagatagtggtggcggcgcttgcgatgatggcggtcggaggcgttgcggattagatctggtcgcttatggtggtttggtggtggtggagggtcggcgcacggttgattggaggtcgcgcgcacgggaaagactgggaagtcgacgtttttttttttttattattactctggacgttttttaaaataaaaaattaggtatatatcatgaattaaaatatatttaagcctcaaattaataagtaatattctttataaattaattatagctatagtttagaagaactagctagcctaatccgtgtatgtcatattctaaaagcaaccaattgggattttgcagcacattttgctataatgataataagttacgttgcataatccagaagtaaaatagctct

SEQ ID NO: 111994 - DNA, 325 bp, Glycine max
  unsure (1)..(325): unsure at all n locations
  Clone ID: PAT_MRT3847_7213C.1
attggtgtcaagttggcaaccattaaccatatgtgtgcatatgggctcaatcctggttttaagttctcgtctttgggcccattctagtcatttacgcaactgttggataaatggcacagggacacatngatttgattctacagcaactttgtagtttctatgacctttcgggagaattagggacaaactggagatgatcacactatacaaaatttcaatagtactattgaagtgctgctgaagaaagtgttaaggcaagatggatgttggaatgcacagcaaaaggagtgatgggcctatgtacagtgtttaacaacagacagtc

SEQ ID NO: 111995 - DNA, 342 bp, Glycine max
  Clone ID: PAT_MRT3847_72140C.1
tcggcttctcttacaggtggaaggcccattcgggtgggtacatttgctaataccattgtgcacattggtccagacatgaattcacggtttcagtttttgaagtaccactaccaacggtgatttaggtgaaggaaaaagactggcaatgattaaagccaatgtagcatgtgctgctgttggcttgacataaaggaacacttcaactccattgttggaatctgggctgtaaaaagacagatggttagatggggagtactcaggaaggatgtcttacgttgctaactacgttgatcagccccaggagaaagatttgttggagggaaattggtgccttgatattaa

SEQ ID NO: 111996 - DNA, 300 bp, Glycine max
  Clone ID: PAT_MRT3847_72141C.1
agaggccattcgagttggatccgaagggtgatatagtgaagcaaatattggcgaaggcgatacatctggcggaccaagtgaccaaagacgacgactgagccagctgcttcaagcatgaatgcagtgagctgaaggctaacacggagaatctggcggggctgctgcttcaggcggctcgtgcgagttacgatctatacgagcgtaccacgcgctcgatgatcgacgaaacaaaacacgtcctcgacaaggcgctcggcttggccctcaagtgacgcggcaacggcctcatgaagcgcgttt

SEQ ID NO: 111997 - DNA, 221 bp, Glycine max
  Clone ID: PAT_MRT3847_72142C.1
atccgctgcgtgctttggaagactgggatatgcttgaaggctacggtttgttgagtctggtgggctcgttcagacagggcgagtttactgtacaactctcctgtgggggtcgactgatacgaggaatgtcggacacatagctggacaataatgtggggtgggtacaacagtggcttcaggacctaccttgggaggctcgccaatggcaggggaaaggggtc

SEQ ID NO: 111998 - DNA, 455 bp, Glycine max
  Clone ID: PAT_MRT3847_72143C.1
aaaaacaaaaagttcctttgttttgaagggccaacctgttagctgaaagctcattggtggggaaaaaaaaatccccaaacctgctaacattttccggggatttttcagtcccccccccctggagggcatttttcaaaatcctcaaagaaaaaccctcctccctagacggggtttttaacttggaacatggaaaaacaaaattggggtccccattattttgaaaaaccagttgcctgtaacgaaaaaaacggggggggaaactttaattggggataaattccttataaatgggccatagctcatccttggttgaagcattttcccccatttgttttttaagaaaaaattcaccccccccaaatatttctcccttttttccctcccaggggtttggctttacaagggggggagggccttgcaggggcaaattccctttgcctccccggcccgctttt

SEQ ID NO: 111999 - DNA, 459 bp, Glycine max
  Clone ID: PAT_MRT3847_72144C.1
gcgacccacgcgtccgtacggctgcgagaagacgacagaagggcactgtctcaattaattctcctatttgcctcctaatttctgttcgctgaagcctctcttcctcgaacattctccttaattcttgcaatacctcatgcgtggtgatgaacccctcgtagctgtgctcaagaaattcaactcgtgcatcaattcctctggttgaaaccatgaatcattccctgaatcgagttctctgatagcaatctttggaatgtgattttattgatgaatcctccaaggggacagtgagttcctttgaggtagagaagaaaaacagaaagaacctgataggaatgttcgatagcctatcctctacccaacctctttctaagagactaaccaaatgccctctctctcctccttctattctatttatacaattcttacacaactaatcaatttacagcagacccattt

SEQ ID NO: 112000 - DNA, 291 bp, Glycine max
  Clone ID: PAT_MRT3847_72145C.1
gcggatcaggctcactgggaaaacaatttttacttgcagagatttggacctcttgggtggttattacacactagcaactcaatttacaaaatatctaccgcattacattaggtggcatctgaatacctaggggatctacattctcccatcttttatcactggtgaaactaaatatacgcggaattagtgtaacactcatattgccggctcatgttacgacggcggatacaaattatggactaaacacgagaaagaacttgctttgacagaagaggaaaagaggtggggtga

SEQ ID NO: 112001 - DNA, 399 bp, Glycine max
  Clone ID: PAT_MRT3847_72146C.1
agccaaccaacctactcctggttaccattggcatccttaatttttccggcttaccttatttttttttccggggggccaaaaaatgggcccaaattaaaaagggtcctattattatttaaaggctcttaaattccatttggcacctaattaccattggatggaggaccggttttcttaacctggaaattcacattattggctttaggggttttaatggttcagccttaaaccgtttctgacccttagcattttttatttcagtttgggggtccaccctttaatgggtgggttggggatccaactaatccaaatggctcttacggttggcaaccacaaggcgaagtttcggtttttgttttggggtggcatagtcctcggggccaccgacccttcctgggg

SEQ ID NO: 112002 - DNA, 391 bp, Glycine max
  unsure (1)..(391): unsure at all n locations
  Clone ID: PAT_MRT3847_72147C.1
tcatggatggttaagtattgaaatgttgttttgcttctgctcttgatggttaagcctcgttggttctgccaagtggttaaactttgaggtatagtttctacttggtggttaagctttgataatttcatggattaatagtttgattgagcttctgccaaatggttttgttgttgatttcgcttgatgattaagctttgatgcttgctttggactcttggaagaagattgagaaagtcaaagttagttgaagatttttagaagtttttgtttctgaccgatgtattttcagcatgtttaactatatttcaagttttcaaaattttttcatttcctttaatgttgatatattgntttctctaagttagaagtgttttcaacaccttccagctta

SEQ ID NO: 112003 - DNA, 435 bp, Glycine max
  Clone ID: PAT_MRT3847_72148C.1
tctaaatccttctttttccctttgaagggaaaccttaatcattctttttagtacttcagaagataagcaatgttccctcagagaatgttcaaccctcctcttcctcctactaaatatacttcttctttgtacacacgggttcctgcaggatcaatttttaacacacaacacttttctcataacacaaatcttcacatgcatatttagttcatagctttttttctctgtctgcactatcatatcatcaagtgtgtctctctgctgcttctctcctgcatcaccatcattttcttcaaatcctgaagttaggtccctttgatatttgatctgggtcaccttcttttttcttctgggaccaggtttcacctcaccctattttgcactgcttgctttgtgtttgtgactccggctcaccaaaatctcagaaatcaagag

SEQ ID NO: 112004 - DNA, 220 bp, Glycine max
  Clone ID: PAT_MRT3847_72149C.1
gtcgacccacgcgtccgaatgaatcagtgccatcatcagtgtgtagcttaagctagctacgctatggatacgttctatgagatgagagacttgatgaacagaaccattctgatgtatggctttcgcttgaaagataacgcatgcatattatcttctgtctaaaaaaacgcgtatgactttcataaaaaaaaaggttaaattattattttctatgatagga

SEQ ID NO: 112005 - DNA, 206 bp, Glycine max
  Clone ID: PAT_MRT3847_7214C.1
ttttgtgtgggatcacagaggattatgaaggcaacatgtaggtccattcggggcccaggatcattggagagaggggcctatagtggcatttcgcaaaaaagggatggggttcaacggtgtcgccactgcacgcggtacctgagctacggtactaaagtcgccacgagatgctctctatacagtcacttggttaccgtgccgcatct

SEQ ID NO: 112006 - DNA, 510 bp, Glycine max
  Clone ID: PAT_MRT3847_72150C.1
gcacgagttactaagatagcatttgaaaaatactttacttttcaaaatgaaactttaccctacatgcatgcgcctaaacagtttaagcctttatgactattctcatcatttactttgtaaaatgcaaagataggtatgttaacagtggcaaacttattcgtacctcaagggtggataaatgtttccccctcaatttaggaaaattacgtataagtaggtttttatattttatttcttatccttgaaattttgaatttaggttatttttggataaatttctttgtaaatacttgtagaaaaagaaaaaaaattattaatttttttcaatacgctaaaatcgattcattcactttagcttttgaagtatattatagatgatgagaaaaactcaatttgttttacattctcattttattttcctataagtacttttatttatttattttactttttttagtgtaaaaaatgacctactaaacctgaaatacatttgagtacaaacttcttttc

SEQ ID NO: 112007 - DNA, 482 bp, Glycine max
  unsure (1)..(482): unsure at all n locations
  Clone ID: PAT_MRT3847_72151C.1
gaatttcacgagtaataatttgattgattttggaaattttaagttttagatagctcatgagattcaattttctcacaattttcatcttattttatgacccatgttgatttgaacataattgacgcagttccatagttttcacgaaaattgaattagttaagttttagtgcttgaaaattcaaaattgtgtttcaaaattaaaaatgatcagattttttttaagaataaactagtaataaaataattacttaagaaattaatttatattttaataaaaaattaaattataacctaaaataaaataaagattatatgaataatttaacttaaattttgctagctgacacttcagctgtttttatataggcgttagtcttctctttggtttggccttttcaaacccaaccctcgcatggtatggttaacgtaacccanatcatatagaagacataagagattcagcaatacattgtcttcaccta

SEQ ID NO: 112008 - DNA, 423 bp, Glycine max
  unsure (1)..(423): unsure at all n locations
  Clone ID: PAT_MRT3847_72152C.1
gaaacgcancgccaaggagcncaaggannngcagaaggacccnccnacnnccagcagcgcaggncccgaggcggaggacagganncacaggcaggcaacaancaggggaccncccganagcccanacaccggcggcgaaaaccaagaaacaaagcacaccccaccggaggagccacacaaaccaccaaaggccgcacccaggaccaaggcaccccacccaaacancaacagcaacggaagcacacgccangacacncnaaaagaacaacggagcccagcacaaaccaaaacnaaggacccccagaccacccgcacacggaagacggancccaaccccgacgacccgcaagcgccagaaaccgcccacaagcacaagacngacagggccaagaacgaagccaccgcacgaagccggacacagaa

SEQ ID NO: 112009 - DNA, 353 bp, Glycine max
  Clone ID: PAT_MRT3847_72153C.1
aagatcatcatctctttttttataaggaaataacgggccgtttattccaggcgagggaacacccccattggtgctcatgtgcgcgacattctcttatttaaagcccatgatacttgatgaatgggccgcccaacattattcatcgcggatgtcttaacaggggccttataacccaattttattgccaatgacaccatcctaacccctcaaaagagaacgactctccctccggctaaacactaaaagagccaaacagtgcccgttctaatggaccacgacctaaagcactacgtataacacctcctggtgacacttgctggaggttggccatacctcaagttatccacactttt

SEQ ID NO: 112010 - DNA, 254 bp, Glycine max
  Clone ID: PAT_MRT3847_72154C.1
aatcgctcaatcattcagatgggtgtcatgagagaagtagttgcaatgatggagtttcatgctgcttaatatcaaatactctggatcatatcaatagctctaatgaaggatgcattcaggcagcatcagaggataatcatacacccttggaaaacatgttaattgatatgtctggattggattctaaatctgatcctttcgagtcaaaacagggaaagaaagtaaaaagaagacaaaggcagaggaaattatat

SEQ ID NO: 112011 - DNA, 320 bp, Glycine max
  Clone ID: PAT_MRT3847_72155C.1
attagatgatttcatagtcgccagctcatctcactaacttttcattcattttagccatacaggcgggtagtaggtcgacatgcatgctattctacggtaaaatccttacttaataccttacacacatagctgatagaaacgagtccgagatgagcaggcgactatgatctcgcccctttttcagccgattttctagcatctgcacgcacctatgcgagggcaccgtcgattcatactctttctaaaaggaagcccatttagtgttccccttattggggtcaaatacacgctccctttatgatcacaagcgtgacacctaa

SEQ ID NO: 112012 - DNA, 224 bp, Glycine max
  unsure (1)..(224): unsure at all n locations
  Clone ID: PAT_MRT3847_72156C.1
tgcttaggaaggngtgcgcatgacctattttgttttagatccacagaatccttttgtgggaaataggtgtatnnnaaatctgacgttccctcagtgcacttcctcgaagtgttaatagtttgcctctgtctatatgttgaggtgctggtgcaaagattgctagtctcatgagtatggcaaatgctgttctgtcagtgtggagttatttggttgtagatctcggc

SEQ ID NO: 112013 - DNA, 332 bp, Glycine max
  unsure (1)..(332): unsure at all n locations
  Clone ID: PAT_MRT3847_72157C.1
gtccctgtgttttngtcacgcgnangtnagctcgtaattcggctcgagctanacgnnantaaaccatgtaacagacnncngctcagtnagannnccgaattangngttcgtggtctccgnntggttgctacnagcagggcancancgaccggcctagctgggnnaggagnccacgggttggcttccttaanatanagggagatttttcntaacngttccnacaanntngggtcngagggccatgncgatgggntgngcngnntcgtgggtgnggtgngttccnaagtgnggnngttggnnangntgnggtggctttangnggatntgtagtt

SEQ ID NO: 112014 - DNA, 577 bp, Glycine max
  Clone ID: PAT_MRT3847_72158C.1
gaagcaacccacgtaaagtaattaccagttcgaggcacgaaggatggtggaaaacacaggacaaggaggaggcatatggttccagttgttccaccccaaaacggcgccgttcgcgtctcacaagacgctctttgtgttcctgtgggtggccacgctggcctcggtgttggtgtggcagaggaccaccatcagcgggtttcttgtgctcggcgggcgtccccgtgaggacgccgccgaagctaaggccggtggtgttctgtttaacggagttcggcggtgttggcgacggcgttactctcaacacggaggcgtttgagagaggcgttggtgccatttccaagttgggggataagggtggtggacaactgaatgtgccacctgggcggtggctcactgctccgtttaatctcaccagtcacatgactctctttcttgcgagagatgctgtcatacttgcagttcaggatgaaaagtattggccactgatgcctgcattgccttcatatgggtatggaagggagcatcccggtcctcgatatagtagtttaattcatgggcaaaatcttgtagatgttgt

SEQ ID NO: 112015 - DNA, 294 bp, Glycine max
  unsure (1)..(294): unsure at all n locations
  Clone ID: PAT_MRT3847_72159C.1
nttcggangngnangnaatntcggnatncggctngagnttntcttctnttttctncttttcnccccttnccatctacccncaccanggttttttagganaccntncatgcggtaagaaattcgggnccangtntctgggnggttatcnaanangagcncggaancgatctacaggattagtannngaggnnggaaannnnnaatttaactngttggatnaatgtgnntnacancganggntctggcggaaagtacganccccgtgcnggctnatgntgtnncctggnacaaagg

SEQ ID NO: 112016 - DNA, 465 bp, Glycine max
  unsure (1)..(465): unsure at all n locations
  Clone ID: PAT_MRT3847_7215C.1
naaannaaanacaaaaancnnngngngaactgggnagannnaaaagnanaaaaannaagannaanaaaataaaaaagngataggnaaaanagncnnggaagnntanagacaggncaaganaagganaatgttntgagngaagnataanangtaaacaagagcacanancctaanngacaaangacagancagaganccaaggagagagagagnagngtgngagccatacgatganaagcaganatacantagtnatgagngatagagntatgagaangangagngataganantgccaganggagagtanaacagnngagancagaaganacaagagagnagagantanaggatantcgtccnaatagtacaaggagtganancaanagagagnaaagagcagagnacgagatanagagtagngaaaaagagatnannacanagaaaggaganacacgatannnc

SEQ ID NO: 112017 - DNA, 445 bp, Glycine max
  Clone ID: PAT_MRT3847_72160C.1
cctccttggcttcagcaacaagctcttcctcccccaccgccgccaccaccacgatccctccctcaccctctcctacaccctcctccgccttccctccttccccgatctcgagttccccgtcctttccttctgtaatggtctcatttgcattgcctacggtgaacgatgcctccccattatcatttgcaatccaagtattcgacgatatgtctggctcccgacaccccacgactaccctggctactacaattcctgcattgccctcggctttgattccactaattgcgattacaaggttatcaggatttcttgcattgtggatgatgaaagctttggcctttctgctcccttggttgagctgtactctcttaaatctggctcttggaggatccttgatggcattgctcctgtctgttacgtggctggagatgctccccatggcttt

SEQ ID NO: 112018 - DNA, 379 bp, Glycine max
  unsure (1)..(379): unsure at all n locations
  Clone ID: PAT_MRT3847_72161C.1
attatnaananaaataaaagggtttttttttggggaaaaaacagggcaacccaaaaatccattttatttattcattcataaaccccttaccctcccttaaaagcaaaaaaatcccaatcccttcagaaaaaccaacccaaacttgggaaccattttccaacattggttttttaaaaaaaacgggttattttctcccgcgttttttaaaaatatccaaacacccaaacaagttatttaattttgaacccaccctgccccaagaaatgggcaagggaaaaatggtccctaacgaaacttacaaatgttaaaggggggcaaaaaaaaaaaaaaaaaccagggcgcgttaatgggggaaaaaaaaaaaaggtttttctaaccg

SEQ ID NO: 112019 - DNA, 2040 bp, Glycine max
  Clone ID: PAT_MRT3847_72162C.1
ccacgcgtccggcagccagtagaagaccgccagagttcttgtcagagacgacggagaaaacaaaacttcgaaaattcaattcaacttccaacctttatttaatccgcaactataaattaaagtcagagtcctacggaagaaaaaaaggtggcgaatcggaatcgagttgcaatgaaagcaaatggtgttacatggtggttatgttctatactagtttgcatagttttagtttgtgttcaatttgaagggtgtgtggcatccaagactaagaaaacggacgaggcatacgtcactcttttgtacggagatgaattcttgttgggtgttagagttctgggaaaatcaatacggaacactggatccaacaaggacatggtagtgttggtctccgatggtgtgtctgattatgccaaaagccttctccgggctgatgggtggatagtggagatgattagtttacttgctaatcctaatcgagtgcgtccaaagaggttttggggtgtctacacaaagctcaaaatatttaacatgaccgactacaagaaagttgtttaccttgatgcggacactattgtggttagaaatattgatgatcttttcaagtgtgggaaattctgtgctaacttaaagcattctgagaggttgaattcgggagtcatggtggtggagccatctgctactctttttaatgacatgatgagcaaaataaaaactactgcatcttacactggaggcgatcaaggatttctcaattcatattactctggatttcccaatgcacatgtttttgagccaaatttgagctcagaggtgttgagttccagacccattcctgaaatggagcgactatcaacactgtataacgctgatgttggtctttacatgcttgctaacaagtggatggtagatgagaatgaactccgtgtgattcactatacactgggcccccttaagccttgggactggtggacgtcttggcttttgaaacctgttgatgtttggcaggatgtaagggaacagcttgatgaatcccttcctggaacaggagggggccagaatcctaaagacagttttcttgtgaaatttctctttctgctaccattctgtgctttactcttctgctgctatcattcatttacaaagaatcaagggtacttcagtacactttgtagaagctcactatgtgatcaagtcagacacctttattataggattagatcaaatgggccacttgcatatactagtatttcggcatcaactaccaattctgtccatcagctcttaaatggtgctcagaacaaggttcctgcttatttgggtggcatttctgtctgtgtctgttttatggttgcagtggtgtctctgggactagctctcttgattgttcctcagcaagtgatgccatggactggattgcttttgatgtatgaatggacattcacaattttttttatattatttggaggttatatccatttgatttatcagtggggaaaaatagtgggatcacgagcagcatcttccttgtcacagcctgggtccgattatgattcagaaaaatttcatcagcgacagatatcatcttgtgattctgctacatggtactatggtttagggatggccttgttggccattgcagctccatcgttgccttgtctttttggaataactgctttgtttttaaggttaggtttgatggttgttgggggcataatattggcgtctttcatgacatatgcttccgaacatcttgcaatccgatcatttcttaaaggcattgatgagcgcgataatgctcgaaatagtagctcgtgtttcttatgttgatttgattgtgacaatagcaagtggtgatgtaaactatggtcgatattttcttccctttttcagcttacatatctaatgctgttctagtggaaaatgtatttaaggaatttttgtctattttgtctatcttctaacaatgtattttgccgaggtcctgttgtaatattattgttattctttcagaaaatgaccttattctattgaaatcacgca

SEQ ID NO: 112020 - DNA, 515 bp, Glycine max
  Clone ID: PAT_MRT3847_72163C.1
agagtaaaactaacgccattttatatattagtgtcatttcaatttctaattcgaatagaagttggtctcaagaataattaatgcatgttacatgatgtcatgaattttgaataaactagaataaaaccttatgttgctggagctatctcctttgtaatgattgcttacaaattttatcactgatcttgttgtgcaacttatttcatttggctaaaaatgacctatatctggtcatttgttgggttgaaagaaagagcagctgaaattgtattgcagtaactagtaactaacaacacactattcctattatcctcctcttatgctgaatcaaattttgaagaatcataactgtttttttttttaatatactttttcggtgtttctcagctccaactgaatctattcaagtccagttgtttacaaaacttcattgtctccatgagtgtttaggtccaatcttgctgctgcaaagtaagaaggcaggcaacctataatcttgagaaactttttcatcc

SEQ ID NO: 112021 - DNA, 187 bp, Glycine max
  Clone ID: PAT_MRT3847_72164C.1
ggcaaccgctttggtgttggagatcgtgatgaccttcggtttggtgtacacagtctacgccactgccggtgacccgaagaagggcgatgggggaatgatagctccgatcgccattgggagcattgggggcgctgacatgggagtgggtgagggcgtctccggagcgaccatgaaccctgctgggacg

SEQ ID NO: 112022 - DNA, 316 bp, Glycine max
  Clone ID: PAT_MRT3847_72165C.1
gctgagaagacatttccccaacacccttagtcttcttcctcatcgtactctgagaggaccaagccaggagagcacttttagtccgatctctttgcagcctctccttctcttgcacacagtgagaggtaagctcgttgagggaccatttggccttccaagtgagcaggacgcgagatcaaaaccatgtgcacgagtaggaccttaccaacctctaactcaagtgacttgagttttgatgcgagattgaacatctcattagtgtagacccttatggtccctttgcctttatacttcatggaaacgaccggacgcgtgg

SEQ ID NO: 112023 - DNA, 205 bp, Glycine max
  Clone ID: PAT_MRT3847_72166C.1
taccttggtgaacaacaactaccgatactctgacaacctcgaatttggcgatgccctaccagtccctgctggaaccacgtactatgtgggtaaccctgactcccacgataatcactgaatgataagacgcgccatactctgtaacaaaccctgtagatttgagagtctcttactattcttcactaaagactgacactcctactta

SEQ ID NO: 112024 - DNA, 174 bp, Glycine max
  Clone ID: PAT_MRT3847_72167C.1
tcttttttttttttttttttagatcacatcaaccaattttatggtataattcgatcctttaagatgtccatagtgatacacccataacgtgtcacccctcacaatcccatcaatgtagggagccgggcgctgctaatggatcacaaccatctgtgatccagatgggtacgacac

SEQ ID NO: 112025 - DNA, 513 bp, Glycine max
  unsure (1)..(513): unsure at all n locations
  Clone ID: PAT_MRT3847_72168C.1
atttgtttaattgcaggttggtcgacgtcgtgcagctggactttggaattgggaatattgaatttttgagttcgaagctggcatactttaaatttaacaagaggcagaaattattgacatatttagataccctatgccggaaggaggactctttcgtatgaattcggaaacaatattgaataacttcacattaaataattagtaaatgataaataatccaattttaagagtatgcaggaaggagcacaatgtcgtgagatcagaaacctggcaaaagtaggaaaaaagtaattattaaatttaaagctaaaatatcccaataataaaagaaagaaattttcaaaggtggaaactttgatttcatttgattatttgaaagtgttttttggtcaggaacttgtttatgtaaaagtgccagctagctggacagctggctatgtgctttgcgattcattacctctttcagaataataatgctctataattntggtaaaaaaaaaaaaaaaaaaaaaa

SEQ ID NO: 112026 - DNA, 272 bp, Glycine max
  Clone ID: PAT_MRT3847_72169C.1
gccgatcccgtcgacccactcgcaaaatattgccaccccaatttgctttatctatactaacacacaggtggggtagatttctcagctgaacatgcttcatatatgtcattgctcacaactgaagcttgcccacacgcaaagtgctggtggaagcaaagaaaaggctcttgatgatcctgaggtgcaaagagaccctgtgagacgccatctagaagggggggaagatgagcccacgccacgccgacagacttgggcggccaagaagaaggggt

SEQ ID NO: 112027 - DNA, 551 bp, Glycine max
  Clone ID: PAT_MRT3847_7216C.1
aaagaggttgagagtcatggcctctataaccatgggctcgaggctgcagatatgatgtatggtcacaaaaaccatcgttatgcagaaaatgatagtgcaacagataacacatcatctgagagtagctcatctttgcaagatcgattgctttgtcaaggacaggatccgtatgatatggagccttctagtcatgtaacacctaatggatctcttctgcctcccaataccaagggtgcaaataacatgggacataaaccatcaggatatttgaaagtgaagggagagatagagcatgctgctattactgctgttaaaaagcaattaggaaagcattatcgggaagatggtccactacttactgttgaatttgatacaattcctcctgaggcatttgaatgccaaattgctgatctagctaatgaagcatactatgctgcaaatcctgctcttccaaattctccagaagtctctgcagtgaaaaaacagtccagtctcagttctagatatgattcatattttaccaaagtcagttgccaagattcacatatgga

SEQ ID NO: 112028 - DNA, 378 bp, Glycine max
  Clone ID: PAT_MRT3847_72170C.1
ccacgcgtccgaatttattgttttgtttgtatatctcaactagcaaccttagaactctgattgtagtaaaatataagcatcagtgtatctgtacacatgaaatattatgaagagatattaaagggtcttcccgtccccgggcctgaggcataagaaggaagctgctatctaggacctagccattgttgaggattttgaagaaagaagttacacaagtatgatcctaagttttttcagaatccactttaatatgtagccttaagaaaattttggttagaattctttagtggaatgaattagctaaagagacaataagactactttgtacttagaagtgagattatgaacaataattggtttctttctaaaaaaaaaaaa

SEQ ID NO: 112029 - DNA, 263 bp, Glycine max
  unsure (1)..(263): unsure at all n locations
  Clone ID: PAT_MRT3847_72171C.1
aggaatctcaaanccttcatttttatgtacctaatctgtttttatctatagatggcccaaaaattatggggggggaatctccagggggggggggggcatattattccccatcttgttgctgataatcatctatatcagcttcaatatctacttattcaggagtcacggtcattttaccttgacaaggcttatgattcctatgcttgtcgcataaccaggatctttcaaagtagatacactagactttttctccaaccagcacc

SEQ ID NO: 112030 - DNA, 600 bp, Glycine max
  Clone ID: PAT_MRT3847_72172C.1
gcgcttttctcaaagcacggcctcacccaaacggacatgatagcgttatctggggcccacacagtgggcttctcgcactgtgaccagttcgcgaaccgtttatattccttctcgtcctccaacacggtggaccccactctggaccccagttacgcccaggacctaatggcggggtgccctaggaaccccgacgccactgtagcggttgccctggacccacaatcccctgcggccttcgacaacttgtattaccaaaacctgctgtcggggaaagggttgctaacctcagaccaggttctgttcgaggatgccacgtcacaaccaactgttgttaggttcgccaacaacgttgcggattttaacgatgcctttgtcgcagccatcaggaagcttgcaagggttggggtcaagactgggaatgatggagagattcggacagattgcaccacattcaattcttgaatcatattactttaacctataagaaataagttttagcataaaatatactaaattttttttcatataaatatatgggttaatttctgaaagtggatattgatatattgtttaataatgtttcaattgtgtttgatgaac

SEQ ID NO: 112031 - DNA, 122 bp, Glycine max
  Clone ID: PAT_MRT3847_72173C.1
tacggttgcaaaagaccaccgaaggggggtgtcgaatgtgtcaaaacacttcaactttacgctccctcccgaaatatagggtccatgagcacgcacgcttgctatcaacgctatagatggtc

SEQ ID NO: 112032 - DNA, 433 bp, Glycine max
  Clone ID: PAT_MRT3847_72174C.1
aatgtaatgagtgatataactgagtgcaaactgcgcatggtatggggttatagagtaccgactttagaaggtttgcagatcacggcttattttggaaaaatgacgaaagttgaatgacggctagggctgagaaatcacctgctcttatcgtttcagatgcgtttgggttattataagcagaggctggtgatcttcaatgaccgtgttacctgttggctatagaccaccctttttgagcatatgctgggatcttggctggaacctgggccctgctgaggtctcagcatcctctgcagttcatgggttttgtaaaggtaagggggcctgtaccccatgtctgaatgagagggcacactctgaactttgaaatttcgaaagactctagctggagcggcgatgctatagatctgtctgtccatctggaagggcacca

SEQ ID NO: 112033 - DNA, 292 bp, Glycine max
  Clone ID: PAT_MRT3847_72175C.1
caagagaaacaagagctttttggaaatataaaagaaaggatattttctcaaaccgaagcggggtttaaaaaaggggcgcaaagtgtttcaccgggtttttgggggacgggtcaaaggtcatttgccatttgaaaaaaaaacaaggggtttgggaaaaacccattcattccgcgagggggggctttctcccctaaagggtgttccccacttggtataaaagccataaccgggggcccactgcggggggggaactttcggattttttttggcacttaaaagcctttcatttggg

SEQ ID NO: 112034 - DNA, 243 bp, Glycine max
  Clone ID: PAT_MRT3847_72176C.1
gattaaccagatatacttggtccttttgaaggttagagagggctacaatacaaacagggggcagctacttatgaagatgtgaagcttttgggtcttgcgggacgaccacttgtgtctaatgcacgcacctcccttattaatcaggcctatgataactcactgtctacaataccatgtgacttcgtgattgatgtttatttgacaaccataaacaatgagaatgcagatgcattcattcctgac

SEQ ID NO: 112035 - DNA, 313 bp, Glycine max
  Clone ID: PAT_MRT3847_72177C.1
atcagacaggagatagacgaaatggaacctttccagctccataactctacccaacactcctccgtactagcgttgcttcgaaaccctaaccctatccatcagattcctacgttcgcctccaacgccaatacactctatccaactgtcatatacagtatgatcccaatctctctttgagatgaatatcaaaaacacacaatctcttttgtgggagcgaaactcatcaaagcaatttcacactgatctgtaacaacatatccaacagctgcaggaacacaagcttttgtcatattcatatgtaaaggcactacat

SEQ ID NO: 112036 - DNA, 372 bp, Glycine max
  Clone ID: PAT_MRT3847_72178C.1
tgttcgcgtacgtacgcctttttttggtttattggtggtggcatatgatgataccttggtaagcgacactcatgttgctttgaataacctaattgatctcacacgtgtgcgttgctcttcagaccagaggttcaagcgggacggagatggttatatttgggtgccaacagcaactgatggctacaatacctgaggggagggaggaccagcacacctgagaagcctttagttggcaaaatgaagtgtggatggtcaaagctcacacaccagtgtgagataagcttatggatgtggagaccagacaagagcattgatgcaaaaggttgtaatgtgtatgaagcgaggccactcaatagagggactcaagctcct

SEQ ID NO: 112037 - DNA, 361 bp, Glycine max
  Clone ID: PAT_MRT3847_72179C.1
aaaaaaaaaaagggattttttattttactggatacgcgcttttcggatgaattcaaacctgatagaggacacataagtttgacttggcatttacatttttggtgaaaataaaaataaaccgcccctttgaatattggggctaactttctaacatataaattgataaaaattacccattttggtgaaaacgaaaaggaacttttttttttcaaatacgggggggaaaaaaattactacttttttttgcctgaaaagggggggtttttcaattgttaaaaaaaacttccattgaaaaaaccttggatggtttttttttgcagcaatccacttttatttttaacgagttggtaaaaaatttttt

SEQ ID NO: 112038 - DNA, 325 bp, Glycine max
  Clone ID: PAT_MRT3847_7217C.1
tagtaattttttttttttttggacaaaggaaacatgatcacttgcataaaaacgaaattactatgcataaacaaacccatttacaaaccaagggaaactgggaagacgacccccttagcgtgagcctcttggcaccactcgcgactctggattaccgttacatcaatgggttctgaccccatggaaaaaaagcaggtaactgtctaatttcgaagaaatgtgacgacacttcaacatgtataacaggtaagggtatcctttaatatcaaaccatctgctgcaacaggagagtgaaatttaaagggaccaaaaattccgggcataa

SEQ ID NO: 112039 - DNA, 309 bp, Glycine max
  Clone ID: PAT_MRT3847_72180C.1
agaacatgatgtttgatgtatccaacggtgtctattacttgatccaccaacccgtgggccccgatttcaggcagcttatctagaaggtgctagtgtaggacagctgcggtggagcctctggtaattttaatttgtagcggagttattatatacccattagagagttcttcttcgtttctctctttctttcttttttcattctaattctgttagggaatggtttttttccccgactcataattttttagtttatgtagactggtctcatgaggactcttattatttcttaaaaaaaaaaaaagaaaatac

SEQ ID NO: 112040 - DNA, 263 bp, Glycine max
  Clone ID: PAT_MRT3847_72181C.1
aaaacaattgaagttcttctgatgcttataaactctgataggcacagtacatactttaaaaacaaggcacctctaattggaggcgctaaaaccgtcaaaaccaccagcaaaaaccaaatgggggggaaccggagagccaaccacatggttgcctttcaaaaaacagaagtccaacgttaggacaacagagggcgggggtcctccccggctatgggcacttaaaaggaacaggggccctggacaaaagccccttcacaaagggg

SEQ ID NO: 112041 - DNA, 217 bp, Glycine max
  unsure (1)..(217): unsure at all n locations
  Clone ID: PAT_MRT3847_72182C.1
ccnactagnaacaaaacgtacncacgcgtagtaagctcggaancagcctctagtcgcggncgcagnttagnnanctcnactncccgaacgttatntctggacngntnggtaaaggcgnaanaggnntcnnnngatttagnagaattagacgttngggtaanaaaggngatngccatnnncngatgaaaanctgatccgntcaaagacccttcattac

SEQ ID NO: 112042 - DNA, 114 bp, Glycine max
  Clone ID: PAT_MRT3847_72183C.1
tttttcataggaagattttctttgttgatttgactgtgttacatcaggtttttcattccccaagaggaacatttcttttgagaaagggcttgggtcacaccaggtattaaattc

SEQ ID NO: 112043 - DNA, 729 bp, Glycine max
  Clone ID: PAT_MRT3847_72184C.1
ccggaattcccgggtcgacccagcgtccgaaagccacacaacaaacaacaagatgaagaagccaccgattttcgaacctcttcaaattttccttctcctactaatcttctatggcagcaacacaaaagcagagaagcaaacaacccacgaccatgcaaacaaaaagacctacataatccacatggacaagtccactatgcccttaaccttcaccgaccaccttagctggttcgactcctccctcaaatcagcgtccccctccgcagagattctatacacctacaaacacgtggcccacggcttctccactaggcttactccagaggacgcagacacactttctaaacaacccggaatcctctccgtcatccctgaactcaaatacaaactccacaccacaagaaccccctccttcctcggactcgacaaagccacaaccttgttacccgcctcggagcagcagagccaggtcatcatcggagtcctcgacaccggcgtctggcccgagctcaaaagccttgacgacacgggcctcggcccggtcccttccacctggaaaggccagtgcgaaattggcaacaacatgaactcatcgaactgcaacagaaaactcgtcggagcgaggtttttctcgaaaggctacgaagccgcacttggacccatcgacacaaccacggagtcaaagtcagcgcgtgacgacgacgggcacgggagtcacacgttaaccac

SEQ ID NO: 112044 - DNA, 301 bp, Glycine max
  unsure (1)..(301): unsure at all n locations
  Clone ID: PAT_MRT3847_72185C.1
cccacgcattcgattgcatatgcgaatgatttaccatgtacctgccatatgcatacacacggcaagagtctgatcgagtagaccatcaaccatgatagcgactgctcttacaacatcnacatcaaagatgataagatccaggacccgctaaggctacccctgtacgagaatcgtttatattgcttcggaaagctgcttgaccactggctgtaccctagactactactgcctccacaaggatagatgtctctaactcgtcctccgtcgccgcaaatacatgcagatcctaatggatacactt

SEQ ID NO: 112045 - DNA, 407 bp, Glycine max
  unsure (1)..(407): unsure at all n locations
  Clone ID: PAT_MRT3847_72186C.1
caaccaggacagnacccccagaagggcnaggaaagncggggcaagggagaaggcagcaacaccaggccaagaaggaccaacaaaagcggagcttttttacaaagggggggacacaccacncaaagacncaagcngagcaaaccacacgcccgggagcgggacaggccccggagccnnngcgcccaaancaggggcagaaggnngaacacncncgaacacaccganaaccncacccgncncaggcgngggncnaggggacacncaaggggaancngcccnnggaagaagaggcacnnnnanngnnnnccnnggcaagnncnnccacaaccccncnnccaccagcaggcaaagcaacggcanggncanaaccggaggaagcaccncnnncccggggggccaagaaagag

SEQ ID NO: 112046 - DNA, 248 bp, Glycine max
  Clone ID: PAT_MRT3847_72187C.1
tgcaacagctccatctgtctctgcttcccaaatcgctcccgaggttgtcaccaacgaaggcctcgtggaggaagcatgggagattgtcaacgacacctttctcgccacagatgacacttggcagctaagaaggaagctattttgagcaattctattcggacaagatcatcacacgaatgctctccagcttggccgatccttatactcgcgttctctcccctcgtgaggtatgacatgactggtgttgg

SEQ ID NO: 112047 - DNA, 322 bp, Glycine max
  unsure (1)..(322): unsure at all n locations
  Clone ID: PAT_MRT3847_72188C.1
acgaggaacatgtgggaactactttttgggtcaatatgttgatgtcttctatgcaaactgattactctggattcaatttttccttcagtgacctaatctatggtaattttaccattcaaatggattacatgctattaatttgtctcttgttttttagtttaaggttttgcagtacttaatttgttgagtttcccatatcacatagttatttcatgtagaacttgtctactcctgaangaaatgctactctantagtctctaataataaaatttttattatcttctttcataaataataatatatcataataaataacctact

SEQ ID NO: 112048 - DNA, 242 bp, Glycine max
  Clone ID: PAT_MRT3847_72189C.1
tcggtttgaggcacagggccacttactgtctacaacaggacctcacaacccattcgcgtattgggcactggtgccgctggacaaactggctattctctgggtctgccaatggccacaggggatgtttacggcagagatcatcccatggacctcgcccttgtagacatccctccgcttactgaagagctcaccggcgctcattactaattggccgactgagcacttgccaacctattttgtga

SEQ ID NO: 112049 - DNA, 1698 bp, Glycine max
  Clone ID: PAT_MRT3847_7218C.1
ccacgcgtccggggaaaggagaggttaagattgatatgatgagcgttaccaattccaatggatatggtggtgttcccagtgagttgcaaagccagggcagtgagcgtagtgacgttcatgtttttgagggtgggaatgctactatttcaatccaggttcttcggcaagtaacggataatttcagtgagaagaacattttgggtaggggagggtttggggttgtttataaaggggaattgcatgatggaactcaaattgctgtaaagagaatggaatctgttgcaacagggagtaagggattgaatgagttccaagcagagattgcagttcttagtaaagttcggcacaggcatttggtggctcttttagggtattgcattaacggcaacgaaagacttttggtgtactagtatatgcctcaagggacattaacgcaacacctgtttgattggggtgaaaatggttgtgctcctttgacttggaaacaaagggtagcaatagctttggatgtagctcggggagtggaatacttgcacagcttggctcagcaaagcttcattcacagggacttaaagccctcgaacatattgctgggtgatgacatgagagccaaggttgcagattttggcttggttaaaaatgcgccagatgggaaatattctgttgagacacgcttggctggaacatttggatatctagcaccggaatatgcagctaccggaagagtgacgaccaaagtagacgtgtacgcatttggagtagttttgatggaactgattactggtagaagggcattggatgatactgtgcctgatgaaagatctcacttggtttcctggttccgtagggtactaattaacaaggagaacatcccaaaggcaattgatcaaactctcgatcccgatgaggaaaccatggagagcatatataaagtggctgagctagctggccattgcactgctcgtgaaccataccaaaggcctgatatggggcatgcagtgaatgtcctgggtcctctggtagagcaatggaagcccaccacccatgaagaagaagaaggttatggcattgaccttcacatgagccttcctcaagctctgcgaagatggcaagccaatgaaggcacttccacaatgtttgacatgtccatctcacaaactcaatcaagcattcctgcaaaaccttcaggatttacagactcctttgattcaatggattgccgctgacaaaaaatgataaacaggacaacatcctatttcttctcagttggaaggacccagatgagaacgttgttaagtaaagctgttctgatctggcaacatcacctaattgtgtcacaatttatttatttttttaaatgatgatttttttatgttcttgcaatctctatttgtacaagtctgatgtcctttattgaggttttccaaagctaacggattggtgagaaagcacatgcggtgggctccatcgttacacatgccatgatttgacacaatctagattctactcacatgccatgccagccaaccccaagctttcggtggtggaagctccataagttatgacttctgcgcaaaaatgttgagcatatacataagttaacttaatagctatacatcttaatttactattttatacacaatttgttacatttcatgtataaaatctttatgcaattattttttctttgggtttctt

SEQ ID NO: 112050 - DNA, 1311 bp, Glycine max
  Clone ID: PAT_MRT3847_72190C.1
aaataagaataaaaataaaatttccaatttttgagtctgagttggctaaaagtagaaacagagtaagttgctgagcacgtgtggcttgcttggacgagagtgagttgcagtgcatagtgattgagagcagaagaagctgcttaagcttaacttaaatgggttttagaattagcggttcctcctcttcatcatgcttttgtttgcaacgtacgcttcttcctccgttaacagcaatagccacttccactcgtggcttcaagaggaggagtaattgcataccgagttgttcagtatcttatcgcaagtttgttgagtttgctttggatgaaaccacactccacactcacttgatcccttcgcctttacaggaaaagtacaatttcatgaattccaaggatggtaaaggaactcttagtatgctatcatttgaaggtgcaaaaattaggcttctacgaagattgatcattgagacagaaacaatgcaggttttggattttactgtctttcattaagcagaatatgacatacccatttattgtgagtactttgagacgtcttttaaaaaaaacattcgtctgttgcacctaaacccttagctttggctggaaaagttgcgttagtcaaattacaaggatgttaaagggcggattagtctcctactataatcaggtgagaaatatcagtcttgaaggaagctcaatcattaagccagaaactatttttcaccaattgttttctggcccatctaatcatcaaacctagaaaaatgttttattttgtgtagtgcattaacagaatattacaatgtgtagttgcaatttgatatactacgccgataaagagttaaataaatctcagaatgtcaacaatatcgaaaaacaccttggatatcgcccttggagtgctggaggggatcctatacgaggtgttttgaagaagctgattggtgacacacttgccaaggatatgctgagaagctttctctttaatggagtcgatgaacttggaagcaaaacattcaatgattattttccacgctactgctgtcgtgagggaactcttaatagacgaggccatgttgttggggtgtcctatgaaaatatgcctttgtgaagctagatatctattacaacaataacaatgtgaatgactttgtctcgataaactcttgctcacatatataatataattatattaaggcgtacaccttgtcgatatttatcgatattagtaatcttcttgcatagtatatatcttgcgtgtttattatattaagactttatattagtagtaataatgactgatatcctc

SEQ ID NO: 112051 - DNA, 225 bp, Glycine max
  Clone ID: PAT_MRT3847_72191C.1
gctcggaattcggctcgagcgaacgggtggtatactcacaaacaaatatttcactgattcaccgatgcaactcaccagcggggtactgagggcggcgaacaaaccctcatgaccgttattctttaaaccccgattctgctccaaccccaactcgtccgtagtcaactctctccaatgtcgtggccttcatgattttagcatggggttccgtgtgcaagcagctct

SEQ ID NO: 112052 - DNA, 105 bp, Glycine max
  Clone ID: PAT_MRT3847_72192C.1
agcactctttggtgttctctctgatactctaaattatactgaaaactctatagtgggccccgcatatggccaacagtatcgtccacagaaaactcattaaggaaa

SEQ ID NO: 112053 - DNA, 398 bp, Glycine max
  unsure (1)..(398): unsure at all n locations
  Clone ID: PAT_MRT3847_72193C.1
ggctcgagggctattgtagcccctctcggaggtcctaagggagaaatatcttatgctcgggagcaagaagcagtttggttcaaaggcaaacgctttacaccgaatttgtgggctggtagccctggagaggaacaaattaaacagcttaggcatgctttagattctaaaggtagaaaggtaggggaggaatggtttaccacaccaaaggtcgaggctgcattaacaaggtaccatgaagcaaatgccaaggcaaaagaaagagttttggaaattttaaggggactcgctgctgagttgcaatacagtataaacattcttgtcttttcttccatgttgcttgntattgccaaagctttatttgctcatgcaagtgaagggagaagaaggagatgggtctt

SEQ ID NO: 112054 - DNA, 263 bp, Glycine max
  Clone ID: PAT_MRT3847_72194C.1
tttttgatcattacaatagcaactatatatgataacaattctaatgttcaatttaataaaaaaaacactccttatagaaagaaatcctttaattccttttgcaactatctatggagttcacaaggttatggcatgtctggatgccacacttagctttcttgtttacatggatttatgctgtgaagggggctggagctactcctacttcaggagttggaactcttccagagacaccaagcaaaggtgcctctggcgcatttcta

SEQ ID NO: 112055 - DNA, 1145 bp, Glycine max
  Clone ID: PAT_MRT3847_72195C.1
gtaaagaaaatttcttagtataatctcgactcgagcaatgagtacatgtgacaccacatgtcgtttaccgtttttggttaacggtcacgtaaacaattaacggatcccaactaatggcaaagactaaaacaaaaagttaatacaagtataggaattaaacacgggcatacattgtatcttcaagtgacttaaccaagggcctagacttttggtagaactgtcaccctctgcgagggttcagttcctcaaatcttgtatttatctagcggtctaccatgtaatagttccatctcctacgtgcatagaacacatttccctactcaccaacaaaaattgctcattctattatttaccccaaaaaatgcttcttctattgctaaagagaattctacgtccttaaacactagccagaatttagatatttccttgcagcaatgatactgtaaatccgggcctgtagttgatggacatcaagaatctcatgaagtattcttctggcatctcagagtgggaaaaccaccttagcatgtttcttaagctcctattcacataaagtttttttccacaaccttcttgagcacctccaatttttggatgacctctggattcaacagatctcttgcttccctaatgagggtaccttctccactcaaatgataagcatccaacacactctttatccatgtgtgaagcttctctggagtcgtgtacaagttatccacatccgttccttcaagttcttctccaggagtaaatgcatctttgagggcagatagttgctcctcaggatcctcaattcgtataagatacttgactattctaatctcttttggcacgagtctctgaagatttcccactgcagtcttgtataaatgatagaggatatcttttacctcatctttcatcatgttcgactccttggaagctgaccaagctttggtgatcatcaataccaatgttgaatcaagttcttttttttcagccaaattgtctatcttcctgcaggcagcatcaagcgaaggagaattgataatatcttgaaatttcaactctgcagcttgcagcttttcaacgctttcagttgcagcatcataggcttgtacagctgccaagcattattcccaagctttgccaattcattttgc

SEQ ID NO: 112056 - DNA, 615 bp, Glycine max
  Clone ID: PAT_MRT3847_72196C.1
gggtttaaaaacggttttgcataggaaaaattgaaaaattcgcaatagggttttcggttacccccattttgaaagccatgtatataaacccttgctatgcttgttacgcactcccacgttctaaaactgcaattggagctcgccacagcaactagaattggaacaaaccctatttctcttgtcaaggcagaacaatgtcttttgatctcagtgattataaaatcatcaaggaaggagaagctgagattcttatgcacgcaaagaatgaagtcttctacaacaaaactcaggtcaataacagggatatatcaatcgctgtcttgagaacatttatatcgaaacggaagcaagagcatgaggcatatttgtccaaaagaacaaaaggggcacaaaaggcatctgaaaatggtgattcttctgaattggttaaggaggaagtacctgacacaactgcacaagaatatcataaatctaatggggaatgcgaagtagaggaagagatatctccagaagaacgatgcagcaccgtggaagaagtttcagttaaggtcactgaagaatgcagcaccgcagaagggcacaccaatctttcagagggaaaggggaagaggaact

SEQ ID NO: 112057 - DNA, 417 bp, Glycine max
  Clone ID: PAT_MRT3847_72197C.1
aaaaaaaaggggcaagcgaagcaaaaccgggttttaaaaaaaaaacccaaaaaaccaaaacgcagggcctaaccaacgaaaacaaaacgggggcaacaacaggggtctcgattccaaaaaaacccgaaaaaacttcacaggtaaggggggatcctaagggcaaaaggcccgcctatgggcaaacttattctaggacaaaaaaatttaaacagggcatgggggccttaaaaggggaaaaacaaggggcattcacaaattccatcaagcaaggggggggcggaagttaaaaaatggaaccccgcaccccataaaaggttacagggggacccaaagcccccagccccaaaaatttcacctttcacattaggggggaaaaccatccccaaaaaaaaccaagcctttttttccatcggggct

SEQ ID NO: 112058 - DNA, 610 bp, Glycine max
  Clone ID: PAT_MRT3847_72198C.1
gctcagaaattggaacttcgattataagaaacaccaaatacaaagtcaccgaaaataaatattattccacacgatacaatttccataatcccaaaaaataaaatgccagattctgatatctaatttgatgcaaagtgccttaatcttccctcagcaatttacctagttgttaattgagaaacaagcacattttctacttttactcgccactttttaggttcttcatcgtcttcctgattgagagctccattaattgcttcaggacccaaaagagagacatgcttgcttgtaatttgacgtcctgccctaagttttggaccccagtgtctttcaggatttggaagaaagcgcgcaaccttcttagcttgtgccttgctaagagatgctacagctcgagcaaaattagcctgaagaacaggttcctttgcaagtatgatgcttcctggttgatctgctggttgaggcttcacaggatgattttttacccagcagcgcattatatcccaaataacatccatggggtgcatctgatttaagtcccaatggattaacatgagttccagatatacgatagcctgcattgatcactgcagaacggaaataattgctg

SEQ ID NO: 112059 - DNA, 412 bp, Glycine max
  Clone ID: PAT_MRT3847_72199C.1
tcgaaattttgtgcatatgtttgtgggtgtatccttagtggcaagatataactcgacacatgtgaggttgtgaaagttttacgaataaagaaaacatagtggttatatcctcatcatcttgcaacttgcatgccctattgtaaaaacaatcactagcaaatgatattgggtatcgataatggatgtgcttgaccactttaccatatggtaacctaatcttattttgaatagcttgcttcaaggatcaagtgacatgttccctcggagttgaactatttttggttcactgcttacatacattgacctatgttgagttgttgtgatggcaccattgtagtacacaatcacaatggttggtgatgaagtcatggttaaggtaatagtaaggttgagatcaaaatatttttaggga

SEQ ID NO: 112060 - DNA, 222 bp, Glycine max
  Clone ID: PAT_MRT3847_7219C.1
attaatagccggaattggggaaaaaataatgtgcaactaaggatagctaccaggatagaaatttaacaaggcagaactctaaccgtgcatgtcataagagagatctgtaaaggtaattcaaggaaaacgtcacatatgagagtcagttgaaacctaacgaactgattgagagacatgccaataggcgtcagtaggatgaggtggaaagtcaaagcaccaact

SEQ ID NO: 112061 - DNA, 265 bp, Glycine max
  unsure (1)..(265): unsure at all n locations
  Clone ID: PAT_MRT3847_721C.1
gntagagaatgatgatgangtntgctatgtgtgcagtggtggttgtagcacnnccttcttntggncggaggtggggcccatggctgaggctgtgacatggnaccccaacagagttgagtcccgtgtcttccaggcaatcacttccggncgctaaaccttccacatgcttgttgcacgaagctgaagcagcaaaaaccatggttatgtggctacctncaaaaacggtagncttgaagcagnttgttaatctcgnaatggcccggna

SEQ ID NO: 112062 - DNA, 2379 bp, Glycine max
  Clone ID: PAT_MRT3847_72200C.1
gttttcggttacccccattttgaaagccatgtatataaacccttgctatgcttgttacgcactcccacgttctaaaactgcaattgaagctcgccacagcaactagaattggaacaaaccctatttctcttgtcaaggtttggccttttttctgctccaaaaccgtagaacaagcataggagagtgagaaggagcagcccctgaatttgtttttgcatgatataggcagaacaatgtcttcagatctcagtgattataaaatcatcaaggaaggagaagctgagattcttatgcacgcaaagaatgaagtcttctacaacaaaactcaggtcaataacagggatatatcaatcgctgtattgagaacatttatatcgaagcggaagcaagagcatgaggcatatttgtcaaaaagaacagaaggggcacaaaagtcatctgaaaatgattattcttctgaattgaacatgctaaacgtacttgactcaactgagctataacatcatatatctagtggggaacagggaagggtgcacgatatcttccaaatcctgaaagacactggggtccaaaactaagggctggacgtcaaattactagcaaacatgtctctcttttgggtccctgttacgctattaatggggcagtcaatccggaagaccccgaagaacctaaaagtaaggagtcaagcagggaagatagtgtcacatcttagctcaaaaatgagatttcaaaattaattttattcatcaatctagaggtcatggaattctatgcttatggttactaaagaaatccgtttgtcttcactaaattttgcagagtaagacgagtaaaagtagaaaaatgtgccttgtttctcaattaacaactatgcaaaatgctgagggaagattaaggctctttgcatcaaattacttttctggatccagcagttcaatctgttgttgatggaggtatgctgatgtgtactgcaacagacatggctgtgctctgtgggggaaatggggaggtctgctattcaaaatatggatcatacccattgagagggaaatattgccatgaaatggctttgaggatcgtgctggcttgcattgagagtcatgctaatcggtataagcggtatatcgttcctgtgttatctgttcagatggatttttatcttcgtgtttttgttcgcatatatacttcggccagtgctatgaaaaacacccccctaaagctttcatatgtttatcagtgcactggttgtgattctttccacctacagcccattggaaggaccatttccaagaatactagtgtcagatatttgcctggctttggtcctgttgttcctcaagaatgccgtgattgtgggaaaaaattcaatatggggggccctatatggtctgcccctatccacgaccaagaatgggtggctgctattctagcagatgtgaaatctatgaaagacagatatccagcttatgatcgcatttcagctgtgttgactacaatatcagaggaattgccagatgttcccctctttttgagtctgcacaacctctgtgcaaccctcaaatgcacttctccatcagcaattattttccgttctgcagtgatcaatgcaggctatcgtatatctggaactcatgttaatccattgggacttaaatcagatgcacccatggatgttatttgggatataatgcgctgctgggtaaaaaatcatcctgtgaagcctcaaccagcagatcaaccaggaagcatcatacttgcaaaggaacctgttcttcaggctaattttgctcgagctgtagcatctcttagcaaggcacaagctaagaaggttgcgcgctttcttccaaatcctgaaagacactggggtccaaaacttagggcaggacgtcaaattacaagcaagcatgtctctcttttgggtcctgaagcaattaatggagctctcaatcaggaagacgatgaagaacctaaaagtaagaagccaaagaccgaagatagtgtcacttcttagttcacaaatgaggttttgaaattaattttcatcaatctagaggtcatggaattccatgcttgtggttactaaagaatccatttgtcttcactaaattttgcagagtggcgagtaaaagtagaaaatgtgcttgtttctcaattaacaactaggcaaattgctgagggaagattaaggcactttgcatcaaattagatatcagaatctggcattttattttttgggattatggaaattgtatcgtgtggaataatatttattttcggtgactttgtatttggtgtttcttataatcgaagttccaatttctgagcaaaaaatcagacaataggagaccgaacgcgatctagaactagtctcgagcc

SEQ ID NO: 112063 - DNA, 350 bp, Glycine max
  Clone ID: PAT_MRT3847_72201C.1
cggtattcccgggtcgacccacccgtccgcgcaggcatgatttatttagcttctcaaatccttggacgagactgtaggctccaggatgtcctacatgctaccgcaaacttgctgacatgctacttcttgctgtccatgcctctggaaaggatcataagggagcgcctgtggatgggaccaatgttcctgacaaaaggctcactccgagatacgagcatggacttgctgaattccacacagaatttgtaatgtgcgtccaagctcttccattgtgatcctgtcttcctcattgcacattgcgatgagagggccaacatgattattgcgcatcagtacatggctaatggacc

SEQ ID NO: 112064 - DNA, 290 bp, Glycine max
  Clone ID: PAT_MRT3847_72202C.1
tagtactagggaaacaaagacgaaagttgagttttcacaacatacatcaatttcaaagcacgctaaaaagaacacttatggtgcgtggttgaaataaaacaaggatacaaaattaaattgtcgtaattgttgatccctaacatgattgtacaggagtggcaggactatggacacattgtgcatattctgaactttttctttcatttttctttttcctgttactgttgaaattttgattagattttcactcttgtaaagcacaggttgcactttaaataataaaatattga

SEQ ID NO: 112065 - DNA, 327 bp, Glycine max
  Clone ID: PAT_MRT3847_72203C.1
ccactcgttcgttttttttttgttttacattggtgatctatttattgccggggtataagattaattggcatcagctagcatgccttcaagttgcaacatcaaccctatccaattcgatcgtaaacagccatccatgtttatctagacgttacaacaacaccagacaaaccttaaaatgatattatatgtataagcaaggactaaataagactatggtgacgaaacactgcttgctcgcgccggacacgagggcggtcgcgagagacgacccgaaacttatcggaccgaaacctgcacccgaacaagctgtccctatggtgagttcct

SEQ ID NO: 112066 - DNA, 385 bp, Glycine max
  Clone ID: PAT_MRT3847_72204C.1
ggcatggctagtgacactttattttttgccagtgtgatgattgataggtgcaggggagtgttcaagggggtaagggcattggttgatgttgggggaggaacggggactatggctaaagctattaccaagtcatttccgcaactgaagtgcattgtatttgatctcccacatgttgttgatggcttgtatggtacggagaacataaaatatgtttgaggctacatgtttgaagcaattccttctgctgaatccattatgttgaagtggatattgcataacctggaacgattaggaatgcttaaaaattctaaagaaatgtatagaggcaatcacatgcatagaaaaaaggaattgtgttgatcatatactctgttataaggaatga

SEQ ID NO: 112067 - DNA, 265 bp, Glycine max
  unsure (1)..(265): unsure at all n locations
  Clone ID: PAT_MRT3847_72205C.1
cngccatggccacccacgcggctcttgcttctacaaggatccctcncanacacaaggttcccatcgaagngcctctcactctttcccaagccantgcgcnttaaagagncttgaggtgacananttctcngggcttagatccacttcatgtgtcacatatgcnaacagtgcnagagaatcnnccntnnntgatcttgtagntcccaactcantcccaagacnaatggatcaatcctgngangggaganacagtggccaagtngaa

SEQ ID NO: 112068 - DNA, 346 bp, Glycine max
  unsure (1)..(346): unsure at all n locations
  Clone ID: PAT_MRT3847_72206C.1
tttttttttttttttttttttttttttttttttttttttttttttttttttttttttttttttttttttttttttttttnaaaaaacgggaaatccggtaaaatttggggaataaacataaaaaattattttttgacagggccattttttaatccctgggggggggtcgcaaaaaacgggtccttaacccccaaataaaacctttttgttgtccccttccccgtttgattttgggggaactttttccccccgggggggcaaaaacaaaaaaaaccccccctttttggttcggggttatttaacaaaactttttccctttttactgggaaacattttctttgtttac

SEQ ID NO: 112069 - DNA, 275 bp, Glycine max
  Clone ID: PAT_MRT3847_72207C.1
agggtaggaaagtggaaggtactaaaaaggaaaatgtagttttagtttcttctctaagctaaacaactggctttactactgctatattttactaccacatagtagtgtagatgtagtataacttgcttaggaatgctttcaaaaaggttacctccatagtcaaaaaaagggggagtatacagctgattgttgcatttatgaaactgcatttcaatatgctatgctgttactgtgcttagacacttccttacgtttgagttctcaggagagagagt

SEQ ID NO: 112070 - DNA, 441 bp, Glycine max
  Clone ID: PAT_MRT3847_72208C.1
tgtacactaatcaacaaatatcaattttatatattggggcaaccacatgatagatcatactctttaacaataaaattatcaaaccaatgataaaaacctgcctaccctatggataaattcctcatcactccagtgcatccaacagttgcaacatagtctactaactacattaaagctagctccacaattataaaccaatcactcaagcacgacatatatgttacaaaatcaaacacccactctaacttctgcattggcaaatgaaagtgtgaacacctgaacccttcaagaccggcatgggaaaacataaaaatgcgtgggtagtggctattgctccatacataggggttgaggatcaaaatttcgtccccttttgcttatgcggcttagcctaggggagtgacattagaatgaacccaaatttctgcctctaggctacta

SEQ ID NO: 112071 - DNA, 849 bp, Glycine max
  unsure (1)..(849): unsure at all n locations
  Clone ID: PAT_MRT3847_72209C.1
ncttctgtagtctcctccactcctcgaccaaatttaaacgaatatatctggttactccttctccaacgtcttcctctaatggttgtacgtcttctcatgaactaactctttttcaatcccctacctaatcccttcaatttacccatttcttttaattaatcagatctgagaaatcctaatttctctaaccctaacaaaacccccgaaatggaagcgtacgttgaaatggaagccgcgaacaacatcctcagagcacagaccatggaactcatcgaccaataggtttctggattccattctcgagataaccaatgaggtcgacggcagtggtgaatccttcgagattctgcagattgcaatggcgagctcagtcgacgatagtggtgcaaccgtcagaatcgggtcgggcctcgacgggcccccatgatctcgattcggaggatcctgttggagaaattactgtacccgaaattggcatcggaagaggaaacactgcgagagtaatcggaggaggaagagttcatcaccgttcccgggttgagtagatccgaattgaaatccttcatcctctaaaccacacaacacaatcaccgcccccctcctacctctgcaactgcaagcagagaaaggaagaagaagaagaacgcaagcctatgtcaatgaatgaatgacggtgaaatagaagaacagaagatgcttctattgtgtgtattgaagtttcagtgatttggtgcatggtgggacttgtgtctaatgagcgtattcaagttatgtctcaatcaaacatggtgggactcgtgtgtcaattatctatggtcaagtgtncatgatttcgactaatttgatgaa

SEQ ID NO: 112072 - DNA, 323 bp, Glycine max
  Clone ID: PAT_MRT3847_7220C.1
cagtgcttttccgccgccgtcgcggttcaaacttgaatagttcaaaaggtgtgaaagcaaataagatgcagcatagaaatttgacttctggaaggccttctggaactgatggctccgattactcctactgtatggtagtcgattcacggtagcaactggttgcaaaggggaagaaacgcctgtctctctacgttatcactgaggctgtgttgctgtgattacgagtgacacgtacatatttaccacgaagagaagcagacgctccaaatacagttgcctattcatctgttattgtaagtgttgtctcactaataattgggaat

SEQ ID NO: 112073 - DNA, 160 bp, Glycine max
  Clone ID: PAT_MRT3847_72210C.1
aacaaagatttgccgtccggtttatttcaattgtttaaaaaaagaaaaaatttgatattcattaggctaactaaatttaacattgaaatcacagacaaaaaaaattttcacttttgaattgaaacaccatgggcgataaaaccctatttactttccagga

SEQ ID NO: 112074 - DNA, 2892 bp, Glycine max
  Clone ID: PAT_MRT3847_72211C.1
ccacgcgtccgggcatggcattgaagctaaaggcatcgtgcaacacgggccgagaaattgagattccaatccttaaatgccgatgttcaggaagcttacatgagaatggtaaaagagagtaataatgaaagattgactttgcttcttgaagaaacaacttgattacttgtaaatttgggagtagcggatcaagcatataacaaataaaaacaatgctaagtcatggaactctatgaagattcagaatcgaatttccctgagtccgctggattaaagaatgtaatttctaaggaatcccctcttgaggaagatgtggatttaatagattctgatcgtaacggtggtgatactagtgatttacttgaaggtcagcggcaatacaattctgccatacattcaattcaagaaaaggtaagcgagcaaccatctattcttcaaggtggagaattaagaccataccaactagaaggcctccagtggatgctttctttgtttaataacaatttaaatggaatattggctgatgaaatggggcttgggaagacaatacaaaccatctcattgatagcatatcttatggaacacaagggtgtgactggtcctcacttgattgtggctccaaaggctgttctgccaaattggatcaatgaattctcaacatgggctcctagcatcacaaccattctttatgatggacggctggatgagagaaaagcaatgaaggaagagttgtcaggggaggggaaatttaatgttctgataacacactatgatcttataatgagagataaagcatttctcaagaaaatccattggctctacttgattgtggatgaagggcatcgattgaagaatcatgagtgtgctctagcaagaaccctggactctggctatcacattcaacgaagactgctgttgactggtaccccaattcagaacagtttgcaggaattatggtccctgctcaattttctccttccaaacattttcaattcagttcagaatttcgaggactggtttaatgctccctttgcagaccgagtggatgtctctctaactgatgaagaacaactattgatcattcggcgtctgcatcaagtgataaggcccttcatattgagaaggaaaaaagatgaggtggaaaaatttcttcctagtaaatctcaggttatactcaaatgtgacttgtcagcctggcagaaagtatattatcaacaagtcactgatgttggcagagttggcttagacaatggttctggaaaatcaaaaagtctacagaacttgacaatgcaactcagaaaatgttgtaaccatccctacctctttgtgggtgactatgatatccataaacacaaggaggagattttcagagcatcaggaaagtttgaacttcttgaccgtttgcttccaaaacttcgtagagctggtcacagagtcctccttttttctcagatgactcggctcatggacattcttgaaatttatctgcgacttaatgattttaaatttcttagacttgatggctcaacaaaaactgaggaaagaggttccctactacggaaattcaatgcacctgattctgcatactttatgtttctcttgagcacccgtgccggaggtcttggtttgaacttacaaacagcagatactgttataatctttgacagcgattggaacccacaaatggatcaacaagccgaggatcgagcacatcgcattggacaaaaaaaggaagttagagtttttgtgttagttagtgtgggatctattgaagaggtgattttagagcgtgctaaacaaaagatgggcattgatgccaaagtcattcaggcagggctctttaacacaacttctacagcacaagacagaagagaaatgttgcaggagattatgcgtagaggtactagctcacttggtacggatgtcccgagtgagagagaaattaaccgccttgcggcccgatctgatgaggaattttggctgtttgagaaaatggatgaagagcgaaggcaaaaggagaattacagatctcgtctcatggaagagcatgaactgccggattgggtatactctccactaaataaggatgataaggtcaaaatatttgacagtggtagtgttactggaaagcgtaaaagaaatgaagtggtatatgcagatacattaagtgacctacaatggatgaaggctgtggagaacggacaggacatatctaagctttcagtcaaagggaaaagaagagaccacctccctgttgacaaccatgcacaagctagtgatgacatggggacagaagaacggttatttagaagtgaagacactttcgacgtgacacctgcctctaagagactcaagcccgaagaaataaattcccagaaacatgaaaacgaagatgtcagtgttggtggtttgaacgagcatatattttcctggaatactcgtagaaagaagagatcaggctaccttggccagggttcattctctgatagtagagggcagaattcaaatggaagagcaaactggaactgatagttctaatttagtcatggatgccagaaattttccctacatttgtattgtgattctgcttcattgtgtttgtcaaggtaaatggtagattacactcgatcagcaaatgtagataccagcaaattccttctggcagttgtgaagtttatcagtgtgaatgtaaaatctaattgatgaaacacatttccccttgttcatttttcaatctgagagaaagaaagagccatgagagagagcaagagagtgtgagaaaaagacctatgttaaaagtatgaagtgatccttggtaattgtaatggagccctttacatttatgaaatatttagatatttccaacaaaaaagttgggttttcctaatcctc

SEQ ID NO: 112075 - DNA, 391 bp, Glycine max
  Clone ID: PAT_MRT3847_72212C.1
ttgggcatttatggacatctgagattagatgggtgtaaaaggctatctgatggaggaaacactggttttattcagagctgagctgatggctggattgctttcacgacgagtctgacacttgcttaaagcggccagactcatacatagacagatgctatcacatttaacgagaaaggagtttatcacctctagaaaggccactattcatatccaaaagatttggagagctaatcttgcgacgacactatatgagaatatgacgagggaagcagcttctatcaggatacagaaacacgtgcgtgcgcacagagcaagaatgaattatacaacgtttcaagcatcagctattgttattcaatcacgcttgagagcattagccgcgagaaatgaa

SEQ ID NO: 112076 - DNA, 264 bp, Glycine max
  Clone ID: PAT_MRT3847_72213C.1
gctattgcgtccgagtagtgctcacaagaggcgatccgttataagacgctacacgggctgttctttatggcggtcagaatgaaaacactagctttctcaccaatgaccataggctgacgaaggggattgagatacaagaacagtctcaaacatatgcttaaggagtgtccttttacatcacgggaacgacaacgggctaactgattcaccaatataaaccgccatactatgcgcaatgagggtggttaaatatacaacaacaac

SEQ ID NO: 112077 - DNA, 909 bp, Glycine max
  Clone ID: PAT_MRT3847_72214C.1
caaggctttgttgtcagctcttgtgcctggtttcccaactcaaaacagttcgtgtgtggcagttctgaccctgaaaagggcgtttgcatgtgggattgtgatggaaatgtgataaaatcatggagaggaatgaggatgcccaaggtcgtagatcttgctgttactccagatggtgagtatcttatcagcatattcatggataaagaaattcggattctgcacatgggaacctatgctgagcgagtcatttcagaggagcacccaatcacatccctttcagtttcaggagatagcaagttcttcattgtcaatctaaacagccaggagattcatatgtgggatgtggctgggaaatgggataagccattgaggtttatgggccacaagcaacacaaatatgtgataaggtcatgctttggtggattgaataacacgtttatcgccagtggtagtgagaattcacaggtatacatttggaactgccggaactccaggcctgtagaggttctatttgggcactccatgactgtgaactgtgtgagttggaaccccaaaataccacaaatgttggcatctgcaagtgatgattataccattcgtatatggggacccagcttacaaaaaaaaaagaaggccaacttgagtagattagacacgttgcatattaaaatttcaagcttagtgtatagcttatacacgttttagtatattctttttccccccgcacaaagtctgttcaggtcacagcttgagtttgtaaagtcttagtttacccatgcaagaattttggaattttgggctacatttcacatctgtacactgtacatctcctttccttcgtttattactcccttaatttgtcacattaaaaaaaaaatccaagaccttgaagtcaggatttactctttc

SEQ ID NO: 112078 - DNA, 238 bp, Glycine max
  Clone ID: PAT_MRT3847_72215C.1
caaaaaggaaagcgaaagaagaaaacaaactgcataagttgcaaaattctttacatctcttctacacttacaaccaaaaataatcaatgccctactataagaggaacgcatacgatgttttaatcacgttcttaaaatataaacattctaacacacatttaccccatccaatttcacttaactctgttatacaaatttctcttttgttttttcaaaaaaaactaaaagctttcccaaa

SEQ ID NO: 112079 - DNA, 396 bp, Glycine max
  Clone ID: PAT_MRT3847_72216C.1
taaccacttttatgcctggttaggttcaatactgctatactgaacaggagagctctactttagagcattgtggaagtatagttgattcgagattttgggtttgtgaagttagggtatttttttgtttgaaaagagtaaaaggtaaaaaatataattagaatgattcccaagagaatagtattttagacatgctctcctttatggagggaatggtcattcttcatttgatggaatgcacattctcattttaaaggtgctaccaatcattctatcctgtcatttttttagttcatttgtattacatacatttaatctccaagtaatttgcataatcacttttcttgaattggtatgtactacatacatactaaagtatgaagatctgtcttgttgact

SEQ ID NO: 112080 - DNA, 377 bp, Glycine max
  Clone ID: PAT_MRT3847_72217C.1
ggctcgagctggaccgaggtgtggaacaaaaagacttcaactcttatggaagggggccctgcagggaagaatggatggcaaggggaactctcgccaacattcgtgttagctaccatctcttagatgtgaacaataaccccaacacaggccacattccgactggggagaatactgtcgtgaccgatgcatggccagaatacaccgtgcaagggcaatgacaccaaggtgctggctgaagctaaacatggactatccatttccagagattgctgctggcaagactccaacggtatctgatggcaaatcttacagaggtaagacttttgaaaaaagacattgaggccaattgaaccgataagcaatttggtggtgttttt

SEQ ID NO: 112081 - DNA, 503 bp, Glycine max
  Clone ID: PAT_MRT3847_72218C.1
aattcggctcgagggcgttagaagaaggaaaagcttttgagcgtatgggttctaggcagcttgctggcttgcttgtatctctttgggtaagaaagaatcttagaacacatgttggggacattgatgctggggccgtcccgtgtggttttggacgtgcaattggtaataagggaggagtgggtttgagaatcagagtgtatgacaggataatttgctttgtgaattgtcacttggccgcacacttggaagcagttaatcggcggaatgctgattttgatcacatttatcgaaatatggtgttcacccgaacgtccagcctacttaatactgcagctgctggtgtctctactgctgttcatgtgcttcgtggtgccaatgctacaggtgtcagctctgaagaacacataagctgatttatctgaagcagagtatggtggatatctttcggggatttgaactatcgcctttttggtgtattgtatgatgcaagccacgactttgtt

SEQ ID NO: 112082 - DNA, 193 bp, Glycine max
  Clone ID: PAT_MRT3847_72219C.1
gtctggattacacgatcaaattcctactgccttcgatcctttcgctgatgcagatgctgatgacttggctgctgggccaaaggattatgtgcttattcacgttcagcaacaaaatgggaggaaaagcctgataactcgtcatgggttgataaaagaatttagcttcacatgatacgtaaagacgttaaaaaag

SEQ ID NO: 112083 - DNA, 127 bp, Glycine max
  unsure (1)..(127): unsure at all n locations
  Clone ID: PAT_MRT3847_7221C.1
ccttctcanaaacancgcgtngtctcttctgcttcgtatctattctgtgctgntggcttgggtggattcaaggctttcanagcatncggtgnggcntnntaatcgattnatnnaagcaggncgnatg

SEQ ID NO: 112084 - DNA, 313 bp, Glycine max
  Clone ID: PAT_MRT3847_72220C.1
gatcacagagaagagtgatgtgtacagttttggtgtggttctcattgaagtcttaacggggatggagccaatagatagcaggattccagaaggttcgcacgttgtcccttgggttatcagggaaatcagagagaagaaaacataatgtgcatcaattctagaccagaaactaacactgcagtgtggaacacaagtccctgagatgcttcaagtgctaggtgtggctctactctgtgtgaatccatccgcagaatatagacctacaatgaaagatgtagcatcaatgctcatcgagatcagacatgagagcgtg

SEQ ID NO: 112085 - DNA, 468 bp, Glycine max
  Clone ID: PAT_MRT3847_72221C.1
acctatcattatcacacgtcaaattaattttcaagtattaattagtcttcagatgatatcaaacaaataattctacattaatagttcgattcttctacagtaaaattgttcagtatttggtgccacaaaccatttaatgacttgcataagtaaataatcatgcatcttatcacactaaatctgaccttactttgaaatttactttaccacatcaaatacaagagttggttggaactatgcaattccaagtttgagtttgtcatattaaaatcataagaatcataaggtaaattaagattctttaaccaaagagtatttataggatcaatctgcagaatgaaaaattggacaaagtattccagaagagaaccaattatagacaaggatctaagtgtagataaatctaaatgtgtatatttcgaacttgcctgagtcatttcacctttgagacggtttaatctgtcagca

SEQ ID NO: 112086 - DNA, 958 bp, Glycine max
  Clone ID: PAT_MRT3847_72222C.1
cctagattcagccacagtttcggaggagaagaaaatagtcgttcgaggttagtttttcttctgagatttgggattttagggtttatatctttgtctttttggtttctgttgatttccaaatcgcgtatcttagataagacagttgaatttttattcttctctagtcacaacgttctgattcttacgcctccgagtcaatattttcggttagtaatttctagggtttcagatgttttgttttggagaattagtcgataatttcatccggccaacgtatgtgtctttaatttcttaattaaacaaagattatggataaatataagttttgaagattaggttatgcgatagaagggggtaagaaaggttctattgttgtttgtttgaaattgatgtttctgaaattactttttgggcgtcgacacagatggcccgtacgaagcaaactgctcgtaagtccacaggaggaaaggctcctaggaagcagcttgcaaccaaggtctcttctataatcacaacaacaattaattaatcattgttcatattgatttgctttgattttatctgagagcttaattcctttgttttacttttaggctgcacgtaagtctgcaccaactactggtggtgtgaagaagccacatcgttaccgtcctggtaccgttgctcttcgtgagattaggaaataccagaagagtaccgagcttttgatcaggaagctccccttccagaggctggttcgtgaaattgctcaggacttcaaggtattgtaatgtgtattattgtttaatgtttgtgtgttttgttgttgaacttgttaacaagggaattttgttgtgcttttgttgcagactgatctgcgtttccagagccacgccgtgcttgcattgcaagaagctgctgaggcatacctttgttgggctctttgaggacactaacctgtgtgccattcacgccaagc

SEQ ID NO: 112087 - DNA, 441 bp, Glycine max
  Clone ID: PAT_MRT3847_72223C.1
cctacgcttccgctctaaatcggtagtccctcggtgtctatctctctttcattcccttggttcttgtgagaaactgccaaaaaaaatgcggccagttatcaccaacctcaaatcccaaagaacaagatgagcccaacatgttagccaccttgatccccaaatgcccaacatgtcaacaacaacaacaaatgcaaaatcaccatagtactcctaataacaccactcattagtccctttccctgaacgaaggcaagagcatagccaacatcttcttgtccatggacctcactggactattactctattcccggtccatgagctccatgctcttcctcggacagctaggagaactcgccctcgcaggaggctccttagccatcggcttcgccaacatcaccggctactctgtactctatggcctaggcatgggcatggaaccca

SEQ ID NO: 112088 - DNA, 1066 bp, Glycine max
  Clone ID: PAT_MRT3847_72224C.1
ggacgtagtcaacgcgagctgatgactcgcgcttactaggaattcctcgttgaagaccaacaattgcaatgatctatccccatcacgatgaaatttcaaagattacccggacctgtcggccaaggctatagactcgagttggaaaaaaaaaaatagtcgttcgagatggcccgtacgaagcaaactgctcgtaagtccacaggaggaaaggctcctaggaagcagcttgcaaccaaggctgcacgtaagtctgcaccaactactggtggtgtgaagaagccacatcgttaccgtcctggtaccgttgctcttcgtgagattaggaaataccagaagagtaccgagcttttgatcaggaagctccccttccagaggctggttcgtgaaattgctcaggacttcaagactgatctgcgtttccagagccacgccgtgcttgcattgcaagaagctgctgaggcataccttgttgggctctttgaggacactaacctgtgtgccattcacgctaagcgggtaaccattatgcccaaggatatccagctggcaagaaggattcgcggtgaacgtgcttgaggtggtggttgtgaagatgaagatgaagatgggttgctgcgggtggtgtttttgttgttcagattcctttttttttttcaatggatagggttgttagggagtgtaggtgttttacggtattattacccattaattgtgatacaggcaaatactgccaagtgtccgtgactgtgttttcttccttttagaaaattggcttgtaattgatttttggacatgtgtgtcataatgtttctgtttttagtttttacctacgggatgtagtcactttggaattgtattggacaacattcagttgccatctaatctcgtttaagctaagtttgttgtgctaattaaactgacctcccttcttggttttgaaatgagaggatttgaaaatatagtattgacagaactggcagaaaatctactcaatttgctcataaatacttaattacccatgttggttttggcttcaaattttgttgaatttcatctcacttgtgtt

SEQ ID NO: 112089 - DNA, 982 bp, Glycine max
  Clone ID: PAT_MRT3847_72225C.1
caccctacggctgcgagaagactacagaagggggatcctttgttttctattcttcaagattcagggactgcgtttcggaagcagacacagatggctcgtacgaagcaaaccgctcgtaagtccacaggaggaaaggctcctaggaagcagcttgcaaccaaggctgcacgtaagtctgcaccaactactggtggtgtgaagaagccccaccgttatcgtcctggtaccgttgctcttcgtgagattaggaaataccagaagagtaccgagcttttgatccggaagctccccttccagaggctggttcgtgaaattgctcaggacttcaagactgatctgcgtttccagagccacgccgtgcttgcattgcaagaagctgctgaggcataccttgttgggctctttgaggacactaacctgtgtgccattcacgccaagcgtgtaaccattatgcccaaggatattcagctggcaagaaggattcgtggtgagcgtgcttgagttggtggttggaaagatgaagatgattggtggctgcggttggtgtttttgtttttcagattcctttttttattcaatagatggggttgttagggagggtaggttttctgctggtagtagcattaattgggatataggcaaatactgctaagtgtccgtgactgtgttttcttcctttaagaaaattggcttgtaattgatttttggacatatgtatgtgttagaatgcttctgttttagtttttacctgcgggatgttgcagccactttagaaactgtattggacaacattcagttgccatctaatctcgtttaagttagtttgttggcttgcctcgttcttactcgggatttccatcccagtttggttactgggtttcttatttattgttcactgtacattatttatggattacctccataaaagaaaagagcgttaatcaaagctgtcagatttaaaagttaatataatttttagttt

SEQ ID NO: 112090 - DNA, 271 bp, Glycine max
  Clone ID: PAT_MRT3847_72226C.1
cggtccgaattcccgtttcactccccaccctgtgttaccactgaacaaaatgccaccaatagctaacgtagtgttagacgcggcgcgcacgaaaggctgaatgatcaaatacctgctgatgacagggtatgcactactcaaagtgagagattggccctaattgtgacacgtggtcataacgaacatggtcagctcaaactattttcatgcctgtaagtggacaaaagtaagaaccacatcccctgggaaattgatcttcccaatagaaagt

SEQ ID NO: 112091 - DNA, 279 bp, Glycine max
  Clone ID: PAT_MRT3847_72227C.1
actccgatattgttgagaaagataactaatgtagcggttctttttagcaactcagttttgtagtaaaagaaattgggttacaactggttttcctgttcgaaaaattgggaaaagatgacccggccatccttcctcaaattgtcgggccggaaaacagggggtatccagttgtcttttctacaaaaatggggtggtaaaaaaaaccccccccttttttttttttttttccacaattttttggggaaggggggggccccaattcggggtttcctccccccg

SEQ ID NO: 112092 - DNA, 552 bp, Glycine max
  Clone ID: PAT_MRT3847_72228C.1
ttagtaccaaaacaacaattaatttttcaggtacaagtttttcaacattatgtctaacttagtaagaacaaggagcattgaatctatcaagtaaaccaaaaatgtaagctcaaatgttgagggagaaaaataggaagaaaccctaaaaggctaacctggacaataaaaatatcaggagatggtatttttacacaaaggaaccaaagaagcatgcaaaattgaaccaatggcttcaacaaaagcattattgatcgaagtatctttggtaaactttgactggctgttaaccactgcttctgaaaacttgaaaaagttccaactctagtaaaatatgaggataacttgtctagaaaagattagtattagtcagcattgataccattacgtaaatatgaatagatgggttggcaagaagtgcagtatggggctctgaacctgttagaaatcatcattaaacaagaaaattactcaagctgaacaaaaaattagtacctaacttcatgaaatactatactaataaaaatataactctaatgattcattataaacaac

SEQ ID NO: 112093 - DNA, 699 bp, Glycine max
  Clone ID: PAT_MRT3847_72229C.1
gaggggtcttaaatagccattcggtcaaaagtaacaaattgttacttatcataaaatgacactttggaatccatgtcaactagtcgtaatgcaaatacaaacatgcattgcgttgcttatagttttcttggatgtatatatttagttcacaagcacgtaatatgaccagagaactttgtattagtgtatttacttccctgcctgcaaaattatgttcatcgagcctataaagtagcatgtgtttctttaatttcccaaattatagtcttgaactgtttgatttcttaccttctgcttgcaagtggactaatttgtacactgatgttgcaaatacatggattgattttgagaatcaacatgcttctaatatcttgtgtaagcaggtcaagtgttcatgttttctcttggaaacagacaaatactgtgtgtgagccaatctgacatactgagagatatcaccacatgcatatccttggactttgggaagccttcatatcaacagaaacaactagggcctttgctgggccagggtgttttaacttcaaatggaactacatgggtccatcaaagaaagattctagctccaaaactattgagatattgtgcgttccatttttcaacttataattaattcatttgtacatgttgatgttacatatacccgtttatttgtgatagttgcaagaatatatacttggc

SEQ ID NO: 112094 - DNA, 461 bp, Glycine max
  Clone ID: PAT_MRT3847_7222C.1
tggtggggggggggggtaaaataataggttgtgaggggtaaagtcgtatcaagcatcgagtacaggtctagaaataataaaatttgaggtgtgtaagcagacacataggcggcagcagaacaaaccaaacacaaacccgactgaaggagatactctagctgaggcagcggagttttgtcgcgcatgtggaataatgggtagtagcattctcagttgatctaccaagcatgcccatagcagccctgttaactcggcacaacatgggctgtgtgcgtagcgtgaatgtatagccgatttgcgtagggctgagtgcataagtaatcttagctgttacggctcttatgcgcaccacaatgctcgggaactttagggctgagttgccatggatctggtgcttaacatttataatcgtacaattctcaacgtgggattgtgaatagtgagcggctgggttgtagagt

SEQ ID NO: 112095 - DNA, 506 bp, Glycine max
  Clone ID: PAT_MRT3847_72230C.1
cctcacgcgttcgaagccatcctcattctctctctttgggttctgaacttgtaatagctatagatagaaatacagtgacagacacaatagaagaagaaacccaacccaagcaaacgcactcagagaagagagaatgaccaccccaagaggaaaccaccacccgcagcctaacggtgagcgaagaagacaatggccaccggcacatccagcagcggcagcggaagcggctccggaagcggcagagacagcgacagcaacagcagcaggcggacattcttacaatgggtaccgacagtaccacccaagaacgccgggtcgttcgtcgtcgtcgtcggcatcgttcaaagggtgctggtgctgcctcttccttctattctcgttcctggcgctgctggtgctagcggtggtgctggtaataatcctagcggtgaagccgaagaagccacagttcgatctggagcaagtgggggtgcagtacatgggcaatacacccaatcccccctcca

SEQ ID NO: 112096 - DNA, 416 bp, Glycine max
  Clone ID: PAT_MRT3847_72231C.1
ccctcgcgtttgcattactggggcccagcacgacccatactggcgcctggcccggataatgtgcctgatggaattattcagtgctcaacgctaagaagaatacgaatacattacaaaacgagagctttgtggacttcttaacgaactctttaattccgcaaacaaaacatattgactaaaagaccacctttgcaaccttagcctcagcgttataagccgcatggtgttgggaaaaaagtaccttgaggaatgcgaaaacgccgaattttggcccgatgagttcaagaatatgcttgacgagttgttattgcttaatggggcgtataacatgcgggactttattccttggatggactcccttggacctgcagggttacataaagaggatgaaggcttttagcaataagcttgatagg

SEQ ID NO: 112097 - DNA, 1939 bp, Glycine max
  unsure (1)..(1939): unsure at all n locations
  Clone ID: PAT_MRT3847_72232C.1
cagtgtttgaacagtacagatctccccgcagtagagatttcctccaaaaatcatacttcactttttccaccaaaaaataattaggaaaaaaataaaaagatggaaagataatgtggttccgattcaaaccacacgattccacgaccttattatggagccgcggtggcggtagcggtggccggcgattataacggcggaggagtaagagatggttgtgttgtgaggaagattggtaagctgtgggaacatgtcgttgagaagcatagtccgtgaactcaaggagatgagagatggaattggcagcacatcaaagcggggtgcagaaagcaagcattggctcagtcggacaaagtcacatgtagcaccagatattcttgctactccatttgaacctattcaacagggacaatgggcaaatctaccatcagaattgcttctggacataatccagaggatcgaagagagtgagacatcttggcctgcccgtgctgttgttgtcttttgtgcttcagtatgtaaatcatggaggtccattacaagagagattgtcaagactcctgaacaatgtggaaggatcacatttcccatttcattgaagcagccgggtccgcgtgattctccaatacagtgctttatcaggaggaacaaagaaacttctacatatctattgtactttggtctggttccatcagagaatgacggtaataagttgttattagctgccaaaaggataagaagggcaacaggcactgactttatcatatccttggctgcagatgatttttctcgagccagcaacaaatatgttggtaaactaaggtctaattttttgggtaccaagttcaccatatatgacagtcaagctccaaatgatgctgcaattcaatcaaattgtcaatctagtaggagatttcattctaagcaggtgtcaccaagacttccagcttgtaattatcttgttagcactgtttcctacgagctgaatgtcctatgcactagagggccaagaagaatgtactgtgtcatgaactccatacctgtctcagctattcaggaaggcggcaatgccccaactccagcatcttaccctcaaatatttgatgaacatttttctccatcaccagcactgaaagaaaaagttccagtcacagatttaaactctgcaagcttatcagagccaccagtatcgagccaatgctcagccgagcaattagcactgaaaaacagggctcccagatggcatgagcagcttcagtgctggtgcctaaacttcaagggtcgtgtttcagtggcttctgttaagaactttcaacttgtagctgctgttgatccatctcataatatttctgctgaggagcaagaaaaggtaatcttgcagtttggaaagattggaaaagacatattccccatggattactgttatccgctctctaccttccaagcctttgccatctgcttgagcagctttgacactaaacctgcctgtgaatgagaagcgttacattactacattgtaattgacatctgctgagttgctggttgtcaatcatggtggcatgcagctgaaaatcatagctgttctgccgttagtattttccccttgaattggttgctgattctggaatttgttcaatctgttgtttcgtggtcctgtaaaattaaaattaaatgaagtttagtgaattctgtaatatatatgtttctggtgttcctccctcacgaatacttgcatctgcttgtggcatacagctgaaatcatagctgtgctgccgttggaatcccccccttataaattggttgttgattctggaatttattctgtcttttgttttgtggtcctgtaaaattaaattaaatgaagtttagtgaattctatgatatgtatgtctccggtgttcctcacgaatcctttgccctgcttaaatactgttnctgcaag

SEQ ID NO: 112098 - DNA, 192 bp, Glycine max
  unsure (1)..(192): unsure at all n locations
  Clone ID: PAT_MRT3847_72233C.1
agctcctcctcctcctcctcctcctccttccctcaagaaattaatagtggagcattcaaccaatgtggagagggccatgaaccatttgtttcatatgagggtcttgagcagctgcatcgggtcttatttgttcttgggatcactcatgttctgtatagntgtctggctgttgggttagcaatgagcaagatc

SEQ ID NO: 112099 - DNA, 206 bp, Glycine max
  Clone ID: PAT_MRT3847_72234C.1
cttctcactctctctattttattttcgctttcccgctttttcatagcaaaacgaaaaagggaaccctagatacgggagagatttcattccgcaaaaaatctcttccttctctctcctcatttctgagttccgagctttcctcccctgagatctggtgtgacgtggcttcaaaattgaatcggattgagatttgttgtcgtggttgc

SEQ ID NO: 112100 - DNA, 420 bp, Glycine max
  unsure (1)..(420): unsure at all n locations
  Clone ID: PAT_MRT3847_72235C.1
ggtccggaattcccgggcaccccgcctgcgggactcagaaacaacttaatccagggaattgcgggcgangagtgacanatcttnggcttnaacctattggaagggggggtccaaatgtgcaaaacttgaancttcctaagagtgcttttctgggagacaaggggttantatcatttgccaggggtgctccatcanttnagagcctgcgattgggggggtgccacanaattacccaaattgggctctttggggtcttttttaactgtggtgcaaaattnaaggtgcttactctnattanctgctatgggatcaaagatctcaatatgggtttgccagcaatatctccttctnaatcaatttnngcattaagggggctgactngcctngatttngcaatgctaaccttgccttacttggaaa

SEQ ID NO: 112101 - DNA, 429 bp, Glycine max
  Clone ID: PAT_MRT3847_72236C.1
ttttttttcttacatttttttttttttcttttttttggatttttgttatggtttttttctttccttaactttttttctactttttttttttttttctttttttaagaaaaaaaagggggggggagaacacaaatataccccggaccccattctgttttaaaattcgccccccccccccaaaaaaaccccaaatttttttctccccaaattttctttaaacccccccccaaccaatttaacctggggcaaaacccccctccacctggtccaaaattctaaaattccaatttttgacacaaatctttccggggttcaccagaaaaaatttgttcccaaacatccaacgggaaaggtcttcatcttgtcaaaaaactgtgccaagtcccgtgctcaaaaaaaccactcccagcaacaatcttctgtgcatac

SEQ ID NO: 112102 - DNA, 316 bp, Glycine max
  unsure (1)..(316): unsure at all n locations
  Clone ID: PAT_MRT3847_72237C.1
gttaaaatggaccaggttatcgacctggccaaaatcaaaagactaattaaaaggttgatcctatggaatcaagccatgataaaccatccannnaggcagcntgaaaataaaaccaaaatctgaaaaaaagggggattttgcaaaggtttttttcattggaaaggaaggaacctgaaaaagggaggggaaccaataccaggcctaccgggctggacgggttggtatgaaataaaaaactcaccgagataaggtccaatcatctcgggttggatttcaaccgggttgaaggccttgccattgtaaactccaatcgggg

SEQ ID NO: 112103 - DNA, 256 bp, Glycine max
  Clone ID: PAT_MRT3847_72238C.1
ccataaccctctctttctctctttaatcttaaaccccgttacgacgtcgtacggcttgggctctttctccctctacccgaaccgaacaacaatcgtgaaagagggagaacagagtaccttcattctctctctctcttactttctctattgcgacgcgtttgattctctcgcttataatatatttctccgctggcgctctcttactggccggcgattgtttcggatcgatcgccgacgccgtcgagttcactcgctc

SEQ ID NO: 112104 - DNA, 491 bp, Glycine max
  Clone ID: PAT_MRT3847_72239C.1
cccacgcgtccgcccacgcgtccgtacggctgcgagaagacgacagaaggatacggctgcgagaagacgacagaagggtacggctgcgagaagacgacagaaggggaaggcaacaaactgaaccagagccaatccttttcttctcccttgttttgaacaccctctgtggatacccttttgttaaagccaattgttttctcagatttgaggacaaggaggtggtgggggaggagataatacagggagaaaaacataatagagagaaaaataaaagcacaaacgtgaggctcttgttgaaacacacaattagatataccagttgtcaatttgtcatatctgaaatttctcaagttgtgtttgtttgtcgtagaattgtaggttcagctgcatccttatattttggttcacatattctctctctctccctctctctcctctggcttataactttacctttctatcctcatggagtagtaaagaagtaactaatc

SEQ ID NO: 112105 - DNA, 776 bp, Glycine max
  Clone ID: PAT_MRT3847_7223C.1
atgatgttcgttgcagcatgtggtacaaagcagagctatattccttcacttcccccgttgacaagatgcaaccgtgactcaaagttgatcaagttgtggaagaaagctagcccttgtggtgctaatatctcagagctagaacacatccatgaaggtcataatcctaggccatcaactagccgtggcacccagcgcctctatgttcgtctcaacaccttacactatctcctctctaacatcaacacccttgaaaaatcactctcccacacccctggtgtagtcccttcttcaagccgcaaacatagcggtccctatcttgaaatagtcaattcctccatcccagcagcatgtcaacatgtctcagaagttgcagcataccgtctcatattccttgactccaattcagtcttctatggcagcctctatgttggtgacgtagccaactctcgcattaggccagcgctgaggatcctcaagcaaaacatcacgctgatgactacacttgtggcagatagagctcaagcacttgcaatgaaggaagtgatgaaggcatcctttgatgcattcctcatggttttgcttgcaggtggaagctcaagggtgtttaacaggtctgatcatgtgatgatccaagaggacttcgagagcttgaatcgcgttttctgcacgtgtggggagggactaatagcagagaatttggttgagagagaggctgcggtggtagaaggtgtcattgcattgatggggcaatacactgaacagttggtggaagattt

SEQ ID NO: 112106 - DNA, 116 bp, Glycine max
  Clone ID: PAT_MRT3847_72240C.1
gcacaagcacaagcagcaatgttgtataactccatctcatcgtcattgtcattgtcactgtatgtagatcactcagccacttgagataatcttagatattcctgtacgtcatcgta

SEQ ID NO: 112107 - DNA, 380 bp, Glycine max
  unsure (1)..(380): unsure at all n locations
  Clone ID: PAT_MRT3847_72241C.1
ncnnccttttttttttttttttttttttttnatntattttttttttttaaaatttttctaatgggttttttggttttttcccaaaaaaaaaattttaaaatggttaaattcccggggccctttttcctttacaaaaaaagtttcttgggggccccgccttttttgggggttccctttgggggacaacttttttttcaaaggcgggaactttttttcttttttggttacccaatttttgtgggttttttcttggcaactgaaaaaggttcactaagcaaattccctatgttctcaggggggccgtttcttctataagttttttttttttttcctgggcctcctttattttttgaaacttggcgggggaccattaaaatgtt

SEQ ID NO: 112108 - DNA, 268 bp, Glycine max
  unsure (1)..(268): unsure at all n locations
  Clone ID: PAT_MRT3847_72242C.1
gggaaaggcttcctgcactgagcaccaagttgaaacctcttgattctttgcttagaattccacagaatatggagacngntcttttcaatgactccccacctttggagttcaaggtgcgtagaaatagagccaactgnatggttaatcatcacnannatantcttaatantgggaattgaaatgnaattantgtatcnctctctctgcctgtttatgtaattntgtggagtatgtacccntattttanctganatcatgttcgaccccc

SEQ ID NO: 112109 - DNA, 672 bp, Glycine max
  Clone ID: PAT_MRT3847_72243C.1
cccccggtcgacccagcgttcggcgggctaggattggtatgcttcgtgttagttagtgtcttcattctgattctcttattgtatgttgtgcgattcagttcgttgtcgtttttgttatgtggatggaaaagcgaaaatatccactcaccctatgaggaaagatctcccaaaattgataggaagtgccgtatgacactctaaacgcagcgtcaatttaaagaacgctctcatcatccaccgatgataatattttatcatcggtcttgatatcacgctgcgtgtgtgatttgaaacgggtctctgagggttttctttttttaaaaaaaaattaaggttaggtccgatgccacgtcactggtagctatatgtgagcattgaccagcgatgctatgattggaccaaaaacaagagtgaaattcatttgtttcgcatcctgataggaacctgcggatctcataacctaatgatctgcggagccgttttatgcgattacatttctaatgttttgtcaaaacttttggtattctttttatgttgttgtcattggagttggtatctatgaagccgatgaggattagatttgaattggaattaccgtctgaacatctgatgagagtttctggctgactgagggcttgtggttggctcatgaattaattggcatgcttggtg

SEQ ID NO: 112110 - DNA, 395 bp, Glycine max
  Clone ID: PAT_MRT3847_72244C.1
ctattcggctcgagggagatttgacgcagcaaaacttgcagctggaggcatattgctcccatatggaacccaggatgatggaatgagatgatagagctatacatgacccttgacaggatgggactgtaggaactgaacattacatataaagctggacgatgttgcgtcacaggagacacgtctaaccttccatgtagatggtttgctgtataacaagcgctagcatatggctctggctcaaggtatggtgaatcagatgcatatggagatcatgggggaaactaaaaacctcgaattctaaggcgaaaaactcaagctgatactgtctgcaatgcacgaggacatagatacaataggtcccgctgctttgctcgaagtctacacgttactggctg

SEQ ID NO: 112111 - DNA, 370 bp, Glycine max
  Clone ID: PAT_MRT3847_72245C.1
ccacgcgtccgattttcttctatctcatcctttcttttagttttatttttatttttttatctcgggtaaaaaaaatcatgggtgttttgacttctgcaagcgcacacaagttgctccgcatttgctgaaaaagtatacaaagtctgatacctcaagatgccagaaatgtgctgccaaaagcattgctcaaacttcctaagagctgggaaaccattgagaagatatggggggctgaggacctattataactcacttttgcttaaagtttacgtgtagttgacataccacttagattcaataaatacaggaatctattcctacaacttacgggtgagttaaggcatttcagttcaaccttcaataattgaaa

SEQ ID NO: 112112 - DNA, 266 bp, Glycine max
  Clone ID: PAT_MRT3847_72246C.1
caattctcccgcttcctccgcaacccaaccctctatgctttcctgatcgacaacatgcactacagcgattcacgtaacccttcattttttcagatccacttcaccacgatcgcaatctccctccattttgtgctctcctttctgtcacgatcgttttatttttccagatccaccccacgacgaccgcaatcactccatctgtgctctcctctcctgttattgcgatctcccctccgttgctgcaactgcgaagccaaggcaaagct

SEQ ID NO: 112113 - DNA, 394 bp, Glycine max
  Clone ID: PAT_MRT3847_72247C.1
ctcataaaattcttcattgatcgctaaaaagggatcatcatcatgaaattgggcatccgttgtaacaaatagtgaaagataacccaaagcggcaaagcctaaggactagttcaaagacatttcattgaaacccacccactaaaatttttgggggaacggatccaaggatgagtagaactaaaaaaaccccatttcattacatgggggtaaaaaagagattttacaaatttcctgggttccatttacaaattcggagcctaacaaaggaaatatcaaacgaaatcgcaatcgagaatgtcaaacctccgttttctggagcagaggggcaaaaacgacgacgttttccttacaggaatcggaggctgccacgtaagtgtcgtccgaaaccatgcta

SEQ ID NO: 112114 - DNA, 516 bp, Glycine max
  unsure (1)..(516): unsure at all n locations
  Clone ID: PAT_MRT3847_72248C.1
cggccgcccttttttcctttttttttttttttttttttttttggggttcttgtcctggttttttggtgttggtggggcggttnttttnctttgtggggcctgtntttcccttgcnggcngctggggttnntttttccctccctttcnntggcctcctttcctttgggtggggtttttgtttggctggtcctctgcttcctctgggctggtcccccctcgtccgcctccccgcttttcctctcggccccttttcctcntggtggggggctgctcgggttccggagtttttgctctgtgtctggcntgcctgtctgtcgcccgggggcgtgcttggggctcttgtcgttctctcgggcttctgtgcggggcgtggccnggtctggggcggncggggggggctcggtctcttcctgccggccggggtgccgggggtggggcgtgtcgctgtggtttcttgtgggcgctgtgggggggggcttcggccgtccccgccttggcgtttgggtttgggggggg

SEQ ID NO: 112115 - DNA, 411 bp, Glycine max
  Clone ID: PAT_MRT3847_72249C.1
ggctcgagaaataatgttttgttgatagcagtccagtccacaactcttaacccaagaggattaccaaaaggcctatcgctcttaacaagagctcaaagatactaacaaatcaacaatttcagaaggaaacacagattctgcagataaaacatatagctagcatcaagaagtcttgctagccatggctgaggagtttcaaggtgctatttgtggtgaaagttggtggaatattattaatccaacaagaagtgtgtttcctcttatgccatcaacttgttctgtggcagcagctgatgcaggaaactacaacacttggcaaagttttcttgatgccgggaagccacaccagagtggaactggtagcatcttcatcgatttcaccttacaaatgatgggttttggcatgtcatc

SEQ ID NO: 112116 - DNA, 332 bp, Glycine max
  Clone ID: PAT_MRT3847_7224C.1
gtaaaaaatcaatgatatacattgacataattgagtacatcaaatgccacagatcaaaatgcaacgctgttattttctactgcataatggagtggagtctgatacatgagcactaaaaaacttaaaatagatgcgcattgcaatagttactagaaaatgaaatgaaaagtacgaatcataaacccaaaaaaataattaaaaatctattttaacataatcctcttaaagcatacccacaaataccatatagtaccaattatgaaaagcccccaggaatagtctcttgcccattgtaggagaaaatcctcccagagcctttaaaaaggaaatta

SEQ ID NO: 112117 - DNA, 542 bp, Glycine max
  Clone ID: PAT_MRT3847_72250C.1
tcaggaaattcagaattttaggataaacagattctgcagatataacatatagctagtagcatcaagaagtcttgcttgccatggctgaggattttcaagctgctatctgtggtgaaaattggtggaataatattaatccaacaagaagtgtctttcctcttatgccatcaacttgttcggtggcagcagctgatcatgcaggaaactacagcacttggcaaagtactactgatttcgttgatttgaagggaacaaggtcttgtgctgagctggagactgataataacttgagttttcttgatgctgagaagccacagcagagtgaaagtggtagcatcttgatcaattccaccttacaaatgatgggttttggcaagtcatcttcaacttcatcgaattggaatcaatctttattagggagcggttttgattctgtgcttcaagaagaaacaggcataggtggtggcagccaagtttccaccgttgatgctttgaagccaatgaaccaagaattttccttggatcagcagagtctgaattct

SEQ ID NO: 112118 - DNA, 268 bp, Glycine max
  Clone ID: PAT_MRT3847_72251C.1
gctgtctagcactttagcatgcatggcaagtctctcctttaaattaaaatgtttaattgatttgtttgacagctagaatatttaattgatatagtcttattttaaatatatggtctttaataaatgccatttaaaaaccattttaatcttaacaaaaaaccaaaaagagaagaagcgaaaggagggaggattgaggaaggagagactttatatacggaggtaacagggcactgtagaattgcgcgtttgaggttgttgtgcaaaggtt

SEQ ID NO: 112119 - DNA, 843 bp, Glycine max
  Clone ID: PAT_MRT3847_72252C.1
cacttataagtgcggaactgtgttagaagaagaagagctcaaagatactaacaaatcagcaaattcagaaggaaacacagattctgcagataaaacatatagctagcatcaataagtcttgcttgccatggctgaggagtttcaagctgctatttgtggtgaaagttggtggaatattattaatccaacaagaagtgtgtttcctcttatgccatcaacttgttctgtggcagcagctgatgcaggaaactacagcacttggcaaagtactactgatttcgtggatttgaagggaacaaggtcttgtgctgaggagactgatattaacttggtttcttctgatacttctctgagttttcttgatgccgagaagccacaccagagcggaactggtagcatcttgatcgattccaccttacaaatgatgggttttggcatgtcatcttcaacttcaccgaattggagtcaatctttattagggagcagttttgattctgtgcttcaagaagaaacaggcataggtggtggtggttcttccaatgattcacaaatccaaaaggattggagtccaaagaatttctcatctgatggtggcagcgagcaagtttccaccgttgatgctttcaagccaatgaaccaagaattttccttgaatcagcagagtctgaattctgttgttacaagcactgatggatcattatctggtggtaatttcccagttgtttcagcctcctacggttacccttcaacattgatacaaagcttatatgagcatcaaccacaaccacagaattcacttttcaccaacccctccatgtcctatgggacatgttccaatgaact

SEQ ID NO: 112120 - DNA, 144 bp, Glycine max
  Clone ID: PAT_MRT3847_72253C.1
tcggaattgaaaaagagaagagagatgaaaagagggctactattagggttttgctgtgtttactccacaataggaacacaacctggtgcgactccattgaactagtcgcggtgctgctgtgcacagttagtggtaggggcggtt

SEQ ID NO: 112121 - DNA, 270 bp, Glycine max
  Clone ID: PAT_MRT3847_72254C.1
cggctcgaggcacccctgtggccggggtcacgagagttcctgctgggccagtggccagcctgtctccaggtggccagacagcagcctcctgagggtgtggcctgcaggtgcactcatggctcttcagagcctgaaccacccctatgagttgaagtctggaagcgcagctgggcattgtttggaagtaggaggactgtgagtgtgtgtgggcaggtgaacccttcctcttcctcatggcgagtgtcgaagagggaagggagctgtgtcctg

SEQ ID NO: 112122 - DNA, 249 bp, Glycine max
  Clone ID: PAT_MRT3847_72255C.1
ggctcgagggagctgaaaaagttcttttgtcgacttgtgaccacatctgagggtgaccatgtcggaagacgctacccgactatgatactcagttgcagacacaaaggcggagatagagaatctacccacttccagggagggagagggaggggaatggctactcattgagccgagaagaacaccaaattgacagatacaggagacattagcccagttggacaagacaaggatgcagcagaagcgagatgg

SEQ ID NO: 112123 - DNA, 233 bp, Glycine max
  Clone ID: PAT_MRT3847_72256C.1
gggaagaacgcatattacattccttaactaaaggcgaagaccatgacacttttttagtgacatatccgtctattatcgaaggttgggaatagcatctatagtataggtacgcctaagaaccaaaacattctcttgaatacaggcatcgcccacaaagaaatgcttttgccgtatcaagaacatccatgaactctggaacatgtttgttagttgaaaaccttagccactgcacc

SEQ ID NO: 112124 - DNA, 511 bp, Glycine max
  Clone ID: PAT_MRT3847_72257C.1
tagttctagatcgcgagcgccgccccaaacagctaaccaatggaataattctcaaactttatcataataggtccatatgttacattttttgacaaaaaagaaagaacagcatacaacagcaaaaaagaataataggcagagctttattctagacgaattcagcaaactgaacacttgattcaggtaagcatcaaatccaacaaaaagaattcctcccagctcaatcagcatctggaagcaagaatctccatcaaggacaaaccaagcttacaccaaaaacatgtaaagcatggttgctgcatcaataaaccagagtttctccaattgtaacatgtttggattaccattacactctattccaaagtacctacagaataacagatacaaaggttatgtttgttttaccgtttcattccgtggacacacgtttccaagcaccattttgtgagaagcaacaaattgttactacttctccttgaagggccgtgagaggggggtgtagaagagttac

SEQ ID NO: 112125 - DNA, 409 bp, Glycine max
  Clone ID: PAT_MRT3847_72258C.1
ttgggtttatattttttttgtcctatattttaaggatcatttcaaactcatcggaaggggggaaaaggaatttcccccttccacaataaaaaaaacccgagggataccctggtccttttttcaaaatgatttaataaaacactttttttttttggggggaccccttaagtgggggaacacccaagggtttttcatcaaattatttttttgaacaagggctgaacccaggccccaccaaaaattttttattggggggggcgcacttggcccttttggggaccaccaaggggagtgattattcctattaaatgccccccgggagctggggggggttttcccccaaaaccccccccccatggcgaaaaaaaagggggggggtttccttaaatttatcccccctctttgtttt

SEQ ID NO: 112126 - DNA, 370 bp, Glycine max
  Clone ID: PAT_MRT3847_72259C.1
gactgtagataatcatgttaagcttggaggatgtaccacttctgatgtgacacacaatgcatgagctgataatgggaacttttcttgtggtccaaacaattaccgacagaaaggtatctcgggttgccccggttgttcggcccataaactgccgtgtttaaccattagcatttgcagttgcgctctctggattgtctttgtgcgggcgttttgctatctcgccaaaagcatgtaatagccgtgttcgatgcaaaaatgttttccgttcatacagccccacgtattatattccagaaattttaggtgctagacctggggggcctttagggggggcttactcgaataaatttgttagggttcccttcctttt

SEQ ID NO: 112127 - DNA, 509 bp, Glycine max
  unsure (1)..(509): unsure at all n locations
  Clone ID: PAT_MRT3847_7225C.1
ttgtgcatcaatcggcggggaggtcattaattgtgaatccctccgtttgttccgcncgttttccttattttgcttgttagattcggggaggatcaaatttcgtgttgagtggttgtggttgtggggtttcaaaaacttattggggattttaaattgggttttctataatttttgtatccattttgcctttagctttctttgggtaccattgcatataaggtaataggaaaaagtttccatgtttattgtgtttaaaacattttcctgcggaaaaatcggttgattcagatggtgttaatactggtaagtttcagattccaattggttcaattgtaatagggcttcttagtaaaaggggcttcgtggttaagcttctattttgcctaattgcgtctttgttttaccctgtctttctaaatgggcaacagctctgtgctgatgtgttgattgatgccttgtgtatgtgcgctaggctatgggttgctctgagatgattgaagaatccattt

SEQ ID NO: 112128 - DNA, 226 bp, Glycine max
  unsure (1)..(226): unsure at all n locations
  Clone ID: PAT_MRT3847_72260C.1
actactataagtcacagcctcattnatggncacaagccacttagcactgagtgctgcaattgaagttgaagtcttggcccntctntcttcaantccaaacacacgatctcatcatnccanggctgcantccggctcnantgtaggagcngtcaccagagncctntnnganactgnatgggncnccactnggggtttnagtnccgagtcanatccttcnttgggnna

SEQ ID NO: 112129 - DNA, 293 bp, Glycine max
  Clone ID: PAT_MRT3847_72261C.1
ctatctctcaatccgctctctcataatactaacctctgtaattttagaagcttattatacccaatctagatatacctatcttagagaaaaccctaagtggcaagacgatcaccttggaggtggagtgctctgaccccctccacaacctgaaggccaaaatccaactaccatggaaggcagttgctgaaagatcaatcagtggtaatatccgccggaaaacaaatgcgaagaccgcagaaccctacgacgataccacattcaaaatgagtacactctctagctgggactacgac

SEQ ID NO: 112130 - DNA, 463 bp, Glycine max
  Clone ID: PAT_MRT3847_72262C.1
tcggctcgaggcgaacgaacgaactaatcaatacaacgccatatctctgtgcatcgcttccttccctcgtcctcaattcgaatcaatttcctcaaagttgctcccacttttcttcgcatcataattcggaagaaactggtttcgatggtgcgagctccgaatccagagcatcgggaatcgaccacgccctttgtcgtacagggagagggtttgacaaatgatgggtttattcctcagatattttcatctatgccagctctcaatgatgcagcttcttatcttgcacaaacaacatcatacataactggatgtttctctgattattcagtggaacattcccccagactttttggtgcttctgacactcgtgcaccagagcttgtggattttccttcttctgaaactaatgcaacttcatctactgaaaatgagcatattgcttcaaacagaacccatttaacct

SEQ ID NO: 112131 - DNA, 448 bp, Glycine max
  Clone ID: PAT_MRT3847_72263C.1
ggaaaaaacaaccaccttgggtaccttattttaacactttcctactttaagaaggattaaatcccaaaatggcattaccccttttattgggaaccaaccttccagaaaccagaaaattcaccacttggtcctttcttaaacaaaagcccggggaagccaaatgaaccccctttggtttattaaaaataaaaaccggttttggaagaaaacaattggtggtttttggctaacaaaaaaccctaaaaaaaaccaaccatttccacttaaatggttggctggccgggaattaagccaaccacccaaaccccttattaattaattggggggcccaacttcaagcccaattttggggggcaactttggcccattgggtttaaaaggcccggggggaacaacccttttattaagttggcccccaaaaaaagtccttttgaccctaaaaagggtt

SEQ ID NO: 112132 - DNA, 268 bp, Glycine max
  Clone ID: PAT_MRT3847_72264C.1
ttatttaggtaatgtaatcatgtctgtgtgcttttgctacttccttatcatttctctttcttcttcctccctgtcactgtttttgtttttgtttttgatcaaatttgttttcgctaaatatgacctagaatcctctatgttctttctttctcccaacttggacttactctttccgtttctgtctcgctttgttttcgtgagtaacagttggaaactcgtgttcaacacactatcattgttcgtaacagtgtttgtttgcttactctta

SEQ ID NO: 112133 - DNA, 541 bp, Glycine max
  Clone ID: PAT_MRT3847_72265C.1
ccacgcgtccgtacggctgcgagaagacgacagaagggagatatcatcttgaccatagtgagtttaattaggaaaattatctttaggtgtttaattaaagtaattgtctttaggaatttaatcaaaatatttatctataatacacttaattaaagtaattatttttagatatcatattagaatatttatctataatgtgtctaattaaaataattgtctttagagatcatattataatacctatacatagtgtgcataattaaagcaattatcttcgggaatctatgaataagaaactagagtctttacttgggggatttgaaattcattagacatttgacgaataacaagaacttttgagaggagaattgcacgagtaacaattggggtccgaatctgtaaaaaaaaaatatctcttttatttctaatgtattattatatgatgtttagttattctatgattatgattggctaaatcccttaaaactcagattgtgatgtaggtatacctatgtattttaggtcctctttttaataattt

SEQ ID NO: 112134 - DNA, 238 bp, Glycine max
  Clone ID: PAT_MRT3847_72266C.1
ctgcatgggtggggggagtgcacccattgtacattcagctattacgtgcaggaaagtgacaagtactctggccaattgcatcggttacctccagaacggatgaacgccgtcttcaggatgctgcaacggattgaacagcctcaatgcctgcggcaagaccaccgacgaccgacagacggagtgcaactgactcaagtaggccgccagccaaatctccggttttaactccaaacaagct

SEQ ID NO: 112135 - DNA, 500 bp, Glycine max
  Clone ID: PAT_MRT3847_72267C.1
cctcgtgccgaattcggcaccagcaagtggtcaaccctttttttttagaacacaaattaaatttataacatatagatacatgactaatgttttataaaattaaagacttattgattttttatattaaccttacaaccatacaagaaactattagaggtttgtttcaatatattgtttaattactaataagatgtattttgaataaaacatattctcgttgatgtctggcatgtgcacgatgatagtggttcaaatttttataatttctactaaattgatatgaactttgtaaattatttagatagtgtgagatttcctggcttgttgttggtgtgaatttattattttccaaatttgcaatggagaattgatctttgtaggaacgattatgcaaatctttccaaatataacatcatgcaatctttggtttcatggatcacaataaccaataaattatcattgattacacctcttcaaaaaaaaaaaaaaaaaaaaaaaaa

SEQ ID NO: 112136 - DNA, 902 bp, Glycine max
  unsure (1)..(902): unsure at all n locations
  Clone ID: PAT_MRT3847_72268C.1
cacgttttatttagtgtgttaaagagacagattaatatttgtgtatatagatagcatggcactgcactnnntgcatggcggattaaactgaaaaaagcatgttaattgatacaggataaatgtttacatgatggaacatgctttttcgttgtcgtcgctgaaaaaggaaaaaaagttgtcttgggcatgagatgaaggctggaagacgtttttaacttaaccggtgggtgctctacggtcatttactccgggggcctaaggatggtagaccacatgctgttcaacatttggcccctttctggctcttactttccctgtgctccttacccttttaagcaccttatttggatccccatttcctctcactacccccctgctcccctttttgttcacctccacagatttcactccttttattgaactcactgcatttctcactcttctttcgcaacattgcctctctctctatatttttttctctgctgtctgcattgctttctgcttggtcctagtgctggttacagtgcaaaagttggagaggtaatctagtgcacccattttctagaaatcaaaccaaagccagatagtgagagtgtgattcatcaatggtgtttatgtagggaagtctctaaaagattcagaggactaattaaggcgcaaaagcaggtttcttgataattatattataaactgtaattattacaggggacatttgcttgtaaaagatcaccaactgtgctatgttttattgactntttttagaatctttatatttattttgtctttcagttttgtacaatcattatgctttacttttccacagttcactaacaaattgctccaacaatgccttttattatatgattataatcactgtgttatatattgaatggttcaatatc

SEQ ID NO: 112137 - DNA, 229 bp, Glycine max
  Clone ID: PAT_MRT3847_72269C.1
ttgtatctaataccttcaactctttaaagatcctaggtttgaacgggccaagcccttgactaatgggttccttctcttgacctaaactacctattccgacttatttaaccaggcccatctatcctgcttgcacatagttccaacattatccaatgaaactgtgaaagatattcatatagcgaaacctagctagttgaacgatagtcctaaacctaaattacttactata

SEQ ID NO: 112138 - DNA, 1990 bp, Glycine max
  Clone ID: PAT_MRT3847_7226C.1
cccacgcgtccgcccccttcctgcaaaactgaccaagtcccatactcttccgccatatcactacttttcaacacgctctaatttaaacaatactcccactaccgcacatggatattttcacttcctatacataaccctattccgccatctcttttttcacacttcatttccttcttcttctctgattttggttcatggcgtgggcgaagaagccaggtgactcaaataatgtaggctttatgagatggttagcgttggtgttggtgttggtgttgttatcgggcttttggtgtgtttcgggtgtgaaagaaggaaaaaggaatgcgtacgcgacaatgatgtacgtaggtacgccgagggactacgaattctacatagccatacgcgtgcttctgaaatcgctggctacgctcgacgctcaagccgatcttgttgtcattgcttcccttgatgttcctcctcgctggattcgtgctcttgaaaaggaagatggtgcgaaagtagtgagagtggaaaatctggacaacccctacaagcatcaagataattttgacaagaggttcaagttatcgttgaacaaactctacgcatggagcttagtggactatgacagggtggtgatgttggacgctgataacctcttcctccaaaacacggacgagttgtttcaatgtggacaattctgtgcggtctttatcaatccttcgttgtttcacacaggactcttcgtcttgaagccatcaatggccgtgttcaaggacatggttcatgaattacggaatgggagagaaaatcctgatggtgcagaccagggtttcatagctagctatttcccagagttgcttgataagccaatgtttcacccaccacctaatgccaccaagcttgatggaacatataggcttcctttaggttatcagatggatgcatcttactattatcttaaacttcgctggagcataccctgtggaccaaatagtgtgatcacattcccaggggcaccatggttgaagccatggtattggtggtcctggcctgttctgccattaggcctccagtggcatgaaaaacgtcgccaaactttggggtatggtgcggagatggctgtgatacttattcaatcagcaatatatgtgggaataatagcaatgacgcgttttgcaaggccaagtctctcaaagctatgctataggcgttccgacaagagcatcaacttggtgcagaacatcctcaaatttgtggcactgtggagcattcttgcggcttacacaacacccttcttcatcattcctcccacggttcaccctttgttgggatggcctctctacttgcttggtgtctttgcattgtgctcaattacggtcaatgcctttctgctgccaatgttgccggttctgatgccatggctcgggatcgccggtgccttgattgtcatggcttttccttggtattcagatggggtggtgagagcattgtgtgtttttggttatgcattctgtgctgcaccgtttgtgtgggcttctatgactaggataatggcagggcttcatcagtctctagaaagggaagcttttttgccaagattaggagaatcctcaccaccttcttggtttaacaagttgtactgagttgtctaattgagcatgattgaatgcttggggacatggatgacaattgagaagctcattggaaattgaaggggaggaagtgccatggatttagcacctttatgatgttacggttgaaattatatacattcttttggagtgagatggccatgctgcacttactaggaggaggaacatcggggacttagtgtgtacatagattgttttgcaattttttcgcatacatctgtatcaattattgcacgattggttcttgtattcaaatttttaaaattgttattagatagttaaataagatgagagagttctgcattaaaattgcacgattggttcttgtattcaaatttttaaacttgttagac

SEQ ID NO: 112139 - DNA, 1628 bp, Glycine max
  Clone ID: PAT_MRT3847_72270C.1
gtcgggccaaaaagacgtggcacgcatcgatggatcacacccgaggtctttaaccttcacctctgtggtggagaaggacgccgaatcagaaggacaatcgggaggttgggaaataggtaggaagtggctcaagttgggagaaaaaatagcctctggatcctctggagatttgtaccgtggagtttgcctcggcgacggtgttgctgttaaggttctgagatcggagcaattgaatgatgccttagaggatgagtttgcccacgaagtgccatttctgaggcaggtgcagcatttaaatgttgttcgtttcattggtgcatgtacagagtttccacctttgggctgatgcactggaggatgagtgggttcaagaagtggccatcctgaggcaggtgcatcataaaaatgttgctcgtttcagtggtgcatgtacatactgtccacatttgtgcatgatacccgagtatatgcccggaggaagtctggatgattacgtgcacagaaatcataatgtcgtggtgctgtcgcaatcactaaaatttgcaattgatgtctgcaagggtatggagtatttgcatcaaagcaagataattcacagagatctgaagacggctaatttgctgatggatacgcacaatgttgttaaagtcgcagattttggagttgctcggttcgctaaatcaggggggagtgatgacagcagaaactgggacatatagatggatggcaccagaggttataaaccatcagccctatgatcagaaagcagacgtattcagtttttccattgcactgtgggagttggtgtccgcaacggggcccgatgactccatgtctcccccacctgctgccctgggcgtccgtcagggtctgcggccagaacttccgaacgatgggcaccctagactattagagttgatgcaaagatgttgggaagcaattccaagccaccgtccatcctttaatgagataaccgctgaacttgaaaatcttttgcaagaaatggagaaagattcagaagcgaatggtgcttgacattttcagcacaaactaatatattccagttattttacacggtgggatggatctgacttttttttcccttcctctggcagctgtagagtttttttcacgttcccttgtggcaccgagggagaaaggagttcgcagaaatcgtgaccaatacaaagtgagaaaatgtaaagaggcatactaatgttatagctgactatacttaaaatatatatatcccaggatcacgtcaaacttctccgaaattattttgattcgaggaatgcgttccacgtggctattgatgtgttctggtagccaaaaagaaacatagttgacgtaaaatcaatgaagtgtatagtgagggtaatgctgttgagctttaatgtttcattttttttcttggggtcaagtattgagaattttatgttttgcactgtaaattaatgacaggcatggaccgatgagaccaggtatctaaactattttaatgcaaagtgttacctttgccttattattcatatacatgttctcataattaggtgaattttatgtgagattcatcaaaaaaaaaaaaaaaaaaaaaaaaaaaaaaaaaactcgagactagttctctc

SEQ ID NO: 112140 - DNA, 393 bp, Glycine max
  Clone ID: PAT_MRT3847_72271C.1
tccacgcgttcttatcgagtatgctaccacacacagaagccatacccttccctgggtgattgacgtcttcagtgtccacagttgtgtccaaagacacgcagtactaccggtcctaaacctactatgaggctgacagatccacagtaggattcaaaggtttgatcaatacgggaatcagaaccattaaacctttcttcgtacacgcggacgaagacctagtggacattacactccgtaccataacccagatctgtgcaagagatacccatcaacgcgtgttgcagaatgtccacttgactgttagcacagcggggataatgcaaatggacaaccacagcattagggtggaacttgtccttcggacactgttagaggtgaatgtatttaacgatc

SEQ ID NO: 112141 - DNA, 382 bp, Glycine max
  Clone ID: PAT_MRT3847_72272C.1
atcaatgttctccacaagcaaatataagtctccctcctggcttcgatcctaattacagagctcgtgaggtgcacatattattttaactggctgagatcaaactacatttgcatatgagcacaaatctaacatggagatttttgggatgggccaagtcaatttattgtgttgtataaatattgatatttttttaatgatcctagttagcatttgttttttgttggccaaataaaggtataattattatattttattttatttattttcaatattatctgctatactagttgtgtgcttgtaggagccaaactttagtctgttattgagccatgggaattactagtgttggtgacatttgggatatatgggaaaatgttaatag

SEQ ID NO: 112142 - DNA, 504 bp, Glycine max
  Clone ID: PAT_MRT3847_72273C.1
caggagcttgaggacgatatactaccagctgaagcggagcgtaggtatcaagaatacaaatcagagtatatctcgacccaaaaacgagcttattttaatgctcataaggatgaggaatggttgaaagataaatatcatccaacaaatttggttacagtcattgaaaggaggaatgaaaatgctcgacagctagcaaaggattttttgcttgatttacagagtggaacattagaactaaatcctggtttaaatgcctctataagtaaatcagggcaagctagtgaaccaaattcggaggaggaagcagacactggaggtaaacgaagaaggcagggtaggggatccaataaagaaaatgatttctcagctgctccaaaagctcatcctatcagtactgaaccaagacggatacaagcagatgttcaacaggctcaggcccttgttcgcaagcttgacacagaaaaggggattgaagataatattttatgcatcagtgatcacaat

SEQ ID NO: 112143 - DNA, 136 bp, Glycine max
  unsure (1)..(136): unsure at all n locations
  Clone ID: PAT_MRT3847_72274C.1
tcncncncncgcntacgttagctcggtattccgagcttggntcctctagagcngccgcncgactagtgagcttcgtatacccgggatttnattccggaccggtaacctgcnggcntaaccanctttnccctatagt

SEQ ID NO: 112144 - DNA, 515 bp, Glycine max
  Clone ID: PAT_MRT3847_72275C.1
ttcccatgcaggaagccttccattacatgacttgatatgacgctcctccttggttgggggggggggagggtgaccgtagcagacgttaagggaggtatggcaggtaggttatgggcgtcggtaaggtacgccgtaccttaggatggaagatagaggtaatgtataaggagggtaatgttagagcaatcatgatagcagaattagaatggaggtaccccctatgaacggcgcaaagccatgtagggccgcaatgttaaggctagtggaagggtagcagtaataccgctggcagagttagccagaaccaacatgcaagacgccgacaaggagaacagcgaacttagccgccggtagctgtccccaccaacttgaaaaattgcgtggtgagagctaccagtgcagtccaatatatgtttgcggaagtttcgacctctaccacgggttcaattccaaatagagcagcgcaactgaagcttagctgcaccaggagaacacaaggccaaggctgaagcaaa

SEQ ID NO: 112145 - DNA, 422 bp, Glycine max
  Clone ID: PAT_MRT3847_72276C.1
tacggctgcgagaagacgacagaagggcctacgaccactatttactttgtatttatcggtggttggcgtatttcaacattaactaaagtatggaaactgtgctttaatttatacatcaggagagcaaatgttagattagttaattaaatgaattagcataaattagttattagagatttttataataccaaattgatgaaaattgtatggactttgctttatgagtggctcatgatgattaagtcactcagttttagtagtgataataacttcttttacaccatattttttcttaatgcactcttctatatttttgtattttttttttctcgtgttggaaactcgtgtgtatattcgtgttggatcatagcataggttaagcctatacactaaggattaaattaatgtgagaagtggattaa

SEQ ID NO: 112146 - DNA, 1245 bp, Glycine max
  Clone ID: PAT_MRT3847_72277C.1
ggctcgagcaataattaacaagttaagatttgccctcaagttttgatctcttcaattcggctcgagccgcaaactcattctgggcggcgatagttttatcgttctctatctccaagatggtcggagaacacggtacgatgtcacttgcctccgatgatcagaaaacaccacttcttcccgtgcacgagccaatggaaggaacacgcaccagcgtctccttcagcatcaaaacaattctaacactggaaaacttgtacgtgattctgggacctatgctgtctcttttcatatgcctcttcgtgaagctcgacgcgccacccacaagccagaaaatgcttggtgtgattgcgtgggtcttcgcttggtgggtcacgcaggccgtgccacttcccgtgacttccatgtgtcctctgtttttgttcccaattttcgggatagcttcagctgatagtgtggcgcactcttacatggatgacgtcatcaccctcgttttgggaagcttcattctcgccctcgccgtcgaacgctacaacgttcaccggagattggccttgaatgtaacactgctgttttgtggcgacccggttaatccagcgctgttactgctggggctatgcgcgacaatattcttcgtgagcatgtggctgcacaacgtggcgacggcggtgatgatgatgccggtggcgacggggatcgtgcagcggctgccgccggcgcacgagcagtcggaggcggtgaacaaattctgccgcgcggtgattctcacggtggtctacgccacgcccatcggaggaataagcacactaacgggaacgggtgtgaacttgataataatcggaatgtggaagagcctcttccctgaggcaaaaccaataagcttcaacacgtggttcttctatggtttccctgttgctgttctcatcctcatttgtttttggtgcatcatttgcctcctctatgtgccaaaaggttcgggtcgggctttgtctgcttacttggatagatctcacttgaagagagacctcgaagctcttggtcccatggcttttgccgagaagatggtgttgtctgtgtttgggttgctgatcatactttggatgacaagaagaataacagatgacattcctggatggggatctttattccatgacctagttggagatggaagtgttagtgttatggtggctgttttattgttcataatcccaaacatgaagcaagagggggagaagctaatgagttgga

SEQ ID NO: 112147 - DNA, 415 bp, Glycine max
  Clone ID: PAT_MRT3847_72278C.1
tgggttagcattattataattatgggtataacacatagtaataatatacatcattttatttgtagcaagaaacacaaatgcaaaagtggtcacggtgtactaggtactaacaacagacggtggttgttacctaattaattaacaagacatcacagtttcacgtactattcttgaccaagtagcttcacttcccagttcccacgctcatccttccaagcccgcagcgaccatctaattcaatttttcagtacttgaggcagagccaggctgagtcctgggcctgggcttgtacttgggctttccggtcctactttgacccagccgattaatcatatacaaagcattgctagtgaccctcgcaacatccgtgactcttcgtttgacgttcggcctggcattccctccgaagccttcg

SEQ ID NO: 112148 - DNA, 220 bp, Glycine max
  Clone ID: PAT_MRT3847_72279C.1
ccatggcagaagtggtttctgcaagatgccatgcaatcgctgaacctcttcgtcacctgaaactgtcttctattccctcgtcgcgtaacaaggctgaatggcatggtgaagctcaaatcgtcgagctctgaattcgaccttcacattgaagatgacctgccttctggatccagtgttcagcaagaacggcttggcaagctccgcctgtgtgattcgccag

SEQ ID NO: 112149 - DNA, 727 bp, Glycine max
  Clone ID: PAT_MRT3847_7227C.1
gtttcctcccaaaactgactaattccaagactattcctccaccttctcactacttttcgacacgctcaaattaaaacaagagttccactactgcaaatagatattttcacttcctacatataaccctattccaccacctctcttttcatcatcgcttcaattaacacttcctttcgttgttttcctctgatttttttggtggttgatggcgtgggcgaataagcgaggtgactcaaaaaatgcagggtttatgagaacgttggtggtggtgttgttggtgttgctatcggggttttggtgtgtttccggtgtgaaagaaggaaaaagaaatgcttacgcgacgatgatgtacgtaggtacgccgagggactacgaattctacatagccatacgcgtgcttctcaaatcgctggctacgctcgacgctcaagccgatcttgttgtcattgcttcccttgatgttcctcctcgatggattcgagctcttgaaaaggaagatggtgcgaaagtagtaagagtggaaaatctggacaatccttacaagcatcaagataattttgacaagagattcaagttatcgttgaacaaactctacgcgtggagcttagtggactatgacagggtggtgatgttggacgctgataacctcttcctccaaaacacggacgagttgtttcaatgtggacaattctgtgcgggctttatcaatccttgggtctttcacaca

SEQ ID NO: 112150 - DNA, 1423 bp, Glycine max
  Clone ID: PAT_MRT3847_72280C.1
cgggtcgacccacgcgtccgggctcacctgctccccttcctcgtcctcactctcctcgccgccaccgcctccgcccacaacatcaccgacattctcgccgccaaccccgactacagcgacttcaacgacttcctctcccaaaccggcctcgccggcgacatcaacacccgccagaccatcaccgtcctcagcctccatatcctcctcgactacttcgacaacacaaagctccaccagatcaccaacgggaccactctttccaccactctctaccaaaccacaggtaatgccaacggcaacgtcggctccgtcaacatcaccgacctcaaaggcggcaaggtcggcttcggctccgcggctcccggctccaaactcgactcctcctacatcaaatccgtcaaaagtatcccctacaacatctccgtcatcgaaatcagcgcgccgatcatggcgccggggatcctcgcggctcctcctccctcagccgacgttaacataacggcgctcatcgaaaaagccggatgcaaaacgttcgcctcactcatctcctctaacggactcattaaaacgtttcagtcaacggcggataaaggtttgactattttcgctcctaacgatgaagcgtttaaggcgaaaggcgtacctgatttgagcaagctcacgaacgctgaagtggtttcgctcttacagtatcacgcagccgctaagtatcttcctgttggatctttgaaaacgacgaaggattccattaatacgttcgcttccaatggcgccggaaagttcgatttgaccgtttccgtcgccggagattccctcacgttacacaccggtgttgattcgtcgaggattgcggacaccattctggattcctctccgctttcgatttattcagtcgacagcgttcttcttccgcaggaactgttcgcgaagtcgccgtctcccgctccggcgccggaatcggtttcttctcctactcctgcaccgtcaccagtggcggaagcgccttcgccgtttcccgcgtcgcctccggctcccgcgggagagagtcccgctggtgctccggcggaagcgccatcatcagaagctgagcggagtagttccgccggtaagaatgacggggttcacgtgaaagcttctgcggctctcactgttgcagtgtctgcattgtctgcatttgtgatttctgctacttttatgtaattttaatattttattggttttgttttgtaagtgtttttttagtttttttttttaatttgcgctttttttccgggatattattggacggggaatttggtttatttatttattttgttataaattaattcaggcatgtggtgatgtagggcgtgttagttgtgtatttttattttagttttaatttctgagttatggaagattctggtgttttttgggtggtggt

SEQ ID NO: 112151 - DNA, 818 bp, Glycine max
  Clone ID: PAT_MRT3847_72281C.1
ggctcgagagcctattccaaagccagttcccgtgtataagcctataccaaagccagttcccatttataagccaattcccatttttaagccaataccgaaaccagttcccatttataagccaattcccatttttaagccaataccgaaaccagttcccatttataagccaattcccatttttaagccagtaccgaaaccagttcccatttataagccaattccaatttttaagccagtaccaacaccaattcctttttttaagcctataccaaagcctgttcctattgttaaacctattcctattccagtttttaaacccatacctaaaccatttccaattgttaaacctatcccttaagccaaagtcattttttaagccagagactttcttcagaaaacctattcctaaacttcacccaaatctgataaagcacggttttttacattttccaattcccaatacaattcctacaatttcaactccataagatgatttgcccgtgtcctataaaattattgtacttagaacgttatcccattttatttccaatatagctacgtttgttttaaaacatcaacggggtttctgtaaaaatcctatcgtactcttgccccccgtattaaaatatatccagttcatttgcctcaataattttctcagcattcccgttgtaaattgatttgtatgtattattccaaaaataaaactaattctctatttttggtttaaataaaaaaaaaaaaaaaaaaggggggggggggggggggggggggggggtgccgccccccaagaaggcgcccagagcctacggtaacgg

SEQ ID NO: 112152 - DNA, 1534 bp, Glycine max
  Clone ID: PAT_MRT3847_72282C.1
ccgatggcagcatgtatacattccgttgctgtttttcagtggagtagattatattgatgctcctacaccatatatgatgggactctattcgggtgttgatacttctgctctggcaattgatggggttgttgttgtggcccttgagtataatcgtatcactacctcagaggaaattcctcctattcctgagccagaattcagccttttgcgtggtgagataatgaagctattatatcccaatgtaattggaattgatgagatgaacactggaatatacagtgtgtctgagcattatcctaaacttagggctaagcaatggggagaggaacacgaccttcagctaaggatgatattcctaaagttctttgcaacagttttaagtggctatcgcaatttcctagaaaatagtgctactcaggtcttcaactctcaagcttttttgaagaagcggtctcgatctactaaccaaccaccagagcccatgatagctcagttcctagactctcatggtttcttggattatttggaaagaggagtaggttctgatgaaaacaacaataatctgcttgataagctacaagatgcaattggaaggggtcaaaaccctatgtcaattcttccttcatcctcagtagaacctgagattttaacagtatcagattctgatattggaatatcaggatctggtgccaaatacacttatgatagatttcctgcaaatatcagaacagaagaacaagaagaaaagaggaaacagattcttgcagcagttagtaatgcttttgagtactcaggaaggcatactcctagtaaggatcctttagcagatagtcttagtccagacgagagagctgctgaaagggatcgcatggtgctagatattcaggttaagctgcagggtttatggctgcggcttcttaaactgggagcaacagatgatcctctctcatcctttgaatatggaacgatactcgctttgattgaatctgatgcagaggggattggcggtagtggatttgttgaatgtataagagagcatatacattcgggttgggactgtcatctcactgaagaacagtttattgcagtgaaagaattgcttaaaacagctattaatcgcgcaacatcacgtaatgacttgttgaccattagagatgctcttgaagttccttctgatatgtataagaaagataataataatgtgctggactacgtccaacgtcatcttatctctttatctatttgggaggaattacgattttgggaaggatattttgactatttaatggagcaatcttcaaacaagtctgccaactatgcatctttggtgacagctcagcttgttgtgttggcatcacacatggtattgtttggtctactcatgtgcttgaatttcattgaagtcaagttgtatctttttgtgcttttaatactttgcctgcatgaaggctgggctgggacttcctgataatgatgcttggtacatgatcgaaacaattgcagagaggaacagcatcggatccaatcaatttat

SEQ ID NO: 112153 - DNA, 459 bp, Glycine max
  Clone ID: PAT_MRT3847_72283C.1
ctctctccatcatggctcacctgctccccttcctcgtcctcactctcctcgccgccaccgcctccgcccacaacatcaccaacgggaccactctttccaccactctctaccaaaccacaggtaatgccaacggcaacgtcggctccgtcaacatcaccgacctcaaaggcggcaaggtcggcttcggctccgcggctcccggctccaaactcgactcctcctacatcaaatccgtcaaaagtatcccctacaacatctccgtcatcgaaatcagcgcgccgataatggcgccggggatcctcgcggctcctcctccgtcagccgacgttaacataacggcgctaatcgaaaaagccggatgcaaaacgttcgcctcacttatctcctctaacggactcattaaaacgtttcaggcaacggcggataaaggtttgactattttcgctcctaacgatgaag

SEQ ID NO: 112154 - DNA, 244 bp, Glycine max
  Clone ID: PAT_MRT3847_72284C.1
cttctctgccccaacgattgggggacgccaatatattgtacacccagggcgacatctaactgctcaaaggttaaaaggcgctaatgctaatgataacattgccttaaacaaagatatactggctggcactgatacaactagccacattgggaaaacaattgaaacaaatgctgtaacatacgcaaacttgctaaaagcaggctctaaacctaaaaaaaatggcctccaatataaaaacaaaaac

SEQ ID NO: 112155 - DNA, 1189 bp, Glycine max
  Clone ID: PAT_MRT3847_72285C.1
cctataaaatcaaaatgacttttcatctcattatctttgaagagataatgccataagagtattccattatacagcagcctaaagcagagggaggttggctaactaagaaatattgggaaagccagaaaggtaactgactactaggtgttttccactgaaactgctctaaaaggccgactcagcaagcatgcaagaaagattttccttagctcattaagaccataaagatagacatcatagagaagatgataaagaatggagggtcacattatacctctaattttattatccatcattttgtttcccaaaccctccatacgaccatctctattttttccggtatttgtgttatgaatgatcaccaaaggtggccacatgatcagatcatcctgatttgctgctgcttcatcagcaggtaaaaactgatatgcctttgagttatcaggaggctttgagtagttccaacgcattaaaacacacagagctttgtgtaatcccaaatgatcaatacgtgaatcggcattatctgggttgtatgtgtgcataatgagagcatgcatatctggaaaatcttttgcagacctgccagtgccagtgccgcaaacaagacaatgaaggcgtccctgcttcccatcttccaagtaagtcctcttctgcgaggcattctcactaatgagcttcgcaaagttacaaaaggctttcttcaacgcgtcataatccacctgcgagtgcctagtagaattcgacccatcgagcctggatagtcttcgaggcggacgcgtgggtcgactttggtatattccggccctctggcactgtctttgctataggcttataccctggttttggaataggcttgttcactggaactggatctgactttggtataggtctataccctgaaaatggctttggtacaggtttatatactggaattggaatatgtttcttgaatattggtttatgatgaaaacatctgaattttgcttcttcttcatgcccatttaggtttgtctttggcagcttttcattccataaatcttgagttgtttgctgcagcagtagatgtagcatatctgaaggttatcactctctacaagggaaccccagagctgcaaaagtgcgttctgcaaagaagaagaagaaaaaaaaaaaaaaagggcggccgctcgcgatctagactcgagcc

SEQ ID NO: 112156 - DNA, 3820 bp, Glycine max
  Clone ID: PAT_MRT3847_72286C.1
tcccgggtcaggctcgcgtccgtccgctctctcacacactctcttattgtctctccatcatggctcacattctccctttcctcctcctcaccctcctcgccgccaccgcctccgcccacaatatcaccgacattctcgccgccaaccccgactacagcgacttcaacggcttcctctcccaaaccggcctcgccggcgaaatcaacacccgccagaccatcaccgtcctcgtcctcaacaacgccgccctctccgccgtggccgcaaaacaccccctctccgtcgtcaaaaacctcctcagcctccacatcctcctcgactacttcgacaacacaaagctccaccagatccccaacggcaccacgctctccaccactctctaccaaaccaccggcaatgccaacggcaacgtcggctccgtcaacatcaccgacctcaaaggcggtaaggttggcttcggctccgctgctcccggctccaaactcgactcctcctacaccaaatccgtcaaacaaatcccctacaacatctccgtcatggaaatcagcgcgccgatcatttcgccggggatcctcgcggctccgcctccctcagccgacgttaacataacggcactcatcgaaaaagccggatgcaaaacgttcgcctcactcatctcctctaacggactcattaaaacgtttcagtcaacggcggataaaggtttgactattttcgctcctaacgatgaagcgtttaaggcgaaaggcgtacctgatttgagcaagctcacgaacgctgaagttgtttcgctcttacagtatcacgccgctaagtatcttccatccggatctctgaaaacgacgaaggattcaattaacacgttggcctccaacggcgccggaaagtgatttaggtgacgtctccaggatggcttgcctgctcctctacgtcgtcgtccctggtgcactcacgcgccccgacattttcccttttcagctttcattggtgtggcctagctgttttctcaatgagaaagccttcatctctgcaaagcgcacttttgcgctttggggttcccttgttgcttgttatcaccttctgttatgctacttctactgctgcagcaacaactcaagtttcagggaatgaagagctgccaaagacaaacctaaatgggcatgatgaagaagcaaaattcggattttttcatcataaaccaatattcaagaaacatattccaattccagtatataaacctgtaccaaagccatttccagtgtataaacctataccaaagccagttccagttccagtgtacaagcctattccaaagccagtgtataagcctattccaaagccagttccagtgtacaagcctataccaaagccagttccagttccagtgtataagcctattccaaagccagtgtacaagcctattccgaagccagtgtataagcctattccaaagccagttccagtgtacaagcctataccaaagccagttccagttccagtgtataagcctattccaaagccagtgtacaagcctattccgaagccagtgtataagcctattccaaagccagttccagtgtataagcctattccaaagccagttccagtgtataagcctattccaaaaccagtgtacaagcctattccaaagccagttcccgtgtataagcctataccaaagccagttcccatttataagccaattcccatttttaagccaataccgaaaccagttcccatttataagccaattcccatttttaagccagtaccgaaaccagttcccatttataagccaattccaatttttaagccagtaccaacaccaattcctttttttaagcctataccaaagcctgttcctattgttaaacctattcctattccagtttttaaacccatacctaaaccatttccaattgttaaacctatcccttaagccaaagtcattttttaagccagagactttcttcagaaaacctattcctaaacttcacccaaatctgataaagcacggtcttctacattttccaattcacaatacaattcctacaatttcaactccataagatgatttggccgtgtcctataaaattattgtacttagaacgttatcccattctatttccaatatagctacgtttgttctaaaacatcaacggggtttctgtagaaatcctatcgtactcttgtgcattgtattagaatatatgcagttcatttgcctcaataatcttctcagcattgccgttgtaaattgatttgtatgtattattccaagaatagaactaattctctatttttggtttaaataatatttgtatttcctttcaaaaaaaaaaaaaaaaaaaaaaaaaaaaaaaaaaaacgaaaacaaagaaagacgccgcaaaaaagtatttgcccgtttccgtcgccagagattccctgacgctacacaccgcagtcgattcctcgagggtcggaaagggcgtcgtgtcctcgtccgtcgcgggggcttccctcactccccctccccttgccgtttcctcgggggtcgcggtgccgattctcgctgcccctccgcttaaaattccgtctgccgaccccggtccgcggccgccggatccggtcgcgccgtcgccggttcccgccccgtcgccgggaacgttccctgctccggctcccaccccggcctcaacgggaagggaatcggcctggtcgcccgcggcttcgcccgcctctccggcgaggcggaaggattgcggagacgattctcgattccactccgctttcaatttattctgtggacagcgttcttcttccgccggagctgttcgcgaagtcgccgtctcctgccccggcgccgggaccggttactgcgccttctccctcgccggtgtcaactccatcggaagcaccttcgccgcttccggcatcgcctccggctccagcgggagagactcctgccggtgctccggcggatgcaccgtcctcggaggctgagcggagcacttccggcaagagtgacggtgttcacgtgaaagcttctgcgactctcactgttgcagtgattgcattgtctgcctttgtgatttctgctacctttatgtaattttaatatttttatagtttttattgattttctttttgtaagtgtttttgagtttttttttttaaatttgcgctttttatttttatttttatttttcctgggatgtgattggacgagggaatttggtttatttatttttttgttataaattaatttaggcatgtggtgatgtacgacactgcgacgtgttagttgtgtatttttattttattttaatttttgagttatggttaaggaggccattcgacttgctgaacactttgagaaggaaaaccatggacgcaaggattgggaccgtgtgcagtcacaaacattaggaaaggatgatgagaataatgcaaaccttgtgaaggtggatgagaaaaaagtagataaaaggagggttttgtatggctatcttgggactgcttttgatcttgacaaagttgattttgacacaaggaagaaggctttcatagagagcaggagagaatacaaaccacccatgtagtttttggactatacatgggaatggctatgtaaaatggaatacatggaaagtttttccagttgcattataatcccgattcctgaagatgataaaaagcttttatgtattgtgctgaccatttcatgtacaataggaggcagcattgccatcatttttattttaattcacataatttgtgccgaattttcctgccatagtaatatttaggcacattaagaagatttgtttgtctttcc

SEQ ID NO: 112157 - DNA, 104 bp, Glycine max
  Clone ID: PAT_MRT3847_72287C.1
gtccaccagtttcatatgatgtaccaagagttgagccctttgacgcaaactcaagagcaattcccactgctcaaccactctctggatcacaaagatcaagtact

SEQ ID NO: 112158 - DNA, 508 bp, Glycine max
  Clone ID: PAT_MRT3847_72288C.1
atttatacgtgtgctggtgcacatatcaggcgcagtacataatttgggggaccaaaaaaaccatgaacacaccgagaggaacagaatcgaatgcgcgcatgcgcacgtgtagaacgctccagcagtttgcttttccaagttcagtactatggctataacagtcagaccaatagacggggagcagttttcttaaaccctcgttctactttgctgcatatccatgcttttgggtggtcatgagcgcgttgactcatttttaggtcagtctgatagaatggtaggtttgtctatcctcaaggcatacattagggggccaccctattactctgttacagagccataacctctattatatgatactaggatagtgtgtaataaacagaagatcttctaaattcttatatagtatcatgatcaggtggaagtttgatgattgttatgcagtagtagtcacatttggtgaatgtgaaaaggatgctctgaaaattgaatatatggaagtgcgaat

SEQ ID NO: 112159 - DNA, 855 bp, Glycine max
  unsure (1)..(855): unsure at all n locations
  Clone ID: PAT_MRT3847_72289C.1
ttcccactccatctttctttctgagctctgccaactctcagatttctgtgttctcttcctcactcacttgtcactgtagtatctcatatagattagagccttcaagcaaaaccacccttcaaaatcatacattaatcgcatttttctcttcaccttttccttctttccacaaaaatggttccatctcagttatccaagtatggtctcctcttcatttcttgcacctttttccttatcaacttcttaaccattcccatttcttccctcaacataggagttgaaaccaccggaatcactgtctctgtgagcaaagagtgcagcagaacatgtgagtcaagcttctgttcagtgcctcctttattgagatatggcaagtactgtggacttctgtatagtgggtgccctggggaaaaaccttgtgatggccttgatgcttgttgtatgtatcatgataaatgtgtccaagccaaaaacaacgactacctaagccaagagtgcagccaaacattcatcaactgcatgcaaaagtttaagaactcaagagctcctacattcaagggaaacgcatgtcaagtggatgatgtaattgaagttatcaatgttgtcatggaagcagctctgctggctggaagagtcttacacaagccctagctagctagctacaattaataatggttattacttattacctgcctctcaaagcctatatatatgaggacctagctaaggtagactagttttagtttttgtacgtgtattgtttattgtccttggattttttttttaattagttttgcattttaatttctatcgttttgttgttatttaacgtttagtttaatcanannnactcca

SEQ ID NO: 112160 - DNA, 602 bp, Glycine max
  Clone ID: PAT_MRT3847_7228C.1
gcattgtgctctattgcagtcaatgcctttctgctgccaatgttgccggttctgatgccgtggctcgggatcaccggtgctttgattgtcatggcttttccttggtattcagatggggtggtgagagcattgtgcgtttttggttatgcattctgtgctgcaccgtgtgtgtgggcatctatgactaggataatggcagggcttcaccagtctctagaaagggaagcttttttgccaagattaggagaatcttcaccaccctcttggtttaacaagttatattgagctgtctgattgagcatgattgaatgcttggggacatagatgacaagctcattggaaactgaaggggaggaagtgccatggatttagaaccattatgatgttacggtcgaaattatatacatttttcttggagcgagatggccatgttgcacttactaggaggaggaacaacgcggagttagtgtgtgtatataaagataaagattgttttgctatttttcacatacatatgtatcaattattgcacgattggttcttgtattcaaatttttaaacttgttagacagtgagataagatcagagagttcggcatcatt

SEQ ID NO: 112161 - DNA, 383 bp, Glycine max
  Clone ID: PAT_MRT3847_72290C.1
cgacgcatggtttttgaacggaaagaccgcgttgatgaggaggggacctatgaagaagcactccttaagagcaccacttaacggaggatagggtacggactatatggaacggagaaccattcgctccatctaatggttccccaaatacgcttaccacgcacaaatggtgaaacaggcaaaaggtagacctttactggggatggagaacagatgacattgattcgaacaactactgctgaagaggcttacaacaagcttatcgttgaactagccaaccgagatccaacgtagattgacattgcacgccccaaggatgataaactttctagacgcaaaatcttagacaaaccaaaaacgcgctgactgactattctacccattgg

SEQ ID NO: 112162 - DNA, 198 bp, Glycine max
  Clone ID: PAT_MRT3847_72291C.1
tcgggttctggagctgcttgcaaagcgccaggagccggtagtggctcctccccctgcagcgccggctcccaagccggtggtgtctggagacgtatggagcggccctcggatcactgatgagcagcttgagacctataagcaggcagtggcgcatgccagtgaacttgatgctcagttgcaagccgagagggtgaaggg

SEQ ID NO: 112163 - DNA, 257 bp, Glycine max
  Clone ID: PAT_MRT3847_72292C.1
attaaataccatttattcattaggagcatgtccttgtttatatatgttcatgttttcgtgtgtgttactgcagctgttgggcatccaatatgagaatcaaccaagttagtgattcctccgagttgctgtctgctcaatccttgattttggaggataaaagtgagcttaaaccaagaagtgtagaggagagcccaaccgactttcaccatcaggaaattgtgttttctgactcttcgcacccagaaagcgcggcatcg

SEQ ID NO: 112164 - DNA, 235 bp, Glycine max
  Clone ID: PAT_MRT3847_72293C.1
tttttcttttttttttttttttttttttttttttttctttttttttctttttatttttttggccccccagaaatggggtaaaattaagggccattgcccggggcccaaaccaataaaattttgttgcaaaaccacctgaaaattacattcccactgtttgaaaaaccttttgggcccgtatttttaaaaccccgtgcgagggatttgggcaatttacaatggccaacatgctttt

SEQ ID NO: 112165 - DNA, 424 bp, Glycine max
  Clone ID: PAT_MRT3847_72294C.1
accagcaccgagataactcaaagtgaagctgcaaatattgtaatggagtatgttaagcagcacaacctctttcataagacaaaaaagaagagaattgagtgtgatgagaagctgcatttgctgtttgggaggaagaccattagccggctgaaaatcaatgacttgcttgagtcacactttgcggagaactgtgaggagtcctctgatggtattttctttgactcagaagatgatgagagtgccttgacagcttgtgaaaccccgagaacagcaccttcggagaggaagagtcaaccaaagaaaccagcttttgaaaaaccaaggagctgttttgctgccattgttcctgcctacatcaagcttgtttatttgaagaggagtctagttgaggaccttttaaaggaccctgaaacttttgagacta

SEQ ID NO: 112166 - DNA, 315 bp, Glycine max
  unsure (1)..(315): unsure at all n locations
  Clone ID: PAT_MRT3847_72295C.1
tcccgggtcgacccacgcgtccgtttttttttttttttttttttttagtgggaggcgtggtaagaatatttcccagcantgtttcatcaaattctgctttactcataaaaaaaaaaaaatcaccaaactttgcttgaggctncaagcactcccctaacaaattccaaacacaaacttttgtgtttcactctgaaaaatataaacgaatgctagatagatcataacagtcatgatctctctctaaaaaaacctaagcttgttcatgacatgtttnctttgctggagaaagaagagcatcagaacatagatccttgt

SEQ ID NO: 112167 - DNA, 326 bp, Glycine max
  Clone ID: PAT_MRT3847_72296C.1
tgcaaggggaagcaacaccgggcatcaatgatacgcgcaattgatacgggctccaattgatggcgttacgctcacgacgtgcgcgcagtacctgttcagacttctcgtagagtcctgacacaacctcccaaaacaaactcatcgctgtcgtcgaccgctgtcgcctccatctccgcagactgtttcaacatatcgtcgcaacctcgcttcatatattcgctatacacaagcttcagtatgatcggtcagcaagctaaggcaaagccgcaaggatctgacgtgagtgtgtgaagtgactgaggtaagtgattcatgcatgtgcttca

SEQ ID NO: 112168 - DNA, 423 bp, Glycine max
  Clone ID: PAT_MRT3847_72297C.1
ctatgttaactattttctttatgaatcaaatatttttttctccatgggggttattccttaggtgtgggaggtattttaataatccttttttacacatatattttatgaatcaaataataattttttcttcatcgatcttattctttggtgtgacatctattttaataattctttatacccatatattgttcagatttaaattatctgcacatgaattcccattatacatagctcgcatctttaaacctacatcctctaatttattataacaaagaggtatgttacttaaccttttcttccttttacttgtatttttatctacactttacaacctattctaacgtattttctttctttttttacaacaaccttaaaacacttaatgttaaaataactaaaattaaaatctaattgaattttttt

SEQ ID NO: 112169 - DNA, 359 bp, Glycine max
  unsure (1)..(359): unsure at all n locations
  Clone ID: PAT_MRT3847_72298C.1
acagtgtcctctgaacttaacctacaattcaccttctaccaccccacagtagacctccttttacaacactgaagactttgcaactgggggggttggagggggacaacctttactagaaacatatttatgtcgggcttttaattagggctcgtctcctgcagggctgcctaagctcaacttgagaccaagataagggttcgttatctcggatcataattgttgcttttacaaactattgatngaaaggcttggtattctgggtggctagttcttaccgaggaataaaagtatccccctgtggagggctcttgatctgaattcatgggccccgtttttatggaatcggtttttaattttgg

SEQ ID NO: 112170 - DNA, 327 bp, Glycine max
  Clone ID: PAT_MRT3847_72299C.1
cgggaagcgaagaaggaccagcacaaccagagcccaggccatagccaccgaaaggctcaacggagcgcaagacaagagcaaaccagactcgaggcacagctccaaacggccgcaaccagcacacccagacgccattacaaaagggtgagcagccacaaggtaacaagcacaggagagagacagaaaaaactccactcccaaaggcagcacgtcagcatcatcaacagcagcacctaagcctgcttcaggaacaaggggcatccagcacaagacggacgcatactggaactacaggaagctccccattgtggacgaccacatcataaa

SEQ ID NO: 112171 - DNA, 260 bp, Glycine max
  Clone ID: PAT_MRT3847_7229C.1
cgaatatctcaaggagatattcgtgtaacatagtatatacaaagcttcttcatttctacgctgcttgggaagattggattgcagagacagcaacataacatgggtccaattataattcacgaatagcttgcttctcatcggaccaagatgttcaagcgcacatacattaagatgtgaaggaggtgagtggagtggggttcgtgaattttttttccagtgacgggggattgtacgattaatgttgtaacaaataataataa

SEQ ID NO: 112172 - DNA, 417 bp, Glycine max
  Clone ID: PAT_MRT3847_722C.1
tacggctgcgagaagacgacagaaggggacatcattcataattattgttatgaacaccaaatgatgtaatttaacttgtacaccaattatgcttgagaaaatgtgtattcgtggaaagtagtgaacgacatggtgaaaggaaggtgcctatagcaacagaatggcaatgcaaaattgctaaaaccaactaacaaagcctcttacctagtgtgtaatcatacaaaagtgtcttttgaactggaccatctttttgataatcctggctacacagatagtgacaccattatagacttcgatcgtaggagattatgctttgactcaatccgtgacaagtctgttatactggtcatcacacgattgtgcgtgataaatgcaactataactgactaagttcttttttgtttattacggtaaaaa

SEQ ID NO: 112173 - DNA, 263 bp, Glycine max
  unsure (1)..(263): unsure at all n locations
  Clone ID: PAT_MRT3847_72300C.1
ggggagtttctaatgccttttaccatattttggctggaaaagctgctgtcttttgcattttgaaccatttatagcaaaaaaaataatattggcttgcatgtgagtaggtaaagacaatagtaaaaaattcagttgtaccctgattttagtattatattgggaaactctttctctctttttttcttcttctttatctttgcttggtatacttaaaatcattcaactattagtcctttttttccactaaataaattaaangaaaa

SEQ ID NO: 112174 - DNA, 192 bp, Glycine max
  Clone ID: PAT_MRT3847_72301C.1
atcaggcgagaataatagtctattgtctatttttcagttcgtttgtattactgggaataggtgattttacatgtggtgcatgagttcataactgatttagagaaagttaaacatggatgtgttatgtgtaaatgaaatagatgcactattcagattgaaacatttcagatgatgaaactagacataagatta

SEQ ID NO: 112175 - DNA, 343 bp, Glycine max
  Clone ID: PAT_MRT3847_72302C.1
atccattagaatgagcttaataacatttcaggtctacttaactaggtatcagaaatcttgatagttgatgggcatctgaagatttcagattaaaaaaattaacagataagaaaacaattcactctagcacactgttattattatagcacaaggcacacagataaaactattcaaatcttggaaggattgaacaacctgaacacaagtatcctcacgaaaaccacagcatccaagccaccaatggccagtatctcatcctcagatgtttcccatgctttcaatatccagctaggggagggaacaaatctttccaagcagagatcaatgcgtcttgaatgctgag

SEQ ID NO: 112176 - DNA, 192 bp, Glycine max
  Clone ID: PAT_MRT3847_72303C.1
tttttaaccactaaagaggaatcaaagagagaggggataaatgtttatacacttaactattaatacacataatagcgatcattaccaagaggtaaaaaatactaagtgaggtcactatccaattaatcaaactgtagtctatatttttgacaataaattaattaatatacatactaacgcactgtatcaatt

SEQ ID NO: 112177 - DNA, 364 bp, Glycine max
  Clone ID: PAT_MRT3847_72304C.1
attttgcaaaatagtaaaatgccaccagaacctataattaaatttaaaacacttgatttgggatacaaataggtttttggcttttggtgtaattcaaatgactattttaatgtggtttcactgacatttatgatgaggaactgcgttgtttttctccattgatttactcttttgtttaggaagattccttaatccttagcctctttttctttggaattttttctcttcatcttaatgaattttctttcataaaattgtgatttttgaaattgtgtcctgttggttgtttctgagcattaggttgataacatttgaatttttttagtttgttcttgggcatatatatatatatatatatatatat

SEQ ID NO: 112178 - DNA, 313 bp, Glycine max
  Clone ID: PAT_MRT3847_72305C.1
aaaaaaagtattgggccctatgaattcagcataaggcagcaaagctgatgttcatgtataaaccagacataaaatcactaattcctaaattcattaccattctcataatgggaatgcaatttcatgaagccttctcacattagaggacaaaactagaactaattttggtccttggcatcatttactcaaatcaaatgatgtcccgcgcatatttttcccagttttagaccatggatgtcatgctggttagaaagaacctccctataaatttttaggggagaggaagaacaccccgcccctttatgggaaaaga

SEQ ID NO: 112179 - DNA, 438 bp, Glycine max
  Clone ID: PAT_MRT3847_72306C.1
aaaaaaaaaattttaattacggggcctttaaacggggcaaaaaattgggccccattttttaagggggaaccctgggccaccaaaaagggggcgaaattgatttaatttacttgggcttttaccaaactacaatctaaaaattcatcttgtttggggggggggggatttttatacaaattctcctccgcctttcctaaatctaaaacatcattcaaaggggaagctcaaggcctccttgggaataaacaaatctgattccatgagggtttcactttttttttgatcaacatgattggccatgaggccattcttttccttccctttgggggggggtttacactcctcgaatttgaagcaactgataaaaggggcaatgggtaaaccaccaacctgcatgaaggaatataccactggggggccaacgcctcgaaaacctta

SEQ ID NO: 112180 - DNA, 437 bp, Glycine max
  unsure (1)..(437): unsure at all n locations
  Clone ID: PAT_MRT3847_72307C.1
cataatattaatgcattaaaaaataataatattattattgttttgcctgcattgatattatttgtatcttttatctattgttttttttaggattattctttttattgnnnttattattatatacatatataagtattttatcaataaaaattngttgttagtnnnaatgagtgaaaagaatgaatacacaactcccccatcatattttaaattttgtccaacaaggtatgaataaaaggaaatgaatttatttgatataaaaaaatatcaaattatttttaaaacatcataagaatcattgcnagaaaattgtattttgatnnnnntcatgattatccttattgattcacaaccattacacttttattttcatatattataatatcacnntttttttactttcatacttacatacatatatatatgctgctaataaa

SEQ ID NO: 112181 - DNA, 275 bp, Glycine max
  Clone ID: PAT_MRT3847_72308C.1
cttaataaaaacccaaccgcaggacgccgcacgggggcaccggaaacaaaagcaagccgaccccgcccacaagaacccagaaaaagcacgacccacccagggggacgaccacccaagggaaagacacccacccgccgcgcgggcgacagacaccgagaaccacaggcacaaccacgccgagccaaacagccagaacacaaccccacccgagacaggacggaccggcagacaaaaacgccaaccgcagcgcaccgagagcccagccaaaccacaag

SEQ ID NO: 112182 - DNA, 152 bp, Glycine max
  Clone ID: PAT_MRT3847_72309C.1
aacaaccaaacacaaatatttaatcaagggcattttcataacctcatgtgctccacacatatctcactctatctcttcactacaaccctatcccattctcactaaaacaccactattcaagacatctccagaaactttaaactccaatacaa

SEQ ID NO: 112183 - DNA, 596 bp, Glycine max
  Clone ID: PAT_MRT3847_7230C.1
ctaaaatccttgattccactcttgtcgaaggtcttcaaacttgttgggttgatcagcattttttttgttttatgtaatcattgctactggtaattggctaccatgggttgttgatgtgtttgtgatgtttttttttcttttttaaaattctgatgggaaaaggacgtctttttttctgctgttaattgtcctcatgtggaccatgcatttcactgtaagtcttcaaggtggtcccttccaatgctgaaacaatgctgtggtaaacagtttgggcattttggaacgctaatgccatattatttagtctgtaaagatgttcatgcaatgacatgagaagatatatgttatagtgagcaaaagtgattggtgagagttgtgtgaaaatgctgtatatgtcctgaattcaacttttatgtttaatttgtaccttagaatgagctgctgagtttgacatcaactcgtatttaaacttgaacctaaacaaagtttttaatttgtaatatttttttaaaaagagcatcttgaatatcatgttcacataacattaggaaagcaataccctgttgttacgtgttttcctcttgtgtaaatcatta

SEQ ID NO: 112184 - DNA, 860 bp, Glycine max
  unsure (1)..(860): unsure at all n locations
  Clone ID: PAT_MRT3847_72310C.1
aagtgagttagacgagnggnnaggaactgattagttcattgtcagtgattatggggatgcagaagcatgttcttcttggactacataaagaatcgcttcaagctttacgtgtgaactattaccctccttgcagcacacctgagcaagtgctgggtttgagtccacactctgacgcgagcaccatcaccttgcttatgcaagatgatgatgtaactggcttagaaattcaacaccaaggaggatgggtgccggtgaccccaataccagatgctctagttgtcaatgttggagatgtgattgagatctggagtaatggcaaatacaagagtgtagaacacagagcagtgacgagtaagaaaaagagaaggatttcttatgcattatttttgtgcccacgagatgatgtggaaattgagccccttgatcatatgatagatgctcaaaaacccaagttgtatcagaaagtcaggtatggagattatctgagacaatctatgaagaggaaaatggagggaaaaacacacatggatgtggcaaggatagaggattctcatctcacgaaaaaagatgattaagaaaagaaatggcccagtaaaagaatatgagaagaacataaagtgtaaaagtactccctcgtgctgatttaccaagtgtcaattgtgtttgtataatatgcataaactaagtcgagtctttacactctgcttactacatatccttgtcactgaaatttagatttctttctaaaatctaaaccaacttctgtaatctctgtactcctcatctcaggttttttgagaagtatgaactttcctttatgaatcaaacccaaaccttcttagagtgtgcttgaaaaaaaa

SEQ ID NO: 112185 - DNA, 277 bp, Glycine max
  Clone ID: PAT_MRT3847_72311C.1
tttctcacttatttcacatatttgggggtcttagggaaaaaagccaatctaccgtaccaactctaatctaagtcaaagacaagtgatttctatgcgaacataacaatgagcaccattactttggtccaaacatttttattacacttacattatgcgcatactttcgatagccccccccggcatatttaccctaaggagaaacggaaaaagaaaaaaatgttcgacaattttacttagacggggaaatacaaccctgccgattcaaaaataaatccat

SEQ ID NO: 112186 - DNA, 510 bp, Glycine max
  Clone ID: PAT_MRT3847_72312C.1
gtgattttttttttttttttttttttttttttttttttttttttttttttttattttttggtttttgacataaaaaaacttgatttgaccttcatagatcaaaatttcaaacttacatacgggggaacattacccgggggaacctgattggggcccaatcctttacctaaaaactggccccacccccttttagatttgaaaaacttggttccatccaattccaaaacttaagcattcctaagaaaattttgcccccctaaatttgcccgtttatttggcaatgaaaggtcccttggaaggaaaaaaaaccccaccccacacaccacacactttcattagaaagaaatgctggtgggaattcccctgaaagtaaggccttccccactggtgggaaaaaacccagggttaggcattttccccggtccattacgggtcctaagggttgaaatcttgctcctccctgaaattttgaccccaatttccttcaacttggttccaaacttcttaaag

SEQ ID NO: 112187 - DNA, 1175 bp, Glycine max
  unsure (1)..(1175): unsure at all n locations
  Clone ID: PAT_MRT3847_72313C.1
ggctcgaggtttaagatgtgaaaaaccacgaccatttgagcctctatatataggtgtctcgtatgctcaaacatgacaagccagtgatagttgctttcagataactgatagttgtgtgcaattatttgaattcaagaatgtctcaacccgactcgttggtggctgagattgaggtgaaaacctctgctgatcacttttacgacaccttgaagggtaagaaacagcatcgtattcatgatgttgcccctcatcatatccataaggtggaagttcatgaaggtgagtgggataaatctggcaatatcaaggtgcttacattcgctgatggggacactgttgagaccttaaaggagagagttgattttgatgatgaaaacaagaagataacctacaccatattggagggtgtcatgttgaagtactataagagctacaaggttatcgttcatgttttaccaaaaggtgatgagcacagccttgtgaagtggactttcttgtatgagaaggtggatcacactgcccctgagccaaccaagtacaaagatttggtggttaaactcaccaagaacgtggaggctcatcttgttgaggctcgttaaaatgatccctaagtggttcacgctaaataaagttgtgatgtgtgtggtgtgttgcatgtggccccttggttaattatcagccattatgtttgctttaaattgccgtgcgtaatatgttgttggttaacttgttaaaaatattggttctcaaccataagttgtgtaatgtgttgttggtttattcaaaatattggccggggatcacagggagggctacatgcctttgtatgtctgtgatttgtaatcttcgaccagctattgattaattgatgttaagggggatttatccttgtttgtctcaaaaaaaaaaaaaaaaaaaaaaaaaaaaaaaaaaaatacagattttagatctttttagtgaggtttaatttgcgcacttttaattgggggggggatagntgttttttttttttaantttttgtgcgttttagggggggataatatgcgggtcggaggattagtgcccaaagcctgtggtggctggtgtgtgtttttggttaaattagttgngttgtgttgattggggggtttttagtggggtagttgtgggggggtgggggggggggtttgggtgg

SEQ ID NO: 112188 - DNA, 341 bp, Glycine max
  unsure (1)..(341): unsure at all n locations
  Clone ID: PAT_MRT3847_72314C.1
gaggaaagtccagtatgtcagcgtcgatcgcttcgactactggttctgggtcggacaacaagtctaggacttcatcctcctttatagagtttggagagtataacagtacccaggcggctctctttggtgatgctgctccctcacacagtagcggccacaggaagggtatggtcatcccacactcgcctatcgctagtctcgagcagtggctcggtagacagtcggacatcaccgctgtcgaaagcatggtcttctagattctcgcctcaattgtcgggcaggcaggcgattctaaacgaatgacgtctcctaggaaagaaggacggcgctganaagaagac

SEQ ID NO: 112189 - DNA, 460 bp, Glycine max
  Clone ID: PAT_MRT3847_72315C.1
gcaactttctgagtaacttcgcgcgaagaagaaagatggtgaagcacaacaacgtcatccccaacggccacttccacaagtactgggagtcccgaatcaagacttggttcgaccaggcttccaagaagaagacccgtcgcctgagacgtaaggctaaggccgctgccatcgccccgcgtccggccgctggtctgctgcgccccgccgtgcactgccccacgatcaagtacggctcgaaggtccgtgccggcaagggcttcacgctcgaggagctgaaggaggctggcatcaaccgcaagcaggctctgagcatcggcatcgccgtggacttccgccgcaccaacaagtcggtggagtcgctccaggccaacgtgcaccgcctcaaggcctacaaggccaagctcgtggtgttcccgcgcaagagcaacaagcccaagaacggcgactcggccgccgagga

SEQ ID NO: 112190 - DNA, 476 bp, Glycine max
  Clone ID: PAT_MRT3847_72316C.1
cttatacactgtatgaaatacttgctcagtctctggatattaaaatgttgagtccaattgtgaatctagacaaggattctagcacttttgattctaatataatcattaagggggaagaaaaagaactccatggaacctctgaaagctctggaagctcagaacttcttttggagcttcatggaaagagatcagataatcccgaaaagattgaggaattgtctgaaaaatctcttgttagaagtcctgatttgggggctatcatccatgcacctgatcactctgttgagacaaaattatcagaaacatttgataatgacgttactggaaatgaagaagtccgaataagtcaaacacatttttacagatataggttaagcgttggatttgttttctgtcaaagaccatcaaaacattccaaatggagtcaaaaaggaaatgacttgtcaaaaaaaagatgtttgccacatgatttagac

SEQ ID NO: 112191 - DNA, 1395 bp, Glycine max
  Clone ID: PAT_MRT3847_72317C.1
atttcggctcgaggatccgacgttccaagattgtatagccctcaagaatcacaattagaggatttgaccagccatacgtgttgaaatcactcaacgaagtcgatgctataaatttatttcgccactctgcatccctgaatcagagtagctctgacattcctgagaatattgtcaaaaagattgcgagagggtgcagtggttctcccttggcacttatagtgactggcaaatcactaagtcgtgaaccaccgtgggcttggaacaacagggctaagaaactgtccaagggtcaaccaattcttgcttttagtgcagatgtgcttacttgtctccaaaaaagcttcgatgacttggatcctaaggtggctgagtgttttagggacctaagcttattccccgaagcccagaggatacctgctgctgcccttgttgatatatgggcagaactgcgtgatgaagatgatgacagcgcaatggagaatatctatgaactcgtcaaaaggaacatggctgatattgttgtcacaaggaatatttcaagtggcacgattgactataattaccactatgttacacaacatggtcttcttcgggacctagctatccttcaaacgaacaaggaactaatgaagaagaggaatagactgattattgacgtaagtggtaacaatcttcccgattggtggactacacagaatgagtatcacattgcagcccactcactatccatatcaactgatgacacattcacttcagaatggtgcaacttgcaggcatctgaggttgaggttctagtgctgaaccttcgagaaaagaagcggtcgctaccaatgttcatggagaaaatgaataaactaaaagtcctgatagtaacgaattatgagttctatcgcgctgacttggaaaattttgagctgcttgataatctgtctagtctcaaaagaatcagattagagaaggtttcaattcccttcttgagcaacactggagtgcaactgaagaatctacacaagttctcctttttcatgtgcaatgtgaatgaagcattcaaaaatagcaccattcaagtttcaaaagtgttcccaaatttggaggagatgaacattgactactgtgatatggtggaattgccaattgggctctctgatattgattccctaaagaagctaagtatcacaaactgtcacaaactttctgcacttcctgaaggaattgggaagttggtcaatctggaatcactaaggcttacttcatgtactaaattagaagagttaccagaatcaatcacaagtcttagtaaactgaacttccttgacatctctgactgcgtaagccttagtaagttaccagagaacatgggagagttgcgtagtttagaaaatctcaattgcagag

SEQ ID NO: 112192 - DNA, 292 bp, Glycine max
  Clone ID: PAT_MRT3847_72318C.1
gcgcccccaaaaagggtttttcacgaatttataatttaaattggagccttcaaaatggcccccatagacgcattggagtaaatatttatctgcctaacaatttgggtccaaaccattaacattaccttcctcggaaaaaatcccaaaaacatatccaatctgttattgcaagcttaaatataaccccatatttttttttattaacaaaaataaccccatataatagtagcataaacagatttggggaatttttaaccaaacctttaccaacattttaaaagcgaattcccca

SEQ ID NO: 112193 - DNA, 1028 bp, Glycine max
  unsure (1)..(1028): unsure at all n locations
  Clone ID: PAT_MRT3847_72319C.1
ttgagcttttctctctctctctcccacttacactagaaaggaataagaggccaaacaccctcttttcctattgtttgttcctacatacctcaagtgttgtcattaacatattttcatcctaaacaatagttcttgttgctatatattcgttatccttaattaaccacatacgtgaaatttaaagatgccatcacaagcagagctaagcatgatggattacaagccctacagctactccacactgctgaaatcatttttagatcaaactgaaactgatcagacctacaagcttgaagagttcctctctcgcttagaggaagaacgtgtcaagattgatgccttcaagcgcgagcttcctctctgcatgcaactcctcaccaacgctgtggaggcttcaaggcagcaactacaagccttcagatcaaaccaaggaacgaggccagttctggaagaattcatgccaatattaaagcatccaaactctcaagaaagcgctgaaaaaacatcaaacatatctgacaaggcgaattggatgacatcagctcaactatggagccaagcaagtgaaggaaccaaaccacaatccacaattacatcattacctaaagaaggtgctgatattggctttagcgtgagcccgaagctagccctagacaacaaacataggaatgggggagcctttttaccattctcaaaagaacgaaactcgtgtcaaggattaaggggtcttcctgagttggcccttgcatctcctgagaaagaaattgaggaaaataagtgtgaattagaggcagagaaatgttcgaaaagggagaatccaggcaaaggagggagttgtgaaggggttaatgttgatcagggaaaaagtgcttcagttgcatctgaggcacaaacagcaaatactaccaccaccacaactaacactagtggccaaactcatangaaagcaagaaggtgttgggtcaccggatttgcaccgtcgatttgttaatgctcttcaatgcttggtggatctcaagtggccaccc

SEQ ID NO: 112194 - DNA, 487 bp, Glycine max
  Clone ID: PAT_MRT3847_7231C.1
tgatggtgctgatatggtcatgtcttgcacaagtttcttttaaactttaatgttccctttttccttctacatgccagttggtgaaactgttcagtattttcaccactccaaataataaggacttgctttaattattttttttttttgtttatagagttttctattaaaaacttgtttgaggattaaattgaagatttactctattttcttttcatgactcaaactcaaggtgtaaaccttgtatactaatgaaaagtcaatcagtgctttcacatttaattaatattagttagattaaatagtttttaatttaactaatttgcattcttaatcttatatatatatataaaatttattatacaatttaaaatattcttcaaaaaaaatattctaaaatctagaaaaaaaaagatataattagagtgatagtctttgcagtgtttggtcttcttaaagatgatggcatcacactatcacaggatcaata

SEQ ID NO: 112195 - DNA, 111 bp, Glycine max
  Clone ID: PAT_MRT3847_72320C.1
tatctcctatgatatttctgtaatatgtgatatctcaacacaactgtgagccaacgtgactattgcagctttctagtctagtctttagtattataaagactacttaattag

SEQ ID NO: 112196 - DNA, 1264 bp, Glycine max
  Clone ID: PAT_MRT3847_72321C.1
ccgtgcgtctcgtgtgcttgtcgctggataaaactagaaatttggcagaaacgaaccctaacaaaataaaaaaaaaaaacgcgcactctatataagtgcattttttccctttctctttcatcaaattgtgcttgtgattgtctttgtatcacgaaaactatacgattcgattccttgttttcaatggacaccttcttcaattctcaatcttcttcttcttcgagaagccgctggagttacgatactctcaagaatttccgtgagatctctccgctggttcagaatcacatcaaacgggtttattttacgttatgttgcgctgtggtggctgctgctgttggagcttttcttcatgttctgtggaacattgggggttttctcaccacgttggcttccattggaagcatggtttggttgctatctacaccccctgttgaagagcaaaagaggttgtctctgttgatggcttcggccttgtttcagggcgcttccattggacctctgattgatttggctattgccattgatcctagccttattgttagtgcatttgtggcaacttctttggcttttgcttgcttctctgcggcagctttagttgcaaggcgtagggagtacctctaccttggtggtttgctttcttctgggctgtccattcttatgtggttgcactttgcttcctctctctttgggggctcaattgcactcttcaagtttgagctgtactttgggcttttggtgtttgtgggctacgttatagtagacactcaagaaattattgaaagggctcactttggtgacctggattatgtgaagcatgcattgacattgttcactgatttggctgcaatctttgtgcgaattcttattataatgttgaagaattcatctgagagaaatgagaagaagaagaaaaggagagattagtaggctgaccgaccgactcgagctcaggcttctctacagtaatttagtttgtggagaatacataattagctgtttagatgatgttggtcccttgtgtagttagttagctatgtgtttgctgtaatggtaaatgtcaggatttcttttaaacatcttcatatgtatttgccaatatcataatgtgtcgtataacatcataccttggtttaagcagcatgttgacgaaaccttcactaaattttatttttgggtttagtttattttatacattaagtggacaatgcagccgacatatattttgaatcaataggatagccctttcaggatgtgctatttt

SEQ ID NO: 112197 - DNA, 243 bp, Glycine max
  Clone ID: PAT_MRT3847_72322C.1
cttgttcccatttcagaagagattagccttgtcagcagactaatcaatgcaattgcaaacaatgcatgcaaagaacagctcaccactggtttgcaaaaactggaccacagcttcccttctaaaaccacctcaaacatggaacctgaaacaccctcagaatggtgggggaaatctctcaatgttcttagtcttgatttctttcaaagagttttgtctgcagtgaagtcaaagggattaaaacaa

SEQ ID NO: 112198 - DNA, 245 bp, Glycine max
  Clone ID: PAT_MRT3847_72323C.1
ctcacgcgtccgcacgacgggaagccaccaacgacgctggtgtcatacgggggctcaacgtgatgcgaataatcaacgagcctaacggggctgacatagcatatgcgctcgacgcaagggccactagctcaggggagacgaatgttctaacttgtgatctccatggagggactccagaagtgtatgtactgaccatgcatgagagtatattcgaagtcaatgccactgctggtgacactcacttg

SEQ ID NO: 112199 - DNA, 580 bp, Glycine max
  Clone ID: PAT_MRT3847_72324C.1
ggctcgagaaaaaaataaaaagaataaaaaaaacagacgtctggagaaagtcgatgcgataccaagagcgaattaggaaacgttggctgggaattgggtggtaaagtaaagaaagggttgaggccgagttggtttcgtggaaggaagaaaccaagaaattaacagagaaaataagaataagaatggtgtggtgaatggtgatggaaaagaagatgaaggtccgttcggaaagggaaaagacgaaagttgtgattaggcatttgcccccttctctctctcaatccgatctctcccaacacatcgattctcacttcgcttctcgctacaattggttctctttccgtcccggcaacaacagtcacactcgtcagaggcattcccgtgcctatatagacttcaagtgtcccgatgacgttttcgagttcgccgagttctttgatggacacgtttttgttaacgagcgaggtgcccagcataaagttatagttgagtacgctccttctcagcgtgttccaaagcctagtgccaaaaaggatggacgtgaagggactatatacaaagatccagactatcttgagtt

SEQ ID NO: 112200 - DNA, 164 bp, Glycine max
  Clone ID: PAT_MRT3847_72325C.1
ctaaaatcagaaaatgagtctccaaagcaacctcttatctcttttggttgccttggccgcagtttttgcatctttgaatctgataaatccaattccacagtttctcaataatttcacatattttagtctcacaaccttgtcaccatcatctgcatacttggcaa

SEQ ID NO: 112201 - DNA, 252 bp, Glycine max
  Clone ID: PAT_MRT3847_72326C.1
ctgagtgctgcgacccagtcgagctctcattcgacatggtcgtcacgggacatgaagacctgcgtcgagcagccgatccgcgagaattcgcactctctccagatcgacaacgccctccgccgttcgcgacagcgagtccgatcggcctcaggagtactacaccggcggcgtcgagactggcatgcatatccaagatccttcactgggaaatcatgtgcacgaacttcgcgatcaggctaggcaacttggggc

SEQ ID NO: 112202 - DNA, 390 bp, Glycine max
  Clone ID: PAT_MRT3847_72327C.1
ctcacgcgtacggtatatgtaatcaccggtttgtacggctactcagttaaattgttctgtgtgcaccgttccagaaagaatgaacctccaggacgcctatgcacttcgtcggccgactgtcgattgaccaccagctctatatatctcactgttattaaaataggatgagagaaactcggagaccttcttgttgattatagaataacatgacggggagattcgtgaccagatgggcggggctgtgcttaataggagccaccttaagtggccatagctgaggagtgtgactggttccgcactcctcactcatttgtcggctgactcatgctatctcactcgtgacatataccctttcgtatgcctgccaaaaaggccctatggcaacaaact

SEQ ID NO: 112203 - DNA, 240 bp, Glycine max
  Clone ID: PAT_MRT3847_72328C.1
attcggtcgagcagccatgacctttcgttagcagaaaccagaaacattccgccgaaaaaaagtctctttggaagtagggagctacttaaaaacatattgatgccactgggtgtggaatctgaggagcagtaactcctctggggaggatttaaatgagggtgctgtcaacactgtgatttttaaccaggtgaatctgttatggacccttacagagttgtctctgagaatgtggacatgttg

SEQ ID NO: 112204 - DNA, 771 bp, Glycine max
  Clone ID: PAT_MRT3847_72329C.1
tacctctgatggttctggccaaattccgtatgaacttattagggacacacttcagatcaatgatgatgaagtggaactatgggtggttagagcaataactgccaagttaattgactgtaagatggaccaaatgcatcaatcagtagttgttagtcatcctactgatcgtgtgtttggtcagcaccaatggcaagcactgagaacaaagctagcgacatggagaggaaacattgcaaatgttatcagtaccattcaggccaacaaaataacggaggatgggtctcaggcagcccaaggtttggtagttaggtgagaggacgttttcaactgaagcaattttctgaagcatatagattttatcccggtgaagttttttttaatcttaaaacagagaaggaaaaaattttactccccaactttgtgacagaaccattttgttttaagcttttccattttgatgttatgtttgaccagcctcacgatagcgttgagtatattatacctgtggactgttgtccaagtagctcctaggaatcaatatacagccatttaacttttagtgttttctgaacaaattgttcactgattacacgatcgttcatagttagaccagatagacatggaatcaatatacatctttgctgaatagctcttgatagatgcgatttatttgttttgttacgatttagttttccatttattttagttggctggtgactctatttatactaatcaactttggcatagccattattgaagttctccattttt

SEQ ID NO: 112205 - DNA, 214 bp, Glycine max
  Clone ID: PAT_MRT3847_7232C.1
ggaagaagggaattgccgttactaatcaggcctatcccttcataatgacagtaatgtcatgtcacggaggcacacaaaagaactgggttcttcgtcgtctgagtggaccgtgtgtctgagtttgggatcactggcctctgcagcactctgtgccatagcacacaagccattggacgtagaatttggctgaaactacctgccaacatgggccgtt

SEQ ID NO: 112206 - DNA, 275 bp, Glycine max
  Clone ID: PAT_MRT3847_72330C.1
cttatacaaacgatactgtatgatattggatggcgtggaaactaacagttctcaccggtgatgaacaatgggctttgcattactacctctgataatgcaattgcttggacccgactagtgtgtgcgcgtgaagggacaagccattggcctgccgtctgcgttatgtgagatacgcaacacctccacactagtacgtcttactcattatagactgcatcctattcttcagacactgtttgagaccgtacgtaacttggccacacctatgctgggat

SEQ ID NO: 112207 - DNA, 152 bp, Glycine max
  Clone ID: PAT_MRT3847_72331C.1
attcggcatccggcacgacgagagaccagatctaaatcctcttccaagatgcagggaagagagacagctggtgagtccgtcgaggaaacagctgcaagcattggcgcttctgccaaggctggcatgcagataaccaaggccactctccagga

SEQ ID NO: 112208 - DNA, 655 bp, Glycine max
  unsure (1)..(655): unsure at all n locations
  Clone ID: PAT_MRT3847_72332C.1
cggtccggattcccgggtcgaccacctccgacctgctttacattaatgatctcgagaagctctcttcgctacagatatctcatccggaactccagccttcactcctaagtttggcttccctgttccagaatcctcaaatcctaacttgccgacaagggacactgaccaaccaacacttcattctcctaccgctgtcaacaccggtcaacgtgcgtccttattgatatccccactaccagaagcatgagattgagcttcaggtggagtccatgctacagaagggtcttatccaacccagtacgagtccattctcctcgccggtactactagtgaagaagactaccgagccttgaatgcactcacagtcaagataggttccccattcccacaattgatgaactcttggatgaattgggaggcgctaggtgcttttcaaagttggacttgttgcaagggtaccatcaaattcgaatgcatgttttccgatattcccaaaacggccttcaagacacaccatggacattatgaattcaaagtaatgccatttgggtttgtgtatggcgccgtcatcattccaggcgaccacgaagaatgatcttttcngncttatctcctccacttcatcatcgtctttttcgacgatatcctcatatat

SEQ ID NO: 112209 - DNA, 281 bp, Glycine max
  unsure (1)..(281): unsure at all n locations
  Clone ID: PAT_MRT3847_72333C.1
cgcgtttttccttcttcgctagattacccagatctacgacgagtctctgctatgaatcaattcttatcttaatnnnnnnnnnnnnnnnnnnntcattctaatctttccagaatcctcgaatctctccttcgaacgttcagtgatcttgacttgaccgaatgctgttgcggttgaaatctcagaggctttgggatttcggtgtgagaaaatagggcttcgacgattcctttgcttcccttcggactccttctacgccatttggtcccttccttggccgtatt

SEQ ID NO: 112210 - DNA, 613 bp, Glycine max
  Clone ID: PAT_MRT3847_72334C.1
ccacgcgtccgctaggatcaacttaataattatcagataactttcactcataatcttgattatggtgtgaaccagagaataggaacagtcaaactccattttccaacttacgctgcatgcatttttcaccagctttaaacagtttgattaaacccatccgaaatggattttttcctctgtatccttttctttttgttactattactcttaattaaatgggagacgatccccaattgcgtcaagattgcagaatcaatttcacataaaatttaattttgcatttataacttaatccaaagtcacagtctattatcacctacaggctacaattctatagattatttttttatattatcctccaataattgaaatttcagctcagcaatcaatactatccgaccgtggagaacaacacctaacgcaataaagtaactccatctaaccttttgtactttccactttttctaattaaaaagcccaacagatgaccgtacatagaggaagctaagagtgtacttgaaacccataataaatattagctcagtggttttaaattccagatctttttgttgtcaatgaggatggagttgacttaaattgcagatctcataac

SEQ ID NO: 112211 - DNA, 799 bp, Glycine max
  unsure (1)..(799): unsure at all n locations
  Clone ID: PAT_MRT3847_72335C.1
ccacgcgtccggcaaccacgaaggttcactgttctcaatcctcatgctcttttggagccatgcagaatgcaaccatcttcttcacccactagaccctctaaccccttctgagctcaaccttgttcgaaccattgtccaaaacttttatccaacctctcaaaacctcaccttccactacgtaggcttggacgaacccaacaagcccgaaatcctcaaatggctatcctcaaacaactcaaaaatcaaacccaaaccacgaccacctcgccgagcctttgccgtagtccggttccaaaaacagtcccacgagatcacagtggacctgtccacgcattccatcgtctcaaccaaagactgcgaaggaaatggcaaccctatgctcacctttggcgaacaagccgtggcgtcgcagctaccattcagctacgaaccgtttaaagagtctttgaagaaaaggggtctcaacacgtcacaggttgtttgtgcttgtttcactattggttggttcggagaaggcaagaccaaaaggaacgtcaaggttaagtgttattacgcaaatgacactgccaatttgtatgccaggccattggaaggtgtggctgcggtggttgatttggacgacatgaaaattgttggctacaatgatagatatgtggttccggttccaaaggcagagggcactgaatacagagcttctaagctgaaaccaccgtttggtccaaagcataagggaatagctgtcacgcaagacggtggacctggtttcaccanagacggccattccgtaagttgggccaat

SEQ ID NO: 112212 - DNA, 349 bp, Glycine max
  Clone ID: PAT_MRT3847_72336C.1
tccggtcgacccacccttccgccggttgcaaaagacaacagaggggttgtgttttcattaacttatacaaattctcggcgttgggtcgcgtccttgtgttaatcgtgttgacgttgaaggaaatttaagtgaagagagaatgatgatgaagtctgctatgtgtgcattggtgcttgtggcactggttgtggttgtagtgctgtccatggctgatgctgcggtgacttgcatcccatcacagttgactccttgtcttgcgcgcgttaattcaggttctgcaccttccagtgcttgttgcctgaagctgaaagagcaaaagccatgcttccgtggctacctcaaaaaccct

SEQ ID NO: 112213 - DNA, 471 bp, Glycine max
  Clone ID: PAT_MRT3847_72337C.1
ttttatattaatttcattataattatttagtaaataatgactattttttattaacatttgcaaatgagacaaacttgtccacattatataagagattgacaacttaaatttagatacatggaacaaacattattaatttctctctattattattcttcttataatcttttttattttttttctctcatctttattattattgtcgttgttttttaggctctaataatgtgcttatggttttggcctttgagtgctctagaggtttacttaattttgttctctcagccattgtcgcaatacaacagtttttttttttttttttttactttttaacaatttgatagcaatttcttcttcaatcattgttaactactattattttaaaagataataatttaagtaacataatgtattttagttcaataattgtttataacataaataatatgacatttttatttaaatttactg

SEQ ID NO: 112214 - DNA, 180 bp, Glycine max
  Clone ID: PAT_MRT3847_72338C.1
acgcgtacgtactgctcccataagacctctcatgcataatctgattacatgggaagaggggcgatcataatccctttgcgcggatccatagacgggcacttctcgttcctgatctcgctgttactacagctccaatagctgatatttaagttttctccttttcctagctcgtatttatac

SEQ ID NO: 112215 - DNA, 967 bp, Glycine max
  unsure (1)..(967): unsure at all n locations
  Clone ID: PAT_MRT3847_72339C.1
ggctcgagtgcttaccaaacttttgtattatttggatctacttttgggttgatccctgacattcattcatacaatgggttgatgtatgcctttgggaagctgaagaagacacatgaagctacaagggtgtttgagcacctagtgagtttgggtctgaagtctaatgcaaaatcatattctctacttgttgatgcccacctcattaaccgggatgtcaaatctgctctggcagtgattgatgatatgagagctgctggatatgaaccatcaaaagagatgctaaaaaaggtcagacggcgatgcacacgagaaatggacaatgaaagtgatgccagagtgcaatcactggctaattccttgaattaccaattgggttcagaaaaccgacgggacattctgtttaatcttaattacagtatgggttatgcttgaatggaatacctctgtatattagtggatgctgctcaagttggcgggtcaggatgattcaagaacatcttcgcgcaatctttatttttgtatttatgtgtttatgaagcggggaggatgctgatgatggaattagctttcttagtgaaaacccaaagcagtgagtttttcatcaaagttgttcgaaataatagtaagattgatccaattttagtagaggatagaatcaagatcgacacttatctcatggttcttattttttttgttctgttttttggcactgcccattctttacaatctaatgtggcaacgactagaagctgcaaggatttggaaactgcttttgtggtgctgtggttgtattaaattctacttcaaataatggtaaatcttccaatcgagcgcacgttttaatcaaaaaccccccccaaacaaacccccacaacccaaacccacccccccggccccccccccccactaaagaaaccccccccaccccccgcaaaaaaaacccaccaccccncaccccccccccccc

SEQ ID NO: 112216 - DNA, 493 bp, Glycine max
  Clone ID: PAT_MRT3847_7233C.1
ttatcaacattgcacagcttatttttcaccgagcgatggcctttcatcccacgaggagggtagattacatccaccgtcgcaatccgttcctaaaaaaaacttcttaacttacatttcacattgctaaaatggtaaagcccctttctttgagagaagatccaaccttcacttttactttttactaaattggccacattatacgtcaccccccccaacctttctacataagatggaggaggcacattcctcattcttttgcttgcatactccaacattatgggctcttatcaactctgagaagctacttacgtccatccgtgacaagaatgctgactgccctggttttctgtattcatgcctggactccaccttgggataccttgcacctcttgcaatataatttcctcggccacttctgaatctcttcggaggagcttgactcaaatccaatgtcacaaccttggggaggagaaacactttcttggggtgggga

SEQ ID NO: 112217 - DNA, 447 bp, Glycine max
  Clone ID: PAT_MRT3847_72340C.1
ccggtcaactccaacataccttatattttcttccactttccaaaccgcgaagatgacgggcgtcaagaccgcacacgccgagcagcttgacagagtttacactctcgaccacgagatgcctgtagcagctcgacagaccagtatctacgatgaggacatcctcatgcagaagaaggagggtggtgattactccggcgcgaaggctaagaccgacccggttgagatcgcgctcgtgaagaagcttgatctatggattatgcccatgctttggctgatgcactggacttaactatcttgtatgtagcgccatctagctcccaatgatcggcggtcttcaaaaagacctcaaactgggagaaacccggcgccacacatgtgagtcgatttgcttcgtatgctacattcttgggcagatgtcgtacaacatgggtctgactcgaggtggct

SEQ ID NO: 112218 - DNA, 424 bp, Glycine max
  Clone ID: PAT_MRT3847_72341C.1
ctctccgatttggttgctgtaaatttatctcgccactctgcatccctgtatcagagccgctctgacattcctgataatattgccgacaagattgcgagagggagcggtggatgtccccttggcacttatagtgactgtcatatcgctaagtcgagaaccaccgtgggctcggcccagcaggggtaacaacctggccaagggtcaacccactcttgctcctagtgcagatgtgcttacttgtgtccaaacaagcttccatgacttggatcctaacgtggctgcgtgtgttagggacctaagcttattccccgaatcccagaggatacccgctgctgcccctgctgatatactggcagaactgcgggctgaacatgatgaccgcgcagaggacaacatctatgaactcgtctataggcacatggct

SEQ ID NO: 112219 - DNA, 615 bp, Glycine max
  Clone ID: PAT_MRT3847_72342C.1
caattcaaaacagggtcttataatcctgaattttacgaaaattgtcaaggaatggaatgagaagcaagaaattacttcgcagaattttttaactcttaatcaaaatctatacattttttttctgaaaaaattaacatacatcatcacatcacacttttttttgtcatattcttctaaatctctttgaagaaagatgtgtacaaggtaagatgacaaagagacaaaacaaaatgccccatttccaaaatattatcatcatactaatctaaaccaagggaactcattttatgtctcaagtcaattgtatggtttccagacaccttttgacggattggattctgttattcttacaactctctgtcttcgttgttgcggattctttgtcacattattttcttctggattgttatttgccttcaccacatcaactttcactatgtgatgatctgatgtccctttggaagaaaggactaaataggaaccgggaacaaacttgtatggagaatttgatgatgataatatgtaatctacccgagttccatacttacatgttccctggaccctttggcccttggcagtcgtgacaactgactcgcatttccctgcatagtcctt

SEQ ID NO: 112220 - DNA, 633 bp, Glycine max
  Clone ID: PAT_MRT3847_72343C.1
atctgagacttggaagttggaggaaaatgtcaagtgaggtagaagaagaagaaagaagacctcttatcggccatgatttaggttcctcaattctcatcgttcatcaaaatgaagacactatctcaatctgtcctttgccacaatccaatcctacagatacatcctctctttctcttcctaatcaacgcctttcttctctcgatgtcttccgcggtctaactgttgcgttgatgatattagttgataatgtgggaagggcattcccgtccttgaatcattctccatggtttggagtgacactggccgattttgtaatgccgttttttctctttgtggttggcgtttcgatcggtctggtattcaagaaagtctctagcaaacccaacgccacaaagaaagtcatatcgaggacgcttaagcttttccttttgggactgttacttcaaggtgggtatttccatgggcacggcaaattaacgtatggagttgatttgagcaagatacgctggcttggcgtacttcaggatgttttctatcttactttgctcagtgtacctttgtttgctctacggtctgtatgttccgaattggaaattcaagcattctagtttgctttcggccagtgactccagt

SEQ ID NO: 112221 - DNA, 506 bp, Glycine max
  Clone ID: PAT_MRT3847_72344C.1
ggggaggaaagcactctgcaacagaaatactctcagctcttttcgattagtaagcagcagaatgattttatctccaccatgggtagcttctcacagaatatttggagatgggatttgaaatggaggagacatctcttcgagcatgaggagggtgtagctgtggcttttatggaagacatcactgcttatactcttcagaatcacttgaaagataagttgctgtggaaagctgatcctagtgggctatactctactaggtctgcttataggcttctatcaagtcaaaacagtactgctttagatgggataaatttccagcttgtttggaaattgaagatacccccaaaggcggccatcttcacctggaggctcatcaaagataggctccctactagagctaatctgcatagaagaaatgtggagttgcaggatcttacctgccccctctgtcacagtgagcaggaggaggcaagacatctttttttccattgcagatacactggtgg

SEQ ID NO: 112222 - DNA, 232 bp, Glycine max
  Clone ID: PAT_MRT3847_72345C.1
agcgttcatcgtgatatactggtgacctgttgcgctcacagcacacgaaaccgtgcttcaactgtaatatcacgtacggaatgcatgccttactaagacggtattctacttgctttgccaatcgtgcatcatcaacgtctggcaggtatgacatactctcactcttcttgttgcctactggtggacacacttggatgcattgcactcgtgcaccgtggctatctatggacgt

SEQ ID NO: 112223 - DNA, 433 bp, Glycine max
  Clone ID: PAT_MRT3847_72346C.1
aatccacaacattactttgaactgttattctataggaactattacagatgcagtagctgcaaaggctgcgtcgcgagaaagcaagtagaacgaagcaccaccgaacccaacacgttcatcgtgacctacaccggcgaccacaaacacgcgaaacctgttcaccggaactccctcgcgggaagcaccagaaccaagccatccacgacccgtttatccgaacccaatgaatccgtgtcttgcccaaaaaaagaaaacgcatgttcttcaaattccgagctttctccaatgttgtcagtttctgacacgctggaaaacgaggaaacggtctcggccagcgaacccgattgccctgacatggaaattgagccctctgataacgacgacgttttgatacctaacacgggtgccatgttcgacgctgttctcttgggct

SEQ ID NO: 112224 - DNA, 463 bp, Glycine max
  Clone ID: PAT_MRT3847_72347C.1
cagtgctgtactgtatgcaattcacacaactccttcaattgtcatacacaccttagaagatgatggctctctgtatcattggtaccatggatgtacaacgcgtacatagaacaattcctagctctagcttggagataccgctgaggacaaggtccaccataatcataaacgacacacccttcaccgttcaatagctacgatctgatactattttcttaaactcatgcccaaggataacattggccttggtgattacccttcatctccactctacacgatgtggcaccgggcattaacggctcgtagaatcttgctttaactaaaataccgaatactccgttatgaatttagtttaccctttgaaacctcccttacctccttggtaccacaaatcccttgtcaagagggggaccctccactttgtgcaacttgtcacaagtatgttgaatggttaaacaacctt

SEQ ID NO: 112225 - DNA, 1413 bp, Glycine max
  unsure (1)..(1413): unsure at all n locations
  Clone ID: PAT_MRT3847_72348C.1
gttcttttcctccactatgttttttttttttgcaattatctttcttatttaaaagatgaagcaagcaaacagaatcccctcttttgatcttggtttcaatattcatcatcaaatcactggtcctccttttatagaaatcttagatctgcttttaacacaacaaggttttggtggagaagaagaagcaaagacgacggtgtataaatacaagagtagaagaagaagaagaagcaattagagggagagttagtgagcaaggtggatcgaaggcaagggaagaggtctctccctcctcatgaggagaaaaaagaagctttcaacttttcctattattcatccaacaccatctcaaaatcgaaaggaacaagcttcaccatcacccttttcactcctcatgagtaacaacaaaaacaccaccttcttccccaccccacatggccaaataaggacttctgaatttgttaatagccaaaatccgccccaggctacaaatcaaggcattgatgatattaggaaaaagcactatagaggagttaggcagagaccatggggcaaatgggcagcagaaataagagaccctaagaaagcagctagagtgtggcttggcacctttgacacggcagaggctgcagctatggcttatgatgctgctgcattgaggttcaaaggaaacaaagccaaactcaattttcctgaacgtgttgttatgccaatacaaccacaaacaaataacaataattccacttcttcatcagctcctactacacaatcatcttcttctcttccaccaccacaatctctacataataatagttctctttcagcagaagggtttccaaatcttgaggagtatgcaaggttgctgagttgtagcgatgatgatgattttcaacgtgttgcattggggctctaccagcatcacaataatgaggattttatttgtggttcatcacaaccaccaccagtgccgttttttgtgtcctcttcttcttcttcttctgcaatgacatcgtcatattctgattttttgggccaaggagggagtactggttttgatgaagggaacaagagggggtcgtagttttatgtctctgaattttgagcactgcatgcaggttgcttccacaacaattaaggaagttcaaatctctcatctcttatatgttcttttgtttttattattccaattacaaaataacacctgaggtataaaatctataatactcatctttcgtctttaatctgactctttgatatttttaggcaaactggttagtgcttattaattttatcaatctatcgaaaaatttaactcactatttttaattagttgagtttctcttctcaaaannnaanannnnaaaaaaaaaaaaaaaaaaaaaaaaaaaaaaaaaaaaaaaaaaaaaaaaaaaa

SEQ ID NO: 112226 - DNA, 1920 bp, Glycine max
  Clone ID: PAT_MRT3847_72349C.1
gtttccttgtatgcaggtcctatggcccatccagtgcgaccacactcttacatcaagatggacaacttctacacagttacggtctacgaaaagggggctgaagttgtgagaatgtacaaaaccttgctaggaagtcaagggttccgaaaaggcatggatctttattttaagagacatgatggccaagctgtaacatgtgaagatttttttgccgccatgcgagatgcaaatgatgcagattttgcaaatttcttgctatggtattctcaagctgggacccctgttgtcatagtaaatacttcttataatccagaagcacatactttttctttaaaatttagtcaagatataccaccaaccccagggcaatcagttaaggaacccacattcattcctgttgcagtgggtttgcttgattccatgggaaaggacattcctctttcaactgtttaccataatggtactatgcaatctgtttcaagcaatgatcaatcagtctgcactacagtccttagagtgaccaagaaagaggaagagtttgtattcaccgatatatttgaaaggcctgttccttctttgttaagaggatacagtgctcctattcgtctggaatctgatctcactgatagcgacctgtttttcttactagccaatgattccgatgaattcaaccgttgggaggctggacaagttttggcacggaagttgatgcttaacttagtggatgatttgcaacgtaacaaaccattggttttaaattccaattttgttcaagggttcaaacgtattttatgtgactcaagtctggacaaagagtttgtggcaaaggcaataactttgcctggtgagggagaaataatggatatgatgggggttgcagatcctgatgctgttcatactgttcggactttcatcaggaagcagcttgcaagtgaactgagatcagagttcctcagcacagtggaaaataacaggagctcagaagaatatgtcttcaatcactcaaacttggccaggcgtgctctgaagaatgttgctcttgcttatcttggatgccttgaggaaaaagaattcaccgatcttgtgttgcatgagtataaaactgctacaaatatgactgagcagtttgctgccttggctgccatagctcagaaccctggtaaaacccgtgatgatgttcttgatgacttttatggcaagtggcagcatgatttcttggtggtgaacaaatggtttgctcttcaagcaatgtctgacattcctggtaatgttgagaatgtgcggaaactgttaagccacccagcatttgatctgcgcaatcccaacaaagtgtactctctcattggaggtttctgtgggtctccggtgaactttcatgcaaaggatgggtcaggctacaagtttttgggagagattgtgctgcaacttgacaagctaaatcctcaggtagcctcgagaatggtgtcagccttctcaagatggaggcgttatgatgaagacagacaaaagcttgcaaaggcgcagttggagaggatcatgtctactaatggactatcggagaatgtgtttgagatagcttcgaaaagcttagctgcctaaaagtgttaatggcgtatgaaaaactgccatgatgtgttagtggcgaaagcaattgcagcaacgatcccaatatcttttgcaaagctttggcgccacaatgggtagctctctttttgcatccatgtcttaactcggggtgatttctttatctttttcccaaggatgtgtagggcgttatgcaataaaagctgaactagtttatctacgtaactttaaaatgtgattcagtggatattcgtttgttataccgttttttatttttggttttattgataatttgacaaggaaatatgagtgcgtttgatttttttttttaactat

SEQ ID NO: 112227 - DNA, 561 bp, Glycine max
  Clone ID: PAT_MRT3847_7234C.1
gctagtaaaatttaattttatagataaatttatccatcccaacttgttttcttgatggattaaccatgacagatcaaaatgggaagctagtcagactgtccaatccgcataataatatatacacgtgattaagatgaacgttttaacctttaaggacgtgcctgacatgataaatgacgttagacgacctgtgctgtactactacaaagtgacatgcataaattcagctgttgatatcacagatatatataaagcagcaaacgcctttttattcataaaaatgctctcgaacattgattgatgaactgcctcttatttttttgatcgggatattaacatgggagcaacatatcaaactttcttgcagcaaggtttcactctgcagcacttatttcccctcgttgagaagggaataatctgctcaataatgtgcttctgacttgaaaggggtcgtaaagtcgcccatgaaccataaaatgcttccgcaggtgggcagaaaaaccgttattgcttagggcttagtaattggaaggttctttgcccttaccaataagcaattga

SEQ ID NO: 112228 - DNA, 557 bp, Glycine max
  Clone ID: PAT_MRT3847_72350C.1
gtaacatgtgaagatttttttgccgccatgcgagatgcaaatgatgcagattttgcaaatttcttgctatggtttgtatttttttccttctttttccctgcatttttctgctcattttgtattaactgttcaactaatatgcaggtattctcaagctgggacccctgttgtcatagtaaatacttcttataatccagaagcacatactttttctttaaaatttagtcaagatataccaccaaccccagggcaatcagttaaggaacccacattcattcctgttgcagtgggtttgcttgattccatgggaaaggacattcctctttcaactgtttaccataatggtactatgcaatctgtttcaagcaatgatcaatcagtctgcactacagtccttagagtgaccaagaaagaggaagagtttgtattcaccgatatatttgaaaggcctgttccttctttgttaagaggatacagtgctcctattcgtctggaatctgatctcactgatagcgacctgtttttcttactagccaatgattccgatgaattcaacc

SEQ ID NO: 112229 - DNA, 386 bp, Glycine max
  Clone ID: PAT_MRT3847_72351C.1
ttctctcttgctgtcttcacagcagactacagggtgtaatactgactatatttaccaccctatatgcaggccgcgatggaggcagtgatcagggcgaaacccaggttgccacgtctagaggctggagtagaggaagaagggaacacagctactaacgatactcctgttgaaacaactgctaaatgaaggtacctgcggtggtaccctcctctacaaactactgaacccaattaagtatccgatatatcatatcatatgatcaatatgcagatcaaaaatcacattgtttatcaacatctacattctgaatatctatattgacatatggaatgcgcaccggctgaaccaccatgcctactggcataacttggtcaagaaagacaccg

SEQ ID NO: 112230 - DNA, 216 bp, Glycine max
  unsure (1)..(216): unsure at all n locations
  Clone ID: PAT_MRT3847_72352C.1
gacccacacatccgatcaaaatttcctcaattattactattgcctttattatcacattagccctcncactagcttgtttttttataaaataccccgacctcaattcctaaaaccacatcattcttccctaccccttataacaattactactttatttctctatcaaacatctcaaatttacttacctatatttattattcacactattttttcaaa

SEQ ID NO: 112231 - DNA, 669 bp, Glycine max
  Clone ID: PAT_MRT3847_72353C.1
accctcccagccggccggggggacattatgctaccaacgatgtcaacgttgtcaatggctaacaacaaaatgcaaaaccctaaacctccctcgaggagcacgagttatggtccactaggacttgaaaatgatgacaacttcttcgagggagtcttggccgtggatcaaagcatgcaaaatggttctgattctcacattttctctccaaactcaaagggtgataataataataacaacaacaataatgctagcaactttcctatcaaacgtgcactgatcacatcacaactttggaacgagacagggtctccggggtcttcttcttcgtgcaagcgatttcatggtgatcttaattgtggatgcagcaatgctgaggacaataatgattcctttatttccctgctaagccagtttcctcagaacgcaacttttcagccaaacgcgattcatgggtccgttgaggatgatggtgcgccgaggcaacaatttcatcttcatggcataaattggaactgattaatcaatagtgtgctttagcttagtttactttacacacacatgaaaattaaatgtaactaccattaattatagacttcttcatgcaggtcttagtatttttcactttccttctactgtattcataacacaaaataggaagagatcgagact

SEQ ID NO: 112232 - DNA, 1526 bp, Glycine max
  Clone ID: PAT_MRT3847_72354C.1
tagaaattataagaaaaagaaaggaaaaagaagtaaagcatgaacgaacacctcagaacttttgcacttcaactcagctactcaacaacgacgccaaaatcctcttccacaccgcacactgcttcttccgttctctcaaggtttctttacactgaaattcagtaagaaatttggaaaactggcataatggaagacaacgactacataaggagatgggaggatctggacatagatattttggtgaagatttttcagttgcttgacatttttgagttgacatccggcatctctcgtgtttgtagtgcatggcgcttggcatgttgtgatccacttctctggaaaacactagatttgtcgatgttaagatctaacttcatcaagatcccattagagccatttgtttatgttgatggacgatctgataggacattaacgcgtatattgaagatttccctgagtctcagccagcagagtataatgactttgatcttccatttcaacttgtacgtaagtgatgaacagttgacatacactgctgaaaggtgcccacagctcaggcgactcgttctgccagcttggaacagaatcaagaaaccaggaatgtgcaaagccattcgtggctggaaagagttagagtccctgacaatgcctagtatagcaaatccaccatatattttggaggaaatctcaacgcactgcaagaactttagcgaactcaagattatggggccatgtgacattttctttgcttcatcacttgctgcttttcttccaaaattaagagtcttgagcctacgatgctcaatgctatataaggatgttctcattctcatccttgacagcttacaacacttggaagtgctcaacatatcacattgtgttctgatggaagccctcccagctcctcaacagaaaagaatcattaaagaaattgatgtgactattcgtcagaaggcttctcggttacgtgaatttctcacatgcatggaagactcatgtgtcatgtgccaacgaacaagaactgatgaaggactgattaggtggtacaagtacgaggaagggctttggaaaacagatgaggtgaggtctctctcactttaggcaatcggaagcgatctagttgttaatgctcatgtcacattttctgttgttaagtaatgctgccaccttaagtgtagatccaaataaacaaagtttaattcttacagatgaatgctgttgcaccctctaggagttagccaaatcttgtaactgtatataggaacaataagttttgtttctgtagttggtttcattttgagaagtgttctaaatcatgaaaatttgttaagacagtaattatggttctttatagaagtgtgatgagattagttttgggccattcttctttagtttcaacatttacaagtagtcaactagtctttacgggttcgaaatgacaacatttacatgtgcagggtgagtgttggggatattcactgcaggtcgactctagaggatccccgggtaccgagctcgaattcgta

SEQ ID NO: 112233 - DNA, 226 bp, Glycine max
  Clone ID: PAT_MRT3847_72355C.1
aactacacttttaccgttatactctggatttaatagtcgcttggatcactgatctcatctcaattctcagatatgtggacaaatggtatgcctaaagtggtggaatgggggagcatggaacaaaaacacatggatgatgatcaagaggaggggaacggtggatatattgaaaaggcgtcagattttattcatgacatagctgagaatattgtgggagcttttgggt

SEQ ID NO: 112234 - DNA, 133 bp, Glycine max
  unsure (1)..(133): unsure at all n locations
  Clone ID: PAT_MRT3847_72356C.1
tgatggtagaagtgaagattcaattgtggattattgtggatcgtcgttaatttgaattgtgtgagtgagggaacaaggaaggtgaggaatatntaataaaangaaatggattatgatgtatgtgttaacataa

SEQ ID NO: 112235 - DNA, 373 bp, Glycine max
  unsure (1)..(373): unsure at all n locations
  Clone ID: PAT_MRT3847_72357C.1
cggctctagtccatacgccaaggtgataatgctttcggggaggctggttaaaactggcctggtctttcctggattggccagttgtggaatacaaggatctttgacatctncttactacatttttgcaacacctacctctttctctctctctctttcactcgtcctaggtttgattatttcttccctcaattcccaacctcgcatctaccattattttattctcaaaccacgacaacaaatacacaacacaccccaacacacacacacaaacacaacacaaacttagtttctcaatttcttgctctcgagccaacccaagttaaattgaaaacaagagcaaaaacttaacaaaggtttggtcttttgatgtgag

SEQ ID NO: 112236 - DNA, 416 bp, Glycine max
  unsure (1)..(416): unsure at all n locations
  Clone ID: PAT_MRT3847_72358C.1
acgcccacgcgtncgaaacatggctttcttaaagctcccttagtgctgctcccttgcagctctaatgggtgtcctctcaaagtgcttggcaaactatcgagaatccccccagtgtacaaagccttccacttgagaaaaccaccagtnttataaagcccctcagttgagaaagccttcctgtgtacaaacccttcagtttgaaaacccctccaatttataatgcctccagtagagaagccaccagtgtacaagcccccagttgagaaacccccagtgtacaagcccccagttgaaaaaccaccagtgtacaagcccccagttgagaaaccaccagtgtacaagcccccagttgaaaaacctccaggttacaagcccccagttgataaacccccagtgtacaagcccccagttgaaaa

SEQ ID NO: 112237 - DNA, 699 bp, Glycine max
  unsure (1)..(699): unsure at all n locations
  Clone ID: PAT_MRT3847_72359C.1
annnnaatttaancaacaacatttcctttgtcaccttatttattacaagtttgctttgtttgtctaatctacacacactattagtcaggcgttctggtctcgtcctgccttggttcctttctaacaccgaggaacaacaatagctagttgcatgtcgaatttactcataattaagaaagacaagagaaaaggatgtgacagaaagagagaaaaaaatgatactaggatgaaaggggtgtgcgtcaatcttgagagtcaagcgggttccaaaacataaaggacaacaacaaaagattgggtaatagaactggtaaaaaagggttaacatttctgcgaagtttcctagccattcttttcctaacataagcccttctttgttggggttcccactgcgcttcttcgactccctctgtgagaatcagtggtgggggttggtggaaggggcacttggatctccaagaggtttgaggaggtgcgtttcccaatacccttttgaggaagaatgagcgtagccatgttttgagaagctgagggttggaagaacagaggaatggagggtagtcccagttgagatagcaggggatttgagtggcgatgaagaattgagagtggagggatggggtggttgtggggcttgttagcatgtgggttaaggacttgcaccctctgttcccccgatgtttcttccatggctcaaac

SEQ ID NO: 112238 - DNA, 122 bp, Glycine max
  unsure (1)..(122): unsure at all n locations
  Clone ID: PAT_MRT3847_7235C.1
ctntattcntcgttnnagcgacgcanncagcngttgantttggaaaaagatgtgttcagccggaagttcagagnacgcancagacatngttcccttggactttntnccaaggnagcgagctt

SEQ ID NO: 112239 - DNA, 389 bp, Glycine max
  Clone ID: PAT_MRT3847_72360C.1
tctttttctcgtgggcggacgcgtgggaagatttgaaattttgataaaccgagatccaggttgcctcaccttataacggctacaaaagcaatcgatacgtgatgtcaagaatgggtcaatcaatctctactgctttgggtgcgacttattgagggaaagaaaaacactctctgtgctgatcacagactgggagaatcataagattttgcactcttaggttatacgctgaacactgttctatttgatatacgacttactgtcagatttaaacatattgtgttactctctgagttgatctgttcaattgcaagttcaagcctggtgaaattttggataagcgctcccactcatctatctggtataggacttttgagggtagacttttctat

SEQ ID NO: 112240 - DNA, 451 bp, Glycine max
  Clone ID: PAT_MRT3847_72361C.1
ataagcacaggccgaattcatgccagaggtcccgttggagttgaagggttgttgacaaatagatggatattgagagggagtgggcatgtggtaaatagtgatcgaggggtcacttatacttacaaggatctaccagtaaaagcataaatgtgcagccagagatcagtttgagctacttaggattattgttgttcacctcattaaaccagcagcaatttttctgttctatttttcatttacagaagttgcttcggtgcgtgcagtcagtgtatatcttaactatcacttacccctttccagattttttttcttacctggaacatgctctggggaaatcaaataagtgcatgaattatattatttggctgtatactcttttttatttattcataaaagtactacttaagattgtgaaacagcaatgcagagacaaattgagacgggccaaaaa

SEQ ID NO: 112241 - DNA, 246 bp, Glycine max
  Clone ID: PAT_MRT3847_72362C.1
agggtctgaaaccccacgatcaagggcccgcacttgtgattcagccagtcagggatctggtgttgggtcacctaataacaaggaccagcgacgcagtttctttaaactactcgagaaaggatccgaaatgccttttcaaacttttcacccacttaaaaatggtccaaaactgacgcgcaagaaacgcaagtgaatcatggaggtacctatttcatcactgaatgcagcacctcttgacactgagtt

SEQ ID NO: 112242 - DNA, 254 bp, Glycine max
  unsure (1)..(254): unsure at all n locations
  Clone ID: PAT_MRT3847_72363C.1
tttatggaaaaatgtgaagaagaataatatggtaaaaatggggggatgagggataggatgttataatattnaatatatggattatttaatttttaggggaattgtaaggggatatatagtggtgagagtggggggataagtgtatgattaaaagggtatatgttgtanagtttaaatgttaaatgtgagtaggggatatgtgttggaatgatgaagagggggaagttaattaggaggaggtgaaagagatattt

SEQ ID NO: 112243 - DNA, 451 bp, Glycine max
  Clone ID: PAT_MRT3847_72364C.1
tttcgcgttctcgtgcgcagaaccccggggaaacaccctatcattgcacaaaaaacaaccagacaaaaaaaatcgatgattttagtactacaatctaccaataatggttgattgaacatggaaaacaaggaagggtacctccaagacaccaaattcaatctccttccgacaacatgttcttacggctcttgtatctaccgtctccgacctgaaataagtttccgggcagtcctcgctgccgggccggttaccagtactatatgcgccttcctcaactaacaaagctgtgctactccaccgatattgctacttggaacaacaaaccaatgctaaaaccaatcaagcacgctataaaaatcacatgacggttcgattccattggaagatccgagcccagaccttactacaaccacagagaagtggctcgccagatagcgtctctaatgatgca

SEQ ID NO: 112244 - DNA, 311 bp, Glycine max
  Clone ID: PAT_MRT3847_72365C.1
gaaacccaataagaattattgacattaaaagggaattgcccaattggggagcaatttattgtcccaaaactgtgacaaaacttgtttgacacattcggactataaatttagaaatgcccaccttgggaaaacttttatgtgaccacaagtgcacagcttttggcccccaataaattgtccgagcaatatgttgctaaagaaagaaaagaaccactcactgaaatttgtgcccatttgaagaaaattggccaaaaaaagttgcagcaaaattattggacctatgtaatgccaacaagagatgttccttgatt

SEQ ID NO: 112245 - DNA, 343 bp, Glycine max
  Clone ID: PAT_MRT3847_72366C.1
actagttctagatcgcgagcgggcgcccttttttttgttgttttttttttgttttttttttttttttttttttatgtttttttttttttggaaccaaattttttattaatttatggcgtaaggggctgggcaaattggtttttctccttgaatttggtaaaaaaattattgatttttacagggaacaagtcagaggggtttttattgtacaaacataattctgggactggggggtttgattatgcaacatataattcgggttttccatcaaaggataaacccatgaacttttcaccatccacagtgtttttttctattaaaagtttatcaagctttggaagga

SEQ ID NO: 112246 - DNA, 246 bp, Glycine max
  Clone ID: PAT_MRT3847_72367C.1
agacttcatggcatttgagtttccttattgacattcccgaactggatagagttcaggctattctcttgtgaatcttttaagattatggaatggctggtaatactcttatgctcactttttctgtgccacaggctaatgccacatcttttgaaaatgcggaatactctgcatgagcttctgaaaatgcggaatcctctgcgtgatctgggatctgtgaattctttcacttgttcgattgtttaattc

SEQ ID NO: 112247 - DNA, 358 bp, Glycine max
  Clone ID: PAT_MRT3847_72368C.1
tttactcgtccgcttattcacacgaacgaaaacaaagcaccatcaaaagcccgagcacaagggaaaccacacagatagccacacacagagctaaaatctgaacggaggaccaaccggaagcaccaccatcaaagactgctgctatggatgaaaccctggatccaaccgggtatgaaattgaagacgagacaccagacaagatctctgaacagatccctggcacccagaaaggctgccagacatgcaaggagccatacgggggggtataagcatggatagcagaatcgatggcaagcatgggagcacacatggctgctcacaacaaaagagtggacggaatacaactaagcatccacca

SEQ ID NO: 112248 - DNA, 187 bp, Glycine max
  Clone ID: PAT_MRT3847_72369C.1
accacccccattgggcaactacaaatcttgtcctacaacctataaatatccatctcctccaccaacaccatacaactacccgtcaccaccacccacattttacaaatacaattcttcgggtactccattgcattcaccaactcgcacgatttacatgtatacatgccctcctactccatatcactac

SEQ ID NO: 112249 - DNA, 992 bp, Glycine max
  Clone ID: PAT_MRT3847_7236C.1
gcacgagcttgaagattcccttttgaatacatgacgctcttatcctctcacctacttgtcttctccgccgtccaccaccgtgcgccgccgaccaccaccacccggaacagcccaacaacaaaccacactgtgcggtttctgtgttctcccggcgtgccgccagctgtccgcttggatcaaaggttgccgcgctttgttgtccccggcgccggagcagaagatctgctctacaatgccggagccaccgtcggcgttcttggcggcggttacgccctcgtccgtgcctttgacgaactcactcggagaaacatcctccaacagggtctgggctgaaagctggtgtaaatattatctggcttgcttctgctggttgcctggccaattttcagcaacgccccgaaggctcgctactttgccgcatttgttcctctcgtcaattgcttgaggcttttggtcaatggtctctcacttgcttctgatgagggactcatcaaatccgtcaccagagaaggagatccactgggatcgcatatcttatctcttttgtagaagataggggtccatgaagtttccctacagtgaacataagtgtttagccggtagcgtgtctatgcttgtctttggattcttggtttcaatagggatgctctactactattcagttttaggacatgtgcagttggattgggcaagcactctgcccagagttgcttttatttctttcgtggcaacattggtggagtctcttcccattactaaggtagtagatgacaacatttctgttccactagctaccatggcagtggcatttttcactttccatcattaactcttaggagtctactggtctagttcccctgtaatgtcttacttgccttccctatccaattttttcctgctagtgcgacaatatgaaatttagtttgttccttgtaaagaaattagtgaaaattttatagcataaagaatgagtcaagtattttgttgtgttg

SEQ ID NO: 112250 - DNA, 304 bp, Glycine max
  Clone ID: PAT_MRT3847_72370C.1
cgaagcttgtgattggaactcacagcgtgaagacaagaagcgagagtgaaggcaaagactgggatcaggttttcgccttcgataaagaaggcctcaattcgacgtcattggagatttccgtttggtcagaggaggtcaaagaaggggatgagaaaagcgagagttctctcggaacggtgtcgtttgatctgcaagaggtgcctaaaagagttcctccggatagtcctttggctccgcagtggtacactctcgaatccgaaacctcgccggcgaatgacatcatgctcgcccgttggatcgggac

SEQ ID NO: 112251 - DNA, 444 bp, Glycine max
  Clone ID: PAT_MRT3847_72371C.1
ggtgttggaagcataggaagactgggatatgcgtcattgataccatatgtggagccagtggtgcaggctcaaagtgctgaagtgtactatgacttcttgcctgaggagggtgatagtcaagagggagttgctcacattggtgaattgaaatctggtgtatatgttccactgcctacaaaaactaaattgctggaaactcccaaagaatggcagctggatctaccttgtgcaaaattcctagcgtcttgactacaactgtagatagattggtaggcacagaacatggaggtatatgattctcttgttggtggaattcagacatatgccactcgcatggtgccactagatgaagaaaggctttctatggttgcacaacacataggtgatgaaaggtttgattgtgtagatgaggaagattgctttgaggtagtttctttaagtgca

SEQ ID NO: 112252 - DNA, 1623 bp, Glycine max
  Clone ID: PAT_MRT3847_72372C.1
gaaatacatgccaaacctaaccagttgaaatgacactccctttataatatatacttatctcccttcaattaatctccatcttaggtttgtgtctatcttacaataatggtgttgatttgttgagacaactagttcggtatttccagtgatcagcaatattttccattggcactttaatttcctaccctagctagttgatgttgtgttttcataaatgacaaattggaccaagccaaaaaaaaatattctgcctaactaaagcatgattggtattatttatttgtatgcaataattaattgatatattgacggctgcgagaagacgacagaagggggatattggtttcgttcaatattctatgacttttctctttaagaaattctagatctgctttatatgaaggcatatatagcttgaagttcaccatcaagcttacacatagagagaaaagaggctaatttattgtgttcatagatacaagacaatgaagaacctttcatagagttgaacaaggtggatcgaaggcatgggaagaggcctctcccttctgatcatgcatcaagggagagaagggaaggtttcaacttttctgttaaccaatctccacctaagagccaagggggagaagcttctcaattctcctttatgcatccaatcaatactggtgatgatagcaccctttcttcaccaattccacaatatgggcaaataagcaattcttgcttgattgagactcaggacccatccctacagcctttaaatcaaggaggaaatgggagaaaaagacattatagaggagttaggcagagaccgtggggcaaatgggctgccgaaatccgcgaccctaaaaaggctgctagagtgtggcttggcacgtttgacacggcagaggctgctgctgctgcttatgatgctgctgctttgaagttcaaaggctccaaagccaagctcaatttccctgaacatgttcttcttcctcctcctccaatatcatcatcatcaccaccttgcaataataataataatcatcatagttattattatggttcttcagctcttgcacctcttgcaccaccaccacaacatgtttatgatcaaacaccaccaccacaacaacaacccttgctatcatcatcagcacaagaagaagggtttccaaatctaatgcagtacgcgcagcttctttggagtagggatgatgatgatctacagcgtattgcttcaggccttcatcaacatcatcatcacaatgaggctttttatgattcaagttcttcaactttgttctcatcaacttccactacttattctatgactgtgtctgatcaacagcagaatattggagatgacacgagtactcccatgggggcagaatataattatggtggctgcttttttagagggagtgattttcatgacaagaattgaacattatgctaagtgtaagtatgatgtgtgtgctgctaaaaacctacctttttctgtattgttttcataattcaaaatttcaaataatgcttcttgaacttcaggtataaactcccatttcttcacatcggaagtgatatatatatatatatatatatatatatatatatataaacatgaaatttttagaaaca

SEQ ID NO: 112253 - DNA, 611 bp, Glycine max
  Clone ID: PAT_MRT3847_72373C.1
agaaaatgaaatgtctagaaatggctcttgtctcagtcaccaccgcaaattcttcgaagttcattctcttacgcactctctctcgttctcacgctttctccttcgctctccaccgtcaattccaactactctcgtcttcctccgctgtgctccgccgtcttccccggttcctcgccgcctcccccggttctccgctcccaccttccgaaaacgattccagcaggcaccttgaagggacttttggggctaataaagtttctgaagagataagatgatcgttgtgctgagcatggttattgatgggtagcagaagtagaacagtaaacgttaacactaaggacactgacaaggttctgaacgggatgccaagctacgctcctccattgccttcttcttccaattccatggccatggaagcaactaatgctcatccttcccgtatttctgaatttggaaccctggagcaatctcttggatttcgtgttgaagataccattaatcttagcagaagtatgttgctcatgttttgatctataatagttggactccttttttttgtgtggtatttattctttctgtattatgaatttaatatcatgtctcatactccc

SEQ ID NO: 112254 - DNA, 2286 bp, Glycine max
  Clone ID: PAT_MRT3847_72374C.1
aaaatcgtgaggctgccaggaaaagccgactgaggaaaaaggcatatgtgcaacaattagagagcagtaggttgaaactgacccaacttgagcaggagctccagcgatctcgccagcagggaatatttatttcaagtactggagatcaggcacagtcaatgagtggaaatggtacttaaacattgtgtacctccgattgtatgttttgagggttaaacatattggagtagttttaggggatgttttgaggctgataataataatccatagtcagtgcaaaaacgattgacacttggtttgacattcaattaacaatatgtgcatcccgaaattagtgtatatgtaaattttgcattggcaatttggcagaaacctgataaaggcacctctattgagttgctgtccctaaccaacatggaatttctacatgctaaaatatttatggttgatttaagtgcttcatctagttctctgatattattctttttcgtgaaacaaaccaaagttcctgtaaagatatagtaccatctctaagttggattccatttacgttggttcatatttttcattgacaaacattggttatttggttgcatcttgcatcatttcagttgcactgaagtactgcattcttctgatacaccatagagcttggtgttatttgctgtgattgattgcatcatacgtgatgcaagcctattatgtgatttttgaactctgacaacatggtactcagtagcatggatggtcatgggcagggttttgcaaaagtttgtgctctgtttcaaatcctaaatcaatttaataatcttgttgtacaggcgctatggcatttgatgtagagtacgcacgatggttagaagagcataatagacaaaccaatgagctaagggctgcaataaattctcatgctggagatattgaacttcgaaccattgttgacaatttcatgacgcagtttgatgatatcttcagactgaaaggtattgcagcaaaagctgatgttttccacattctgtcaggaatgtggaagactccagctgagaggtgtttcatgtggattggaggctttcggtcatccgaactcctcccaagggagaagtttctcttatctatgttttgtaaatgttttttctggtttgaaaattgcttcactaatatctggttgaacattgattgcattccatgcttcccaacaatataaagtgagaaaagcaacaaaagaatcaaaatagataggacctttttttcttgacattattgaaacctaaaattcaagatatagtttcggaactttcccaattgaagaaatatcagttttaaccgttttgtgtttacgataattgattctgttgttgagttttaaagttcatagactttttatcacgttatgctgtctaagattggattgaaactgttgcagcttcttctaagtcagttggagcctttagccgagcaacaattgatgggcatctacaacttgcagcaatcatcccagcagactgaagatgctctttcccaagggatggatgcattgcagcaatcactatctgagacattggctaatggttcgcccagctcatcaggctgcctcgggaaatgtggcaaattacatggggcaaatggctatggccatgggaaagcttggtacacttgaggggtttcttcaccaggctgacaatctgcggcagcagacattacaacaaatgcttcgaatattaacgaccaggcaatcggctcgtgctcttcttgccatcagtgattatttctcacggctgagagcgctgagttctttgtggcttgccaggccaagggagtgaagcatttcacagccccattagtggacttctttcatgcctgacccccttaaacaccgatgatcattgaatcttgtgctctgaatgagttcaatggaagctggtgtcttttgacaatgaattcctcttgaagcctagttgtggtgctataaacattaaatgctacgatttttctactctgccaactgctgctgtggtgcaacacttttctttaagcttttgtggttttaaaatagtctcaataatttgattatataggtgtatgatagatagaagttgttgaaggggaaaaatgtagaaatagtgtatctgtatttttaggttatagctgttcattgtatttcagaaatcagcttttatttgagggggtatttacctctggttggttgcatatatggctccatggtgtatttatgtatggatgtatatatacgttctctcttggtatattagaaagacattaccaact

SEQ ID NO: 112255 - DNA, 1372 bp, Glycine max
  Clone ID: PAT_MRT3847_72375C.1
cccacgcgtacgggtaaggccttttctgttaattgtagatgaacttggaaaattattgtgatataacttggcatatgtgcaacaactagagagcagtaggttgaaactgatatcgccagcagggaatatttatttcaagtactggagatcaggcacagtcaatgagtggaaatggcgctatggcatttgatgtagagtacgcacgatggttagaagagcataatagacaaaccaatgagctaaggactgcaataaattctcatgctggagatattgaacttcgaaccattgttgacaatttcatgacacagtttgatgatatcctcaggctgaaaggtattgcagcaaaagctgatgttttccacattctgtcaggaatgtggaagactccagctgagaggtgtttcatgtggattggaggctttcgctcatccgaactactcaagcttcttgaaagtcagttggagcctttaaccgagcaacaattgatgggcatctacaacttgcagcagtcatcccagcaggctgaagatgctctttcccaagggatggatgcattgcagcaatcactgtctgagacattggctaatggttcacccagcacatcaggctcctcgggaaatgtggcaagttacatggggcaaatggctatggccatgggaaagcttggtactcttgatgggtttcttcgccaggctgacaatctgcggcagcagacattacaacaaatgcttcgaatattaacgaccaggcaatcagctcgagctcttctcgccatcagtgattatttctcacggctgcgagctctgagttctttgtggcttgctaggccaagggagtgaagcatttcacagctccattagtggacttctttcatacctgacccccttaaagactgatcgttgaatcttgtgctctgaatgagttcaatggaagctggtgtcttttgacaatgaattcctctagaagcctagttgtggtgctataaacattagatgctacgatttttctactctgccaactgctgctgtggtgcaacacttttctttaagcttttgtggttttaaaatagtctcaataatttgattatataggtgtatgatagatagaagttgttgaaggggaaaaatgtagaaatagtatctgtattttaggttatagctgttcattgtatttcagaaatcagcttttatttgtggttggttgcatatatggctccatggtgtatttatgtatggatgtatatatacgttctctcttggtatattagaaagacattaccaactagtaaaaaaaaaaaaaaaaaaaacatacaaaaatgaaacaataaaaacataatataactaaaaaaaataaaaggggcgcccgtttt

SEQ ID NO: 112256 - DNA, 1612 bp, Glycine max
  Clone ID: PAT_MRT3847_72376C.1
gtacgcttctgcgagaagacgcccgaagggggatgcaggagaggatgaatggtatagggttttccccggcgggatacagtcccgtaatcccttcttcatcctgttttcctaaaaaattgagagtccagccgcaacgggccttgagctctgacccctacgttctggaactcgccgaaaccctagaagactccttcccctcctctccctccaccccactccctctccagaacctccgcctctcctcctcccaatccctcctctccactccatggccctcccgccgcgacgagcccttccgcttcaccgacctctccttcatccgccaatcccgcatcctccccgtctcccccaccatctccctcctcactcccacctcccacctccccaacgacgtctacgtcggctccctctcctcctcctccccctctctcctccaacgagtctcccatttcatctgccctttccccatcggcgacctcttcttctccatcaacggtatcgccgctcccgatttaactctcgtctatgtccccgagggctgccacgtcgacatccccatccacttggactacttgctccctcgcactcccttcacaggggcaaccagtttttgatggaaacattaaggttaacaggtatgctcagcagacagatgcaggacagttaacaagaacccttctgcttgaacctcgtgcgactgtaaatgttaaaccgaatcttcagattgtggctgatgatgttaagtgctcccatggagctgctataagcgacctggaagaaagtcaactcttatatttccaagctcgcggcattgacatagagactgctagaagagttctggtttttgcttttgggagtgaggtgatagataagtttccttattcttccattagagacagagtgcgtagtcagattaagaatttgttggatccatcatcgaattgatcatcattttaggggtgtcctgaatgtaaacattttaagctacctgatacaatgataaactgaaatcacaatgaaaatcgtttccccaaaaacacattcacagggacaagcagtttttgatggaaacattaaggttaacaggtatgctcagcagacagatgcaggacagttaacaagaacccttctgcttgaacctcgtgcgactgtaaatgttaaaccgaatcttcagattgtggctgatgatgttaagtgctcccatggagctgctataggcgacctgggagaaagtcaactcttatatttccaagctcgcggcattgacatagagactgctagaagagttctggtttttgcttttgggagtgaggtgatagataagtttccttattcttccattagagacagagtgcgtagtcagattaagaatttgttggatccatcatcgaattgatcatcattttaggggtgtcctgaatgtaaacattttaagctacctgatacaatgataaactgaaatcacaatgaaaatcgtttccccaaaaattgttgccttctgcttcatgtatttcttttaatgtggaaaatcatttccttactgggtttgtataagttaaacatgcaccatactcattgaaacatgcatgggaagccatcacactactttcac

SEQ ID NO: 112257 - DNA, 1161 bp, Glycine max
  Clone ID: PAT_MRT3847_72377C.1
caacttgtcatgttttataaatatttctgaacttcttttttaaatccttgtttctatttattcaggcatatgtgcaacaactagagagcagtaggttgaaactgatatcgccagcagggaatatttatttcaagtactggagatcaggcacagtcaatgaatggaaatggcgctatggcatttgatgtagagtacgcacgatggttagaagagcataatagacaaaccaatgagctaaggactgcaataaattctcatgctggagatattgaacttcgaaccattgttgacaatttcatgacgcagtttaatgatatcttcaggctgaaagctattgcagcaaaagctgatgcttgccagattctgtcaggaatgtggaagactccagctgagaggtgtttcatgtggattggaggctttcggccatccgaactcttcaagcttcttctaagtcagttggagcctttagtcgagcaacagatggatatctacagctttcagcaatcatgccagcaggctgaagaagctctttcccaagggatggatgcattgcagcaatcagtatctgagacattggctaatggttcgcccagctcatcaggctccccgggaaatgtggcaaataacatgggtcaaataactatggccatgggaaagcttggtacacttgaggggtttcttctccaggctgacaatctgcggcagcggacattagaagtaatgcttcaaatattaacgaccaggcaatcggctcgtgctcttcttgccatcagtgattatttctcacggctgagagagctgggttctttgtggccttccaggccaagggagtgaagcatttcacagccccattagtggacttctttcatgtctgactcccttaaacaccgatgattattgaatcttgtgctctgaatgagttcaatggaagctggtgtctttggacaatgaattcctcttgaagcctagttgtgatgctataagcattaaatgctatgacttttctactctgctgatgtggtgcaacatttttctttaagcttttgtggttttaaaatagtttcaataatttgattatataggtgtatgatagatagaagttgttgatttgacaccctctactgcgagatatacataaataaataaaatataaaacttcgt

SEQ ID NO: 112258 - DNA, 1036 bp, Glycine max
  Clone ID: PAT_MRT3847_72378C.1
gagcccttccgcttcaccgacctctccttcatccgccaacggtatcgccgctcccgatttaactctcgtctatgtccccgagggctgccacgtcgacatccccatccacttggactacatgctccctcccactccctccaccgatgattccgacgccgccatgcatctctccaatcctagggttctggtcgtcgtcgagaaaggagcacacgtcaatataatcgaggactttcccgcttctccagagaatcagaatgactcttactggagtaatgccgcatttgaggcagtgattggtcaaggtgcaaagcttacgcattcttatattcaaactcagtctttccgtgctgctcacatcaaatggacctccattcgccaggaagcttctagtacatatgagcttacagaggtaagcacgggaggaaaactggggaggcacaatcttcatatccagcaattgggcccagacaccgtcactgagttatcaactttgcacttgtctgttgctgatcaaacgcaggatctccacagtactcttgtgttggatcatccacgcggctattctcggcaactccataaatgcattgttacacattcacagggacaagcagtttttgatggaaacattaaggttaacaggtatgctcagcagacagatgcaggacagttaacaagaacccttctgcttgaacctcgtgcgactgtaaatgttaaaccgaatcttcagattgtggctgatgatgttaagtgctcccatggagctgctataagcgacctggaagaaagtcaactcttatatttccaagctcgcggcattgacatagagactgctagaagagttctggtttttgcttttgggagtgaggtgatagataagtttccttattcttccattagagacagagtgcgtagtcagattaagaatttgttggatccatcatcgaattgatcatcattttaggggtgtcctgaatgtaaacattttaagctacctgatacaatgataaactgaaatcacaatgaaaatcgtttcccc

SEQ ID NO: 112259 - DNA, 3283 bp, Glycine max
  Clone ID: PAT_MRT3847_72379C.1
ctcgagccgctcgagccgctcgagccgctcgagccgctcgagccgatggatgcattccggcatccgctctccgcgacattcgcctatggctctcccagcccttcgccctcctccggttgtggggcatcttccacgggccgcatgcctcccgccaggcggaagctgcgctctcccgaggggtggatgcattgcagcaatcacctgcggcagcagtgcattacggcacgcgctgcgcatcttaacccccgggcaatcagctcgagctcccctcgccatcagtgattattgctcacggctgcgagctctgagttctttgtggcttgctaggccaagggagtgaagcatttcacagctccattagtggacttctttcatacctgacccccttaaagactgatcgttgaatcttgtgctctgaatgagttcaatggaagctggtgtcttttgacaatgaattcctctagaagcctagttgtatttcacagccccattagtggacttctttcatgcctgactcccttaaacaccgatgatcattgaatcttgtgctctgaatgagttcaatggaagctggtgtcttttgacaatgaattcctcttgaagcctagttgtgatgctataaacattaaatgctatgatttttctactctgccaactgctggtgtggtgcaacatttttctttaagcttttgtggttttaaaatagtctcaataatttgattatataggtgtatgatagatagaagctgttgaagggaaaaatgtagaaatagtgtatctgtatttttaggttatagctgttcattgtatttcagaaatcagcttttatttgagggggtatttacctctctttagtttcatttcctgcttaatggtttgtggttggagagaaaatgaaatgtctagaaatggctcttgtctcagtcaccaccgcaaattcttcgaagtatattctcttacgcactctctctcgttctcacgctttctccttcgctctccaccgtcaattccaactactctcgtcttcctccgctgtgctccgccgtcttccccggttcctcgccgcctcccccggttctccgctcccaccttccgaaaacgattccagcaggcaccttgactcgttctccatctagtgagatcggtttcttcttctgggtgtgttgcttaaatctgtggaaagttcatttttttttccgattttcatgtgaccagggtcttttggggctaataaggtttgtggagagagaagatgatcgttgtgctgagcatgattattgatgggtagcagaagtagaacggtaaacgttaacaactaaggacactgacaaggttctgaacgggatgccaagctacgctcctccattgccttcttctaattccatagccatggaagcaactaatgctcatccttcccgcatttctgaatttggaaccctggagcaatctcttggatttcgtgttgaagataccattaatcttagcagaaatccgatgtttaatcaaatgaaatcaaatagccaagctctaggtgctgatattcaatttggtgctttaaataagtcaattgcaacatcagatataaacctctctgctgctattgctgcgtctcaagcattggtattccaaaaagattcacaaccaactctggcttcaacatctgctggtcgtgagaactggggagagaccaacttggctgatgctagccctaggactgatacttcaacagatgatacagaagacaaaaatcaaaggcctgaaaggggtgaatccagtggatcaaaagataaatcagatcaaaagacattaagacggcttgctcaaaatcgtgaggctgccaggaaaagccgactgaggaaaaaggcatatgtgcaacaattagagagcagtaggttgaaactgacccaacttgagcaggagctccagcgagcacgccagcagggaatatttatttcaagtactggagatcaggcacagtcaatgagtggaaatggcgctatggcatttgatgtagagtacgcacgatggttagaagagcataatagacaaaccaatgagctaagggctgcaataaattctcatgctggagatattgaacttcgaaccattgttgacaatttcatgacacaatttgatgatatcttcaggctgaaaggtattgcagcaaaagctgatgttttccacattctgtcaggaatgtggaagactccagctgagaggtgtttcatgtggattggaggctttcgctcatccgaactactcaagcttcttgaaagtcagttggagcctttaaccgagcaacaattgatgggcatctacaacttgcagcagtcatcccagcaggctgaagatgctctttcccaagggatggatgcattgcagcaatcactgtctgagacattggctaatggttcacccagcacatcaggctcctcgggaaatgtggcaaattacatggggcaaatggctatggccatgggaaagcttggtactcttgatgggtttcttcaccaggctgacaatctgcggcagcagacattacaacaaatgcttcgaatattaacgaccaggcaatcggctcgtgctcttcttgccatcagtgattatttctcacggctgagagcgctgagttctttgtggcttgccaggccaagggagtgaagcatttcacagccccattagtggacttctttcatgcctgactcccttaaacaccgatgatcattgaatcttgtgctctgaatgagttcaatggaagctggtgtcttttgacaatgaattcctcttgaagcctagttgtgatgctataaacattaaatgctatgatttttctactctgccaactgctggtgtggtgcaacatttttctttaagcttttgtggttttaaaatagtctcaataatttgattatataggtgtatgatagatagaagctgttgaagggaaaaatgtagaaatagtgtatctgtatttttaggttatagctgttcattgtatttcagaaatcagcttttatttgagggggtatttacctctctttagtttcatttcctgcttaatggtttgtggttggttgcacataaggctccatggtgtatgtatttatacgttctcttttggtatattagaaagacattactaactaaaaattgttttttgggatttttgagcagatgttgctacatctttatccaaaattcaagatagaatacagatcttctttgctgttcttttctggatgtctctagtcgtttgggcttccgcctgggatgggaggaatag

SEQ ID NO: 112260 - DNA, 148 bp, Glycine max
  Clone ID: PAT_MRT3847_7237C.1
cccattcaaaaatggcaataaaccccttgatatttgaatgaagaaataagctatactctaaaggattcatacctgttacatttcattggcctattaaaggagttgggaaatacccaacttatttcccaaaaatacattacatatcgat

SEQ ID NO: 112261 - DNA, 451 bp, Glycine max
  Clone ID: PAT_MRT3847_72380C.1
attcttttctacacaatcaaaaccaccattacttattccaaacagtggttagtccaactgtcgctttgaccgtttgacttcattgtatccatggtagttttctttttataggatcaaacttactgatattatttaataccatacatgagagaatttatatcattagattaacttactaggtatttgttttgttgaataatattataaccccttacagtattttctcacaaaccatcctattatttatctaataaaatgatttatagttaagtaaataatccgttaggtagtggacatccaatgtggaattttttgaaaatatactatctccctccattcctatatataaaaaataaatgaaaatatttttttcctaaatataagaaacatatgaccctcttttattggattaataattaatttccctccatatttttatagactattaatt

SEQ ID NO: 112262 - DNA, 445 bp, Glycine max
  Clone ID: PAT_MRT3847_72381C.1
gaaaaacccaaaaagattgatgccagattgagacaaagaatagatcctcaatacagtgagggtcaggctgaaatggagacaccactgttcaaattgtctttggacgatgtggaaactcctaaaggttcctggccggatcttaaaatttctcaatctaaaattgcactttgcaagaacacagggggtggaaccattctgcgtagtgatctattggcaaatttttgtgacagagggcaattttagagcacagcgtggattcgtagagcaactcattgtattaaaggaatgattaaaatggtggccacagttggtattcctgagagcttcaggtatagcattgctctcgctatgaataggtgtcatagggggcgcgcgagttctgacatttacaccatctgctctcaagactgagaattatggaatccggattgcacaaagcaatgac

SEQ ID NO: 112263 - DNA, 179 bp, Glycine max
  Clone ID: PAT_MRT3847_72382C.1
ttattttttaataagtaataatatttgataatgaggtcttttaatcataataaaaaattcttttaaaattaacattgaaattacaacactccacaggtgacacaccacgcactattgtgtaagacttaagcttcatacaatgctcaactctttgagccattgtcaatgcaaagggcatg

SEQ ID NO: 112264 - DNA, 569 bp, Glycine max
  Clone ID: PAT_MRT3847_72383C.1
ccacgcgtccgcccccctcaccttcttcccttcttcgtcgtccctgcttcctcctttccttcttcctcctattcctatttctctctctcaatcattctcattacgcataactctcaattctctctatgctaatgaatgataatatcttctcattattcctttgatctctctcccattcttcgatcatgggcctctgtttctcctccaccaaggtcagcggctccagcagcaacaacaacaacaacaacaacgcctcatccaaccgtaaccgcaaatgttcggccgcgccggcggctgcagcgccgccggagccggtgacgccgcagaagaaacaaccgtcgcaggctcaacggcggcgagtgccagaggagtcgcggaagaacccacgcgccaaagacaaagcgggtgcgcgtcggcaagggacacgtgttccgtgcggaaagcgaacggatttcgggtacgagaaagacttcgagaatagattctcgctcgggaaattgttgggacatggacaattcggttacacctacgttggaattgacaaaaaaaatggggaccgtgtcgcgggt

SEQ ID NO: 112265 - DNA, 413 bp, Glycine max
  Clone ID: PAT_MRT3847_72384C.1
aacacacgtccgggcaataataggtctgatgatgcgttacacgttctgggccgcaccgcgcaaactgatgtaacaacgagtccatatccatggccgacaagtccgggtaatctttgaaatttcatcgtgatcgggatagatcattgcagagttttctagctaatgtagataacgaataactgtgcccattaaagcagagtttatgctatgtatctcaacgagctagacattactagtcctaagtgttatccctattttctaaaacactgacatgttgtgcatccgaagttcaagttttttagtgctacatacgatcagtgagtgcctattagtctgtacgttgactgtctaaattgttctccgaatgaggttgcctttcagtacaatactttcttgggaagcaagtcatcttc

SEQ ID NO: 112266 - DNA, 289 bp, Glycine max
  Clone ID: PAT_MRT3847_72385C.1
acccacgcgtcctaacaaaccaactccaacctttcactctctctgtttctgcaatcacaaatttgtataatataaatgttaacgtgtcctgaaaacctaatcactctctctacttaaaccgcatcaattactctaacaaataatctctctcctccatcactgtacacctacttaatatatataacaccaaacccattcactatctcaagttaaaaatcttatcccactatcttcattccaaggaacttcccatcacaataatccaaccctaccatctatgtttcattaa

SEQ ID NO: 112267 - DNA, 224 bp, Glycine max
  unsure (1)..(224): unsure at all n locations
  Clone ID: PAT_MRT3847_72386C.1
gtctatccgaagtctttgggaatagtgctgcaatggcttcaagtcaggangaggtatcccatttgggaactaccgctaccacaattatgtgcacggtgcatactgctctcagattgttgggaggtcaactgacgtatatcgcagcccggttcatgcccctaatggcactgcttcacacatcaaacctatttcacgctacgattccaatgcttattcacaatatg

SEQ ID NO: 112268 - DNA, 457 bp, Glycine max
  Clone ID: PAT_MRT3847_72387C.1
cacatacttctatggattgttggccctattatagtttggtacatgttttaaataatactactgtaatactacatttctatgttgaatttaatttgaaagtgatgacttctacctttgcattgtattaaaaattaaactaaaaatacttctatcttttcaccttaattggcaaggaagttctgggaatggataaaaattatgtcaatgcttggggggaagtttcctattcaataaataatatcatcaaaccttttgaaacagtcttttgttgtgataatttgaatttttgtgggcaagttaagttttaatatgctgataacttgaatttaagatacttgctgtctaagagcaaatgattaaagataaatgactctcagcttcccattatgctatagtttgtatataaagtataagatcttcattagatgggaaggtgaatctattcatgtagcataag

SEQ ID NO: 112269 - DNA, 216 bp, Glycine max
  Clone ID: PAT_MRT3847_72388C.1
gggtcactgtggtttctgtcatgggtggtagaaaatctgaatcctcaaaaatctaaacctctctttctggggttttggtcatcacaaacccttttgctggggcataattgtgaaaagggaaaaatggaaaaagatgatgaagatgaaaaatattagtagtagcaacaataataataagacaaatggtctttcttccatcatgaatggaagaagctc

SEQ ID NO: 112270 - DNA, 468 bp, Glycine max
  unsure (1)..(468): unsure at all n locations
  Clone ID: PAT_MRT3847_72389C.1
tnnttttttttttttttttttntttttttttntacaacacaaaccgaccttattttcaggggactttattacagacccattaaacatcaaagtttttcaaatgtttggggaacacatccaacattacacaacgagctaaaaaccccccacggaaacggaggacaagggaaagggttaatcccttctgaatgttgaagtcagggagggcccttccatcctcgagctgttggccagaaaaaataaccctttgttggcccggggggatgccttccttgccctgaatctgggccttcacattgccaagggggccaaacctctccacctcgagggtaatagtcttacccgaaaaagttttaacaaaaatttgcttcccaccccgaagacccaccaccagggggagagttgactccttctggatgttgaaaccagaaagggtgcgtccgtcctcaagctgtttcccgggaaaaa

SEQ ID NO: 112271 - DNA, 671 bp, Glycine max
  Clone ID: PAT_MRT3847_7238C.1
atctctcccgttgcagcgtcttgatctcagcagaaatagatttgaaggaaatataccctctcaaattggaaatctctctgagttgcggcatctttatctcagttggaatactttggaaggaaatataccctctcaaattggaaatctctccaagttgcagcatcttgatctcagctacaattattttgaaggaagtataccgtcccaacttgggaacctttcaaatttgcagaagctttatcttggaggaagtgtaccgtcccgacttgggaacctttcaaatttgctgaagctttatcttggaggaggaagtgtaccgtcccgacttgggaacctttcaaatttgctgaagctttatcttggaggaggaagtgtaccgtcccgacttgggaaccttccaaatttgctgaagctttatcttggaggccgatcatattatggtgggtgctctcaaaattgacgatggagatcgttggctgtctaatctcatttctttaacccatctttccttggactccatatctaatctcaacacttctcatagctttctcccaatgattgccaagctacccaaacttagagaactaagtttaatttattggagcctttccgatcattttatccttttattggaaccctcttaaatcaatttttctaagttccctttccat

SEQ ID NO: 112272 - DNA, 432 bp, Glycine max
  Clone ID: PAT_MRT3847_72390C.1
tcctctagagtggccgccctttggaatccttttttttttttttttttttttttttttttttttttttttttttttttttttttttttttccaggggggggaaacgggtctttatttcaaaaaggtgggccaaggcccatcagcccaaggataaacattagagggtccctccccaaaaacgggggaaaacccagggaaattcctgtccccaaaactgacccaattggacggggccctaagcccacccccttcagcccctttttccctggccccctttcttaaaaagaaccggaaaacaaaggcctttgatttggattggggggaaaccaacaacccctggaaaggtacagaccattagtctacacagtttaaaaaggcccactttctttacaagtaaatagaaggggagggaaaagggaaataaccccccccc

SEQ ID NO: 112273 - DNA, 276 bp, Glycine max
  Clone ID: PAT_MRT3847_72391C.1
aaatagagtggcgcatgtttccatactctatccccaaatctatcatgatcatagaaggatgaactcaggcgcatactaatatgattactttattcattgaagctgacgtggttaacatgctgactgatcatatcataaatagctgccttctatggactcagatccccacaagtgcatatgatgttgaaatctgccgccttagtttatgaactgcctgacgggacgatccgttcttcccattaccttcaagggccaaaggatattcgggacatcctc

SEQ ID NO: 112274 - DNA, 134 bp, Glycine max
  Clone ID: PAT_MRT3847_72392C.1
gtcaaaagggcatttgggaatttattacacactcttatttgtgtgggtgggtgacaaatttttaagactacacgccctccctgaaacatgtgatgaccacgaatattctgccactgagaggggatccgatcaca

SEQ ID NO: 112275 - DNA, 2594 bp, Glycine max
  Clone ID: PAT_MRT3847_72393C.1
cgtacggctcgagccggcaaaatctaccaatctcaaacagtgcagaaacacagcgaaatattttcaaccgcaaaacaaataacattcaatttccaaaattgccataatcaaccatagctgaacagaagaagtcagtaaccatcgtcgtgagcgaagatccataataatacagttacaaattgcaataacacactcattgtggttatcgaaatttgatcgcagcgtcgagaagaatgggaagtttgggagcgattctgaaacatccagatgacttttaccctctgctgaagctgaaaatggcggcgaggaacgccgagaagcagatcccgccggagccgcactgggcgttctgctacacaatgctccacaaggtttctcgaagtttcgccctcgtcattcagcaactcggcatcgagcttcgcaacgccgtttgcatattttatttggttctgcgagctctcgacaccgttgaggatgatactagcatagaaacagatgtcaaggtgccaatactgatagcctttcaccgtcatatttatgatcgtgattggcacttttcatgtggcacaaaggagtacaaagttctaatggaccagtttcatcatgtttcaactgcttttctggaacttggaaagaactaccaggaagcaattgaggacattaccaaaagaatgggtgctggaatggccaaatttatttgcaaggaggtagaaacaattgatgactatgatgaatattgtcactatgtggcgggacttgttgggctgggtttatcaaagcttttccatgcgtctggttcagaagatctggctccagatgacctttccaattcaatgggcttgtttctacaggtatcatatcatggtagtaagtaataaaaaaatacagtatggttgcaattgtttactgataggaatcttcagtttaggaagaaagaaaaagaaaacagagcactttaactgaaagagatgaatctgttttatcgaaaggataaagaaaacacaaaggagcaatcctcctttcacacaagggaatatccctgttccactatggatacaactcgatgcccctccttgtcctagcaaggatccctttatacttctcagctgaactccctctaacagaattagctgtctaacagaagtaactgtctaacagttctaactgaaaggtctaacagaattaacagtattctgtttttagactctttccctcctcctatatactattagaggtcttggttgtggctgaccttgatcctctttcctaacatttactgatatttctggccatcttttgagattgcagaaaacaaacattattcgagattatctggaagacatcaatgagatccccaagtcacgcatgttttggccacgacagatttggagtaaatatgttaacaaacttgaggatttgaaatatgaggagaactctgttaaggcagtgcaatgcttaaatgacatggtcactaatgctctgatgcatgctgaagattgcttaacatacatggctgctttacgtgacccgcctatatttcgcttttgtgctataccccagataatggcaattggaacacttgcattatgctacaataacattgaggtcttcagaggtgtagttaaaatgaggcgaggtaagagcaaatattttgatactaatttccttgtgatttgattttgaggcatactaaacataaagtcaaacttggtatatgtcagggaatgtgtctttgaagtcctaggaattgtgaatggctgcaatttgtatttcatgtgcatgcctgctgtataaatctccccctgtggtgggaacttgtgagatgggtgggaaaaaagacagcttttatgagaacccaattgaacactctttgcaatgcaccaacgggaatgccggtagcattaaggatacaagatggaaatgctggtggatagccctcacatggaccatttggcaacatagaaacaaagcagtttttgacacgcagattttcgacacaacctgagtaatggatgccgcacttctcctattatggtcatggctcaaagttatggagaaggacttcactatgcattacaaccaatggtcatctcaactgggggaggtatttgggtaattaggaaagaagggtaatggctaggattctctgtagtagatacaccacagctgtaatcttggccttgggctcaaatggtatctaatactaatctctaggatagtatcgataccatctgtgtatagtactactatttgtattttcagtacctctggtactttgcatataatataattatctatttttgctgagcaaaaaaaaaaaacgtgataggaatcttcagtttaggaagaaagaaaaagaaaaacagagcactttaacagaaagagatgaatctgttttattgaaaggatagagaaaacacaaaggagaaatcctcctttcacacaagggaatatccctgttccactctggatacaactcgatgcccctccttgtccaggatccctttatacttctcagtccaactcccttctacagaattagctgtctaacagttctaagtgaaaggtctaacagaattaacagtgttctgttt

SEQ ID NO: 112276 - DNA, 429 bp, Glycine max
  Clone ID: PAT_MRT3847_72394C.1
gattctttggtggtggcgttggaggaggtgctggtggtggttttggaaaaggtggtggtataggtaagggtggaggtggaggctttggtggtggtgttggaggtggaattggcaaaggtggaggtttaggtggtggtggtggctttggaaagggtggtggtgttggtggaggaattggaaaaggaggtggcattggaggaggaataggcaaaggtggaggttttggtgggggtgttggaggaggttccggtggtggaattggaggtggaattggaaaaggaggtggcattggaggtggaataggcaaaggtggtggttttggtgggggtgttggaggaggttccagtggtggcattgtgggtggaatcgaaaaaagaagcggcattgaaggtggaataggcaaaggtggaggtttttgttggggtgttg

SEQ ID NO: 112277 - DNA, 470 bp, Glycine max
  Clone ID: PAT_MRT3847_72395C.1
ctgtacactggcagtggcagccttactactactattagtgcaagcatggcactgcggatagatacttgtcttttccgcttacggtgcgcacgacagtgccgtccgttaacatttgaatgttagtaaagtgccaacactgtggggtgctgcacagggtgggcgtgttttccgaggtgcagttactacttccggtgcgcggggttttgatgtataaagtactgcggtgtaagtacgggtaatactgttaaacgagcggagtattgagaaagatgaagggctgcgtgttgaacaagcggcactagttgtgggggtacctggtggggccgcgtgtgttggtgccaaccagcgtattaacaacgcggcaattaagtgtgttaagcacgctgtcgggagtgctagggctgtactcacacaaatactactaatactgctctacgcggacggtaacacattggccgcttaatacgttg

SEQ ID NO: 112278 - DNA, 431 bp, Glycine max
  Clone ID: PAT_MRT3847_72396C.1
aggctatttgccatgccctatatcctgccgtgagaacgtggaaaaagaaaaactattttcagttttttcacccttggaacattcaacttccagcagatataatctcatcagcatgtgttactgaaggagatttaagggtggaaaaggtccaggttctgatcattttgaagctataggttggctttggtgtgaaagattggtgcttaggttatggccattcaagcacagtggtatccaaataattctgcttctccgttttgcaacaatggattttgtgctggtgggcttattgactctcatatcaatttccaaccgaaaaatcatcttcaacaacagcagcagcagctatcagaacagcatttgaaagagttatataatgcgagtcatggaactgttgatccaaatcttcatgtttataattcaaaagccgt

SEQ ID NO: 112279 - DNA, 487 bp, Glycine max
  Clone ID: PAT_MRT3847_72397C.1
ttgggggggggggggggggtagatggtcaatgaaaacaatgcaaagggcaacacaaaaaacaagaagcactaaagatctaaaagatgtataatgtatgtataagttgtgagggagacgaactaagatattgggtacaaatgcaaaaagatcagcttatgaaccagaaattatgggagcgtggatctaaagagaagcacttgcgtcacaagagtaatgcggggggatgcctaaaagatatctgacacaagtaaaaataaaatgtacttaaatgacccctatcgcatacgaagagaatgaagcaaggtagtatgatataatcggaataccggctagcccccttagttgggcacggggctattgcggatatgcgacgtggcaactagaaggagcaggcggctaagggcactatagttaagtgctatgatcttaggctgggctgttggggttaagcacactaacgcgacaaatggcaccgccaactaagcg

SEQ ID NO: 112280 - DNA, 505 bp, Glycine max
  unsure (1)..(505): unsure at all n locations
  Clone ID: PAT_MRT3847_72398C.1
tttctttgcgtccggcacaacagacctcctngggggggcttcgttttgacgcggggggcattccaccgctcgcatactcgggccgggtccagctcaaggcgctgctggaccggcccgagtcagtggtgggacgacacgtgatcgttggtggatgggtgaagtctgctaaggaggtcaagaagaaggcggcggcgcctccatcatttgcgacggcgacggaagaaaccaccgacgccggggaaggagggaagggcaaggacgtgtcgtgcgtggagattctgcagtcgaggataccgctgcttcggagcttattggatgtgttcggaggaggcggttacgtgcagcgcaagaaacgtgagaatgtaattgtgccgaatcataaggttttgcctcccaaagcttctacggcgtatctgcttctaacggatgggtcgtgcgttccaagccttcaggttgttgttgattcttcagtagccacccctagcagacttttgcctactggaac

SEQ ID NO: 112281 - DNA, 2289 bp, Glycine max
  unsure (1)..(2289): unsure at all n locations
  Clone ID: PAT_MRT3847_72399C.1
atttcttccgagtattctgttctcctttattaagcagctaaaaattttaaggaaagggaaaatgaagaatctttgtcagaattttgatgttagagccacgattccggttaaaataggaaaaaaatcgacttgggatgttttgtttcctcgtaggttgtggttgccgacgtggacgtgtgatcagaggaaggaggggaagttgaacttaaaggtgcagtgcggtactaggaaagaagggtgggttgaatctgcgggaaaaagcgcgtttgggtttggcgtttcggccgcggttttgttctctgcgttctgctactcgcccgcggcgcttgcagagtccctcaccgttgcttttcccgtgtctcgggcgcctgaaattcgtgcagttcaaagaactcttgtggaagcatggggtttaattcgagaaacatttgttgatcctacatttaatcatcaagattgggatttgaagttgcagcaaacaatggtggaaatgtttcccctgaactcagctgatgcagcatacacaaaactccgtggaatgctttctacccttggagatcctttcactcgaattatcagcccaaaggaataccaagggtttaaaattggaagtgatgggaacgtacaaggagtgggattgttcataaatgttgaaccaagaacaggacatttggttgtcttgtcatgtgtagatggcagtccagctgctcgtgctggtatacatcaaggggatgaattgattgagataaatggtgagaggcttgatggcattgatagtgaaactgcagcacaaaggcttagagggaatgctggaacaactgttacagtaaaggtcaaagactcaggaacaagatcttttatccgagaggtcaaacttcctagggagtatattaagctctctccaatatcaagtgccatcatccctcatagatccccagatggtcatttcacaaaaactggctatgtgaaattgtcagccttctctcagactgctgctgaagacatgaggaatgccattcaggaattggaaaatcaaggagtacactcgtacatattagatctacggaacaatatgaaaatctttttctatttctccagagtatcctggtctttggtattaagcagctaaaaattttgttgcagggtggtttggtaaaagccggccttgatgttgcacagatgtggttagatggaaatgagactctagtgaacacaatcgatagagatgggaacatgctacccattaatatggtcgatggacatgctataacacatgatccacttgtggtgattgtcaatgagggaagcgcaagtgccagtgagattttagccggggcattacatgataacggtcgagctattcttgtggggcacaaaacatttggtaaaggaaagattcagagtgtcactcagcttcatgatgggtcagcactctttgttacagtggcaaaatatctatcaccagcccttcatgacatagatcaggttgggataacaccagatgtgcaatgcacaacagaaatgctcaattcaaccaaggatatttcaaattcaaccaaagacaaggcctcagtctcatctctggaagcagattcatgcataatggtagcagaacatgagttggatttggaggagtccatgggaactgcttcttgaacattcaatttccttatatcacactttcttttcaatgtttaacagttgaaagaaagggtagtttagtgctgatgtgtcagccaattcatcattttgtactatgttacattgggatcactagttgtcatgggtatataaaacagagaaacagattgtattgtatatacaattgaatagaataatagaaaatttaactcctagttgaagcacgacaccgttattctttttttgttatataatgatcatactaggatgtctttagtattcaaatctcattattaaacaagatttccacaaggcaaagcatgaaataagaggaactgagttgtattaatgaggtgagtaaattaccccaaattgcatatagacgccaatatatattatgttcatatattaacgaaactgttgcaattcgatatacaaatgttagcgttacattcttttgaaatataatgcatagtcaaaaaccatattgatggttagtctttgaaaggtgccaatggccttaataactgcttttcgaacaaaaacttaaatgcagtttctcaaatntttttgtggttgttttctaatcaaaattggagttttatctcgataatctattcaataaaggtttacattaaaggtcaacat

SEQ ID NO: 112282 - DNA, 262 bp, Glycine max
  Clone ID: PAT_MRT3847_7239C.1
atatgagcttgacgatcagcagatgggtgtggttatgaatggtttcatggtatggtgcatcgacaatggtacatctccagatgctaatggcgtgtgggtgatgatggatggagaggaacatattgaatattcgttgaaacccattggctagaatgcagaactcactttgagaccaatcatgcaccattactcagatgcagcagagacttacattgagatgataaattctgaaagtccgaatatgcctagatatggactactc

SEQ ID NO: 112283 - DNA, 1674 bp, Glycine max
  Clone ID: PAT_MRT3847_723C.1
ttcattcaataaaaaaacaactacatcgcttttgcttcccctgaactggcgtaaaccaaagccctctggctttggtccttcgctagggttcggggattcaccatttccaatgatcttcttctctcggttctacacttctcaacttcagagggaaattcaatgcagctgtttctgaggagtttcaagtgatttctgtggttctggttcggtttattgaggatcttgagggggcttttgcagaaggctgtgactctgtgacaatgccttctacagaaaatcagggcttttcgttgtccttttcctcgtttggccgttccatatttggtgtcgggcaggagcaggttcattctgtggaagcaagtaatgaatctgattcctgtaatttagagctcgggtcattccaaaagcgtgttaccgatcgatttcaagacctttctgtagctagtgatgagcaatttctctcaattgattggattcagaagctcctcggagcatttatctgctgccaagaggaattcagagccatcctgttgaataacaaagagcaggtcacaaaacccccccttgatcgcatgatttctgaattctttgagaggtcagtgaaggcgcttgacatttgtaatgctagccgagatgggattgagaagattcgcacatggcaaaagcatctggaaattgtgttttgtgccttgggttcgagtaagagagcgttaactgaaggccatttccggagggcaagaaaggcactgatggatttagcattggcaatgcttgatgaaaaagagtctggatcagttttttctcagcgtaataggtcttttgggcgacataactctggcaaggatcatcactcctcatcagggcattcaagatcgcattcgtggagtgtctctcgttcctggtctgcagccaagcaactacaatccattgcgaataaccttgttccacccctccattctgaatttgctggtttaagcgggtgctactgagattgctgcagcaagtgggcttgtgactcctgtttatacaataaactgtattctcctgatagttttgtggacccttgttgcagccattccttgtcaggataggggtctaagcattcatttttcagtcccgcggcaattatcctggagcactccggttaccgcacttcatgaacgaatcacggaagagtcaaagaagcgagagcgccgaaactcaaatggtttgttgaaggagatatatcaagttgaggtaagcagccgccgcttgaccgacctcatagattcagctcagtttccgttggcagatgaccagaaaacggaagttgagcgcaatgtgatggagctgatgcgtgtttgtgaagctttcagaaatggatcggatccattggagcgccaagtgagggaggtcttccagaagataatggcatgtcgaactgaggggctcgattatcttggcacgccaagccatacagagcaatgaaaatggtgggttgttgatgagctatcagatgtacaaatttgcggaactgtgtacattttacatcttaccatctttttctgaggagtgactcggcaagataagcagacaaatcttttaggactcttgtgatgcgttgtattaaattattaatctcagtacttgtgtaaaaaaattaaaaaagaatggtcaggttacttgttccaaaaa

SEQ ID NO: 112284 - DNA, 460 bp, Glycine max
  unsure (1)..(460): unsure at all n locations
  Clone ID: PAT_MRT3847_72400C.1
ccgggtcgacccacgcgtccgcccacgcgtccgaattcgagcggccgcttttttttttttttttttttttttttttttgaggcggtccattccatcattctgggttgaacgtgggcactgtttggtcgagtttattttataatttgattaatctcttttccgaaaagaagacatcttttcgttttcttttcttttcttttttttccccccttgaataagagcaaataaagtagcaaacttttcgttttcaaaagatagtaagctcgtgaaaaagagaaaataaaaattaattgaacaatgttaggattttcctgcgcttagtctttgccttcggtaatagcatagcgtttaaagtccgaactcatcagntttctctctctttctgcttttaantgatatcagtcgctttcttgatgaagtagtagtaatagtatgggaatatatttttgttaattatgta

SEQ ID NO: 112285 - DNA, 104 bp, Glycine max
  Clone ID: PAT_MRT3847_72401C.1
agaaagttagtagattgtgatttcctcaggagccacccacgggacattagacaggtattggcctcttcaatggagaaaactttagggtccataatctagagatt

SEQ ID NO: 112286 - DNA, 502 bp, Glycine max
  Clone ID: PAT_MRT3847_72402C.1
ggctcgagctcgagccgaattcggctcgagattatttactccaaagaacagcactagatgctttgagagtaatagaggttgaactcaacttcatctatcaagctttctacaccaaggcatcagtcataaccaacaaggtagggtttttctttcgattagggtcctttgcttcactcgtggcggccttggtggtttttgtttatgaccaaaagcgtggctccaatccctttgatgttaaagtcacctacacattactatatggtgctgtggccttagatctcgtgtccgcgttcatgctcattttttctgaccactcatttgcattaatttaccctcacatctctaaaaaaattagtgattctgatggtggcaaagaaacatccaaattagcctctattttaagttgtttcctcaagcttaagagaccgaaatggagagaacagaagcttaaggagccaaaatggcttcataataagagctataagatattgcgtaggttcat

SEQ ID NO: 112287 - DNA, 284 bp, Glycine max
  Clone ID: PAT_MRT3847_72403C.1
ttgatgaaaaaatgtttttgagcaatggtgaaaattaatatgattcagatgctatcttctttttcctcatgtgcatctgctacatctgctctgtctctttgtcctttttcatagaagggcactttattccttggtttgacttgttttctacatttcacttgatactacaggtagttatgatatcttcgttggccatggttatgtcatttgtaataaatgaactgatgtatattgatattctcagcagcaacttaaagcccttggaacattcgtgatctctaacc

SEQ ID NO: 112288 - DNA, 306 bp, Glycine max
  Clone ID: PAT_MRT3847_72404C.1
ggacatggaaaacgattctttttttgacccttaaatactgacaaatcaaaaacgtgattcctatcaactaattacgttatcatatgaaatgaacgacctctgatggctggccctaataaacataactattctttgtaccatggcttctgcaactgtagacacccaagacttataagctgcacttctagagaccctgacagtgcaacgacggcccacggtcttatgcagccaccaagggctgctgagaagctctggtttagatacttcgtcgtccttcccagtaggactcacttgcacctagcagca

SEQ ID NO: 112289 - DNA, 303 bp, Glycine max
  Clone ID: PAT_MRT3847_72405C.1
cggccgccctttttttaatacatgatttgttttttttttttttttatttttcatctttgggttctcgggtttttcttatattgtttaacataactatattattaaaaaaacaaaaaacaaagacaaaaaagaggccacgagaaccggcacaacagggaacaccagaacgcacaaacgacgacaggaagataaagaagacgcagaaaaaaaaaaaaaagaagagggaaacaaaaaaaaaagccaacaaaaaaagaaccgggacagaccaaaacggacagggaaagagccccagcggccgggaaa

SEQ ID NO: 112290 - DNA, 416 bp, Glycine max
  Clone ID: PAT_MRT3847_72406C.1
ccacgcgtccgattgctccctagacctcaatataacttcctgagaactatccgcctactgtaccgcgtgagatagatctggtgtcttacaaggctggatacccccgtgtgcatcctaagacagagctcaggtggggtctggatgctgtctggcatggcttgagcagagccgagggttccttaagggtgtactcgtggagctaatgcctttcttctgacaacagatggcttgacgctggaatcaagtacgttcccttcgacactatctctgactatgaccatattcttgccgtccccgccaccctgagtgacctgcaccaccaaggctcgcgctggaccggcggtatgactggggatgtgcctacgtcgtacatgtgcacaggtgaggctaccgctgctgatatggatgtgactttt

SEQ ID NO: 112291 - DNA, 200 bp, Glycine max
  Clone ID: PAT_MRT3847_72407C.1
ccggaactgcctggccgtcccacccgacccatcatttcccctcccacgcgtccgactccggtgagacgcttattgctggggtcacaccactgttcgacatgccctgtggatcgcgacttcgcctgtgcacttgaaagcaggacatgcagttgtatttacccaaacaacgttgtgtggagttcagtagaactggagtgggc

SEQ ID NO: 112292 - DNA, 355 bp, Glycine max
  unsure (1)..(355): unsure at all n locations
  Clone ID: PAT_MRT3847_72408C.1
tcgacccacgccgtcccggtctctcttcgggnaaggacaacagggggggcagatggagagagatctaccatctttttgagtggttttcctgtttgcacatcccatgccctgactgctttgctcggtctgacagacactatttgagtcccgtgtgtagtccagagaagatcgaatactggattagagtgacctttcaggggggggggggtcttgctattcttgtgcacatgccatgaggtagattccacagtgatgggagcctgatgntaaccaatgcccccgcggtatagaccctcactgaggacataggacgcggagacctacccggactattaaaaaaaagcagggaacaacc

SEQ ID NO: 112293 - DNA, 407 bp, Glycine max
  unsure (1)..(407): unsure at all n locations
  Clone ID: PAT_MRT3847_72409C.1
gaggaaagcgttttacaaatatacctgctctcctctatcattcaccttatctacaacacagtacatgctgatagactatcctcgccaaagcctaggtcagaggagtatgacaaacaagccatgataaaaaccggagaccattatacaagccctccaaagaggggcggcgaccgccagcaacaagattccgaaagaaanaaaaccagcgactaggaccaaccagacagcaacactatcaataccatggagtgccaccacctaggatagctaggagacactacaagatgggaatgagtgtatggtggagaccttactggagcatgaccaatagatgagcgagagagaacagctgaagcgtggatgaaagcttcatatgacaatataccatgagatgcaccgactggact

SEQ ID NO: 112294 - DNA, 557 bp, Glycine max
  Clone ID: PAT_MRT3847_7240C.1
ctggtccttgatgatgatgggaatctcaggatctatagcttctaccctgaacagaaaaaccaatgggttgaggtttggaaagggatatgggagatgtgcagaatcaaaggcaaatgtgggcctaatgcaatttgtgtgcccaaagaggatttgagcacttccacttattgtgtttgtccatctgggttcacaccagcaatccaaaatgatccggaaaagggttgcagaaggaaaatccctctttcccaaaacacccaatttctgaggcttgattatgtgaactgctcaagtgacggtcatttgaatgaaattaaagctgataactttgcaatgtgcgaggcaaattgctcaagagaaaaaacctgtcttgggtttggattcaagtatgatggatctggctactgtatgttggtgaatggcacaaatcttcaatatgggttttggtcaccaggcactgaggctgccttgtttgtaaaggttgacaaatccgagtcatcagtttccaacttcattggcatgactgaggtgatgcaaaccacatgtcctgtgaacataag

SEQ ID NO: 112295 - DNA, 530 bp, Glycine max
  Clone ID: PAT_MRT3847_72410C.1
cgcgtatgtatgcttggatcctctagtgcggccgcttttttttttttttttttttttttttttttgatatacgttgtgctttaacgacttgaattcaatatgattttgtttatcaattatttttggatttatacattacttataagaaattttataagtttttttttttagttagtatttcactaggttttaaaataattaattgatcaaagacgtctttaagcaagcttttaaataggctcgtggaccaagccagacttttatgtaagccgagccgagtcttaaaaaaagcctatgacagttaatgagccaagctcaagccttacgtattcaactcaagccgagctcaagcctagtaaagcttggcttggctcatttccacccctaccaatgacatagtggcggaagctcccttcttcatgagaatatcaatgcaaaacattcacttcttgtagagtgtagatgatacgaacctcccattggagggccaaaagtgacttaatagatgtaactatcatcacaaatagatg

SEQ ID NO: 112296 - DNA, 385 bp, Glycine max
  Clone ID: PAT_MRT3847_72411C.1
ggctcgagctccctcccgctcagattccgagaacaaccctgacccctaaggccaagggtttttctcggcttcttcaaattcctgaaatggcgtggggcgcacctttacccaagaacaagctcgccttgttgtgagaccaagcccggggcctaaccagcatcctcactcccttaatgtacgataaattcgatctcgcctatcacgctacaataggtgttgactgtgtataaaaaactatctatcacaaatacccacaccgtacgactccagatgcgtagatacagatagccaggggagactatataagtgttattcctagctacattagggactcaccactgcctgttattgatatgaaaaccaggccgccaactttttaaatact

SEQ ID NO: 112297 - DNA, 311 bp, Glycine max
  Clone ID: PAT_MRT3847_72412C.1
gggacacaaaaaacatcctgttcatgcgttggctttaggaaaaaaacctcccggggggtggggaacccagttttttttttttataaaataaaaacccctcctttccttagccccttttaaaagaaacttatttttccccaaaaaacggggggggaaaagcccccccccaaaggttttcatagaggccacccttttcaattttcccttccctccggattatcctttcaagcctcctaggggtgcctttaggactaaggggtttcccccgaacatcaatagcagggggggcatttgttttgatttcctttggg

SEQ ID NO: 112298 - DNA, 380 bp, Glycine max
  unsure (1)..(380): unsure at all n locations
  Clone ID: PAT_MRT3847_72413C.1
aaaaacaaggaagcgangnnagggaaancagaanaannaaccggaggaaaccaaccnggagaggcacaggcccacaaggggggaaaggggaaancggaaagcccctttttcccacaggaaaatactttttctggggaaagaaaaattttttttttttacaggcancngcnnanggnngcnaggggggggggggggggnccacaacccccccccccngagagnncaaagacnnanngnncnnnngcaanncnccaccccccggaaaaaaaaagaaaaacggagcanagccgacgccgcaaagccgaaaacggncgacccggggcacccccacaggaaggccccccnaaaccccaggggggnggagacccacccccgccagg

SEQ ID NO: 112299 - DNA, 416 bp, Glycine max
  Clone ID: PAT_MRT3847_72414C.1
catcaccaccttgcaataataataataatcatcatagttattattatggttctgcagctcttgcacctcttgcaccaccaccacaacatgtttatgatcaaacaccaccaccacaacaaccacccttggttttattattagcacaagaagaaagggttgcaaatctaatgcaggacgccccacttcttttgagttgggattatgaatatctacaacgtattggtttaaggctttattaacattattattacacagtggcgctttttaattcaaggtcttcaaatttgttcttataaacctccactacttattctattactgtgtgtgataaacaccagaatattgtggatgacacgagtactctcaaagggggacaaaataaatatagtggctgcttttttatagggagtgttttt

SEQ ID NO: 112300 - DNA, 221 bp, Glycine max
  Clone ID: PAT_MRT3847_72415C.1
tgggcgttctgctctagggaacttacgtacttgcactttgtcttgattttacaactaaccctctcgatctttagatcggaggcctgactcaggtccgtggtgcgtagccatcactatgcaaagtggtgctctgcacacaaataaacaggtggctgtccaccaacacatctatgctagtgctcttgtcgccaatactgatcatggtgactatgtggggcatg

SEQ ID NO: 112301 - DNA, 432 bp, Glycine max
  Clone ID: PAT_MRT3847_72416C.1
ttggagagcgggctttttttttttgaaacagcaattttctaaaacggggaagggtgatattaaagaggccaggtgatcacaccaaaggagtaagatctccggggcaaaaactggaagaaaaaaagattaagtgtggatcgtaaaggaaaattcatacgaaaaaataagggacgaggatctcattctcatgatttccaacttcgacatcctgaacaagagaacactggtgccgccaacctcagaagaagaggcggaaaaatcagaagcatatcgcatcaccacaacattcaccttctccatcaacgactgtaaactgtgccccttcttgtcccctgtgtctttatgtatctctctaacccaactgttagccggggcagaagtacatcgcaggagcaataatgcgtccggaggaggaaccgacacactttcctg

SEQ ID NO: 112302 - DNA, 523 bp, Glycine max
  Clone ID: PAT_MRT3847_72417C.1
cggaattcccgggtcgacccacgcgtccgagcgaccctccaatcgcgaatattaagagaatcaaactcgttctgttttgtttttctttatttctgagaaagaaagaaaagatgggaatgacaccgaaaatagctccttcgatgctctcttccgacttcgccaatttggcttccgaggctcagcgcatgctccacttcggcgccgattggctccacatggacatcatggatgggtaaggaagtcactcactctcttgctttgcttatgctattggctttgtcctcactcctcatattgccattacttccaaattgaatgggtttttaagttgcatttcagttcattccctttttgttgttttgtcaagttaatgttatctgtgtgcaaggataatgggttctagttctttttgctgattacatttcaagttttgaattttaatggtctgttaacaatttgcggcacattcttttgtcgatttgcttctatatttgtaacaatgattttgagttagttgaattag

SEQ ID NO: 112303 - DNA, 683 bp, Glycine max
  Clone ID: PAT_MRT3847_72418C.1
gactgccctaagttgtttattggatatgaattttacaaatattacgtcaattaacggtaacgggggagctgaaaagtgttgcgccttctccaggctgcacggcgagacccaccaatggggggggggaacttggggccctttccaaggccacggtttttgcggccagcagatgtcagcccacgcatctccctgtgcttggggactggtttggtaatccattgggtgtcgggatttcttctgatagctttatggaatggatcaatgaggataacctcaaaaaatttatatgtggaatcttcaccaacccagtaggaattcaggactctcaaagctccacaatggcgcccagctctctcctcagcaacagactgaaggcttcgggcaaacttcagctggttaacaccgtggtggacaggcttgccgtaggttgcacccttaggaactgggcgcttgcgaccaccgcggcggacacggatcctgtaaatgacataaccttgcttagccttgtatcccagccttcgcgccttatcaggccgggtggggcggggagccctgtgcagcgcagagagctggcggtactgccagcctcgggccctttgccgggcgcgcgtccccgcgcacgcctccttcctccacagctcctggatgtatttgtatgcacccatcttggctcacctgatggc

SEQ ID NO: 112304 - DNA, 438 bp, Glycine max
  Clone ID: PAT_MRT3847_72419C.1
ctcgttctgttttgtttttctttatttctgagaaagaaagaaaagatgggaatgacaccgaaaatagctccttcgatgctctcttccgacttcgccaatttggcttccgaggctcagcgcatgctccacttcggcgccgattggctccacatggacatcatggtcttcttcctcttcttcttctattgcatgcttacaattttgttcctttgttaaccaagtttgaatgattgtctatgtgtttgttactattaattaatttctctcattgagcttactttaatttttcagcaaccatggctactgattttttttttttatatttttattttttcattttgggttcatttgcaggatgggtaaggaagtcactcactctcttgctttgcttatgctattggctttgtcctcactcctcatattgccattacttccaaa

SEQ ID NO: 112305 - DNA, 460 bp, Glycine max
  Clone ID: PAT_MRT3847_7241C.1
gttgttggtggtgtttttttttttttttttttgggcggggatgcattcattcattcccttcccctaaatgggaaagccctttaaatacataattcacactttcaaacacaggctcattttcagtaatttttaaatttttttttccaaaagtcgaaaacttttggggggggaaaaaaaaaaaaagggacttaaatgaaaaaccccttgacactggggggggcctgctttcaatttcccttagcccccggggtcgcaaaccaactccaatttcctaaatcagtcagcaattgcccctgtcaagttcttctcgaagatcccgtggcccactttaatccttcccgggccccacccgggtgccaaaaatgcaccggggggggggctcccccccgttgggtccaagtggccgatatcaacaccgcggttaatcttggccttaaattcggggcccaaaaaatcccct

SEQ ID NO: 112306 - DNA, 387 bp, Glycine max
  unsure (1)..(387): unsure at all n locations
  Clone ID: PAT_MRT3847_72420C.1
aattcggctcgagctcgctgcgagaagacgacagaaggggggataggaggttgactggtacaaactcgagtgtatgcgagaaaagagagaactcaccgcgagagaaattgcttccaccgtagacattatctctaaaatgccaacaatggatgtgtggaaataaatgccgaacctcgcgttcaaatttcacgtctgtgcaacagttaacaagtcttagatcgtcattccactgagacatattgaagtgtatgccgaaaaaagagagggttntgagaaagaaagatgggaaaacagagtgcgagaggaagagaaagcatagagatgtgtcccctgaaacatgagctatctacatataattagggtattctcagactattatacactcta

SEQ ID NO: 112307 - DNA, 446 bp, Glycine max
  unsure (1)..(446): unsure at all n locations
  Clone ID: PAT_MRT3847_72421C.1
aatggaaattgattgctttgtgttgatctcgcacaattagaacccagaaactgattgcagcatgtttttgcttttatgatgatcatgcgttttatgatctttccttgcgtgtgtgtgttcctttctaattttgaactttcgatcatggatttatttaaaattctttaatttgccgacatatcgtgaacgattgtggaatcagtgatttttttccatcaattccatggaattcgtctgaatccatgttagcattcggctttcatgtgatcaatttcctgtttctgtaaccaccatgatgtggagtcaactttctaacaattctacccattttatgtgcgttctattgtttatcgntgtgtactgttcaatgaaattgaatccggagtcaaatgggcgttttgcaattctttaatctacttgttattctatgatcattggcataatgt

SEQ ID NO: 112308 - DNA, 410 bp, Glycine max
  Clone ID: PAT_MRT3847_72422C.1
cctggggagaaaaccccccaaacccggcccgttgggggaaggggttgtacaaagtttgttttcgcataatcagaaggcaagaaagggatttcccctcgaaacttccatagccccaaaacaaaaatatttaaaagcgctggcaaaaaaggggggtggggaatttggccaaaattttcaccccttgggggcccttaaacctttttcaccagggttcctggtgggcattttgacgttccattttttttcccgaagaggttatccggggggaccctttttttgttgggcccaaaaaccccccccccttccaagggtttgcccgccccccttctcccttgcaaaaggcccccttgaaacgggagggacttctttgcttaaaacggtatgccctgtttcgtaaagggcttccggtt

SEQ ID NO: 112309 - DNA, 665 bp, Glycine max
  unsure (1)..(665): unsure at all n locations
  Clone ID: PAT_MRT3847_72423C.1
gaagaggctgcagctcagagagagagagaacgncaaagaatgctttctattncagggcttattgccccaagcgaattgcaagatgaaatggtggactcatagataggctaaacagtgtgggagctaatagtattacggtgggcattttaacttgtttcataggctttgattcaatccattgccaggtcctttgagaagagatgcagcattttccttcaatccattgccaggtcctttgattcaatccattggcagttcctgatttcagaatttttgctggccggggatactgccttgtccgttgggtgagtgtagattattcaattactaattggggctgataatattcagtcattttgtaagggattcatgaagacatctttatatagaattgcaggatggaagactcattttgagtattgatgactccttaggagtgacctcctaacctcgggtggtttgtgcagaaaacccttgtggtttgatattttgtatttttttcccctccccaatcaatatttaggaatattgctgtaccatgagcgcacttaatatatatggtttcatgaactagtgtgttaatataatgtgttcatttcctcccaatagagagaggataaaaaaaaaaaaaaaaaaaaaaaaaaaaaagcggccgctctagagga

SEQ ID NO: 112310 - DNA, 3287 bp, Glycine max
  Clone ID: PAT_MRT3847_72424C.1
gcaggtaccggcaatgctccctggtatggttgatgggcatggttctcagctccttcagcgccgacagctttatgctggtcccatgtcaaagttgagaatgcttatgatctgtcgaatggctaagcctgaagaggtgctcatagttgaagatgaaaatgggaacattgtccgtgaaaccttgaaggacaatgatgttcttgttcaatataagattatgagggagactcttatttacttgtcacatcttgatcatgatgatactgaaaagcagatgttgaggaaattaagtaaacaactgagtggtgaggattggacatggaacaatttgaatacactctgctgggcaattggttctatatcaggttccatgatggaagaacaggaaaacagatttttggttatggtcattcgcgatttattaaacctatgtgaaatcacaaagggaaaagataacaaagctgttattgcaagtaatatcatgtatgttgttgggcagtatccacggtttttaagagctcattggaagttccttaaaactgttgtgaataaattgtttgagtttatgcatgagacacatcctggagttcaggatatggcctgtgacacatttctgaaaatagtccagaagtgcaagcgaaaatttgtaatcacccaggttggggaaaacgagccatttgtgtctgagcttctgacaggccttcccatcactattgcagatcttgaaccccatcagatacattccttctatgaatctgttggtcacatgattcaggcagagtctgatgcacagaagagagatgaatatcttcagcggttgatggagctcccaaatcagaaatggatggaaattattgggaaggcacatcaaaatgctgattttctgaaggatcaagatgtaatccgaaatgtgcttaatatattgcagacgaatacaagtgttgcatcttctttaggaacatatttcctgccacagatcacattgatctttttggacatgttgaatgtgtacagaatgtacagtgagcttatttcaaaaagtattacagaaggtggaccttttgcatctagaacatcctatgtcaaacttctacgttcggttaagagggagacacttaagctgattgagacattcttggataaggcagaagaccagccacaaattggcaaacaatttgtgccgccaatgatggatcctgttcttggagattattccaggaatgttcctgatgcaagggaatcagaggttttgtcactttttgcaacaattgttaacaaatataaagctgcaatgattgaagatgtacctcgcatatttgaagctgtttttcagttcctgagattaaaaatagaaggaaaacataaagtcctcaacgtagataagtatctacaagaagggttctcttaattcagtggagatagcaattgttgcagttgatatgatggaatcatttgcatgaactactcagtagttcaagtgatttaggttgactatgcttttagtggatcatgttagtattgtttacaaggtctactaagaattgtatttcatatgagaagactgtgagtgtactggtacggctcacttgtaataataagatgttgcaaaaatcattttgaagatcctacctcttccacatgttcctatgacttgtgccactattgttaaaatgatctgaagttattgctagaattcaaataaataacatatcttttagtaggattttaacatatacaaaaatttttgaattagttagaaatttcttagacgtaattcattgattgaacttcaataatcgaatagtaatttaacatatctttttgtggaagatcagacaatatgttttgattccggtaaaatagtttgccaagttgaataggtattactaaatagaacatcttaccataaggcttgttttacgtgcacttatgggggaggtgtaaataacccatataattacgtcgcccatgctcatagtctttattgtacgcaccatcaaactcaaatctttttgtacaaaggttacttcttttttcttgttaattatgcaagaatgttcgtgtctctaagctactcaaggtttgttttcctgcttaatctgcttgtcaagtcagcaactgaagcttgttatggattcaatcatatgggcatttcggcatacgtccaggaatattgctgaaactgggcttaacctgttgttggagatgctgaagaagtttcagggctcagagttctgtaatcagttttatcggacatactttttgacaattgaacaagagatatttgctgtcttgactgacacttttcataaacctgggttcaaattacatgtcttggtgctacagcatttgttctgtttgctagaaactggtgccctaactgaacctctttgggatgttgctacaagtcaatattcatactcaagtaatgctgtgtttgtacgtgagtttaccataaaacttctaagcacttcatttcccaacatgacatcagcagaggttacccaatttgttaatggactctttgagtccaccaatgatctttccacatttaaaaatcacatacgagattttcttattcagtcaaaagaattttcagctcaggataacaaagatctatatgctgaagaggctgcagctcagagagagagagaacgacaaagaatgctttctattccagggcttattgccccaagcgaattgcaagatgaaatggtggactcatagataggctaaacagtgtgggagttgatagtaatacggtgggcattttaacttgtttcacaggctttgattcaatccattgccaggtcctttaagaagagatgcagcgtttttctccaacattagtttcccccctcttcccaatattttaagttgggactggtttggcagttcctgatttcagaattttcgctggccggggatactgccttgtccgttgggtgagtgtagattattcaattactaattggggctgataatatttgtaagggattcatgaaggcatctttatatagaatcgcaggatggaagactcgttcctgagtattgatgactccttaggtgacacctccttaacctcgggcggtttgtgcagaaaacccttgtggtttgatattttgtattttttccctcaccaattaatttttagggatattgatgtacaatgagcgcacttaatatatggtttcgtgaactggtgtgctatataatgtgttcatagcaaccacaaaaaaagatagaatatttggaataaaagcattaatgggaagaataagaagaagttg

SEQ ID NO: 112311 - DNA, 290 bp, Glycine max
  unsure (1)..(290): unsure at all n locations
  Clone ID: PAT_MRT3847_72425C.1
gcggccgcccnnnnnnnnnnntttttaaaaactccaaaagggnccacacccacacaangagggaacagagggaacacggagacacaaagcaccccaagaacaaaactgcactcggagaaagacacatggaccaagggggagcgtaaaacatcgatttgcaaagcataaggcgccaaaacacaggtgccggagacaagaagtgcaccaccagcaagaacaccaaggggaggcacagcccagatagccaagccagacgcaccgccagcgaagacaacaccggagggagacca

SEQ ID NO: 112312 - DNA, 1212 bp, Glycine max
  Clone ID: PAT_MRT3847_72426C.1
gttccacgcgtccgcaaaacctagaagaaggtattatggccgcagcagcagcagcaaccactctctcctcttccctttccaaaccctcctctcttactttccaaacccactctttccccataaccctacccactccccctcgcgccgccgccaaaccccctcttctcgtcttctccaaaaacccaatttccgacatcgtctcctccaccttctcacgcgccgaagaaggcgcgtgggacgacgagaagccgcgcgaggagtgcggcgtggtcggcatatacggcgaccctgaggcctcgcgcctctgctaccttgccctccacgcgctccagcatcgcggccaagaaggcgccggaatcgtcaccgtcaacaacaacgtcctccaatccatcaccggcgttggcctcgtctccgaagtcttcaaccaatcaaaactcgaccagctccccggcagcctctccatcggccacgtccgctactccaccgccggccaatccatgctcaaaaacgtccagccctttgtcgccggttaccgcttcggctccgtcggcgtggcccacaacggcaacctcgtcaactataagaccctccgaaccaacctcgaagacaacggctccatcttcaacaccacctctgacaccgaggttgtcctccacctcatcgccacctccaaacacagacccttcattcttcgaatcgttgacgcctgtgaaaagctcgaaggggcttactcgagccgcttcgtcaccgaggacaagcttgtcgccgttcgcgaccccttcggattcagacctttggttatgggaaggagaagtaacgggtctgtggttttcgcttctgaaacctgcgctcttgaccttattgaagcgacttatgagagagaggtttaccctggtgaggttcttgttgtggataaaaacggtattcagagtctatgcctcatgtctcatcctcaacccaaacaatgcatttttgaacatatttactttgcacttcccaattcggttgtttttgggaggtctgtgtatgagtctcggagacaatttggggagattttggctactgagagtcctgtggactgtgatgttgtgattgctgtgcctgattctggtgttgtggctgcgcttggttatgccgccaaagctggggttccgtttcagcagggtttgattaggtcacactatgttgggaggactttcattgagccctctc

SEQ ID NO: 112313 - DNA, 407 bp, Glycine max
  Clone ID: PAT_MRT3847_72427C.1
gcatcgcatccctcttgatttgtagtttgttttgttctgtagataaaagttctgccaaaggaagaggggtgctaagatcatagtgggtgttgtgcaacaatacctatgatctatgctgctatgatcctggcacattctgccatttccatacttgaaactgtcgtagactctgatattgaacaatgaggcctcttgtatgtctaccagatcacatctcttggtagacgtgtacagagtaactagacgcctaactcttacactggaggagttctaatccagccacctactgtagcggcctgtttatgtgaatgtttcataatagcatctatgcatatcggcgtgtatgcttggacattttacagaatcaatggagccctatttattacgtaacttgggattcttacctt

SEQ ID NO: 112314 - DNA, 251 bp, Glycine max
  Clone ID: PAT_MRT3847_72428C.1
ttcaaaattcaacactcttgaattttggactagtactgggcgcgcttcagtcttgagttgtggaatcaagagatttgccgcaaaagttctactattgcttttggtggggcctcagaaatttgagttctcttggtcagagccttgcaacaagtacctgtgtttggactatctgctatgcaatttgcatatcaattgctggatttgtgttatttgcattcctcataggaaatattcagacatatttgtattca

SEQ ID NO: 112315 - DNA, 428 bp, Glycine max
  Clone ID: PAT_MRT3847_72429C.1
aatatatattcagggatattatcaagcctcggcgagggaattgataaggatcaatggaaccacaaaagctccagtcatgaattttgctgctgagacatcacttggggtggttactgtaagagcattcaacacggtgaacagatttttcaacaactacctaaagcttgtggacatggatgcaacattgttctttcattctatcgtgaccatggaatggtcaattttaaggtttgaagtacttcaaaaatttgacagtcttcactgcagctttattacttattctacttcctaagggatatgtaccttcaggtcttgtgggattgtctctggcttatgcgttgacactgaaagaagcccaagtattttggagtcgaatgtgtaacatgtcatcaaaccatataatctctgttgaaagaataatgcaattc

SEQ ID NO: 112316 - DNA, 1129 bp, Glycine max
  unsure (1)..(1129): unsure at all n locations
  Clone ID: PAT_MRT3847_7242C.1
cgagtacggctgcgagaagacgacagaagggcaacaggggcaacccccttctctttggtgtatggtatggaagcagtactccctgtggaggttgagattccatcaatgagagttctaatggaggcccagttatcagaagctgaatggtgccaaagcagatatgatcagttgaatctaattgaagaaaaacgcatgaaggccttgtgccacggacaactttatcaacagaggatgaagcaggctttcgacaagaaggttcgtcctcgtgcgtttcaagaaggagatcttgttctcaagaaggttttatctttccaacccgactctaggggcaagtggacgcctaattacgaaggcccatatgtcgtcaagagaactttctctggtggtgcgctgactcttacgactatggatggggatgagctccctcgtcccgtgaatgcggatgcagtcaagagatactttgtctaaaaataaaagaacagctcggtaagtcgaaaacccgaaagggcggcttaggcaaaaatgagcgtctcggtgggtcgaaaacccgaaagggcgacccaggcaaaaattagagacatcaaacagaaaataattagcctgataggtcgaaaacccgaaagggtgatctatgcaaaatttaaggatcaaaagacaaagtaactgcatcgagatgatcttcgttcatttggggcacaatggaatgtcaaggagaccctgaatctgaagcatccaaacagtggaattcaaggttgtcagagggaacaacggttattgtgttcaatgaaccttcgacttatatttaccattttccaaaactttgtaagatcagtggagccatgccattggcaggtcaccactctttcaaataaatttgagcctgttgcctttcatttggaattctcatttattcagcttataaaacctttcctttttttatggtagcatttgaaacaaaatatttctcaaaatcataaattttctttcatgtcttttttgagaagcgcaaacaacaaaacactttctctttgaactcgtgaataaatgaagggtgtgtcaacagctaccttgcaggttgcacgtggtcaattgctttttttttttccaaaaacccnncccctgcccaacc

SEQ ID NO: 112317 - DNA, 185 bp, Glycine max
  Clone ID: PAT_MRT3847_72430C.1
gccctacaaaagctgacgttggtgcatcctgttccgttgaatgaaacattgcaataatggatacccgtttggggaaatccgcagctgcatcatttaatgcacattatgctgatgtaacaggtacgtcagggaacaaggttgccaattgtaagtttgaccctgggaattatcaacggactaattcg

SEQ ID NO: 112318 - DNA, 415 bp, Glycine max
  Clone ID: PAT_MRT3847_72431C.1
ttctccttaatctctctctctctatataaactctctctcctttgctttcttccttttacttcacttataaaaaatttcccctctttttttttttgtctctttctttctttcagcgatctttcaatcagccatggtcgaccttcaaaccgtttgctgcatgtgcggtgacgttggtttccccgacaagcttttccgctgcaacaaatgccgccaccggttccaacactcgtattgtagtaactactatggggaattatcggagatagagctatgcgattggtgccaaagcgagggaagaaattactcgagatcacatagctccaattcgaagaaattagcggtggccggaaacgacgccggaaccacgacccgttcggaatattcccgcgagaaaatcaagcaccatgatcgtgat

SEQ ID NO: 112319 - DNA, 166 bp, Glycine max
  Clone ID: PAT_MRT3847_72432C.1
tccacctagaaatatcccttacaagagcgcgcccaccttgatggacaaccaggaactgccctaaacaacattgtatcgtttacacaaagttcaggtcccatcgaatcctatcttgtgaggggggatacacctctggggacaacccaagaggaaaggcgaacttttg

SEQ ID NO: 112320 - DNA, 394 bp, Glycine max
  Clone ID: PAT_MRT3847_72433C.1
tctacctactcggtaggtcgcccttcgttcttttttttttttttttttttttttttttttttttttttttttttaacagaaaatgaaacaatttataaaaggacctggttacagcgaactttgctactgaacaaagctgttatactagtagcatctggcataactcaaagccaggcaagacactgacttatgtcatagactttcctataacaaccagctcagccagtctactaactactattcaaaccgacatttttttaaagaggctctcccttattattggagcattgataaccacaactaccatttaacctattggctactcagctttggcttgttcggattcgagccaactcaagcactcataaacctgttagcggcttacagatgctaa

SEQ ID NO: 112321 - DNA, 1186 bp, Glycine max
  Clone ID: PAT_MRT3847_72434C.1
gacgacctacatgggacactcgaaagccgctagggatatctgtttcagcaatgatgggaccaagtttttgagtgctgggtatgacaagaatattaagtattgcgataccgagacggggcacgtgatatcgacgttcgccaccggcaaaattccttacgttgtgaagcttaatccggacgacgataagcagaatgttttgttggctggaatgagtgataagaagattgttcagtgggatatgaataccggccagataactcaggagtatgatcagcatttgggggctgtgaataccatcacctttgttgataacaacaggaggtttgttacttccagtgatgacaagtccctcagggtctgggaattcggtattcccgtggttataaagtatattagtgagccccacatgcactccatgccttccatttcgcttcaccccaatgccaattggctcgccgcgcagagcttggataaccagatacttatttatagcacaagggagaagttccaacttaacaagaggaagagatttgggggacatattgtggctggatatgcgtgtcaggtcaatttttctccagatggacgatttgtcatgtcgggggatggtgaagggaagtgttggttctgggactggaagacttgcaaggtctacagaactctcaagtgtcacgaaggtgtttgcattggttgcgagtggcatcccttggaacagagcaaggtagccacgtgtggctgggatgggatgattaagtattgggactagtttctcctgatcaacctgttgctggaatcagttggcagaagcagggcaaagaaaggcactacttcacgacagaaaggagaagaaacattgaattcacaatgttgatatattcatccttggttaaaagtacaatggcttttattgaatattatcacgagatttctcttcactcatcatgacatggccatccagtgttgtgctaattgcaattttgccattttttagggacttttgtataatagtcattttaagttagatattcatgtgtgaaaatttccctctcatgttgcagtttaatttaattacgttttatgcttggattgtgcatactttggtggggatttttgtctctacgggatataaaataatatctgtactcaaaaaaaaaaggaccgtgttctccgcactttaattcatatg

SEQ ID NO: 112322 - DNA, 754 bp, Glycine max
  Clone ID: PAT_MRT3847_72435C.1
ttttcggctgcgagaagacgacagaagggggacgaaattctccactgagagacatagaaaaccgagaaaaagaaaaaaagacaatatgtatgtggtgaagagagatgggaggcaagagacggtgcattttgataaaatcaccgcgcgtctcaagaaacttagttacggtttaagcaccgaacactgtgaccctgttctggtgtctcagaaagtgtgcgctggcgtctacaaaggcgtcaccactagccagctcgatgagttggcggcggaaaccgccgcggctatgaccgccaaccaccctgactatgcttctttggctgcgaggattgccgtttcaaatctgcacaagaatacgaagaagtcattttctgaaacgattaaggttatgtattaccattttaatgagagatctgcgatgaaggctcctctgattgctgatgacgtctatgaaattatcatcaagaatgctgctcgattggacagtgagataatctatgatagggactttgactatgattactttggtttcaaaactcttgagaggtcatacctcttgaaggttcaaggaaaggttgtggaaaggcctcagcacatgttgatgagggttgctgttggaattcataaggatgacattgattctgctgtcagaacataccacatgatgtctcagagatggttcactcatgcatctccaacacttttcaatgcaggaacacctaggcctcagttgagtagttgcttccttgtgtgcatg

SEQ ID NO: 112323 - DNA, 423 bp, Glycine max
  Clone ID: PAT_MRT3847_72436C.1
aaaaaaaggtgcggccttgtattcaaattgggtttaaaaaaaacaacttattcattctttatatgggatcaggctaagcttattcgggaccttgaaggctccatcattggcagaacaccttgacctcttttgatgagggattcgttaaattgcagaactatgagatgtatctcaagcgtgatgagcacttcaatcaccactcctccatcagggccaactttgccaatcaccggtgttaacaccactctgccagagggtgcaattagcattacccatttggcaagcatcggagctcttcatactccaaacatttttgcccaagtttaagatcaggttttgctgcggggattcacattcaattccttgggaaagaatccttttaatctcatataacgtaattccttaaattaaatcctgagacta

SEQ ID NO: 112324 - DNA, 267 bp, Glycine max
  Clone ID: PAT_MRT3847_72437C.1
aattcggcaccagcctctcccttaaaagactttctcgagagccaaaataggaagcaaatgcagaaaagtgaaatgcttcatcactttgacaacctccaccgcccaatcatgtgtttttccagccgcgtttctcttgccgacgacatctccggccactgctccgtcgcttcaacaacctcctccgcctcggggctccgattcttaagatccaaatgctccagatctgagtttgaactcaatgaaacaaatccatgcgccggaagaaag

SEQ ID NO: 112325 - DNA, 250 bp, Glycine max
  Clone ID: PAT_MRT3847_72438C.1
atctgcagtacgattagaccttggtcctggtgttgttatcccactccaaactcacgctgttgcgcttgaactactcggtgttctgcatggtcgcattcttgttggattcatatctttaggtaacatatgtttatcagatggtgctaaaaaagggagagctcatggttttcccacaaaggttggtgcactttcaaatagctgttggtaagagaaaggctcttgcttgtactgtcttcaggattacttttgc

SEQ ID NO: 112326 - DNA, 229 bp, Glycine max
  Clone ID: PAT_MRT3847_72439C.1
gacgggagggggttctagtgtgtgttacaggtgcgactcgtcctggttattcgggatcgtcttcttttgatgcctaggatatatcatttttatatcacccgaaaacgtcttgctgctttggtaactgaggtgtgccgtatcgccttcgtgtgccgcaacggatgcagaagctggagggttgccccatgcttgaccttcaccgtaataccaaccaacagagagcttggtc

SEQ ID NO: 112327 - DNA, 439 bp, Glycine max
  Clone ID: PAT_MRT3847_7243C.1
gtttggggttcgagcaaaaaccgaaacaccttcttcatcagattcccaaaaaacatataacctatttcaccaatccaacagggtggttgtgatttttgttgttgttgttgttagtgatcatcatggacgctgcatcaggggcagcgcctgcggcggtggcggctccccaatcagagggatcaccggctgcgccgagccgctacaagtcgcacaagcgacgcgactggaacacgttcttgcagtacctgaggaaccacaagccaccattgacgctggcgcggtgcattggcacgcacgtgatcgagtttttgaagtacctcgaccagttcgggaagactaaggtacacatcttggggtgcccgtatttcggacaccccaacccacctgccccttgtgcctgtcctgttatacaggcttggggcagaggggacgccctaat

SEQ ID NO: 112328 - DNA, 394 bp, Glycine max
  Clone ID: PAT_MRT3847_72440C.1
ccatttacgttgttaatgtgtgtagaaatctaggttaaagcctacttttatgctcttatatatgaaaatcataagaatattacgtgtttttaaattctaaatggtacttggtatcaagatggtggagatgaaagttatgatgagctacaaagcgtgtgagaagaaggtaaatgaggttaagggataagtatggaagtgagggtgaaaatggtgatgtttatgttaataatttttatgtaatgtgggacataattaaaaatttgaaagtacatccaaggactaaaatgacatatgacagtatgtgattaaattcagtaatcaaaatgacatcaaatagttaactttaaggactaagttaaaaatgatatatatgttgtaacatccaagtcttgat

SEQ ID NO: 112329 - DNA, 402 bp, Glycine max
  Clone ID: PAT_MRT3847_72441C.1
aggcctggagggccgtcgacccacgcgtccggtgggaggctcagaaggccttggctatacaaccagtgccatgcggcgcagtcagggtcccatggacgacttccatcagctcacccgcctccatccccaagcagagtgtaggcaagggctgtgactgcctcaggtaattgggtgattttgctccagcaagaggagaggaagcatgtgagtgccacactgaacctttcagaaacagccgtggggtcgggggtgcttgggccaggccaggatacttggtgttaagcctgctctctcttcagtgccccgactcggcttgcaagcaggacctgctggcctacctgcaacgcatcgacctttactgccaccagctgaacatctgcagcaaggtcaaggccgaagtgc

SEQ ID NO: 112330 - DNA, 916 bp, Glycine max
  Clone ID: PAT_MRT3847_72442C.1
gcaaagtattttgggttccttgtcaagagcacatcagctgcagttgccatctgtttgagttttcaggcatcttatgtagacacgtgctacgtgtcatgtcaactaacaactgttttcacatcccggatcaatatttaccagcccgttggcgaggcaacaattcatcttctgttaaccactaccggggtacaaccagtagggatcagcctgaaaggatacagtttttagaatccatggtttcaacgtttttagtggaatccattgaaactgaggaacgcctggatgttgcttgtgatcaaatttctatggtgctatcacgcatcaaaacctttcctaggtccccacacggggtgaatgacattgcatatagttatccatcagattcattaatcctgccagaggtagaagatactgatggaatgattcccggctttacaatcacaaatccccatgattctatcactacaggaaagctaaaggagagaagagcgagagatgtagtggatctcactaggaaacgcaggcagttctccatgccattgtgtgctcaatatggacatgatgcgtctgattgctcaataatggcgagtgacaatatgagtggagatgcattagggtacttgtagagtgagtggaagtagtactgctgtacaaagtaaatgcattttttcttgggggtacataaatgcttttttatttgtttcagatgcatgttgtaatacacatcttttatattttcttcactcctttcctccaatttagtgatacacatgttgcttctcactctttacatccgcagaggttttagtcctatttgcaccacttatattagcattgagaagtttgatttacttaaatatataaacatttttcgtgtactttttgtgcctgtgtagtaagaatcattgtcttttgg

SEQ ID NO: 112331 - DNA, 597 bp, Glycine max
  Clone ID: PAT_MRT3847_72443C.1
ggctcgaggtagttttggttatggccttttgttgcctacagtggatggacctgtggaaaaatatttagcttcaaggcacttagcaagcaacaagtcttcaatcttccttatccagtaggcaccaccattgctttgtaagtaaggctaaataaaacaatcttatcgttttgaaatcaatctcacccttattttaggttttcctaaatttttttccaacacattcggtctaatttccttccctatagagtcggataaatagaagcaactcattatatacgtagatatattattattcattcacaaacgatcgtatataataacaacttttatattaggcaaaatatgattttaatccctggtctaaattttttgtttaagtttgcccttcaagttttaaaaaataatatttaaatctcttaaaaaatatttttaggatacatatttactattctggggctactcacccccagttaagaagggtggtcctcatattaatatgatggcaaacattcatattgaaagattaatattaatatataatgaataaaattaattttcagatctggaaaatcagtgattaggaggaattaattaata

SEQ ID NO: 112332 - DNA, 364 bp, Glycine max
  Clone ID: PAT_MRT3847_72444C.1
aaagagaaaaatgtgtacagaaagcatgaaataactaaaaaagcaattgtactttagacaaagaagttggtaattcacctttctcaatcctataactacatttttgaaaactataaaaatgccaatggagcagcaaaatagaggcttatctagctaggaagagaataatagcaaaaagtcccaggagcaatgagaaaaggttcaagctatgtcccaaagtagaagctgcagaaaaagtagaattcgacttctgcaagctcttgaggggaccacaatatagaacattatctggtgcagccatctcggtgtcaccattttcttccggattgacgatcttcagcccacgcgtccgcggacgcgtggg

SEQ ID NO: 112333 - DNA, 263 bp, Glycine max
  unsure (1)..(263): unsure at all n locations
  Clone ID: PAT_MRT3847_72445C.1
agcacatccctacacagtggcatgccttgtggatgggtgcaattcagatcttagcaatngtagagattatccataggcgccataaggtgtgtgagctccattccangaccccagaggtcacaattggtggcttcaagcaaaggttctgccaacaatgtagcaggttccattcgctggagcaatttgatgaaagaaaaagaagctgcagaaaacgtttagatggacacaatagaaggagaaganagccccagccagaacctctc

SEQ ID NO: 112334 - DNA, 188 bp, Glycine max
  unsure (1)..(188): unsure at all n locations
  Clone ID: PAT_MRT3847_72446C.1
atttaaaccgggaccgtgtgctccaaaaattcgcgctatggacctacccaaaaaaaaaaaaaactcccttgaacatgttgcataaaataatggcagaggtatgagaagtatanaaatcccttgtttttcaccttcaaaggaactctgcgctgaaattcccacctgctcacagaaggaagcttttgccc

SEQ ID NO: 112335 - DNA, 552 bp, Glycine max
  Clone ID: PAT_MRT3847_72447C.1
gttgtactaaacactccttgtctcccggctcgagcagttttgccttttttgtgaaaaagtgtctacagagaacaaaacagaacggaacagagagagagaggagcttctctacttgactttctggagagacatggagggtgcaaactggaggataacagatgaagaagcagggccatcctcttcttctgggattgcttcaactaaacaacaaaacccacctgaaacttttcatcataggaaggaggcagaagaagaagaagaaaccgaggaagaggaagaagaagacgtttgtcagcataaaaatatcacctttgttcctggtcctctcctttctctcaaggatcagatcgaaaaagacaaggaggatgagagcctaaggagatggaaagagaagctgttaggatgcatggaaagtgatttggatggtcagatacatcctgaagtgaaattccattccattggaataatctctgaggattttggtgaagttattacttctttatctgtggatgaaaagccaaaatggtcatattctggttactctcagggagg

SEQ ID NO: 112336 - DNA, 245 bp, Glycine max
  Clone ID: PAT_MRT3847_72448C.1
atggtcgctatggagtaggagattggtcattccttaaatgccgagagcacatggcaaatgagagggacaagcgcaaagcattccaggaagtttgcaataatttcaggcctgttatgcattattttttcttggagagatttttacagccagctgagtggtttgaaaagagacttgcttatacccgaagtgttgctgctagttctatggttggttacattgttggccttggagatcgacatgcaatg

SEQ ID NO: 112337 - DNA, 970 bp, Glycine max
  Clone ID: PAT_MRT3847_72449C.1
gtcattgtcttagccctgctggtgaatacaatcttcggttaggaattataaaagagctgcacccggacatggttgcaacttattcaggcagtgctcaagtttttgaaggtcacccattcattgtggaagctggagtcagtgtaggtggaaaaaatgtcaaacaaggtctgaatatatttcgatttgccaatagaattccactactttttgagcaaggtgctgatgttgtcaccagaactgcacataaaagaatcaactggagtagttacaaaatcaaccagatgcaagataagattggtgtctttgtaagcattgtgagcacaaaaattccattcaaaggaactgggaaagaatacattggagatgacataactgagattgcttctgctgtcaagtatgctattcagcagtgttgtgtccaattaaaatccaagattgtgaaaaagatgcatgcacgtgagcagcaggagaggaaacgaaatctaagcaggtatattcctgatgcttctggtgcagtatacaatgttttgaaagaaatgacacagttacatgcatcaaagaagattcgttatggggatgatgatgctgaactactgagtaaagtctctgagaatttgattactaaagaaacactgtgtgaaaagctttctaaacatgttgaacaggttgactatgaaatggcattggagtatgccacgcagagtggagtaagcgaagaacccagagaaacaatatacatacaatcattggaagctgaaaataagatgattgacctacagactccatttattgttttcagagtctttcagtaggcttagaaaatttatttgatagtgaaaagaaacaaaagcgaagatgatttttccagattaaatttatattgtgttacccgaaagaacaattattgtatctattcttttcatttgtaccaaatggcaataagattgatatgatattgctgtgaaaacta

SEQ ID NO: 112338 - DNA, 425 bp, Glycine max
  Clone ID: PAT_MRT3847_7244C.1
ttttttttttttttttttttttttttttttttttttttttttttttttttttttttttttttttttcccaatggccaaattttcagtttgggcaataaaaaaaaaaaaaaaatggggccctgggaaatgataggcattagggaaaaaaattttaagcttaaacccggctccgagaaaagataaccgccaaaccaagaaaccccgggttgtgggctcttttttttggaaagaaaaacctcaaccaagaaacaccggggggggggctcaggcctaccccaaaaacacagtaaagggggcggcttttttagctatataaggccgcctttatgtaatttttcccagctttggggaagaaaaaaaacaggttcatttatgaaataaaaaacttttataaaagctgggatcttgggtcagcttcacatttt

SEQ ID NO: 112339 - DNA, 1632 bp, Glycine max
  Clone ID: PAT_MRT3847_72450C.1
gcacgtctaggcgccaagacccgctcgcgtcaagacccagaacttgttattgccaattctttgtttgttgataactccaaatctccttctgacaaccatatgggtcttgcgcctactccgtgccgtttgcgttcttcttcgttcgtgagactcgttgagcggattatccagcttggtaccctcgccctttctgcggtcatcgcgaacagcttctccgcgatcttgaccttctgcttcgctctagttggcactgtgttggcggctttgactgcagcttcgataggacaacaattcgggtcgaggcgagagagagagagaaagggtcgctttaaggcacagaagctttaaatgcgagttggttgattgtagcttcctttcaatcttctcctaatgcttatggactaagcatttgcccaagagcgcgttttttattctcaatatccttcttcttgttattattattattgttattgttctttgttgttaacatatattaataactctttcttaaacccaaatcttgtgacatcacaaaccgtaccctttttgtttatttcctttgtgggttttcaattcgtgcaaatttctgcgacacccagatggattttgcgctgaatccgtgtcctttgcgatcttctacgttcgtgaatttcgtcgagagggttaaacagcttggtaccctcgccgtttctgcagtcattgggaacatcttctccgcgatcttgaccttctgcttcgcattagttggcactttgttgggggctttgactggagctttgataggacaagaaactgagagtggcttcattcgaggggctgctgttggtgccatatcaggagctgttttctccattgaagtgtttgaatcctctcttgttctctggcaatctgatgaatctgggattggctgtgtcttatacttgattgatgttattgccagcttactgagtgggagacttgtgcgtgagaggattggtccggccatgtttagtgctgttcaaagtcagatgggtgctgttgaaaccagctttgatgaggttcaaaacatctttgacaccggtggttccaaaggtttgtctggagatttggttgacaaaatccccaaaatcaaaattacaactgataacaatgttgatgcatctggtgatagagtttcttgttcagtttgcctgcaggactttatgcttggagagacagtaagaagcttgcctcattgccatcacatgtttcacctaccttgcatagataagtggctcttcagacatggttcttgcccattatgcagaagggatctgtaattttgtatatgcttagtacagaccgctaataatgtccctattttatttttgtttttgtttataagcttatttaattctaggacttacatctagtgggagccattgcagtttgagtggtaatcattgtactaaattagtgtaaagaaaattttgggataaaccagtttccacttgttgtatatggatgagagtgattgacccattttctagcccgtctccactctttttctgctctttttttttttttttttgaataaagaacaagagacggtgatataactagtgttttgattcttgccaaaaaaagggcggccaaaagaatagtaagctcgtc

SEQ ID NO: 112340 - DNA, 1281 bp, Glycine max
  Clone ID: PAT_MRT3847_72451C.1
tttctcttttgaacttctttccattttcctttggcttttcgtaaatcaagtttgcttttttacttcctgtttgaacccgaaatttgtcgttttccgctgacattgaaagaagctgttgaatcgcgtcgaataaggttctgaaatttttaagctttcatctcagacagggtgtaataagaaatgatagatataagtactctcaatgctgcacagattactgtgctgggatccgcgttttgtgttatgctttccatgcatttcacgacgcagttaatgtctcagcatctcttctattggaagaatccgaaagagcaaaaggctattatcattatcatccttatggctcctatctatgcagctgtctcctttgtgggtctcttggatatcagaggaagcaaggagtttttcacctttttagagtcagttaaagaatgttacgaagctttggtcattgccaagtttctggctttgatgtatagttacctgaacatatccattagtagaaacattgtgcccgatgaaattaaaggcagggaactacatcaaccccaagacactctttctttggccccaagattgtgtcatcatcccctcaccaacactactacttccatgaacctcacagcccctcctcctcattcccttgtaattgttttaatgtctcttcgaggcgttggagtgccttcaagcttggttgcacctccatggaccctcaagtagaattctcatcatcacttcactctgcctctgagatcattaggaaaaagaaaattactgggcggcaaaagagagaggaacttgaaaaggaggtcgctatgcttcaaaagttgttggaccaagaagaaaagtttcatgagattttggagatggtgcatagtagaccaaatgggtcatcgatatcaattcccaattttcttccacccaagatgagagaactcttaggagagctagtcatggttgagggtgagatagctagacttgaatcccaaataagcgaactccaagctgatttgaaacatgaacaagaaatcaccaaggaatcaaagcctaaaacgtggaatcaagggaacttgagcaattctaacaatcacttatcaacttctccggttccaaatcctagtcctattcgcagaaatgttcaagaaaggatggcatttgaaaccaaggcgttgcatttcataagcaaagctataaagggcgattacaatctcaatgacttcagttataatgacaaagacagttttgttaagacttctgtcgaaccgaaagaaagtaagttcc

SEQ ID NO: 112341 - DNA, 225 bp, Glycine max
  Clone ID: PAT_MRT3847_72452C.1
cgtctgcaataacaccacacattgggttttcggaattcacagatcccatggtcaaactggggcctgggaagcacttagagccaaagcataacctcataataatactaatattaacatgtgtcatgaaccgatgttagcatctttttctgtgtgctctcttggagcctctaactacccaaaccctgggttcatgaaacttcattgcacttatgactctacgtattt

SEQ ID NO: 112342 - DNA, 266 bp, Glycine max
  Clone ID: PAT_MRT3847_72453C.1
cagctgtggttgtaaggcaaatgcttaaggctgcggctgagtgtcatttacatgggttggtacaccgggacatgaagaccaggtgagttttcttctcaagtcacccatagacgattcacctttaaaggctaccgattttcgtttgtctgatttgatacaacctggaaagaggtttcaagatatcgtgcgcagtgcttactatgtttcaccacaagtgttaaaacgagagtctggtcccgagtcagatgtatggagtgattagtgtg

SEQ ID NO: 112343 - DNA, 374 bp, Glycine max
  unsure (1)..(374): unsure at all n locations
  Clone ID: PAT_MRT3847_72454C.1
attacccgggctcgactcgcacgccgtcgcgtgttgactactcacagtgaggcatggagtaaggtatgtctctcctatctatgtaaattataaaatggctatcggaggaggtatatcagacgggcaatgttgcataggcgaacttcttgagttacatctgtaagaatgatgttggtcttccactcgacttgttgtgggccgattagcatgatcacagtacttttttgattgcaaatggcctgtgaattgcatttgaatatagaacctttgtgaaagctnttgtctcttggtattgacaatcgatgtgggtgataccagctcactgtgtcaattgactcttgcttgtatttcgtttgccaatgaagttcttttta

SEQ ID NO: 112344 - DNA, 301 bp, Glycine max
  unsure (1)..(301): unsure at all n locations
  Clone ID: PAT_MRT3847_72455C.1
ggcgatccgtgcgctgactgaacggttgcatagcgggctggggagctcagcgcgtttgtcactggcccgtacggcgaagttgctggtggaacagggggcggtcaatgggaccgaagcgctgttgcccgctggggcgcaagactggaacccggtgctggaacagacctcctggggcccggcgcaacgtttgctgtcgccgctgaaggtcggggcggtgccattgcagtgggcctttgccgctacgaagctgggggctcatccgccgcagtggtggtgagttcgaaaccgctttcgcggncaa

SEQ ID NO: 112345 - DNA, 520 bp, Glycine max
  unsure (1)..(520): unsure at all n locations
  Clone ID: PAT_MRT3847_72456C.1
ccttcgcgtccgataaaatgtgtccatattatttgtctgattaggaagtttgacaaaacgcaaaagtgagggagaatagattttctatgtgtttgggagcaccacagtcactaaatcagaatccccacccaccactgggtctgagaggagacagcgaaagaggaagcagaggggtgttttttggcgggtttgtatttcatatcaaacttttccagggttagaatagaacccaacataagaaaaaaacaaagacagagcgagcgagagagaaaggggaatggaagaggaaggcatagggttagctgttggcgagagccacagaactccgattaaaaatcagcaattgcatccaaagagccaccgccaatggtccctcgccgcacgctgacgacgacgacgacgatgaagccaccgaacgccttctcaacatttgcgatgcccttgaagccttggagacccagctctctttctgcaggttctgcaacaacaacaacngtacgaaagagaaattgccttggct

SEQ ID NO: 112346 - DNA, 509 bp, Glycine max
  Clone ID: PAT_MRT3847_72457C.1
gtcaagaatgctattccatccggtctgattccttccaccaacatctcatcatacaagtcaagcacttccttgtaatgcccattcctaccatacacaccaaacattgaagtccataacacaacgtccctgcttcttacttcttttctaatctccatcccaaccaacttgaacacttgccaagccttctttactaatccacacttgccatacatctcaaccaacgcgctctgaagaaacacatcactctctatatcaggtgtcgtacggagcaagtaaccatgcacttgcctacccatttcaacagcagataatccagtgcatgcacgcaaagctgctgatagagtaaagtgatcatgcttcaatttcaacacgggcatcttcctaactagttcaagttcctgaacccacaggccggcctcgccataacccgacagaagtgcattggcacacacagtgttcttgtcagaaatttcatcgaacacatgggctgcatcttttacattcgacaa

SEQ ID NO: 112347 - DNA, 2013 bp, Glycine max
  Clone ID: PAT_MRT3847_72458C.1
tattattctgagtgtggtgcaagccacctatgtactatttttcctttacttatgcaaaagctacctttgtactatttttcctttacttctgcacaagccacctttgttttgcaggtacatgggtacaataactggcataagtgacctggatcctgttcgttggccgaattctcattggcgatctgttaaggttggttgggacgaatcaaccgctggagagagacagccacgggtatcattatgggaaattgagcctttaacaacgtttccaatgtatccatctctatttcccctcagattgaaacgaccctggcatccgggcacctcttcttttcatgatggcagagatgaagcaactaatgggcttatgtggctgaggggtggacctggagaccaagctctcaattccctgaattttcaaggttctggtttgttgccatggatgcagcagagaatggatccaactttacttgcaaatgatcataatcagcactaccaagccatgtttgcatctggtttgcagaacttagggagtggagatttaatgagacaacaaataatgaattttcaacagccttcaattatcttcaacaatcaggaaaccccaatcctcctttgcagcttcagcaaccgcaagcaattcagcaatccgtatcttctaataatattctacagccacaagcccaagtaatggcagagaacctgtctcagcacctccttcagaaatcacacaacaatcgagaagaccaaacacagcagcagcagcagcagcggcacacttatcaagatacagttttacttcaaagtgatcagctccatcagaggcaacactctggtctaccttcaccgtcatattcaaaaccggatttcttagattcaagcatgaagttccctgcttcagtttcaccaggacaaaacattcttggttcactttgtcccgaagggagtggcaatctcttgaatttatccagaagtagtcagtccatgttgactgaacagttacctcaacaatcatgggccccaaagttcacaccattgcagattaatgcttttggcaactcaatgcaacatgtgcagtattctggaaaagatactgcaatggtgccaccacattgtaacccggactcccaaaatcctattctatttggggtcaacattgattcatctggccttctgcttcctacgactgttcctcgttatactactgcatcagctgaaattgatgcatcagcaatgccattaggagagtctggattccagtctcctctatatccttgcgtgcaagattcatcagagttggtgcaaagtgcagggcaagttgaccctcaaaaccagacacgaacattcgtcaaggtttacaaatcagggtcagttgggcgctcacttgacatctcccggttcagcagttatcatgagctgcgggaggagttggcacagatgtttggtattgaggggaaattagaagaccctcttagatcaggctggcagcttgtattcgtcgacagggagaacgatgttcttctccttggagacgatcccgtgggaatcatttgtcaataatgtatggtatatcaaaatactttcacctgaagatatccataaaatgggagaacaagccctggaatcccttggtccaagtccaggacagaggctgaatagcactggtgcagattctcatgaaattgtttcaggactaccatcaattggctcccttgaatactgagagaattttaacatgtatttttctctcaggtcctacggttaagaagactattacatatccacatgtttagtacttctgtttgaacactacttttcgaccttgcatatctgaatcaatatatactgtattgtctgtttcactttcaaaaacatcgttattatttcgtagaggattgttgagattttcaggacaaaaaatctatattatatatatgatgagaaagaaacctaggacaaacttttgtgccaatttgtaaccttgtgttgacatagagttaaaactattgtagc

SEQ ID NO: 112348 - DNA, 664 bp, Glycine max
  Clone ID: PAT_MRT3847_72459C.1
gttctaggtttctttctcatcatatatgtgatatagattttttgtcctgaaaatctcaacaatcctctacgaaataataacgatgtttttgaaagtgaaacagacaatacagtatatattgattcagatatgcaaggtcgaaaagtagtgttcaaacagaagtactaaacatgtggatatgtaatagtcttcttaaccgtaggacctgagagaaaaatacatgttaaaattctctcagtattcaagggagccaattgatggtagtcctgaaacaatttcatgagaatctgcaccagtgctattcagcctctgtcctggacttggaccaagggattccagggcttgttctcccattttatggatatcttcaggtgaaagtattttgatataccatacattattgacaaatgatctacaaaaaggttatgcaggaaatccacgcaccaaaaagaaacaaacaaatgtcagcaaaacttagccaagtaaaatgaacaagtatagcatgtttacttatttgaaggtttggagatagaatgccaaatgtatttattagatcacaagttgatttaacaagactttatattgtaagttgaagttgaacttactcccacggatcgtctccaaggagaagaacatcgttctccctgtcgacgaatacaagctg

SEQ ID NO: 112349 - DNA, 521 bp, Glycine max
  Clone ID: PAT_MRT3847_7245C.1
gtccccaaacccgccccccccaaaaaaaacccggggggcgaagccccttaaaacaaagggggggggagcaagaaaccccccccaaaaaatccccccccaaaaaaacgggaaaaaggaaaaaaatgggggcccccccttcgggccaatattaaaggggcccccaaaaatcccctggttttaaaaacccccccccaaaaaaacgggggcggattcccccggggggccccaaaaaaaaggggggggaacgggtggcaaattttttttagcgaaaggagccggagaggaaaccccggggggggctttggggaaaaatagggtttagggtcgcggggaaaattgcggccaaggtcccccggcagggaagaaacccctgggggggggagggccgcggaccagaggggcaggggggcgcaagaccgggtggagggagagggagggttggggggggcggggggcaagggggggggggccgcggggggggggggggggggggcccggggggccggggggcggggggggga

SEQ ID NO: 112350 - DNA, 398 bp, Glycine max
  Clone ID: PAT_MRT3847_72460C.1
cccacgcgtccggtgatttcagttagtgatcggtgttcacttgatctcatcatgatcgtgttcgtctattgaagaagatgccgatcagaaacatcgccgtcggaaggcctgaataggcgactcaccccgacacgtttaatgctgctttgtctgaattcatctcaaccttcatcttcgtgttctcctgctcaggctccttcatctgctactacaagctcaccgactactgcgcttccacccctgccgtcctcatctccgcctccatcgcccatgcattcgccctcttcgtcgccgtcttcgtcggttccaacatctccggcggccacgtcaaccccgccgtcaccttcggcgccttcgttctctgcaacatcaccttcctcctcggcatcgtctacgtc

SEQ ID NO: 112351 - DNA, 857 bp, Glycine max
  unsure (1)..(857): unsure at all n locations
  Clone ID: PAT_MRT3847_72461C.1
agaactcgannnnngaaaaggatcagaacagtataaattcattgaaaattgcctagcatcagttgacagacaaaaacagccatggctgatatttcttgcacatagggtacttggttattcttctgcagggttctatgctgcagaaggctcatttgaagaaccaatgggaagggaggatcttcaatatctctggcagaagtataaggttgacatagcaatgtatggacatgtccataactatgaaaggacttgccctgtgtatcagaatatctgcaccaacaaagagaagaacaattacaagggctccttggatggtacaatacatgtagtggttggaggaggaggagcatcccttgctgaatttgcccccataaacaccacatggagtatatttaaagaccatgactttggatttgtcaagcttacagcatttgaccattcaaacttcttgtttgagtacaagaaaagcagtgatggacaagtctatgactcattcagaatatccaggcagtacagggacatcttggcttgcactgttgatagttgtccccctacaacactagcatcttgatctaaaagcaaaaaaagttgttgatttagtttgtttatatttggttggataacatgttccatatgatctcaaaatgaggttaggccactgaattgtttggtttaaagtggcagtatggaatttatactgtctagcaattgaccatgggcaacattggctaaaaccacaatttcattagaaagcaccatggttgcaatgaattgaaaattctatagaatcagaaaacaccaatattgcaatgaattaaaaaagaaagacacccgccactagttcgaagaatgtcaca

SEQ ID NO: 112352 - DNA, 388 bp, Glycine max
  Clone ID: PAT_MRT3847_72462C.1
gtttctcaacaatgtttttctcacacagagagaacacagtgagtggtcttgggagattggtgctaatcatatggctttttgtggtgttaattatcaattcaagctacacagctagtttaacatccatcctcacagtgcagcaactgtcatcacaaattgaaggcattgacagcttgatatcaggtactcaaccaattggaattcaagaagggtcatttgcacgcaagtatttgacagatgaactcaatatacaaccatcaaggatagttacgttgagaaatatggaggcatatattgatgccctcgagaaaaggacaaaagatggaagggttgtggccgttgttgatgagcttccttatattgaaatattaatgtcaagtaccaactg

SEQ ID NO: 112353 - DNA, 288 bp, Glycine max
  Clone ID: PAT_MRT3847_72463C.1
cattacatgcgccatttacgtgtgcaagactacagtgatctctgaagtaacggtggaacacgtacgattgtccacaacacgttgaaacatatgtgttatatacttaatgacattcatcaaaactcatgattgatgtgaagataattatagcaaacctaacgtatgatacataaccatactactggagacatattgattgcctacaatgtaattatacacttgcttaatatcttctttgcttaaataatactcgaactatcaattccttaactataatttaaactcctt

SEQ ID NO: 112354 - DNA, 529 bp, Glycine max
  Clone ID: PAT_MRT3847_72464C.1
cacatgagaaaataaccctttgcaaattataggaaccctccaatgctttgactccaccaatagcctgatcgtccaccaaaagcctaacctctagccattgcgaatgatctacaagaacctacgcttattggatgggatatcccctcccggtgtcaacaccattgccgtaatggggcagttccacacaaaatatggtccaaaaggggtgtgcctcccaaacctggttcatttatttggtgggactgcccttggtttcaggcacaacaaagtccttggacaccgttatgatcaagacgaaggaggcgactttgaggcccccatccatcttgttgtggggcatcattgacaggaagacctgtgctatcaagaaagagagggacatgtgcacggacacattgttactttgagctttcgggcggatctccaagggaaagatctcattaggcaccaaccagtttatggggcctgaggaccaggcaattgctgttgcgtttctgctaatgaagagaaccgcgacaactgcatacca

SEQ ID NO: 112355 - DNA, 233 bp, Glycine max
  Clone ID: PAT_MRT3847_72465C.1
ccccccatggatcttccctcacccaggttttttggaccctttctcacccttactatcttcggcctccgcttctttggatttatcaatataaccctgatcctcatgtgcagccttctaatcctcctcaagcaccatttaaatttgcccatttccttggctcccccccttcccctaaatacgacggtggaaggctggggcccctttaaggggaaacagggtttccccttttccaa

SEQ ID NO: 112356 - DNA, 436 bp, Glycine max
  Clone ID: PAT_MRT3847_72466C.1
cggcggccgacctttcttttttttgttttttaacaaagttttattctagttctgctagatcctagggggaatccagggagaatagacctgacatcaagaacagaaatcaaaattatagataattgacaaatattactttaaagccaacgcctcgattacctcaattgctacaccaattgaagattcatattatgatgtggttaaacttgttaggccaggaacagatattgctattctatccattaacaaataacaggcccgttattgcgcacgaatttttttcaaagactgctgcatataaaactcaagcccgaattctgactttgcttatgactcaatgagagaactttgctactaacttgtcaacatgggtaacgatatcatctaccctgggcccgctggaaactcttttgtgaaccatccttgacaagaactg

SEQ ID NO: 112357 - DNA, 278 bp, Glycine max
  unsure (1)..(278): unsure at all n locations
  Clone ID: PAT_MRT3847_72467C.1
catttgaggtggtgcttcccaangtgtgcagagacgcacaacaaaagggtnacnanagtatccttttgttctgctttcttcnaaaaagtgtcgagtgacgtaaaaacggattactgtgcgtatcatcgttatcagatgcatccggtgccaaatctaggaaaagcaaccttganttgaagtcatcgagattttatagtctgacatctggaatntagatntctcnaccaagggcgtcagntccnncaaacgtcccccagttgcttaactgcatctttatc

SEQ ID NO: 112358 - DNA, 225 bp, Glycine max
  Clone ID: PAT_MRT3847_72468C.1
gttagagtgccagtgttagcgacttatttttagagtacgtagggagtctaactcatatagttgttttaagttgcctacctcccttaagagaatggtttggtctcctcttgccgattatcttgctgttggtttgtgggtaaactagagtttttgaattattgctctcgccgccttatgttttgtattgactcgtggggggatagtaattagataagctcgagcatc

SEQ ID NO: 112359 - DNA, 497 bp, Glycine max
  Clone ID: PAT_MRT3847_72469C.1
gaaaggcctttgcttcaaatgtgatgcaaggttagtcgaggccacaaatgtccttcaaagatgttcttttgactgccgacgaggatgctatttcggtgggcgaattccttcttgtcgattgggtccaggaagaagacacaacagagacacaatcgcaggcccaaataagcttgcatgcactctcgagccatatggccccaaaaaccttacgcgtattgggtcgtgttgccaatcagcaggtgttaacattaattgatggaggtagcatccacaatttcatccaagagctactggccacaaccttgggccttccaacgcagcccactccaccgttgtgggtcttggttggcaacgaacacgaaatctaatgtcaccttctctatatgaaggtccttgtctgtgttcaaaggcaagaattcatggaggatcttcatgttcttcgaatatgcgaccaacatcatgtattgggagtctagtggttgaaatcactaggacct

SEQ ID NO: 112360 - DNA, 446 bp, Glycine max
  Clone ID: PAT_MRT3847_7246C.1
ggagaaagaaaaagtagaaaaaggaagtagtataaaatggaatgtaaaaatgtattttagaattgtaggaacttatatttttattgaatgaaactcatatttagcaagctcagttagtcattacaattctgtttcttttttctgcttgttttattttactctttatttacatattaatttttattttaattttatttttgactttgggatttcaagatgttgtggatttgtaatgagatgttcataatattggtctttagggaacagaaaacaaaatcaaagtggaaaaacatgttaggattattattaatatgtgcatgcatcattattctacatatatagatttgtgattatgcatgtaacttttctaagcaaataaataattattattgagcatacatgtgtttaattgattcttggtggattcatcagatatcaagtccatg

SEQ ID NO: 112361 - DNA, 364 bp, Glycine max
  unsure (1)..(364): unsure at all n locations
  Clone ID: PAT_MRT3847_72470C.1
gcggggcgtcacgtccacgcgtgtcgctaacaccactgatggacagtgttttttgatgacatttctcgattnggtgtgtcctggtagataataattgcgttgggcaggacagaacaagttgttgtgttcgtctgttctagagtgttgagtctgtgatcaggctttgagaaatactgagcataggatatnnggcttgatagtttggccgcatgtcaatgagtagttgcataggaaggatctggggcacgaagttacatgacacgagaatcagtagtgtcaagttaagtgctgcttttagatctttaagaagggagaaaggttttggttagtgctttctttttggggaccttcgagaaagtgtttc

SEQ ID NO: 112362 - DNA, 259 bp, Glycine max
  Clone ID: PAT_MRT3847_72471C.1
cactgggacactaccagaagcactcggggtcgctgccgagaagccagtcgacatcatctgaactgacaccaattcccaaacacatcagctactaacactcaatcacatgtctgcagccgcatctcctaattcagagcccacccacttgtaatctactaagactgaagcaatccaaggatactatcttgaccctacccattgtatccactgtgccatagctcaatatcttactatgacgatgtttgaagcgaatatgcac

SEQ ID NO: 112363 - DNA, 454 bp, Glycine max
  Clone ID: PAT_MRT3847_72472C.1
acgaggtttcaaagaacaaaaggagaactccagcttggtgcgatagaatcttgtggcatggagggggaatacagcaactttcgtacgtccgcagagaatttaagttctctgaccatcgaccggtttgtgcaacatttaatgtagaagttgaggttatgttcaggggacagaagaagaaagtttcaacttgcaactttcagaacattcatgatcttgtatccacaagaagtccatattattcttgaaaattcgtgaagaaatttttgaaggttttggaaagcatcaagaagcatatgcatccagaatcgaagaagctatgaaaatgcaatagaaatgttattagaattaacttcttttcttttttattaaaaaaagggggaaacaacaagttcctatattagctactaaagaacaatctgtcagtgctttatttttgggactatatataggaact

SEQ ID NO: 112364 - DNA, 744 bp, Glycine max
  unsure (1)..(744): unsure at all n locations
  Clone ID: PAT_MRT3847_72473C.1
tcttgcaaaccttacaccattctctgatagcaatcaaagtcctcgtaatatgtaccaatgtcagatggcaaaacaaacaatgggtacaccatcaacatctttaagacatcgaacagataacaaattatatcgattacaaacaggccaatcaccaatcgttcgatctaaactttacgatacccttggttttgatgggttcgttagtggcacaaatgcaatcgtggctgtaatttcatatacaggatatgatatggaggatgctatgattataaataaatcagcacatgaacgagggtttgcatacggtactatttacaaatcagaagtaattgatcttaatgatgaacgtgtgcgtggagaacctattaaacaccattttagtcttggagaggatgcatctccagcattacgtgaaaaacttagtagtgatggtttacctctaattggagttaaactgacagatggagatccattgtgtgcttattatgatgatacaactaaagtcacgaaaattaaaaaatataaaggaacagaagatgcatatgtntgaggaagttcgattaattggagatgatgctggtaagaaagaagttcaaaaggttcatattaaattaagggttccaagaccttcggttattggtgaatagtttgcttctagacatggacaaaaaggtgttctttcacaattataccctcaagtagacatgccttttactgaaagtggaatgcaaccagatattatta

SEQ ID NO: 112365 - DNA, 496 bp, Glycine max
  Clone ID: PAT_MRT3847_72474C.1
ttatcggctcgagagaagacgacagaagggctcccactcttcctatttgattttactctatttcagttgagagaaaaagtgtcaaaaataaattctatgatgtcatgaagtcctgtttgcttaatctgtatataattatatatgatgttctccttcacgagataactttgtaaaggttctttaacctttcttctgttatgaaagcaattgaatctcctgaaatttatgttaattgcaactcatttttagggatgatgatcatctaaagtcaaaacatgtgtgaaaggttcttgcaattaaaacttgaaacagaatgggaaaatgcttgatcttctaaatgatcctagactctcaattttttgacacttcaattgtaagaaattgcaggtggttttttgatattgtttaaagcttgctgtctggtcttaatatcaggaaataatatactatcacattaaactattatagtttaatggcttcaaagttaagtgtagtt

SEQ ID NO: 112366 - DNA, 380 bp, Glycine max
  Clone ID: PAT_MRT3847_72475C.1
acgcgaaaaggcggaagttcagacaattgacatgatgcgggtgtgaggcaatgttctgtgctcatgtgcacactgttactggtcagtggtatgtcacaacgttaaattttgatcacaaacatgagatgctggatgcaaagcgtccgttattgctacctgcccgtaggaagatgacaacaactgatataattaaaattcagaattttcaaaaagtaaggattcgcccttcacatatgtatggtgcgtttgcaaacactaatggatattaaaaatgtccgagtttttagaaaagagattcataatcaagttggaagacacaaatgaaaacgcaagcctgttttgcaaggggctttcaagtcccaaaagggtttgggcaaaaa

SEQ ID NO: 112367 - DNA, 201 bp, Glycine max
  Clone ID: PAT_MRT3847_72476C.1
aagacccgaatcaacaattatttttaatcacagtgtcctgagcacaatggttacacacattaaaaaaaagcactacgcctcgcaccctatggagttataccattttttttttaaaactctgctttgatctacctgaagctagtgggctaaattaatcattgtacgagcatggccatccgaatcagggctgtccaacttatt

SEQ ID NO: 112368 - DNA, 310 bp, Glycine max
  Clone ID: PAT_MRT3847_72477C.1
ggaaaagtttgttttgttaaccaaaataactaaaaccattgtgataaaaattaaggtccttgtttccaccgttgcggcaattttggaacaagggcaatcccatgattacaaaatgtccctcccccaaataactatgggcaatggtgcccgtaatcccgaggtgaaatgtgcaaattggaggcttgccgtgaaagcaaacaacatctttggctttaaaaccattcctgaaaattgcgttaaggcaacaaaggaatacatccaaggagaccattatcgatcagattccaaaacatttaaccaacaagcttac

SEQ ID NO: 112369 - DNA, 189 bp, Glycine max
  unsure (1)..(189): unsure at all n locations
  Clone ID: PAT_MRT3847_72478C.1
acaggggagacagngaaccgaaaagcttaccgtgaggacgatgcgcaactcgcacaaacaagacgggatcgcgtgcaacaagcagacaactacaagcaactcaaaaagggcgcgcatgaagcgagcaatacacggaacagaggcagacaagagagcgacgagacggccaaggacactgagcctagcgag

SEQ ID NO: 112370 - DNA, 260 bp, Glycine max
  Clone ID: PAT_MRT3847_72479C.1
tcaatagcaagttcagacactgtcagattgtcatgcaaagtgtacgagttcacacgtgatgcatcaataacggaataaacgggagattggtcgacttagcttgtgtatctatatcccgttgaaattggaaagcttgagttcaatgctccagaagcaaccaatcaatgcttgctattgggaaaacgtgtgtataggacttttcccatacacttagtcgctgtactgattagtactaatttgagtgcgaagcagactctaga

SEQ ID NO: 112371 - DNA, 500 bp, Glycine max
  Clone ID: PAT_MRT3847_7247C.1
gtcgaggatccgacccggatccatggggtgcgtgagctcgaagcaagcggtgtcggtgacgccggcgattgaccactccggcgcgttccggagcaatgcgggtggtctgggcgagccggagaagaagaggagcaagaagaggaccgagtctggtggagcgagtctgagcgaggtaggtgagtcggggagaacgagttccaattgcgactcgctcagcttcaggctggggaacctccacaagtacgtgcagggcgaacacgtcgcagccggctggcccgcctggctcagcgccgtcgccggcgaagccattcacggctgggtccccctccgcgcagacgccttcgaaaaactcgagaagatagggcaggggacgtacagcagtgtgtttagggcgagggagcttgagacggggaagatagtggcattgaagaaggtgcggttcgacaatttcgaaccggagagtgtgcggttcatggcgcgtgagatactgatcctgcgac

SEQ ID NO: 112372 - DNA, 362 bp, Glycine max
  Clone ID: PAT_MRT3847_72480C.1
aattcggctcgagcgacgcaggcacgcagctcagttagcaacagcgttttgttttttttatcacttcattcccaaccctagcgaacgggcaatcgctcccagggggcacggtggcgcccgacgcagtctctgtccgtaccagcgttagtgccagctccactgtcgcgtatggctcggaaagctccgcatttggccattcgcgctcttacacatggatgattcattagacatcactccttgagaaggtgagtcaaatcctcaagtcaacaaaaaaaaggggtagaggtcccacacggttaaagaaggtaagactcaaacgtgttagagatcagaagatatcaattgagcttgatcaatcgact

SEQ ID NO: 112373 - DNA, 1337 bp, Glycine max
  Clone ID: PAT_MRT3847_72481C.1
gtcgcttaagcaaaagctcacgcgtccgcggacgcgtgggcagaagtattaaaatcagaaattaaacgaattgaattaatgcttgctgttgtcactgaggaaaggaataaattaagaaatgtggccaatttgaagaatgatgaagctctggatgcatcgaaaaatgcaaatcctgttcaggagcctgaatcatctcttatgaagaaagatgattgcattaaagatttagaaagtaccttgcatgagcaaagaatggttaataatcgtcaattagatgaaatgaagttacttaatgaaaagttgctgggtgaggcaggaagagtgaagtcagtggagagggagagtgaccggctccggtcagagatttcattattagaggcaaagttgggtcatggtgatttttccgctgctaatacaaaagttctgcggatggtgaatacacttactgttgataatgaggccaaacaaaccatagaggcactgcaaactaagcttcaaaaaactaaagagaaattaaaagcttttgaagaattgaagagtcaatcaggcgaagctggaaagctggtagatagctacatatcggataagatgttgcaattaaaagagcaaatcgcaacacttgagaagcgagaagaaagatacaagactgtgtttgcagacagaatttcagtcttccggagggcatgctgtgagctttttggttacaagattgtgatggatgaacaccagcgttctaatggaatcccggtgacacgatttaccttgcaatccatttatgcacaaagtgatgacgaaaagcttgaatttgaatatgaatcagggaatactaacattttggcaaatcattatacatctcagcctgaggtttctcgtcaggttgagatattcattcggaaaatgaattcaattcctgctttcactgccaacataacagtggagtctttcaatagaagaaccttgtcttaaattcaacaatcaacttgtgtctaagtactggtattttttgcggcaactatcagttatgatgtatatatcttgcatcttcaagttcgggaatttggtcagctagtaaggatgttacgactggacacattttgtatcctgacattggtaatggatggcttggatttgaaaaatgacacatttatttttttaaataattgaatagtgaggtggaattttgggcgtgtagacttgttgaggtttattttttttgtaagattacatttttcttgtcatctggtttttcaatttaggtgcctgttacgttttatttcatgacaatttccgtagttgccatgatgcagggaataggagcttgtactctttattctaaa

SEQ ID NO: 112374 - DNA, 1750 bp, Glycine max
  Clone ID: PAT_MRT3847_72482C.1
gtgcttctttacttattctatagagagtgctttgtgttgttagtgagttcagtttccatggatcgtacgcttgttatgtcttcacctaatgtctgttcaaacactaatggtggaaatctcatgcgcaggaaacattccaccatggccaacaatatatactatccaacttcttgcgtatcaaaagcttcacaatgccataggaaaactcaaatagaatgcaatcttttgaggtcacaacagtcaattttgaatcatcattacaaatgcattgaaggaaggcctacatttcaagaatgcaatagaaaatatgttgtaaaagcagcccatgctataccatcttttgattctgaatctcacgcttccagtcccaaaaacattttggaccctgtcaaaaaattcttggttgctttgtactggttttgcaatcctcactcgatgattggccgaacattaagcgcaacatctgggtgtctgcttgcagtggagaaattgtcagatatatctccattatttttcattggtttgttacaggtcttggtacccaacttctttatggatatttatgttaatggtgtgaatcaactgtttgaccttgaaatagacaagataaataaaccatttttaccattagtatctgggaacttatccattacaaatgctgtctttattgtagcatcatctgcaattctgagtttttggctaagcttgattataggttcttggtcattgattgggaacgttgcgctgtgctttgtgctgtggactgcctattcagtaaatgtgcccctgttgagatggaagagatcaccagtactcacagcaatgattatgttttctagttggacacttatatttccaattacatatttccttcgcatgcggtcgtttgtgttcagaacgcccgttggctttccaacatcgtgctttgggtccagggtatgcgttacggctgcgagaagacgacagaaggggtccaaggatatacccgacatcgaaggagatacaaaatttggcatacgttcttttgcaacacgtttaggtaaaaaaaaggtattttggatttgtgtttccctattcgaagtggcttttggagttgtcctcctcgcaggagcatcatcttcttctcccctctggattaaaattattacgggtctaggaagtattattcctgctacaattctctggtaccagaccaaatatgtagatttgtcaagtccagattcgaccagatccttctatatgctgaactggaagttgttgaacgtagcattcttgttcctgcctttaattagataaggatgacactgaagaccaagacaatgttcgtaaagcgtacaacaaaatagtatagatcttttgcacctaaatttattaaaacaataaaaatcattagatttgtgttccatagatataagttcatgtatcattaagatttttctttacttttgtcgaagattttatcatctgtatccataccaacattggccttgattgtcatatatttcataagtggaacaagaaaatataaacaacttgttatactaaaagttttaagcgaaaaatagtattttaagaataaagtaaatgttattcagtatccttataacattagttaagaaataaaaaaaatatatttgtattggaatacgaaaaattatgtcgttcatgcctttatttttgttcttttatgattttcataaaaaaatattttttttctttttatattcttaaccaagttcttaatgactcc

SEQ ID NO: 112375 - DNA, 448 bp, Glycine max
  Clone ID: PAT_MRT3847_72483C.1
gttacttaatgaaaagttgcatggtgaagcaagaagagtgaagtcactggagagggagagtgaccggctccggtcagagatttcattattagaggcaaagtttgactatctacatgctgtttttccttctatagttgggtcatggtgatttttccgctgctaatacaaaagttctgcggatggtgaatacacttactgtcgataatgaggccaaacaaaccatagaggcactgcaaactgagcttcaaaaaacgaaagagaaattaaaagctgttgaagaattgaagagtcaatcaggcgaagctggaaagctggtagatagctacatatcggataagatgttgcaattaaaagagcaaatcgcaacacttgagaagcgagaagaaagatacaagactgtgtttgcagacagaatttcagtcttccggagggcatgctgtgagctttt

SEQ ID NO: 112376 - DNA, 849 bp, Glycine max
  unsure (1)..(849): unsure at all n locations
  Clone ID: PAT_MRT3847_72484C.1
ctcagccactgagggattcagcgttaacctgattcgaaaaaactcttcccatgcccatgtcctccattagacgacgtagagggaggacatgggcatgggaaaaactcttactccacaatccccaatatatgcttacttggtcactatctcatggagctctctattggaactccaccattcaaaatctatggcattgcggacacgggcagtgatctcacatggacctcatgtgtgccatgcaacaactgctacaagcaacgtaaccccatgttcgatcctcaaaagtccaccacgtataggaacatatcatgcgactcaaagctatgccataaacttgacacaggcgtgtgttctcctcagaagcgttgcaattacacctatgcctacgcatctgctgctataacacgaggcgttttggcgcaggaaacaatcacactcagctcaaccaaagggaaaagtgttcctcttaagggcattgtgtttggttgtggacacaacaacacgggtggtttcaatgatcatgagatgggtatcataggcctaggaggagggccagtgtcactcatttctcaaatgggttcttcctttggagggaagaggttttcacaatgcttggtcccattccacactgatgttagtgtttctagcaaaatgagttttggtaaagggagtaaagtgtcagggaaaggnagtggtttctacaccctttggttgctaagcaagacaagaccccctattttgttaccttacttggcattagtgtggaaaatacgtatttgcattttaaccggttcttcacaaaatgttgaaaaggtaacatgttccttgattcagggacacccccaacta

SEQ ID NO: 112377 - DNA, 414 bp, Glycine max
  unsure (1)..(414): unsure at all n locations
  Clone ID: PAT_MRT3847_72485C.1
cttttgtttgtctaacaaccccacaatgctgattccctcctctcacccctcaatagtaacctcttatcgtttattcccttatctttcaattccttctgttgatttctgctcattcatttgtagggaaataaattcaatactgaagaaaaccaagttgaaccaacagacgtgaaaccatgttatggaatcctacaggaataattcagtggcaagaagagaagaggtggcttccctggccttgtgtccccccacaactccgtgaagactcaagaaagcatttgaatcactctcgagaatgtgcaaacccagatctaataataggcatgactatcaacaacattgcttagcaaacatagtgtggtgtanggagacattatgtaaggttgtttgtgcagttccaacaagctatttgaa

SEQ ID NO: 112378 - DNA, 103 bp, Glycine max
  Clone ID: PAT_MRT3847_72486C.1
cagcatacgctccgtgggatcttccagcgggttacacttgcacctacatcagataccggtctagcatagtcgtctacgtgagctgcgtgttgtataggtctct

SEQ ID NO: 112379 - DNA, 268 bp, Glycine max
  unsure (1)..(268): unsure at all n locations
  Clone ID: PAT_MRT3847_72487C.1
agctcttccccctccaagaactggtatcttactttgccagtattggcaactacaatttaacatccttgtaatccctacagactcaattagccatggcccctcaagcagttaccttcaagtccttagccgaagctctgatggaggcgctattcttgtacccctccactgtggacttagttccaggccagtnacccagaccgtctccggaagggggaccagatgccgaaacaaacgcatccgtggggagctcggccgccatgatagaagc

SEQ ID NO: 112380 - DNA, 349 bp, Glycine max
  Clone ID: PAT_MRT3847_72488C.1
ggcatgtcaacgtaattgtcatgagaaacaatttcccactagttagaccatataaaaccccagtcagttcacccacacagggtggtatggagacagcactgacacttgttccagactctcctcactagatttatcgatgtgctccacttctacaaattcatcttccgtaaagtcacttagatgattctaagcaactgaatacttcatatgactctgccatcactgcaggccatttcactgtagtagctggatgctgttggcctctactacttttgagagatttcatgtgcaaacatctacgatgaactgatgtcaggactggtcctgtcacccatggtctcactcctac

SEQ ID NO: 112381 - DNA, 678 bp, Glycine max
  unsure (1)..(678): unsure at all n locations
  Clone ID: PAT_MRT3847_72489C.1
cacgcgtccgatcaggtgtattgagtgtaacagtttgagtttcaattatattatctacaataggtgaagatagcttatatttaacagaaaaattaatgaagttaaatataagacttaaaaggaaatttttaaataaaagtaattcggaaactaaatacaataaaattattttgagaagactaaaattaatataaattaatctttaaaagattaaaattatatttaatcattttatttataatgttgtaaaaggtggatatttattgatgtttatttcctcgatatttttaagttggttaatatatacaactaagaaaaactttaacgtgatcaatctattccatgagtacactctaactataattggacatgccttgttgactagacaattttagttgtacacactataattatatatgcccggtcgtctaggcaattttagctgtatattatgtgcaaattctaactacttttaacgcatgacaatttaagtggaaagaactgtcataattccttcatgttttattacatctttctttttgtacacctttcacatgttgcagtttttcaattaatgaacaaatattatttaatatttttaattatatataaaagtagaggattaagaaaggttgttgacatctacatccttaattaatgtatcgntttgtgaattaa

SEQ ID NO: 112382 - DNA, 383 bp, Glycine max
  unsure (1)..(383): unsure at all n locations
  Clone ID: PAT_MRT3847_7248C.1
tgctagttgtagccaagatgcaaagccatgttcttctcttatccggattcgtgacactgtggataaagaaagtagtggtgatagagtgctaaacagtactgaaagacaaaatgagggtcatcgagttcttatggattttgtgtggaactacttttctcataaagacacagttcaatttggccagaggcgtgttcttattagtgacaaaacgcccttgtactttcaacatgatgggcattcaagaacaatagttggaattcaagtcaaatatcaacagtctggaattccacaatacagtctcctggttatggatcctggtcatagaacggctgctctagaaagatacttanggagaaagttggatggcagaaattcataaaaag

SEQ ID NO: 112383 - DNA, 215 bp, Glycine max
  Clone ID: PAT_MRT3847_72490C.1
cgagcaacatgggcataatttctcggatttcacctatgcagtggatctgctgcattatgttcaaaccgatgagttgctataaaatactacacatcaaaacatgcctcaccaacctgcttattttgtacctgaatcaatgcccgttgggactcctcttagaaagtgcacaatccgataggatcacatcacatgatgtcctaacgactttcgatcaa

SEQ ID NO: 112384 - DNA, 1537 bp, Glycine max
  Clone ID: PAT_MRT3847_72491C.1
ggaaattgttgggctccatgttgagctgaggcaaacattaatgtcagtaagtgcaaactgccacttgatagagcgtttgttttttgagtcttctaaaacaggtagagatgacagcttgaaagcgcaaacctgttttgagctagtaaacaattgtcctcatctaacttctttatcccttagagggtttaagctacacgattgcaaagttcgtgtactggttaagggatttaggaaactgaaatatgttgacttttcaacatcctattcaatcactggtaacttcttaagaaaccttggaagctgcaatggtgggaatttacttgaggtcttaattttaagggattgcatgcatctcaaagagatggaagttgctaggctgttgactgcaattcttgcaggagatttcaaattgcttgtacatcttgacatatccaatagggaaggcttagcatctgaggctgactggtatcacaggtgctataactctagtattatgcctacgaaacaggttttggaagcaaggcctgatatgtgtctggtggctgaatatccgtcagccgaaggaagttacattgagacatttgatgctgatatgaatagtgagataagtcttccatcacaattgagcagccacacgtcagatggatcaatttttatgagtacatctgaaagcagctacaatagtgatcagggaagtggcaatgaggatggtcaagatgccaactatgtgatatatgaggaaagctcagatgagattgactttttgtccctctagggaatcctcgttgtaaggcatcaatcgaaaaggacaacaatctagtgaacttggggagcggtaggggaagagcgatgccacaggatggatgtcaatatggatcctggatttttcaactttcattttgtccttctctctaattgaagttcttcattgtggaattttcaatctgggaggacaattggagatcaggtgcaattttaaagttgccctctgtttccatatttacagaaacgtaaatatattgctgctccatcccactttatttttcctcggcattaatctatgcagtgctgggatttgtttttggttctaatgtagaagaggtcttcaattatgtattttgtaccccttttagctaattcgcaaataaaattaagtaaacattctttgtttactttttattagtaataataggagatggccaggtcatggatcatttcaggatgaatgaacataccccgttgatcaaacacattcctgttcgtgagaggtgacatccttgaaaaaatgtaactcgcacttattatcatttcgtgtaggtatactacacagattatggaattgatgtaatattcttcctactcgctcctaaattaaacaaaattacaaatgaaactgttctatgatctgatgaccttccaatccttcgcattgcaaaatcggacggttccaatattttaggttggcaggagataattggaacagtttcaggttttaataaaactaggtggatttttttattaaaaaaaaaaaaaaaaa

SEQ ID NO: 112385 - DNA, 362 bp, Glycine max
  Clone ID: PAT_MRT3847_72492C.1
tttttgcttgcatgtattttaccttatttacttgattaagtaccattcacacgttattgcaaggaggattatgaatacataacaagctacctgcgatgacaagacactactattggatatcaagactatactacgtaagagacgaccataaacgcaacgccgatcctttggagtggcccacagactagactatgtgcccttggtaccgtgcggccatatctctcttccatgctaactttgtcattatctcctttcattatttgaccttgatggcccaggacttgcgctgtcaatgcattgtataagagatgcaataagtgtagcacttctgacattgccagaatgacactagggctcatttt

SEQ ID NO: 112386 - DNA, 437 bp, Glycine max
  Clone ID: PAT_MRT3847_72493C.1
gttgaagttaaaaaccacttattatgtttactgggctggacaaaaaccacaaaaattaaggatatgcctatggacaagagaactgaaaatttaaaaaaaagaaaaaagacatggaagccgtaaactaaaaaaaaaaaaattattttcaaatagccatgaaagaaaattttcttttaaaatgaaagaaaaactaaaagaaaagtaaaaaagaaaacttgagctgaaattcaattttaccaacattggaaactagctttgaagtaaaaaccaaccaacgaccaggaaaattttgggggcccttaacaaccatagtcgtggacccatttccgggccccataaattccttttaaaatgcatgaataactactagaagtctatcatggaaaacgggggctggactccaattttaccaccattggaaactagctttggaatag

SEQ ID NO: 112387 - DNA, 183 bp, Glycine max
  Clone ID: PAT_MRT3847_72494C.1
gtgaatgaagaacgaacgctggaagtagaaatagagcctggggtgagagacggcatggagtacccctttattggagaaggtgagcctcacgtggatggggagcctggagatttacggttccgaatcaaagttgtcaagcacccaatatttgaaaggagaggagatgatttgtacacaaatgtg

SEQ ID NO: 112388 - DNA, 548 bp, Glycine max
  Clone ID: PAT_MRT3847_72495C.1
ggcaaatacaataaagggagtatattaaggttgtgtacttttagtttaccattacacattaaattagattttattttattgttaaattcttttgtgagccaattgtatttgtgtgtaaaaggtataagctagaagtgatggtgtatcgcaaggaacaaagttccaattttgtactctaggaccatgagtgcatagaacttatagggaaatctgcacaagatttaaacaacatgatgtttgttgtatgtgtttatatgtttcacttactcctatcttttttttatttatattattatgactgtttccctaatatgttaactgttttgtttatgtctatctaagggtggtgataaaagcgttaatgtgttcctagatccacttgacaatcttttgggttgtactcttgcatttaaaatcaaggtccagtccaaatacaaagttcatctgtggaaaaaatatctgatgatcctaaactaatgcaagcaattatggatttattgtcagatgtggaggattcagttgaagctcaagtttgtttttcttttgaa

SEQ ID NO: 112389 - DNA, 489 bp, Glycine max
  Clone ID: PAT_MRT3847_72496C.1
tgctgataaggccattacacaaaattaaagtgagattccaaatctagatcaaaaaaggacaaaatataacaacagaagattatatttcgcctaataattatactaattaaaagcacactttgtagaagcaatttttttttatttcttttcatgagatttacaaatatggggtcgtcctccacttttagaccttgaccatgaaaagatttggcaatttatgcagggattaaaccttgttctgaggcttgcttggttgcaaactgtccttcattcaagttttgaaaacgttgattatcgagtaacatccttatttttagcatctcttgaagttattagacgagggctatggaatttcttcagattggagaatgagcatctaaataatgctggcaagtttagagcagtgaagatagtaccacttccttttcatgaagtggatgaagaagactaataataaggtcatttgggtgatttattcgagggtagggg

SEQ ID NO: 112390 - DNA, 642 bp, Glycine max
  unsure (1)..(642): unsure at all n locations
  Clone ID: PAT_MRT3847_72497C.1
ccccaagaaacatttattttcctnnnntttttccctttgggaaaccaaatttaaaaatttattctttaatcaaggaaggaaccaaaccttggttgttcccttttttattggaaaacatccaacaattttgcccaacctttggttttttcaaaaaccggccattgactttggagtaaatgaaacaggggccctcaagggaaggcctttgaaggcttttttttccaaaacccttgagggtttaaaaaagttaccaattaattgggcccatttttttaggcggggtaaaatatgatgggccccaaccaaagctgcccaaaaaacaaggccaccccggaaatttgggaagnnnnttccaaaaacaaatgccagggcaaggcctgaagccccaataacaactccatcttttaaaacnnnngaggcctcattaactacggggaaaannatcatctcnnncaccttttggccagcaacaaaaaaaggctttccattgggcctaaaattgcaaanncttttaaactccccaaggattggaagtattgaaggaccaggttttggcttgcnnnncttttcataaagntaaaaccctttcccatgggttttgccctttcccccaaatttgacccaaaaatcaagccgggggga

SEQ ID NO: 112391 - DNA, 653 bp, Glycine max
  Clone ID: PAT_MRT3847_72498C.1
atcctgtgacaccatatatatgctcattctgagatagtcttcttgtgatatattctacttctcgacacatgcatctcgaataagaatatacccatacttatcccaacaagcatgctggccatgctccttctgatatcgttctcataggcggcatgcacccattcaaaggacgctgagggtgccaaaataactagctaacactccgatgcctgatttgatggtggtggtgaccatgattgtatgatcatttgttttcctcctccccctcatcgttatcctccccctcaactttatggccgcacgtgtttactacaaatacgcatgacaatctctctcaatagcaagtaaataaatgctattgtgggctgttgctggctgacacagtacccgatagtgcaaacaatgctgccgataatactattggtcgtctagaagtgttgcagacataccatatgaggtatataagagccacatttgagatacagttcatgctgtttatgcctgaccattgcaaatctatatcatatcgtatcgttcagggtgttaatgccagataatactgaatctatataatatcctcagccctacgtgacataatggatacatagtaagggctgcctttcatagcactatataatgataccactagtatg

SEQ ID NO: 112392 - DNA, 478 bp, Glycine max
  Clone ID: PAT_MRT3847_72499C.1
ctgattccaaaaaaaaaaagaaaatctaactggttatggcaacgctaggatatggtttcgctgaagcatacgtaacgaggaagctctacaaggaaaaaatgaaaaagagagcacaagaagaagagggagagaaaaacaccaacatgaagatttcaacaaccaaaacgggttcgaaggaacaaacatcaagtggatgtttctcatgggtctccaatcaccagcaaaggaaaatttctcggatttcagattacaatgacgacactgaatctgccaattcctgattcatgtgttgggcttttcacaataaaattgcttctctactttttgtgtgcttacattatttggttctttcaattattttccagcaaaaagaagattatattaagatggcacacaagatgtgtccatcaaacaaatttctttcaatatttctttcaatgtatcctacaattatttctactgtgaaattaataaaatg

SEQ ID NO: 112393 - DNA, 528 bp, Glycine max
  Clone ID: PAT_MRT3847_7249C.1
gccggattcccggctcgacccacgcgtccgctgcacgcttatattcacttcctcttcaattcattcaccttccttacttttattttctttctctgctctctctttaatttgtctcaacgttgaagtgaattgcttcaagtccaaaaatggagcagtatgaaattcttgaacagattggaagaggttcctttgcttcagctctacttgtcaggcacaggcacgaaaacaaaaggtatgtccttaagaagatacgtcttgcccgccagactgatagaactcgtagatctgctcaccaggagatggagcttatctctaaagttcgcaatccatttatcgtagagtataaagattcctgggtggaaaagggttgttttgtatgtatcgtcattggctattgtgaaggaggagatatggccgaggcaattaaaaaggccaatggcgtttattttcctgaagagaggctctgtaagtggctggttcaactgctgatggcacttgattacttgcaatgcaatcatattcttcatc

SEQ ID NO: 112394 - DNA, 352 bp, Glycine max
  Clone ID: PAT_MRT3847_724C.1
ttctctaaaacagttcctttattactatcatggaactggggaagcgtcctttatattctgtattttccacaaagcctactcaagtttcctctgtggaaaacctctatgaatctatttgctcagcacctttactcgacacattacgcctcacacaatagcagagcctcaaaaagctaagatttatcattactatgtacctgtctttctctgctgtgaacagcacattactgaacatcattgccatttcatacattgacaatatataccttctttagtgattggttatacagctcctcaaagctgacataagacaacccttgtctttgctcttgactatcatttcgaaaccatt

SEQ ID NO: 112395 - DNA, 285 bp, Glycine max
  Clone ID: PAT_MRT3847_72500C.1
gggaccaatgaggactgttattttattttttatcagcattgacataacattcaagctagtgtgaccccctcaaagggtagctaagctacctgtgctagttactaaggctgataaagggttatctaagtctcctatattagcccgtgagtggattttatttccataaaaggactccctaagccatcaatgggacatgttgatatacccttagaggctttgaaatggatagtctgatttatatccccattggttagttaagtttttaattaatttttaacaaattga

SEQ ID NO: 112396 - DNA, 392 bp, Glycine max
  Clone ID: PAT_MRT3847_72501C.1
ccattatatttttgtgtaaatagaggaaaaactcgatggaaaatatggtggcttaattctatgttgggcaataggaagttagaatacaggcgtgaattaagccaatgaatggattgtcttggtcctattgaaaataccaggctaagggaagaccctcatatttttaccgatgtagataataaaattcacagggatttggattatctagaaatgtggaggttcttttctagcgatctgaatcccggttttaagaattatgatgatctttacatgtatgaaactcaattttagttttacaataatactacctgtttcaatgctcatggcattgatagttccaatctatggggttttgacgaatacaaggggatttttctctttacgttcctttc

SEQ ID NO: 112397 - DNA, 409 bp, Glycine max
  Clone ID: PAT_MRT3847_72502C.1
ttcggctgcaagctctagtgctgggacctgtctcacacagggaaactacgatctgcgtaggattgcaaccaacatgatctactcacacaagagcactccaacacccatgcatgtgatattcggcgtcattcgcgccatcccttggcacatctccctcatctacggctgccttcctctccaaacccaagctgctctcacatgttctgccacgccgccgctccgtcaccgccatgccatcgcatgcgaactctttcgcgcagctggcggcgacatctccatatggcacggcagcatgcctctactgattgacgatgacagaatccgacaccgcattgtggcgtttcatgacctgaagggagagggatcgtggaatgtcgcttgtgacgcgctacaggtaccgtggctccat

SEQ ID NO: 112398 - DNA, 584 bp, Glycine max
  Clone ID: PAT_MRT3847_72503C.1
tttgccgtgctagcatgtgaggagtgcctcctgcttggggggggggggggggggggggggaatgctttaaggaaagccaggcaaacaggaaaggaaacggggccataagaggtcaggctgaccaagcgaaggaatagttcatggcaaccgagccgtgtgaagcgaaaaataagaaagataatgagaataactgattggggtgttataactggctaacgggaaaaggagggaacagttggcacatgacaatgaaaaatgtgaaagagggtattagcgtacagagggattgatgggagcatacagaaagtgctacctataagaaagacttataaagcagacaaagggagaaggtaccgaggtaagctgtacaaacctgggctgcaggcaatacggttattagtggtaacgttacgggtgaaaggttggagagtagttaatggcgggttacagttgactgtactgctgagccaccagcttgcaggtgttcggggcggagctgctaaaattgctaaaactgtaggtatgtgcttacgggtacgatacgtggctacggggccactacatcgtcactgggttgcaccagc

SEQ ID NO: 112399 - DNA, 238 bp, Glycine max
  Clone ID: PAT_MRT3847_72504C.1
tgcttcttgaggatcaagatgcagttcacgcgcaccgcatcgcactgtttcgggtcgtggctgtctccgtcctggccgggctcttcatgctcaggcccttcgtgtggagcccttcgccggtcatcgctttagccaccgtcttcggccgctcgcgtgtcgccgccgggggggcgaccgctgcctcgccatctgcctcgtgtgtcccggctccggcgggtgctgctggcggctgtctgtg

SEQ ID NO: 112400 - DNA, 619 bp, Glycine max
  Clone ID: PAT_MRT3847_72505C.1
ggaaattaattaaccacaccacacatctcataaatcataaaacctttttttttccctacctaatctaatctaatattatacacaacgtactatagttagcacattacatatatatgctcttgagcacacataattctggtcttgatctcatctggatcaatctcatttttctcaattgaaattggaactatagaaagtgctctgtggtacaatggggggttgatgccaataaggtgcactgcaagtgtctatggcaagtgattaagtggtcattggtgagtccagctgcttgcataaatgaatgaagcaccgttggacctacacacctaaagccccttctgatcatgtctttgcttatgctctctgactttgatgtcttcactggtatcttgtggccgaacttgtattgcgtggagatgggtttgtgattgacaaaatcccaaatgtatttgtcaaatgaaccaaagtccttgttaatcgctaaaattcggttagcattgtcaacaacacctcgaactctgcttatatcacccttctgtctcttctcgcagccgaccattcgcgtagctcgcacccgggaattcgttgctgcatcaaattctgaaaatgcagtcctgaa

SEQ ID NO: 112401 - DNA, 2920 bp, Glycine max
  Clone ID: PAT_MRT3847_72506C.1
gttttaatccctctgttgctgtaagctgcttcattccaaattgaaacatttgtttcccgtgtatttggggggttcatgaaattactctaatccagcttggggttggccttgattttaaaatctacgatcaatgtaacatggaattttagtgaagtaagaaatccaaattggaagcaggttgaatagaaaaaaggaaaagaaatttcccttaaaaggcagaaagaattattgaagacaaacacaaaagaaacaaggaaagaatttgggaccacaaaggtttcagaatgaaagtttggaagggggagacattaaccctaagtttaactgagtttgtatgcacaacaataggcgacacagtgtaaatatatgatcccaagagtatatgtggaacagaaatgcacttgagcactctgcactaatactattgttttttgcttgtgatgtgcaacgagtatttcttttattttttctcctcagttgcggcccgtggatgtatccatgtatgttctgcacattatggtgaagtaattaacattgttcactgggcgagatccttaacttgtaaaggatatgcaatgagcatcattgacccttctcttgctggaaatgccaaaaccgagtccatttggagggtggtagaaattgccatgcagtgtgtagcacaacatggtgcctccaggccaaggatgcaagaaatcattttggctatacaagatgcaaccaagattgaaaaaggaacagaaaataagctaaaatcatcatcattttcaggtagtagtagttcaaagccacaacattcttcccggaaaactctactcacaagctttcttgaaattgagagccctgacgtgtcaaatggttgccttccatcggcaagataattaaattggacataccttacaacattccatgggttgattttgtttgtatttttacttctttttaaccattattattctaccatgtttacaccagtaacaatgtgacactaactagttacaacattccatattttggaaccaatagtaatcctcttccatattctggaaataagtaaatatgtacagattgcttcaaaaacagacaagcaagacacaactgttgtaaatgcttttcgattattgtctgctcaaagttcccagacaaacgaaggcgatccttgtgttccaactccctgggaatgggtgaattgtagtaccaccacacctccaagaattactaaaataattctttcgagaaggaatgtgaagggtgaaatcccatctgagcttagcaatatggaagcattgacagagttgtggttagatggcaacttgcttactggacagttacctgacatgagcaaacttataaatctaaagattgtgcatttagagaacaacaagttgacaggtcgactaccatctgacatgggtagtttgccaagcttacaggcattgttcatacagaacaactcatttagcggggaaataccagccggattaatatctaaaaaaatcatttttaactatgatggtaatgctgaactacacagaggaaagaagaagcattttaagatggttttgggaatttcaattggagtactagtgattctattaatattattcttagtaagtttggtactattgcttaatacacggagaaaggcgtctaaaaagaaacgtgaggaaaaaggaatttctggacgcactaacagtaaacctggatactcgtttcttcggggtggaaatttaatggatgaaaatactacttgctatattacactctcggagttgaaagaagctactgacaatttttcaaagaaaattggcaaaggaagctttggatctgtctattatgggaaaatgagagatggaaaagaaatagcagttaaaagtatgaatgaatcatcttgtcacgggaaccagcaatttgttaacgaggtggccctcctatccagaattcatcacagaaatttggttcccttgattggatattgtgaagaagaatgtcagcatattctggtttacgagtatatgcacaatggcactttacgggatcacattcatgagagtttcaagaagcagaagttagactggttagctcgtcttcgtattgcagaagatgcagccaaaggtcttgaatacctacacacaggatgcaatcctagtatcattcaccgtgacataaagacaggaaatattctcctagacatcaatatgagagcaaaagtatcagactttggactctccagattagctgaagaagatttaacccatatatctagcattgcacgaggaactgtaggctacttggatcctgagtactatgcaagtcagcaattgacagaaaagagtgatgtatacagttttggagttgttctgctagaactgattgctggaaaaaagcctgtgtcatctgaagattacagtgacgaaatgaacattgttcactgggcaagatccttaactcataaaggagatgcaatgagcatcattgacccttctctagaaggaaatgccaaaactgagtccatttggagggtggttgaaattgccatgcaatgtgttgaacaacatggtgcctccaggccaaggatgcaagaaatcattttggctatacaagatgctatcaagattgaaaaaggaacagagaataagctaaagtcttcatcatcattttcaggtagtagtagttcaaagccacattcttcccggaaaactttactcacaagctttcttgaaattgagagccctgacgtatcaaatggttgccttccatcagcaagataattaaattggacatgccttacattccatgtgttgattttgtttctatatttacttctttttaaccattattattctaccaatatgtacttttcaccagtaacagtttgacactgactagtgacaacattccaaatttggaaccaattgtt

SEQ ID NO: 112402 - DNA, 212 bp, Glycine max
  Clone ID: PAT_MRT3847_72507C.1
agtccatccagtggagctgctaatacggctgcagttactggagtagcttatgaagcattaggccttgaatctgctgcgacaacttcaggcgattttttcgcggatctgatttcttcacagcgggatgacattcgcaaggtccgtgacatttcagggtcattccgttgggtcacatttctcgctctggacagatcacatttcatatctgacgc

SEQ ID NO: 112403 - DNA, 719 bp, Glycine max
  unsure (1)..(719): unsure at all n locations
  Clone ID: PAT_MRT3847_72508C.1
attgttttaaaaacagacaagcaagacacaactgttgtaaatgcttttcgattattgtctgctcaaagttcccagacaaacgaaggcgatccttgtgttccaactccctgggaatgggtgaattgtagtaccaccacacctccaagaattactaaaataattctttcgagaaggaatgtgaagggtgaaatcccatctgagcttagcaatatggaagcattgacagagttgtaagtacattgatcttcataatagaactacttacagatttttaatgagatttctcttgtaattcgttctgagttacttaggtggttagatggcaacttgcttactggacagttacctgacatgagcaaacttataaatctaaagattgtgtaagttcttgagtttgacgcatgcccctccttggagggttggagcgcaatcaaaacttcagctcatatttcaaatttattagtttttaactccaaaaattcttctttctatgttttccttttttgtattttcatttcttaattgatgacatgcaggcatttagagaacaacaagttgacaggtcgactaccatctgacatgggtagtttgccaagcttacaggcattgttcatacagaacaactcatttagcggngaaataccagccggattaatatctaaaaaaatcattnttaaactatgatggtatgctgaactacacagaggaaagaagaagca

SEQ ID NO: 112404 - DNA, 293 bp, Glycine max
  Clone ID: PAT_MRT3847_72509C.1
ggggccccttagggggggtttattgggcgcctggggctatcctggccctagccggttcctggggggaattggtttccggtcccctttccccccccccttccggccgggggccttaggggggcagcccggggggccctttgggggggctcccccccattgattggggggggcttcctggcccctttcccggcgggaaacctggggggcccgctgcctttttggctcggcccccccccggggggaggggggttgagttttgggggcctttccccttcccggctccctggctccct

SEQ ID NO: 112405 - DNA, 146 bp, Glycine max
  unsure (1)..(146): unsure at all n locations
  Clone ID: PAT_MRT3847_7250C.1
acagaggcancnggaatcnggcgccggataanagccgctcanggnggcgncagaaccatgcganantcgattttcacgatggantggctccaaanactgcctnnatcctctcacatctacgncctccgcactctcctttctcnana

SEQ ID NO: 112406 - DNA, 395 bp, Glycine max
  Clone ID: PAT_MRT3847_72510C.1
gactgcaaacattatgggctcccattgcgacttttaggccgccgatctctgagggatggcctcttctcatctgtcatatatgtcacatcaaggaagatgatccacacggtaaggatgctgcaccaactgaattggactagtagggtggacaggcattgtttgatttggaaaataccattcaagagcttaaaggtgatctgaaagatttatagcattgaagctagccgtgcatgttgatagcttctggaaaccgcaagggtggtgttattcatgttccttacagattaaggagaggtttccgtaggattcatgttctgcttgacacggagctatagaataagtttagcggcaaggatgtaagcttgggctccacccgcagacttttgacgccgcct

SEQ ID NO: 112407 - DNA, 706 bp, Glycine max
  Clone ID: PAT_MRT3847_72511C.1
cgtccccggattcccgggtcgacccacgcgtccgaggggttaggcctgttcctgggagacacccttgtgttggaacccctgaggatattgttgcaactcattcccttgctttccttgatcattgtagtgacaagaatggggtttcttctggtgccggtgacacggatagatcgaagtctccgaggaaggtgtttggtggtggggttggggagaaggagaagaaggagagagtgagatcaaatgttggtggtgggagtggtaaagaggatgtgcaatccagcaaagcaagtgctgttttcggtaggagcaaatctcagcctcagcaacctcagcctatcaagcctgcactcaagattcaggtgaagaaggaatcattgactagattgaagtctaccaattcgcggtccattccttcgtcaccgagtagttgctactcgttgcctagttcttttgagaaatttgccaatggggtcaggcagcatcaggcaaaggttggggctaaggtgggagtggcggagacggaaaagtctgttcgaggggctagtagttcggttgggaagaaaattgtggtgggaaatccgattagaaatttggtgcagggaattgagctggggactaaggctttaaggaagagctgggaagggagtatggaggtcaagactaaagagtcttccaaaaccagggttgcattccaagtttgatccta

SEQ ID NO: 112408 - DNA, 991 bp, Glycine max
  Clone ID: PAT_MRT3847_72512C.1
tttaaaaaaacccaaatagccattcaatttcgaggctttacgcgccgtttcgaaagcgatgacgctatccaccgcgccctcaccgccaccggcattagaagaggagccgttacctcacgacggcgacgattacgacggcatcgtttcactggacgacgagggtttcccgtcgcaattccccgaatcaggaacggcgtcggaaaagagcagtttcgccgcggatttctatcgcagcggaaccgattggtcctcgctgttgttgtcgctggaagatagtaaacagagcgatttagcgcaagattcggggaagaagatgaagcaggccaatctgttccagatttgggggtttaaaagaaacgacgccattggttcagttgaatctggtcccagtaaaagtggttgttgtgacgacggaggtggttcttctgagaggaagattgtgaaacctgaaaatcggtgttcgatttttcccgacacagggaaagagttcgagaacgcgaaatcttctcgcaagagaaagggttcctgtggtgaaaatagggttacacgttcctgtcccttttataagaaaatgccagggacaatgttcactgttgatgcttttcgttatgggtgtgttgaagggtgctcagcatattttcttactcatttccattgcgatcactatggtggccttagcaagaaatggtcacatggccctatatattgctctcctctcacaggaaggctcgttcaaatgtgtctctcggtaaatcctttgtatatccaccctctggtatttaataaggaacatgtgattgatggtgtcaaagtgacattgttagatgctaatcactgccctggtgcagctgtgattcacttttacctaccaaatggtcaacgctatttgcacactggagatcttagaacatgtgaactaatgccagctcaccatcttcttgtaatcgacgtgtgatgttctctatgtggatacacctattgcaaccgaaga

SEQ ID NO: 112409 - DNA, 436 bp, Glycine max
  Clone ID: PAT_MRT3847_72513C.1
taaaaacctaaagataaaattttagaataaaaaaatcaagggaggaattacaatcttttcattatagggggtctataaaaaaaactttaaagggccgttcttttaattccgggttaaaaatcttttggccccaaaacaaaaggggttttcagcacgaaatttctttttttacccggggctccagctggggggtggcctttaacctaaaactccggggggaagggcaaatatttggagttctttgctggagcgggatggggattttttgcacctttgctccaatcataacaaaccggttaagcaaatttggagcccttttttttaaatgtcctgcagggggtgggctgactacacctttggatagccttgggtttttgtttactggttttatcccaaaaattaaaagccccctcagatcccgccgttgcaaaagggg

SEQ ID NO: 112410 - DNA, 129 bp, Glycine max
  Clone ID: PAT_MRT3847_72514C.1
ctggatcacgactctgtaatctgcttgcctatatcgtcagatgctatcggaaacatggtctagaaggggatagatgctgcgaggatttacagtcttctagttagttgcgagcttctactagtagcttac

SEQ ID NO: 112411 - DNA, 677 bp, Glycine max
  Clone ID: PAT_MRT3847_72515C.1
ccacgcgtccgcacaaacaactaactcgttgaataatatctcccagataaccctgcactttctcttacattcttctctcttttctttcattctgttaattcccctgtcttctttactctttggattcagcacttgaattgaatttgacacagtagatagacccttctcgtggcgtgaaattggggagtcgtgtgatagccccagatccagttctgttcaggctgaagggtttttgggcagtggtgttcattcatggtgctgtgtgagggaataaggaggtggtgctttgcctaaatttgtggatggacatggaccggaggagttggccatggcgcaggaagtcgtctgagaaaagtcccggtgaaactgagagttctggctcaatgtcatctcattctgaaagattttttgatgatcaggtatatcccacccaaactacgccgcctccagaaggcatgtttgaagctgcaccaaatgatgaagaagctaatgatgtgaagactctaacagaaagattatctgctgctctcttaaactctcgtgccaaagaagacttggcaaagcagcatgctaaagttgcggaagaagctgtctcaggctgggagaaggctgaaaatgaattattgattcttaaacaacacactcatcgatggaaaacagcaaaactcagttcttga

SEQ ID NO: 112412 - DNA, 305 bp, Glycine max
  Clone ID: PAT_MRT3847_72516C.1
atgcaagaacagtgggccgccaccaaatgatatcgcccaggagctggctcccgacctctattctacccagtcccggccagctctcttcagagatgctcgcaactcagccaaattgttccataatgtgaagctattccttaccttgtgcggggttgcagctgtcggtttacaggttggcaggcatgtctattggtcacttggcagactaaaataggtatatgcgctacactgagatttgctactttcgatagggttgtgaggaacccacacgtcaagcctatttgtaaggctgtatctgatcaggg

SEQ ID NO: 112413 - DNA, 889 bp, Glycine max
  Clone ID: PAT_MRT3847_72517C.1
gccgactactgtgtggctattgtgctgttaggtaatctcgcgcccgtggccaagaattcatgcccaatggatctcttgataaatttatttttcccaaagatggaagtatacatttaagatatgatggaatatgtaatatagcaattggagtcgctcgtggcattgcttatctccatcatgggtgcgagatgcagattttgcattttgatatcaagccccacaacattctactagatgaaacattcaccccagtggcccctggctttgctttggcaaaattatagcctatagataatagcattgtctctaagacagcggcaagaggcacaattggatatgaagccctcaccctattggtcaatgactttggaggaatatcctataaggctctcgattatatattggatataattttgatggagatggcaggcaagaggaaaaatctaaatccccatgcagagcgttcaagtcaacttttctttcccttttggatttataatcatattagagacggggaagatatagaaatggaagatgtcacagaggaggaaaagaaaatggtaaagaaaatgatcatagttgcactttggtgtatacaattgaaaccaaatgaccgtccctcaatgaacgaagtagtcgaaatgcttgaaggagacattgaaaacttagaaatacctccaaagccaactttgtatccaagtgaaacgatcacaaaaaattaaaaaatcaagtctataatgagataatatcgaattatttcattgaaaacttggaaatacctccaaagccaactctgtatccaagtgaaactatcacaaaagattaaaaaatcaagtctaatgagacaatatcgagttattccataagttcttattattctatataaaaa

SEQ ID NO: 112414 - DNA, 275 bp, Glycine max
  Clone ID: PAT_MRT3847_72518C.1
aggaattgttgtaactttgtggttgctacattctctcagtttctagattctatcttcgctatggtccgcagattctatgtgcgtgagtgagtatggctagaaaaggtgaaggtcctgctatcggaatcgatgttggaacgacgtactcttgcgttggcgtgttgcaacacgatcgtgttgaaatcatagtcatcgatcatggtaacagaactactccatcctacgttgcttactctgacgcagaacggttgatcagcgatgcggcgaataacagg

SEQ ID NO: 112415 - DNA, 300 bp, Glycine max
  Clone ID: PAT_MRT3847_72519C.1
tccactcgttcagttaattgtcaaggtgaaatcaacccatactgcatgtaatggactggtttgaccaatagatgactgagttatgggcaacaatttttctgtggtgcaactatgctaagtttagatggtttgattaccaaacaagttttgagcaagatggcagaaatgataaataggctttgagggggggatagaaaaatggatgcgtgaaaggacacaccttctgtagcttggtggtcaagaatggacattggtaagaaaaatggttaggagagttgaaagaggaatcccttctggatt

SEQ ID NO: 112416 - DNA, 479 bp, Glycine max
  unsure (1)..(479): unsure at all n locations
  Clone ID: PAT_MRT3847_7251C.1
cggaattcccgggncgacgaaaatcttccttctcaaattgtcatttctggaatatgaatgaaccgtggcaccaaatttgtctacatttttttttttctttttcacttcatttcacaaaattttttgtttgtttgatgatgcaagcactttgagtggactggatttgtgttcgtttgtggggtatttttgattccccaaaaacaaagttttttttttttttttttgctttgtgtgttcatttatcaatttatcaattcagatttgtgttgtgattattatgggttgtgctaattccaaaccaaagggatgccaacattgtcactgcaacaccccttattattcttcttctatggctagaagcttctcggtgcatgtacatcacccacctcaaaccaaaggagacagttaccatgttgcggcactgacatcaaccacactaggttctctggaccaggatgtaccccacaacaacaactacc

SEQ ID NO: 112417 - DNA, 426 bp, Glycine max
  Clone ID: PAT_MRT3847_72520C.1
attggaaaaaaaaaaattttttttttaacggaaagggccaaaagggaaacaaaaccccgggttttttttttccgggggaaaatccccggggttttaaattacttataaaacccattgggcgggaaatttaaacgggaataccccaaaaaggaaaaacccggggttcacacaacttccctaaaaaaaatttttttgaaaaaaaaaaaactttttgggggggttttgaaaaaggaaaaaagtttttctttagggggaaggacttttttaacaaaagggggggggaaaaaccttgggccccttttgggagggcaaaaaaatttcccacttggaaaaaactccaaacccaatcctttttgaatttaggggccccaaaagggtttgaaaacgggagtattttttcccaccccttttttcttttttcaaaaa

SEQ ID NO: 112418 - DNA, 587 bp, Glycine max
  Clone ID: PAT_MRT3847_72521C.1
cggaaaacatccggctgcgggctcgagctcgagccgattcggcgggagatgcaaactgcgagaccaagaaaaatacaaaacttgatcgcaccacgaagcctcaaaactctctccccatcccacatctccatgcatattagatcgatgaaggtgaagtacctaacataaaagagccttggtaacagaaaaaacacatcatgagctcctgaaccaccttcatcgaccaggatcataagtttaaaacatggagatgcagcggatgagggagttgctgttactgtggtcatcatttgaaagcgagggaatgtcccttgtgggtggaaatcacactgccgccaggttttgcactcgctaaaacaatattccacaacccccttttctctctcttttctctctaattatctcttcttttgtattcctctctctttcttcttctacatatatataacaactctctttaaaatttcaacactgtggtcgtcatcatcgtcatcttctttgtgtttctttctcttttgaatgccctacacttgcttttgaagccacaaaccaaccaactatatatctcgggtacctaattgagaaat

SEQ ID NO: 112419 - DNA, 335 bp, Glycine max
  Clone ID: PAT_MRT3847_72522C.1
cggcccaagcggaaaccggacttcactttttttttttatacacagacttaaccaccattcttgtgagattaagagggggggggggaaccaccaatatccctgcatataaaacgtacattaaacctgacaatatttttggagaaagatgagccctttctaccccaaactaccatagataaaccctccaaacctcaacacatatcctagcttaatatattatactgagttgtttgaaacactgtgttaatagtatatagaacagcactaaccttactaacctttttgttttgtttattgtggaacatatgtaattcactagctgcacattctaaata

SEQ ID NO: 112420 - DNA, 282 bp, Glycine max
  Clone ID: PAT_MRT3847_72523C.1
tgctgaaggagaaaagagtgcaaatttgagaagtagaagagggaggtcttgttcaattttaccgcatgctagtgctaagatggcatgtgatcaaacacacagattgatctctactaacttagatgaagtgagtcaaggtgaaagtacacacaatagaggagtagctaatgattctcctcgcatccttaatgttcatgatgtgtatgaagttccacaaactagtgaaaatcatgaagtcagtgaacatgggggaaaaaggtttgagaaatggagttctgatgc

SEQ ID NO: 112421 - DNA, 587 bp, Glycine max
  unsure (1)..(587): unsure at all n locations
  Clone ID: PAT_MRT3847_72524C.1
tcgttttcgcgtgggcttttccagttggaagttcaacgacgtaaacatatgtgtatttgttggtgttgaatgctggcaacatggggagaataaagtgctaaatctcaacctcacaaacatgggtctgaagggtgagtttccacgaggccttaggggttgctcttcgttggtaggcttagacctttcacacaacgagctcacaggacccatcccatctgatatatccacattactcccttatgctacttccattgacctctcaaataacaagtttaatggggaaattccaccaagtttggctaactgcagttacctgaattctcttagacttgataacaacatgttaagcggtcatatcccacaagaacttgngcagcttcaaaggattagaaacatttcttttgccaacaataatttatcagggccgttgcctttgttccgggatggcgtgactagtgctgaagcttatgcaaataatacccaacttttgtggacggccttttgccaccctgctcaagcgatgatttccctcaatcattcagggatgcccttgtgtgggtatgctttttcgctgacttcttaaattt

SEQ ID NO: 112422 - DNA, 1865 bp, Glycine max
  Clone ID: PAT_MRT3847_72525C.1
cggacgcgtgggcggacgcgtgggcggagggttggacaaggacagtcggataagggggaagcgagcaatactctcgaatgtcacagataagcattctgctacacataaccaacactgccttctcgtttgagcattatataaactcagtcggtgctcataacttttcctcacacgactctgctcactcatatttatattgaacaaacagagatcccaaatcaatggatattgaagcaggtaaagatattcctgtaagagacccagcgctactcgatgacgacggcagaatcaaaagaaccgggaacgtgttcactgctaccacgcacatagtaacggtggtggtgggtgcaggagtgctggctctggcatgggccatggctcagcttggatggatagctggcatagccgttatgatcctctttgcatgcatttctgtttacacttacaatcttgtagctgattgctacagatttcctgacccagtcagtggcaagagaaactacacttacatgcaggccgttgatgcctaccttggtggaaaaatgcacgtgttctgcggatccgtcctatatgggaagctcgccggggttacagtgggctacactataactagttctgtgagcttggtggctataaagaaagctatttgctttcacaaaaaaggccatgatgcttattgcaagttttcaaacaatccctatatgattggttttgggatttgccaaattttattgtctcaaatcccaaatttccacaagttaacgtggctttcaaccattgctgctgctacctctttcggttatgcattcattggaagcgggctttctctttcggtggtggtctcaggtaaaggagaagcaaccagtatatttggaagcaaagtaggaccagatttatctgaagcggataaagtttggaaggttttcagtgctttgggaaacattgcacttgcttgctcatttgctactgttatttatgacataatggatacattgaagtcctatccaccagaaaacaaacagatgaaaaaggccaatatgttaggaatcacaacaatgacaatacttttcctgctatgcggtggccttggctatgctgctttcggagatgacacgccggggaacatcctcaccggctttggattttacgagccattctggttggtcgcccttggcaatgttttcattgtagtccacatggttggagcatatcaggtgatggctcaaccactatttcgtgtaattgagatgggtgctaacatggcgtggccgcgttcagatttcattaacaagagctatcccatcaaaatgggctccttaacatgtaacatcaacttgtttaggataatttggaggtcaatgtatgtggcagtggccacagttattgccatggctatgccatttttcaatgagtttcttgccttgcttggagcaatagggttttggcctctcattgtcttcttccctgtacaaatgcacattgcacagaaacgggtaaaaagactatcattgaagtggtgttgtcttcaaatattgagcttcgcgtgcttcctagttacagtttccgcggcagttggttcggttcgtggaattagcaagaatataaaaaaatacaaacttttccagtataaacaatagggcatttggttgcacattccagtgtctcacatttgagaaatgtgaaaatagctatagctaggcagaaaaagaagggagacaagttaattaaaacaaggcagtgaaaattatctgaatgcaaaattatttgtcagctacattattccaacttacagtgtgagcaacactatttcaactagtcaaaatatttctgtctcagttatatcaaattactctcattttatgttc

SEQ ID NO: 112423 - DNA, 788 bp, Glycine max
  unsure (1)..(788): unsure at all n locations
  Clone ID: PAT_MRT3847_72526C.1
cggattccccgtcgacccacgcgtccgcaaaaacctcaaactcaaaactaacgacgacccaccgaacctaagcacacaaacagagagttagagacgaaatcctcatctcaccaatggcgaagctgaagacgagcattgattcatcgttctgggacttcaacgtggcgtcccctcagctgcacgaaggatgggtcaagtccgttccgggcgacccgtttccgttggacggctccgtcgccagcagagtgctccggccacgacagctctccgtcatcggaaacgggttgcctcttcccgtcatcgttccctcgctctctcccacttcgcccaaggacttgggttccttctgtctccagtccctcctcctcaaactagctaatcctcgctggtggcttaccatgactggacagtttcgtcccaggaagctgattgctgatgttaaaaatgagatctctaatgctgaagaatttgatctctccacagtcaaggatgttgcgaagcatttcattaacaagtcactttattctttcgggttaacctcacaattcgcttttcctccttcaacatccttgctgcttgctatagaaggccatggtgaaaaagaaagattgcgcagcaaagtgatggtttttcacaagcttcctgatcatgaccttacgttggaagcagcatggcctcaattatttgttgaccacaaaggaaaatattgngatgtccctgagtctttatctgntgatttgtcatcccttgtgtccgaatctggattgcgataccacattgngatgcat

SEQ ID NO: 112424 - DNA, 1113 bp, Glycine max
  Clone ID: PAT_MRT3847_72527C.1
gttctgatgggaaaaccttctactgtctagagatggcaaaatatttcaaccctggtgaagctgaagccatgaatcagagtgtagcttacctactgtcaaagttgagttacattccatccacactcttcctatcagaagtttcttacgtggaattcttagacagagtgcatgtttctgagaaaaagctaagagcacaaggcttgtgggaagttccccatccttggctgaaccttctgatcccaaggagtgagattcataactttgctgaagaagtatttggcaatattcttaaagacacaaacaatggacccatactcatttaccccgtcaaccaaacacggtggaacagcaaaacatcattgattaccccagaggaagatattttttacctagtagcattcctatccttagctctcccaaattctaccggtgcagacagtttagaacacattctagcccaaaacaaaagagtcatagatttctacactggtgccaaaatgagagtgaagcaataccttcccattacagcacacaggaagaatggcaagtccattttgggtcacgatgggagacattcgtggaaagaaaaagggcctatgaccactagcactgctagccctggccacaaaatctttcaaaggctgtctcctcttcgtgttagttttctagtgtgttgtaaggttgtgaactaatgataaattacgtaagagtgttgcttcctgcacctctctggcatcccattacattacggaatgtccaatctgtaatgtaatttaatcattctgtaatgtaatggggcatgaagcaaaatttgaaggtgcacgaagtttcacttgttaattaatcatgtatgtttctttcttccctctggccttgctctcaataattgtgagcgtggccaatgtattttctattcaaacggagccttgctttttaggtcatggttagaagattgaagattgggtcaagagaacactaagttgatggtgatgttttaagctctttgcaggaaattaagtttaaattttagggccacccttgtaagagaaaaatatcagcaaagaaaaatgtaaagcaaaggttaaataaatagaaatttgttattaccaaaaa

SEQ ID NO: 112425 - DNA, 277 bp, Glycine max
  Clone ID: PAT_MRT3847_72528C.1
gacgtgagaagacacaaggggtggggggtgctctgtctgaatgaaggagagaaaactaaactgattctactgataagctctgtcttcagtccattgctctaactaaggatcctacatacctacagcattatttttgaccctattctaagctaaccatgattgtccggctgcgatggaacataatgtactttgcatatatgattggaaaaagatctgaccctcttgttctggaattaccaaagccatcaattcagctgcactatgtctattatcagct

SEQ ID NO: 112426 - DNA, 2099 bp, Glycine max
  Clone ID: PAT_MRT3847_72529C.1
aagcacaaaaaaaaagtgtttggtcccaaaatacaacaagagtgcaaaatggtggtggcagagttcactagtggtggcttgaggggaatgaaggccttcagctatcatgttctcacggggcgttggttcatgctatttgcatctttactcatcatgtccgttgcaggagcaacctacatgtttgggatatactctaacgaggtcaaaacctcattagggtacgaccaatccactctcaacttgctaagcttcttcaaagacctaggtgccaacgttggagtcatatccgggttggtcaacgaggtaacaccaccttttgtggtactctcaattggggtcatcatgaacttcttcggctacttcatgatatttcttgctgtctctgggcgcattgacaaaccccaagtttggcaaatgtgtctctacatttgcattggtgcaaattctcaaacttttgccaacactggtgctttggtcacgtgtgtcaaaaacttccctggaagccgtggcagtatcttaggcctactcaaaggctacgttggtctaagtggtgccatcatcacacagctttaccatgctttctatggtaatcatgactctcaagctcttatcttactcattgcttggctccctgctgctgtttcctccctttttcttccaacaattcggataatgaacacagtactgcaccaacccaaggagggcaacagagttttctaccaccttctatatatttcacttggccttgctgcttttctcatggttctgatccttgtacaaaacaagcttagtttttcaaggattgaatacatagtagatggccttgtggttttcttctttcttcttctcccacttgttgtggtgtttagagaggagataaaccaattgaaagcaaatactcaatgtttgaccgattcaccaccccagttgaaagtagtcactgaagctattccaccaccaaacgtggagcaagaagaagtaccaccaactaccacaagttcccacgagaaaagttcttgtttaaggaacatattcaaccctccaaagaggggagaagactacaccattttgcaagcacttttcagtattgacatgctgattttgttcattgcaacaacgtttggtgctggaggaacattaacagccatagacaacctgggacagattggacactcattaggatacccgaacaaaagcacaacaacctttgtgtccttagtgagcatatggaactacttgggaagagtagcttcaggttatgcctctgagatcttcttgaccaaatacaaaatccctcgtccctacatgctcactctagttttgcttgtctcttgtgttggccatgttctgatagccctcggtgtcccaaactccctctacttcgcttcggtgattatagggttttgttttggagctcaatggccactaatgtttgcaatcatatcagaagtttttggcctcaaatactactccacgttgtacaactttggagccgcggcaagccctcttgggtcttacattctgaacgtgaaagtggctggtgttttgtatgataaagaggctttgaaacagttgaaggcgaaaggactcactagagaagaagggaaggacctaacttgcgtgggagtgcaatgctataaaatggcttttatcataatcacggcttcaacgttggttggttgtttagcttcggtcattttggcgctgaggactagaaagttttacaaaggggatatctatagaaaatttagaatggaacatgaagcaatggagattaccaagactgctaattaattaattaattaattaatgttctgtttgaaaaagtcgcgtaattaaaccttgagcagcaccagcgctagtactccaccaacacaagcagctcggaggaacaagacaaaactatagataatgaagtgtgcttctaagttttagctacaattaatgcctggctttttcttgtacattataagtttgattctgtaaaattagtaaatggggaatgaacagtaagaagtgctgttagagcatttttatatctaaggaaagaattgtatatttttctctttgattcaaatttatatttgtgtttataaagg

SEQ ID NO: 112427 - DNA, 1260 bp, Glycine max
  Clone ID: PAT_MRT3847_7252C.1
ccacaatctaatttctgattcacagtcctatccttttgagataagagcacacgtttaacaaaattgcattctctatttctcttcccctctcatcattttaatcacgcgcacatcagcacaacacaacaattcactaagctaaaatcacttcatcatggcttcctcgtgtgcttcctctgccattgcagctgttgccatctccacaccaagttcccagaagaatggatcactcttgggaagcacaaaagcttcttttcttagtgggaggaaactgaaggtgaacaactttacagcaccagttggagcacgatccagcactacagtttgcgcagttgctgagcctgataggcctctgtggttcccaggcagcacccctcctccatggctagatggcagtttgccaggagattttggctttgatcctctaggtcttgcatctgatcctgagagcctgagatggaatgtccaagcagagcttgtgcactgcagatgggccatgttgggagctgctggcattttcatcccagaattcctcacaaagattggtatcctgaacaccccttcatggtacactgctggagagttggagtacttcacagacaccaccacactcttcatagttgagctctttttcatcggttgggccgagggtagaaggtgggctgacatcatcaagccaggctgtgtcaacactgaccccatctttcccaacaacaagctcacaggaactgatgttgggtacccaggtgggctttggtttgacccacttggctggggaagtggttctcctgagaagatcaaggagttgagaacaaaggagatcaagaatgggaggttggccatgttggctgtgatgggggcatggttccagcacatttacactggcactggtcctattgacaacctctttgctcaccttgcagatcctggccatgctactatttttgctgctttcactcccaagtgagaagtgttggaacaactctatgattgcaagccttggagaaacattggcaaacctttttaactaagttgtaacgcttaaatggttttaggtgggagtgtttatgttggtgaaagcttgtaaaatggctacttctattgtcatgcatagattgaagattcaatgtacaaatacctatttaaggtttagatgcatttaatgtaaattcaggaagtaatcacagtttttgcatggatgatagaactgcaacaatatttgatggtaactagcgcaggggatattagatggtccttgtt

SEQ ID NO: 112428 - DNA, 1035 bp, Glycine max
  unsure (1)..(1035): unsure at all n locations
  Clone ID: PAT_MRT3847_72530C.1
tttttcccacgctttcgctctgttccatactctctctccaatgtagtacgaggaaaaaaacaagcaacttttttctgcctccaatcgccatggccaccaccacccaatggagttccctttctctctctcttctccttctctccatcgccctcttccaaaccctaacccccaattcctcgccgtcgccccctcctcccaactacatcgtcgccttcagccactacgccgccgccgatcgccaccgcgcctacctcgaatccgcactccgcccaggaggctggcggtggatcccgcggcagaacccggcggcgcagttccccaccgatttcgggctcgtcgcgatcgatgattccgcggtggttgacgagattcggaaactggggtcggacaagtacgtgagcttggacatgagctacaagaggggtttgatggcaaagaaggatcagagacgcaacgacaagaaggttggtgcgtttgaggatgggaagaagaagcgccccgggaagatcttcactgcgatgtcattttgtgaggccgaagaaggaggaggagaagaagaacatgcccgtaatcgcagcagttctgtcaagttgggggggggaattggtgatggatgcaaatagcacaacttcaatcttttcggttaagggaccttgggccttaacacacactggtgccaaggtcaaaatggccatatttgacacaggaattcgagctgatcaccctcattttcgtaacatcaagatacgttgaatgataatcttggacatgggacttttgttgcgggagttattgctggtgtagatgctgaatgccttggttttgcaccagatacagagatatatgcatttcgtgtgttcactgatgcacagcctattgcaggtgtcatatacatcatggttccttgatgccttcaactatgcaattgcaaccaatatggatgtgctaaattngagcataggaggacctgactacttggatctcccatttgttgaaaagatatgggagataacagcanataacataatcatggtt

SEQ ID NO: 112429 - DNA, 2192 bp, Glycine max
  Clone ID: PAT_MRT3847_72531C.1
gaagacaacaagtgagaaagacaagaggaaagaaggcaagactgaagacgatgattgagacagtgaacacaacacaacaccataaccttaaacctcttcttttctaatttgccatgtatctctgtttcatttctctgttacatactctccctccaatgtagtaggaggaaaacaagcaacttttttttgccgccaatcgccatggccaccaccaccacccaatggagttccatttctttctctctcctccttctctccattgccctcttccaaaccctaacccccaattcccatccgccgccccctcctcccaactacatcgtcgctttccgccactacgccgccgccgatagccaccgcgcctacctcgaatccgcactccgcccaggaggctggcgctggatcccgcggcggaaccctgcggcgcagtttcccaccgatttcgggctggtcgcgatcgaggatttgggagtagttgacgagattcggaaactggggtcggtcaagtacgtgagcttggacatgagctacaagaggggtttgatgacgaagaaggatcagagacgcaacgacaacaaggttggtgcgtttgaggatgggaagaagaagcgccccgggaagatcttcactgcgatgtcattttctgaggctgaagaagaagacgccagcaatcgcagcagttccgtcaagtgggggcgggaattgttgatgcagagatcacaagttacttcaatgtttggggctggggatctttgggcaaaagggtacactggtgccaaggtcaaaatggccatatttgacacaggaattcgagctgatcaccctcattttcgtaacatcaaggagcgcacaaattggacaaatgaagatacgttgaatgataatcttggacatgggacttttgttgcgggagttattgctggtgtagatgctgaatgccttggttttgcaccagatacagagatatatgcatttcgtgtgttcactgatgcacagcctattgcaggtgtcatatacatcatggttccttgatgccttcaactatgcaattgcaaccaatatggatgtgctaaatttgagcataggaggacctgactacttggatctcccatttgttgaaaagatatgggagataacagcaaataacataatcatggtttctgcaattggaaatgatgggccactttatggaactttgaacaatccagcagatcaaagtgatgtcatcggtgttggtggtattgactatagtgaccatatagcctccttttcctcacgtggcatgagtacctgggaacttcctcatggttatggccgcgtgaagcctgacatagttgcatatggacgggacataatgggatcaaaaattagtgcgggttgtaaaagtttatcaggaactagtgttgcaagtcctgtagttgctggtgttgtatgtttgcttgtcagtgtcattcctgaacctgatagaaaaaatatcttaaacccagcaagcatgaaacaagcattggttgagggtgctgcaaagctttctgggcctaacatgtatgatcagggtgctgggagagttgatctgttaaaatcatatgagattcttaagagctacaaacctagggcaagcatctttcccagtgttcttgattatacagtttgtccttacacatggcctttctgtcgtcagccactctatgcaggtgccatgcctgtcatcttcaatgccaccattttgaatggaatgggtgttgtcggatatgttgatagtccaccaacatggcatccttctgatgaagaagggaatcttctaagcatacattttacttattctgagatcatctggccttggactggttatttggcccttcacatgcaaatcaaggaagaaggtgcacagttttctggaaagattgaaggtaatgtgactctcagggtttctagccccccggctcatggagagaaggaccctcgaattagcatatgtgtgcttcaattaaagttaaatgtggtgccaacaccaccacggtcaaaacgaattttgtgggatcagtttcacaatatcaaatacccacctggttatattcccagagattccttggatgttcgtaatgacattcttgactggcatggggatcatctgcatacaaattttcacatcatgttcaacatgttacgggatgctggttactatgttgaaacac

SEQ ID NO: 112430 - DNA, 238 bp, Glycine max
  Clone ID: PAT_MRT3847_72532C.1
agtccttcctgctttcaatggactattgactggtatggtcttccctgttccctccgccggattggtccgtcgaagacctctcggtgtggttggacccccaagcctctatgatgaaattaaacacgctatcaaggaggtttctcagggcccgaagtctgtaattcttggttacactggccatgatgtgttctccaccaactctgttgttgaccacacatcaactatttttgatgccaag

SEQ ID NO: 112431 - DNA, 110 bp, Glycine max
  Clone ID: PAT_MRT3847_72533C.1
acttacaccaatgacgcatcgtcaatcctgctagaccaaagaatgctcgcatacaatacactacatactcaatcaaatgattgtacacctacaacatgcccatcattcta

SEQ ID NO: 112432 - DNA, 794 bp, Glycine max
  Clone ID: PAT_MRT3847_72534C.1
ctgaatcctcctctgcctccgtgcaaagatttcaagactcatcaaacagctggggcaacctgagacacactcgctcatccaacaaaacctcatggccaacgtggaaatcctcgttctacttgttgcagcggcattattaatgccattgcgacacaccacagaagctgcagagcatgttgtgggtggttctgccggttggattattccttcccaaggagacacctccttatatacctcctttgcagctaataacactttcagactaaacgacatactcgtgttcaacttcgcaacaggatttcacaacgtagtcaccctgtcaaagaaacactacgacagttgcaacgtgagtgaagtaatgcaatcattcgacacagcgccggcgagaatcactctgaaccgcacgggcgagttctatttcgcatgcgcgttctcgagtcactgctccctcggccaaaagctgagtattcatgtgactgcagggtcgtcttcccttgctccattatccccacctccacctgcgtcacgtgcagccatgccccttgttgctgtcacaatccctgttcttttcattgcagttgccacaaatgtcttgttctagaattatgtatgtggtctcggtctattttgggacttggttatttacttgtatttgttggatcaagggttatgttgtttgaataagttattattattattatttattttccagctgcactggatttgtgtttttgtgttgtattatgtatgagaattgtagatgaataaaaaaaaatttgaattattttggaaaa

SEQ ID NO: 112433 - DNA, 137 bp, Glycine max
  Clone ID: PAT_MRT3847_72535C.1
aaagataataatcgcttacattgaaaagggtgatctacattatgtgagaacattgaatggtttactgaatatactggttattgcaaaatttgcaaaatttaattgaacatttttataggtggaaaggtatatatatc

SEQ ID NO: 112434 - DNA, 312 bp, Glycine max
  Clone ID: PAT_MRT3847_72536C.1
ggctcgagacaaaaactcgctgtccttctccatttctcgtcgcaccttttcctcttctctctctttctctctttctagttcgtgttcttcgtcgcaaatccgaagtaggatctctctcgttctttctctaagtttttcgcgatggcgtctaagcgaatctcgaaggagcttaaggatttgccgaaggatcctgcaacatcttgcagtgccggtcctgatcatgaagatatgtaccattggcaagctgcaactatgggtccttcagaccgtccctatgcttgaagtgtaatcctagtgactattgcatatcct

SEQ ID NO: 112435 - DNA, 445 bp, Glycine max
  Clone ID: PAT_MRT3847_72537C.1
acaccaaactcgaagatctccgcttgaaagctgttttattgattaaacaattaaaatattaatcatcacatgcaatgactacgacatttgaaccattgttaactacctaagaagaaagggggaaaactattcatgatggatcaccacctattcactgcagagattatgcactggttgtgtgctcaaacttattatctacaattttggctgtttaagctgattgatagacccctagtaaacattgaatttcggagaatgtggcctacttaaaatgaaggcatatacgattgtcctttgttggcgaacctagatgatgctcacagacagccatattgtgagaaacttgaaatcatatctggtggaataccaagtgcatgcaaaagcactgatttagcgaactcactgttagatcaaatccaacttacaattaccttcgccatcaatc

SEQ ID NO: 112436 - DNA, 609 bp, Glycine max
  Clone ID: PAT_MRT3847_72538C.1
aaaaatatttttaaaatagtaatattgaataaggttaattaaatcttttggagatgatttgttatttaatgagggatgttgtgttgttggctcgttgtttcctgtactaaattactttctttacattttcttttactttcagaatggccaatctaaaagctaaaaacattccaaaaaagaatacaggaagtaatttggaagtgcaggaagcaacaacctttgttgtttgctcacaagttcgagaaaagcaacggtgtttgattgtaattggcctgtagggattctgttccattggacttttatgggttgcctatttatgtttgggttgctttgtttttctttctctgtaacgattggcataggctgggttgcttcacaacttgtgatttaacctaaaatccttttattaataaatgagtagattacagtaatacctcctaaagttttctgtaattatacaagtattttttatttttttaactattattttcacttttcttgtaaggggtgttaatttaagatttgaagagatatcaatatgatgtttttaaacatacaagaggtattagtgtaatatatattttgaagcttaaaaaagtgttggtgtag

SEQ ID NO: 112437 - DNA, 432 bp, Glycine max
  Clone ID: PAT_MRT3847_72539C.1
tttttaatagaagcaattcattagaaaataaggtaagcattcaccccaacttgtgattgttaagctctggatttttcagttgttagaaataacagatacctaaagcatatagccacatcaggatagatcaaatcgaacaacaacacaggtgatgttatctgagcttcctcgtgcataagcttcttttataagttctctggacgccacttctgcatctgtgatattttgtactaaagacacggcctccttgtttgatatgacattccagaggccatcactagcaattataataaaatcaactccgttaatttcttcctcctgaatttctgggtcagcaacaacatagggcttaagaaatttgtctccaaacgcacgggaaacagcaagaacaccaccaactctccatgttccagcccaaattatgaatccccc

SEQ ID NO: 112438 - DNA, 1366 bp, Glycine max
  Clone ID: PAT_MRT3847_7253C.1
cgtgtgcttcctctgccattgcagctgttgccatctccacaccaaggcaagtttatttttttccacgtgcccattacttgttaaaatgtgaacattacgtgaaatattgtttcatgcattgtcccatttaaaattatgataaacccctgatccggttaatgtatatatttattttatatgatccttagtttagtttgatcattctttgaaattcaacctagtactgattatgaaactatatgttaaaaaaatgatgaaattgcgttcagttcccagaagaatggatcactcttgggaagcacaaaagcttcttttcttagtgggaggaaactgaaggtgaacaactttacagcaccagttggagcacgatccagcactacagtttgcgcagttgctgagcctgataggcctctgtggttcccaggcagcacccctcctccatggctagatggcagtttgccaggagattttggctttgatcctctaggtcttgcatctgatcctgagagcctgagatggaatgtccaagcagagcttgtgcactgcagatgggccatgttgggagctgctggcattttcatcccagaattcctcacaaagattggtatcctgaacaccccttcatggtacactgctggagagttggagtacttcacagacaccaccacactcttcatagttgagctctttttcatcggttgggccgagggtagaaggtgggctgacatcatcaagccaggctgtgtcaacactgaccccatctttcccaacaacaagctcacaggaactgatgttgggtacccaggtgggctttggtttgacccacttggctggggaagtggttctcctgagaagatcaaggagttgagaacaaaggagatcaagaatgggaggttggccatgttggctgtgatgggggcatggttccagcacatttacactggcactggtcctattgacaacctctttgctcaccttgcagatcctggccatgctactatttttgctgctttcactcccaagtgagaagtgttggaacaactctatgattgcaagccttggagaaacattggcaaacctttttaactaagttgtaacgcttaaatggttttaggtgggagtgtttatgttggtgaaagcttgtaaaatggctacttctattgtcatgcatagattgaagattcaatgtacaaatacctatttaaggtttagatgcatttaatgtaaattcaggaagtaatcacagtttttgcatggatgatagaactgcaacaatatttgatggtaactagcgcaggggatattagatggtccttgttaacctgctgaatcttcatttcacacttcctcaaaaatcattgctttt

SEQ ID NO: 112439 - DNA, 435 bp, Glycine max
  Clone ID: PAT_MRT3847_72540C.1
aaagaagtcaagttgtatttatataacttaataagaagtttgccttgctataaaattaatgggccattccaatcttccgttatagatttcattgtcatgtcacactatttccaattatatgctacatatttctaatctcaagttcggaaaagaagaaaaaaaaggaaaaagaaaaaaatgcattcatcttcctataagaaagttttgaatcggtagagacaatttcgcgtgtgattggatgaatatttgcaaactgatttgaattatatttgtttcttcctgaaagtaaattagctataaaagtatataaaataaaatacatattataaatttaaataatatgagtatatatagttagaaaaaagaaaaaaatataaagagtttatttcattctttaaaaaattatatttataatattttatatacctaaataaa

SEQ ID NO: 112440 - DNA, 302 bp, Glycine max
  Clone ID: PAT_MRT3847_72541C.1
cgagggcttgcattaggcttggcatcctttgtttccgagttactgagatggaggtaaattattctgaactgacgcctgctaatatctgcagtggaggatcaaggacagttccattatacagagttggtttgacttaaaatccaaacagcatcaagcgcagctagattcttggattttggtatcacgatcataacaataaagaacttaaaggattttagccccgcattcggtaggggagatcaattatagactgactagaaccaattgatatttatagatggacatatgtacaaacagatatt

SEQ ID NO: 112441 - DNA, 979 bp, Glycine max
  Clone ID: PAT_MRT3847_72542C.1
aatgatggttctccgcttacatttatttttctcaattggggacaagatattgtgccaaaatcaacaagcaaattctccactaataaaacctgattcactatcaaaatcaggtaattagcaagacttgtttttagcaagagaggcgtaaaactatctctaatattacctttggttacctctcagtcactattggaataggccttatggtctgccggcagttccacgtctcaatgccattgccctatacccgcagtatcacgactagcaggatttctccgaccatcgggactattacatatgcctgccttcagattgtgatcacaggtcttggagcagccttaatagataaagctggcaggaagccccttattctattatccggatcgggattggtcgcaggatgcacatttgtagcagttgcattctatctcaaggttcacgaggttggtgttgaggcagtcccagcacttgccgtaactggcatactggtctacataggatcattttcaataggaatgggagcaattccatgggttgtgatgtgtgagatatttcctgtcaatattaaagggctggcaggaagtgtggccacattagtgaactggtttggtgcatggttatgttcctatactttcaacttcttcatgagctggagctcctatggtaccttcatcctttatgcagcaattaatgcactggctatattgtttataattgttgcggtgccagaaaccaaggggaaaagcttggaacaattacaagcagacattaactcataggaagcaggagttttgtaatttgcagaacaatggacggtggaaaaagaaaaagaaaaaaccgacagcagtttcgtgattgaatcatctctagccatattatttgtcgtaggtttttttctgtattgatgattaaatttgttctcaagatttataattaacgttggttttctttaatgtcaatgattcataaaatatccccc

SEQ ID NO: 112442 - DNA, 221 bp, Glycine max
  Clone ID: PAT_MRT3847_72543C.1
aaaccagaaaaagagcaaccgagcacggttgttgcggtatctgagccggtggctacagaagtagaggaaaaaacagaagaaccagaaaaagaattgcaagaagctgagaaaccaagcatagttgcagtgtcctgaggcgctgtggtgtacattgagttggagggaaaataacaggaagataccagagaaaagcaatgcgccaaggatggctgcaagaaagc

SEQ ID NO: 112443 - DNA, 343 bp, Glycine max
  Clone ID: PAT_MRT3847_72544C.1
tcgcaacaactacatataagcatacccaacatagaaaaagaaaaaaagattgggtgtggcatagctagctggctgaatctatctgctcctgttgccgctagtggtcatgatcgttgtacgattcactttcaggaacagaaaagcccttgtcgctagccatcgtcgcttttattgattgaaaaaagaataccacatatatttatttttgccactagcttcttacttcacgacccttctttttcttcctgtattacccctattccgcttcgtattcatctgagcaaaacttttctgctgctccttctctctgagctttcccgcacgtgcctacagctgcaacaat

SEQ ID NO: 112444 - DNA, 339 bp, Glycine max
  Clone ID: PAT_MRT3847_72545C.1
ggtggcccacctttccctcctatgagaagtacttaaaactggccggaaaaacgaccatcattgctttttgtgggaaaaaattattctgggacaagggcacacaacaaactatccgggggaaaaaaatgtaaagccggcggggcctaataaggaagcggacaaaaaaaaataggggtgcgcccagggccccctttttagcaggcaaaaaaattgtggtggctgcattaataaagaatccaacacccggcgaaaagaggctggccccttgggggccacaaagggggctcttctcaccaaaaagaagggggacaacagatggccgttcttcacctgctcaac

SEQ ID NO: 112445 - DNA, 359 bp, Glycine max
  unsure (1)..(359): unsure at all n locations
  Clone ID: PAT_MRT3847_72546C.1
gagtngcatgnacgcgtacgtnagctcgganttngagctcgagncagcagtgggttntctntnnggctntctagnaacntatncnntgtncnantgctccggagagacgantncgnnttgagcgattgnnaggcagncnagncngcantgantnctgagcagangggngcaggcaatccggaggacagaggacagngnaagcagtttntgccgacacngggnnnaagctggcnggggttcggtgcngcaanaaggtncggntngtcagggcnnatnnnntacgaggcggnngaccganntngatctganagaccnaggtnacagcggctccntgaagaganaaggngatannaaatnna

SEQ ID NO: 112446 - DNA, 241 bp, Glycine max
  Clone ID: PAT_MRT3847_72547C.1
tgcactccacatttcacaaccattattggcaccacatacctctattggttaagatcaattcccaggtttgtggttccgattttttccacttacatgcttcatcatgctctgtactgttgctgtttgttaaaaatacttgtaccaatgaggcccaatcactccgtttgattgctgcattcccagacatcacaatcttaaccacattcctgggaattgatcttcccaatagaggtatgtggtc

SEQ ID NO: 112447 - DNA, 165 bp, Glycine max
  Clone ID: PAT_MRT3847_72548C.1
cccacacggcgggttttcgctatttattatgcaagcggggagacccttgcaggaacacgaaggccctaacttatttcgtcccattgccctactttttcgaccgttgttccaaattgaagaagggggaggaaaatcgccttggagaggcaaggggattggggcata

SEQ ID NO: 112448 - DNA, 271 bp, Glycine max
  Clone ID: PAT_MRT3847_72549C.1
atgcctcgtgtctggcacccttcatacacaaaacattgaactaaccgcgccaacctatccttgctgcagccctactgctatgaaacacagccgatagggtgagctatccacagaccccgactcaactgaacttgcgccatgacgatgctgttagacttgctccattcactgccacccgcacaatataagatacttatcaacgatccaaacaatcgcgccatatgctgactatgacatctttagacttcatccaaaaatttacggataaaaa

SEQ ID NO: 112449 - DNA, 1261 bp, Glycine max
  Clone ID: PAT_MRT3847_7254C.1
acccaccatctaatttctgattcacagtcctatcctttgagataagagcacacgtttaacaaaatgctattctctatttctcatcactttaatcacgcactatcagtacaacaactcactcactaagctaaacaatttcatcaagcctgccatggcttcctcgtgtgcttcctctgccattgcagctgttgccatctccacaccaagttcccagaagaatggatcactcttgggaagcacaaaagcttcttttcttagtgggaggaaactgaaggtgaacagttttacagcaccagttggagcacgatccagcactacagtgtgtgcagttgctgagcctgataggcctctgtggttcccaggcagcacccctcctccatggctagatggcagtttgccaggagattttggctttgatcccctaggtcttggatctgatcctgagagcctgagatggaatgtccaagcagagcttgtgcactgcagatgggccatgttgggagctgctggcattttcatcccagaattcctcacaaagattggtatcctgaacaccccttcatggtacactgctggagagttggagtacttcacagacactaccacactcttcgtagttgagctctttttcattggttgggccgagggtagaaggtgggctgatatcatcaagccaggctgtgtcaacactgaccctatctttcccaacaacaagctcacaggaactgatgttgggtacccaggtgggctttggtttgatccacttggctggggaagtggttctcctgagaagatcaaggagttgagaacaaaggagatcaagaatgggaggttggccatgttggctgtgatgggggcatggttccagcacatttacactggcactggtcctattgacaacctctttgctcaccttgcagatcctggtcatgctactatttttgctgctttcactcccaagtgagaagggttggaacaactctatgattgcaagccttggagaaacattgggaaacttgtttaactaagttgtaaggcttaaatgtctttaggggggagtttttatgttggtgaaagcttgtaaaatggtacttctattgtcatgcacagattgattattcaatgtacaaatacctatttaagtttagatgcatttaatgtaaattcaggaagtaatcacagtttttgcatggatgatagggctgcaccaatatctgatagtgcctagcacgggatattaaatggtcttgttaaccagccg

SEQ ID NO: 112450 - DNA, 436 bp, Glycine max
  Clone ID: PAT_MRT3847_72550C.1
cctacacggccggattggcgctttgtagcttgttgatgtccctttctgagccctgcactcttggtgttgcgagagaatgccatgcctgaaaccaagatgctaggcatgctctccgaccaaacactcccatgacaagctcattgatagatcggataaagcctggccctgcatgtgaagaaatccaagatcaccctacgcatattgaagaagcacatgtcccataaacctacttctataaagaagacctcaatccaggcccatcagcgaaagtacatttcaaacagcctctatatacacaaccatggagcgttggtacctgcttaaatgaaattagggacactactaaataaggatgtgagtttggagagctatgcatcaagaaagaagcctttgagggggaaaagaaattttgtgcatattccttgggaacagagat

SEQ ID NO: 112451 - DNA, 522 bp, Glycine max
  unsure (1)..(522): unsure at all n locations
  Clone ID: PAT_MRT3847_72551C.1
cttcgtccaggagttcaagcgcaagaacaagaaggacttgaccaccaacgctcgtgctctccgtcgtctccgcaccgcctgtgagcgtgctaagcgcactctctcgtcggctgctcagaccaccatcgagatcgactcgctcttcgagggtatcgacttctacacttcgatcacccgtgcccgtttcgaggagctctgcggtgacctcttctcgcacaccatcgagcccgtcgagaaggtcctccgcgactccaagatcgacaagggatccgtccacgagatcgtcctcgtcggtggttccacccgtatccccaaggttcagaagctcctcaccgacttcttcaacggccgtgagctcaacaggtcgatcaaccccgatgaggccgtcgcctacggtgccgtcgtccaggccgtcattctctcgggtgacacctcggagaggacccaggacttgctcctnctcgacgttgcccctctctcatgggtatcgagaaccgacgtggtgtcttcactcccctgatc

SEQ ID NO: 112452 - DNA, 1097 bp, Glycine max
  unsure (1)..(1097): unsure at all n locations
  Clone ID: PAT_MRT3847_72552C.1
ggccctctcccctcacgtctcttcattctccttctccccctgggccattcctcgcgtcgctcttcagcaaccctcctcctttgttgatgctcatgtgactctttttgtgtcccaattggagaccataatggcagccaaatctcctcatgactcttcattctccttctcaagaaggtacttccattggaagaagaaagccttggatgaatctgataacgaggaagaaatcctcaacttctcatcttcatcctcatatttccctgaagaagtcgatgacaaccaagatgatcacaatcataatcacccccaccacctcacactccaaatgccataacaggtgcaatgccaagaaaaaaacccacttctccaagaagtccaagtttaagtccgccctcacggtctttaccgtcacgcgtgtgccgaggctgggactgaaccacaacaagaacagttccagtctcggcacgcgcgtggtagggacactcttcggccaccgccgtggccacgtgcacttcgcctttcaggaggatccaaaactgggcccagctttcctcgtcaagctcgccacccggacgagtgcactcgtccgggaaatggcctcggggctggtgagaatcgcgctggaatgcgagaaaaagaaaaatgacattaactacaacgccacagcagcaaagtgaggctgcttgaggagccactctggagaacgtactgcaacggaagaaagtgcgggtacgcgaacaggcgcgagtgtgggccccatgagtggaagatactgaaggcggtggagcccatatcgatgggggcaggggtgttgccagtggtgtgcgggaatgaagctgcggggtccgaggaagaagcttctggggaggttatgtacatgagagccaagtatgagagggttgtggggtccagagactctgaggcgttttacatgatgaaccctgatgcgagtggaggtcctgaacttagcatttacttgattagagtttaattaacattaacattggcatatatggcaatgtatctgctagagttaatttgtttcaactatgtttgggatttgggattgttnnnaaataaaagaaaggggagacnng

SEQ ID NO: 112453 - DNA, 437 bp, Glycine max
  Clone ID: PAT_MRT3847_72553C.1
aattcggctcgagtacggctgcgagagacgacagaagggggaagctgctcttcggtgtgttttcattttatttgtttctgcctacttttgtatttgcatttttggatttgttatagatgtgtacataatcacattctcagccatttattttcttatcaactgttatagttgaattttattctccaagtttatatttctcactttagaagagctagattctgtttttttttttaaaacttctatcattctatcatgttcgtatatattttaccttgtgtaaaattttatttgtttcagcgctttatttttaacagctctacttattacatatttatcggaatctatgatgtggtgcagtgaaattaaggagaggatcaagaaaacaaaggatgagaagaaggcttagaaagcagaagttgcttccaagtcgcaaaaag

SEQ ID NO: 112454 - DNA, 460 bp, Glycine max
  Clone ID: PAT_MRT3847_72554C.1
gcgcgcagggcaccagagagccgccaagcccgggggaaccggacgggccgacacccggaacccccgagcgaccggcggcggaacccatcgggccggccagggagccatcggaaacatgtgtcgaggaggacgaatgcttgccccgacaaagatctggcgcctcaggaccaagaaaaacaatgtgaaccataagcgcaacgccggagcctccgccatcgctgcgtccgccatccccaccctcgtgggcgcaagcggccaccgcatcgagtccgtaccggagctcccacacgacgatagcgacaccgccgaaagcggcgagaaaacaaaagaagcaaccaaggcctcaagcagatcggagcgctcaccgacgcagagaaagcaaaaaaaagtccaaggattcggcccgggaaaggggaaaatgcgaaagcgacgatacatagcacgccgggggacaatcctc

SEQ ID NO: 112455 - DNA, 1614 bp, Glycine max
  Clone ID: PAT_MRT3847_72555C.1
tacggctgcgagatagcattgtttttcttatctagaaaaagaccatttgaccttccttccatctttcttgggcacaccaagctctaaaaaaacccttttttctttagttttgttccctctaaaattctctttctgcttagtctccacgctcttgcttgcttttgtgtgagagaacaatggcaatggtgaagtctcccaagaagcaagtgaacctcttctattcccttgactgtgaagaccttgcccagaacgttgctcttcaatcaccccacatcgttctccagaacatcaaatggaggtcatttgctgatggatttccaaatatatatataaataatgcagaagaacttcgaggtcaacatgttgctttcttggcatctttcagctcccctgcacatgtctttgaacaactttctgtcatatatgcactccctcgtttatttgttgcttccttcacattggtattgcctttctttccaactggatcctttgagcgaatggaggaagaaggagatgtagcaactgccttcaccctagcaaggatgttgtcaaatattccaatttcaagaggtggcccaactagtttagtcatatatgacattcatgccttgcaggagaggttttattttggagatgaagtcttgcctttgtttgagactggtattcctctcttaaagcaacgtctgagtcagcttcccgatgctgataatgtagttattgcatttccagatgatggtgcatggaagcgattccacaagctgtttgataatttttcactagttgtatgttctaaggttcgcgaaggtgacaaaaggatagttcggctcaaggaagggaatgtctctggtcatcatgtactcattgttgatgatttggtccaatctggaggcaccctgattgagtgcaaatacagctccttttgaagtgctgagtctagccgggtctattgctaatgccctacaaatttgaaggcaaaatttttcgaggggaaaattgtttttgattattgatgttgggtatgcatacccaaactaaaccacactttatctctgcatgtgtctgcataagtcaatcaatcaatgcatgtttctgcaactagatgcgatgcaactgaatatttctctctttttacctgattgagtgtctactcaggtttaagagccaatggtgcagcaaaggtgagtgcctatgttacccatggcgtgtttcctaaccaatcatgggagcgattcactcataaaaaagacgccttggagaatgcatttgcctacttctggattacagattcttgccctcttactgtcaaagctgtagcaaatacagctccttttgaagtgctgagtctagccgggtctattgctaatgccctacaaatttgaaggcaaaatttttcgaggggaaagcattgaactgtgttaaaagggattctcaactacaattttcatccctgattagctttagaataacatcttttcagttgtgatgtgcattgctactagtttaccacaatgaaacctgttaatttcttctgtactgtgacctgattgagtgtcaactctggtacaagaccgttgaatgcaaatcatctaatcttaccttaccccaaaaaaaaca

SEQ ID NO: 112456 - DNA, 652 bp, Glycine max
  Clone ID: PAT_MRT3847_72556C.1
gttattgcatttccagatgatggtgcatggaagcgattccacaagctgtttgataatttttcactagttgtatgtactaaggttcgtgaaggtgacaaaaggatagttcggctcaaggaagggaatgtctctggtcatcatgtagtcattgttgatgatttggtccaatctggaggcaccctgattgagtgtcagaaagttttggcagccaatggtgcagcaaaggtgagtgcctatgttacccatggcgtgtttcctaaccaatcatgggagcgattcactcataaaaaagacgccttggagaatgcatttgcctacttctggattacagattcttgccctcttactgtcaaagctgtagcaaatacagctccttttgaagtgctgagtctagccgggtctattgctaatgccctacaaatttgaaggcaaaatttttcgaggggaaagcattgaactgtgttaaaagggattctcaactacaattttcatccctgattagctttagaataacatcttttcagttgtgatgtgcattgctactagtttaccccaatgaaacctgttaatttcttctgtactgtgacctgattgagtgtcaactctggtacaagaccgttgaatgcaaatcatctaatcttcccttaaccct

SEQ ID NO: 112457 - DNA, 265 bp, Glycine max
  Clone ID: PAT_MRT3847_72557C.1
caattaaggaattaaggtattgcttttttgctttaggtatgggttcaaacatccgaccttgctccttcccaatacccagaatacgtgcgcccgcacgcgaccatatatcttttctatagtgccaccgaaatccaattaactggtctacgggctacaacatttacaactggtaaaccggggaagctacccaatttaatagcttaataacccatccccatatccccagttggcgagttggcgaaaaagcccatacccaccgccttat

SEQ ID NO: 112458 - DNA, 282 bp, Glycine max
  Clone ID: PAT_MRT3847_72558C.1
acccatggtcaagtttaaatttttatggtggcggtcctgaacaggatttttaacaacaatgcctggatccgtgtaattgcacccacataaccctttctatacactacatttcatccccaattttatagctctctggagaccatttttgcttacacggttattacccggccttcccactctaattattgttgtagcgcctttgtatacaagcggagtcgaggtcttaatcattgcattttacacggcgatcgccctatctataattagaagcttggcatggaa

SEQ ID NO: 112459 - DNA, 1087 bp, Glycine max
  Clone ID: PAT_MRT3847_72559C.1
tgaatctataaaaggaagtacatattcagagttttagcaatcatccaagagcttaatttgttatagatacacacactagtgtcggagcggcccttccccgcgagcgtgtccgagggctagccatattaatagcattatcctatatatggcagggtcatcctcctcctcctccacctccaatactcctccacaaaagcatgaggtgttcattagttttagaagtgaagacacccgcaagacattcaccagccatcttaatgctgctttggaaagattagatatcaaaacctacttagacaacaataatctagatagaggagaggaaatacccacaacccttgttagggccatcgaggaagcaaagctatccgtcattgttttctctaaaaactatgcggattctaagtggtgtttggatgagctcctaaaaatacttgagtttggaagggctaaaactctaattataatgcctgttttctatgacatagatccttctgatgtgaggaatcagaggggaacctatgctgaggcatttgataaacatgagagatattttcaggaaaagaagaagctgcaagaatggaggaaaggtttggtagaagcagccaattattctggttgggactgcgacgtcaacaggacagaatctgaaattgttgaggaaattgccaaggacgtgctagaaaagcttaatcgtgcgaacgtcagtgacctagatcgtcagataactaagtacgagcaacttgcacaacttcagcatcaatattttatgtgcataccttctttggaaaattgtcaaaatcatcgagcaacggttcaacgcatcacagaacttaaaatggagagaagtatgcgtttgcttcgtctgacaccagacatgctctcgcatatgaaaaattcaagagctgatgaatataatattttctctccattttaacaaaaagaaaatagtcgtctaatattatgaatataatcaatgacatattatacattgttccaacaattaaatgtattgaaatgatgtaatgcggggtactgctgatattcttcaacgtaataaaatttactttttaccctgttgcagaaa

SEQ ID NO: 112460 - DNA, 332 bp, Glycine max
  Clone ID: PAT_MRT3847_7255C.1
ggattttttaccaaagaaaacataaaaaacttgcttgcaatctactaccaaaaatatgagatgaaacttttgccaaactcaaatactacttcctgtacccatcctccatctcatgtctacctttaccaccacccatgaagtatccttcttgagttgaggaatcaatttaaatacattgatattagaatttgcatcatgtgatttccccaaacatttcatatacatgctcacacctatcatgggagttataaggtagtgttggtggtctatagtcttgaattcaaatcctccactaacataacatattaactactaatatttgccaataaaaa

SEQ ID NO: 112461 - DNA, 377 bp, Glycine max
  Clone ID: PAT_MRT3847_72560C.1
tcgacggctcgagctttccagaagaggatcttcttccaacagtctaggcattcatactcttgaggtgctggaggcttgccaccgtaaatgtgttcacatacagctaatggtccatatccctgggatggggaggccacatgtgatgccactacacaccaccctgtccaaatctacccaggataagtcaatgtcaaatactacttacaccatcttggctacatccccagtgcagaacacttcgactactacttcgatgacgccctcgtatgtgcctacaaggcataccatctgactgacacacttgtcggcaccgtgatgcactacattatcactgttcaacgaatcatgacaccccggtgtgacgttcccgactatca

SEQ ID NO: 112462 - DNA, 147 bp, Glycine max
  Clone ID: PAT_MRT3847_72561C.1
tccggttgtaagaacacgacagatagggcggcttggactagcaccaagatctaaatctagggccctcctgtacctgtattgagtcataaagaacgtgtattccatgatcgctgccaatgagagctgagatattgatattattttcac

SEQ ID NO: 112463 - DNA, 313 bp, Glycine max
  Clone ID: PAT_MRT3847_72562C.1
gttaacattaatgtatataataatagctgactgacccagacagaaaactgattagataaaaaacaaaactaaaaacagaaaaaacagaataataatagaaaaaaaattgaagacttaaagaatacgacaatcaacaaaaaaaagaagaacaaccaaaaaagcaacagaaacgacgggaaagataaaaagggcgagaataatccaatagaagaacatccagacataagaacactgaaaaatcagatcttgagcagtaggaacaggagctcgcaaaaaagaaagccgaaaggatgacagagacagcagataaagc

SEQ ID NO: 112464 - DNA, 537 bp, Glycine max
  Clone ID: PAT_MRT3847_72563C.1
gaaagagacctggtgaaaaatccaaggttatctctgatgaagaaaaagcagctctcaaggcaagagaggctgcaaggaaaagggtacaggagagggagaaacccttgctcggcctttacaacaagccttactaactgtacaaaatttactttagcagccttgtcttcccccagaaatatgaggttgtgcttcttttttgcctgattcctttaggctgccattaaggtgggtgtcctaagtccccaagtgttttccatgtgactctaccttgtacaatgtaactgctcctttttttttttgttttgtttttgcaatacatgaatgctaattttcagctttgtttgtatgagaggagaaaaaaaaaaggtttagaagtcttcgttaggccgatgaaagcaagttaaatctccgttgcagaagcttttgtaaaacacatccaaataagttaatccttatccttatgtggatactaaagcaatgcacattaacgttctttagtgtgttaaatcatatggtgtacaagttgggaaaacttat

SEQ ID NO: 112465 - DNA, 1294 bp, Glycine max
  Clone ID: PAT_MRT3847_72564C.1
ggctcgagggaaaaccaggcagaccctgcaatgcgattagtctctgagatgatgatactttgcggtgaagctgttgccacatttggatctcggaatgaaattcctttaccatacaggggacagccccaatcagatatgaatgtttctgaattttcccatctcccagaaggacctgttaggagctttgcactggtcagagtaatgcgtgctgctgaaatcgatttcaggaagccagcacgccatggtgttttggggattcctggttacgttcagtttacatcccccatccgtagatatttggatcttcttgctcattatcaggtaaaggcattccttagaggcaagcctccaccctttacagctggtaagcttgaagggatagcagctgttgtaaatgagaatgttagaacagtgaggaaactctgcagcagcagtcttcggtactggatattagaatatttacgaagacaaccaaaagagagaacatatcgtgcattggtccttagatttttgaaagatcgaattgcagctctattgttgcttgaggttggatttcaagcttctgcctggatccctgtaggaatgcagataggggatgaagtagaagttaaggtggaagaagcacatccacgtgatgatattctatttctgaaggaggttgtaaaagagtgatgagctaagataggattttgaataggctttatcattgttcaacgatttattcaatagggtaaacatctttccgcatcccaaatccactcaatttggctggtaggatgcagcctccttcctggtctattgcatggaagagagatcacactttcactggcagaatttcatcatttgaaacattgttaagtggttcaaatcaaatcttgaagtgtcatttctggcagagaagttcatggatgtaatagccaacaagtgtacagtccttcaaacattttctccaaccatagtcacatgaggtctatcggttttgttcctcacttgagcaagtaattttgcccattcacctgatttggtgtagtagtagtagtatatggttggccttacaattcatatgaagatctaagtgagctttcattgtaatatcacattcttcgtgcaataacatccgaaaatctagagtttcagtactgcgggtgattacgcggaagagacatttttacatgatatacgcttacacccagtttcccatatacccctataattgatcatgaagggctaaaattgtggaatacaagcgatgtcatctcaaatgatcattgcattagaaaaaaaaaggaaaacc

SEQ ID NO: 112466 - DNA, 457 bp, Glycine max
  Clone ID: PAT_MRT3847_72565C.1
gggcccggaaaccctaagggccttattttggaaaaaaaacccccaggggggtcaaacaaatctttttccccttgtcaaaaaaaaaaagaaagaaggggtcaaaatctactttttaggggggtcaacccccttgggggggcatcacccggggtttcacgggcaacagctttatcgggtttatcaggtataaaaagctggggggggaattcccccttgggaaggggccccccgggggggcccagggtgggggccaaaactttaatttcacaaaatttgggcgggcccagggggccaataaaaaccccagccctttccatggcatttggcccccgacaaagcccaggggaggccaacaagtatgggggctttgggccccaactttttgaaccacccccaaccataaaggcttttttaaaggggggagggggtttaaaaaatcctcttattggcagagggg

SEQ ID NO: 112467 - DNA, 400 bp, Glycine max
  Clone ID: PAT_MRT3847_72566C.1
catttccggctcctcctctggttcctcttcccccttcgactcccattcctcctgtcgctctcgggcctgttctccctcgtgctccaaatcctcttcaccctcctactcctcttcctctcgaagctcccgtagcctcagctgtcccccggaactgaagataatacacatttctatcacttcatctactttgtttatgttcttctctgtcaagacctagttctattagaaatcaactaaaaaaagctctccctccccccctagaatagcttatctaaacacagccttagtagtagctgatgatggcttcccttcctttctttggttgaggactatccggccaaagttagttgttagtttgctagcgggagggattcgaatcctttggaccttcaaacccacg

SEQ ID NO: 112468 - DNA, 238 bp, Glycine max
  Clone ID: PAT_MRT3847_72567C.1
aatcgtatgcacgcgtacgtaagctcggaattcggctcgaggcatgaggttgtccttagctgccgctatctcccacggccgcgtctaccgccgcctgggcctcggtcccgagtcccggatccaccttctacggaacttgctcacaggcctagttcgccacgaacgcatcgaggcgacatgggcacgcgtggacgagatgaggggtacgcggagaagctcatcgactatggaaagctgg

SEQ ID NO: 112469 - DNA, 221 bp, Glycine max
  unsure (1)..(221): unsure at all n locations
  Clone ID: PAT_MRT3847_72568C.1
agcaaatctgcaaccaaattttaactgctttgtgtgtgtgtgtntatggggtgtgcgtgtttgtaaatggtgcctggttacattaactgcatcaagtttatatgcattaaagaccaagctactcttttttctggtctctggctcaatgtatacataacataaccctactaccttttcttctctgatttaacactacttgatcgacatccaagactatccta

SEQ ID NO: 112470 - DNA, 988 bp, Glycine max
  Clone ID: PAT_MRT3847_72569C.1
cttgctacataattggttatatttctgaaaggcgtcgtataaacagttaaagtcctcactaatttttgtttgatagaagaaacaattcaatttcgacttccaacctatccattttactttttttctttcattgtccgttttttatgacaatcacaaagaaattgtaactaaatcacttgctggctggccaatgcccacgggctgcgagaagacgaccggaggccgattcgtggaaaaacaaaagaaaaaagaaaaaaaaaagattattcttggcttatgaaggaagaagagcctccaagcaaggaggaacgtgtctgaatctccatataaacaccgagatttcagagagaagcagaatcttatgctacctccttcgttaagttaaaggaattcagtttttgggcatggattttctctcatgtggatctggaccatgctgtcaagcagtggatatgaagtggaagttggttggcaaatgtttgaattcacgtcaagcaaggtttcccagtgttggaaatagaagcgggtcagtgagatttcatgacaataaggagctgcaaagagactttgggtctctgagtgctcttgaagggtccaaaagaaccaattgcaaggcttatagtgaaagttatgatggctatgtgattggtggtgaagaggatgtagcagacatttcaggggtagaagaacctgctactaacaacgttgtcattccaggtctgccagatgggtcaaatggtgctccaataagtagttgcttttgggagtggaagcctaaacttaacgtgcactatgagaaggcagggtgtgagaacgtggattccccacatgttctctttcttcctggttttggtgttggctctttccattatgagaagcaactcaaagatttggggcgtgacactagagtatgggcactggattttctaggccaagggttgtccttgccttttgaagatccggctccttactacaataaggaaggggc

SEQ ID NO: 112471 - DNA, 157 bp, Glycine max
  Clone ID: PAT_MRT3847_7256C.1
agccatcaaggcagctgaggaaggaataacagttgaagagtatgattgccttccatacttgtattcccgatcattagatctgtcttggcaattctatggtgtcaatgtcgtctactcagttctattcgtagacaacaatcctgcgtcgtcaaagtct

SEQ ID NO: 112472 - DNA, 173 bp, Glycine max
  Clone ID: PAT_MRT3847_72570C.1
ctagcaacaatatgggggattaggatctgagtatgggtttccagatcaaaaagaaaacactgctttaagtgccttagaccctttttcatatgttacagctgaaggagatcatgatttcttcagataggcaccatataaatagagtaatgtggttgattttcactataactgcc

SEQ ID NO: 112473 - DNA, 379 bp, Glycine max
  Clone ID: PAT_MRT3847_72571C.1
gtatctaattttttttatttttttttttttttttttggttttagttttttattttttcggaaaacagaagttttttttttttttacaaaataaaacccagtcccatgtggtaagtaattggggccaaaaactataattggggaaggggcccttggggttataaaccccaaatatttttctacctgggaaaacccaattttcccacgcaacccccagaactcagggaccccccctgcccaaaggggggaggaaaccccgtggggggggggtttgcaacaccgtacttgctccaattgagggggaacaaaggaccccggaggccaaattttgaaaaccccaaccggaacttctgaaaaaaggccctttggtttttctttta

SEQ ID NO: 112474 - DNA, 468 bp, Glycine max
  Clone ID: PAT_MRT3847_72572C.1
aacctttgggctgatttatgtgcttgcatggtcgtgagagatgatagaaggggacgcaaaagccgaggccgatcccggagtaagtcacagcatcccggactcttaacccgccctctcctaatacgaggcctaaacttttttcgtaaccgtctactacttcctcggcccccctacccgcctctctcctcgtcgtctcttaaataataagaaggtccccgttaaataaagaaaaaattttcatttaaaccatactagacaagccctagggcgccgaggaaccgaaaaacggagaagaaacgcccgacacggtagaagagcctacggcagagagaaggaccgacccggagagcaacgaccacttagggataggagtaaataattagtacgacttaaagatattaggaggattcccgagaaacaacgtacacatccccgcatagaccacgaggatcaagagaaccactaacg

SEQ ID NO: 112475 - DNA, 254 bp, Glycine max
  Clone ID: PAT_MRT3847_72573C.1
aagcaaatgagctctttatcgaaattttagtttctgtcaatccgcggtctgtttttgatgcaagcacatccaacatgtggctctcttgaaccaattttccatgcaaccatcacctacaattcaccatatgttctattatgttcccactacctggattttcaaaataaatcgtacatcgtgcaatacctttgcaagcaaggtattatttcctctctccacgtccaccaaagagattacttacaaaataacctcct

SEQ ID NO: 112476 - DNA, 753 bp, Glycine max
  Clone ID: PAT_MRT3847_72574C.1
gagctagctgcatccaagaattcaccgctgaacgtaagaactagtggcacagtccaaaatggacgaagggaaagtcatgttagagttagacgaaatgatcagggtgcatcaaacgccaatatcaagagagaattagccttgagcaaagaaagggaactttcatatgaagctgctcttttagagaaagatcagaaagaggccgaacttcaaagaaagattgaggagtcaaagcaaagagaagcatacctggaaaatgaacttgccaacatgtgggtccttgtggcaaagctaaaaaagtcacaaggagctgaaactgatgtttcagtgtcaactaaagagagtttgcagttggatggttttgacgtttgatgtgatcttgtaatagtggcttttgagtggatccattattacaatttgctttcaataggagtggtttgagagagaggtgtgtaaagattgttgttcgctggaaagtgtgctattctcttccccttccatccctatcctttttgatccatactccatagcaagggtccaatttgtacatccaaattatagtggcttgactcgcttcgcttcccttcccttctcccttgcattcctatctccatccttccaaatgttgagctaatttggcccctttttaatttttatttggttgacatctctagagagatgacgtttaaagcatagaaagtaatattggcttcaaatttgcattaattatggagttccgctcgtgttccttaaaaa

SEQ ID NO: 112477 - DNA, 116 bp, Glycine max
  Clone ID: PAT_MRT3847_72575C.1
caaatatcgacgtacggtggactgatctaagaaaatattctggttcttatatatgaggccggttccattcaatggaggaaatcccaatgcctgatattatcattaacaaaccagat

SEQ ID NO: 112478 - DNA, 322 bp, Glycine max
  Clone ID: PAT_MRT3847_72576C.1
ggaggaataattattatgatttttctataccttgctcaaatgaattttaacaggctttaaaaattacaagaaataaatgcacaagctaaaaaacaaattcaaatttgcccagaaaggcatccatgcggcaatacctccggctcgacccataagtctggacagggggaaggaataaacttttgtgaacaaactgtttacacagctttgactaaaatcggaaaaaggggccaacgggggcacttaaaactaagaccaatgcctttgttatatgcaaggggtgaaaaaaggcgaaggggagcaaaaaaaaataaggaacgaaaaa

SEQ ID NO: 112479 - DNA, 738 bp, Glycine max
  Clone ID: PAT_MRT3847_72577C.1
ccacgcgtccggaggctccagaaaaacaccaaattacatagaatttttaggcgtaaccaaagtacgtaccaaaccatggcattgacaagtcaattgagaaaccttcttgcagctctagaggctgaggaagcagcccaaaaatccaaaggtaaagtgaacacatacaccaaccatggcgatgggtttcagaacatcactggcactaagaccaacagtggtgcatattctggtgatggtaacactcatcacgccaccaacaactacggtggtggtcctgctataaataatagtggcaatttccagggacatggcaatggaggctttattggtggtaatttcgatgcctcaacgaggaactactgattaatttatgtatgatcaacttcatgtattaaatatcgtgttctgcgctacgtatactaattaataataaaattagagctgcatgctgcagctctaacagtgtgtgatatgaataattacttgagaggggggatacgacacaccttcttgagttcataaatttcaattccgatctttttggttgtggtgtattattaataacaatttgttattattaattattaagtgacttctataataacaatttgttaactttgctaaataaaaaacaaaaaaaaaaaaaattttttaaaataaaaactaattaaaaataccgttttttcttcaccttttctttttttccctttttttcctcccctttttcctccccttttt

SEQ ID NO: 112480 - DNA, 713 bp, Glycine max
  Clone ID: PAT_MRT3847_72578C.1
cggctcgatcgaaagaaatacacgccagaatgggactcctctcgttcgtgtttggaggcttagggttcattctcatcggcgctcacgaagcccttcttcactcttctccttcttcccaaaacaagaaaaccaaaaccctcttctcgatctctctggtcctcttctcctctttcttcatcctcaactccacgctatccctcttcgacgcgcacagctcaaacgacgccgttggcgccgcgctccagctgcaagtcctatccatcgcgttcgtcttcctcttctactccctcctccccctcctcagcctcagcttcactctcccctctccgctcctaaacctcgtcggcgcgttcgccttcgccgaagagtttctcttgttctacctccagcgcaaggaccccagtggcgtcgagaatcgttactacgatctcctgctggtgcccatcgccgtgtgcgtgttctgcacggttctggagctgggatcgccgcgctccggcgtcgtcgccaaattgggccgcggcgtgggcctcgttcttcaggggacctggctcatccagattggcctctcactgttctcgggctgggtcgcgcagggttgtgatttgcatcatgtgagtaggggaaactacacgttgaggtgtaaggggcactctgagtatcacagggcgagggctatcgccacgctttagttcaattgccacctcgcgctcttg

SEQ ID NO: 112481 - DNA, 130 bp, Glycine max
  Clone ID: PAT_MRT3847_72579C.1
gctcttaattcagagtttaattcatcaacgggtgtttggctttgagattcaatctgaccatggtggacgtttacaaactctgcatcttcacttcttgcactcttccgcgctttcctaggcttttttaatc

SEQ ID NO: 112482 - DNA, 445 bp, Glycine max
  Clone ID: PAT_MRT3847_7257C.1
ggctcgaggtttctttccatgctttattgccatgtgcaagtcagggtgccatacaaaagggactggcccggagaagttcgttgttaaacttttaccaccacttttggggagtcattatgtgctaatgggacacagcatgaactctacaatccagaaaatgaagtgttcaaaagctgctcgtgctaatgtggctatcttctgtctgaactctgaacctgcgagtgatgagctcgcaatggagcatacttgtagacttttagttctgaaaaaattgaataacttgaacgtgttttacttcatagcgaggcacataggttgtattgcttcctgccaaaaaaatgggttcattcctggacaattgaagtaataatcgcatactagtgatatttgaaataacaccctactgagatatattttttcttttcacaatagctgatctattttt

SEQ ID NO: 112483 - DNA, 275 bp, Glycine max
  Clone ID: PAT_MRT3847_72580C.1
tccctcatggatcatggttcctcttgctctcttgctgtttttttccagttattacaaactggttggatttatgttcttctcctctctcctcttcacatccctagcactgcttttgtctacttttcttctcttcatgtggaagcgcaaggctgaggcaattggtttcagttttgaggagaagaagacaccacaccatggaagggagagtgttgttgctattgcaccaacccctatgcacaaggatgtggaaactattgtgacacaagcaaagggaa

SEQ ID NO: 112484 - DNA, 131 bp, Glycine max
  Clone ID: PAT_MRT3847_72581C.1
attctactctcatgctaatcataacaatagaatagaatgtcactagcatattagctgaacagataacagtgcgggtacctttcgaagctgtctgagcacgctgagcggtactgaagagatggttgagttca

SEQ ID NO: 112485 - DNA, 129 bp, Glycine max
  Clone ID: PAT_MRT3847_72582C.1
tgtttcgcgtggcgggacacatgccaacagtggcggagtcgtgtgtctgcttgtggaccctgttgccaacctccgctttttaaggacccaaggctgagaggcacccgagattacttaagatggctccgt

SEQ ID NO: 112486 - DNA, 262 bp, Glycine max
  unsure (1)..(262): unsure at all n locations
  Clone ID: PAT_MRT3847_72583C.1
ccgannccttngtcatnggagtggcaccagttanggctcaattcgagagtgctnaanaacngtgttcccgctgagaacgataggctgcaaatgtgncagctaactgnacctgcaaccctgcacttgcaagtgaggtgttgganagctaaancttcaagcagaaatggncctnagaaataatgatanaaactatatgtagttncaanacttcanaattatnnagnnngnatcatgttgcactctggcgnctnctntctaaaca

SEQ ID NO: 112487 - DNA, 341 bp, Glycine max
  unsure (1)..(341): unsure at all n locations
  Clone ID: PAT_MRT3847_72584C.1
gagcacactcgnctgcggccgccctaannaaaaaaaaaggggggggttcatattaaaggaccgcccgaacaacacccggacaagaaaagcccccgggggcccactaaaaccgggccgcacataaaaccccaaccataaaaaaaaaaaaaaaaggcaccccaaaaagccccctcgcaaaagaaccacccaaattaatgagaccgggccggccaaaccctgggacaacagacaacccaaaagccaagggcccgaccagaccacggcatcgagtatggaccaccccaacaagaaacaaaaaggcgtcaccaccgtctaagccaatcccccccccgggagcacca

SEQ ID NO: 112488 - DNA, 387 bp, Glycine max
  Clone ID: PAT_MRT3847_72585C.1
cccacgcgttcgcccaatcctccgaccactttttccgcgtacccttggatgctatatgctgatacctttttatccttgagttctaatgaaacaagaacctaacttttgtggatgaatcaataacctgttatcaaaacctgaataaccggcccggttaatttctctttggagtaatcttatcttttgctgtataggatccttcttatgacactttcattttcctctgaattgtcatactgttgtcttacataccaaaaaataaaaaaagacataaaagtaataaaaaagaataaaatataaattaaatataaaaattaaataacttctatttaaatataattctttataaaaataaatcttttgaataaaataataaaatataaaaat

SEQ ID NO: 112489 - DNA, 1005 bp, Glycine max
  Clone ID: PAT_MRT3847_72586C.1
gtgaggaggtgcaggttccaagagaagccgtccagctgaagtgcataatctatctgaaaggattatgccaatgggaggtggtttatatatgccttcaatgattttaccaaccagaaaaaaaatgggtgggattttaaccaaaacttttcccctcaaaaccttaattaaaaaccaaaggagccaggcctgaattttcgaaggcaacggaaaaagacaaggctgtcatgaccctccacagggaatagtaagaggaaagatggatcatctgcggcaatgctttcaggtccagtttgcagcatgtagggacttgaggcatgctcaaaactagggagtatgatacaaacactctttaactggttgtctacatcagaaaatctacttgtttaattcaagagaagataaaatgggctgatgcaatgagtgaaattgacaagaagcacaggaaggatgtggaagagaaggtagaagaagtaaagaagtccattttcaaggccgacatcgacttcagagggcatgaggagatctgctctgaatctggtggagtgatggattatgaagaagatcgaagccgaccaaagaggaggcggcatccaattcttgaagatttagtagataagggagctcattggagatgggttctttagttgcttgcctgacttttattcatggcatgcgtcaacagaggatatcagcttttgcagacagacaagtatatctcatcgatattgcccttgtctgtcacaccacaaagcgagatagggacaaggaaaaaaaggagggaaaacctgttaatttaggaaattgatagtgtttcttgaaccattatttaatcgtctactgagttggcaataacaagctgagatggtggtgcggctatttatttgcggttgctgaatgctatatatactgttttgttttgtattatgctgatatatttgctgcctcaattgcgttgttatactttgtggtgaatatatatattccaaaattatatattagatgcgt

SEQ ID NO: 112490 - DNA, 1227 bp, Glycine max
  Clone ID: PAT_MRT3847_72587C.1
ggttgcttttccccctaagggtctggtgaatactctctccttcaccgtctctagaggtgtgcgggacaaattacaggttgattgtcgaatatatttatggaaatggaacgctcgtatagtgatctcagatgtggatggtacaattacaaggtcagatgttcttggtcagttcatgcctttggttggtattgactggtcacagacaggtgttgcacatttattctccgctatcaaggaaaatggttatcaactgctttttctcagtgctcgttcaatttctcaggcctatattacacggcaattcttactaaaccttaaacaggatggaaaagttttaccagatggtcctgttgttatttcccctgatggactttttccctctctatatcgagaagttattaggagggttcctcatgaattcaaaatagcatgcttagaggacatcaaggcactttttccttctgatagcagtccattctatgctggttttggtaatagggatactgatgaaatcagctaccttaaggttggaattcccctaggaaaaatcttcattattaatcccaggggagaggtggttgtaaaccgtcgtgttgacacaaaatcatatacttctctgcatgctctcgtgaatcggaatgtttcccccctactagctcttctgagcaggaggactttaactcatggaatttctggaaactaccccctcctgccatggatatttgaaagggtcccatgaatttttgggctcaattatgcggtatggatgggcggaggctgtcctgcttcaaaaattttatgggttatatgtatctgagcccaatgagaaccacctgattctgttgatgacatgcactgtgaattgattaatcggaatgcatagcaatttgaaaatttggtggatgggattcgtatgaaagagcaagatggaacttcttccctgtttgacgctgcgagatcaaatccatttttgtcgttggttagttttaatgttaacccgtgaccaccaaagtcatgaaatcacacacacatttgatatcatttcttgattatagatagattagtacacagcgaagtccttttcatttgattgcaaacttgtatatgtatgtaattatgtacttgagtgatgcctcttcagttttattattctaccatatagaaaagcttatacttgttttcattcgttcttattttacaataattataaatgaacaccttaatcac

SEQ ID NO: 112491 - DNA, 733 bp, Glycine max
  Clone ID: PAT_MRT3847_72588C.1
aattcggctcgaggcttgtttcaattcaagagaagataaaatgggctgatgcaatgagtgaaattgacaagaagcacaggaaggatgtggaagagaaggtagaagaagtaaagaagtccattttcaagaagttacacactgtaagcaggccgacatcgacttcagagggcatgaggagatctgctctgaatctggtggagtgatggattatgaagaagatcgaagccgaccaaagaggaggcggcatccaatttcttgaagatttagtagataagggagctcattggagatgggttctttagttgcttgcctgacttttattcatggcatgcgtcaacagaggatatcagcttttgcagacagacaagtatatctcatcgatattacccttgtctgtcacaccccaaagcgagataggaacaggggaaaaaaaaaggggggggggggggggggggctgttaatttaggaatttgatagtgtttcttgaaccattattaatcgtctactgagttggcaagaacaagctgagatggtggtgcggctatttattttgggttgctgaatatactgttttgttttgtattatgctatatatgtgctgcctcaatttcattgctatactttgtattccaaaaattatgttagatatgtatttcaaggaaaaatattgtcaccgcagttcccgacatgaaaaattcaaatttaatttttgaatgtgaaacaattgtgccc

SEQ ID NO: 112492 - DNA, 273 bp, Glycine max
  unsure (1)..(273): unsure at all n locations
  Clone ID: PAT_MRT3847_72589C.1
cctagattcagccacagttggaaaaaaaaaaaaagttgttcgagatggcacgtacgaagcaaactgcnccgtaagtccacaggnggaaaggcncctaggaagcagntcgcaaccaaggctgcacgtaagtctgcaccaactactggtgtgtgaagaagccanatcgttatcgtcctggacaccgttgctcttcgngagattaggaantaccagaagagtaccgagcttttgatcaggaagctcccttccagaggctggttcgngaattncnca

SEQ ID NO: 112493 - DNA, 604 bp, Glycine max
  unsure (1)..(604): unsure at all n locations
  Clone ID: PAT_MRT3847_7258C.1
ccacgcgtccgggagaaccttcttcttttaggttaaatatcttttgaatagttgtctttttgacccaagaaaacaaaaattagagagagnccttttttaccaagttgaaaaaaaagttattaatgctaattatgcactttcaatttaaactacagtttcagcataagggttgaatgtgtcagtggtttgtgcacatttcaagaccaaagagcgtttaagtgagggagcttgctctagattttactaaaatccattatttggccttcttaagtacattattcttactttaaatgtgtcaaactaacatagttttaccatcaacttttccatttagacagtatcaattaacatttttttacttacaaatacataatttttgttcatatttctatttatattaatctatcaattttttccacctttgtttttggattgtcaccatgattgaacaaatactatgattaaatgtgacgcaagccattatttctattcttatttttagggtttgtatttaattaaaaaactcttttttctgattccatagtttttttacagtnnctccattcctgtgcantactatttgaaagctgattttgtgttaaca

SEQ ID NO: 112494 - DNA, 288 bp, Glycine max
  Clone ID: PAT_MRT3847_72590C.1
ccacgcgtccgggaaaactcgtaaagcgaaaggctccttcaagctcccacctacccgaccttctagcatcttcttcttcttagacggtgaagaagaagaatgccgcacctgctaagccccaacccagagcccaagcctaaggctaagcccaagcccgctgctaaagccaaggacgctaaggcgactaatgacaaggcaccagctaaaaccaaggcatctgcttaggctacagccgatgacccaaccgggcccgacgccgctcctgaacctatggctggtggtggtggt

SEQ ID NO: 112495 - DNA, 250 bp, Glycine max
  Clone ID: PAT_MRT3847_72591C.1
caccgtcacttctgcggccgttgctattccctcattcactggcctcaaggctacctcaggcaaagtgagtgccgcaaataatatcccatttccccaattcacaatgatgggcatcaaggcttcgcacaaagactttacagtctctgttgtggcccctgcctccagagcattgatggctaaccacgccctggccattgacctattctcccgtggcgctgaaatgtatttggttttccctctcacaaaattc

SEQ ID NO: 112496 - DNA, 689 bp, Glycine max
  unsure (1)..(689): unsure at all n locations
  Clone ID: PAT_MRT3847_72592C.1
gatgagtggaaggcacatgattttgaactttggacaacctccctttgacatccaccaaccaaatttggtatacaccggctctgatgattgtaaattcagttgctgggatttgcgagataaacctccccaatgtggtatttcagagctctaaagtccacaaaatgggtgtttgttgcattgagaagagtccacatgacccaaataccttgttaactggcagctatgatgaatacctaagggtatgggatttaagatcaatgtcaaaaccccttaataagacttcaattaacttggggggaggagtttggagggttaagcaccaccccttcattccaggtttggttttggctgcttgtatgcacaatggttttgctattgtcgccattaaaggcaacaatgctgaagtgtcggaaacttacaagaagcatgattctcttgcctatggagcagactggcagaaacgagaagcaaatcacataggtgggaataccaaacctctagtggctacttgctcattctatgacaaacttgttcgggtgtggaggccaggaaatgatattgtcttgtagaatgtagattgatgcttaacgttatctagcccacttggaaatgtgatacatagttgtttccttgaatcccggttgaattatatccctctttaatttccagattgaaaaantntatannag

SEQ ID NO: 112497 - DNA, 339 bp, Glycine max
  Clone ID: PAT_MRT3847_72593C.1
ggaccggccggaaacccgggcgacccacgcgccatagtacgcgggacgcgcaacgaggacgggcaggaccaaggaggagaccggagacccggaccggggacacgccaacggccaacggggcaagaaggccaaggaggcgaaggagggccaacgaggagctgaaagacaagaaaagcaaacagacaagggaacagcacaaagaaagggaaagatccgcggcgacacaactgcaaaagcggcaaaagcatacaccgacccagaacaaggaccacacacaccaccaccggccccaaggacaccaacgcaaagcaccaacaatgggagggacgcacggaccac

SEQ ID NO: 112498 - DNA, 486 bp, Glycine max
  Clone ID: PAT_MRT3847_72594C.1
aattcggctcgagaaatcattcgttgtagttgattcagcgtgaagttgtagatttgggaattaagctataggcactgcagctaaagtggctggctacgtgttcttgaccatataaattaactacagagcttttgcgcctcttattcatccaagtatactttctctacttcatattttgtccaagctaattctttagcttttttttatggttaatgattattgcaaagttggctttttcttttttgataattgagtctgattgattgattttttctgcttatgatcgggaccttattgagagaaaaaggatagttattttttttattagtcaatattaggtattagtttggtaggttcttttggtgtgaaggatttgaatccactggtgatcatttaaacatattcaactggagtagaatttgaaagagccttggtgatctctttaaccctagagatcgaacatattcagccggagtagaattttga

SEQ ID NO: 112499 - DNA, 221 bp, Glycine max
  Clone ID: PAT_MRT3847_72595C.1
ataatgttcaacaacttatggaattgagcaattcatggaatcttagtgcatatagcatgaaggaacgaatctaagtggattttagtgttatgatagatagcagctcggcaggaacgcaggagaaacttgtagctgatgtctaatatattataggtgactgctgaagacaacgtgagttctatagtcactacttcattataactcgtgctataatctggaaa

SEQ ID NO: 112500 - DNA, 1055 bp, Glycine max
  Clone ID: PAT_MRT3847_72596C.1
accataatttttcattctctgcttttctctatcgtctcacctaggcctgtattcctttactatatcaatttttatgagcaagtcaaagcaccaataaaatttgcaataatcaatcttttcatcaccattttggcaaatatcaattcaaccattataccacagttactaataaatttccaaacacaataaattagaaagaaattctcattacaccctccttgttcattgtcatctacattgaattgaagctccaccaacctcttctgccacctttgttttcagtttccaaactctcatggggatattaattgttctgcttattttacttatcattcatatacacgggaatggtcatcacaaagaggcaagaggaaatattaatccaaagaggggctgtgatttgtttcaaggtaactgggttgttgatgattcataccctctttataatacctcagaatgtccctttattctcaaggaatttgattgccaaaagaatggtcgtcctgataaactctatgtcaagtacagatggcaacctaaagactgcaacttaccaagattcaatggtgaagacttcttaagaagacttagagggaagaatatcttgtttgtgggggactccttgagtttgaaccaatggcaatcactcacttgcatgcttcacacggctgtgccacttgccaaatacacctcagtcaggactggaggtctatccaccttcattttcccgttctctgtcaaatatcacatgattcatagtatgcatgccacataatatgcagagctatgatgtcaaggtgatgttttcccgtaacgcatttttggtggatattgcaagtgaaagtatcggtagagtcctgaaattagattcaattgaagctggaaaaatatggaaaggaaatcacatactgatattcgactcttggcattggtggcttcacataggaagaaaacaaccatgggatttcattcaagaaggaaatcgtacattcaaggacatgaatcgtttggttgcatacgagaaaggcttgaaaacatgggccaaatgggttgaa

SEQ ID NO: 112501 - DNA, 495 bp, Glycine max
  Clone ID: PAT_MRT3847_72597C.1
ggctcgagctcgagccgaatcggctcgaggttactgccagtaactggaggtcaataatcaggctttgcacttgagattatgtgcaaaaggtgtttgtcatgagtcatgactcatgactactttcttttcttacaggttgaggtggatgtaatgaactcaatttaactaaaggtattattgccagaaagatgaacctggatttgttgatgaggatttgtttcttttcatttgatctaatgtggctggatcatactgtataataagtagcaatttttttgctacaataaatgactttttttttttccttggcaggaatctatggcatctaagtggaggatggtgtacaaccctgccatctgtggcctacctgtcctcatggtcttggtgggggaagtaatggtaatggcatctgaatggacttctagagtaacgattttatttatactattttcatattatttttaatgtcaacccagaaaagttgtctagcctcat

SEQ ID NO: 112502 - DNA, 333 bp, Glycine max
  unsure (1)..(333): unsure at all n locations
  Clone ID: PAT_MRT3847_72598C.1
cacggaggaacttttttaattgttaacccccacgaaaaccccnaacgattgcgatggacgcttgatgcgccgaaaccctaaccttaaccgggatatcacgtgggctgggatagaacaggcatcggagggaggcgatcgacaggaaaacaggtagaagtagactagcgaagaagaacgacgtctgctgctgagagcggaagcaagagacctatcttcgaaagagcgtgcgccttcaacgccactctccaagaggcaccggagagactccacgccgatgcgagcccctcctaccaggaccggagaccaactccggcctctcttgccccacatgga

SEQ ID NO: 112503 - DNA, 295 bp, Glycine max
  unsure (1)..(295): unsure at all n locations
  Clone ID: PAT_MRT3847_72599C.1
gtctttnnnnncttttgatatttttctttnagaaaaggaccagcgaagtccattcctaataaaataagtgtttaattaacctacgcaaagagtgacattaaggaaaagaccttacttggcgcaacaacatgagtctcggtaacacaagatccgcaacaacttgacagctaaggctgcctcctaatgtctcaagtaccccctattggctaactcttcctaggactagaatatttcaacatggcatagctgactctaaaggggaaatgcaacatttatgcacaaattccatataaca

SEQ ID NO: 112504 - DNA, 1274 bp, Glycine max
  unsure (1)..(1274): unsure at all n locations
  Clone ID: PAT_MRT3847_7259C.1
tttaccttgatagtactccttctttcatatacagaggatgaaaagcatttcagatgtatacattaccattaaaggatgtcctcaatgaaaaattcgtctttcaagtcctaattagtgaatgtcaaccttgaagaagttatttctgctcctctgcacacataaatttgttgctgatgctgatttacaaatgttgtaatgcagaatatcccttatcagttttcgatggcacatcttcccaattgcaagataaagattattcttcataatttgaaaggagaacattggactgttaattccgtgccaacaactagagtgcatactagtcacactctttgtggaggatggatggcctttgttcgtggtaataacataaaggttggagatatctgcatttttgagcttgtgcatgagtgtgaattacgtgttcgcattgctgaggttgcaaaagatgggtctgactgccaggttggaaacctagccattactaggcctagtgcaggacatgctgtaacttccagatgtatgccaatgaatcctaaagtcaactcaaaatgcataagaaaagttgatctatcggataagaagtggtcaaagattggtcaagaaactattttatccattgacttaaagaaatctagtagagcttcaaatacttctaagaagatggggctttgccctcagtcgaaagctgcccataaaaagttgggtaaggtttttcgctacttgctcaataggtgacacactaaaattataattctatgtcagatgtatatgtcttaagattttgcaacaaagttagatgaaattctttctaattaagaaaaaggaaaagtgtataataggaattgtattattttccgtggatcatacactttgaaaatcccataccagttctcagctgcacatctcccaacttacaaaactgccggtacacttcgtaattcaagaggtgaatgctggactgtgaactcggttccagatgcaaaaggtagaacagttcacaccttttgtggagggtggatggcctttgttcgtgataatgacatcaattttggagacacatgcatttttgaactcgttgctcaatgtgagatgcacgtttacatatctggggttggaaaggaagggcttgatcatcaaaatgggcatttaaaacttactaatagattagctaacgttccatctacctgctaacgttcttgtttgtgagaatcaatcttccatgaagntgtttgttttgagagtggcaaaagatcttttgcattttatgtaca

SEQ ID NO: 112505 - DNA, 1005 bp, Glycine max
  Clone ID: PAT_MRT3847_725C.1
tcgctcagctttaaacactactcttcatagggtcaaagagtgagagtgtgagtgtgtgtgtttctgttctatatctgcaaccttcccagtgttgttgttttgaaggaagtttgcctatttgttcatggagaggaagagaaccacccctactagtatctccttctttttcttgctctcaatttgcacactcatcttcttcagtagaactactagtgcctctgccattccatgtttagataccaggtgtcccatgtttgccaaagctggcagagattttcaaaatcttttttcaatcatgttcaggcaatttggctgctggttcatggtgtgattgagaacccctcatatttgtaggatagttgaattcttgctcgcaatttgtcttctcatcctcattccttcaactactgctgaccctgacattccaggctgacataagagtgggtcccgctatggatgtgctgtttgtgttctgtttactcgcaagcatagaaatgcaggtgctcaagcaggaagatggacaagggatggtgcttggatgggctatagagggcgaattattggtgtgggctaggagccgtcgccgcgggcctggtgcattgacacaccggcgcacgttagaatgaggcaggaggaaacctagctgtcgtgtttgcgggccggtgccgccgccggtgccgccggcggcgccggtctcccccggttttgttttctcacagccacacgagtctcggtaacgtgcgcgtacagtagtacaatgctctcagcgcagcgctttcaccgcaaaaacacagttacagtttctattatcatggtcatgatggtgcatgttagcctagtcttgtacaatacatatattgctgacttggatgttgccccacattatcacaaccaaaaccatactagaaaacattcttcaacttcaataatatatattaacatagtatgggatagttgacagataagtatgttttttaattgggcgatcaagagattcaatttcag

SEQ ID NO: 112506 - DNA, 282 bp, Glycine max
  Clone ID: PAT_MRT3847_72600C.1
gcatgacaaatcatcgtacacaataccaggggctaaagagattcatcgccagttgacaaccaataacaactggcgctcatatgggcttgatcgggggattaaaagttctaggctgtagcgcacaatgcctgcgtgcattatacaagaagactgatgggaatgactgggctacacagcgaacactattagcttttgcatttagcgagcagagcttaagacagaatgctatcgaccttatcgggggcggaaactgatgatatagaactggaaagatgatcacac

SEQ ID NO: 112507 - DNA, 411 bp, Glycine max
  Clone ID: PAT_MRT3847_72601C.1
ttgggggggggggggggggggggggggggggggggggggtggagggggggggggagcgagccacaatagcgcccccaaaatatatccacagacgtcacgataaatttttaactccccattaaacccgggaatagtaaatatattggtaagctctctaagcccggaaaaatcccccaggtgtaaagctggtaaatttgtttggtttgttacccaattaagaccctgggcaaaattccggggatagatggccaatttttaggccgaagtctccccacagctttaataaatgtcccttcaaggttcccatgatcggttcttggagcctaactgaggccttgggtgctcacgcctttaataggaccaattgcccttgcccaggctaatgctgccaagcccaaaatatgccccggt

SEQ ID NO: 112508 - DNA, 214 bp, Glycine max
  Clone ID: PAT_MRT3847_72602C.1
ctaccaaaacattcacaattgcggggttggagataaatgcaatggctacaagcatatccaccctcacccgtcggtacattgaaccttaaaactgtacaccagatggagaaataaaaaggaacgaaccccattatcggaaatttatactttattcagccgaaaagaacaattcgtgaaaatatattttaatggggtggtattgatacatgctctg

SEQ ID NO: 112509 - DNA, 668 bp, Glycine max
  Clone ID: PAT_MRT3847_72603C.1
attcccttatggtgggaaaccggtggaggagcttatggaaaagccattgagttgggtggcggagaaagttcatgagtttttggagattggtctgacagaagagcattttttgggacttgttgattgggttgaggtacatcgaccagctcctggtttgtctaggatttattgtgggcatggcaaggaagaaggaccaagttttgtggtttcttctggtcaaaggtttccggagtcaaaggttgattttgggtgggggaagcccgtgtttgcatcgtaccattttccttggggtggagattctggctatgtcatgccaatgccttcttctactgggaatggtgattggttggtctacatgcaccttctcgaggctcatttgaatttcatggaggttagggctcctcaaattttttggccattctctcgggattatcatttcaatcgtcattgactttgcttgtttatttgtgttgttcttcatcggtcatgcaacttgttgatttgtattacgggaaatcatttctagtgtgaattttatgcatacaaatagtatgaagtggtgtgacgctagctagtatttatttttgcatgtatttgtggaattgtggccattgcagtatatgtatctattctatcatccaataattaattccaaattcatttttgtc

SEQ ID NO: 112510 - DNA, 208 bp, Glycine max
  Clone ID: PAT_MRT3847_72604C.1
ccacgcgtccgcgtaagtgtgtgaaaaaaataatctttgtggatgagcagacttctgggggggaaaaaagtgcaaccacaagaacgaaagaaggtaatattaatcgttgtcgtggttcaagataaacagaaactgctgggacaaattagagagatgccgccgtattcagggtggggggaagagtttgaccttttatggacagggactt

SEQ ID NO: 112511 - DNA, 140 bp, Glycine max
  unsure (1)..(140): unsure at all n locations
  Clone ID: PAT_MRT3847_72605C.1
atcagagggagaaggtcagacagtagcgttttttggtgttnncgaaggtcacggaggnnnccggactggngcntatccgaaaaacaacccgcataagactttgagtaggccccccaacgacatcaaagacacaaagacag

SEQ ID NO: 112512 - DNA, 1401 bp, Glycine max
  Clone ID: PAT_MRT3847_72606C.1
ccacgccgtccgcacacacgcaccggcagcacccgccgccggtggaacccattaacaaacaccacaagaaacttatcattcccttgttcttctccttcctcctcatcttctcttacccattttccatctaatcggctcgagaaaaattcgaatacccaattgggaaaaagcaaacaactttgctaacactcggtgaaaaaaaaaaacgcattccgccttcagtccttcgtttcgcattgagctctgtttcttttccagatgaaacggcgatgaagtagctgtcgtttttcgaatcagaacgccaccgcagaatgctgtgcaggaggagctccaaaaacggcgtcggctcgggatcggtgccggtgcacctcaacgtctacgatctgacacccatcaacggttacgcttactggttcggcctcggagtgtaccattctggcgtgcaagttcatgacgttgagtttgcgttcggggctcacgagtatccttcgacggggatattcgaaggggaaccgaagaggtgcgaaggtttcgcgttcaggaaaacgattctgatcggaaaaactgatatgggaccctgtgaggttagggcagtgatggaagaacttgctgctgagtacagagggaatgcttacaatctcatcacaaagaattgcaaccatttctgcaacgatgcttgtcttagactcaccggaaatcctattccaagttgggtcaatcgtcttgctcgaattggatttatgtgcaattgtgttcttcccgtgacatagaactcaacaaaagttaggcatcccaagatagaagacaaataatgtgaagaagagaagcaagcattagagagtgagacaaagaagcttaattattcaaattcatcttcccctatcagacttggtaggggaaggagttgaactcgacttaccctccctccagattcacttttgtttaattcctcctcctatcctcttcgttagcccaagactaatttatttaattttctttcctttgttctcattcgaccaattacttaacttcttctaacgaagaaacgccaatgattggatttttaatttttgttgagttcagtttctcgccgccgtgcgccgccgcggcgtgctgtgccgcgtgcgcgccctcaacgacgtccgcgcgggaccggggccggtgcgcctcgacgtccccgagtggtcccccggcttcgcgttcgcgtattcgttccgcctcggagtgtcccattccggcccccgtgtgctcggcgcggtgttgcgcgttcgtgcgcccaacgactgacgcgttgctcgcaggctcatcccaaaggatggcccccagtgctgcgacggtgccgcgctcaggctcaccggtctgtccggtccaaccgagtcgagccccttgctccgattgggt

SEQ ID NO: 112513 - DNA, 582 bp, Glycine max
  unsure (1)..(582): unsure at all n locations
  Clone ID: PAT_MRT3847_72607C.1
ggctcgagatttgaaattccattttgtttatcattgaaatacattgcacattcatattcgattgctttctcctttcagaatcattgtattttattttgattatatccaactgattgtcaatttgtattgtctaactgatatattattgaataatagttgtgtccatgctttctttcacaccatttgaatagggaaatcaatattgtgttgtgctctatttctccatttgaataaacttttaggaacttgactataccttgccaagcacaagaaaatggttgatcatggaggtgtgccagtagaagttggtggtgaggcgggctatgcagtacgtaatgctcgaaaaaccgagttggttgaagctccttggaaagaagccccaaccatggctcatctatttgagcaatcctgtgacaaatatagccacaatccatttcttggaacaagaaagctaatacgaaaagagtttgttacatcaagtgatggcaggaagtttgagaaacttcatttangaaactatgaatgggaaacctatggagaggtattttctcgtgtgtcaaattttgcatctggtcttcttaa

SEQ ID NO: 112514 - DNA, 313 bp, Glycine max
  unsure (1)..(313): unsure at all n locations
  Clone ID: PAT_MRT3847_72608C.1
agcgccctccaancattaaatttccaacatttttcatttccatctttactttaagtcgncaatcaattcccaatagtccctttcttacacaattaggtctggcctcatnattccaaaaccttatactattaccaaatctanataaatcttctctcactaatatcacaacaaatttttccaacctttttatctatttaacaaatatttacaaaaaattctatatttttcttatccaaaatatttattcacattttattttattcccattaattcttcctttatatttcaaaacatctttacattatctacattt

SEQ ID NO: 112515 - DNA, 899 bp, Glycine max
  Clone ID: PAT_MRT3847_72609C.1
gtttttggatgcttttcaatgctgctttgaaggtgttttgatttcattgtggtttttaagagcaaattttaggattcagttgagttctatttgcaaagatcttgtcaaaacacatcttgatatcctggatttgtatgaatattatttacatttttcattagcttggcttcaaaaaaactcggaagcgcttttgtatatgttggaaccattcttggttgcacaatctaatgaccgtaatccttacaacattgatattgtgaatctgaagaagcttatcccaaaaattgggcagttgttggctcaaacttctttcatgtctaatatacaaaaccttcaactatccgaacgtgcagaagataaactagttgcagatataaagcattcaattcctgatgatgaaagatggaagattatagggacctgcttgtggcagcatatgtctagattcatgatatttaatttgaatctggttcttgccaaacttgaagatggtaaactgtcgggtcctttccacagaaaatatacttatggggagtcttatctcataaatatggattctgaaagcatcagcttgccagagaagattcgttttccagagtcccagagaaatgtacaagagaaatggagaacttttggaggcattgtgtataaactctaccaatcaacgggaagctgcagttgctggcaacaggaagggtataatgttctttcattgggaagatgagattccttttagtggtaaatcagatgatcttttgtgggccacagctgattggcctcagaatggatgggcaggttcagaatccacccctgctccaacatgtgtttctcctggtgttggccttgggagcaagaaaggggcacaccttgggctgggtggagcaactattgggtggact

SEQ ID NO: 112516 - DNA, 685 bp, Glycine max
  Clone ID: PAT_MRT3847_7260C.1
gtatcataattattgggagctagagaccctaagagaagaagacgatttagtgattgctgaaagtttagctaatgagctatctaaatggaattatgaggtgcatgtggttgataattttgaaaagataatggaagattttcgccgagtagaaccacaactcgtattattagatatcaatctaccaacacttaatggcttccattggtgccaagaaatgcgaaaagtatctcatgtgcctattatgtttattagttcaagaacagataatatggatcaaattctggctatccaaatgggtggcgatgattttatcgagaaaccatttaacttgtctttaacagtagctaaaattcaggcactattgcgtcgcacttatgatttatcaatagctcgtgatgaaatagctgttaaaggttgtaaactaattgttgatgaggccaagcttagcaaggataatgaacatgttcaactttccttaacagagctacagatattaaaattgttatttcaaaatgaaaataaatatgtaagtcgtacagctttaattgagaagtgttgggagtctgagaattttattgatgataatacgctcgcagtaaatatgacacgattacgaaaaaaattactttctatcggtgtcgatgatttaattgagacaaagaaaaatgtaggatacagggtttga

SEQ ID NO: 112517 - DNA, 255 bp, Glycine max
  unsure (1)..(255): unsure at all n locations
  Clone ID: PAT_MRT3847_72610C.1
acaaggaaaacaaaagagaggcccccaccaggcaggaaaaaacaagacagaacnaaaaagaaaaccacaagcnccaggcagagccagaacggcacaaagaacacccgaagagcgacgacggaaaaaaaacaaccctcaaaacaccatacggaaccactgagacaaggagcacacccttctgatggaacattcggccagagacacagccacgcggcacattggcagcaggaccaaagaccacaaagaggacccaga

SEQ ID NO: 112518 - DNA, 2052 bp, Glycine max
  Clone ID: PAT_MRT3847_72611C.1
ggtccggattcccgggtcgacccacgcgtccggaaagtacaagagaaatggagaacttttggaggcattgtgtataaactctactgatcaacgggaagctgcagttgctggcaataggaagggtataatgttctttcatctggaagatgagattccttttagtgctaaatcagatgatcttttgtgggctacagctgattggcctcagaatggatgggcaggttcagaatccacccctgctccaacatgtgtttctcctggtgttggccttgggagcaagaaaggggcacaccttgggctggatggagcaactattggcgtggactcttcagcttggcccagcaatgacttgacaggtggcaaagtattaggaaggctaggttatactggtattggtgcctctggattaggttgggaagttcaacaagattttgaagattttgtggatccacttgccactttggagaacataagtaccagggctttgtctagtcatcctatgagaccttttttcttggttggttctagcaatacacacatttacttgtgggagttcaacaaagacaaagctactgctacatatggagtgctgcctgctgccaatgtccctccaccttatgcccttgcatcaatttcagccttgcagtttgaccactttggacaccggtttgccagtgctgcattagatggaactgtctgcacgtggcagctggaggttggaggaaggagcaatgttcgtccaacagaatcatctctttgctttaacggtcatgcatcggacgtcacatatttttcctcaagtggatcgataatagctgtggctggatatagctctaatggtgttaatgtggtcatatgggatactttagctccacccactacttctcgagcttccattttatgtcatgaaggtggtgcacacaccgtgtctgtttttgataatcatgtgggaagtggttctgtatccccccttattgtgactggtggtaaaggtggtgatgttggacttcatgacttccgctatatagctactggaaaggctaaaaggcataagcgtgctgataacattgggcaaagctctgtctcatctttaactcgtgataaggatcaaaatgtagatgggatgctttggtacattccaaaggctcactcagggagtgtcacaaaagtagttaccatcccaaataccagcttgtttttaactggaagcacagatggagatgtcaaactctgggatgcccagagcacaaagttaatacatcactggtcaaagatacatgaaaaacacacctttctgcagccaagttctcgtggatttggtggtgttgttcgggctgctgttacggatatacaagttgttccccatggttttctttcttgcggtggggatggaattgtaaagctggtacggctggacaatcacctgcgtgcccatggaattgagttatgatacttctgagatcctttgtgttgatgacaactctactatgctgcaaatgcttcacgacagtggtcatcatcggtcagaggttatcaaatctgcattattggcttcgtcaacagcttaatataagaaatgtgaacattgctgaagccaccatccattttgaaaaaggattcttcattggtatgttcagatatccaaaacaactgcaacttgggcaagccatacatcccggaacataaacatctcatgctagtgaacctcattgcttctttgaacagattggatgggttcattttgattcgagtcagtctttctgcatggaacaaaactttagtcagtggccgggctataattgtattaagttatgaatacctctcgaggttggcaacatttttgagacaaaacttgtctttgttcttggtgtacattacctgtttgaatttgttgaggcatgtgagtatagtgtatacacacggcaaaaacttagattctctagtgagttttgtttacatttgtagtcatactttgcagcatgtatatattaagaaatagtgtcggtgattttaattagaacttgagaaaagttataatatactactgttcat

SEQ ID NO: 112519 - DNA, 430 bp, Glycine max
  Clone ID: PAT_MRT3847_72612C.1
gaacattgcttccataatatagaagaaatcaattcaattttcctcatatatttctactctttttgattggcaactattattgtgcacaaatcccatttccatttctttgatttttgcttgtgatcatctccaaacagaacttccaaacaaataaagaataatcgccacaaggatcattctttcccatttacaacttgaagtaccaaatgtagaatgatccacgagaacgaaaaaagatctattgtattaatatttgaaatagtttcaactttcaaggataaaataacttggcctcgagccgcaaaactttagtcagtggccgggctataattgtatcaagttatgaaatacctctcgaggctggcaacatttttgagagaaaactagtctttgttcttggtagaaagaatgactcgaatcaaaatgaacc

SEQ ID NO: 112520 - DNA, 1244 bp, Glycine max
  Clone ID: PAT_MRT3847_72613C.1
gagttgcaccggtccccagttacgggaaaataaaaaattgttcttgtttgtccatttagccatgaagaagttgtctttctccatccccaccgcaaaaccccaatcggtggacacttccaccacccgaaaggacgacgacagcgacggaaccaaacagtacatcaccgaattcgacccttccaaacccgcaaaccccaaaatcacaatccccccaatccaaaaccagtggaacccccaacaagacaacgaacacagcaccacgcggtggcgccgcactccggaggagaccgagctgctgcgtaagctgaaactggaggaagatctgcagaggttgccggaggaccaggggttggaggagttcaaggatgtccccgtcgaggttttcggcgaggcgttgctcgctgggtatggctggacggaagggatggggattgggaagaaggccaaagaggacgtgaaggtggtacaggtcaaggggagaacctcaagggaaggattagggttcgttgccaatgcttctggcaacaatttgaatcactgcgaccatcatttatgtaatttgcagttctagtattcacaccttagtggtgggttctctagtaatagagatatgccgtacagaatcaagggtctattggttacaatagtattattctctctttctctaatcatagctctccaagttctcttttctttgggtcaatccctatggaagcttgattcctaagatctagtacgttgaatccatgctctgattctgtttcttttaatttaatatttgttgtttccaaatgctgtctccatcggcattatgaattggtgattctatgttgatgttgtgggtgtgtggttcgtattgtttacagaaggctgtgcgttgccagtagtgtatgaggatcgttattgttatggtggcaatgttttatacatgtttttggcatgcagtgggtaaataaagtgttgggttgtgatgataactgatagtttcagattgtttttcttgtgctttcaaatttgaactatgaaatggagaagaacacataatggattttgttgctaggagttgagcaaaccccattaatcatctttgattccatcattatcttaaaacaagtaacttggttaagctatgtaagggattggtagtttagctatgggacttgggctcttcttgtaaggaattagaaaatgagcattttaatgagttggtaataacaaagaaatgacgaacaaatattgataaa

SEQ ID NO: 112521 - DNA, 3677 bp, Glycine max
  unsure (1)..(3677): unsure at all n locations
  Clone ID: PAT_MRT3847_72614C.1
gtccaagcttcatgcacaattgcacatgcagttcttgtcactaaagaggagggtgtcattggaaccaatggtttgttatatttggttcttttgaatatgacacccttcttcaataatttgagtttaaaacttgagatctatcagcctatgtattatttgattattttgcaagaggttataggttcaaatcttgtgtcattattgtaacaccctctcccaaaacaaaaagatattttgtatatagtatctggattagtgctgntaattaattgcatgtgtgtttttgaacatttcttccataatatagaagaaatcaattcaatttttctcatatatttctactctttttgattggcaactattattcacaaatcccatttccatttctttgatttttgcttatcatctccaaacagaacttcacaaataaagaataatcgcggatcattctttcccatttacaacttgaagtaccaaatggaatgatcgagaaaaagatctatatgatagtttcaactttcaagtaaataacttgtccgcccacgcgtccgcccacgcgtgcggcaaattttaggattcagttgagttctatttgcaaagatcttgtcaaaacacatcttgatatcctggatttgtatgaatattatttacatttttcattagcttggcttcaaaaaaactcggaagcgcttttgtatatgttggaaccattcttggttgcacaatctaatgaccgtaatccttacaacattgatattgtgaatctgaagaagcttatcccaaaaattgggcagttgttggctcaaacttctttcatgtctaatatacaaaaccttcaactatccgaacgtgcagaagataaactagttgcagatataaagcattcaattcctgatgatgaaagatggaagattatagggacctgcttgtggcagcatatgtctagattcatgatatttaatttgaatctggttcttgccaaacttgaagatggtaaactgtcgggtcctttccacagaaaatatacttatggggagtcttatctcataaatatggattctgaaagcatcagcttgccagagaagattcggttagtcttgtttagcctatgtgatctactgatgacaacagttactcacatttcttcttatcatgttaaacaacaagcagaatttctgtggcagaaagtagggaatgatttgaatgtaatgactcttcaatggttaaaacaaaaatcagaattcagccagaaccaaaacctggacattttggaactggggaacatgaaagataactattcagttaatcagttattatgggatcgctgtgcggatcccaaattgatatctgattgctttgcacaggaaaaactcaattggccaaatgatttggatcagatgaatactaaaggatggaatgatttgtctataattatgacaggactgcataaaactgatgatacatgtggtgatggatgtaaacttagcactagatcttctaatcatgaagttggaactcctgttaaaggaacatctctaagtggcaatgcttctgcaagatcaaaccagaaagatataacttatacaaattttgcagttttccagagtcccagagaaatgtacaagagaaatggagaacttttggaggcattgtgtataaacttagttaccctaccgagaagctgcagtttgttaacaggaagcacgggtagagatgtcatttcattggatggacgaagattccttttagtagaaaattagatgatcttttgtgagccacagctgattggccacagaatggatggggagtttcataatgctcctctgcttccaaatgtgtatctcctggttttggcctagggagcaagaaaatggcacaccttgggatgggtagagcaactattggtgtgaactcttctgcttggcccaggaatgacttgacagttggtggagtattagtagtgctagtgtatacttggattgggctgcctgtactaggttacaaaattcaacaagagtttgaagtttttgcggtttgaattgctactttcatcaacaaaagtaccagggctttgtacagtcctcctgtgagaacttttttttcaattgggattattaatacacatgtttacttgtcgaagttccacaaagattaggctagtgctacatatcgagtacagaataataacaatgtactaaaaccttttgcccctgcttaatattaggcctggcagcattaccactttggacatccgttttccagtgctgcattagatggaaatgtccggacgtggaagctgaaggttggatgaaggagcaatgtacgtccgacaaaatcatttctatgctataagggtcttgtatcggacttcaccaatttttcctcatttgtattgattatagctatggtttgttcatgcaccaaaagtttagtcagtgtccggtctattattgtagttactcatgaaaatttttcgaggttggctttatttttgagacaaaacttgactgtgtttttgttttacaatacttggttaaattgtttgatgtatgtgagtattgtgaatagtggtaaaagaagtgatgttggacttcatgacttccgctatatagctactggaaaggctaaaaggcataagcgtgctgataacattgggcaaagctctgtctcatctttaactcgtgataaggatcaaaatgtagatgggatgctttggtacattccaaaggctcactcagggagtgtcacaaaagtagttaccatcccaaataccagcttgtttttaactggaagcacagatggagatgtcaaactctgggatgcccagagcacaaagttaatacatcactggtcaaagatacatgaaaaacacacctttctgcagccaagttctcgtggatttggtggtgttgttcgggctgctgttacggatatacaagttgttccccatggttttctttcttgcggtggggatggaattgtaaagctggtacggctggacaatcacctgcgtgcccatggaattgagttatgatacttctgagatcctttgtgttgatgacaactctactatgctgcaaatgcttcacgacagtggtcatcatcggtcagaggttatcaaatctgcattattggcttcgtcaacagcttaatataagaaatgtgaacattgctgaagccaccatccattttgaaaaaggattcttcattggtatgttcagatatccaaaacaactgcaacttgggcaagccatacatcccggaacataaacatctcatgctagtgaacctcattgcttctttgaacagattggatgggttcattttgattcgagtcagtctttctgcatggaacaaaactttagtcagtggccgggctataattgtattaagttatgaatacctctcgaggttggcaacatttttgagacaaaacttgtctttgttcttggtgtacattacctgtttgaatttgttgaggcatgtgagtatagtgtatacacacggcaaaaacttagattctctagtgagttttgtttacatttgtagtcatactttgcagcatgtatatattaagaaatagtgtcggtgattttaattagaacttgagaaaagttataatatactactgttcataacttcttgggaatcaaaagcttgaaaccttttccaagtgc

SEQ ID NO: 112522 - DNA, 1130 bp, Glycine max
  unsure (1)..(1130): unsure at all n locations
  Clone ID: PAT_MRT3847_72615C.1
gatttaactcatgattgttgtgttgagtctttacctagtagcaattccatttcaagatcagctctgcaaactgaaaatgcatttgaaaagcaaaagggtgataactctttcagattatgcgaagaatacaatggatgccagagtggagcaattgaaaagtgtgagcaacagtccccatatactcacagcagaagtgaatcattttcaagttcaatttctagtactgattgtgcgcatgcagtttcaaaagaggtgtcagggatatccaataagcttcaaaatgtgaaggtactgtctggagaaatcacaaaggtgtgtcctccttctcctggtaacaaacaatcagggatctctccgtggttatctggaacgcaatttcaaagccctggatcaaatgtgggagtgttggagaatggaaataataataatagtcattcaagatttgattcccatcctgttttcaactccgggtcggatgaattaaccacctcatctcatgttattagattgattgaagaccttcacagccaatcaattgaaacgcaaactgctgctgcagaagaattgaggctccttacaaagcataacaaggaaaaccgtatcattgttgggcagtatggggctgttgcacctttgctttcactgttatattcagacttgcaggtaacacaagagcatgctgttacagctctgctgaatttatcaattaatgaagacaacaaggccttgatcatggaagcaggagccatagaaccacttatccatgttttaagtacaggaaatgatagtgccaaggagaattctgcagcaactatattcagcctctcaataattgagaacaataaagcaagaattggccgttctggagcagttaaagctttggtggatcttcttgcctcangaactcttagaggaaagaaggatgctgctactgctctatttaacctgtcaatatttcatgagaataaagctcgtatagttcaagctggagcggtgaaagttctggtttggttaatggaccatgctgaangaatggttgacaagggctgttgctcttctgtcaaacctgtcaacaattnncagaggccgattagaaattgcaagggaaaggggcatccccttactagttg

SEQ ID NO: 112523 - DNA, 404 bp, Glycine max
  Clone ID: PAT_MRT3847_72616C.1
aataaattaagcccatgtgattttgttaaaaaaaaaaaaaaaaaaaaaaaaaaaaaaaaaaaaaaaaaaaaaaaaagaagaaaaaaaaaaaaagaaaatcacataaacagggataaaaacgaaatacgttttcaaataacgcaaattatattattttgaatgcatcaaaaatttaaaaaaatggcaaatgggagaaccttttagaaaccgaaattaattggctaggagaaaatcaacttttatccaactgaagtaatattaaaaaggtccttaccgatcggcattaccaacagttatgcaggataaaaaggtgaatggaactcattactgtagatggacattaaccccgtcgtgtgaggtggatacgcaaagaaagagcggtacaattgaaagggcactaaaga

SEQ ID NO: 112524 - DNA, 193 bp, Glycine max
  Clone ID: PAT_MRT3847_72617C.1
ttagctcagtctgggggctgagtctctacacacaccctcagaagaacagaccagaaccaccacataaacattgcttttcaaaggcggatagagcaacggcgttcttaaataaaattggaaatctgctcaagaatgctgctgccacgcacatcattcaggatttttctggcggtagcggcctccactttttcca

SEQ ID NO: 112525 - DNA, 304 bp, Glycine max
  Clone ID: PAT_MRT3847_72618C.1
cattacaacatgtatttagattcacatttgcgacgaagaccctacattgatacactttaacatattacctgatgagattttaaaataactccagaatgaatttttaattaagagcatgttacaaaaatatactcatacctatagtcagccaaaagccggaatgcacaacatagcctagctccaattatataacaggggacgtaatcaccccgaaaacattggcatttttatcagacgtcacaccccaaaaggccttgttaagagaaaggatggatgctttactcgggtacgagggagaaaagct

SEQ ID NO: 112526 - DNA, 169 bp, Glycine max
  unsure (1)..(169): unsure at all n locations
  Clone ID: PAT_MRT3847_72619C.1
catatctcttctatantntcaggtagggttttttcacttggcgtggggccacaacctcnttacttttaaaaccctttctttacccaacttaatcncctttcaacacatcccccttttcccaactttcttaatatctaaaaaaccctcacctatctcccttcccaacaat

SEQ ID NO: 112527 - DNA, 1116 bp, Glycine max
  Clone ID: PAT_MRT3847_7261C.1
cccattggtcggatattaatttgcggtggattgaagttaaaactttgaaccactttaggaagaaaagacattggcatttaatccgagttttgaacccctccctgtcccaggtaaatctgggttttgacaaactacttgaaattgatcaagggaatgaggatcgttggactgacgggtggaatagcgtctggaaagagcaccgtttccaatctgttcaagtcccatgatgttcccattgtagatgctgacgttgtcgctcgcgaggtgttaatgaaagggagtggtggttggaagaaagtcgttgcagcttttggggacgaaattcttcttgaaaatggagaagtcaatagacccaggcttggccaaattgtcttctccgatccggataagcgtcaatttctcaaccgattgctagctccttacatatcacgtgggatattttggaaggttttgaagctatggatgaagggatacaaggtcattgttcttgatgtgcctttgttattcgaggccaagatggacaagttcacaaagcccattattgttgtatgggttgatcctgagacgcagattcagcggctcttggcgagagacaaatccagtgaggaggatgctcggaataggattaatgctcaaatgtcactggatgttaaaaggggtaaagctgatatagttatagataacactcattcattggatgacttgaatcgactgttcgagccaggcagggagttttggccacacttgctttcttatagctcagggttttttctgtttatgaagacattcaacaatcatatccccatttcatagccccctgtgttctacacatttgttaatgtattatttacattccctctaaagccctaaacccatgagttcttttgtgtatctcttttcaaattccccaacaaatcctgctgttcaaagttgattaatttaaatttgaagaaacaacttcaagttttaaataaccatgatattatatttctttcgtcttgcttcctttcgttgtcgtggggtggttggttgcgataggtctgtggttgttggggccttctgggcttttgtgcgtgtgtgtttgaaagtttttatagatatcatgtctcagactag

SEQ ID NO: 112528 - DNA, 279 bp, Glycine max
  Clone ID: PAT_MRT3847_72620C.1
cccactcgtcctcccactcgtcctgtttttaatcaggcctgattttttatacggaagggtattttattaaaggggggcggattttattctgcgttttgtccctagtaatctctgctatagtacacaccttaattatcaatgtcttgtcttccaaaagtacctattttaactttgtcttgccacagacacacattcttatcatcatagtttaaatttacctacactattatcctcaactttctctatagcttctatttaaataattaactttatgatatc

SEQ ID NO: 112529 - DNA, 252 bp, Glycine max
  Clone ID: PAT_MRT3847_72621C.1
cccactcgtacaaacgacgcgggggatttaagcctgggacaaggggtccctcaagctagagctatacgctacaagaactctgacatgctagcgaaaacatacatcagcaacagagctgacgcccaccgaaaaggaaaaaggacctatagtgacgttgctacctatgaaaatagatctgcaaaggctcagactagtcatacaaaaacagccagtgatctccaagcagaggaagaccgtccaaaagcaattaac

SEQ ID NO: 112530 - DNA, 406 bp, Glycine max
  unsure (1)..(406): unsure at all n locations
  Clone ID: PAT_MRT3847_72622C.1
ttgaaacaccaacactttgacatttagacctgatcattgatgattacacgnngatgggcagcaaattgacttgcaatttaaacatcgtatcaatacttgcaaaccaaaataattaataacattaatatataattaatatttttgtacaataattataataatggttggtagtatcatttttttctgagaaccccaacaaaagagattggtctaatatactccttaaacatttattgatctaccaatctcgcataattgtgaaacaaacttttcaagatcccttcttcatagtggtgggagatctttgattcttgaatggccctaactgtcacaaaaacctgtgtgccataaatttcactacttttttgctaaatattactcttgagcatcttaaacatatctagcc

SEQ ID NO: 112531 - DNA, 181 bp, Glycine max
  Clone ID: PAT_MRT3847_72623C.1
tcccacgcgtgcggctgctagtggccaaggaggactgttatatgcttgattgttcccataacccgagcctctgaagattaaaaggtggccggaaactttcaattgactgtgcattcatgtcaggcatataagcatatatatgcactaatgctagctgaagcggggaaggtgtacaactcac

SEQ ID NO: 112532 - DNA, 259 bp, Glycine max
  Clone ID: PAT_MRT3847_72624C.1
tttttgacagggcaactaaataatattgagtgaagcacttaacacgttacattgaatgatcatggaccctgtcaacaaccactacaacttagggaatgaaatttagtctaaattgttagaactgacaccattaatcctactattccaaaaaccacaactgcttggcataactaataataaaagtgaaaatggcgtacaacttcaccctgtttaatggaccagccaaatgccaaatttggggatattatttctcaatttt

SEQ ID NO: 112533 - DNA, 650 bp, Glycine max
  Clone ID: PAT_MRT3847_72625C.1
aaggaatagaacgtgcgcgaagcaaacatggatcttctgtgcaacgcttattcgaatgcctcagacgacgaagaagaagaacaaccaaaacgacagagagtatccctctcttcccctaacccgctaaaacgacaccttcctttgtcttctcctccttcattcaacaaccaaacacaagctcccatgcccggaagatacatttccaaacgacagcgcgcattgatggccccacccctgcccctcttcctgaaccggttcctgttccgtctccgttcacgctatctgggagtatcttggatgctgatatacaccataatattttatcattgttgaaaagtaaagcaaagggtcatcaaagcccaaacctgatatctgaaaagctatctgcgactctatatgggcatacaaaagctgtcaatgctatacattggtcatcaactcatgctcacctccttgcatctgctgggatggatcatgcggcttgcatatggaatgtatggagcagaaatcagaagaaagcatgtgtgctaaacttccacaatgcagcagtcaaagatgtgaaatggtctcatcaagggcacttcctactttcttgtgggtatgattgcacgtctaggtttatttgattgttaaaagggattggagactca

SEQ ID NO: 112534 - DNA, 377 bp, Glycine max
  unsure (1)..(377): unsure at all n locations
  Clone ID: PAT_MRT3847_72626C.1
gtgttattcttttttttttttttttttcccggactaggagggaatattctaagcagagattcataatgcagattagccgacctttatacatttttgagcaatggcgaagcgttataagaaagcgcaggaggcggccgggagcgtccccgtcccgtgacgggtttaaaacacnggaactggctgttgggcaaaacaagaccacttttttctggggatgggggcccaccatttttctcagagngcccgaaaaccatcacggacttattacataagtttttagctacactttgatagctcatgataattcctaatgaagggctatctctgttagaagcttgctctccgaacacctagcttgaaagagctggggttgcagg

SEQ ID NO: 112535 - DNA, 260 bp, Glycine max
  unsure (1)..(260): unsure at all n locations
  Clone ID: PAT_MRT3847_72627C.1
gggcatgcaattgacgctatcatattgctaattgctttagctggtaatacaataatgctgtttttcaatgtaatggcgaaagtcaccaaggagtctaaagaaattttntnaaatttnncaatcctttccgnnnnnnnnnannnnattnaatnnngggagcccaataaatattattttttgcaaatattgtagnccttttgtacctaaagataattttaaccttcgtaaaaaaaatagttatgcaagttaaaacccttttt

SEQ ID NO: 112536 - DNA, 624 bp, Glycine max
  Clone ID: PAT_MRT3847_72628C.1
gcgtcatacgtttgtcttgagccatgaccatgttgagaaactcaagaaatgggttactattaaatgcaaaaaccatggtctagaaataccacacttaacaacatttgtggtaagatgttctttgatttgggtttgtaaggtgaaatctgaagaggctgaagttggtacaatacttcccaataatgatgagtcctacatcttggcctttatggcagattgtcgtaatcgtcccgaatgttcaattccattggaatattttggaaattgtttggtttgtggaaatgctgaagtcaagaggggcaagcttgttggagaaaatggtgttgtggaggcagcccttgctattggaagtgaaggtactctggtgccacccgcagcctctgctgggcccccctcactgaccccaatctttgctcatgtcgccacggtgggggtgctgtggtctggccttgctggcgccccgaggcgcgagctggttcgagctgacggtggggggggggcacccatggcgagtggtggtgttcttggacatttgcaacgtgaaacgtctcaaggggctgaaactttgatgtcaaatttaacagaattcgcccacatgacaatactcgcaggctcaccgaagct

SEQ ID NO: 112537 - DNA, 209 bp, Glycine max
  Clone ID: PAT_MRT3847_72629C.1
ctttaacactttattactaatacaaacagcggtaggacttgaaatcctgctcatgcacccaatggaacatactatgctataacattgcctaatacataaacatcaatgccctaatctcaaagacgaacggtgacggaagaaaaaccaacgtttgtcgattatagtgggaaattgtagaccaatggtgctggtgtcgttacaacacattt

SEQ ID NO: 112538 - DNA, 431 bp, Glycine max
  Clone ID: PAT_MRT3847_7262C.1
aggccgttgcgaccgcttgtcgaactcacgcgaatgctcgcgggcgcaggcagctaactcggctccgggcgcacctaccctgaacatagtgaacaagccagcgctaggatatgattgagaagcactgggtccaaccatgatgctcatgtatagtgccgccatcagtttttccgtggcttggcagaaggacctctatctacaatagctgagccacagatgaaggcctaagagatctcagctccaatcacacccacttacatcatcagcattattcctttgcttcagcccgaacatacacaactctggccctcttcaaatctaagaccaaagccgtttctgttaagactacggttaccaagcctaagctaaatgatgaagatggcttctttggcacttctgggagatcatgtgttgctcaacagaacgagctc

SEQ ID NO: 112539 - DNA, 193 bp, Glycine max
  Clone ID: PAT_MRT3847_72630C.1
tgttggtgtattttcttttttcattttggctaaacaattagtggggtttggctttttttacccctgaggttagatttctttgttttttaaatagtttggactgacgggtgtgagttggattgtgaatctcgttgtggcgtgttcctgattgtgttttttatgcttgagtggcttaaaaatttattttttagct

SEQ ID NO: 112540 - DNA, 309 bp, Glycine max
  unsure (1)..(309): unsure at all n locations
  Clone ID: PAT_MRT3847_72631C.1
ttcgctgnacgagtacgtgaagctcggaattcggctcgagntcgnganaactagannacagtgtgntgaaantnnnggttcttngtttnncntncgctgctancactnttncgnngnatgggcaatgccatgcggnacgatatgttcccttcnncgaatgaacactgggctanggtgcccgtacnccggaggtgaaatgcgcaagtnggaggcttgctgtggaagcacanaananctttggntttgagaccattcctgaagagngcgttnaagcnacaaaggncancccngccngggnanncantntct

SEQ ID NO: 112541 - DNA, 668 bp, Glycine max
  Clone ID: PAT_MRT3847_72632C.1
acaataggcgcgctcgtccttacgtttcccccctttcatttctctgagtccgattctccatttctcctcttattctcactcccctacgtgtttctggtaacaacatcaacactccttcactttcaactctctctacaacttccactagggtaaacacacctcatagcactttccacaatgaagccagagttgtacgaaatctccgacgacgaatgggagaaccactccttcaaaccctcgcgggttctgaagcgacctcgcacttcgtctcctccttctccgccacccgtcgaatccttcgcttacacctccacctccaaggtcgacgtttcaagcgaaaacgacgatgacagcgattgcgtcgaaatcgcgccggaagccgccaatttccgccagaatctcgatgacctcgaggacgctgatgtggacgacgaaccggtaccggcgtcccgcggccggaggttcataatcgacgaagaggaggaggaagacggcgaggaggagaacgggggaagggacggacacgtggcggaagccggtggtgcggagtcgaccgcggcggcgggggtggcgggaggaagttgaggaatggtgtgtgcgcgacgtgggtgggagggctgtgctccgcggcgcgcgaatctccgcggagttgaagggcgaactcttcg

SEQ ID NO: 112542 - DNA, 401 bp, Glycine max
  Clone ID: PAT_MRT3847_72633C.1
actgctcaagactggcgtatgatatcctaccgaacataatttgaagagaccgaccttacacaaaggcactggttcgccaacttgttgctccctcaaacaaagaggactagcgcaagatagctattccactcacctaaaagataatcataatgtagaggggtgctcctcctgtacattactatgatggatgagcaggaacatttccaagggagggactagaaatctttagaggggacaaaatgggacaatgctgctgaacatcaacctaggaaaacgatctccacggagaaaaatgccctaaggaagacactatgcttcttgaattgagcgacggcagtggaaagggaggaagtatccaatttgagccggaacctgactcatcactggagatactactactg

SEQ ID NO: 112543 - DNA, 366 bp, Glycine max
  Clone ID: PAT_MRT3847_72634C.1
gcccaactgattaattgaatagtccgataggacacgatgccagctgactccaatcactgccttccaaagatcttgttatattacataggatcttatacgagtgcattaaaaactctatcactataagataaagagaattgtgatcaaaaaataacgcaccgacacacagatagatggtatgtggaaacatacaacatgaagctccaatgctcctaaacaccagtgcttgacaaactccattactcctgaaaagagatcactaacatcagtaatcactcatataccaggatcgcgctgaaacacggagcaccaacgactgtgccacgaccttatcacatactatccacacaccacactggctcctag

SEQ ID NO: 112544 - DNA, 282 bp, Glycine max
  Clone ID: PAT_MRT3847_72635C.1
cggagagagacgaggcagtgtgcgacgccgcacagagagaagaacaccctatgagcgacaatcgacacttgcagttccacacaagccctggtgacgagtatggcgacaacgagcttactactcctgtcgaatgacgaacactcgtcggcatacacagaaggtagaaaatctcagccactgcaagcttatcaccagtctcgacatcatctggacagtcaccttgatcatacgaaaagtgcacgcaaggcaaatacgttgaacctgtcttgtacacaatggata

SEQ ID NO: 112545 - DNA, 1519 bp, Glycine max
  Clone ID: PAT_MRT3847_72636C.1
ggggcacatatagatgtccatggaaaaaagatgtgtcaggcaacaagattaccggcattcagttctcccaaaaaaacagccatagaataatgatcacatcagaagattctaaaatttgtatatttgatggcactgagcttgttcagaaatacaaaggtcttcctaagtcaggaagtcagatgtctggttcatttacatcaagtggaaaaaatataatctcagttggagaggactcccatgtatatatttggaactttgatgacatgggaaatgcttcttcgaaacagacgaaatctgaacgctcctgtgagtactttttctctaaaggtgttactgttgcaataccttggtcaggaatgaaagcagatcaaagggactctagtggtaattattcgcactacatgcaacaatagtgatagtacgagtattatattctgtgttggagcttcttcagaaatacaaaggtcttcctaagtcaggaagtcagatgtctggttcatttacatcaagtggaaaaaatataatctcagttggagaggactcccatgtatatatttggaactttgatgacatggaaatgcttcttcgaaacagacgaaatctggacgctcctgtgggtactttttcgccttaggtgttacttctgccaaaccgacgtcagccatgtaatcctgtgagcacgtcggctctgaaggggtttctgttgcattaccttggtcttgcatgagtgcagaagaacaaagtggctcttccaatgatcttgcccaccattcttcgtcaaaccaccaactagaggctgcttctggcgctagagattcgaaacgtttttctctcggtaattggttctccattgatggcacgtgtcgaggttcgatgacttggcctgaggagaaacttcccagttgggatctacctatagcagaagttgaatttggtcaccagcagttatgtaacaaagatacttcccatgaaaaacatgtatcagaaacatggggactatcaattgtggcagctggttgtgatggaactatcaagacattccacaactttggatttcccgttaggctttaatagacattgtcatggttatgtgtaaatgtcttatgtggtgctgaataacctgttacttacgcatttaaggatcgatgatttgctttccatatatgagaactttggccactcacgcatccgggctttgcctggtaaaggtggaaatttacaacggtgtgttatggccttagaatccaatgtaagtggctcaaaatgtgggaagacggaatttgaagcctttgcctctgcttatatgatgatcattgctaaatccatgttgagtctcaaggctctcgaaatgttctagaaatttgtacacttaacacttgtgatatgcctctagtttaatgtggttctagtggtgaagtcaggccacagaccacacgagaatcttaatctctttttctcattctaacattgtgattagatgatttatacagctgatacaaatttaaaaatgcaattgaaa

SEQ ID NO: 112546 - DNA, 1248 bp, Glycine max
  Clone ID: PAT_MRT3847_72637C.1
accacctccatactactacaagtcacctccaccaccagacccatcaccaccacctccctactactacaagtctccacccccaccatccccatcaccaccaccaccttactactacaagtcacctcctccaccatccccatcaccaccacctccatactactacaagtcacctccaccaccagacccatcaccaccaccttcatactactacaagtcacctccaccaccagacccatcaccaccacctccctactactacaagtctccacccccaccatctccatcaccaccacctccttattactacaagtcacctcctccaccatccccatcaccaccacctcattattactacaagtcaccaccaccaccagacccatcaccaccacctccctactattacagatcacccccaccaccatctccatcgcccccaccaccctattactacaagtcacctccacctccatcaccttctccaccacctccttactactataagagtcctcctccaccatctcccgtgtctcatcctccctactactacaaatctcctccaccatcaacgccgtctcccccacctccttaccagtacgtgagtcctccaccaccaaccaaatctcctccaccacctatctacaagtaatcttggaattaagcagaagcagcaacaagtcatgttctagtattcattgtggaataaagtccagttccatttggagcaaagttaagcctttaatttgttgtacaagttctttgaataagagtttgaatatatcgtctctaagctacaatcttcacgactcaaatgaggttgcttcgatttatttggtagccatctttcacatcttgttggtactaagttcaagggagcaacaaaccaaaatgaggaagcaagatttgaaatgttgatgccaatgcaggcttttagagatttcttatttgtttctttgtagattaatatggttgatagtgtatgattgcattcaaattattgtgaaaattcttttaattatatcttcttgtgttgtttgcaataaaattttcaatatttgacataaaaaagcataataatatgcatatacatattatgcataaaaaaaaaaaaaaaaaaaaaaaaaaaaaaaaaaaaaaaaaaaaaaaaaaaaaaaaaaaaaaaaaaggggcggcttaccatccaactagaagggccctggcccatttcatataggggtgggaaaattgcagttttaatagaccaaagttggg

SEQ ID NO: 112547 - DNA, 1846 bp, Glycine max
  Clone ID: PAT_MRT3847_72638C.1
cgcgtttttctctttggtggcactgtgaacagaaaaaaccataatgaggcaattccaactgagagagttttcaaaattcccaatgttgataaagtaattaaagaaggcaagaaggctcctacaaaacttcgtgatattaagttgaatagcattggctacaacctgaatgttgatatgtacacgccaagtggttggccccagttagtggtgatgttttaaaggtcttggctggcaaagtttctgccgaatatgacttttatgaggcttgtaacatggatcttgatgatgaagatggaaatccttctcaaagtgaatttttacctgtggaaatctacttacggaacagctttttcttgttttccaacagaggaagaagggagagatgcatgccatgcaattgccgctttatgtgaagtctgttcaattgaatctttgatctctaacttcatccttcccctgcaggggcataatatatcaggaaaggatcaccgtgttcattgttccataaatatcaacacagagactggacgtttgtcagcaagaaggccaaatctgcagaatcaacctgctttggaaaaggaccggtacaaaatccgtcaagcattcatagctgctccagggaattctcttatagttgctgattatggacagttggaacttaggattctggcacatcttgctaattgtaagagcatgttggaagcatttgaagctggtggagatttccattcaaggactgcaatgaatatgtacccacatattcgtgaagcagttgagaaaaaggaagtgcttcttgagtggcatcctcagcctggtgaagacaaacccccagttcctcttttgaaagatgcctttgcttctgaaagaagaaaagctaaaatgcttaacttctcaattgcatatgggaagactcctgtggggctttccaaggattggaaggtttctgtgaaagaagctaagaaaacagttgacctttggtacaatgatagaaaagaggttttgcaatggcaagaggagcgtaaaaaggaagctcgcgtgttacattgtgtttacacattgctagggcgagctcgacggttccctttgatggcccaagctaacacctatcagaaaggtcacattgagcgagctgctattaatactccagtgcagggtagtgcagctgatgttgccatgtgtgctatgttgcaaatttccaagaataaacggttgaaggagcttgggtggaagttactttcacaggttcatgatgaagtcctattggaaggaccaacggaatcggctgaggttgcgaagtccatagttgttgagtgcatgtccaaaccctttaacggcaaaaatattcttaaagttgacctctctgttgatgccaagtgtgctcaaaactggtactctgggaaataggtagtcccttatacaacatgaaaatccatgacaactgtttggagatggttcccttggtgattgctatcaaaaagatactgctactctagtgcctctattttcaatgcgaactttatatgcctaaaatatcattatatgaggttgttgatttctatagaggtttatgacatcctaggaaattttccagtgatatgttttggtaataccgaagcataacacgatttgctttgaaggaagaaaaaggccaaaactactggcctcggcattttacttctctagttagcagttttttgtttttttgcttctatattttgaatgtataccggtttttcatgccttgcatcatgtaccggtttgttgtttttggttgatgcaaacaatatcaatattgtatataaattattacaaaatgaatgtatctgcatttctgttaatctgttgc

SEQ ID NO: 112548 - DNA, 628 bp, Glycine max
  Clone ID: PAT_MRT3847_72639C.1
aggttcatgatgaagtcatattggaaggaccaacggaatcgtctgaggttgcgaagtccatagttattgagtgcatgtccaaaccctttaacggcaagaatattcttaaagttgacctctctgttgatgccaagtgtgctcaaaactggtactctgggaaatagtggtagtcccttatacagcatgaaaagacatgacaactgtttggagatttttaaaaattcagatatctttggctgcatggttcctttggtaattgcaataaaaaagatactgctactctggtgcctctattttcaaggcagaattgatatgccttaaatatcattatatgaggttgatttctatagaggtttttgacatcctaggaaattttccagtgttatgttttgataatatatcaaagcataacacgttttgctttgaaggaagaaaaaggccaaaaccactggcctcggcgttttacttgtctagttagcagtttttttttttttttgcttctatattttgaatgtataccggtttttcatgccttgcatcatgtgccggttagttgttttttgttgatgcaaactatatcaatattgtatataaattattacaaaaagaatgtatctgcatttctgtt

SEQ ID NO: 112549 - DNA, 452 bp, Glycine max
  Clone ID: PAT_MRT3847_7263C.1
gttttgaacccctccctgtccccggtaaatctgggttttgacaaactacttgaaattgatcaagggaatgaggatcgttggactgacgggtggaatagcgtctggaaagagcaccgtttccaatctgttcaagtcccatgatgttcccattgtagatgctgacgttgtcgctcgcgtaagttccttctccctttttttcaatttcggtcaaattaaactctgtctgtgagtgattactggaatactatgcaggaggtgttaatgaaagggagtggtggttggaagaaagtcgttgcagcttttggggacgaaattcttcttgaaaatggagaagtcaatagacccaggcttggccaaattgtcttctccgatccggataagcgtcaatttctcaaccggttttgaagctatggatgaagggatacaaggtcattgttcttgatgtgcctttg

SEQ ID NO: 112550 - DNA, 437 bp, Glycine max
  Clone ID: PAT_MRT3847_72640C.1
aatttaggctcttcccatttttcttaattcgctggtgcatcgcgctgcggcaatcttgattttggtcatactcatcttcatgtttggagagatattgccgcaagcaatttgtacaagatatggattgacggttggagcaacgctggctccacttgtttgtgttcttcttatagttttcttccttttttcttatccaatcagaaaggtatgcttataatgttgatatgtatgattactatcaacaagggtatgtttaacgaaagtggttagtcttcctcaacgtaacaaatcaaggtttgaataattgcaagaggtgtccatgtttcctgtttgacaatagtgtctcagataggattgccttaaaaaaaggatatgtgtgaaaacaaacaaacaaaaatgtatgatagctatgtgtaacaagatacctgatggagatt

SEQ ID NO: 112551 - DNA, 354 bp, Glycine max
  Clone ID: PAT_MRT3847_72641C.1
cggctcgagagagaaatcaccacattttgtactaaacctgcttattagtttcttaactagccttgtttttgtgttattttgcatggcttccaagcaagaaccaaagctctctttgacccttctagtggacaaagaaagaaactgtgtggttgtggctgaagcaagtggagacttgatagacatattgttcagttttctcacccttccactcggaactatcataaggcttgtgtcgaaaaagcaagggcacgacgaagcagacgaaattggttgcataaacaatttgtaccaaagcttggaaaattctggtgacgaggttttctggaaccatatttgcaagagaatgttgctttg

SEQ ID NO: 112552 - DNA, 697 bp, Glycine max
  Clone ID: PAT_MRT3847_72642C.1
agaagcaaaataagcttacttcccacctgttgtgctggatgcaacccccccttggtgtgaatttcggggatgtttgtgccgatgtaccacggaactccaccttcaagagtggtgacatggtgacagcttcgttttggtccgcgtgccctcgtaatgacctgatgactgaaggcacctttgcactggtggaatttctccaagaaaaggatgcttggattcctgcttatgatgatgattttctgtctgcgctataagtggtcaaggccttccaaactcagttttaggagtaaaggacccttggaatggatgataccgcagggtgtgactcctggtgtgtacagattaagtcactttggtgctgcaaagggcttatttggatcaattcatccctttacaggttcatcccctgcgtttgtagtagcctaaagggaggcatgttgttgcaggttgctgccgttactatatttgtgatttcttgtgctgaactttagtagaatcctttcaatatctaagaatgattccctaatatttgtttttttccttcccttttggtattagttttaagaccaataaaccacagtagttaatttagtctagatatggctaaacttactctttaaaaaatgttgctactagtttcaattgttcataattggaaaactgtaatgtttctacattttaaaatatatttaaggtt

SEQ ID NO: 112553 - DNA, 398 bp, Glycine max
  unsure (1)..(398): unsure at all n locations
  Clone ID: PAT_MRT3847_72643C.1
tgtacttanacgcttaaccactgatgcacgacattgtcctctcttcctccttcattttcaggccctacnnnnnntgaacacacctgattttcatcatcaactctantcatgctcaatgttgtacagcttggacgggaagacagacctgctagtggatcgaccatcgctctcttgttcatcgacttctttaacaccttgacctttgataatgagagtgatgagcttcacggagatcttcacgtattccttgccgagcccangcatgtccacacgcacatgcatagcatcctctgtctccctcgcgtcnnattcncgacgcactccatcgccagctcctataccgcnngacgcggacaggaacgcattgttcatgacctgtaccatcatgatcagaacct

SEQ ID NO: 112554 - DNA, 649 bp, Glycine max
  unsure (1)..(649): unsure at all n locations
  Clone ID: PAT_MRT3847_72644C.1
tacaaatctcgtttagtttgataacacttttgttattgtcaatgttgttattgtgtattgcatgctataaggttcatttattgtttcaaaagttagattttttattgatgtttcagaagagtggaaaatgaacggattcatggttgttgtattaatgtgggaaatattaagggataaaccggtatagacactcacaatcatgttcttatcacttttaccagatttgaattcctgagtgtttctctttgttttctttgggagtattacgtgtattgttgtgactggttaattttaatttaaactggatgaagttcttctcttttttctaccctcttttgatggggaaaagtttgtatatttcaatttgattgattgcaatatggttaattttatatttcacggtaagttgtatagtatttttcgaagggtaaagatgattttttgtgggtttgtttgatacttttgaggactgaattcccttgaggagaaataaaatcagagggatgtacatatctgttacctattattgntgntnttctgcactttgtgtaagcattgtgccatgtagcatccattctgagtcttaatgtanagcccaaggtttttaaatattggttgcgctgcangtttgntgcacattttttctact

SEQ ID NO: 112555 - DNA, 501 bp, Glycine max
  unsure (1)..(501): unsure at all n locations
  Clone ID: PAT_MRT3847_72645C.1
cagaatatgggcactcgtgtggtgtacgaagagaaactaaggaccggaaatctccaccacgatcccaccatcaaccctggcctcggttccgctcgatgccctcgctgtctctctctcctcaaccctaatttcgtctgtctctctctcctcaaccctaatttcgaaagaggcgagtggaccatcactcccgtcttgcacgacgccactgccgtcgctgggtcggggattggtggtatgcttggttttgttcatggtttcaatacaggtttacctcttcttcaaaatggtctgaagggaccgaagtggcttccttttgttgttgggattcctccattgttgatattctccggcctaagtgcagcatttggaggttatgtgcttccaaagttcactcaacttaccgtaacatcctactatgcctnctcgagtgcctcacattatggaatctcgcttctcacccgacatattggagagaantacagttccaaactcggcagcacc

SEQ ID NO: 112556 - DNA, 1059 bp, Glycine max
  Clone ID: PAT_MRT3847_72646C.1
gaagtctcatctaatctataccccgtctaaatctccgagtggttgacaccgatcgaagtagcagcacacagaaaatgggcactcgagaggtgtacgaggagaaactaaggaccggaaatctccaccacgatcccaccatgagccctggcctcggatccgctcgatgccctcgatgtaatgggcactcgagaggtgtacgaagagaaactaaggaccggaaatctccaccacgatcccaccatcaaccctggcctcggttccgctcgatgccctcgctgtctcttctctcctcaaccctacatgttgacctcagcctctcggtccattacacccttcttgcacgagaccgatgcgattggaccatcactgcttggtgttgtacgtcgtcctactgccgtctctgggtcggggattggtggtatgcttggttttgttcatggtttcaatacaggtttatctcttcttcaaaatggtctgaagggaccgaagtggcttccttttgttgttgggattcctccattgttgatattctccggcctaagtgcagcatttggaggttatgtgcttccaaagttcactcaacttaccgtaacatcctactatgcctcctcgagtgcctcacattatggaatctcgcttctcacccgacatattgaagagaattacagttccaaaactcggcagcacctcaagaggctctgataattcctttcgggtgtactgacaaggaaaatacattaccttctggcaattttgtttacattaccttcctgtggatggtttggagtgttaaaatttcatttataatattgttactccatacggaaatgcttataatgtgaataatgcctatttatattttactattaagctgtgataagctcatttattgaagtgtaatgtgtagtgttttaggggaagcgactaagaaagaaaactagcaaaaattcaagtcaatcttatttttatggccattttattaaaaaaaaaaaaaaaaaaaaaaaaaaaaaaaaaaaaaaaaaaaaaaaaaaaaaaaaaaaaaaaaaaaaaaaaaaaaaa

SEQ ID NO: 112557 - DNA, 487 bp, Glycine max
  Clone ID: PAT_MRT3847_72647C.1
caaacatttttttttattaagggctcgggggtttgtctgtcccttggggtgtttcttggagtggccgattgcttacctttttacgacaaggatttggtttccgttgtatgcctgtctgacttgtacgatacatggctgagtcaccacacagtaacgcaaagccttggcgacaagcactagcggaataacctgcccaaggcaaatgtcatgcatattcattccaccatcagactggataagccttccttgctcaagctaggcacctatgctgacgtgccctcccatccagttaggactgcctatgctgactcagaggatgaatcctatcttatgatgaaagccatgccacctgtgccctgggcctctcttgttcagaatgtgcgaagaggatctgctgtccatcattggctgaataatagtgctgagactgatgttaaaaatcacagcctttgtgagagtgatgatgcgtgttctgctgttgaatctg

SEQ ID NO: 112558 - DNA, 136 bp, Glycine max
  unsure (1)..(136): unsure at all n locations
  Clone ID: PAT_MRT3847_72648C.1
tatattcntccaccccanaaaaagaaaatgtgggaaattgtatgggcacgggcgccacaaaatcacctcctcagtagcttccgctactctttacaatgcactagttacagatgctttttaacatcattccattttc

SEQ ID NO: 112559 - DNA, 383 bp, Glycine max
  Clone ID: PAT_MRT3847_72649C.1
ggggattgttgatgcgctgtctgcacggatgctgaacacattgtgcgggttgtgtgggagcatggctcacaacctcatgcacatgaccaaggctgatctgctgtatcaactgcatgaccaaaacgccgagcactgtttgaaccctttcgctaacgaacgcgtgtgcgctattatcatgattaggatgatctacgtggagcggcggatcagagccaaaaccaaggccaaggtttttgagcagttgctggcttcgattcagtacccagtcatgaaggaaaacgcctttgatgctgtttatgagtcgcagaacactcaggagcagatccaggcgtatgcttatgatgtgactcgtgctattgctgctagaatgaacttggatgaac

SEQ ID NO: 112560 - DNA, 994 bp, Glycine max
  Clone ID: PAT_MRT3847_7264C.1
gtcggttattaatttgcggtggattgaagtttgaagtttgaaccatgacttcatattgtaaatctcgattttgacaagctacttgaaattactcgagggaatgaggatcgttggactgacgggtggaatagcgtctgggaagagcaccgtttccaatctgttcaagtcgcatgatgttcccgttgtagatgctgacattgtcgctcgcgaggtgttaaggaaagggagtggtggatggaagaaagtcgttgcggcttttggtgacgaaattcttctcgaaaatggagaagtcaatagacctagtcttggccaaattgttttctcggatccggataagcgtcaatttctcaaccgattgctggctccttacatatcacgtggaatattttgggagattttgaagctatggatgaagggttataaggtcattgttcttgacgtgcctttgttatttgaggctaagatggacaggttcaccaagcctgttattgttgtatgggttgatcctgagacgcagattcagcggctcttggcgagagacaagtccggtgaggaggatgctcggaataggattaatgctcagatgtcactggatgttaaaaggggtaaagctaatatagttatagataacactggttcattggatgacttgaatcagcagttccagaaagttcttgttgaggtcacaaggccattgacttggactgagttttcgtgctccaggcagggagtcttcgccattcttgcttccttcacctcaggtgttgttctgtttatgaagacattcaacaatcatacccacatttcatagccacctgtgttctacacatttgttaatgtattatttacattccctctaaagccctaaacccatgagttcttttgtgtatctcttttcaaattccccaacaaatcctgctgttcaaagttgattaatttaaatttgaagatacaacttcaagttttaaataaccatgatattatatttcttacg

SEQ ID NO: 112561 - DNA, 567 bp, Glycine max
  unsure (1)..(567): unsure at all n locations
  Clone ID: PAT_MRT3847_72650C.1
cacggactccggttggcccggatctcactggttccccctcccggcgacccactgatgggttttctatggccctatgttcccgggggtctggttgggtggaatccgtggtttgggtgggcacctgctaaccgacagtgacctgtgggaagttttctgcctaaagggtaccaacaaagttttcccggggtaaaaattcccttcttacctttaacgccttgggccaattgaattgggcaagaagttcccttttggccctccaataaggaatcccctttcgccgtttaaagctttttggcgttcattcattttcccaaattgnggngggtccttcaatcaatctaatttcaattatcccttggtacctttcaattccttttttttactgttttaactcatgttcatccaggaataagaagcttagttttaaagtttaactttgcaacaactcaattttttacttatttggtnaggattcattttttggacttcaaaaagtgaaatgatatttangatggagaataaaaaatggtatcacactttttacttagataataaacatttattttt

SEQ ID NO: 112562 - DNA, 568 bp, Glycine max
  Clone ID: PAT_MRT3847_72651C.1
cttcttaatcgagtcattctctttgaggaaggtaaaaaccctcattgctcatggcagatccactatcgaaacaaccagatctagtgtcaaaatagtgcagcagcttgtgatcgtaaaggatggtgttgtagaggagcttaaggtgttcgaggtagtggacacagacggggaagcatcaaatggatttgaaaaaagaggcaacacatggtttcgaggaggggtttggggtgagggttcgattgtagttgatgattcaactggcatagcagtgagcggaggctttgtacatgtagcactccatgaggaagccctaaagggcatcgcaatgactctcaaggattttggagaagtggtggatggctttagagtggaggccgacgtccaaggtggcaacatggcgacgaaggagaagctttatgtgggtttggagttgggtgacaactttggactccgagcttgaggtgtcacgctctccaatggccagcacacgcttctcccggtggaagctgtcgttggaccagcacacgctcttgcgacggaaggcgacgatggataggtgtttgtcagt

SEQ ID NO: 112563 - DNA, 145 bp, Glycine max
  Clone ID: PAT_MRT3847_72652C.1
aaccaacataacaagacacgggtttcttttatgggctggacaagggtccccgcttgggaagaatgcatgtgacaactggccaatgcgaaaacaattaggcgcactcacaggggggcccgtaaacaggatgggcccatgtaacaag

SEQ ID NO: 112564 - DNA, 313 bp, Glycine max
  Clone ID: PAT_MRT3847_72653C.1
atatagcggtgttggaatgtgtatccatagcataggtttctagctctacacttgcgcttggctacttgagctgaaaattcatcggaaagtacatacttctgtatgtctctctattgtaccgcttaggagaccgatgcctctagttgatcggcgctaggttctgaagagcaaggcgcgatccttgcagctacagcttagggaccgttaccgggtccacgtatacctgacattggagccttgggcacacccaccacacctttattccatccgacggtgggtagttctagtggaccctagattactggctcaggca

SEQ ID NO: 112565 - DNA, 328 bp, Glycine max
  Clone ID: PAT_MRT3847_72654C.1
gaaactgaaagagctgataggaataatgaaggacaaagcatcgcagggcaaagccgcgatcctctccaaacgcgccactctctctctcctccgagccaccagccacgactccttcgcccctcccacgcgggatcacctctccacgctcctctcctccggtgatggctcacgcgccaccgcctccgacgccgtagacctcctcaccggccgcctccagaccacccagagctccgcgtggcgctgaaatggctgatcgggtgcaacacggatcagcgtgcagcttatcatgagggaccagctcctacagcggcggaggaacaccttacct

SEQ ID NO: 112566 - DNA, 511 bp, Glycine max
  Clone ID: PAT_MRT3847_72655C.1
attcgatcagcatgaggccctcatatacctgcacgcggtgcttatccgctgttaagagctcacgtactcagctgcggcccacccaaacattccgtcctttcgcccagaatgtcttgtcgcaacgaaatcattccaccaaaagtccgacacagccgaagttggcgtcccctcgaagagcgctctcgaccacgcccaatcgcagttttgagaaggcgttcgaaccgttcgaatacattgatcctgagggcaataagcggactcttgtcctaacggaagacaacctctttaactcgttcacgaagtcgccgataccgcagattcgcaaaagagcggctttcatgcgccagcatgcatactgcccgcatcccgaccacaagcctactcgcgctgcaaagaatgagatggatctcgaggctcgcaagtcctcggaaactggctccccaccagctcacgtcgacttcgagtgcccggattgtgggataccggtctactgctgcgaagaacattgggc

SEQ ID NO: 112567 - DNA, 493 bp, Glycine max
  Clone ID: PAT_MRT3847_72656C.1
gttttccttgaatctaaagactcatttgcatcctactgcttgtctatgggcttgaagaggaactaaggacgttatattgtagcattactttgcagattctcatactctaattgcaaggctgcttgccaaatgccaatagggatccgtaagggcttgtatcattgtttttggttttgcatattctagatttggagcgggtatgtgtatgggaagtgtttggttgtctaaatacagggcaaattttgtaggttggaatgggtgtgctaagcattgggagatgataaggcaagatggatcatggatgaggcaatgctctttgagctggagtggctaaagaagaggaggggatgttgttgttgttgaggtgtgggaatttgttggaggattggtgtgaggagtgtgtagactgtagagtgtttagtggaatctatgatggggatacaaaattaggtcagggggtgagaaagaggtttggataggaaattgatgctta

SEQ ID NO: 112568 - DNA, 360 bp, Glycine max
  Clone ID: PAT_MRT3847_72657C.1
gttaattctttttgccggccaaccccccccgcacagtctattttccgccccccgaaagggggccccccaatcgccccaggacaattttcggaaaaaaaaacccggcccaacttccccaattccaagccccatggacccttgtttttttcccccccagggctgggtccggtgggggggaatttttcaatctcaaccccgggcggctttccccccgggggcataacccgcacacccaggggcccgggaaacccaaccccctgttattgttggggattaaacccccggcccctggcccggccgcgagtttttccgcccctggcccccaccctatggaccagcccgcggggaaaggcgaccggt

SEQ ID NO: 112569 - DNA, 403 bp, Glycine max
  Clone ID: PAT_MRT3847_72658C.1
gcacggaagattcgtggcatgaaagccatggtgaattttcctgaagcatcacgtacttcttctgtagaacgttacactgtacatacacaggaatgtcttacaactgttaagaccaatctgcttcacaagaccatagcatttacacttaacactgcaccagctacaacatagaaccttatgacgacgaatacatagatgaggaccattaaatacgatgaagacgacggctatcatgaaccgattcgtgtgatgacgcaatctgctacttccaagcagatgaaacaacgtttcaaggtggaaacgctattgagatgctagtcatgctagctggttccgatcctagtgcatgacatggtcatcaacgggaccaccaacacgaacgattgtgtgatagaagcggatc

SEQ ID NO: 112570 - DNA, 254 bp, Glycine max
  Clone ID: PAT_MRT3847_72659C.1
gatcaacattgccattgagggcaacagcccaggcgagaagcccttggaagtgtcgcccactcaagcttctgctactggatctccacacgctcaccgacgaggtcgcggcagtgtgagcgaaaacctcggtatgacattcaagcgcgtaactgaacgcatgcgtacaccagccgtgggccccagcgcgccaaatctccaccagtcaaccgcgctgagcggtctccttacgagagtgttcctgagttctctttccc

SEQ ID NO: 112571 - DNA, 880 bp, Glycine max
  Clone ID: PAT_MRT3847_7265C.1
aaggattccagaatggtttgatcattgcagcagtgaaagatccataaccttttggggccgtgagagattcccaaggatttgtgtgtgtgtttcttttggaatgctcgaaaattcactgcaccaccattttcaagttacattctgtatagtcatcaatggccacaaaaggatattgtccaaccgttgttacgattggtcagttcagacagatcatgtgtggctttttgatctaactgcccttgttagttatgaagatctcagaggaacattggtgaagagtgactggaatcatgtggagattgaaatggaatggaattgctgtatacaaggtgaccatgggccaacaagaatggctattgtgaaatggtatggaattcacgtatacaggcaggaaagtaaaatggaggatatttctttcacaaatcccaaaaatctacaagaaaatagcaccagtaaaagggttggtactgaggttttggattcatcagagaaaagccaaaagaagttgaaagcaatttctcagtgggattgattccattcctgattgtagaaatctgctttcagaatcaatggatttctgtctgaaaagtgtttggtttcatgtttcaacttatgagtctaactcaatcctacaaaatcaatttgttatgtaagaattgctctccatttatatagtttattttgttacaatctttactcgatgtgagactttcaacacactctctctatcttggaatgatcacaatttaggtgatttttccaatagcttcaaaacacactaatgacctattaggatacaagtcataagtgcttttaagaacttctcaactgaaaatatatagtttttttagtagagaaactctcacttctagcttcatat

SEQ ID NO: 112572 - DNA, 484 bp, Glycine max
  Clone ID: PAT_MRT3847_72660C.1
ttttgtttttgctttttgtttttcaaaatagggaatgagggctatttttattactaatattggtcttgcagagaatgttccaagccatattttaaaaaaccatattgtaaccaatacacgcaacaaacatactgactcatcataacaactgatacatgcactagttcataattaacactcacacataacagcctcccatgcaacgctactgcttatgcacatatttatccttatcctcagctccttattatgcatgctgctctccctaattggaacaccattctcattaacttattattgatgtgctatcaattgacatcactttcagggacactggtatcatgcctatttccctcttctgaagttgtaggttgtgatcccgaggcagtttcatctggaacaattgcatatctctctgatatggaggacgaggatttccctgatgatggataaggttttgaggattctatgtgctgtccggaaa

SEQ ID NO: 112573 - DNA, 257 bp, Glycine max
  Clone ID: PAT_MRT3847_72661C.1
gtggggtttttttttttcttttaaaaaaagagttaaatggttcgcaaattactatccagggtaccacatctctacagtttttattgttttaataaatttaaatgcttaccatattcttttttttctgccaaatgtgctatgaaccttgctttaaccttcctgaacatccttttctaattaaaagcatgagaaagtatgcgtggtacaaccctttccagatcaacatataaaacgatataggggaaactttgttgctc

SEQ ID NO: 112574 - DNA, 503 bp, Glycine max
  Clone ID: PAT_MRT3847_72662C.1
gggcaatcatgtccattatcattcaagggaagcccctattggatggctcctgaggttataaaaaactctaatggttgcaacctagctgttgatatatggagccttggatgcacagttttggaaatggctacaactaaacctccttggagtcagtatgaaggggttgctgccatgttcaagattggtaatagcaaggaactcccaacaatcccagatcatctctcttgtgaaggaaaggattttgttaggaaatgcctacaacgtaatccacacaatcgcccttcagccagtgaattattggaccacccttttgtaaaatatgctgcacctttagaaagacctattctgggtcctgagtctccttcagacccagcagtatcagggatcacacaaggagctacaacttcgggcattggacaaggaaggaatccatctaagttggattcagatagactttctcttcattcttctaagggtttgaaaactaatcctcatgcgagtga

SEQ ID NO: 112575 - DNA, 286 bp, Glycine max
  unsure (1)..(286): unsure at all n locations
  Clone ID: PAT_MRT3847_72663C.1
tgcattnacatttcctctctctcagtttccaagaatcttaatcttttggcaaagtcttacccaaccgtgagctggtgattaccagaaggccgttgagaaggcgaagaacaagctcataggctttattgctgagaagagatgcgctcctctaatgcttctgttggcaaggcactctgctggaacttacgacgtgagcttgaagaccgttggtcccttcttaaccataaagcacccctccgatctcgctcacgtcgcttacatcattcttgacttctatgatagtgct

SEQ ID NO: 112576 - DNA, 2294 bp, Glycine max
  Clone ID: PAT_MRT3847_72664C.1
aaacaacaacgttctcacggaaaactatactgcaaaagtttctgattttggtctctccaagtctatcttagatgatgaaaaagattacgtctccactcaagttaaaggaacaatgggctacttggatccagattattatactagtcagaagttgactgaaaagagtgatgtctatagttttggagtgctaatactggagctgattactgcaagaaagccaatagaacgagggaaatacattgtgaaagtggtcaggagtacaatagataagacaaaagacttgtatggtcttcacaaaattattgacccggccatctgttcaggatcaacactggagggttttgagaagtttgtgaaccttgcaatggagtgtgttgaagattcaggaatgctgacaggcccgcaatgagtgatgtggttaaagaaattgaagacatgttgcagtctgttggtatgcacctaacatctgcaatcagtaacatcaacaacatctagtcatagatatcaggaggtaagtatagtgagttatccatctggaccaaccttacagcaatgagtcctttggttcaagtgcagaacatattcaaaaattcgaacctagttagttaagttcagtccttttttctcaagattgaagtcaagaggagacttgtttattagtatttcgcggccaaaacacagaaaagtagaaattgtggaatttagagtttgtggctgtgagcttcagagtataagtgtggtagcaaggttaacatttccttgactatcatttcttttccttctttctctcccactaaagatgtgaaatgtacaatgaatataggttttgatatggaacatgtagaatataaagtataaacagttttaatatgggcatgatttctcattttttgaaaaaggttgaccctgccattctttcttgtgacaactagagcatgatcatcccctccttcaacattgtctgccaagaccttgctatacgaagtttcaccaatgtcaacagcatcagcacatccagtaggtccatcaatgaggtacaaataaccatcaaatgatgtggtaacaatagttaatcccttctttttctccttgtcttgacttaaatcgactagaagaacttgattcattattcttccatgagtttgatatggataccgcccaatagatgacccatccctgccatcaagaacatgaatcttcccaaataatctcatctatttgacttccatatattttcttttctggctcaggattaggcaccttaatactctcatctacttgactaccatttattttcttttctggctcaggattggacaaatttttttgtgtcaaggtggttttctgttgatgtggcagctgaagatttggcttcatgtctacttccattcatttgagacatagaattcttgatagtagcatcttggataagttggtcatcatgaacatctggatgagaacggtccactgggtcaggatccaagcccacaaaccatttttttagcaccctcctacgggggacttcaagcttatctgacatcatatatcccgaaaccctgaaaaacagcacttcaccattgtaggttgccaaagctatttctctcactccatctttgtcaatgtcatatagaagaggactagaatgcacagttgattggtggaaagcaggccagcctggcattttgtccccatcagcaccttctagaacctcaaggtagtgaacaaaagacggaaccacaatctcaagcttcccatcactgttaatatcagcaatcaagggatttgcatagatgctggaactaacttctgtttgccatctgagctccaaattcttggggcactttgaattcacaagtgcatcctcatctatttcggggtatccgagggagtcgtcggaggcttcgcgctcgcggaaggtgtttttcctgctggaatcatcggagagaacgaatgtgatgttgtggagaagtagcagagagagcagaagaagaagaggctttgtccgcaagcacggtttcatgtcatctactgtggaatcggctccaccagattggtcagtgatgcgatttggtagagttgagtgaagcgataatcagcaattctctttcagcattctattgggagattgttgggagtgggtggaatgaaaccctagctagcgcggtggcagtagcagggtttctttgggtgcgttcgatctgcaagagtgcgagtcaggtacaaatcggacggggggatcggggaggggcacgcagaggtgcaagagtttcctatatagtgagtggtattagagc

SEQ ID NO: 112577 - DNA, 350 bp, Glycine max
  Clone ID: PAT_MRT3847_72665C.1
gattacggggaacatttcactagtctctatttatcatcctcaataatgccatttacacgtctcctctctggagcatctaagcatatacctaaggtcgtctgcgaaatgacaatttgaggtcaatatgctgggcacatcgtgatgtggctctagtcactggtgatgccctgtatcgtcgacaacttcgtaacgctttgcaccgttggatgaagggcctacggcgtttcggcaagcgcctccatgacattggcgcttccatccaccgtgtgatctcgagtttcatgtgtcatcggtggctatttcaccggcgggaaaatcacctgcggttagtcgatttatcgtcccaagtt

SEQ ID NO: 112578 - DNA, 2305 bp, Glycine max
  Clone ID: PAT_MRT3847_72666C.1
tgggaaaagggcaaacgcggagagaactgtgtattaattataaatatctattctgtttcaattatggaaaaaagtatatgtaactcagtaaaacattacagtatcggattaactacactacaacatttaagggcaaaatcccgacattaaggtgccgttcactctgttgcaatcttcgactatctctaaagtaacctcaactttatctgaactaattcttcagcttgtaaaagattgtttcaactccgtggtcaaggttcaccgcagcacccaaggcagacaccatagcagattctactcaatttggcatgaaaatattcacattttctgaactgaatgatgcctaatgtatgaaacaaagtaatcatcgttaatcaatgttccttgaaaaagatggcaatcgcattgagccttgtaggtgaaggatcacaaggacaccaaacatcccaagcattggaagaacaagaagccacttcaacagtttatagttgtgcatatggaatgtgagagagaaatcatcagagaaatacagtccatttctgtcaacgatctcaagcaaaactgttcatagtgtccgtgccgacactgtgggcagcttgcgcgcgatttaccttgttgatcataggtattgtacaactttatcgttctctctgcttggtaattaccaggtactagcaaggaagtagtgactttgtatggtccttgatgcccagatagctcgctgtaattatcacaatctcaatttccacccaaaagcttttgccttcctcatcgtggaatgccctagaaggatgagtaacatagataccttcacgattgtaacgatttgcaacattatttcttccttgactaggcaacctccatgcctttaacaacggaggagatggggttgagaagcagaagacattgccattcattgttgtaattagatcaagatcatccccaccatcaacattgtctgccaagaccatgctatacgaagtttcaccaatgtcaacagcatcagcacatccagtaggtccatcaatgaggtacaaataaccatcaaatgatgtggtaacaatagttaatcccttctttttctccttgtctttacttaaatcgactagaagaacttgattcattattcttccatgagtttgatatggataccgcccaatagatgacccatccctgccatcaagaacatgaatcttcccagatagtgtaggcacaacaagctcagtatggccatctccatcaacatcaccaacagtaggactgaggaataagactctttagatgtttttcccatattaaatctccttttggagtccatacagcaacatttccatgtgtatcagctgtaactagttcaattttcccgtcatcattaacatcagccgcaacaacagctccttgaatctcagccatttcaagaggaaacttttgtctaaccttaccatgatgatccaacacataaaacaggccatacgaagttccaacaagaatgtcaagattcccgtcaccatccaaatctacgacagttggggaagaatatatgtaggctcggaaatttgaagtatctgtactcagatcaagttctgcagtccatttaacttgttttgtatccagattaaaaacaacaataccaccagcaacatatttcccaatgtcaatatcgaatgctggcattttgttcagtagcaaggtagtgaaaagacggaatctcaagcttcccatactgttaatatcagcatcaaggggtttgcatagatgctggaactaacttctgtttgccatcggagctccaaattcttgggacacttcgaattcacaagtgcatcctcatctatttcggggtatccgagggagtcgtcagaggcttcgcgctcgcggaaggtgtttttcttgtcggaatcatcgaaggtggcgtggtggagaagtagcagagagagcagaagaagaagaagaggctttgtccgcaagcacggtttcatgtcatctactgtggaatcggctccaccggacaacgatgagatttggaagcgataatcagcaatttgctttcagcgtagtgagtttgttggggaatcggacgcgtggcggtggtggtagaaggattgcgatcgaaacgcgtgactaaaatgttgataagtctgtagaagtggtagaacagttgcgcactcaccagcaatatcaggcacaaaacgataaaatccattttcaaactgggtaagaagaagaagccgaagtttggatcgacacccgcctgaaagcaccgacgaggaaggtgagaaaaagcagaaatctccggacgcgtggg

SEQ ID NO: 112579 - DNA, 941 bp, Glycine max
  Clone ID: PAT_MRT3847_72667C.1
cggacgcgtgggctttctgtcagagtccgaagcagcaacgctttctctgaataacaattgagttggtttggtacattcataatcggcccttcaattcaataaccagttgcatctgtacgtttttcgcttccttttgctgcttgttgctgaaaaatctgcgatctccggcgtcgttttggtcagcttccggggggtaagaatctgccctctttgtctctctctctctttttgagctttttgtcattggttcagatttagacccatttgtgatttgttccgcttttagaaatcttaggcttctgagatgaggaaatggaattagtagtgtcttggagttttaatctttttcttaaaaagatcgtagcttcttgttaaagtttgttgttattggagacctgggcaagagtgtgtaatctaatcattaccctaggtagcctaattgtacaaaaatggcagtgtttttgtgacatttgtaggttcttaggggtttgattctttgtttcaagcttaatttggtttgcattcattctcttgttcgatatcaatagtgaaaatgtcatctgccggtgtctctactcttagtgtggttcccactgagccattgctgtcaccaaaggcattcccttttccaattccatcacacttgtctttggaagataaatccattttcatatacctctccttttctggctcattgactcccatccgtgttatggagtgggataccattgaatctgtcaaattcaaaatccaaaggtgtgaaagccttccgtttttaacaaacaagcagaagttggtttatgctggccgagagcttgcgcgaagtgatacgccgctcaaggactatggagtaacggatggaaatgttttgcatttggtaatcaaactgtcagaacttcaagtcatcaatgtgaaaacttcttgtgggaaagagttcacgt

SEQ ID NO: 112580 - DNA, 1086 bp, Glycine max
  Clone ID: PAT_MRT3847_72668C.1
ggctcgaggaccaaccttacagcaatgagtcctttggttcaagtgcagaacatattcaaaaattgaacctagttagttaagttagtcttttttctcaagattgaagtcaagagagacttgtttattagtatttcttggccaaaacacagaaaagtagaaattgtggaatttagagtttgtggctgtgagcttcagagtataagtgtggtagcaaggttaacatttccttgactatcatttcttttccttctttctctcccactaaagatgtgaaatgtacaatgaatataggttttgatatggaacatgtagaatataaagtataaacagttttaataaaaacctatattcattgtacgtctccactcaagttaaaggaacaatgggctacttggatccagattattatactagtcagaagttgactgaaaagagtgatgtctatagttttggagtgctaatactggagctgattactgcaagaaagccaatagaacgagggaaatacattgtgaaagtggtcaggagtacaatagataagaccaaagccttgtatggttttccccaaattattgacccggccatctgttcaggatcaaccctggagggttttgagaagtttgtggcccctccaatggagtgtgtttaagattcaggagctgacaggcccccaatgagtgatgtggttaaagaaatttaaaacatgttccagtctgttggtatgcccctaacatttgaatccgtaacatcccccccatctagtcatagatatccggaggtaagtatagtgagtttccctttgggccccccttccaccaatgagtcctttggttcaagtgccgaacatattccaaaattgaacctagttagtttagttagtcttttttttcaagattgaagtcaaaaggagggagaatttttgtcctctccccccaaacccagaaaagtagaaattgtggaatttagagtttgtggctgtgagcttcagagtataagtgtggtagcaaggttaacctttccttggctatccttttttttccaaaaaaaaaaaaaaaaaaaaaaaaaaaaaaaaaccccccccggaac

SEQ ID NO: 112581 - DNA, 1437 bp, Glycine max
  unsure (1)..(1437): unsure at all n locations
  Clone ID: PAT_MRT3847_72669C.1
cagcatcagcacatccagtaggtccatcaatgaggtacaaataaccatcaaatgatgtggtaccaatagttaatcctttctttttctccttgtctttacttaaatcgactagaagaacttgattcattattcttccatgagtntgatatggataccgcncaatagatgacccatccctgccatcaagaacatgaatcttcccagatagtgttggcacaacaagctcagtatggccatccccatcaacatcaccaacagtaggaccctgtggaataagactctttagatgtttttcccatattaaatctccttttggagtccatacagcaacatttccatgtgtatcagctgtaactagttcaattttcccgtcatcattaacatcagccgcaacaacagctccttgaatctcagccatttcaagaggaaacttttgtctaaccttaccatgatgatctaacacataaaacaggccatatgaagttccaacaagaatgtcaagattcccatcaccatccaaatctacaacagttggggaagaatatatgtaggcacggaagtttgaagtatctgtactcagatcaagttctgcagtccatttaacttgtttcgtatccagattaaaaacaacaataccaccagcaacatatttcccaatgtcaatatcacccagttctttccgatgctcctggttgtcataatactcgtgatcaaagaaataagaaacggcaacaatcatttctgaaacaccatcattgtcgatatcagcaatgacaggagtgcacaagatgtgtgagtcaacattcacataatcttctaatttttcatgtttaacttcagtccattcttcatcaccccacattgtttcatcaacataatcatcataatcataactatactcatcagccagatcttcactattacggaataactcaaaagatgaatcagcatctgcatccaggccttcatcattttccacagttgcagcatgaataccctctttaactttggattcagaactgccttgcactgctcctttggaattgttatcttccagaagacgtctcccagtgctggttttattatcagcatgaacagtttccagagacccagcattcacagaggaattatccacaacagttggcaccttaatactctcgtctacttgacttccatttattttctttctggctcaggattaggcaccttaataatctcatctatttgacttccatttattttcttttctggctcaggattaggcaccttaatactctcatctacttgactaccatttattttcttttctggctcaggattggacaaattttttgtctcaaggtggttttctgttgatgtggcagctgaagatttggcttcatgtctacttccattcatatgagacatagaattcttgatagtagcatcttggccagg

SEQ ID NO: 112582 - DNA, 252 bp, Glycine max
  Clone ID: PAT_MRT3847_7266C.1
aaaaaacccaaaaaaaaggttttttcccatttaatcataggcacccttttccatcccctagcagtaatacaagaccgaccttaatcctctacaaaattatttcattgccttacctagaggacaaactgttttttttttaccccccccccgagtttctttggaaacccccctcaggttttaacacttttgggccgcccccttggctttttttttcccctcttaatatttaaaaatccccccggggggggggta

SEQ ID NO: 112583 - DNA, 338 bp, Glycine max
  Clone ID: PAT_MRT3847_72670C.1
ggaacgaaacatgagaatcgttcattagaacgcattatgttcagagtgaatgcagtgtccaaactacagcatcgtgcttcctactgagtgcttacattagatgcgtaccaaggttccggcggcgacggagaactatacatctaattgtctatcactgcattggttctgccgacatgggttttgttgttcctgacttgcatactcgatggcttcaaagttgcagaaagggcaggccagagcatcctaagcagcataatcggaatccagatggggaactaactactacctgcaactgctgaaacagaacatgcgttgcattgatgaccctcctacagtac

SEQ ID NO: 112584 - DNA, 141 bp, Glycine max
  Clone ID: PAT_MRT3847_72671C.1
ctcagtcaaccaattgggttaggtgttcaattttgagagacagactacgatacccggtgctttgcagtctatacagctcatacccaccttgcttactgatattggaatgtgtgtatggatggggtgttgcatccccaattt

SEQ ID NO: 112585 - DNA, 378 bp, Glycine max
  Clone ID: PAT_MRT3847_72672C.1
gcgcccacgcgtctctccacgcgttcgcccacgcgttcgatcatcccttcacatcgctaggcaaaggggcaatgaagacattgatcgcgtttcattggcttctatgctcggaattcagcttttgcgtctgaattaggctgcgtgttgttcccgattgtttgtttttcaatcgttagcagcagagcgtgcttgaacaagttaattggttggttttgtgattttgacgcttggggaccgcaatggaatttgatctctgcgatagcagtggaacagatgatggtcttcctccttcccatcaatgtctaaatagatttcaatgaccagatcatgccacttggactggaaacggaagatctgcaattgtaggccttggtccat

SEQ ID NO: 112586 - DNA, 470 bp, Glycine max
  Clone ID: PAT_MRT3847_72673C.1
ggctcgagggaaaatgtgaagctgtgccagacactttaatacgtttttttaatgggaacattgttggggcacaacagtttgctcatgctgcaataactgatgggtcatttaacccttcaattgactatgcttctcctattcatggagatgggcatggtagtgatccagactctattgcggcccgaaataatggacttcctgtgaggatgaatggtcttgaattctccagagccagtgggatggcttctcgtgctaggattgctgactactaggcaagttattcactggttggagggttcattgcagatgtggttgctgcatttgatcaagctgtatctgatggagtggacatactcaacctttcagctggacccgactgtcctacagcaggcaccataactgcattgtccaaccctattgatgccacactatttggagccgagcaaactggtgtatgtgtggctcaggct

SEQ ID NO: 112587 - DNA, 931 bp, Glycine max
  Clone ID: PAT_MRT3847_72674C.1
ccacgcgtccgctgataactatacaacacaagcacgaacactcccttaccaaaacggcacttgtttattgtcgtttagatcccatggatcacacgcctgctgcgcaacgtcgtctcaaagccattcacgcccacctcaccgccaccgccgatgaatctccctcccacctccgatccaatcccaccgccggcgagttcttctccgctttgatctttacttctgggcagaacaagggtatagtgttgtactcccagagaaattacaaacaggaaagtggaacgtttacagatctgtacgatctcctctgcagctggtgaccaagtttcctaatcatcctgaaattggtaccctgcacgataattttgtgcgctcagttgacacctttcgagactacaaatatctgggaacacgtgtccgtgttgatggaactgttggggagtacaaatggatgacatatggagaagcaggtacggcccggtcagcaataggttctggtttgatttatcatggaatcgaaaagggctccagtattgggttgtattttattaacagacctgagtggctcattgttgatcatgcttgctctgcatactcatttgtatcagtgcctctgtatgatactcttggtcctgatgctgtcaagtatattgttagtcatgctgctgtgcaagttatattctgtgtacctgaaacattaaatttattgctgagctacttgtctgatattccaaccgtacgtctaattgtggtagttggaggtatggatgatcaaattccattcattccttcatccactggagttcaaggtattacatattcaaagctacttaatcagggacctagcaaccttcaacccttttgtccaacaaaaactggtgactttgcaccatttgctacccagttgtacactggaaccccaaaagtgctatct

SEQ ID NO: 112588 - DNA, 375 bp, Glycine max
  Clone ID: PAT_MRT3847_72675C.1
gggggggaaaagaatgatattactcaacccaagcggaaacagattacacctcagtttttataatcagttacacaactgtaactgtcaactaactataaactaactagtaactgtagtttagcctttatagattagctaagaaaagaaaactacactaccgagtaagtatactactatacccccccgcaagctcatgaggggttggcagaatgcctttcaaccactctgagctaggacctgtatgtagtaagatttgaaggagtacgagccttagtcagaatgtctgcttttttatcaatagctggaacatggatgacttgatgttgttcagccataactttttccctgaaaaaaaacaactccaactccacatgt

SEQ ID NO: 112589 - DNA, 344 bp, Glycine max
  Clone ID: PAT_MRT3847_72676C.1
ctcacgcgtccgtgtgaggtagaacccttgcacggtggtgactgcacgatgggtgcctacaagtatgtgtcatagctatagctcatagatgcaatctgatgtcatgcgcttcttacatcagatgaggcgctgggagtattggcagtaaccttccattgctcgcttgacaaggttcacccatatttactaggctcgtcacttgggacttatggctaatctggcctatgctatataccatgttctagttaggaggtgtggtagatagaggccatgtatctaaaggtattgtttatgggaagcctacaaaccatggtgttacctaactgaaatttcaacgtatcaag

SEQ ID NO: 112590 - DNA, 385 bp, Glycine max
  Clone ID: PAT_MRT3847_72677C.1
ggcattcactctgtgagagaaagagatagggtgggggagagagaggagcggaagtgagaaaatgactacgaggttcaagatgatcatgacgactagaggccacgtctgctcctgtcacggtacgtatcgtgaagcaccgtaagcatccagatagtcgagataacgtcagtggcatgcaccatcaccgggtactcttagacaagtaccatccgggattcttcggaaaggtggctatgcgctacttccacatgctccacatcaaattctactgagccatcgtctacattgatatgctgtggtccctcctactatacgaggctctggacatggccacggccgacaatgcgccattgctcgatgtcacccagttatgttgctttaaggt

SEQ ID NO: 112591 - DNA, 1221 bp, Glycine max
  Clone ID: PAT_MRT3847_72678C.1
caagcgtccggaacatttatgccggctctcggcaccgtgttcaagcgattagggtttcctcccatcgaacttgataaccctcacgtgcccctccctcgccgccacgtggatcgccgtcctcccctcggagtacaccgcatccacttccaactcctcgccgtcgttgccgtagcgctccaactgaaacttcatcgtgtcgattcggtccattgccgcggcctcgtgaagaaccgattcgtcgattttgcagccggaggcttccagaagcttcaccgcttggaggctcccaaccctaattgcgagcggcatgagggattccgccgtcgcgcagcaaatccgcgacgacgtcggcgctgccgcattccatggcgacgtgggggccgacgagggagacgtgggggccgggtttggagaatagttggcggaggtgttcgacggtggcctttcgggtggggagcatggtggctcggtcggttatggcgtcgggagggtcggagagagggtgttgatcagagggctgagagagttgtagtgtgtaagaaacagaagagagtgggggaattgtggagaagggtttgtggtggttaaagacactgccactgacatggtgtgcatgaggctggtgagcttgaaggaggagctgcacttttggcccttttggaatatcaactcaacttcctttgtttctgctttcactaacctgtccatgatcaacctgattgattctttgattattgattgattgattctgactttgaactttaaagggtgcttgattacttgaaggaggatgattgattgattctttggctgtttgtttgtttagtttatgttttttttttaatttattagtagacttgtgtgattaattaatactatgtgtagcatgcttgttggttggggtgtgactgtgacagggtaggtgggagacattgaccatgactcctccttgaaagaatggagaaggatatgaaacagtcgcttttgaatttgatgaagcattttcagcgagactcgagactcaagaatgctattactactagtcaattgcacaggactcggacaaggtaaagaaggtgtaagagttgccttattccaaaaggatttgtttttgctgactgattttctagttagacctaccattctggttgcaagtttcattcactttttactgaccaattcaatttcaacatataaatgtgaaggttggaaatgcttttc

SEQ ID NO: 112592 - DNA, 431 bp, Glycine max
  Clone ID: PAT_MRT3847_72679C.1
atccggcggaattgtcactatcttcattggtatgcttatcgggtgctttgcaagccagcgtggtggcaatagtagcgactcgtcattctgggcttgtggcatgggccttaggttgggacttcaggctctatggccctctctacacggtcagtactccattccaatatttcttgtttcctggaccccaaaacctatttttgtttcatcttcaaaatctgattttcaaagcaaggtaacacacataataaataagatgaatttagtcggcacaccaaattaatttgttttctctcaatcccagcctattgaatgcaaaaggttacgaggcaagtattgtaactaaaaaagacaaattgttcactccaaaagtaaattcgttggtcggcccattttggccctagttcactattttctttaagcccaaattatct

SEQ ID NO: 112593 - DNA, 244 bp, Glycine max
  Clone ID: PAT_MRT3847_7267C.1
ttttgttggcttattcagaattgaatacacacttggtggccaaaagggaaaagagaatgaaagatgtatggggatgagaagacatgaagtaatggtggcatgacagtggcggtttgaggtgcggggtgagtcctgcttgggtctagtttttgaaggagagagatggggatggtgtagctcttgccatgtggttggggttttgcacgaggtcatgatggtggtttaaggttgtggtggtaataag

SEQ ID NO: 112594 - DNA, 631 bp, Glycine max
  Clone ID: PAT_MRT3847_72680C.1
gtcaacttttaccgccccttgcttgttgaaggatctatgcatgacttttgacatatcaataatgaattttcaatgagaatttagaatgctagatttcagtcctatcatatcacgacatgctagtggaaggataagcagacagctataatctgtctgaagcagtaatgattgtattttttgttctattaagccaaccaaattacacatttttttttatatggtcagcatcttatatgtttgtcagctatttgtttctcgtctatcattttgttattctttatagtacatctgttgatgaaatatagccaactttctaactagcacatgttgtgcctgttctttatacagggaacccaataccataatgcagttcagaagttcgttgacatttgcaagctgagtgactaatttgaacttctctgtataatacaaaaaagtcgttttcacttcaatgtatctgttttagtgcaatctatttaagtgatgtagtttatattttgcacatagatttggccatcactgccccactcttggttgttcctgcgtattctactgaatgcgagaagcgattgaaaccagatacgaatcattgaatttcaataaaaaaaacaatgaatcagtttaattgtac

SEQ ID NO: 112595 - DNA, 306 bp, Glycine max
  unsure (1)..(306): unsure at all n locations
  Clone ID: PAT_MRT3847_72681C.1
annnnnntanangcgtncgnatncngctcnngcnnctctntcatcttcttcctctttatcacccttctcttcctttctcttactctcccatcctcaattccctcactatttccgtctctacgantccaacctttgctcttgggcgaaccctctctctctcnctctccaaactctctacccttncgcttcttccttcacntcttgtttcctccctctggtggcctcttttgtctcttcaacccaanctcttctaaccttcttgtgtacaacctctttgtcaagtccttcagaaaaatcgaatcccca

SEQ ID NO: 112596 - DNA, 580 bp, Glycine max
  Clone ID: PAT_MRT3847_72682C.1
gttttgacctccagatctggaagattgagttatattgactgggaatcttcccttgtggcgatggagcaggaaattggtagtgaaggggctaagtttgcagatgctgcacattttgtagtgaataactcctgggaaaatttcaatcccttatcagtgaccactggaagctcagttgtgcatttacctgatgtccctgaggacagaccattggaagaaatgattaaggtgaacaagagtgatgaatctatttctattgggaaggactgtgaattggagcatgatagttctgttaaattgaaaaatgatgatatggagaagatagatgatctagatgaatccaagaaaaatcagaatggggatattactaatttgtctgttctccaaaaggatgagaaacatacagtggtaagcgttacagtacagaaaaatgaaagaatatcaaatttggctcagccggcagtatttcttctttcagctatttctgaaacgggacttgtcagtctcccttctcttttgactgctgttcttctgcaggcaaacaatagatcatcctctgaacaggcctcatatatccttccat

SEQ ID NO: 112597 - DNA, 361 bp, Glycine max
  Clone ID: PAT_MRT3847_72683C.1
aaggtaacagcatccagtggaaactaagaggagcttaactttttggttaacttctacgttcacgaatataaaattaagttctatcttctatgcattgcaaaccattgtgcattgatgccatagcaggaattatgttattacatcatttagtttctcatgttacatgtctagcacgcacgcaccaacctgcaattgcaatggtttgaagtatatgatggacccttgttagattaaaaaagaatagatgatgtcatacttatcatccttcataccgtttaagatacatagaatgctgaacgacgttttgctttatagatgaatgcctgatgatgttaaacagatgccaataacacataaaatc

SEQ ID NO: 112598 - DNA, 586 bp, Glycine max
  Clone ID: PAT_MRT3847_72684C.1
ccgcgctacctttggcccgggtggttgccgctcccgtgttccagcctttctgtcggggcagctgaaccactgccccccgctggggggtgcgatgcctatatggatcgagtaatgaagaatcagaagatcattgggatggtaaccttaatactactattagaacaattttcactaaagagaatgcagaacaagatttgaattcatcattagtatcagacgacgctgaaagaatcagaagatcattgggaaggtactgggtttgatttgaattttacacatccgacacttgccttttggccagcgagtccttgccaataaattgacattttggtctcttccatgcttgtcatcaacaacaaaacttaaatgttttcatatttcttttttgtatttaaatattgaactttatgtaacaatctgagatgtaaaatttatttttcttgtcattgtaacggtgtatatgtaacatccttacagaaatcacttgctatctgattaaattacactgtttatagaatcataatgtaaaaatctgaggttgctacatagttgggttaagcacgtgaagtcaggaagcccaagtcat

SEQ ID NO: 112599 - DNA, 327 bp, Glycine max
  Clone ID: PAT_MRT3847_72685C.1
aaaaaaccaaattctcaaaaattttttttcccgtctttggagaggatctttacccattttttttaagggttccccccaaaatcattcttggcccccctctaccattttttacagggggaaaaatcatgggatcaaacatgtttttttttccttcaaaaaaaaccatcagggatgatttgccccattttaaaatttcaaaaggaaagttcgtttttccatggggccaagctcaacacccaaattgtgattgctgaccgggccccccctaattgccaaaggtttttggcctttgtccccttaaaccttccatgggatcctttttatttt

SEQ ID NO: 112600 - DNA, 329 bp, Glycine max
  Clone ID: PAT_MRT3847_72686C.1
ggtaaatgcaagtttacagtacggtaaattctactggcaaagaattggatgtgtggctggctgcagcattatcgtacattgccatggcgcgtggtagtgcacatgctgttgcatcaagtagcattgacgcaagtcatctgaagttgtgtcgagctgcacttactggtcaaaaccctccaccatgtgatgagaaatgctgtacagttacacgccaggccactttgcgttgcctctgcagttacagttctatcctaccttcatttggcatataacgccagttctactttgaacgtgcctgctaaatgtcgtctacgattgcctcatagatg

SEQ ID NO: 112601 - DNA, 363 bp, Glycine max
  Clone ID: PAT_MRT3847_72687C.1
ggttcaatactaagcaaaaataatctcttgtaatagacatactgttcataattttttataatggaaaaggtgctttaggggggatctgttgtctttcactataaaactgttgctattccttgtagctggcgtactgatagaagcctactaaaaatatgaatagaataagcttacctaacgcctttctgaaaaaaactatgtataatgtattatttgttacaactaataatatttgtgacatataatacattattgcatataatgcgtagggaacaaattaaaagagaggggtggggggaatttgattaaacaaattgaatattttcaattaacttgtaaaaaagaataaaaagggcagggcga

SEQ ID NO: 112602 - DNA, 324 bp, Glycine max
  Clone ID: PAT_MRT3847_72688C.1
gtctaatttgttcatttagcctcactcctgctctgttgtacgtcaaatcctacgaaacccatttgaaattcaaaatctcgggctggctaactacatgatcatcgtatactatacctaaccactgcaagggtctgatcatgctgttgtgcttccaactgtggtgcagaaaaagaaactgatggctgttgatacaagtgggctgccagagcataagtgtggctatcgtgcatgtgataaacagctagcaccatcatctactacccttgtcactatgttatctgctacagataaatggagagcgacttgagctgcgagcagacacac

SEQ ID NO: 112603 - DNA, 244 bp, Glycine max
  Clone ID: PAT_MRT3847_72689C.1
ggttgtttgtgcagttccaacaagctatttgaaagatgcaggattttcttttatgcggtttggattggtgtgtgtttggactttagaattatatgttgcagttaaaattgtttagactagttttcagttttaggtgagaaggatgagatgtatctaaaagctttggtagaacttagtggttgtttcggtcagtagttacaagttgtattaggccttgttttggtagtaatgaacaatattgctc

SEQ ID NO: 112604 - DNA, 347 bp, Glycine max
  Clone ID: PAT_MRT3847_7268C.1
cccccaaaacggggggccgggaccccaaaaaggggttttaaaccctttgttttaccaaaccccataaaattcctttttttggttaaaggaaaaaatttaattcccttaaaaaaattcccagctccccccaaaaccccaaaaaaaaaaccccaaagaaagggttaaaaaaaaaaaaaaaaaaaattttggccctgacaaaaaaaaaaatgatcaaccccttttggcccacaccaaaaattgaaaacggggctcccccccccctgaaaaaggaacccccggtggaccccattaatgttaaacgggggcccattttgggggtccaaaacctgaccgggggtggacccccc

SEQ ID NO: 112605 - DNA, 555 bp, Glycine max
  Clone ID: PAT_MRT3847_72690C.1
cgatctatcgctagtaatgtaccaggtaccgtacactataagttgctctatcgcgtcggaaattaatttctcgctgttggggttagggtgtagggttggtaacgatggtacggtgtactatattatagtattgggctactacttgttagaagaggttaaggtagtatttgtggggtaagaggtttggaggagtctgggcaggtcggcagggggggaaggtgggattgtaaggggaagaacaagtacgggggcgacggggcagggcggcgacgaacaggaaggaatgaggtacaggtacggaggcttactgggcagggtgggggggggggggaaggaccgggctaacgaaaatttaaatttaaattttgacattggcccaagacgggcacacggcgcggcaaaaacaagtccagtggcgtgtcggggagggtacagaacaaacgtggacaggtacaggtacggcggcatctgggcaggtcggggtggtgaaggacagggctcacgagaccgcaactttgaacgtggagccagaccgacgcactgggcggcggcaac

SEQ ID NO: 112606 - DNA, 610 bp, Glycine max
  Clone ID: PAT_MRT3847_72691C.1
tctgggtcatcagcaaggcccaatgggtcgaagctgccacctgggtagattgggtcagtgacctcaccgagggggccaccagcaatacggtaaccttcacggcacgaggtaacaatgagtatcatgtgaataacaataggggaagaagaaattatagaggaggaggaagaaggggcaattttgtttatgtgcctaaggaggtgcctcctactcctactcatgctggatggtaaatgatacaacaaaggctaagtgtcaaagaccgtagaccgagactgcgacaaggggaccccaatgaaactgctgaggtggctgaagatatataaattttgttatctggtaaaaaaaacatgcaagatatggtagcttataagaagacaaagacagcattttatattctaatacatttgtatggaaggtttatggtatatttgggattttatagtttaagaataggtttatggtatatttgggattaataggtttatggtatattctagtacctgccgtggtgataggtttatgtatattcagagaaaatatgcatagacaattttaaatgaagctaaattgttcaaaaaaaaaaaaaaaaaaactcgagacctcgtgc

SEQ ID NO: 112607 - DNA, 416 bp, Glycine max
  Clone ID: PAT_MRT3847_72692C.1
tacgactcctgaatataagttgcgtttgttgatgatttatgcatctgtctatcctgaaaaagtttgagggtgataaagcttcaaaactaatgcagttggcaaaactatcacctgatgacatgaaagttatcagtaatatgcaacagctggcgggatcatcaaacaagaaatcatctgctgctggtggtttctcactcaagttcagtaaccagaagacaaagcaagcagcgcgcaaagatcgtactgaagaggaagaaacatggcaattatttcgattttatcccatgttagaggagctcattgaaaatctaagtaagggagaattggcaaagaatgaatattcctgtataaatgagccaaatcctagtaatgcacgaggttcagttagaatcagcaaacagacccagacaccttca

SEQ ID NO: 112608 - DNA, 807 bp, Glycine max
  unsure (1)..(807): unsure at all n locations
  Clone ID: PAT_MRT3847_72693C.1
actataagtcgcagaccctttaaaagaagcagcagaaggaagaaagaaagaaagaaatggaggagaaagaagagctcaaaaagtctaaggttattaaaatagactctcaaaaatcatgggaacaccacatctcttatgctaccaatcaaaagtaccctattgtagttcatttctctgctttctggtgtgtcccttctttagttatgaatcctttctttcaagaattggcctccacttatgaagatgttttgtttctgacgttggatgtggatgaggttaaggaaattgcctccaagatggaaatcaaagccatgcccacctttctgttgctgagtggagggactcctgtggacaaaattgtgggtgcaaatcctgatgaaattaggaaaaggattgaccattttgttcactcaactcgttcctagaacttttgttcattgtgctaggaagcatttcatatatgttttatattccaaagtaatatttatacgggttgttctgtgcttgtttcattgttgaagtatatgtttggtgacccgggaaagtcagtagagtgtgaatggtactttgtattgagtttcatcatgatggcattattctcttataaaatcctttcttcttgtaatactggttgaattctgtgcatgtgattgaatgtaaaatgagcaagggaaagtcactggagtgtgaatggtactttgtattgagtttcatcatgatgacattattctcttataatattctttcttgttgtatcaatcnnngcgtatcacctgattggnnntgaaactaatanattcctaatat

SEQ ID NO: 112609 - DNA, 689 bp, Glycine max
  unsure (1)..(689): unsure at all n locations
  Clone ID: PAT_MRT3847_72694C.1
gccggctcgaggccnnggccgggcccgggatgtatagaaacccttttaaagaagcagcagaagcagaaagaaatggaggagaaaaaagagctcaaaaagtctaaggttatcaaaatagactctcaaaaatcatgggaacaccacatctctcatgccaccaataaaaagtacccagttgtggttcatttctctgctttctggtgtgtgccttctatagttatgaatcctttctttcaagaattagcctccgcctatgaagatgttttgtttctgacgttggatgtggatgaggttaaggaaattgcttccaagatggaaatcaaagccatgcccacctttctgttactgagtggagggactcccatggacaaaattgtgggtgcaaatcctgatgaaataaggaaaaggattgatcattttgttaactcaactcattcctacaaatctgtgtaaaccatgcacatgatgaacaaggagttggccaaatcctagaactgttgttcattgtactaggaaccatttcatatatgttttatattccaaagtaatattaatactggttgaattctgtgcttgtttgtgtatgtttggtgagcaagggaaagtcactggagtgtgaatggtactttgtattgagtttcatcatgatgacattattctcttataatattctttcttggtggatcgaa

SEQ ID NO: 112610 - DNA, 265 bp, Glycine max
  Clone ID: PAT_MRT3847_72695C.1
tgagcgcatgggatagactggaggacaaggtttaagcttagcagaagacgaccggtattaccgggacttggttgaagcagcaccgtaccgtgtacaatggagccactatacactctgttatcataagcatgcccgaaggcaccatctacactggtatcttacaaacatggctcgcacaggattacatgttcgctcgtgcgcttgtgccaattgagtctagaatgctgatgcaaacatggaaggaatcagcttgcagaggtgacat

SEQ ID NO: 112611 - DNA, 1329 bp, Glycine max
  Clone ID: PAT_MRT3847_72696C.1
cttccgcgttgaaaccatccaacccccttaaccctaaattcgttgtcttcacttccttccttccttcgcgtgagattgcattttcttcttctgcaggaccaaattgatatacaagatcattgttttagagagagagagagagagagagagagagagagagaggatgtttggttcaaagaaaactcctctgagagatgctaaacctacctctgttgaccatgcccataacccctttgattctgatgaagatacaaaagataacaagtataattcttctaagaagactttgaccaacaccaacccctttgatgatgatcatgttaatgccactggccactcttcatcatcttcttatggcctttcgtctacccatcgaaataggtataagaacgatttccgcgactcaggggggttggagagtcaatctgtgcaggaattggagaactatgctgtttacaaggctgaagagacgacaaattcagtgaacagttgtttaaagatagctgaggaaatgagagaggatgctaccaagactttggtgatgctgcaccaacagggtgagcagattacaaggagtcaccatgttgctgctgatattgatcacgatttgagtcggggagaaaagctgttgggaagtcttggtggcatgttctccaaaacttggaaacctaagaagacaggcacgataactggccctgttgtttttggagaggatccagtgagaaagaagggcaaccacttggagcaaagagagaagttaggattgacttctgcccctaaagggcagtcaaagtcacgtacaacactttctgagccatcaaatgtgcttgaaaaagttgaggttgaaaaagggaagcaagatgatgcactgtcagatttaagtgatctcttgggagaactgaaaggcatggccattgacatgggatctgaaattgggagccaaaaccaagccttggatggttttgacaatgatatggagaagttgatcgtccgcgtgaatggtgctaatcaacgtggtcgtcgtttgcttgggaaataggggtgtatatcatgagattgatactaatttttaatatgcattattcaattaaaggagcttccaatgttccaggatactgatttcaaatatagtaatgtacaatacgcttgtgaaatttttgtctctgaaatatgtaatgtattggttgatttgagattatttatgattcaaattttctatcgtcaatatggtgattcctactctaccttttctggcatgattcattccacaaacttgttctcttttactaggaaacggataagtgcataataaaattcattcacatttta

SEQ ID NO: 112612 - DNA, 335 bp, Glycine max
  Clone ID: PAT_MRT3847_72697C.1
ggaaaccgtaagccgaccctggtatatgcctacaatacaatcccatttccaggcgtcttgggtgctgataccacttaccagtttgccaagccatgcattcttacacagaaaacttttcaccacatactatgtatacatcccagggatttccacacgcttctgattcatgtcctagaagaccaaaaacgcatgttcttgtgtagacagcggaagcctgctgatctgttggaggggaagcctgctggcacaaatgttccctgagtgaagctacagcagaagctagacccacgagtcgtacagagagcgtgagagagagtatctgatacgatgatcct

SEQ ID NO: 112613 - DNA, 721 bp, Glycine max
  Clone ID: PAT_MRT3847_72698C.1
agctcggaattcggctcgagtgagcgctttcctcgagccggagcaatcgcgtgaattttcaacgggattttgcagagcttccgcgttgaaaccatccaaccctcttagcctcatattcgttgtctatacttccctccttccttcgtgtaattacatttttttcatcagcagttccaggaccaaattgatacacaagatcactgtttttttagagagagattgagagaggatgtttggttcaaagaaaactcctctgagagatgctaaacctagttctgttggccatgcccataacccctttgattctgatgaagagacaaacgataaaaagtataattcctctaagaagactttgaccaacaccaacccctttgatgatgaagttgatgttgatgccactggccactcctcgtcgtcttcttatggcctttcgtcttcccatcgaaataggtataagagcgatttccgcgactctgggggattggagagtcaatctgtgcaggaattggagaactatgctgtttacaaggctgaagagacaacaaactcagtgaacagctgtttgaagatagcagaggaaatgagagaggatgctaccaagactttggtgatgctgcaccatcagggtgagcagattacaaggagtcaccatgttgctgctgatattgatcacgatttgagtcggggagaaaagcttttgggaagtcttggtggcatgttc

SEQ ID NO: 112614 - DNA, 1676 bp, Glycine max
  Clone ID: PAT_MRT3847_72699C.1
gtaccgtttccgggttccacggtcgacccacgcgtccgccactggcaacctcaagcgcaggagcgactctgccggttcccaacgtgaggactttctctgcttaagatcgagaaagaatttagaacagggtaatgataaggcaaatgaagatgactcagtgaagataaatgatgacgtggctgcggcggttgttgattgcgatgtgataacaccggaatccaaagcggaaaactcaggattcaatttaaaccttatagcagttaactctgactccgactccgcttttagggtttccaccggcaaccggaagcgcaagattcactcaaccggttccggatgcgagggttttctcaacaaaagaccggggaagaaggctgtcaagagagcaatgacaaacgattcagaagaacaaagtaataataacgcaaatgatgatgatgataatgacgtggcggtggcggttgatgaaaatgtgatgataccagagaacactggtggtgcaaacgttgtagcggataatagtgtacctttgcgtgttcgagaacgtcctagaaattccaatgcaagagagcgtggttccggttatgggaggaacgattacatggaacgattccacgacatagcgcgggaaaacgcgtcgcggtttgctttctttgcaccggaaggggaggaccatgaccggtcaccgccggtggaaccggagcgtgacgaaatcgaggattggcccggtcctttctccacagctatgaaaatcatcagagaccgagggtcgaaactgcaaaacgctgaagcgagttcgcaagcgagcttgtgtgagtctattaagtgggttcctaatgcgaagagagggaatgcaggtgttaatgtttcggttccgtcgttgcaagagatgtgccttaagattctggtgaagaatgttgatgctattgcttcgcttgagagtgtgcctgatgccctgatgcaccggcttagccagttgctctgtgactcgaggagaattaacggccactttctcgagcttcttgtgcgtggaacgcccactgagattcgattgagagattgctcgtggttcccacgcgaacggtttaccgagtcttttcgaacgtgtgacacggaaaatttggtggtactgcaacttgaccagtgtgggcgctgtttgcctgattatgtagtagtttctactttggcacagtcgccaaggcatttatctagtttatctactctatccctcagtggtgcatgccgactttcagatggaggtttgcgtgcacttgtttcttctgctccggcacttagatccataaatctcagccagtgttcccttctcacatcttctagtgtatatattttggctgaatcattaaaatctcttctgaaagagttgtaccttgatgattgccaaggcattgatgctgcactaattgtgccagcactaattgagcttgaacatttagaagtgttgtcagtagctggcattcaaacggtttgtgatgaatttgtcaagaactacattgttgctcgtggacaaaacatgaaagagcttgttttgaaggactgtataaacttgactgatgcatcaatcaaagccattgttgagcactgtccaagattatgtgtgcttggatctatgaacctgcacatattaacagatttatctataggacatcttgcaaatg

SEQ ID NO: 112615 - DNA, 762 bp, Glycine max
  unsure (1)..(762): unsure at all n locations
  Clone ID: PAT_MRT3847_7269C.1
ggtccggattccgggtcgacccacgcgtccgtaatagggcagcccgtcgcggtggcggagcaggcggggctggtggcggtttggttgatcccattgcacctgagcttcccgttccagttcactttgcagcggttcctgcagtgccagttgaagaccggcatcattgcttgggtttcaggggtggctcttgcggttcacgtgttagtgagttgggtttttgtttataggatgagaattgggattgttggcactgctctttccattggtttctcgtggtggctctctgttttgggaatgctcgggtatacactctttggtggttgccctcgctcgtggactggtttttctgttgaagcttttgttggcctttgggaattcttcaaactttctttggcttctggggtcatgcttgcgttagagaatttctattacagactgttgcttatagtttctggatatatgcataacactgagattgcaattgatgctctttccgtttgtgtgactatttatggttgggagtccatgataccactagcatttttgggcgcaaccggcttgggggtgtggtgaggttgagaattctgtggtgtactactcanatggagtcaatgttcagaactgctgtgaatcacaagaaaatgcagttggagataattgtatgtatctgtggtggtgtgagggaacaaggagcgagttttgtgggtgcgtgtagcaaatgagcttggtgcaggcaatgcanaagggtgcagattttgcact

SEQ ID NO: 112616 - DNA, 252 bp, Glycine max
  unsure (1)..(252): unsure at all n locations
  Clone ID: PAT_MRT3847_726C.1
aanaaatgccacaccctctactatcgcgcanccntttnttcacttcttcatgnttcgactcttctgcgcctganctccnacngtngtctgagtngcgccgccgtttggnttcgcggatttctccnatgttcgnntaacgagacanagtgaatctgaatcgcattcgaacgtgntctcttcgacatcttcacttaagccttcganttgcataagatgcttncgagggtttatngnccaaatcacctcaaaccc

SEQ ID NO: 112617 - DNA, 584 bp, Glycine max
  Clone ID: PAT_MRT3847_72700C.1
caattcggctcgagctgaagaagatattcgccctttgtttgaggaacatgggaacgtgattgaggttgccctcatcaaagataaaaagacaggacagcatcaaggttgttgtttcataaaatatgctacctcagaagaagctgatcaggcaattagagcattgcacaatcagcatactcttcctggaggtgttggtccaatccaagtgcgatatgctgatggtgaacgggaacgcctcggtgctgttgagtacaaattatttgtgggctctctgaacaaacaggctaccgtaaaggaagttgaggaaattttctcaaaatatggccgggttgaagatgtttatcttatgcgtgatgagaagaaacaaagtcgtggatgtggttttgttaaatactcacacagagatatggctctggcagcaattaatgcgcttaatggaatctacacaatgagaggttgtgagcagccactaattgttcggttgctgatccttaaaggcctcgtcaaggagatttcaggggtcttgcatttgaggccaagaattggttctagatttgatgcccaggcacaagaaatcattcata

SEQ ID NO: 112618 - DNA, 637 bp, Glycine max
  unsure (1)..(637): unsure at all n locations
  Clone ID: PAT_MRT3847_72701C.1
cggaattcccgggtcgacccacgcgtccggcaccttccctactaccgccggagcagcagccacgcactttttcgctttttcctttcaaacccgcgtccactcatcagcatgatcttttcggcttccacgacgacggtggcgcatcttccgcttcccacgccggcggattcaacagccacctcgccgccgtattctcgccttcccctgccgttgatcacgccttttctcacgcgccgatgcagtctcttactcttccgcatcaccaacacctaatgcgctccccgatgcaacccaagcctcaaaccgacccagcttagttcttctcaattggaggcaaatgggtgtaaaggaggaagggagagacaaacttgcagaaagaggatgaaaggtgggggagacagataagggaaggggatatgagactgactaatcctccattgttttttgggtttgaactttttgatgattttctaggtagatgcattttagaaagtaggatctgaattgatgttagagatcgaacgggttttctggtagagagcaatggtacttccttcatccattttaaaagagtaacatacaagaacactcttccactctaaataatttattagtaatattttttttatataanana

SEQ ID NO: 112619 - DNA, 408 bp, Glycine max
  Clone ID: PAT_MRT3847_72702C.1
ggtcatgaaattaatactttatagtaaattcaagatcaaacaaattattgtgaaaattttccaattctgcaactaagcagacatctggaccgacccatttttaattgttaaagtctattcaattgagcagactttacatgaatcatgcacaaataataaaatctgaaacatttgattttcatgaatctggtccatctataagtcaaaagacaaatagggtgcactgtatgctaagctaagaacaaggaaaaccgatataaaacaaatttggggtggcctactcttgggagcactcaacatggtcatggtcatggatgttttccagctccaaacactcgtttcaggcattcttgccttgttagtaggtgccttgctttataagttaaaagaaacacatggtcctaatgc

SEQ ID NO: 112620 - DNA, 467 bp, Glycine max
  Clone ID: PAT_MRT3847_72703C.1
ctgcttgggggggggggggggggaaatacggcacaaggtacggaaaagttaactgcctagaagcttaaaacctcgggggaggatagcagaatcagaagacagactcgaaggcggagggaagctgccgttatagtgcgactacataatagaccggaaaagcccgcgagttaaacggaacggatggcgagaccaacctaatgtacctagctactggtggaattacgcggggctagcttactagtaaggtttggtaggcgtaaaagaacccgagttgttacattaccactagaagtatggcgaccctgcacgggtataactgtactgctgcctggcgtgcaggttagcgacgtgggccataaagcgccttgtaatggtatagccgacgtaccagtatcaaggtctggtaagcgcgaactggctaccataggcatccggcgcagcgagcaagtctcaacgtcaacgtgggc

SEQ ID NO: 112621 - DNA, 2473 bp, Glycine max
  Clone ID: PAT_MRT3847_72704C.1
gaaagaaaaaagaaaattacacataatccataattattatatatccttccttctgcaatgtacaaactagcaagttaacagaatccggaggcatggataaccttcataacacaaatatattagtgagtcaaatacaaacataccaaagtaaacacacaattaaagttctctaaacatttttctaaagcaaatttaaacccatacagctaaataccaaccacaaattccctttctggagtttcacactcttcgtataacgattacaagtcccttaaatcttgaagctcattagtttatccatgtttcagataggtggagatgcccaaccaaattactttctgtgatgggcatgcatgcacattactctttggatgtttggttatgcttcccgtgcaagataacacttccacgtaattgctggttgcaccttctatctaattactcagcagcatccatcagctacaagcttgaattcttcctgaatgaccaaatgctgaagaattgttgtttctcacactggtttcacattttggtgctgctgcgctcttgtggcaataccatttcaaaggcttcaactagcagtgccactttcttcttcctagctggagcaagctgtgtcacaacttgtcttagagcacaatcaagcatccaatcctctgagttctttctctcatccatcatttgatgcctcaggtcaaccttctcttgtcctggctcaggaaccaatggcagaaaatttggctcttttgggttgaactttctcatttcatcatcatcatcttcaacacccttctttcttctaatgccatctttccaaattttgctcgtgctttcctctttagcacttatgcaacttgtgttttgctggaaccctatagctttgccttggtctttgtccaacaaatcttgatcttgagaagctatgttactttctttttcagacacatcctccaactcaatttggctctcccctttgttgctctcatcattgttctctagactgattgagtatccattttcatcggtcgcttcaattttggaagtttcactcatcttctgacattgagtgttgtcaattgtctcttcatcacgtgcctttgtgttgcaactggccgcatcatcatccttatgcttttcatctccttcaccattattttgtgcattggtcaggtactcaaatatttcctccgtaaaagaaggttggtcgtaaccaatttcttgtgtttcagtgcttccatttgtgtcttcaaggacagaattgatgccactaggttgttcttcaaagtaggtgctttcttctgaattggcttctttgtgtgtttcatcaaccagaaagtgctcataatagccaccaagaatatcatctaaccatgtcactgatacatcatgagaactctctgatgaggactcaacttttgagtcattgtcctcctctgagtacacagaagaatcagcatcctcttcgtgatcgaatccgtgcaaccgctcctcctcccactccatgtcaaaggttttggaatccgagtcatccatgtcaacatcccccatgtcttgttccccatcactgcagtaacttcccatgctcatttcttcatgagaccagacaatagattggtaatcttcatctgcacctccttcattttgttctaggagagagcttcctttggtagcatctacttcaattgcaacattatctaaggattttttcaaatcctcttcaagatcaatctcagatatagagggagaaggaatacaattaccaatacttcttgaagtagtgatttgcatgacaccctcactggcttctatgccattatcctcaagtgttgacttgttatcttcatgatcctcaatctctttgagaaaatctattctccccatttcttctgctgctgttggttttgcatccttttcattggcatagatttcaatgaagatatcaatgccaatttcatcacaagaaggttttgcatcaaagacattctgctcagcatcagagtcctccttctgtgtctcaaggggaaccttcagtctccgagggctgagagcttcaagctttgcacgcttctgcatcttcaaaaggaacctcctcgcagacacgaagctcttcaacggtggcaaatcagcatgatgatgaccattaagagaacaatatgtgtaagggcaaaccttcatggctgaagttccctctgactgagttcccccagagctaagcatgaggtatgcagggaactttgagtccttcaaagttgaagaacatgtagctctctgtggtgcaccatagcacacataacagccctggtggattttctagaacaagctctagaagccttgaaactagtggttttggtcaatgttctcctcgagctcaaactgaatgttcttgtcaaaacttttgcaggcttcttagcacaggaagctttggaatcactgaaaaattgtctaggaacccacgcgtccgccaaaacgtcat

SEQ ID NO: 112622 - DNA, 381 bp, Glycine max
  Clone ID: PAT_MRT3847_72705C.1
gcacactcatcttttctacgtgctacggtctatggtgctcttctaattcggccacgactaggacactcgtacccgtttcctaaagtttatcaagaaatccctatactagttggagaatggtggaatgctaatgttgtagaggttgagcaaaatgcaacagaaactcaacagccgccaattgaatcagatgcatatacaattaatggtttacccagcgatctctataactgctctcaggatggaacataccaggtcaaagtaaagcaaggaaaaacctacttgttgcgcataatcaactctgcactcaataatcaacacttttttgaagtagccaaccatacattaaccgtagttgccattgatgctacctataccaatcac

SEQ ID NO: 112623 - DNA, 323 bp, Glycine max
  Clone ID: PAT_MRT3847_72706C.1
attttgttttcttttgggattaagaaatggctgtaaagtaaaaatatacatgttaaaaatgaagtaaacaaagcaagtacaccctaaatgattgattatatatatatatatatatatatatatatatatatatatatatatatatatatatatatatatatatatagagatgtggtgcggggagcgagggagaagtgtggatatgtgaaagtgagagcgaacgcgaaagcaagcaaacaatagcgccagcccgctgggagcgcggggggggggggggcgggcgggcgcgcgcgcgcgcgcgcgcgcgcgcgcgcgcgcgcgcg

SEQ ID NO: 112624 - DNA, 290 bp, Glycine max
  Clone ID: PAT_MRT3847_72707C.1
atccactgtctgttcgtcggcttttgcacggtgtacttcagaacgacacgtgatggctgcggccgagcccagtataagcccatctaacacgcgcgtgggctggatcgatacagggcgtcatgggccagacgatgagcgctcgcctcatgcgagccgactacaccctcagcgctttgaatcgtacccccttcaaggctccaaccactactgaacctcggagcccatttagactgctcctcccacgccgtcgcagccctctccgacgaagcattctacatcggcggctaccc

SEQ ID NO: 112625 - DNA, 486 bp, Glycine max
  Clone ID: PAT_MRT3847_72708C.1
actctctctctcacacacacactcgctgcgacttctacttattgttaatcccaaatcattgcattcccttcgctgacgcgaatgcgaccaagatgccgagaatggagggcattctgaaccttccagtgcaagaccctctttgtcccgagttttctgctgctcacataaattgggtcaaattggaaggtggtcgccaatgtggtgataatattgctctgattccttttgccagagttgatgattttgtcaaaggggaatcttccaacccccccaatgccctgcgagttttcgcgtagaatcaagaaggaagagacctgtaggaagcattgccaaaccaagggttgatggctatcttgaatatacattatactggtgttcttatggtcccaaagactaccgagagagtgactcgggtgtaggggaggcgtcacatgatgagagggtgtctttgccatttcactgttaaaaggctgtacacccgtcccc

SEQ ID NO: 112626 - DNA, 483 bp, Glycine max
  Clone ID: PAT_MRT3847_72709C.1
aattcggctcgagtgatagtgttgtagtcaaagatttgcacctgcttttccaaccaaaatctccttttgctactgcaaacattttctctccctttgttattggatttcaccaatttttctgtgaacacacacaaaactcttatgcttcttcaaacaacaaaatctttgtcttgagataatggaaaccatgaagcccaaatcagcactgagcaataggagcaagaaactggcaaagacattccagaaggtgatgagcctccgaagtgcaacgaaactcgcttcaaacaatggcatttgcatgctcaattcccacctcaaagtcaaggaagatctcttcaccgatcagaacaagaaaccccaccaaggaaacaacaagaatagagcaattatggaggctctaattgcaagactcttcgctggagtcaccaccatcaaagcagcatatgcagaactccaaatggctcagcacccttacaacaacga

SEQ ID NO: 112627 - DNA, 1272 bp, Glycine max
  Clone ID: PAT_MRT3847_7270C.1
gatgtggatggctttcatcccttaaatattggaaatcttgcaataagaggaagaaagcccttctttgttccttgtgctcccaagggctgcattgagttgttacttaggcacggtgtggaaatcaaggggaaaagagcagtgataattggaagaagtaaaattgtggggttacccacttccttgctattgcagtagaggcaccacgcaacagtcagcgtgttacacgcgtatacaaagaacccagaacatataacttctgaagcagatattgtggtagtagatgttggagtccccaacatagttcgtggcaattggctaaagaaaggagctgtggtgattgacatgggaacaaatcaagttaaggatcccagcggccacggcttttgtgtctcgggagatgtttgctttgaagaggcggttaaggtggcatcagccattacccctgttcctggaggcgtgggaccggttacaatatcgatgctcctctccaacacccttgattctgcgaaacgtgcttttggaatggtttgattagatgatgtcttttctccaaagttctatagtggatcttccatctatatatgcacatgaaataggtttgccatttgtcatgctatttaagagaaagtgactctatttttaattttttatcggcaaatgttaattgctagtttgttagtttttgtaagcaagagggatcaaatccacgtcctttctctcctacccttatttcttaaccatccaaccaaccttatatctctgaaagtgactcaaaattattatcccaatgcttcatgagcatacaacattttctctgctggggcgactaactagagcatctgcatgttactttctatataaacagtatttgttgaggcgagcttgctatatgattgatttattgcattgcgaggatctaaatacaccacacaggatctgcaaattagtctttttcgcttcattgctttgcagtgcaaacacccctcttgcaaccaagaaagaaaaaggaagatgcattttctactgttttgctcattaagtagaaactgatgtagaattttgtgtacatggtttgtacagctatttgaaatgcactctttgcggcatctcttttatggatagttaattaacttttattaagattgagtgaggaggaatcaatggtgtgcatatgcacactcgtacacacactgatattacttcatttatttaattgatgcaattagatgcttcagaaaatgaacatataaagaatttcatttggtccaaaaa

SEQ ID NO: 112628 - DNA, 692 bp, Glycine max
  unsure (1)..(692): unsure at all n locations
  Clone ID: PAT_MRT3847_72710C.1
ggcgtcctcacactgtctctccctcagtcacttcgacttttacttcttgttaatcccaaaacattgcatccccttcgctgagtcgaatgcgaccaagatgccgagaatggaggacattctgaaccttcctgtgcaagaccctctttatcccgagttttctgctgctcacataaattgggtcaaattggaaggtggtcgccaaggtggtgatgatattgctctcattcctttttgccagagttgatgattttgtcaaaggggaatcttccaaccccgaatgccctgcgagtttccgcatagaatcaagaaggaaaagacctgtaggaagcattgccaaaccaagggttgatggctatcttgaatatacattatactggtgttcttatggtcctgaagactaccgagagagtgactcaggtgtaggggatggcacaagcaccaaacctgcttcagggaaggggagcagaccggggaggcgtcacatgatgagagggtgcctttgccatttcactgttaaaaggctntacacccgacccctccttgcgctaatcatatataaccaaagaaggcatgtagataaatcaggggcaccgtgtcatggattacttgacagggatgcggtagggacaagagctatgtatgctccgcgaatttcggatgagttacgccagaaagtgatgtctatgctttat

SEQ ID NO: 112629 - DNA, 250 bp, Glycine max
  Clone ID: PAT_MRT3847_72711C.1
gaaaagaggaaagagttcttttctgagaaaccggcccgaagaaagcccccaagcatgaagctatgaagaaaaaggtgttgtggtaacgccgggaacacctcgccatgcaagaaagcaaaaaacaaaaatctcttttgttgaaagtgggtgggtcgaccaggccgagctgtctgttctcgtatgcgaatgctggctgggtaatgtcatgaagcgcagcaggcaatatgaataaagattagcatcgtccttt

SEQ ID NO: 112630 - DNA, 264 bp, Glycine max
  Clone ID: PAT_MRT3847_72712C.1
gcaggaaaaaaagcgcggggggaaacacgaaggatgaatgcaggctggatctataacacaagtgggttaaatgcaaacagggtgaatgcaacatcctgaactttttgtatccaatctatattgtccacactttaaatgagggggaccaacgacacacgttggaaagagaacaaagtgtgacccccttttaaaaacttcgcctctcctcacaaatatatcccccttactgttttagggggtcaaacaatacttctttttttttac

SEQ ID NO: 112631 - DNA, 989 bp, Glycine max
  Clone ID: PAT_MRT3847_72713C.1
tctcgagccgaatcggctcgagacggctcgagaagacgacagaagggggtgacaatctttcttagctagatcagtgcctcatttttctttcagttttcctgcttcttctcttcttcaactggttttgagattgccattttcttatcttgtttagtttagcttgtttggttgagaggaattaattattttgtataaaacaatgaaggagagtgtaggaaaccctttgcgtcttcaatctgtgaatcatatctccctcatatgcagatcagtggaacaatcaatggatttctatcagaacgttcttggattttaccccatcaggaggcctggctctttagattttgatggggcatggctattcggctacggaattggaattcatttgctagaagcagagaaccctgaaaagttgccaaagaagaaggaaattaatccaaaggataatcatatatctttccagtgtgagagcatggttgcagtggagaagaagctgaaagaaatggaaattgactatgtgcgagcaacggtggaggaaggtggaatccaagtggatcaactgtttttccacgaccctgatgggttcatgatcgagatatgcaactgtgatagcctccctgtgattcccttagttggtgaggtggcaagatcatgttcccttgtgaatcttgagaagatgcagaatcagcagcagatacagaaaatgctccagcaactttgatgagccttttctgttatgttatgtgatcagagcatcctcacggatcacgaggacttgttgctttttttttttatgtggttgagttgtcaatgtgtcattctgttccttttgttttgttttctttaattgtgttatataataataaacaatctgccaaatagatcagcgcttttgcaaccattgattagagtgtttcatagtggagtttgctttgctgctctctctttttaatttaatatgacttctggtaaagtacttcttttagtcaaaa

SEQ ID NO: 112632 - DNA, 618 bp, Glycine max
  Clone ID: PAT_MRT3847_72714C.1
gtcttagaccccttgttaagaccaatgcttgggattatgtagttgtttggaaatatggggatgacccaacaaggtttattgagtgggtaggttgctgttgtagagggagttgtagtgtgaacattgatgtggtgaagcctgaagaggaaaagggtgaagtgtgcaacttggctcaaagttgcagggatgatcattttcattttcagcatctagttagaacaaaggcttgtgaagctcttgctcagcttccttttgcattgtctctctattctggtgtgcatggagaggttgccatatcacaacaagcaagatggcttacccaggattcaattggaacccaagttttgatccctattgttggtggtcttattgagctcttcactgaaaacctgattccaatggatatgaatatcgtagagttcataacagcacatggttgtgtctctttagagcaagaagccatatctgcacagagctacaccagtctgaacatcaatgaacatctgccattaagggaacaatactcacattggtcaccacacatgccaactttaactcctagtgtccatcagcctgcaacgagacagtgcagctcccatcctagcattgaaggaccat

SEQ ID NO: 112633 - DNA, 1283 bp, Glycine max
  Clone ID: PAT_MRT3847_72715C.1
ggaattttagagagagagagagagagagaggtggtggagggaaattcggataaaaaaagaagaaagcgaaacaaacttaaaacgggtaggacagaaattgttgtccctgactcgcgtcggcgtctgtgtatgaatgtgtttgtggagaaaatggaagctgtgatgggactgatgcggaggattcctccgaaacacacagaaacagctctgtcagcgcttctgagccttatgcctgacaactcctccgatctcctctctcaagtcgatcagcccctccaggttctgtgcgatgtcgaatgcggcaaggagttcattttgtgcgaatacaacagagatgccgactcttacagatcaccttggtcaaataaatatcatccaccattagaagatgggtccctcccttcttcgtgaatacaacagagttgcggaagcttcgaaatgacatatttgccaaaaaaatatcatccaccattagaaggtggcatcctcccttcttacatgtgggaagatgattaatgaaggtttcgtagcctgtttttaataaaacaagaccagctcaaagacagggcagggtcgacggggatatttagaggaaggtgcatgggatgctatacatgttatagaggtgggaccagaggaagaagaaaacaccaattatcgtttaaccagtacagttatgctgactctgactacaaataatgagtcatccggaactttcagtttatctggttcaattaggcgtcagatgagtatgaagctatcagttgctgatgggcatctttgtaacatgggaaggatgattgaagaaatggagagtaagctgaggaactcactagatcaggtatactttggcaaaacaagagaaatggtttgcacactgagaccaccatctgaagtggcacagttgagaatgcctgatagcgcctgagagctgatgtgccgttacttggtgtagcagagagaaatttactttgttttagcgtattggctggtaacttgtgtcacagtatttgaaggtaggtagtttcacaacggttggtgtttctggtgggtggccatggttttacagaggtagttctttttgttatttgagtgtcaattgttgttttctgtagtggataagcatcatgtttgttgttgatacttgactgatgattcaacaaaacagtgaaattctaaaactggtgcctaggagaatgcttgacatgatacccttgtgtggaaatgaatcaaatgatatctcgtgccattacaacttacaaggtggattattatttctcttt

SEQ ID NO: 112634 - DNA, 502 bp, Glycine max
  Clone ID: PAT_MRT3847_72716C.1
ggggaaaacttaaaacagttaaatgtttgggtgggcccctgaaacccccaaaggccctgtttttttataggggcccctagtgggcagcttgctttttttcacttaaaaggtcccagacgattccccaaacatgttgtcacagtttgttgtacccaacagcccttgggcccttaccccctgttatttttgtttttagcaacaaccttaacttttttaagggagaggggaggggccccacttgtaacccacagggggattagcccggttgcaacccttggggatggggacaccaacttgggggttgacccccccccttttggctgtgttggaaagcaaaactgcccaaagggagcttgggttctgcccaattttttttacctgggcccaaaaactttgagaaaaactagcctttctattttgggctgctggggcccctggggcacgcttttaagcctttttatttggggggggggattttccacatttacaagcacttttcccc

SEQ ID NO: 112635 - DNA, 249 bp, Glycine max
  Clone ID: PAT_MRT3847_72717C.1
aacgtcggtgtaggtaaccacacttggggaataattttccactttaacattcattgcttttttcaaatacttttgttgcaaaaacaaacatcacacgggcgtttcttttttaaagaaataatttgcaacaccttgttcaaactatgtttgtataattacaaccaagacggtttttttttttcaactccctatccccccgttttttttctctgggggggggggggggttaaacaaaaagaattatatttt

SEQ ID NO: 112636 - DNA, 602 bp, Glycine max
  Clone ID: PAT_MRT3847_72718C.1
cccacgcgtccgcccacgcgtccgtacggctgcgagaagacgacagaaggggattgcacgagcgagtatgaagttcccgactcagtagcccagtcacacctaaacaaaaccctaacgaaaccctgcggaggaaaacgtcgtcgcagcaaccttcacattagcgatggccattgttctccgtcttggaagcagaagcagaagcaaagggaaccacccttcttctcatatcgtgttcttctccacctccaattccaattccaactccaactccaactccaattctcctttctctgacctcttcagtgaaatcaaaaacaatttcaaagaatcctctccctctccttcaaacaccccgcgctcctcgaatttccgcgacgagatcaacaaaaacctccatgaattccgcgcccggaccaccgcgcctccgccgcagcagcagcaaatctcgttccagaaaatctaccaggaaaacatgaaccggaacccgcccaactcctcttccttcaacttcaattccattcgcgacagcctaaaaaacatcaagcccgccgcccagaccacccaaatcctgtcgcgcccaatgccttccaccaccagcggct

SEQ ID NO: 112637 - DNA, 1761 bp, Glycine max
  Clone ID: PAT_MRT3847_72719C.1
cccgcgtccgcagctcactctctctttcttcactcttcaccgcaactcacacttccggcgaaacctccccggaagccatggccagagaatgagtctccgccgattgccatgtcggtctcctgctccaactgcttccccgacgacgaccactccttcctcctctgcggcgaggactcctccggaatcatggattcctcgccggagtgttcctccgacctcgattcctcgccgccgtcggaggcggagtccatcgccggattcatggaagacgagcgcaacttcgtccccggattcgaatacctcaataggttccaatctcgctctctcgacgcctctgccagagaagaatccgttgcatggattctcaaggtgcaggcttattacgcttttcaaccggtcacggcttatctttccgttaactacttggatcggttcttgaattctcgaccgttgccgccgaaaacgaatgggtggccactgcaacttctctctgttgcgtgcttgtctttagcagcaaagatggaggaatctctagttccatctcttttggaccttcaggtagaaggtgctaaatacgtatttgaaccgagaacaattcgtaggatggagctacttgttctgggtgtcttggattggaggctaagatcagtaaccccactttgcttcctcgttttctttgcgtgcaaagcagattcaactggaacttttacccggttcctcatttcccgggctacagaaatcatcgtatctaatatccaagaggctagctttcttgcttacaggccatcatgcattgctgctgcagccatactcactgcagctaatgaaattcctaattggtctgtggttaagcccgagcaagctgagtcctggtgtcagggaataagaaaagtaagcatatatagtatatatgcatggttttaaattgaggtcaccgttgcggtaagccaaaaaaccattatattgcgatcacggctgatgcagccgaaatcgtggtcataatgcgattacgtagtgttaaaatacctggaagtagggaccgcaatttaaaaccatgataatacgttaaattatgatgcgttggtttttgtatatgttaaatggatcggattgccaaagcacctatatctgattattgcaggaaaaagtaatagggtgctaccagttgatgcaagaacttgtgattaacaataaccaaaggaaactccctactaaagtgttggcgcagctgcgagtaacaactcggacccgaatgaggtcaagtactgtctcatcattctcatcaacatcatcatcatcctcttcaacctccttctccttgtcttgtaagaggaggaaattaaataatcgtttgtgggtagatgatgagaaaggaaactccgagtaaagaaaaaaaggaacaataataataaaagagcaagggaagaaaaaaaaaaaaagagaaagagagagaggaaataaggtgggccaagtcgtctagaaacctcaacattttttagagggattttgctattaaaatttgacttgagtgacggtgtagattataatagtattagcatatatatctctatcgtatgtactacgagagtttgatgggtttggagtaatttttatttttatgttggtgactcattaatattgagttggcataattcctctaggaggggagagggattttgcaacatgttactgtgggagagtaaatgagagaagaaaaagaagggaaacactgatacagtggtagaagaattaatgtgattt

SEQ ID NO: 112638 - DNA, 380 bp, Glycine max
  Clone ID: PAT_MRT3847_7271C.1
gaactaaaaagccaaaggtttttttttataaaggagaataaatcacattgttttactcttttactactacgggggattccaccgacggggatgagttcctcacgaatttttttttttactaatccgggggaagggaatacattatcaacattgagtaactaaatagcccatcaacattttgggtaactacccctcaacaatgggggtaactaccccttttaattttttttataaacattcccgtttaattcctacatttacctgttataagggcattttaaatcattttcagggacctttaaatgctggggacgttgaccaaatcaatgcaaattccccatttaaaaatttaatctttcaagatttcccacccaacgggc

SEQ ID NO: 112639 - DNA, 360 bp, Glycine max
  Clone ID: PAT_MRT3847_72720C.1
gttgttgtctatatttttttgcatggtgttccattttattggctgaagcgaagaaaagccttgacttgcctctaacatgtgtatttgggggcccccctcacaaatgtattttttcctctcaagggcggccccccacttaaataagaaaaaatttttctccggggaggggttaaggtgctcttaaaaaagctggtggcggaacaaaacccgccctgggaaaatattggtcggcctcgcgccttttataaaaccccgggagacatgggggggtgagaaaaaaaaaaaaattggggcccgcccccccccctgtaaaaatacttgatttcgggggcgcagtttttttttcgtttccccaccaaa

SEQ ID NO: 112640 - DNA, 567 bp, Glycine max
  Clone ID: PAT_MRT3847_72721C.1
aaaacaaaaccttgtggcttttttttcccttcctcccagggagaaaaaaattcgttggccatttaagggtcttggggggcttccgggcctggctaaattggcttaccaaaggaaaaagggggtaaaaggccccattcccaaaaaaaaaaatccaggcaataaaaaattgtgtaaaatttcccaatgttgaaccaaaggcttaggcccccaaggaaaaaagagcttttttccttagtaaagggggaaattttcccctttaaggaaggggggaaaagaaaataaaaggttgggtgaaaatttctctcggttgtttggtggaggaccaaattgaaaaataacccctgtataaaggaactcgttccaagggtccgggaatcctgggaaaccccctggggccccatcggcttaaagagtcagacccacttggtgttctggaataaacattttcccttggcctatggggcaaacaaaagggggggccttttttctccttttgacaaagaaggggtgttaaggaacaaccctggccccctttattgctgagccactatggtggcaattgtaaaa

SEQ ID NO: 112641 - DNA, 393 bp, Glycine max
  Clone ID: PAT_MRT3847_72722C.1
cttaccataaaataacaggtagactcagagaagaggtgccaaaccttgacgatagctggctctctctagtctgaggcatctggatgtaaaatacgaaacactcgttgctttataaggagaaacgccccaccctttaggattgtgctgcccaccactcacaatgcgcccaaactatgcaaaaactattaaaagaccgtctctgttaagcacttaaaggcgaaaaactggtggaaacctttatgcccttgatccatccaaaggttcgacgacccggccttgcggaccatatatcacacggctacgctaattaagagaaccaaccatcctagatgctcccttcttaaagaacaccatttcactctgagtttacaggggaaacctacacttaaaacc

SEQ ID NO: 112642 - DNA, 168 bp, Glycine max
  unsure (1)..(168): unsure at all n locations
  Clone ID: PAT_MRT3847_72723C.1
tcgcatcgcaccttcaacttaaccnattccactngtaatcgtaaangctntgctagangnnnngacaaagtgtgtctgtgtgtgtgagagaganagcaatggctggctcgtgggcangccgttctctgantntnctagcnancatnnccttcggatgtctattngcga

SEQ ID NO: 112643 - DNA, 706 bp, Glycine max
  Clone ID: PAT_MRT3847_72724C.1
ggttcgggccaggcgtacgcccacgcgtccggacatccaggatcttacagccaaaatggcagaccttcaggaaaagggacgagatgttgatgacgagcttgatttgcaaggcaatgacttggaagaatattttcgcatcaaagaggaagctgggatgaaaactgcaaagcttagagaggaaaaggagcttctagataggaaactaaatgctgatagtgaagctcaaaagaacttagaagaaaatcttcaacagttaagaaacagggagtctgaactgaattcacaggaagaacagatgcgagcaaggcttgaaaaaattcttgataattctgcaaaaaataaagttggccttgaaaacttgaaaaaagaactacgcgtgatgcaggacaaacatcgtgattccaagaaaaaatatgaaaatttgaagttaaaaattggtgaattagaaaatcaactacgtgaattgaaggctgatagatatgagaatgagagagatgttaggttgtctcaggctgttgagactctgaaacgcctgtttcaaggagttcatggtcgcatgactgatctttgtaggccaacacaaaagaagtataacctagctgttaccgttgctatgggtaaatttatggatgcagtcgtagttgataatgaaaagaccgggaaggaatgcatcaagtatttaaaagatcagaggctttctccccag

SEQ ID NO: 112644 - DNA, 231 bp, Glycine max
  unsure (1)..(231): unsure at all n locations
  Clone ID: PAT_MRT3847_72725C.1
ngtccgacccacgcccgtccgatggacacacagtgtgtacttagggacccgatctgttcaaccctatcttatgggttttgtgctgcatccccatagatgatggggggctgatataataatgcgcgctcaggtacccacccgcgcggtggcagccctcgtttgaagagccgaatgctacctcattttgtaaatttgaggacttgaagaggaacttagccatcacaaatacgt

SEQ ID NO: 112645 - DNA, 329 bp, Glycine max
  unsure (1)..(329): unsure at all n locations
  Clone ID: PAT_MRT3847_72726C.1
gagttggtgtcgtantaagctcgganttcggntcgngnantnttataagcagagattcntanttcagnttagccgaantttatacagaagctaccanttaccanacattagaaaaaaaaaaaaanaaccaaccatgggncttancacacccatcacaantccaaaacacttgaanttgctgaaagncangncntgggccactttattctanggntgtttgtttaacacaaaacnccagattccacgaaaaccntcannggcntnntacatnggtttttngctanncttnntggtttntcnttnttcctnttangggctatctctgcttg

SEQ ID NO: 112646 - DNA, 121 bp, Glycine max
  Clone ID: PAT_MRT3847_72727C.1
tttttgtgggaacttaattttactaatgcttggttgtttggggttatcaaagaattcagaccaaaaatgaatttttttcttgaaacaacatcctaaaggggtaagactttaaaaggtgaac

SEQ ID NO: 112647 - DNA, 312 bp, Glycine max
  Clone ID: PAT_MRT3847_72728C.1
agaaggggacacgtcagtttgttgatcgagataactagctacagtgtgatgcaaatgaatgtccttgatttcttcgttgctacaattttggtagcatggcaatgccatgcgtacgatatgttccctcttctaatgaacactggctattgtgcccgtactcctgaggtgaaatgctcaagttggaggcttgctgctgaagcacacaacatcattcgcttctataccatgattgaagagtgcgttgtatcaacaacggaatacatccatggcgaacaatatatttcatactacttaacagctaatcaacaagct

SEQ ID NO: 112648 - DNA, 331 bp, Glycine max
  Clone ID: PAT_MRT3847_72729C.1
ggaggcacaaccccgcaaaaaaaaaataatgaaaaaaagaaacaaaggccaaaatgaacacctacacacatatcatacccccacgtgcaaaaaagacgatagtacacccgaaacaggctggctacataggagggggggcacaagacggggcactgtgaccaaaataactattgtctggggattagggaaaaaaaactatgggttttgtgctgactaaaacactcgaaactcacatttaacctagcctgggaacgccctacacaggctactccagggggggccggggggacacaccggaatccccgaccggagcccggggggggccaaaacc

SEQ ID NO: 112649 - DNA, 304 bp, Glycine max
  Clone ID: PAT_MRT3847_7272C.1
ggatgctcctacatgattaaaggttggctacacttttctgagggtggtcttttttacaaagaccttggtaactctgtcaggggggcacactatgtgtttctgtcactgttcatctttccagaacataatccacatctttaatgttactcatgatgtatacccttcattatattcatcatttgcatcaaatctgatattaatattgtccacttaataatcagtcataactatgcttgctcctctatggacccttcaacaacaacttttgagatgtacatattacatagttgatcctccatcataa

SEQ ID NO: 112650 - DNA, 393 bp, Glycine max
  Clone ID: PAT_MRT3847_72730C.1
tttttaattgccgacaagtgcgtaacttttggtctattttgttctatttatcaaagtcacaacataacatttgatcttacttagtactcctatgagagattcaaatcgcaagtcacatacacgcacgcagctatgatatttcggaaaaaatactcgaacaataaccgatgactcagttcattacggagataacatatgaaaagctagatttccaacactactagtaatgtttaaacatacatgaggctattgtatttagctgtgaccacatgcaatgcattcttaccattcttcctaccaaataaataataaaaaaaaacgtatttaatagtatttttcaatgtatcaattactaatgttttcacttttcatgtaacacttactgtataattt

SEQ ID NO: 112651 - DNA, 431 bp, Glycine max
  Clone ID: PAT_MRT3847_72731C.1
gaaagttggaaagttcaaccgacattattatgcttgatgcaaaaccaacacatttgcattggaaattggaaagctaacttcttaaagggcattagcatgaccgagaacagaaggggcacaggatccttttgtgagggccaattcaaatcccaaggattagcgatttaaattaaattaagccacccatcatgccagagtgattgaagaaaaatctggacctgcactccatgcccttctaatcttctgtgacggggtgcacctcacgcttggtgggagcacgatcatcaacgtaaatctaaccgctgatctgatctaagacctgcacgaaccccatggcataaggcgtagtaaaaccagtcttaacgcaaagggagaacacttcctttccaaggacgatgctggtgcgggggaactctttacgactaatctta

SEQ ID NO: 112652 - DNA, 491 bp, Glycine max
  unsure (1)..(491): unsure at all n locations
  Clone ID: PAT_MRT3847_72732C.1
tggtaaattaaaatgaatttgtggttacacaagaaagaacaaagtagatattgatgtgatgccaatcaaggagaaaatgacagaaaaataggtagggtggtttggatgtatgcaatgaaaaccattggaggtactggtgaggagaatggattgcataatttttagtcttgtaaaaaagagtagaggggaaccaagaacttagaaggaaattattaaaagagatctcatggtgaatgatgttcctgagaatttcgtttttaagtgagtccaatggcttcatatgatctttgtgtctaatgtcacctaatgagataaagctattgttgtttgtgtggttttatggtgtaaaaacttaaaacanatgttaacaatattgcttttaatggtattcattaacggcaaaccattcattataagggtttgtttgatttcacatttcatacaatatcccttgtttgaacattggcaacaacttcagcatctgaaattca

SEQ ID NO: 112653 - DNA, 357 bp, Glycine max
  Clone ID: PAT_MRT3847_72733C.1
cgaccggccggaattcgggtcgacccacgcgtctcgctggagagacacgagggggagcgagagaagggggaacgaagaactcagctcagctgaacagagctcttcgactacattatgcgataacttattttctgagaggtcttttttctctctcttcttcacggattcaccatttccatatgattttgtccaaactaaatcgtgatttttacaggaaaatccggagattgactgagcgtgtataggagccggtatcatagggcgcttggctatgatgttttattggaaggactagtagtattgctgtagcacctcacattgtattgtgacaagagtctgagggactattacgatcga

SEQ ID NO: 112654 - DNA, 533 bp, Glycine max
  Clone ID: PAT_MRT3847_72734C.1
gcgggggggcccaccccaataaatggggggaggcccccctttaggggcccccggggtttccccttttggtttccggtcctttttttttggggaattttaaggggaaaacatttttcccagggaacccggttttccctttttttccccaagttttaaaaccccccccaaaaggaaaaatggggacccctcaagggccgggtcgggatttatttccgggggggcgaggtccctaattggggggcccccccaattttttttttttttttttttttttttttttattttttttttttttttttttttttttttttttttttttttttttttttttttttttttttttttttttttttttttttttttttttttttttttttaggacaaaaggaaaaggcaccaaattcaatttaagtggacactttaactcaatgtcttaggtgcaaagagaagatgccaagtttgagatgattttactatatttttcatattggactgtcttcctctataattttgagttaagtggacactttaac

SEQ ID NO: 112655 - DNA, 383 bp, Glycine max
  unsure (1)..(383): unsure at all n locations
  Clone ID: PAT_MRT3847_72735C.1
aagaacgccaagctttcccctcctccgttcccctcgtccttggcctcctcctcctcctcctcctggcttaaaaggttgttccggtccgttggaattccaagttttgcaatttaaacagttcccaatggatgtgatcccctttgactctgactccattcagttcaagctcgacgacaactttcacgcgggaaacaacaatggcagcgctgttaattccttcgccgccgtccagagcgtggcgtcgatgatggatgcaggtaacanaactacttgccactcgacggtaatggttgacctggtggcgccgacaaatattgacgccaccgtaaacatgaccaatccttgtcagtttcacgatgacaagggttggccatgtaagaatg

SEQ ID NO: 112656 - DNA, 877 bp, Glycine max
  Clone ID: PAT_MRT3847_72736C.1
tgttggcgtcaatttacgcgaaattagggttgatcgaggaagaagaagaagatgtcgtacctgttgcctcacttgcactctgggtgggcggttgatcaagcaatccgggcagaagaggagcgtcgaggaggaagaagaagaagaagatgtcgtacctgttgcctcacttgcactctggatgggccgtcgatcaagcaatcctcgccgaagaggagcgtctcgtcgtcatccgtttcggccacgactgggacgaaacctgcatgcagatggacgaggtgttggcgtcagtggcggagacgataaagaactttgcggtgatatacctggtggacataacggaggtgccggatttcaacaccatgtacgagctctacgacccttccacggtgatgttcttcttcaggaacaagcacatcatgattgatctcggaaccggtaacaacaacaagatcaactgggctctcaaggacaagcaggagttcatcgacattgttgagaccgtctatcgtggagccaggaagggacggggtctcgtcatcgctcccaaagattactccaccaagtaccgttactagtttcattcatctgtaacatacaacaaactaaatattatctcttttcttacttctctggtgtggtgctggttgtggttgtatgatcattctgatttctgcttattcacaactctgttacatgaattgcttttgtcatatgctaaagtgttgttagaataattccttagttttgcaactttgctttagtagtttaggatcgttggtgaagcaaacacaatttgattttttcaataaagttgacattttttctttgaaaaaaaaaaaatgtccaaaaatttctttgcaaaactggcaatcaaaaa

SEQ ID NO: 112657 - DNA, 578 bp, Glycine max
  Clone ID: PAT_MRT3847_72737C.1
gtcaaatgggaaataataataacttggaaaaactataccaagtcacatataccaagcatatcagtagttaatgatcttacactgttaggaatccagaatttgaaaagaagaaaaagaacaattttattaaataaaatagaagataatctctcctccaaagggtttccccttttatgacaaagccacttctttatccccacaaggtttactaatctgaatgcctcccctctaccatagtatcctcctattcgggcctggcccataacatacctctaattaatcttttttcccctaaagataagataaataataaaaaagataaagatagacaaagataaaaggataaataattcctatttttctttataaagataaataaaaaagatagctaacttatttctatttttcctaggataaataaagataattaacttattcctattgtatagtaagtctcctaacatacactatcaaggaattgtatcaatataagtaaacagagcgcaagtcagtaaaatgctattacaaagttaatatatttctataattctattgatttcaacagaacacaaattaag

SEQ ID NO: 112658 - DNA, 183 bp, Glycine max
  Clone ID: PAT_MRT3847_72738C.1
ctcaaacctttttttcttcgagagaacaagaacataacggagggtatattttcttggacagaagaacaagcatagaatggttttagtgagaactaatactgtgaagaaattctctcggcaggtgatagatctttactactctttcatgaccctggacttctatactaacatgaatctttttta

SEQ ID NO: 112659 - DNA, 508 bp, Glycine max
  unsure (1)..(508): unsure at all n locations
  Clone ID: PAT_MRT3847_72739C.1
ccacgcgtccgagaatgctgggcgaagatgttagaagatttaagatggaggggaaggagcacgctgctgtcgatgcgagcgaacaagttccaggatagacagccgattgggacggtggagcagagcctatacgacgggaaggactaccaagatccggggccggcgccactgggtgacccgacggagtgtacgtgcatgggccttttacagagcagggatagcatgagtttgaggccacttttctaggtctgtacatcactggcttaaccgtcatgggagtcgccggggctaagtctaagtgcagtaccgttgggattcaagggatcgcttgggccttcggtggcatgatcttagccctcggttactgcaccgatggcaatgtcagggggacacataaacacggcggtgacatttgtgtctgtttttgctanaagaaggttgtcgttgtccagggcgattctctacattgtaatgcattgctatgggtgcgtatttgaggcgctggcgt

SEQ ID NO: 112660 - DNA, 414 bp, Glycine max
  unsure (1)..(414): unsure at all n locations
  Clone ID: PAT_MRT3847_7273C.1
aaggtttcccgtcatcactgtatgacgtcctccttctttgggggggggggggggcaatagaaagcaaacgtgctagagggtgaggtggactggcttagcataaatagaagctgactgtatacaaagctcaaagggatagatgatcgcgacattggcagcatcgaaatgcaacgcgcctcacaataattgaaaatcggagatagtgatagtaagcagagacatcccgatgataataaattgaagagctacgtagtaagagagacgcgtttatgaaaaacggcagcatatttaagtgcccagagacaaggagatcgaccaaagatgtatcgaggagacgtggaaagcccactggttagcgggtaccaggacaacatgaacntagatacctggctatgagtgacgactcatgggcat

SEQ ID NO: 112661 - DNA, 268 bp, Glycine max
  unsure (1)..(268): unsure at all n locations
  Clone ID: PAT_MRT3847_72740C.1
atcctctagagcagccgctcgnnttgtttttttttttttttttttttaagcttaaacccaccgggtagcccctcctaacaagaggaatacccttttgtcatttgaaaacatccatcaaacacttagttcaaccacaaaataccggaccgaaacctacaggcatacaaactcttcctataatgatttgcataagagcattaccaatcatattcatagcagaaactcgatgaaatttttataaagtacaattcctcacaacatacgagcc

SEQ ID NO: 112662 - DNA, 412 bp, Glycine max
  Clone ID: PAT_MRT3847_72741C.1
caaaaaaagcccccctttccatcaaaaaaaaggattttttttaggttaaaatctttagccctttttcccttttaggaggggggccaaattttttccttccccatttggaaaatggctacccttcccaaattttggggggtatataccataaattggaaggggggttttttttggggggcccggaatcacccttaaagaacgggtttttttttgggggccggggttcttccttcccagggaatagccaaatttttttttataaaacccccccccgggtaaacccgccggggggtttttcctggcccccggaaaccccaaaaacccggaattccggcccaggccttaaaattttttttaaggtctttcctttcccctggtgcctaaaaacgggggactttccccccccccgggt

SEQ ID NO: 112663 - DNA, 310 bp, Glycine max
  Clone ID: PAT_MRT3847_72742C.1
tcgatcgttcgttttttttttcctttttttttttttttttttgtgaatgcgatacacatgcttggagcattgacacaaatttgaatgaaattggtcacgccaatttgcctagcttaataggggatatttaccctaacttaaaacgcgcctgctcacggagtactttcactttaaaggttctctaaaaaaattccatgcagaattttcttacaaattgaacatggatacttttttcacctcttattagtttctggctactatatatatgctgctgtttttttgctttgaagcctgttagtgtgcccaattt

SEQ ID NO: 112664 - DNA, 344 bp, Glycine max
  Clone ID: PAT_MRT3847_72743C.1
ttcaattttcatttttaacaaaaaacaaaatgggattgttaaaatacatgagacgcctgggggaaactacctaataaagcttaatcaaatccaacacaaacagcttcccgtgactgatatcaacacaacagtgaacttgctcattgatgccattgaaaacatcatactgtgtggaacctatttttcttaccaaccttattatactgattatatatcagcttttttcctattttatgcacacaaaccccaaatatattaaatttgtgaggggaaaactaaatcttaaaaaggcatatatccagggtgtttcgaactatgcattatcggacttcccaaacaaactt

SEQ ID NO: 112665 - DNA, 337 bp, Glycine max
  unsure (1)..(337): unsure at all n locations
  Clone ID: PAT_MRT3847_72744C.1
ccgggacgacccacgcgcccgcgttttntttattaagccccccgccacacaaacacggcgcgggtcaatgaaacaacagcacgggagcagcgagncccccagaacacggcaccgagaggccgaaaccggacagcaccaccaccggaacaggggccgcccacagccagagggcccacgaacacaaggagaaacacaccgcagccagagacgccgcccccaacgccgccggcaaaaagggcgacaacgaaaaccacacccaagaagaggaaggccccaacgaacacaacgacggacgcaaaggcgccgaaaaacaaaacgcccacaccgaaggagcaac

SEQ ID NO: 112666 - DNA, 1528 bp, Glycine max
  Clone ID: PAT_MRT3847_72745C.1
atgaggttatcttctgtaacttcttcacctcttcagttcttttccatgatgtctctttcagtttcacctagcttaggatctccctaccaaatgaaatgcgagcaaaggggtttggtattaatccatttgttgctcgctggtgctaattttgtagccaccggtgatttacaaaatgcaaacctcacacttgagcagatttcccagcatgcctctcttgatggggatactatgcagcgaattgcttcttatttttctgaagcactcgctgatcggatacttaaaacatggcctggcatccacagggccctcaattccagcagaataactatggtttctgatgaaattcttgttcaaaagctcttctttgagcttttacccttcctcaagttctcatatatcctcactaatcaggctattgttgaagccatggaaggggagaaaatggtgcatatagttgatctctatggggccggaccggcacagtggatttctctcctccaagttttgagtgcacgtcctgaaggtcctccccatttgagaatcaccggggtccatcacaagaaagaggttctggatcagatggctcataaactcactgaagaggcggaaaagttggatatcccattccaattcaaccctgtgctaagcaagttggaaaatcttgatttcaacaaacttcgcgttaaaactggggaggcactggcaataagttctattatgcagttgcactcccttttggccttggatgaagatgcctcgcggagaaaatcgcctcttttgtcaaaaaactcaaatgcaattcacctgcagaaaggcctcctcatgaaccataacacactgggagatttgcttgacggctatagcccgagtcctgattcggcctcatcctcaccagcagcgtcttcatctgctttgatgaattcggagagctttcttaatgccttgtgggggttatccccaaaagtcatggttgtaactgaacaagactttaaccacaactgtttgaccatgatggagagactggcagaagctctattttcttatgctgcatattttgattgcttggagtccacggtctcaagagcatccatggacagattaaaacttgagaagatgctttttggcgaggagataaagaacatcatagcttgtgaaggatgtgaaagaaaagaaaggcacgaaaagatggataggtggatccagagacttgacttatctggatttgcaaacgtgcctataagctattatgggatgctgcagggaaggaggttcttgcagacctatggttgtgaggggtacaagatgagggaggaatgtggtcgggtgatgatatgctggcaggagcgatccttgttttccataacagcttggagaccaaggaagtaagataaagaagaaaattagtcatgtagtaatggatagagtctctttttttaagtttttcttttcttttctttgtttctaattgtatgacagagttttaccaatgtggtaatgactagtaatgaagagatacttctatttcctt

SEQ ID NO: 112667 - DNA, 464 bp, Glycine max
  unsure (1)..(464): unsure at all n locations
  Clone ID: PAT_MRT3847_72746C.1
caaaactgtattcaattgattgttcctaaattgtatcaccttaacattcttggttttatcacaagcagatctcaatgttctgaatgaatatccacaagttcattcaatttcagcattcaacaatatttacaatggcactggcatttttggtatccaagttacaacagtaagcccctttgaatcctgtccattatgaaacaatggtttctggatatattgcatcatttataccagccaatttttgtattattgtaattaagggtgtttctattaaacccttgtaatgaaagagatcagaatcaaactttcaacatgttttggagctatgagatagttcaagttcaacaactgtataataattctaactccccttaaatcactagtaataatgatgaacaagaattggtgccttattctacgaatgagcttggcaggtttaggtttaacagatntgtgccatgact

SEQ ID NO: 112668 - DNA, 314 bp, Glycine max
  Clone ID: PAT_MRT3847_72747C.1
cttgaagtaaacccatctctactctcttctcggagtttcactgtggaactaaggcatctacttcactattgagtgggaatcccggatctctgtctgaaagcaggctttatcgactttctttgtccgagacccatacatttgtagttcgcacgaggacactaaagaaagcagctctaactccagaagctagacgatcggttttatacgttcattcaggggatgcggaagcaaattaccccgatcaaggaagcgaaaatcagaactgttaatcagagccagcgttgtctgctttctttcaaaggggtggtgaaaaa

SEQ ID NO: 112669 - DNA, 182 bp, Glycine max
  Clone ID: PAT_MRT3847_72748C.1
gcctgcgctacctttactttgacataaatactgaacccgggtctacaacccctttggtggaaagaccgatcccgggtggacaatacttgtctcatttttgatccagttaaccttgtagcccggtacgaagcctatggcgacgacccatatccagggattgggagccaagacgcgatgattct

SEQ ID NO: 112670 - DNA, 313 bp, Glycine max
  Clone ID: PAT_MRT3847_72749C.1
cgtgtctctagcttttcatctataaaaaagcttgatgtgaaacatatgatcaaaacaatatctgggcgtgcgggttcttcagaagttagcgagactgtgagtcacctactcatatctctctcaagcactataatatgtagaggtgcttttgggataaggtatgaatatgaaggaagcgaaaagaatatgttccatgggttgctcaattattcttcaccgtttgataggcaccttctctattacagattttattccattcacggggtggattgataaacttaaaggattggatgcactacttgaaagaaacttc

SEQ ID NO: 112671 - DNA, 511 bp, Glycine max
  Clone ID: PAT_MRT3847_7274C.1
tttttcttttttttttttttttttttttttttttttttgcccagctaggcttacgatttggggaaaaggacaattttggttggaaaggattggctacgccttggtcccaaaaaaaagtcggtgttcacccaaccaccattggtttgcctttccttttggcaggggcgttttaagtttttttttttcaaaaccaccacatatggggaatccttaccaacaattcccattgcttacaaccacagaatttttttgttgacttaagcaactttgtcaaaaaaaatctattgcgggctgaagctggctcaagtttaagctgaggttgccttaaaagcatccttggagcgctttttggcaaagtattcatcatcgcggccaaggattttagcaactgacggcttaacccatttcttgcggccagaaagcacgcgtagggaacaaccactcttctcaagattctcctttgctgaggtgcaaaaggcacagccttttagcgtcaacttcttgctcagtt

SEQ ID NO: 112672 - DNA, 337 bp, Glycine max
  Clone ID: PAT_MRT3847_72750C.1
cggacgcgtgggctgcgcgtgaacaagccttatgtaagccaaagccatggttaagcataagaatgttatccccaacggacactttcgtaagcactggcagaactattttaagaccttgttcaatataacaccaacggaaacacagaaacactgtggtctcgacaaaaaaactctgaaaatattttccacacatatacatctagaccttttacacccattgcacatggtcaaactttgaaatacaacatgaaagtgagatctgaaaggggattttcccttgaagaactcaaggcagcaggtattcccaaaaagcttgcaccaacaattggtattgctg

SEQ ID NO: 112673 - DNA, 409 bp, Glycine max
  Clone ID: PAT_MRT3847_72751C.1
tgcttctaaggctagaggccttcacagtcatttttgtcgctgctataaccattgcgatcgggtaacaaaccaagggtgcaaccattcatctttcaaaatccttaccacctctacatgttcttctcactgctaatggacatcaaatgcttatcatacgtttacattactgttgaccacacgcaacttcactcacgcttgcaatccctcacactacttctagccctcgtgaatagacagataatcaaactcttgtggacatctaactctgctctaaacacattcatcaaggctttactcttttcctacaacggatatgccactgcacactgattcctttgctactaaactaattattatgcttaaaggaaacatgcttgctatattcatatgaaaatgtgacatcaaatat

SEQ ID NO: 112674 - DNA, 1093 bp, Glycine max
  Clone ID: PAT_MRT3847_72752C.1
ggctcgagctctgaatgggggcttctcttctttgttcgattttgacatgaactatgataatgaagcagatggtggctatgatgcttctgctgcttctgagcagtggaacttttctgaaggtgtcaagtcgtcatccttcttgcaagaggctcgagtgctggaggagcctccagttgaatctcaggatgttaggagcaaacagagggctcaaatgctagaagacttggaaacagaagccttgatgcgtcaatggggtttgaatgagaatgcttttcatcattctccaccgaaagattttgctggttttggaagtccaattcatttaccacctgaagagcctcccacattgcctcctcttgatgatgggttgggcccttttcttcagacaaaagatgggggttttctacgcactatgagtccctcaattttcaagaattctaaaagttgtgggagcttaatcatgcacgtatccaaccctgttgtggtacccgcagaaatgggttctgggataatggaggttttgcagtgtttggcatcagtgggtattgaaaagctctcaatgcaggcaaaggagttaatgccgctggaagatatcacagggaagacaatgcaacaaatagcatgggaagctatgccttccttagagggtgcatagaggcaatgccatttgcggcatgatccaataacagtgccagacagtgctggtgtgcaaagggacttgaaaggaatgccatctaaacaaaagtctggcaagtttagttcaaggacagtggccaaccaaacaggctcggagtttgtttcagtagaagaccttgctccattggctatggataaaattgaagcactttcaatggagggtttgagaatccaatctgggatgtcggaagaggaagcaccatcaaacattattgctcagtccattggagatatttcagctctccagggcaagggggttgatattagtgggtcccttggcctggatggagctgctggtttgcagctgatggatgtaaaagaacggtgtgatggtgttgatgggaatatgagcttatcattaactcttgatgaatggatgaagctggattcaggtgag

SEQ ID NO: 112675 - DNA, 389 bp, Glycine max
  Clone ID: PAT_MRT3847_72753C.1
cccccccaataaaattttttgaaaaaattgggaaccaacaacctaccggaagcggttcgacctcacgcgcaaacttttgtttaccgttacattagagaaaactcacccgaataaaactgagactatttttctctcaattccaatactatatagtcgcattttcttttataaccccgagaaaccgctttgcgtcaaaaaacacctttgtgtgtataaggacagtgaaatttcatgggaccacctttacagggaaaaacccgcaggtgctgttgcacttttggcctatgacacgtcggatacaggatctggggcaggtactgacctaacattccaacctttgccacttttagaaaggcttttgggcttttaaaacagttctggctaaaata

SEQ ID NO: 112676 - DNA, 472 bp, Glycine max
  Clone ID: PAT_MRT3847_72754C.1
gttcgaatcttctcatagacaatgaaggtaatctgaagcttgctgattttggactggcacggtcattttctaacgagcacaatgcaaatcttacaaatcgtgtcatcacattatggtacaggtaatttatgtccataataggttttaattttgacctaagttcttttgggagggttgcatcatgaacttatgcccatacacattattgatttatttcattatattattagaccccctgagctgctgcttgggacaacaaggtatgggccagctgtagatatgtggtctgtagggtgcatttttgcagagcttcttcatgggaagcctatctttcctggaaaagatgaggttagtgataatatgtataattcttgtctgaaattaggggtaaagtaaaagtggttgtgaaattgtattgtggcgaggcatgcttttatccagtatgttatcactactcagtatacaagatgtc

SEQ ID NO: 112677 - DNA, 407 bp, Glycine max
  Clone ID: PAT_MRT3847_72755C.1
gtaaaatactactctcttataaaggcattgttgacgtccatttgctgtaacttccacttgttggtgacagctaaagttagtaggatccttacagttactggtttaataactggagaaaaagtctcattgtagtcttttcccagttgttgataaaagcctttggctacaagcttcaccttgtacttagtaatagagccatctggattctcttttactcgaaacacccacttgcaactgatgacagatacagaagtaggtaactcaaccaaagaccatgtaccattgcaaagtaaagcatcatactcaacctgcatagcttgcttccacgtagaattagagagtgctgttttgacattcttatgttcagcgtgtgctaacattaaagtgggattgagtctagacttcac

SEQ ID NO: 112678 - DNA, 188 bp, Glycine max
  Clone ID: PAT_MRT3847_72756C.1
acgcgtacatctcactaggactgcggcctccaccaaaattgcagaccagttcaatccttttcagtcctctctttggacacgttttcacagttacataacatattctgtggaaatatggcaaaacttggagactgtgcatctcatttttctattgcagcactggggttgagcaccttttacgtgaccca

SEQ ID NO: 112679 - DNA, 356 bp, Glycine max
  Clone ID: PAT_MRT3847_72757C.1
agaagcactattaattcatcattcgggtggacgggcccacaacatggtcgaaaatggacatgaaaaggcgcttgctcccaccttaaccatccaattcatcccaatttgacccaaattgcattcctgtctcaaacccattattgccaaggccctgactgccagggcgacaaattctaactaaattgttacagaatttgtaaccctataaagctaaagcttgtctcccatccctcttagacttcgatctgccgggccctatcactacgaaatgcatgcgatctaaacgatatttgggacccagtatagatgaccctctgtttccgttgataaccttaaggctatgggaactgtaaaga

SEQ ID NO: 112680 - DNA, 121 bp, Glycine max
  unsure (1)..(121): unsure at all n locations
  Clone ID: PAT_MRT3847_72758C.1
anattgtggtgacaaattgacttncnatctggaattcgtnttctgatttttggnagtactatttctggttnttncnatgtagnattngagctttatnnattatnaaattaagtttctttca

SEQ ID NO: 112681 - DNA, 936 bp, Glycine max
  Clone ID: PAT_MRT3847_72759C.1
taaatcaagggtgggagtagctgaagggatttagctaagacaactgctctagttaagtggtctaaacattaagctcagctgttaaaagtgactgatgactctgacaacacaaggtattttagacgagctatgcagaaaccatttttactttgtgtctattctttacttgggtgatagacttgtgttagtgcaaaccagattctggttgtttgacttgtcctaggtatctttggcagacatcactccatgggagctgccccgtgataaaaggggagaagtgggtggctacaaagtggataagagatcaagaattggatgattagataattggcacctgcaatcgagattcgatttcgacatcaatcgaagcaattctgtctcataagcaaggtcaccatcatacattttatttttatatggtcagatactcatgaataatcaaggggtaaatttaattagatgctgaaataacaccagtacaaagtttgatagcatgaacgcactaccagctgaccattaaattgagacccattattcattactcttcaaaaaaaaaaaaaaaaaaaaaaaaaaaaaaaaaaaaaaaaaaaaaaaaaaaaaaaaaaaaaaaaaaaaaaaaaaaaaaaaaaaaaaaaaaaaaaaaaaaaaaaaaaaaaaaaaaaaaaaaaaaaaaaaaaaaaaaaaagggggggggccgttttaagggacccaaattttaaaacccgggggggggaaggaaaaattttttttttggggccaccaaaattaaattccgggcccgggttttaaaaggggggggctggaaaaaccctgggggtacccaaattaatccccttggaaaaaaacccctttttcccaggggggggaaaaaggaaaaggccccccacggtcgccctttccaaaaattggccacccctaaagggcaatgggaccccc

SEQ ID NO: 112682 - DNA, 685 bp, Glycine max
  unsure (1)..(685): unsure at all n locations
  Clone ID: PAT_MRT3847_7275C.1
taccgccctgggcaggtaccccggtcnnncggaattcccggngtcgacccacgcgtcacggctgcgagaagacgacagaaggggacccctcctctcgtcgaaactctccgaccccatctccgaattcgcctccggcatcgtaccatgtaacgcctcgccggtacagttcagtttctttcctcccctaaccctaatcttcgcgttttctaattttcgcgcagttctctctgtaacacatccgcgattcgcttcttcttccgtacatggctcaaccagacactctcactatcactcccaccagttctaaggatgaaagggaatccttgaagaatgacactccaattgacaacaatgcttgtaataattctacagatgaaagggaatccttgaagaatgacactccaattgacaacaatgcttgtaataattctacagatgaaagggaatccttgaagaatgacactccaattgacaacaatgcttgtaataattctacagatgaaagggaatccttgaagaatgacactccaattgacaacaatgcttgtaataattctacagatgaaagggaatccttgaagaatgactctccagttgacaacaatgcttttaataattctacggatgaaagggaatccttgaagaatgacactccaattgacagcaatgcttgtaaggatgtgac

SEQ ID NO: 112683 - DNA, 410 bp, Glycine max
  Clone ID: PAT_MRT3847_72760C.1
aatctgtatctttacaccagatacaaaaactgttacaggggtcggaggaacaagaataaccaaatcttttttggagttggagaaagggctcagaggaacaggaaaccgtaaaaaaactcgattttaacatgaacaactgaaaaataaggggctttccaagaaacagtaaacgtgaccctggagaccttttttcagtaattttcataaaaagagttaacctgacgagagcatcctagggtttagtatgcgctataaccaccaatgtgatgaacaacatgaggggagtctaacaatcaatctggttactgggtctataaacgctatggggactgcttattgtacttccaaatatgcctgtgttttatccttgaggacgtccattcgcttgactacctgtacgaacacgacgg

SEQ ID NO: 112684 - DNA, 537 bp, Glycine max
  Clone ID: PAT_MRT3847_72761C.1
tgagctcggaattcggctcgaggctgcctacaccactttctccttcttttcaaccccgcagaaccaaaaaaccttttttcttcaaccctttaaacgccacgtttcgtttcttaaaccattcaaatgcgtccgacctggttcagcttcaacccgattcagaccgaaccctgttatttccagctccgcgctccgtacctcggcactggtcgttccctctaaactcgagcacctagcggaggagttcggctccctgcgggagccggtggagcgtgtgaagcggctgctgcactacgcggcggcgatggcgccgatgccggagtccaaccgggtcgacgcgaaccgggtgatggggtgcaccgcgcgcgtgtgggtggaggtggggatcgacgaagagggaaaagtgcgcgtggcggcggacagcgattcggagattacgagggggttctgcgcgtgtctggtttgggtgctcgatggttcggagccggacgaggttatgaaagtgaccaccgatgatttaacggctctgaatgtcgggtt

SEQ ID NO: 112685 - DNA, 257 bp, Glycine max
  Clone ID: PAT_MRT3847_72762C.1
gtcagaccgcaaaatgacaatcaatgtgcagatacatcatcttctccatctgagatagcccagttcaatgccacacaggagtttcctgatggtaataaggagcagcagtctagccttgccaaccgtcgccagagcacaaggaaccggccattgaccacaaaagcattggaagctcttgagtaccgatttactactctaagaggaaaagaaagaacacagaatgttcagacaataattcaaagtccaaatgtgtacgt

SEQ ID NO: 112686 - DNA, 489 bp, Glycine max
  Clone ID: PAT_MRT3847_72763C.1
tttttggaaatgagacatgggcacttgtcactattttgatcttcgattcaatgacatgctgtgcaatcaatacagcacaataaagggctgatacgaccgactgcttacagcacgttcacgcagttcaggtcacggtatgcctgctgcagacgaatgatcatcgactcttccgacttgcgcacccacacacgcgggtcatagtactttttgttcgggacgtctgcaccatccgggttgccaatctgaccctgcaggtagtctttcttgtcctcgtaaaacttgcgcagaccgtcccagtacgcccactgcgtgtccgtgtcaatgttcatcttgaccaccccgttgcccacggccgtctcgatctcctgagctgatgagcccgaaccgccatgaaacacaaagaagacgggcttgtccgtggtaagcgacttttccttgacgacaaacttctggaagtcgcccaggatctcgggatggagcttcacgttg

SEQ ID NO: 112687 - DNA, 377 bp, Glycine max
  Clone ID: PAT_MRT3847_72764C.1
atccgttttggatttgtgggaagagcccttatctgggggactccctgttttacatgtgccatcactgccatgcaaatgcttacgtccttgcttacgctactgccaaaagatataccactatgaatcagcttgtacagaatagcattgtgcccctcgaatccctaagccccaactgcaatgccgccggagaaagaggccatgattactgattcagaatcgatccactacgcgggcattgctcaaggggatacggacctggggcagaaccagagcgagaaggagcctaacatggaggccttagcagcccaatgtggggaccaagcgcctgcgatgcacgcgctattgtcgcactccgggcataaccgggcttacacctt

SEQ ID NO: 112688 - DNA, 392 bp, Glycine max
  Clone ID: PAT_MRT3847_72765C.1
ggagcagaaaagaatttagcttttatttccacggacaccagcaaactgattaattctaacaaaatataacttgggaggccaatggtttttacccttttcccttcttgcttatacactccccacaaacacaaaggatgttcggtgtaaagcatttagttaaataatgaaagtgtatatcactactcatttaaaagcaatttaaacatcacaagtgatatggtggataatcatttaaatagatttaaaataaactcttatatgatattaaaatatgaatttaaatttaactcaatttcaaaaattaattcttataagcagagttatcctccgttttgatattatctcctgtcaaccccggctgagaagattttttccaatattaaggatcttac

SEQ ID NO: 112689 - DNA, 338 bp, Glycine max
  Clone ID: PAT_MRT3847_72766C.1
cttagtcgaacaaggtgcgatgctgagcaccatggttggctcctatgaaaaatgctgctaggacccgggcaagttacgaagtgagaagtggatattgtctgtgtccatgtctatgacacggtgattgacacgattatagggaaatttacatggaatgaaacaggctatgaacagttgcaaacaatgggaattggactgtgtattgcagtcctgatcatatcagcatccactatagtggctaatgtacgtgtgcttgttccgaatcagcatggcattgatgatgaacctgttgatgaaccacttaatatactatggaatatatctcagcatttcttata

SEQ ID NO: 112690 - DNA, 122 bp, Glycine max
  Clone ID: PAT_MRT3847_72767C.1
gctgtccattctttgccaccctcaatctctgtcctttggcgaacttcattcattcattaaccttttcgacaaccctctttgaaatttgaattaccttattaggatggcccaccaaacccaaa

SEQ ID NO: 112691 - DNA, 1503 bp, Glycine max
  Clone ID: PAT_MRT3847_72768C.1
tctttgatttaatttaatgtacttaactattgtttttcaatgcaatgaatgaaaaaagtaaaaaaccaaagccaacacacaaaacgaggttcaccagtgaagtaagtcgttcacgttttttgtttgtttccacgcgtccgcctttttgcccgctctgcacaacgctcaatcgctcattgctctttgcagaatctctgcaacaaggttattccacactacacactcaaaaaaccagaaccacattgatacgcttcaggtttccctcgatggctttgttttgatgaccttcacctaccctcattgcttctcctttccttcctttgttctgagtgaaaccaactcaatcacttttccaccaccaattgtcttccttttccttacaaagggtcttgttcctttcctactaacctaagtcctaagctctctcatttttctcatttgctgcatcaacatgcagcatgggtgctcacggttactctgttcaccattgtctgaaacataataaaggtcacattttgaccgaggaggtcttgcttttccagctgtcaactttaagggttatgatattttagttttcctcttcattgggtttgttttacttatttttttccccaagtgggcctcttggaatgttgtgtgtgattgtgaatgtgtgaagctctgaagaaaaagtaatggggtggtgtggggggttatcaaaatagggttttttctatgaatgcttggtgaatggatgtaatctgacaaaagggggaaaatgggtgctacgaactctagagcggaaaagaatgaagctttgagtctgtgcaaggaaagaaagaggttcatcaaggtggctattgattcaagatatgctttagtagctgcacatgtttcgtacattcaatctcttcgaaatgttggcattgctctccgcaggtatgctgagtctcaggtagaggtagagtcatctctttctatatctaacaaaaccccttctcaaactagttacccttctccatcatcaccttctcatgttgctgaggttgaggttttggagtcaccgttgcacaccgagagtcctctttcgcctcctgtggccaccactcttagttacatgaggtcagggggtagtgctgctgtcactgttaggatcaatgccttcggtaacaacaactatttggatgatgaatccaccgtggttccaatgcctccacctccaccacctcctcctgagtcaggtgcatcttgggatttctttgaacctgcagaggacagtgacagcttcaggtttgcagtgcattgtagtgagtccagagagtttagggatgaagaaaagggtgatcaatggttacatgttggttctgataggcattgcatgatgcaaccactcctggatgagaagtttagtggaaacttcagcagtgctgcaatgggaaatgagtgtggcaactcttatgcacattgccttgataattcaactgtttcaagaggggagtgaaggtggcaaagggaatggttgat

SEQ ID NO: 112692 - DNA, 204 bp, Glycine max
  Clone ID: PAT_MRT3847_72769C.1
aattattctgagtgaggcgcaagccaactatgtactatttttcctttacttatgcaaaagctacctttgtactatttttcctttacttctgcacaagacacctttgttttgcatgtacatgggcacccttaccggcgtaagtgacctggatcccggttcgttggccgcaatctcattggcgatctgataaagctggttgggacg

SEQ ID NO: 112693 - DNA, 223 bp, Glycine max
  unsure (1)..(223): unsure at all n locations
  Clone ID: PAT_MRT3847_7276C.1
ggctggataaagactcagccatactcgggggggcgtgtattggggggtgcagttctccatgattgaattcattttgaggggggtaatgacactgtgncanacctgaaaggagccagaattttcagaattcacctggactagactaatttagaaaacccggataaatgggaacttaaaaatacttgtgtgatcgtatggtgagatccaattataaacctccaac

SEQ ID NO: 112694 - DNA, 436 bp, Glycine max
  Clone ID: PAT_MRT3847_72770C.1
attggaattggagttgtgattcaattagcatctaccatctgtgcatcaatgcagggaaaggtaaagtgtttttatttgtttgttcctgggttgtagtgttcaattaaattttcaggttaggccccctaatgaaagtcatgcaaacaatgtaagttacacactataagtggttaggccccctaatggaactcatgcaaacaatgtaagttacacactctaaaaaacaatttgaaaattaagaaacattttttcaggaacaattttgccaaagctttaaaatcactgtataggtagcaataaatcaaggatcaaatatataatttttaataactcagactgtctaataatttccttaattttagtctatctatcttaaacaaaaaataaaacaaaaaagggagtagtgcaatttgttaaacagctctgtactcatcca

SEQ ID NO: 112695 - DNA, 482 bp, Glycine max
  Clone ID: PAT_MRT3847_72771C.1
aatatggacttgtttgaggcaggagctgaatggtattgagatccgtcctttggcaagtgccccaagccccgttttatacacataagcggaaaaaagctacacttggaactgaaattcttttctagtagtgagcctgtaggggaggaaaagtcatttaaccccaaccaacaattgccggaccccaaatgagacccgcgccaaagtcagctgccgcaatagtttgccctggtttaactttaccgatgggaaatgattctttcgaatgtgaaggaagagaagccgcccttgagttgctattattagccaaaagggtggtcccccgtctgaggggaggtttgaccgatcggacactggatacataaaactattggttgtctgcacttatattaactaaggcaccctaagcgcaaagttgcgaccttaattctgcctttcttcaatagattaacaaacatgtcatgctttttccatcattaaccaaa

SEQ ID NO: 112696 - DNA, 448 bp, Glycine max
  unsure (1)..(448): unsure at all n locations
  Clone ID: PAT_MRT3847_72772C.1
gggattcttgcatttagatctggaaattttctcgagagaaatgaggaaggcatgaggcatgtcgaacaagagagaaatccgaacgcgagagattttgatctggacatcctcgccaccactttgcgctgcgacagcctcgactaggacaagagagaaatccggccagaccaccatgtcgccggggaccgcgactaggcgcggcagcagttcaagacctgacgtcgtggtgcatcctctccgaccccacacgtaagacctgacgccgccgccgaagtgagtggtgggcggcgacgacaatgattggattgcattccggacatcttcaaatcgggcgtccacaccctcgtcttggtcttgtattgtttggcttggtctgccatttttaatttttggttgattgatttcgactttgttctctcctattatgcccaggaaagtatttttcana

SEQ ID NO: 112697 - DNA, 218 bp, Glycine max
  Clone ID: PAT_MRT3847_72773C.1
tattatacatacacaccttttaaaaaaaaaaaaacaataatctataaatatgcttactttgaaattctatcttacatacaccttcttacaacaacatatctcatatataatattacctaaattcatatcactcaccttctttttaaaacttcttatctataaaaaccctaactttacccaacttaattacctctcaatatattcccatttcaccattt

SEQ ID NO: 112698 - DNA, 235 bp, Glycine max
  unsure (1)..(235): unsure at all n locations
  Clone ID: PAT_MRT3847_72774C.1
tancattcctttactgctaaaacatggtccaagatagaaactagncgcgncgtgtagntgntcaaatttnacgacngtcatggacnggcatgtccgncggacattnagtcatgngaacggcctcncatgacntctagcggtgcatnggngtgcgtatngtgtgcaatgcncngcgntttcaagtacgancgcanctcatgccttcagngngttcaagacgcgtagnncatnccgt

SEQ ID NO: 112699 - DNA, 344 bp, Glycine max
  Clone ID: PAT_MRT3847_72775C.1
acaaaaaatgggttatggggattattattattattattattatcaaataagctaatatgatgcattattattattactactatacaacaaaaaaatgggtttggcacactggtattttatgccatatccatttttttggtgtgtaggcctactatacaacaaaaaaatgggtatggcacactgttattttatgccttgacgtttttaaatgtatccaaaagaattttacaaatgatgggtttgggcttgactgttgctgcgaggttttggtcttttatttttatggactaaaccaagcccgaatgtttttcaaagagtttcctctgggttaggggactaaattt

SEQ ID NO: 112700 - DNA, 144 bp, Glycine max
  Clone ID: PAT_MRT3847_72776C.1
acgagaaaccattccagcatgcccacctaggtgcccctcaccttaccacttattatttccttgtctagtaatcatacttatacgcgatatctctctttatgggattgattaacgccacacaatcccacctttgatttgcacaca

SEQ ID NO: 112701 - DNA, 306 bp, Glycine max
  Clone ID: PAT_MRT3847_72777C.1
aaaactaattgttgatactttgtgcagtgcaatcttccatatgttactatggtagtggctgacaatctacaggtcattctcctttcagttctattcaatggctcagtgtaacatagtttgataggactgttgactttgtagctttattgcagtttctgcgttataaaattgcttctgggctctaacttattgttaatgtttagattttttttttcaattaaatattttgaagtttgacataccaaatgcagcttatgctggctcaatctgtaccataacccaaatttcccagcacggcactcttga

SEQ ID NO: 112702 - DNA, 433 bp, Glycine max
  Clone ID: PAT_MRT3847_72778C.1
ggatcaaatctaacactgcctgaatttaatggctgttctgacatgatctgaattcgaaaatggacctcagtaagtacaagctattttgatttggtacacatcaatgatgctccaaaagccacacatgtggtttctggatctttttgttgattttaattcggctataatatactttacaaaaatatgaagaacaataagggatgacaaagaaagtgacaagaacaacacgcttctgctctcctcagattcatcattcggaacccaggttgacacttgaagatgaatgaagcagtgaagacacagagaagcttgagttattgctttgtgttcaaagtttgcatgactggtactgatgaagatgttggcagaactccaccaatgcttttattccaacatgcaccattcgcaggaggcccttttagaagcacatcaa

SEQ ID NO: 112703 - DNA, 306 bp, Glycine max
  Clone ID: PAT_MRT3847_72779C.1
ctggggtgggttttttttttggcggggtggggggaaaaaattttgaatacataataaacaaacctttcaaggtgtttgtttacaatgaaactcaaaaagattttggtacaaatttttttactggtctgaacttaaaccaaaaaccttggttaattttttgaaagaagggggtggggggaattgaaacaattcatgtcaacttccagtcttatttaagaggggtttttttttttgtttggtccccatgaaatgctggggggggtggcttttgggatggctcctctagtagggggggggtaaaggaac

SEQ ID NO: 112704 - DNA, 844 bp, Glycine max
  unsure (1)..(844): unsure at all n locations
  Clone ID: PAT_MRT3847_7277C.1
acacgaccagatccttgatcaaataccggcacaatggcagtcaagggaaacaaccccatcttgaagaaccacttccgcaaggattggcagcgtcgcgtccgcgtgcacttcgaccagcccggcaagaaggccagccgtcgcaacacgcgcaaggagaaggccgcccgtgtcgctcctaagcccgtcgacaagctccgccccatcgttcgctgccccaccgtcaagtacaaccgccgtgttcgtgctggccgtggtttctccctcgccgagctgaaggaggccaacatcccccgcaagcttgcgcgcaccatcggtatctccgtcgacccccgtcgccagaacctcagcgaggagtccctcaaggccaacgttgagcgcctgaaggcctaccagcagcgcctcatcctcttcccccgcaactccaaggcccccaagaagggcgaggccagcgccgaggaggtcaaggctgtccgcgacggcgaccacgttctcttcaccaactccgctctccccatcaacaacaaggctgttgtcaccgaggagaagatctccgagaacccctccaccgagaacgcctaccgcaagctccgcgacgctcgctccgaggcccgccttgtcggtgtccgcgagaagcgtgccaaggccaaggccgacgaggaggccgagaagaagaagtagatgtagagcatgtacatctttttcaacgaaaatgggttatcttagcgcgtccggcgttcgagggatgggttgatagcgttctggaaatgggaaaggcaccacaaaagagtggccacagtacgaatatccagacgctccatccgtttcgacacgggcagnnnnntcc

SEQ ID NO: 112705 - DNA, 218 bp, Glycine max
  Clone ID: PAT_MRT3847_72780C.1
cggctccttgggtcttcgcaattgctgcttgcacctttgacagagacttttgccgtcctttcaccgtcacagataggctgtttacgagcacgcgtcttttcgtggttttgccacccattcatgccttactctgataccttgcgtctggtgcttggcttgctaattgcgcccattcgcgctgctaaccttagttggcctggcgcgcttgatgctgtcgg

SEQ ID NO: 112706 - DNA, 408 bp, Glycine max
  Clone ID: PAT_MRT3847_72781C.1
cccacgcgtccggaaaaagcctctaaatgtggctagctaataacggcaatgttcctttttggctctattgctgaagctggtctaaaattctgcaattatccaaaaggggggaaaaagggccttaaaaaacattgaggctttgctgtggcattgttattctgaaaaaaactttttattgcaagcaaggaccctcatttccaagctaactgaggagaaaaactctgccattcatcaaaatatcaagcttcagcaagaactggaactgttgagacgcgaagccaaaagaaaccaaagagggattccattcatttatgtatttcttgcgggcttgatcggcatcattttgggatacctattgaaaagaacatggccaccaccgtgttacacattcttcagtttctttgatgc

SEQ ID NO: 112707 - DNA, 2082 bp, Glycine max
  Clone ID: PAT_MRT3847_72782C.1
gttcgaaatccgcatcgagctgatttaagaacaaaaaaaaaatacttcagactgtgggggagcggtggagacagtttaagtctgatttgacgtcgaaatgagaacttgcagctgacaaggatagtgtccatgacactgtatgcaaaatgtacaacattagcaaggagaaatgagccccattttgtcagagccgcagagacccttcatgggaggatgtgcaaaaaaaagcataagccgtccaaaaacaaaacactgcccctcacgtgatgtctcgtgggggttatgaatatttagaaaaaaagttgatggatgagaagagaaagaaaaaactagaggaagctactcaatccggaagcactgacaccgtcattaatcctccatctcccatcaaacgacacgtgaagtggaagctagcccgcaccaagaaaattggtgacatgacatctgaggcaacaaaggaaatcgctgacaagattgtaaatcactttcaattcataattgtaattattttttattattgtgtgattgagtatagaataaatgtgttcttcacaggatgcgcttgaggagcaggcctcacagggttcctttgttacccatggacgtcatgatatattgactgctgccattgggcgaccagaacaccctggtcgtgtgcgtgctgtaggagccggtataaccatcaagcaatactttggatcagcttcaaggacctcctccattgctcccgaataactgcaacagttgacgcaacaaatcaaggaccagctgaaggattcaatcacagaaaaagtcactcgacgactaatgttatccctcagccatatgcaatcacagggactcgcactgcctcctgaacctggtgttggtccttcaactgctcgtgtcagtacaaaggagagttgtgctgatccctcagggaacgatccagacacgggtgactcatacaaatgcgggttgtatattgaagaatatcctcctcgcctggttgccctaggaagagtttatgaggggtccacaagcattcacaacattcctttgctgcatgatcaagtcaaggttggtgttgaggagattagagatgcaaatgctcccattcctgtacccactaaagaggttaaggtcatgggacaggctcttaacacattccttgcttggccgacacatcttgtcaagcgtttatcagaacagggagttgtgggacccgcgaaacctgcagataggccggatcatgaggtcgatgatcccctatatctaatgacattgaccatcccacagctttttctgaagccattgcaggttatgtgggatgctaccttgtttggcctatttaatgaaaacttccctttgtacataaagcatgaagatctgtctgaaattgcacacggtggtcaatgtctcagcatatctgttatacagttgtggattctgtaagtcaatttagattattgttaattacctaatttattgttttaccttcatgcataatttactttgtgttaacaacaatagacatatgactgagacaagtatgcgagccgggaatatcgatgtgtatggattcctcgaaccacagtctatccagagatctggccaatcacaatttgaatcagaaagttacattaagaattgaatgcaaaattcaaaacggaatgtgtacctagaagcctacctaaatggtgcacattggcaaatggtcgttattttgcctaaggaaaatgttgtcatctggttttgttcattgcataataggccagacaactacctcaaaggcataattaatagtgctttgaaaggatttgacgatacccaacaaaataaatccaaacctgttgctaggtggattgttgttaaatatttcactgatgctaaaccattggaaccagagagattgaaggtgtttcgtatacagtgggcaaagtactatttgaaagttaaaaataaaacttagggtgtttagacaattttgtaattgtagtttatatttactcactttacattttttacaattcatgtcttaacattaaatatgcttttaattcatagtaattagtaaatttctcatggaatttctggtaaaaa

SEQ ID NO: 112708 - DNA, 631 bp, Glycine max
  Clone ID: PAT_MRT3847_72783C.1
ttccgggggggtttttttttttttttttttttttttttttttttttttttttttttttttttttttttgggacccccaaacaaaaaacccaataaaggggccaaatttgggaggaggaattctcccaaaaggggaaacttaattgaaaaaagggggggggggacctaaatctccctccttaatttaaagggccaaactaggcccaaaaggaaattttccctggaacaaagggccaaatcccccttggccaaattgggttttaaaacccccacccattttttaaatttcctggggggagaatcaaaaaggcaaaaaggtatttgggccaaaaaaggttaaaaaacttcaaaacagggaaaaagggcttttccccccttgggaaaggacaaacgcaaaaatagggggccccccaaaaaaaaattggggggcccaggaaaaaaaaacaaggggggaggaaaatccggcacccattggaggggggcccagttcccctatttccccaaaaaaggaaaaaaaatatcattttaaaaacccgggggaggggcccaaacaaccggaaaaaaaaacaatttcaaaaattccaggaagggtaaacccataaacaaggtaaaaaaaaacattttaatggaaa

SEQ ID NO: 112709 - DNA, 250 bp, Glycine max
  Clone ID: PAT_MRT3847_72784C.1
gactctcacctcctcactgtgccccctttccctattgggttccccgccgtatatagctcacttgacatccctccctatcgctcgccactgggatcagacccgtgctccaagtcttggtgctgctatcatcttcaaaaaagaccttggacgctatgatccctgcatcatctgggtgagacctttcgttggagctgcacttgcacctctctaccaccagatcggaatcatgctcattcccttcaagtccaac

SEQ ID NO: 112710 - DNA, 530 bp, Glycine max
  Clone ID: PAT_MRT3847_72785C.1
gtcatctagtcgaagattttcaaattctgaggatgtaaccagtgatcatccagtatctgattggaaatctggctcaactgccaagcaggatattacacagtcttcctttccacttgtggggtcaactcctccccctccatcttcaaagaatgaagattcttctatcactcctccagaagcttggggtggtgagcggttaagtgataaatatgcttatacacgtcagcctgtcaatgcaccatctcgttttggggtgttggcttctgctggtcagacagcaggatcaatgttatctggattgcaggatacatcctcatccgtgggtgttagttcctataccagttcaagcctaagttttgcaaatttacgggccaaggatgcttcttcaagccaggaaacttccttggggtttactgatcacatgttctctgctcctttgccgatgtccatcaatacaaaaaccagccttggacaagcaattgattccccaaaaatccttgattccccaagaatgtcatcttttaatcgaa

SEQ ID NO: 112711 - DNA, 319 bp, Glycine max
  Clone ID: PAT_MRT3847_72786C.1
cttgggcttgcgcttacaaacatgcttggtagctgacctttttgaccatccatcgataaggtctaacaagttctaagccaacagggtttttgggtatagctctatggcacttgtaaactagcttgtgtacaggacacttttagctggaatgggggagaggtcagttggtcaataccatggctgatattgatagcggcttgctattagtggggggcatgtgatatcattaaagtgcacggcatcgtgtggtctgatgactatcaagaagttcttggtgtgtgtccatacgccagatgttgtgtaatatagaacgactact

SEQ ID NO: 112712 - DNA, 693 bp, Glycine max
  Clone ID: PAT_MRT3847_72787C.1
caaaaagacgagctctaacctttaaaaaattgaataatcttgttgtacttgtacgtaaatagcctttatcatatgaatttacagaaaaaatcgttacttttagccatacggagggcagaaccaacacagcttacatgcagatcgcattgttgtggcttgaacgcagcctcttctcttaaccttgtaatacagaaaatggaccttcacaagtgttaaactacatcagcaaacttttcaagtttctagtcattcaaactattagccacggatccttgatatgtattccacagcacagtgactcaagtaagctttgaattaaaccacccagaaaatttagccactgatatgatattctgatacattttgtgtatcaatccatggccaggttcctggatagaggtaagcaaccagtggtaatctgacaatgttgctggtggaggtgctccatcaactaggttgccatttatcctcggcccacccttggttaactccacaggcacattggctgaatgaccttgaagatgagagggagaggcacctgggatcacctcctgcttaaaggggagtgctcttgcagattgcagacaaaactctatccactgatggatcaatggtgatggtcccctgatgcgtccaccaatccgatttgtttgaatcctagaggcagcaggaattgcccaccgatccgccttg

SEQ ID NO: 112713 - DNA, 395 bp, Glycine max
  Clone ID: PAT_MRT3847_72788C.1
ggcaattcctgctgcctctaggattcaaacaaatcggattggtggacgcatcaggggaccatcaccattgatccatcagtggatagagttttgtctgcaatctgcaagagcactcccctttaagcaggaggtgatcccaggtgcctctccctctcatcttcaaggtcattcagccaatgtgcctgtggagttaaccaagggtgggccgaggataaatggcaacctagttgatggagcacctccaccagacatcttagaaaggtgtgagtttctagagccattatctaattcaacattgtcagattaccactggttgcttacctctatccaggaacctggccatggattgatacacaaaatgtatcagaatatcatatcagtggtcaaattttctg

SEQ ID NO: 112714 - DNA, 285 bp, Glycine max
  Clone ID: PAT_MRT3847_72789C.1
ggcaacacttcaatacctgtcacccaatttcaaccaaacccaaccaaacctttgggtacccttacgggcaaggcaaccttaagcacccacttcaataatattaacaaccacccccaccctttgtttttggtccttacacaccacacaccttacttatcaatcaatggcgacccccccaaacgacgccggatcgacaaagaaaccccaagccataccatggacccaccaagagaccgggcaccttattcgcgcctaccaagagaaatggtattcccttaaacgggg

SEQ ID NO: 112715 - DNA, 318 bp, Glycine max
  Clone ID: PAT_MRT3847_7278C.1
agccgtcagtacagcagcgaaaggtccagatgcgggtactaaacacaatggtactggcgccaaatcaagacaaaacggtgaagctgcaagcagctcacagcccggtcgcgatgaccaaacactccatctagctccagcagacagaagaccacagacgggtcttgatgcgattcgacgctagattggtacggatgcatatacgatcacataatggtacagcgtccacagatcactcagacgcagcgtcgcgacagcagatctcaagggtatcattgccaaactacaccccaacgataacgcttccattaaccacacaaa

SEQ ID NO: 112716 - DNA, 461 bp, Glycine max
  Clone ID: PAT_MRT3847_72790C.1
ggccgccctttttttttttttttttttttttcccaacactaagttctaactgaataactcgtcgatgcagagttgcctttacagaccacaagtgagatgcccatttttctggacttgcggtcttatatgtgaggaggaggatgcaactcctaagcgtattccaaacatgtgcggacactttgaggacactgcctcttgctttcaagaatcagtgagacatataataacatctcatgaaagctaacctaccagaaagcttattatatgtcatacagtacatcgatacctgatgagggtcacccatggacatgctcaaaccataaacattagcacaatgctgacaactctccactataaaatagtaatctcagtgagaacaatctctcatcagggtctgatactgcaataatgcttgctgaagaactatgtcacaacctcgtgttgtggcttaccaaagcgga

SEQ ID NO: 112717 - DNA, 1066 bp, Glycine max
  Clone ID: PAT_MRT3847_72791C.1
gggctgagtgttctgctttgaacatgtacgagacagaatgggaggattatgctgaccctttatctccctttggagcaacttcaatcctgaatgagcatcctgttgttagcaccaatggaaactcatgggatgaatgggaactttttcagacctttagtggttagtaccttcttgtttgatatgatgaaggatgatatttgaaacgcattaatgatttttgcacacatccatatatatctttgacaccgcaaaacttgattatttttaagattacttctttttcttaacaaagcttaatagtgccgtgcacattctggatcataaaaatgttgactcatcctaaataaattaagaattaactaattttctatccctcacaggaaattcattatgaattttgatgaaaataaagttggtagattttgcccttaattcatgagttaagtttgtcacttgtaacatatctattgtgattccttgttgatattgcgagttggttagaaaattctgcaggcaacaatgagagattgcagtcaattgaccaagtttggacccctaagagtgaaaatcaatccatgtctctgttgaatttcactctgccagatgtcttgataacttcagattggcacgagctgtattctgaccacgacagcacgaaccaagccatcatgactgaagctagtgatgatatcagtggacagtaagcatgtggttcatggaacttactcttcaagtacaggagatttttcttgcgtttggattaacattacttcgttttgcaattgtctgatcttcattcagaaaactgctgaatgtatgattcaaaactttttgttatccatttatgtttactctttaataagggtaatctggtgtaacatctcctgttctgagagtctaatatgggtcagaaacttctgtctttctattgtagctttataaattctctctttgttgcatttattgtgcaccatcctcaaactctttaggacaaatttctttaacaggtttttgaataatttgtagaataacattgtacttgaaactttggacagcatgcagctca

SEQ ID NO: 112718 - DNA, 468 bp, Glycine max
  Clone ID: PAT_MRT3847_72792C.1
ggctcgagccatgtctctgtggagcaccgtatctgctgattgatgatgctgaggacctgcaacctcttgttggagataaccatcccgcttcgggcgaagctctctgataccatcatgatgctcgtaggcccgatgcagaacagcgttatgggtagaccacgacctactgcagctgaggacagcatcactcaacaggatgcctgcacgcactgattgatgcccactccattcggggtgtgcgtaccatgcagcatctgctacatctcggcgtaggcatccactgcttcgatacgacacttactgggcagagcacagccttcaatgatgaacgcgtcgacaccgtcgatcacaccaggcttgtgatccatgccccactcgatgtccaggccgatccacagcatatcacccaaatcgtataggagactgtcgacgggcccgacctgtgcgactacatctatgctgctgagt

SEQ ID NO: 112719 - DNA, 320 bp, Glycine max
  unsure (1)..(320): unsure at all n locations
  Clone ID: PAT_MRT3847_72793C.1
ncnntngangangangtaagatcanaattcngctcgagcnatgnnnncntctgtgacaancannatannttncgtncnnggnnggnatntnnnanacnnangctnnnnnngggnttnngcgaagtnanannnnannnagnnctnacncngnggctgcntnaatatnccgacancnnncanntctnnnntcagcnanaaagtnnnaanaggnccnancgagtngacantncannanatngggnnccgtngcnnanacancnnnngntanngtgtgngacngggcnnaannanngnaganncctgcgnancgnnnggctcnn

SEQ ID NO: 112720 - DNA, 461 bp, Glycine max
  unsure (1)..(461): unsure at all n locations
  Clone ID: PAT_MRT3847_72794C.1
tgttgttatacatggtcataaggtgaaccagcaaatgtcatttatttaaaatttaaaattatgggaatgctttaatatgatggacttagattaggcggcaatacgagaacagcagcacaattttgttatccgttgcagccatgcagcaaattgtagagattcaaactaatatagaacaaagagatgggcacatgcatagttgcacacacaaagtacggagaaactgggagaatcacttcaatagtatcactttttcttaagtgtatctagtacggtacatgctagataatctttaaactgtcaatccaactagatcatcaaataacaatagtttagaaatgtttgcttgacacccaagttaatagaaaagtcctatcctatctattattaaatcctaaacaaagcttccaattgatatcctagntatggtattattctataagcctaaaaacagtctgggg

SEQ ID NO: 112721 - DNA, 295 bp, Glycine max
  Clone ID: PAT_MRT3847_72795C.1
ggtcttcgtaaccacaccgggggggtgggaataaggaagctttcgtttggacttctggctggttatcattggtcggacgggtgtgattcatatgttgaagggcttcgaagtcttgaggacaagccagcatcgtatttggggggggctggaacatggtgtagtaatgcgatggattgtcggtgaaaacacattttttgggcggtcgcttggaggctgaaaataccttgtagctgggcgtggggttgacttgaaggtttaggtctgtttgcagttggtaatggtggtgttatgttgt

SEQ ID NO: 112722 - DNA, 556 bp, Glycine max
  Clone ID: PAT_MRT3847_72796C.1
caaaagaaagggtattttttaaaccgttggcacgagcacaaagcaaatgtgcttacgatccactcatcgtccactttacccacaacggatgagaaccaaattttaggtttttgagctaaaagatacattgttggggagagacaactgatgaggataaagctgggtaaacttcatacccttaaattggtgaggctgacctcgggggaaacacaacttcagaacatcgggactgttccatccttacaggtggctttaccacctaataaaaggcccgagaggccacgatcatcgctagcgtattaaagccatgaatccctttcacgctaattgactgcctttactagcaagaaatatgttctatagcacaaaggattgtactttcacggctgtcaggagtcctaaccacctaaacattcttcttgggaaaatctggaggctacttcccaggcttccttcccccatgatgaacaccaccgattagtttgtacacatcacagactcttgagcttgaaaataatatgccgaacccatattatctcaacaccacatacatttg

SEQ ID NO: 112723 - DNA, 422 bp, Glycine max
  Clone ID: PAT_MRT3847_72797C.1
ggctcgagatccgatccgatccgatccgatggaagagttttcggaagatttgcgcactccgccagtgacgctggcgtccctggtggggtgcccagagctacacactctgatctccacccacctgataggggcgcagtcgcccatcaacaccctcgtcctccacgagttcttcaaaatccaacttttcaacaagaatagcactgactacaccgattcaacaactgccacctcaccctgtcccattgttgccggtatccacaaacgcaattgggtggtcaaacaccgaaccaaacttcccttcgttctcgtcgaactttatcccttccaccatctatctttgtgaccccatccaaaggtttcaagtgtggcttcggactcgataccatcaagactgtgattcgagggaggaacattcatttctc

SEQ ID NO: 112724 - DNA, 352 bp, Glycine max
  Clone ID: PAT_MRT3847_72798C.1
agctaaaccatattattacacacacatgctaacaagcaggggggcttatacaatgcagctgaaacatctacaaaagaccgcgatctgtctcaacctcactgcgatggacatcatcaccgtgtccacagaatgcctgccgagactctagctcacacgcagctcacttcgcatcctaatacttcactactggatccaggtcgactacaatctgacatcacagcaacctgacctgatctggccccgaattcaaagacatcgtactactcctcatgaggcaacgtattccagtcatggtgatttcctatgagctcgacagagaggtcttgcacacgcattgcgtcatattctactg

SEQ ID NO: 112725 - DNA, 412 bp, Glycine max
  Clone ID: PAT_MRT3847_72799C.1
tgctgcacggtggtacgagcgtaactatttacagaggagcatcgcgcgtatatacacagaaaaaagaaaggggaacacgaaaaaaacaaagcaagcggacaaactgaaaaaaatccccccagagaccacagaagacgccgacaaaaccccaaactgagcggacacaacccaaggcaaaaaaaaataaacacccacaaacagagctacaaacagggaaccagggggaaaaaaaacgaagaccaaaaaaggaccgggccgaacaaaaacacccggccaaaaaaacggacatgaacgaacaaaatgcgtacctaaatagggcccaaagagggatagaacccaaacactacagaaaaacctgccccgcggaaactgggggacaacccgggccccggaaggctaaagcaaacaaaaa

SEQ ID NO: 112726 - DNA, 635 bp, Glycine max
  unsure (1)..(635): unsure at all n locations
  Clone ID: PAT_MRT3847_7279C.1
tgtacgtggctaattaagattgcttcctcgctaaatttccaaatatgacatctcgaacgatgtagaaacaataatcttatttgagtacatggctaactattatttagaaatattaaaacaagagagaatagaaaataaacatgcatgcatattgtgtaaaaatcgtacaggaataggaattgatacatagaatcaatcttggggcctgatggcagtcaagatacggaatgcatggtaaaagtgggtggtgggttagagacttgaacaaagccttctagcatttgcacgaccatcccaattgttggcctcatttcaggattctcatgaatgcaccatattgctattttgatccatttttgtaacctctctttgtcagataaggcctcctcctcattctccactagagcatctattctcccttccatatagcaatcacaagcccaatctgccagtactgccttctcttcttccccgggctcctccatcaccacacttcttctgcagcaaataatttccaacaacattatcccaangctgtaaacannnanntnnaccgtcacagcgacattcttgaaccattcnnnagctacatannntngagttcctcggatcatcgtattcnnnctactttggnc

SEQ ID NO: 112727 - DNA, 169 bp, Glycine max
  Clone ID: PAT_MRT3847_727C.1
gtgcagattgccatggacgaacatgatgacattgaaactatggctatcgaagatgttccttataataataatggaaaggtaagtctgagccaggaatctggtaagtctgggaaggcgggatctgaaattggtgattctgcaaggtctcttgctcaggtagaccctattt

SEQ ID NO: 112728 - DNA, 302 bp, Glycine max
  Clone ID: PAT_MRT3847_72800C.1
gggttgtgttttttttttgtgttgtgttctttgaagaaaacaggcatacttctaattcattccggggattacctatctgtgacattcaaaagggtttttgttggccccaactcccggttgggtatatccaaaaacaaattttttccttgaaacttttaataacaggggtttttacatgttgggggggggggtcactcatcaatggggccccgaattttgaaaataaatgttttttccaaaaccaactccaattttaattccctttgcttcccccaacatttttctttccccgaaaataaaag

SEQ ID NO: 112729 - DNA, 648 bp, Glycine max
  Clone ID: PAT_MRT3847_72801C.1
caaaacccttcccgcagagtgagagtagtttgggcgaattcatgtgcgccctcgagaaagttctagagaataatcgcattgactttagatttcggtagttggttatggattcgagcgacagtggtcgcggttactccaagcgcgagagggacgacgaggattgggagtttagtgataagcggaagttcatctaggaagtatatttggggccattctcattgtgtgcggactttacactgtggtgtggggcaaaagcaaagaccgtaagagcacaacagaaatagagaaaggcgaaagccaagaattgccaataaagaacggtacaaaatcagcgtcagacatatttgatggcattgaaatcaatgttcctgctgaggtgttgaagaaaggaggagggaaaaatgtcccaccagcaacaacaacaacaacaacatcatgaaggtccttttataggactagcactataaattttcctattagcttaagctagattgaggtcaagaaagattttgtgcaatgtgaaaatctttatctacctcactagcttcattttcattgcgcctttcttggtttcctttaactttattccgtgtttgagaaagtataatgtcactcaatcaaataatgcaataattaatgccattgtct

SEQ ID NO: 112730 - DNA, 278 bp, Glycine max
  Clone ID: PAT_MRT3847_72802C.1
tgatggcgttcctggccttcatcgtgggttcaacatctcatgtgttgcaattatagtcgcgtcgtggctctttactactggaatgcatgactccctgaaaccagatagttgctggcttgagcgagttgcatagatgactttctgacgctagaaaacctttcgggatggggaatcacaattggtgctcgtttgcctacatataccattgacactgtgcgtagaataatgatcatcacttgtggagaatctgtcaactacaagatctctttccttgcatt

SEQ ID NO: 112731 - DNA, 1779 bp, Glycine max
  Clone ID: PAT_MRT3847_72803C.1
gtagtttgggcgaattcatgtgcgccctcgagaaagttctagagaataatcgcattgactttagatttcggtagttggttatggattcgagcgacagtggtcgcggttactccaagcgcgagaggtacgtcgaggattgggagtttagtgatacggcggctagaagacgacagaaggggacccacaaactccacaagtgtcacaagtcataactcgttagagagagtttgtgtgtgtttttgtgtgtcaccttggtgcatacaacacaagatggaggaccaaaatggtagtggtaagttgagccaagggcttcgcaaggtgaagccttaccttgctatattgtcccttcagtttggctactcagggatgtatatcatcactatggtttctttcaagcatggcatgagtcattggatactctcagtgtaccgtcatgtagttgctgctattataatagtcccttttgcacttgtccttgaaagaaaaataagaccaaagatgactcttcccatcttcctgaggatagtggcacttggtttccttgagccagtgctagatcagaacttgtacaacatggggatgaagatgacctcaacaacgtttgcatctgccactgttaatgtcctcccggccattacttttgtaatggcactcattttcaggctagagaaggtgaacttgagaaaatttcacagtgtagccaaagtcattggaacccttataacagtttcaggagctatggttatgactctgtacaaaggccctgccttccaaatcataaagggtggaggagccatcagcaaccatagcaactctagcagtactagtaccaccgaaccctctgaccagcactggatagttggaactgtttatctcatatcaagttgtgctagttgggctggcttcttcattttgcaatcattcactttgaagaagtacccggcagagctctcactgacagcttggatttgtgtgatgggtattattgagggttcaatcgcatcccttatatttgaacgagacttcagtgtatgggccataggctgggactcaagacttcttgcttgtgtttactctggggtgatttgttctggaatggcatactatgtacaaggggttgtaaccagggaacgtggaccagtgtttgtgacttctttcagccctctatgtatgattatcaccgcagcattgggttcccttgtcttagccgaacaagttcatctaggaagtatatttggggccattctcattgtgtgcggactttacactgtggtgtggggcaaaagcaaagaccgtaagagcacaacagaaatagagaaaggcgaaagccaagaattgccaataaagaacggtacaaaatcagcgtcagacatatttgatggcattgaaatcaatgttccttctgaggtgttgaagaaaggaggagggaaaaatgtcccaccagcaacaacaacaacaacaacatcatgaaggtccttttataggactagcactataaattttcctattagcttaagctagattgaggtcaagaaagattttgtgcaatgtgaaaatctttatctacctcactagcttcattttcattgcgcctttcttgttttcctttaactttattccgtgtttgagaaagtataatgtcactcaatcaaataatgcaataattaatgccattgtctctgttttttgtacttccatatgggaatgcaacagtcaaaaggagtgattgagcctcattgagacgggggggcctaacactagggaccttgcagacccggg

SEQ ID NO: 112732 - DNA, 1256 bp, Glycine max
  unsure (1)..(1256): unsure at all n locations
  Clone ID: PAT_MRT3847_72804C.1
ctaagcttttcccattcatgtgtggtggttatngngataacattggagttagaaaccgtgcctataccgtcgcaacttcaattggaagaaaatgctataatcaatagtggatggtggaatagatcagagtcagtagcttcgcgcaatatctgttcatggtatggtatgtcttgcaacgtcgctggaagcgtaactagaatcaactatcccttttatacacctgggattcgattagcaacactaaacctctctgctttcaagaatttagaatggcttgaggtctcaaactgtggactacaagggactatcccatctgatattggtaatctttctaaactcactcatcttgatttgtcccataattctcttcatggtgaaatgccatctgatattggtaatctccctcactcatcttgatttgtcccataattctcttcatagtgaaataccttcttcattggcaaattttacccaattagagttcctaatcatctctcacaacaacattcaaggctcaattcctgagttgttgtttctaaaaaatctcactgtcttagatttgtccaataattcacttgatggtgagatacctcgtccggcaaatcttatccaattacagagcctaatcctttctaacaacaaatttcaaggtcccattcctcgtgagttgtttctaaaaaatctcattgtcttagatttgtcctataattcacttgatggtgagatacctcgtccgacaaatcttaccccattacaaagcctaatcctttctactcgagaagttcaaggctccattcctagtgagttgttgtttctaaaaaatcttactaggttagatttgtcctataattcacttgatggtgagatacctcctgcactgacaaatcttacccaattagagagcctaatcatatctcacaacaacattcaaggttcaattccgcagaatttggttttcttgaaaagtcttactttgttagatctatcagccaacaaaatcagtgggaccttgcccttgtcacagacaaatttcccaagtttaatattacttgacatttccgacaatctactttctggttccttaaaacccttgtcagtaggaaaccatgcacagctaactactatttacctcagaaacaactcaattagtggaaaaattccaccagagcttggatatttgcctgtcttaagtactctggatctaagatacaataatcttaccggaacagttcctctatctttgaaaaatttccata

SEQ ID NO: 112733 - DNA, 192 bp, Glycine max
  Clone ID: PAT_MRT3847_72805C.1
gaattcaacgcattatatatcctcattggaagggaagaaaaacaatgtaaccaccccttaacaaaatgttatcagacttatgaaaaaaatggtggataaagggggcaaccaaaccgatactttttatcttattctaaaaaattatgttctcgtcatccacttattcacctatcattgagcctaaaaaccctt

SEQ ID NO: 112734 - DNA, 327 bp, Glycine max
  Clone ID: PAT_MRT3847_72806C.1
ccgggcaatttgaaagaaggagggggttagattagaatgtggttttcctttctgtgaccccgctcacagttatttgcaatagcattttcaaagagatgctcattagatatagctatgaaaaattactgcgccaggctaaagcttcaagtttgtttttacaatctttcaaaaattttgattctttgggtgagtatggtgatgataactctaattagtgttcatgaatatggtcgagccttactttaatggcactaaattgaaaagcatacttagcccggtcataaacatcactcattactgatgggctttgataataacttagagcaa

SEQ ID NO: 112735 - DNA, 1672 bp, Glycine max
  Clone ID: PAT_MRT3847_72807C.1
caaagagcaaccaccacaccacacagcacttcccttctcctcctccaccatgtcattgccaccgccgtcgctggtaacggcggcgactccgacggagcttccgatccggcagattccgggaagctacgggttcccgttgctgggccccatctcggatcggcttgactacttctggttccagaagccagagagcttcttcagaaagcgagtggagaaatacaagagcaccgtgttccgcaccaatgttcctccctccttccccttcttcgttaacgttaatcccaacgtaatcgcggttctcgacgtgaaatcattctcccacctcttcgacatggacctcgtcgacaagaaggatgttctcgtcggagactttgtccccagcgtcgccttcaccggaaacatgagagtcggcgtttaccaggacactaccgaacctcaacattccaaggtgaagaactacatcatggatattctgaaaagaagctcaggcatatgggtatcagaactagaatcaaacctagacacactgtgggacaacatcgaagcatcactctcgaaatcctcatcagtttcgtaccttttcccgttacaacagtttctcttcacgttcctctgcaaagtccttgccggtgcagaccctgcacgtgaccctaaaatcgcagagtcaggctattccatgcttaatagttggctcgctcttcagctgctccccacagtcagcgtgggcatccttcaacccctggaagaaatcttcctccactcctttgcctaccctttcttcctcgtcggtggaaactacaacaacctctacaacttcatcaagcaacaaggcaaggacactataaaccggggcgcaatcgggttcgggttaaccgaagaagaagccatccacaatttgctcttcgtgctgggcttcaactcctacggcggattctccatttttctcccctctctgatcgatgccatagccagcaactccgcattgcaggagaagcttaaaaaagaagcgagagaaaagggcgggtcaacgctgaccttcgactcggtcaaagagatggacctgatccaatccgtggtctacgaaacgctgcgcatgaaccctccggttccactccagtacggtcgagcccgaaaggacttccggttgagttcgcacgactcggtcttccacgtcaagaagggcgagttgctgtgcggctttcagaagctcgtcatgagggactccgttatattcgacgaaccggaccggttcaagccggaccggttcacccaagagaaaggggcccagttgttgaactacttgtattggtccaatgggcctcagaccgggtcgcccagtgtgtccaataaacagtgcgcgggtaaggacgttgtcacactcaccgcggctttgattgtggcgtacctttttcgcaggtatgattccatccaaggggatggcagttccatcactgcccttcaaaagaccaagtgaaagaagggtaaatgtgtattttcattgtggagcttgtattttatctaaggtatattatttacttgagaatgatgatctatttatatagaagaggcaggtttatgcaactctttcataaactacaatcttcaattgtaactaacagatgactgatacattttgtaatcgtatgcgcacttcttttttttttttcccaaa

SEQ ID NO: 112736 - DNA, 253 bp, Glycine max
  Clone ID: PAT_MRT3847_72808C.1
cccactcttacggctagttgctaaaaatggctcagaatgaggagaaggctaacttgcatttttgggatgcaacatgtatcacaatttttggcaaacgatcgatccatgtcgccaagagtagattgcactatgttctctgaattaaaatcatgcatgtctgtttttctatattcatattgcattcaatttggtcctttattctatagtggcgcgacaccaaggtttgccttcctattttgatgaattattggga

SEQ ID NO: 112737 - DNA, 408 bp, Glycine max
  Clone ID: PAT_MRT3847_72809C.1
ggggccaaaaaaaaaaatttgtttttaaaaaaaaaaaattattccctccggggaaggggcaaaaaattggggttccccttttaaaagggaaaaaaccccaaataacttatggttaaaggccccttttttttaaaaggggaaaatttgttgaaccccctcccaaaaaaattctggcgttaaaaccccatttaaaaaggcttaagggaaaattggttttaaaaacgggttttggggggaaagcacctcctttgagcccctttcctaattttgggggccgcccccctttcccccaaagggggggggggttttttttttttttggtgacccaaccccccccagtttgggcccacccccccctgggaccatttgggaaaggatgggatggaaaatcctttcaaatcccttttt

SEQ ID NO: 112738 - DNA, 292 bp, Glycine max
  Clone ID: PAT_MRT3847_7280C.1
tggtcataactggggacactgttgtacgaattggggacgtaatatatcgagacgctagaaattgcacaacggaagcactcaagatctttgaatggtcataactgatcacaaggatgtccaattcggggacataactcattgagacgctcgaaattgaacaacggaagctctcgagaaattccaaaggtcataactttttacacggattgtcgaatttgggacgtaatatatcgagaggctcgaaatggcacaacggaagttcttcgagaaaattcgaatggtcataacttat

SEQ ID NO: 112739 - DNA, 802 bp, Glycine max
  unsure (1)..(802): unsure at all n locations
  Clone ID: PAT_MRT3847_72810C.1
ttcaccgtcattgccacatccctaccattcaaatctcctctcttcttttgaatttgagaaaccttcttaattcttttacttttgttccatcgatcaagagctaaaatctcatataggagtccaattaatgggtcgctactcgacgtggttgctctcctcgacactcgtccttttgggcttcctactcattcgggcattttgcccacctggtgtgcatctttgctcctcgccttttgaatttgagaaacattatgaaatccctcatggcaacaatgggtggctacaagaagatgttggtgtttacaacaattctgctactagctttacagcaaatatgggcatttaggccattaaaagaggatcaatggttgaagcagaggctagtaatacaatcactacacagaggctccgagcaatattccgaaagaaatccatgctccaccgttcctgggcgcagtagtcgtagaagctgcacttttgttcatgcagcaccaaccttaccagaagttgccaattagcagcttctactatattatattacattatatatattaatggctttctatctcgtgagactcaaaaatatgtctcgagttcttggtcgatctacttaggcctcaggccactcttgctgatacagtgtttctgtgcaattgttgtgtactctttacttggctatgttttggcactctttgtgcttgcatttgctgtcatatccaataaattcaatttgcctaccnnnnnnnnnnnnnnnnnnnnnnnnnnnnnnnnnnnnnnnnnnnnnnnnnnnnnnnnnnnnnnn

SEQ ID NO: 112740 - DNA, 157 bp, Glycine max
  Clone ID: PAT_MRT3847_72811C.1
tttcatacagctctccacatagcccaaagaccctcaccaactgcacctcataacacattcgcagcccgaatggctcatcgaacgcgccatcaatcctaacatgaatcgccccatgcgtaatgagacctcgcagcgactaccgtacactatcgaacac

SEQ ID NO: 112741 - DNA, 277 bp, Glycine max
  Clone ID: PAT_MRT3847_72812C.1
tgaacaagaagatttcaattcatctaggagtgacattggggattcacataatccactttacaccgatggaattgactctgtgctgctagatcatggagattattcttatgtgtttgaccctgatcaatcagatctgtcacatgatgaatatgataacctcaccaagagtttctacccttcgtacctctatcccaatcttgacgaagatatggattactctgacccacctgatacttctcgtaattatggatttgctgacgaagatcatgttctttgg

SEQ ID NO: 112742 - DNA, 445 bp, Glycine max
  Clone ID: PAT_MRT3847_72813C.1
ggactccaagctcctattgtcatggatccggagagtgtgtggccaacagaaaccactcttgtttggagtgagttgagccaagccatcgtgaacaaagactgggaaaaagcaacagaagcaaagaaaacagtggaggaaagacaaagggagctccaaagagaaagagagtcaaaagggaaaacttggattcctaaacactttagagtgtcttatagcaaagaagagggttgggactgttcaccaattcaaaagtcagtcccaaacgcccctatcgtcaccttgtaatgtgctaattatatatgtatggtttatgtgtgctaattatatatgtatggtttatgtgtttgagtaagtgttaataaaattgattatgaaatgatgtgatttatatgtttgaatatttttattatgaaattatagcagtaataaaaattattattaaaaa

SEQ ID NO: 112743 - DNA, 209 bp, Glycine max
  unsure (1)..(209): unsure at all n locations
  Clone ID: PAT_MRT3847_72814C.1
ggaganngnccannnccccaaaggggccgcgnaaccccggaggagaagaaaannccnnacaaaccccaccncancgancncagnaacaaacccgaacggnnnnngggngngaaacccgaagggaaggngccagnggnncnnnnnganggcaaaagggcggcngannccgacgnaancgngggganaccagaggaaaagnacccagaacc

SEQ ID NO: 112744 - DNA, 330 bp, Glycine max
  Clone ID: PAT_MRT3847_72815C.1
ttacaaggccgagaaccggaatttcactgttgcaactatggctcttagtgtgcttaacgtatctatctagtacgttgtactcaacatcatcgagccggctccctaagcagagccaagaactttaggagcctttacaactccatgatgcaaaactatccaaaacctgaagggtgctcacaggggacatgatgctatcggagatggcgaactcataagctaccttcacatatatggctacctaacaaagggtagactttccaacgacaacttcgacgaaagcgtctagtacgccctaaagcactgagaagcattccatcactaacgcgacac

SEQ ID NO: 112745 - DNA, 179 bp, Glycine max
  Clone ID: PAT_MRT3847_72816C.1
ctcgtcaagctaacgctctcgctcctgcgcctcggcttcaactcctccggatggtacttcactgcaccttgaactctctctctttcgcactaaacgacgcacgaataaacaaaacgactgtgtgtgtgattgcagcaaaacggcagcgaagatggcggtggcgaggatcaagctgctgc

SEQ ID NO: 112746 - DNA, 393 bp, Glycine max
  Clone ID: PAT_MRT3847_72817C.1
ggataaattaattcaaattttttctattttaaattttttgtttggatagggcaattcaatttcctccatatgcaaaattttaattttatattttaaatagataaaattttaatattaaactttatagaaaaaaaatacaatctaattttgaaatattagttaaaaaatattttcaatttttaataatttataaatacaaaaatattgataattttaactagggttgttttgtctaaccataaccagtgatatttttaaatcaacatcaaccaaagctatttttcggtcgacatcaaataaggttttttttgtcaaaagtatgtcgaaaatatttgttagctgatgtcagtcggggctattttttggctcaggttggttgagtctatttttcag

SEQ ID NO: 112747 - DNA, 432 bp, Glycine max
  Clone ID: PAT_MRT3847_72818C.1
tagtttgtcagtaggaacaacaagatcagagtccttcatatgatggtacatttcagctgagttcataggtggtaaaggaagcttccggttcttatagcccacgacaattacttgtgttaagccagtgattaagctgccttgtattttattctttacataaagcggagaagcaagaaagaagaagaaagtggacatgaacataagtgctgctggaactccaaaacctactttccatccaaaatgatcttggatatatactatgactgtgagggcaattatgacagaaaaagctgtagaagcataataccagctgaaaaatgtttctaaggccctctggttgttgggcttatcttttttattcacctggtctgcgccaaatgcgatggagcatgaaaggccaccatttccaatcgacatgagctccagccgaat

SEQ ID NO: 112748 - DNA, 508 bp, Glycine max
  Clone ID: PAT_MRT3847_72819C.1
actctacatttattatcaatgggtcagagccgtgtgtcaagcaactgtagctgcaacggtcgcggcgggtactggacgttgccccttggcgtggattacgtgctgcgcgaaagccatagccattcgtggttatgagccatagacgcgctctgtaactcctgcacctctaggaaccagcgagcgcccctccaccagggttacatgagtatggccaggataatcatactgccagctggctcgtcccggccaacacctttagaagcactaagcagccttggctgcgttcgcagtcgaatcgctctcgatgttgccaacctctggaaatgttttgaccttgtcgagcgtttcttttgacatgctcgcagttacggtagcaacacaatcaagtctatcccggacatcagcgcctgctgctttcagctttgagatggcagcctcgcaggcggcattgaaggctgctggatcctccgtctgggaaggcaatcccttgaattggatgatgtatttt

SEQ ID NO: 112749 - DNA, 324 bp, Glycine max
  Clone ID: PAT_MRT3847_7281C.1
gccaggcaagccccactcaaccaccacacctctgctagttcacgctatccctttctgctcttcttctacctttcaagttctaacagcctaaagatggcacagacattcctatttacctcacgagcggtgaacgagggacaccctgacgagctctgagaccaaatatacgatgctgccctcgacgcttgcctcgagcaggacgccagacagccaaagctgcctgcgaatcatgccccagaaacaactcggacatggtcttccgagaaaccacgaccaaagcctgcgatgacctacaagaagataaagcgcgacccctccacgaac

SEQ ID NO: 112750 - DNA, 238 bp, Glycine max
  Clone ID: PAT_MRT3847_72820C.1
ggatggaaaaaatttggagggggactgggttacaaaccatgttacttacaatagtaatctttttatcaaagccggaaaagattacttctgtttggaagaatataaaagaatgaaattggtatttctataaaattgtcaatttctatacaattgcttttacagcgaatgtactcgtcaaacaaataaatttatccttataaccaagtgcttcaagaggaaatagatgggataattcaac

SEQ ID NO: 112751 - DNA, 588 bp, Glycine max
  unsure (1)..(588): unsure at all n locations
  Clone ID: PAT_MRT3847_72821C.1
aagtctcataatattgccttaaaaactgtgtaaaaaaacataatgaaatttcaaccaaataaaattgttgagagataaagtttgattcttatattatttttttattattgccttgcactggctaattatttttcctgaaattcaataataacatgttaactaattgttaagaatatggtaaaataaaaggagaattctggataataaattgttgatgataaaatttgattcttataatataaatttataatttccttgcttgagttaaatattttgcgtgaggatttttttaaaaacaattttgcctgagatttaacaataaaatattaagatctaatgtgacaaaattaaagagacaagtggtatggaatagattgatgtgatatatttaatagataaatagtggaaacataaaacaacatactctctccgcattcctttgtaattgtcgagttttttctctatttgtctgtcattcacaaagaaaattccacacttattttattnagaataaaaaaaaaattattgattttttttttagtttttacanaataacccttataagaaggataaaatgaaaacgaaagt

SEQ ID NO: 112752 - DNA, 229 bp, Glycine max
  Clone ID: PAT_MRT3847_72822C.1
ccctacgaaccgtggctcgtaaaggaaacttaaaagcttcaaaattgaagaaaaggcgttcattcatgggcgtccccttctcctaatttatcttttcactcctttttctatctttctttttaactatttttacattttcttttttgttttcctcacttttactctgttccattatatgttgtgttatttcattcagtattgttctgttttaaacattttacacattact

SEQ ID NO: 112753 - DNA, 194 bp, Glycine max
  Clone ID: PAT_MRT3847_72823C.1
ccatacaccccgctttatcccaacacttttttctaacattcaacacaagggttctatcctacacctagagaggaaataaaggaaaatactaatgaccttcttcattcaaataatacgtgcttcacccaaaaatatgtatatatgacactgaactacatgccctaacaagctatttgttgagggagaactagttc

SEQ ID NO: 112754 - DNA, 490 bp, Glycine max
  Clone ID: PAT_MRT3847_72824C.1
taaccttagtgctggctctctagaacaaggtccgcacaacaatgcccatggatggactgctgcaagagatcccattttctttgctcaccattcgaacgtaccaggagggtatagaagagatttcaccgatgatgatgattggttggagtctagctttctcttctatgatgggaacaagaaccttgtgcgtgtgaaggtcgtcaaagattgtcttgactccagaaagctagggtatgattacgaatatgttgacacgcaatggctgagaactcgtactatacccaaatatccagtttctctccctctccctgttccacttccacaacctttgccattccattcaacgtacaactgtgtggagcgaggtagaaaaggagaaggtgttagtgatggaagttgagtatgaaatgagtgaggatgtgaagtttgatgtgattatcaacagattggcaataacatatctgttgaaagacttgcatgcacaacatgg

SEQ ID NO: 112755 - DNA, 237 bp, Glycine max
  Clone ID: PAT_MRT3847_72825C.1
tcctctagagctttcgctataagattgagctctcttattttctttctccaaaaaacaaatgccaaaccggggaaaattaaaccaaaaataaaaggggtagtttttcccaatgttacccagccgacctaaaattcttgaccaattgcttaaacccaatttcaaaagccctttttttataaggggggttacccaccggaaaatgaaagttgagaaataacataatcgaaccccggtttt

SEQ ID NO: 112756 - DNA, 462 bp, Glycine max
  Clone ID: PAT_MRT3847_72826C.1
ttgacttctgggccaagccgacgaaaggggacgacaggaaggaatagctggagggggggggcaaggcccagcgtaaccaaaacgcgataccattgccagtcccatggccacgccctctgatcccggcaaataaaaaacgggagcgcgaagaacggacactggaaccgatatccagcatcatcacagtttcaaccgagcgaacgactcctctccaaccagtttatcgcagaatgccaagaccagtctcgggagaactctggtgaacggtaaagttggctaggggctgagcaagggtcaaggacagagggccaccccggatcgatatatgggggcaagaaaaaagctgaacgaggttcatgcatggaacaactcttataaagcatccaacctgagggattgggaagatgcattctgccccgtttgacaggaggtcatccagaaagcgactcaaataccatgggc

SEQ ID NO: 112757 - DNA, 1446 bp, Glycine max
  Clone ID: PAT_MRT3847_72827C.1
tttttttttttttttttttttttttttttttttttttttttaattttttttttttttttttttttttttttttttttcatgcaaagtctacgctttttaaaaaaagcataacacctttacaaagcgaatcatcattcagtaacaattgatgcatacatgaagagaaaaccaacatgagaaaactccattatgttagttaatttccagtacataattctttaacatgttgagtcatggaaaagcaaaaaccatcatctgaccttcagccgaatgttgaaataaggaaggatttataaatgctcatgaacttggccacaaatgcttcaatgtgaaagatcgccttctgtccaagacgcatcctatattcataatatgcagcccaatgacatacttcatgctttagttctgcatccagtttcctcaatagctcataaagaagcctcttcaaaattatctctggaggaatgcaattgattagcagctcatagagctttcctcgaacttgaaacaacctttttgggctctgttccttcattatgtcagatgcaatttcagaaatatactcttcccagtccattggaggaattgtttgtttgttagtgaaaggatactgttggacacgacaagtctcaaatgacaatatggccctccttaaatttcgatttgatttctccacaatgcgagcagcaaaaccaggaggaagttgcagcccttccttcttaccaatgaattctaaaacttcaacaatctgttcttcacttggtgcatttattcgcacattgagacatcgagagcggattgcttctgtaactctagaagaactattgcaacatagaattaatctgcaataagcactgtatttctccatggttctgcggagagaatgttgggcttctctagagagtttgtcaacgtcattgagcacaagtactttaaatcctttcttccccttagtatcaattggtctgttcttagccatttctttgattacttcctgaacaatgtatctgtcctgaaagcctgcatcactcggactcatttcaatgtgattggcacttgataatgttgtcagctctaaatcaagagatctactcccagcatccactttccaggtcctattatccaccttcaccttttcggcaccaggtccgaacatttggcggagaagagccatgattagggttttcttgccggagccagatgggccatagaagagtaaatgggggcaatcctgttccgttaccaatttcttgagattgcgagcgatgtcggtgtggaccataacctggtcgagggttttgggacgatatttgtccacccacaacatcttctgcctcttttgtttgtttctgtttcttcaactgatatcgctgctgagtgctgagaagtgagaaaatacacctctgcagtccccgtcgggcgcctactcgcagccgtggcccgagt

SEQ ID NO: 112758 - DNA, 104 bp, Glycine max
  Clone ID: PAT_MRT3847_72828C.1
tgttgaattctagttagggaaatcaagattttacttacattgatgttgatcatgtggtggattgtcttttaaagtggtgatctgatgtccatctgatgttcgtt

SEQ ID NO: 112759 - DNA, 1149 bp, Glycine max
  Clone ID: PAT_MRT3847_72829C.1
taggcccatcctcctccatctttctctctttcagacacaaaccatactcaaaaggccctagctatgattttttttttaaacaattaagttgccctagctatctatgtagcttgttagctaatagctatagctttcttgttcaaataacctagacaagaattgcgttaggttgcattgtcgataagactataatttataccactatgcttcatgtgatgggtcaataatttattaagatctatataatacttcttccttgcttatttgtgtttgagtgttgtaatgcttcggatacaagcatggcctacaataatattagtagccttgcaaaagatatatagtaattggttatttcgtgtgtttgctgcacaattagaggatatatagcgatgcctttgtgggtgcttaattaattgttagagagttggtgagggatatggaaggggctcacttcagtccagtccgaggcggtggaagatggctgaaactcagctgctgactcgttggttcgagagctcaccattaagatcgatcgatgatgtcggcactcagcccatgtacataattaagggtggtcgtgcttctgatccaacgatgcgggagctgcattcagtcgtgactgtcacgtcttggactgaaggggcctcttcgtctcctacatccttcactcatacatacttgcttttcttcaggatattgttttctttttaatagcttagttaatgttattgtagtgtacgcagtttttgtgtgaaattttctaacatagatactaagagccgagctatatatttacagaaaagttcaattgattaatttttgcattgtagaagagctgaatgttacattatcttcctatgtgaaattgaggtgcacttattatatatagttttcccttttttaatagtggtacattttacacgaaatagaagactcatcttgtatacttatttgcagaaaacctgggtggtccaaagtttaagattggaacctactattgtaaaggagcaatatctccaacggctgatgggagaagtggaggcaaagtcgaactttctagtgcaagatctgcttaatgtcaggacacatgtcaaagtgcgtactgtttgagcattcttcaagacacaaatgccccagactcgttgaaca

SEQ ID NO: 112760 - DNA, 479 bp, Glycine max
  unsure (1)..(479): unsure at all n locations
  Clone ID: PAT_MRT3847_7282C.1
gtgcggcgntcgtcccggcggtcagagagggggaagacacttcattgccgctaccaggacaactggaagaaatacagagcctaaaggaaaaacttaattggacaaaactgcccccaaatttatggacatctatcagcggagaggaagctcgtaataacagcagtaattaaattatgtgtctgtgtgttgagacttgtgaggatatattattatgaagttcaatgttgtttattttctctagttctagctaagatatccgtataacattgtgtacttattgcagttttaatttggaagcacaaccttaatttgaaaaaaaaaaaaatatcatattcatatttgatcactatctctgttaccttacaccgctttatacattttccaggaaagtttgtaattttcctggaaaaaattctgatttaattcaggcccaattttccttccccttataccagaatacccgtttcatattttctgcg

SEQ ID NO: 112761 - DNA, 304 bp, Glycine max
  Clone ID: PAT_MRT3847_72830C.1
atccgttcaaggttcatctgtgcataattaacgagattattttttgaattgtatgataagatcgatgtgcctccattcctgcacctaacgtatgtactgtttgggacatccagtttggtacattgcatgcctgcaaaacatgttgtccagacagttgatgtaccacacagtttcaaatctaatgcaactatgacatgtcagctacactgttgtcacgcaaatttcgaattacttaaggagaacttaatttttagcaggatgagtatcagagtatgcaatctgtactatcagcaatatcccctca

SEQ ID NO: 112762 - DNA, 798 bp, Glycine max
  Clone ID: PAT_MRT3847_72831C.1
ccacgcgtccgctcttccgaccataaacagcaacactcattcaccttaaactacctcctcaacaccttcggcttctccccagaaaccgcctcaaaactctccacccgaatccgcctcgaaacctcccacgaccccgactcaatcctctccctcttcaaatcccatggcttctccgacgcccaaatccgccgcatcatccaaacatacccttacttcctctcctacaacgcccgcaaaaccatcctccccaaactcaccttcctcctctccaaaggcgcctccacctccgacctcgttcgcatcgtcaccaaaaaccctagaatcctccacttcgatctccacaacgccatcaccccgcgctacgacttcatcaaaaaattcatgctttccgatgattccaccctccgctccatcaaatcatgccccagcatcatcttttcgaacacccccctcctcaacattcaatttctcctccacaacgatgtcccggaatccaaggttgttatgttgcttcgctactgggcctgctcgctcgttgccaatgcccccacgtttcaggatgcggttcgggaggttatggaattgggcttcaggcccaacaaaacgttgttcttggtggcacttcgtgctaagcttgggaggaaatcgttgtgggagaggaaggttgaggtgtataggaaatggggctggtctgaggagattctgctttccacgtttctgaggaacccctggtgtatgctggtctctgagaagaaaattgaggccatgatggagttttttattactcatttgggtttg

SEQ ID NO: 112763 - DNA, 377 bp, Glycine max
  Clone ID: PAT_MRT3847_72832C.1
tttttgtgggttttttaaaacatagccgtttaacaaaaccagacaaccgcaagaggtacaaccctaatccccctgccaagggaacggggggccattaattccaaaacaaaaatcacaacaaggccgggcccgcacaaaaggaaactaaaaacaaaggctctcatctacaccaatatagaaccgagataaaacacacccaatttccaaacggctagcccaaccaaaaaaaaggtggggacacaccacaccaccaacccaggggccataaatcgaatggagccaccccaacccagccaagcccaaaagagcccactctagaccggtaaaaaaaatcgcgccaaaggtaggccccagaccaggggagccgtcaaaccttg

SEQ ID NO: 112764 - DNA, 292 bp, Glycine max
  Clone ID: PAT_MRT3847_72833C.1
taaattagtcccgatgcctattcatgtttgtactgatctttttcttttagatggctcactctcatccactgtacatgtcctttcaatgggagagggtggccatcatattgcacatctctcttcttctgctttaatagtattgatatacatatccctctcttcttacctcttatgacatatgactttttcatccattgatgacctcttttcatagacttactataaaatttttttctaaatttctgcctttgacaaaatttcatactatcactatattatttctaaatactct

SEQ ID NO: 112765 - DNA, 614 bp, Glycine max
  Clone ID: PAT_MRT3847_72834C.1
gctcaagtctcagatttaaactttgcaagcttatcagagccaccagtattgagccaaggctcaaccgagcaattagcactgaaaaacaaggctcccagatggcatgagcagctacagtgctggtgtctaaacttcaagggtcgcgtttcagtggcttctgttaagaactttcaacttgtagctgctgttgatccatctcataatatttctgccgaggagcaagaaaaggtaatcttgcagtttggaaagattggaaaagacatatttaccatggattactgttatccactctctactttccaagccttcgccatctgcttgagcagctttgacactaaacctgcctgtgaatgagaggtgttgcattactacattgtaatcgtcatctgctgagttgttgattgccaatcctggtggcatacagctgaaatcatagctgtgctgccgttggaatcccccccttataaattggttgttgattctggaatttattctgtcttttgttttgtggtcctgtaaaattaaattaaatgaagtttagtgaattctatgatatgtatgtctccggtgttcctcacgaatactttgatttgcttaaatactgtttctgcaag

SEQ ID NO: 112766 - DNA, 419 bp, Glycine max
  Clone ID: PAT_MRT3847_72835C.1
gtttcccgtcatcactgtatgacgtcctccttctttgggggggggggggggtatgcgccacgattagtatgactgggttaatagcagaaaacaataatataaccggtagtttctgggtaatgataaccccggaggcacctggagtagaataaaaaggcgttagcgtacaagctaagaagttatataagcgagaaagcattacactacggcctgggaccacgagagcctttgcagaaaagtgatatgggttaacccggaggaggacatagacgaattccgcaaacgaaagttttggttaataagtgtattattataagattaggtaacgtaggttacgttaaataaagtactaagcttcgtagtggtaattgggactgtgggttgcggtggttagaaaggtggcatagaagtaacggttg

SEQ ID NO: 112767 - DNA, 449 bp, Glycine max
  Clone ID: PAT_MRT3847_72836C.1
atctaaaatggagaaagtactaaatgacggaaatgccactgccataggagtaatttctctaaccctcttctcaatagtaaacgagaaatcccttcaaatttgcattaggtaaaaaagaggctcccaaagaagcaggtgcaaggccaaaactcggacacctaccactatagagtggttcagagacacctgaaagggaaatgggagcataggctgaaaagtatggacccatattaaccaacaacaatggcgtcaaaaaggagtacggaatcagcaactgggaaatagctaaggaaagctataccaaaaacgacatcgtagcacagactcgccccaagcaagttggcatagaacacatgtgctacaacacaaaccatgatagggtttgcacccaatggcccatattggcgcgaactaacaaagaatggcaaacatagaaaaactactccaaa

SEQ ID NO: 112768 - DNA, 244 bp, Glycine max
  Clone ID: PAT_MRT3847_72837C.1
tcactatgttttttatttctcacaaccaaatgatgaaagcagaagaataaagcgttgatgtgggtgagatatttcttgggataatgaaagtctcaaacctgcatgatctgatggcgtaaacttgttataaaaacgccgcttttaaataaacttggcatccttacagtaggaaacactacatcgttgactctattcaaaatatactaagggtgttaatgttgagaaagcaatatgtcttaaggat

SEQ ID NO: 112769 - DNA, 534 bp, Glycine max
  unsure (1)..(534): unsure at all n locations
  Clone ID: PAT_MRT3847_72838C.1
gggaaggctcttctctaccatagtgatgattttgttaattggaaactgcatcccaatcctttgtatgcatcagacaatactggaatgtttgagtgtccagatttctttccagtgcacataagtggctcaaagagtggggttgatacatcaatccaaaactccagtgtcaagcatgtcttgaaaataagttatcaaaacaacaactagaatactattttcttggtgaatattttcctgatcaggaaaagtttattcctgatgctgattgggcaagaactggtttggacttgatattggaccatggaatgttttatgcttccaagtcattttttgacaatgccaagaaaagaaggatattgtggggatggtcaaaggagtgtgacaccacacaagatgattatgagaaaggatgggctggtctacagagtattccaaggcaagtttggcttgataaaaatgggaagtggttgatgcagtggccaattgaagaggtagaanaactacgtgacanacaagttagcataacggtagaga

SEQ ID NO: 112770 - DNA, 295 bp, Glycine max
  Clone ID: PAT_MRT3847_72839C.1
caaagcaccaaagcgtatttcaattgtctataagtgtatatgcggcagatcatagcgcagttatatatggatgaagttaaaagagcaccatccacctttttcgttcaacagtccacaccattaaccatttatagcatggtaagagcaccaactgcggtaatgataccggcagggacaacctgggcggcaccagcagtgacgacgtgagtgggagtagttgcaggaggagcaccagcggtcttagtaccgtctggggggttgcaggcgggagcggtagcatcaggtttggtggcaa

SEQ ID NO: 112771 - DNA, 307 bp, Glycine max
  Clone ID: PAT_MRT3847_7283C.1
gcacgagaggaaataagaaccataatggcatgaagaaagcaataatagagccgcaaaggaagtcaattccataacagcatggaatccagagcaagaatatccaactctactttgtttctagatatttgaaaatttacctgaaagatgtgtaaaatcacctccaaaccctaaatctatggctatgtctagattgatagaaagggaaaaaaaaatggaatagtcgtagtaaaagggtactgtcacctatgtcatactttggaaggagttaggtgaggaaccttttctgaatttgttgaatttgtggaaa

SEQ ID NO: 112772 - DNA, 166 bp, Glycine max
  Clone ID: PAT_MRT3847_72840C.1
cgctcttaacgtgagatcgtgtgaagtttaagctaccttaagcaaaaggagaaagacacaccgaaacttagaactctctcttgaatacacccaaagcctgatataccaaactcttgtaatgtaactcttccttactatttatttaatgcaatttcagttctaaaaa

SEQ ID NO: 112773 - DNA, 289 bp, Glycine max
  Clone ID: PAT_MRT3847_72841C.1
tgtgggtgtgccacattgcttggtgttttaagctttccggtgggttgagatttttttattgttctttgcatttgtgtgtccaattccaactgccatgcttttcatttttgggttgtgccacgttgctctgtttgctcatggattctgagttgtgagttttaaaattcccgtagatgcctgtgttaccttccagggcgtttgtattattggtttttgttgcgccagggtgttcgatgcttaaagctttccaatggtttggtgttttgtctaatgctgttattgtggtttg

SEQ ID NO: 112774 - DNA, 104 bp, Glycine max
  Clone ID: PAT_MRT3847_72842C.1
cagcacctgtgcaagaagactactgaaagttacgagttatataagacaacataacgtatcagttcagtgatgacgacagagatattctgatgcgagaagactac

SEQ ID NO: 112775 - DNA, 219 bp, Glycine max
  unsure (1)..(219): unsure at all n locations
  Clone ID: PAT_MRT3847_72843C.1
ctttctctcntgcntncgtnatcncgggntnntgcttcgagnccattctgtngnagtgatntcggtgncanagtttttgacnganggcanttttanatcaagtgntnganttncagcgcanncancgtagtnnaggaaggagnagnatggtgnccacagttggtattcctnagaatanaggtagagcntgggcctgtgctangannantncttttaggn

SEQ ID NO: 112776 - DNA, 529 bp, Glycine max
  Clone ID: PAT_MRT3847_72844C.1
agcttggatcctctagagggggcgccctttttttttttttttttagtatttgattttgatttcatccacgagtgatgaaatatgaggcttaggatcaccgctttggcttaacgaataacatgtttacatgtgggagtacggaaccctactttgtagctaaggaagaacatggaggccttaggacccctcaggggttacacgtagcaggttagaagcccttattccatcgaagaaatcgagagggagcatagtgcaaagcaaatcatctatttatctgctgttgggggatagtaggccttcctattcatgaccgttcatgactctctgcatggatcccagtccaacgaggaggattgaaccttagcataaagtcctgaatgcttcagagaccgggggccttgcgttggggccaccgagcaacacagagttaggcgagttctggccatggagaagcccgccccaagggatatgcatctgttaaagcaggttccaggaaacctcctagggttgtctgtagcattctctcctt

SEQ ID NO: 112777 - DNA, 1347 bp, Glycine max
  Clone ID: PAT_MRT3847_72845C.1
aaaatacatttgtcgcctcaatttctcatgaggcaacagaaaagaaaaaatagatcagtggcggtacgtgaaagttaacgccattaatggagtctgagaagaatttaaggctgccactctctgatgatcgcaatcagagggatgaaagacaacgaaaagtttcagccatgacaagaagaggagtcttcgctgccttatcatatatggcctcttcggttctcttggtcatgttcaacaaagcagccctctcctcttacaatttcccatttgcaaatgtcatcacacttgctcagatggtgtttgcatttattattctctacgtgttgagatccttgaagataatttctttcacagctggtgaatcgctgagcagttctaagaatacaataatatttgtgtcctataggacattagcccagacacttcctcttgctttaacttatttgctttttatggtagtgaccatggaagcagtgcgcggtataaacattcccatgtacaccaccctcaggcgaactgttgtcgccttcacaatggttatggagtattttctgtcagggcagacacattcaagatttgttgttggaagtgttgggataatcatagccggtgcttttgttgctggagctcgtgacttggcatttgatgctttttcctattcagttgtatttgtagaaaacatgtgtaaggcagtatacctggcttctgtttctcgtgttggtaaatccagcggcctcaatatttttggtattgtatggtgcaatgtggtgatttgtggaccaatcttgtttctctggtccttactcagaggagatctcccaagcaacactaaactttccatacttcttttcccgtggatttcaggttgtgatgcttctttcctgcgcttttactttctttataaactacatcgtagttttgaatacaactatcaactcggcacttacacaggcaatctgtggtaacttaaaggatgttttcacaagtggtattggttggttattattcggaggacttccatatgacttgttcaatattcttggtcaagtacttggcttccttgggtcctgtttgtatgcttattgtaaactgatgcaagcagtatgaggatgacctttcaggtgggtgtttaggaacatcaaaacaccaaacaagcatcgtatagtgtccctacaaattttttagggtttacaaattaagtcaacagaaaaaggtcaaatatcaaattatctttatcaaaatttacagtataaaaaatgtttttgtctgcccaagtgtaacttagggaatgacaatagaaatgaattcctgaaaatatttaatataaaagcgtttaatttaactttt

SEQ ID NO: 112778 - DNA, 245 bp, Glycine max
  Clone ID: PAT_MRT3847_72846C.1
acaagcccggacacttgttcttcatccaaaaacaaacgacgcgcctattacaaacgttccaaactaccccttaacaggccgtattgcgctagggacattttttcaccccgcttgagcgtagtaaggagaccactagacgtgtgcagctcagacaggccactcgacgaggatgttctcgccaagctaaatgtggtcacacttctgtacagggaaatctccgaaggcgtggccaccgcataagccac

SEQ ID NO: 112779 - DNA, 504 bp, Glycine max
  Clone ID: PAT_MRT3847_72847C.1
ggaattcaaatatttctttctttcatattcaagtactttgtactatttgttgtgaggagcaagagaaaacaatgggtttccgcatacctgctattgtcacgcaagcatcgttttctacaacccaagcagcctccaagagggttgaagtacaaaaaggatatcttgcggtctatgttggagataagatgaggcggttcatgattccagtatcatacttgaacaaaccttcatttcaagaattacttagtcaagcagaagaagaatttggatatgatcatccaacaggtggtctcacaattccatgcaaggaagatgagttcctaagcaccatcgctaacttgaatgagctgtaaatcttgctaatggagtctgagatagattagcaggggcaaatttgtacagaaggcacattcttttattgtaaagattttccattttctagtataattccattcgaagttgaaatgtgctccctgaatgagaatacaacactttaaacaaaaa

SEQ ID NO: 112780 - DNA, 334 bp, Glycine max
  unsure (1)..(334): unsure at all n locations
  Clone ID: PAT_MRT3847_72848C.1
cgtcacagagtcatgaactcggttagagcagagtgttgtgctgtctttttggtgtggtcacctatggtgcagtgacaacacgaagatcggaggagccaaagatgcgtagtgcgtaagttcgagccaatgggctatcgcaagggtgaagcgcttacgcttgctgatattcgtccgcttcagtttgggctactgcagggatgtatatcgatcactatggtgttgctttcaagcatnggcgatgagtcgattggatactgctcagtgtgaccgtcgatgtgagttgctgctattgataatagtcccttttgcacttgtccttgaaagaaaaataaga

SEQ ID NO: 112781 - DNA, 424 bp, Glycine max
  Clone ID: PAT_MRT3847_72849C.1
aaaaaaaaaaaaagaaaatttggcggggctttaaagggttaaaaaaaggggaagggaaaggggcaatcggggtaaatcttttttttctctaagccggaaaaacccccaaaagatgtttgagtaaacccaggggcataaaatttttccccaaaattggcgaacttaataatatataaggggccttcaaagatttttccaaaaccgggaaaaatccccgttaaaaacttttcaggacaaccccttattttttttttttaaagcaaaaatttcccttgccaaaaaaaaggggaaaagccaaggccgaaaaaaccccgccccttggtttggatttcaggcatggaacccggcatgtaaaaagctggccggggaggaccaaaaagctgcccatacgggggggcattcggaagaaaatatccttgaaacg

SEQ ID NO: 112782 - DNA, 415 bp, Glycine max
  Clone ID: PAT_MRT3847_7284C.1
ttcttttgtgagctataagctagtatatcgtgaggagaatctgaagttaggcggttactcaggtgctgcactactgctgggagcatggccatgccatgcatcaggctcccaaaggttgcctgtccccatgagaactgtctatggggagcgtccattacaggtaaaacgcccaagttataggctccgttgcaagcacacaacatccgagcctttaaaaccatatcctgaagagcgccgttgaaccaacaaatggactacattaactgaccaacaatctagatcaccactatcaaacagataaccaacaggctgacttttatgctagcgaacgcgaaggccattacaacgacatattaatatatcgcatatatgacaccggactctgtaatatcgcatactatcaaaagcatggata

SEQ ID NO: 112783 - DNA, 506 bp, Glycine max
  Clone ID: PAT_MRT3847_72850C.1
ggctcgagacaaaactagggagattagtgaggataatatgtcccccaaaccatcaacatgtattggtcttgcagatcaggaaatcaacacgtcagagaagcagacaaacatttgtgatgaaagctctaacaatagagtccaagaaactaagacggagtcgaatctctaccatgatgctgatcatgtaaatacatatgaagcccgctattctgtaagagatgagatacttactgaaggtaatgtacaatctgcagaaagagaaaaacgaattggaattgtccttgaatccaaacgggttcatgacatgaaaggaccaagatattgatatctcggaaaatcctgatggtgcaggatgatctgaacgtttgacataggacataacagatgagaaccagccatcatattcaccgccatctgctcacttttatgtcgctaagaaaatggacgagctcgataatggtacagatgtatctgagcgaccgagtcctgtatctgtacctgataca

SEQ ID NO: 112784 - DNA, 868 bp, Glycine max
  Clone ID: PAT_MRT3847_72851C.1
ggaaattagacataagaaatgcgattatagagagcgaatagaagactgttcttcagaactctgtaggcggatctcctttagtcctttgtctccgttccgtcgtcaaccctacctttggatctgcgtttggccttcaggttttgaagtccgaaggacgaagaagaagagattcctgacagcgtaatcatgtttggtgtcgtaaggcgaagggttgcttctggcagcccgtctccttggttgctaggtcagtcagctcagaaaatccggtctggcccatcagtttctgctagagcttcttccattgtggaaaaagagattgtatttcgttcaggcggatgtggatttgtccagaacttcagtcatataactcctggaagctggattaattcaaagcctatgagggtggtcattcatccagaggcaactgttcgaacttgggggcgtctattttcttcagaaagtggagacacggttgatgttgtggttcctcctttggctgaatctatctctgatggaactctggcacaatttttgaagagacctggtgacagggttaatgctgatgagccaattgctcaaattgaaacagacaaggtgacaattgatgtttcaagtcctgagtcaggcgtgattctaaagcttctagccaacgaaggtgatactgttgagccaggtaacaagatagcaatcatttcaaggtctgctgatgcaactcacgttgccccatctgagactacatctgagaaaggtgctcctcagccaacccaaaaggttagcgaggagaagaaagctcccaaagttgaaactgctcctgctaaagagaagcccaaagcacctcctgccattctgaagtctcccacgagcccca

SEQ ID NO: 112785 - DNA, 1169 bp, Glycine max
  unsure (1)..(1169): unsure at all n locations
  Clone ID: PAT_MRT3847_72852C.1
aagctacacttctcagtcaccttcatggtgtaagcatattctaaaaaaagtaatcaagcaatcataagaaaaacagaagtattataatgactataactctgctgatgaaaatatcactctttttttgtgtgcatcaagggtataaaaaaataatcccttttaaggcagaaagatcaccaaagcttctttggtacacacagtcaagactaaactactcccaaatttttccaaaccttggtaagaatatcacatatttagcacattattaatatcaacttttgaaaaagtccattttaatgcgcattttaatctgaagatcactcatagcagccttgtaaacaattccacaagctcctcttcctagaactgtagcttccgaaaaatttcctgtggcttccagagatcctggtatgtaaagccttctttaggaaagtagtagttatccaagacatgagtctctatttgcctttcaagtgaaacaaaagcagcacggctaccacgcctcatggcaaaacatatacacactatgaaaataagagaaactagtccaaccaccccagaaacaatactcactatcttttcccttgatgaaccatttctgatccagctatgttttgcagcatgagagggagatagagatggatggcagtgattggtaccaacacggcacaagccgttgttcccagcaaagtttgtgaaatccatctttctaaatgtagtggtgtctggaacagttcctaccagcttgttgtttgatacattgcatattacaagactgagaaggttaccaattgatgaaggaatctcaccaacaagttcattgtcatttagataaagggactctagcatttgcaagttcccaaggctatcaggaattaagccagaaagtttgttgtggctcaggttaagtgcaatctgaagagctccaagttttcccaagtgaagggagatgcttcctgaaaactggttgccacctagttccaggtctgtgagcctaataagattccccaaagtgcccctggtatttctcctgagagcatgttatcagaaactntcaacagctccaagttcaccaagttgccaatttgatttggaagcattcagtgaagtgattcctgctaagatcaagcctctgcaatcttacacagtttcccactcatgagctatac

SEQ ID NO: 112786 - DNA, 304 bp, Glycine max
  Clone ID: PAT_MRT3847_72853C.1
gctcctaaacattctctgcacccaaaccgtgtgattaatcgcgctgtttacttaacacaggcttggtgcacaaattgctccgtctcaaccccattatggacgcagctcacttttttacaccaaaagcagtatgttttctggagtaacaaccagacgggcaaatgcagcagacacaagaacctatgtgataacatgtgcagcatgagactcacagacagaggtgattggactgtctgcatactcagggtgtgggaagagcaccttaatgaggaggctgaccagtgtgctaggaggagcatcagat

SEQ ID NO: 112787 - DNA, 131 bp, Glycine max
  Clone ID: PAT_MRT3847_72854C.1
tcgatttcgggacaagacccacaaaggggcccggccgtgcgaatacaacagaaggcacccaggacacacccacggggacaggggcacgcccaaccaacagaccgcggcacacccccgggccaaccaagagg

SEQ ID NO: 112788 - DNA, 467 bp, Glycine max
  Clone ID: PAT_MRT3847_72855C.1
gtggggaaattagtctttgtgagtggtcccaaaaagaaaaagagggagaagaatcttctcaaactcgtgatctgttggtgcgaatcgatagtcacagaccaaaggtgagagtcttgtgaatctgtagagagtgcgattttgttgtctctacaaatattcaatcactcaaaggaaacgacacaacgtattagacgaagctcgacacgaggaacacatgaaggtaggcgaatcttgctttaccctttttgcttggctggttggtgtgaatcgatagtcacaatccatgtgtgttgaggttggtcactattggtttttttttttttttttcttttttagggttttctataattgttaatgaaggaaattgccactgttggttgtgagtgactatggagcggggctttttaggattttttttctggaattatttttgtattggtaattggggattattttaattgcaattt

SEQ ID NO: 112789 - DNA, 135 bp, Glycine max
  Clone ID: PAT_MRT3847_72856C.1
caaaaacttaatgtcgtaggccccgtcctcgctataaacacgggtccccagacaccaaggcacccggcacttcccaatcgcaaatttgcttccccaaatcgtagatctacggtttaactggagtactgtggtaag

SEQ ID NO: 112790 - DNA, 661 bp, Glycine max
  Clone ID: PAT_MRT3847_72857C.1
ttggatgctataaaacccattgcagatgctcattttaagcgattttttaagtattcgaaattgctttgcgagactacaaggctcagttggaggaagatccaattgtccccaggcccctgtcatccctgtatgattctctcatggagcagaacctttggagattgattgacccatacgcaagggttgagattgcacacattgctgaactaattaaacttcctgttgatcacgtggagcaaaagttgtttcagatgattttggacaaaaagttcgttgggacattggatcaaggagctggatgccttgtcatattcgatgatcccaagactgatgcaatatatcctgcaaccttagaaaccattttcaatattgggaaagttgtggacagtctttatgttaggtctgccaagatagtggcatgagcactccatctggtcacttcatttggtatttgctgcaatactatatgttctctttcccaattagtaggacacaagtcgtttgtttattttccaaatttgtaagactcgggacagtttttagcttctaaattcattgatccctaagccacttcaggggcctttattatttgtaattacaggcgtgttgatggtttgatctttgaaaaatagtaggaccatgcgtccttattataaggttc

SEQ ID NO: 112791 - DNA, 159 bp, Glycine max
  Clone ID: PAT_MRT3847_72858C.1
cggccgctcgagccggcgggcgggatcccaccgcagttccttctgcggggtacgttaatcctcttacgagctttcattcactccatcgattcgggggtgcgttgcccgaaaccgagctagaccctgatcggcgacgaaacaccgccggagaagagatga

SEQ ID NO: 112792 - DNA, 420 bp, Glycine max
  Clone ID: PAT_MRT3847_72859C.1
ctcggcgattcaggaagtacttaagcaactttgcaagaaccaacctgttttggaacatttgcttggggatcttgagcaacatatatgcttctgcttttatagtgttaacaaggcgagatatgcgctcctcaaagagatatgcagtcatcaaacttcttagttaggtcctttcaaggttttcaatcgtggtcacactgtccttgatactgcaaaaaattgcagacatattgcagttgacatggcagctattacaaattgaggctgcagagactccgaaaacctcagcattgcagtcaaaattgtggtagcgaatggattttagaaccttgtttcctttccacgtacctcttttccattaattcgcgcgatgatcacagctccttcttcatttgtcgcacgaatgcaatacctacctgacct

SEQ ID NO: 112793 - DNA, 1235 bp, Glycine max
  Clone ID: PAT_MRT3847_7285C.1
gtcttgacggtcccattttcaccccattgtgcaaattgaaagtagtagggaacccctactatagctactacatcatcacaatgacgtcaccttaacgtctctcgtgttgacacgtagctcagtgaggctatttcgctgcatcctccaagaaggtgtttggaaggatccttcccaccccatgccaaaagcaagcatattaattaaaaaaaatagaaaaaaataaaacacaattttattttattataggatatttattagttatttattggatataagtggcagcatgctttagtcctaagcgtgataaaaagccaaagactcttaggtttttggctctttgcagaatctttgagtgacacatacctagctatcacctcaatggattactattttggaaaccttaatcctaacccttattaccatcactctgccgtagtgaacatggcatctccctcctccgagttcatgttatctgattatctcgtgttggaagatgctcttgttgttgatcatcatcaagagtcttggtcacaaagcactgaaactgaatcgtcggagaaagcaacctccagcgatgcaagtcatgggttcggtgatgcaacctccaccaacaccaacatgcatataaagtgccaaaatagtgggattaagggaaagaatgcagaagtgagtcaaaggatcacgtttagaaccagatcgcaacttgaggttatggatgatggatataaatggaggaaatacgggaagaaaacagtgaagagcagtcccaacccacggaactactacaagtgttcaggtgaaggatgcgatgtgaagaaaagggtggaaagggatagggatgactccaactatgtgttaacaacgtacgacggtgtccacaatcatcagaccccgtctactgcctactacagccaaatgcccttgctgcattctaatcatgattgggccctccacccttctgcaaactcataatatcctccttaatatagtaatatccagagataggagaatcaacttatacttttaggattactttttatctttattatttattttttataagagattttaaaaaataaataatgagaatagagaataattttaaaagaattattgttgatgtaagttaatctctactctgtatatatatatagttattgactcatttagtatattgcctgtcaataaccattattacatgtatattgattattatgcaaattccagtccacgct

SEQ ID NO: 112794 - DNA, 343 bp, Glycine max
  unsure (1)..(343): unsure at all n locations
  Clone ID: PAT_MRT3847_72860C.1
tatgaacgtagcgcatgccagcgcgtcacgtaaagnctcgggagattccggcttcgnaggctaatgatcgacaataggacttctctacatgagtacacaacctgatgtaatttttgaagctgattatgcccaatctaggtatgcaaatgttccatgaacactgtacctaggcaagactatcacttaggcagtggagaccggtgacaccattcacaaccttaaggccgaactccagcacaggagggcattcgtccatcacaacaggtggtaatcttagcgggaagacagatctaagactgcagaacccatcgtcgactgcaaaatgtcaaaaggatgttcacgc

SEQ ID NO: 112795 - DNA, 435 bp, Glycine max
  Clone ID: PAT_MRT3847_72861C.1
gcaaatgttgaagtaagcgtagttggtaggttttagtttgttgaaaatgcaagatcttccaaatgttgtaccatttacagtagaaaagagtaaataaataaacacatttttataaggaaattgtaccatagaagattgcatgcatctggaaacttaggagctctctatttttcgaaataatcaattcacatttgataatcaattattctaaaaccatagaagcgtgaaaagccctttgctcgggatagtcgattacctcaatctggaattgattatcctaattttggaaatgtgaaacaagagggattttaacaaaataattgattaccacatttgataatcgattagatctgttttatttgttcaaactataaataccctcccttgttcattctcattagtgactcttgatttgatcttatcttttgaaaaaca

SEQ ID NO: 112796 - DNA, 457 bp, Glycine max
  Clone ID: PAT_MRT3847_72862C.1
aaaaaaaaatgatactcaatctccttagccagagttctagtgtattattaccccttagctggaaggttgaggagggtggatgatcacactcacaagcttgaggtggattgcaacggagaaggtgctgtttttgctgaggctttcatggccagagttctagtgtattattcctcctctcataatacaggaaatggtagttattactactaccatgggagaatttggatggatactgatggaaatcctattcaagctcatggagggggcattctatatgatgaaagataaagaacatactattggtatgaatataaagatgggcccacgtaccatgctcacaagagagcatctgctcggatgcggctgaacaaagtttcggagctaatacacaattccaccaatcaccagaatttggatagtgcaggggtttcagttcattttcaagagattgtggatt

SEQ ID NO: 112797 - DNA, 310 bp, Glycine max
  Clone ID: PAT_MRT3847_72863C.1
ttattaatttatttttggggaggcataccaaacaagtttttgtttgagtacaaggcctgtggatcatcgtataaaaaaatcaagccgaacattgtgacctgcacaactgagttgtacttgaactcctccacaaggtcaatgtcggtttgctcgggaggatcaaaggaaacaatttttcaatttccttaaagaatacattgcagagacctttttcaccctttaaaaatgcaatcagtgggtacaaaattctgataaaattcccatggcatcaaaacggtaactttgaataaccaaaaattaattggtgagt

SEQ ID NO: 112798 - DNA, 468 bp, Glycine max
  Clone ID: PAT_MRT3847_72864C.1
tttttgatgatactcgcatggtcacttcttgtgaggtgtcatacaaagattgggatggttattgagtaatattcccataaaacatttttgtttggatgcaaagagaaaatacgaggaaagaaaatgaagagaagagaaaatgaaaaaaaaaaggttaattttcgatgggagaaagaagaaaaaagtgagagaaaaatgatcatgttaaatgacatttaaatctttacaatgtaacaatataattgagaaagcggtatatttgtcatttcatcaacttttctcttcacaaccaattttctcacttgtccagggtagaaaatattttaatgtgagttccacatatttttttcccatttcaaaagagcgaagctgtaactgtgagggcattttaagtcttcagtttttctatgttcaacacttttatcgttccaaatgatgacttaataacataatctgccataagtgatt

SEQ ID NO: 112799 - DNA, 325 bp, Glycine max
  Clone ID: PAT_MRT3847_72865C.1
agagaattatatggctactgctttctctcgattttggaacaccagttcttttgggggttttcatcgtccagggggtatctttttctaagaactctccctctttttatacccattatgctgatgctacgtataatcctggcggtgcttattgtgagatgctgaggtttgatatggctattcagttgtatcaacatagctcacacttcattacatattctgcacgaagaccagaaagaatctcttggaacatatatagaagatctctgacaacgattgacatttccaggaaatgttcccaccttgctagcggaatcaaaccttactt

SEQ ID NO: 112800 - DNA, 572 bp, Glycine max
  Clone ID: PAT_MRT3847_72866C.1
agacgtatttatcgatgatgcattgagctatcacttcccatctcgtctactgtattatcggtacagcttgcggccatccaatgaactgcaccagcaacaggagagcgagtcgactttcaagggtcttgctctagccgactgttcatcacgacgctagacgcctgagcagcacaagtaaccccgcccgtgccgctcatcccagaagatacagggaactcactctttcgaggttcactcggttcgctaaagtcgatgggctcggcttcgatctgatgcgccccgcagatactctacacccctccagtcctatgtcaaagaatgcatactgacaatcatatgcgctccagcaaaggcgccactgagcaaagctggcaaagcatggcatacgccgggtgccttgccttcggccatgttcaacgccgtccccaaacgtaaaagaacgaccgatgaggaagctaatgtggtgcttactctgttcaacagtgtggctgaggcgccttatctgtgaagtccaccatcgcagtagatatcgcagcacagatattacagatatattgagaaagatttacaca

SEQ ID NO: 112801 - DNA, 227 bp, Glycine max
  Clone ID: PAT_MRT3847_72867C.1
atagaagtgggaaatcataataattatatttacttcacgtgcctttaccctaaaactcaaaacatgccacagggctttatgaaacgtacccttattattcttacagacgaaaaataagagaaacgggctttcttttcaacgttgttagcaggaaactgcctactatgaaaatcttgataaataaaactgccgattcatatttgcgtgtttacgaaaattccaggaca

SEQ ID NO: 112802 - DNA, 736 bp, Glycine max
  unsure (1)..(736): unsure at all n locations
  Clone ID: PAT_MRT3847_72868C.1
aaaaaattcccgtctccacagttaagtaaaataaaataaacatcaaaattgtttgcttccatgctaaaactaccaacaatagatgatggaaaattcccaccaaaactctcactaaataaatagacctgtttccacaggtcatccaagggaaataaatacagttactggttccgtggaatgaagggtgtcacccattgcttcatgtttctgaagagtatataatgtgtcattgcaccacatttgtccttgaaatatgatagccatcctatgtgggtcgactttgatacaaccctcctctatttgagttgcagatataccttatttgctgactgttattatttctcaaatttactgattcccttctctgttcctatgcatccctgcttttacaccttgtgtctcatggccatttggagtactaaaattgccataactagaaggtcttggggtattgggagcactgggatgcctagggataccctcatttggagcactaaaattgccataactagaagatctttgggtaatgggagcaccaggatgcctggggataccctcatttggaccactaaaattgccataactagaagatcttggggtattgggaacaccatgatgcataggaataccctcacttgggctactaaaattgccataacccggtctaggggtattaggagcattaggaggaggatngcagatattctcatgggaaggcattgagtgtcttggtcca

SEQ ID NO: 112803 - DNA, 371 bp, Glycine max
  Clone ID: PAT_MRT3847_72869C.1
cagaaaccgaaagcatggttttatttaagcaattagcatcactttcaacactcctcaccctattctttcttcaccttctcttagtagattcccaaatccttgaaactccatcaccaccacccgatccaacctcactggtccccaacattttaaacttcatagaccagaggctcgcacaggtcttcccaatcatccaaaccttcaagaacacaataacctcagaccctcgtggagtaacatcaacatgggttggtccaaacatatgcaactacacaggcttctattgcgacaacccaccggacaacctcactggcacaaccatcgcctcgatcgacttcaacggctttcagctcaccgctccaaccctagat

SEQ ID NO: 112804 - DNA, 407 bp, Glycine max
  Clone ID: PAT_MRT3847_7286C.1
acgagaagcatatctacataaagcttcgtatatttcttttaataaatatatgtgggatcctcatgtttaatcagagataaagctagatgcaaacacacatttgcccataataaaagaaaaaaaggattattcaattaaaaattttacacaagaatcataactcataaattttgttgacttttaaaatatttaacttaaaagtaattcaaaccataaattttcatttaacattgaacaatgaaaaaaaatgcaagcatacaacatacatgaaagatgcaacactcacatatacttacatgggtacatgatatgctaaaagaaagtacacgtggcattgttggctgtgattaatgaatgattgagatgagatattttgtggaacacagggagcacacagtgttggtcga

SEQ ID NO: 112805 - DNA, 256 bp, Glycine max
  Clone ID: PAT_MRT3847_72870C.1
gtaaagtcgtcatatgggaagtgagatctaataagcaagttgtaagttgtaaatataacagggtgggtgatgatgaccaaatttaattgaaagcttggcttagggaagctagggaagggaagagcattaagcagagagggataggtgtgagatttggtgaagtagaaggggacagaatagacatccgcccggaaatacagggataccgtacagtcttaaatacctttttattcagtttgtgatatttttctattgg

SEQ ID NO: 112806 - DNA, 419 bp, Glycine max
  unsure (1)..(419): unsure at all n locations
  Clone ID: PAT_MRT3847_72871C.1
gtttcctctcaagctcccacccgttctcttctcacncccanaccacangcgaaaggaaaggccttccatagcgagcaaagcccccccnncnccaanaccgcnaccgcaatcgcccactgcaacgccggaaagggactgcgcaagagccaccgacaagccccaccccaggaccaacccaacaccctgcgatccaagaggctaccagcccatcccaatccgatgagacaacaacaccagagaattcaacacccactcacgcagctccaaacgcagaaacaccccccaaaactaccccagcgggcaggccaggggcagatccaccaaagaccactaccaaaagcaccgcaacaagcactcaaagaaccaacaaaagcaccgctctgaaccaatacgaccacacacctcccataaccgacaac

SEQ ID NO: 112807 - DNA, 279 bp, Glycine max
  Clone ID: PAT_MRT3847_72872C.1
aattaccgacgcgacccacgcgtgctgccattcgtccttaggaactcccacccaccctgggaccaaagaaaggatgcctggtggtgaggtcttgagatcaagtgccttatacaccttttattgtgaatgcatatactagtacaccatcggcctcacctcttacctcttaacgtaccacatacgtgactatgtcgtccggaaccttaacgttgcaattcacagagtattgccccacagatttctaccatggcacggccataacattactggaatgtgacc

SEQ ID NO: 112808 - DNA, 490 bp, Glycine max
  Clone ID: PAT_MRT3847_72873C.1
ggttgccgcggcgaacgggaaatgagggcaccgcacatatttgaatttgcatattatcgagtaagatcacttttaccgttacttctatatgtatgaatcaataatttcttcttctttcgtttgattaatttgtgttcttgttagcaacccctttctagcttatgttcatctctcccccattcatccatatagggtgtttcttgcgcggtatttgcaccgaatttgcatgctattcttaccagaatttaaaattacttttggatgctacatttgcagagtgataaatgggaatcgtggtagtgggaaggagagtaaggaaagttgtggttatagtggggttggcctgttccttaggctggaactgtctctttgttgtttttttcttggtcacatttattcctcgttttgctgtttcacattccagagttttcagaacattttttggttgtggctctacttttctttttaatcaaggggttttccatgtctg

SEQ ID NO: 112809 - DNA, 365 bp, Glycine max
  Clone ID: PAT_MRT3847_72874C.1
cttattcttttatttttttataattttttttcttttacattttctttttatctttcttggggtttaagaaaaacctattttttttttattcaaaacaattggttcaaagggggcaaaaaaccactggtactggtgtttttcttttttaatgacctggtgtcaattttttaaccatgctatattatattaaaactttgggtctctccctattatttatgaccatccccttgttttttggggggggttttgaatcccaaaacccgcaaatttaccaaatccttggggttcatactgttggcaaaaagataattcacccccctgcttattttaacagaatggctttctcacaccaccaatttttgtct

SEQ ID NO: 112810 - DNA, 227 bp, Glycine max
  Clone ID: PAT_MRT3847_72875C.1
agcaaacgcaacattggtagatataatgagagagagaatgagagagagagaaagacccttaccctggtgtatcgctagatttactttgacgcttatgacccttgctatgtctgcgtctttccttctttctttctttctttctctgtgggtcgaaatggctctcccagactttttttcccgtggaaactccctgatccccttcctcatctactcctcttgcctcaaaa

SEQ ID NO: 112811 - DNA, 454 bp, Glycine max
  Clone ID: PAT_MRT3847_72876C.1
ccgcaaactcattctctctgcgacaggatttttgttctctccaagatggtcggagaacacagtacgacgtcaccagcctccggtgatcacaaaataccacttcttcccgttcacgagccagtggaaggaacacatacaaacatctccttcagcaccaaatcgattctaacactacaaaacttctacgtgattctgggacctatgctgtctcttttcatatgcctcttcgtgaaactcgacgcgccacccaccagccagaaaatgcttggtgtgattgcttgggtcttctcttggtgggtgacgcaggccgtgccacttcccgtcacctccatgtgtcctctgtttctgttcccaatttttgggatagcttcagctgatagcgtggcgcactcttacatggacgacgtcatcaccctcgttttgggaagcttcattctcgctctcgccgtcgaac

SEQ ID NO: 112812 - DNA, 369 bp, Glycine max
  Clone ID: PAT_MRT3847_72877C.1
cgtacgctccatcactcttactcgctcctatattcgctcctccaccatcgctctctacatcaaggacgggcatatacaaatcacatggcacacacagcatctggaatggcagtccatgatgactgctacttgaggattttggagctgaatgcaacaaggacacaccttttcatagtttttaacattgacgatcagcataagcacgacattgcggagaatctagcagcacctgcccagggctatgtagatttcactgccagacttcctgctgacgagtgccaatatgctgctcatgatcttcaatctctttctgaacgcaatgtacctacaagcataattcatttcattgcggggtcccctgacacatca

SEQ ID NO: 112813 - DNA, 244 bp, Glycine max
  Clone ID: PAT_MRT3847_72878C.1
gacaccaacacgataacagaccgactaagatggcttcctttgcgtccttcctacaggagcttcttgcagcccttagcctcatgcctgaggggcttgctacttacgacacaccagttccgttgccagcagtgtgcaatcctccactcgtcaagccaacaatagtgcatccatcggttttatcgccaaaaccatcggtttacctgccgcaagcatcggtttacactccaccacatgagaggtcacc

SEQ ID NO: 112814 - DNA, 802 bp, Glycine max
  Clone ID: PAT_MRT3847_72879C.1
gaagtgtgagaatacgaaagaaggggggtttattgccaaatgaagaaggctcacgagatacgcatgggatcagtcacatgctagcgctcctccttcttcttctctctccggtggtggtgactcgccggaagacaccaacttccaccttcaacgccgccgctgaagtgctcagtgataccctttgtttagaacaatgagagcagggaaagggagccaggaagaggatgagtacgaggaagaagagtttggttcttccaagaaacagggtacttcctctgcccctaacgccaacaaagatggaaaagccatcgacaaggctagtgcgataagatcgaaacattctgtgaccgagcagcggagaaggagcaagataaatgagagattccagatattgagggatctcatacctcatagtgatcaaaagagggacacggcatcatttttattagaggtgatggagtatgttcagtacttacaggagaaggtacaaaagtatgaaggttcatatcaaggttggggtcaagagcccctgaagttgatgccatggagaaatagtcattggcgtgtccagagctttgctggtcaacctacagctgtaaagaatggtttgggtccagtatcaccttttcctgtaaagtttgacgaaagcaatgctagtatctctccaactatgcttagtggcacccagaatacaatagatccttatcagagcagggatattgtcaacaagacggctgagaggcaacctgatttagtaaacaagggaatgcctcttccccttgctatgcatgcaaacatgtct

SEQ ID NO: 112815 - DNA, 763 bp, Glycine max
  Clone ID: PAT_MRT3847_7287C.1
ttttatatactggtatttatatagtatagaactagtaggggaattcacagaaagaaattactgattacaattgaaaattgctgaataatatggatgccaaaatgaaagaaaaaaaattagaaaagcagtgtttcctctgacctgtgactacagccttcctgaatctatccaatacacgtttacatcccctttctttcattttcaccttccttttctgattctagctccacctctccaatgaaaaataagaaaaaatgattatactgctgaaatttttttatattttgaacttttaatgtattctattgctgttgcagacgttctgatgatatatataacaaggttgtcctacattaaatagtgtcttaataactgaagcattgtaatttgtaataacagtgcccatattttttttttggtaatacaattattagcaatggcttggattttgctttttcattcacaaatttagaattctcttctttttattttcttcaaacagctctcttctttgtcctccaccctttctctcccttacacttgcctgccccggagagagtaagctgtttaaagcttaaaatttcattctttagagtttagattgatttattatttggattgtgaactattttgcacacactcatgcagtatttgctttggaattattacagcaagatctggcctgtttattttagatctaggggccattgatgtgtatgaatttcaatatttaaatgtagtggtctggtttttcttgccctag

SEQ ID NO: 112816 - DNA, 260 bp, Glycine max
  Clone ID: PAT_MRT3847_72880C.1
gaatttcggctcgaggggtatcaagtataaaccatgttttccaaagcccttcataacgacaaacctcacttggaaaaagaacaagccccaggtgaatacacccattcgcagggggaggtatctcctctaatctaagacgactattacaaacgctcatactaaatggatccattataacatgagaaagatcttgagacagaccaacaaacataaaacaaataagaagacaacgaggaggacccttactacttgaactcaaa

SEQ ID NO: 112817 - DNA, 1750 bp, Glycine max
  Clone ID: PAT_MRT3847_72881C.1
tttttctttttttttaaaccaggacaaggtctcccatcgcagtttgacattaacatggaccaaaatgattaacattcaggtaaagactcgaaaatgattaagaaagaagtgagaatacgaaagaaggggttttattgccaaatgaagaaggctcacgagacacgcatggggtcagccacatgctatccctcctcctcctccttctctctccggtggtggtgactcgccggaaaacacccactgccacctctaacgccgccgccggcgaacacccttctcaaaatctcacccgacccaattcacctttctcctctctcttctcaattccccatctgggtatccctgtttccctcaaagttctcttctttttcgtgattcagaagtgctcagtgatacccttttcttagaacaatgagagcggggaaagggagtcaggaagaggatgagtacgaggaagaagagtttggttcttccaagaaacagggcacttcctctgcccctaacaccaataaagatggaaaagccatcgataaggctagtgcgataagatcgaaacattctgtgactgagcagcggagaaggagcaagataaatgagagattccagatattgagggatctcatacctcatagtgatcaaaagagggacacggcatcatttttattagaggtgatagagtatgttcagtacttacaggagaaggtacaaaagtatgaaggttcatatcaaggttggggtcaagaaccctcgaagttgatgccatggagaaatagtcattggcgtgtccagagctttgccggtcaacccacggctgtaaagaatggtttgggtccagtatcaccttttcctggaaagtttgatgaaagcaatgttagtatctctccaactatgcttaatggctcccagaatacaatagatcctgatcagagcagggatattgtcaacaaaacggctgagaggcaacctgatttagtaagcaagggaatacctcttccccttgctatgcatgcaaacatgtctgttcctgtcagaagtgatggcgtacttgcacatcctcttcagggaactgtttctaatgcacaatcaactgaatgcccaacaactagtgaaccacagaatcaacaggatgaactctcggttgaaggagggacaattagcatctcaagtgcatactcccaagggttgttgaataatctaactcaagcgctacaaagtgctggtttagatctgtctcaggctagcatatcagttcagattaatcttgggaaacgggcaaacaaaggactgaattgtgggacctcttctctcaagcatcatgacaacccttcttcaaacaatcaaacaattgcacattttagagatgcaggcagtggagaagactcggatcaagcacaaaaaagaatgaaaacatataagtgatatatatgtggcattttcatgagaatccacttgcatccagatttctcacttattcttggtgcagcatataacttgtggttactgtacatccttccccatttgtttgacttttaatggttattttaaaactatttaaaccttgaacacgatcatttgtggagatattgaggcttctactgtagggagcatgtcatctatttcgcttgtatgatacatattataattataattattcagtattattgagcttttggatggcaattttatgatatatgtatacttagggaaaaaaaaaaaaaaaaaaaaaaaaaaaagcggccgctttagagga

SEQ ID NO: 112818 - DNA, 329 bp, Glycine max
  Clone ID: PAT_MRT3847_72882C.1
ggaaaaaatttttaaaaaaaaaaaaaaaaaaaaaaaaaaaaggaaaaataaaaaaaaaaaaaaatataaaaaaaaaaaaaaaaaaaaaaatttaataaaaaaaaaaaaaaattaaaaaaaaaaaaaaaaaggggcggcccccccttattgaccccttccccccggaatttatttccggcccggtccctgagggcttcccacttttccttttatggggccgttttaaaccttggcgaaaacatggacataccttttccctggggaaaaatttaatccctataaaatcccacaaaaaaaacaacccggaactttaaagttaaaaccctggg

SEQ ID NO: 112819 - DNA, 2109 bp, Glycine max
  Clone ID: PAT_MRT3847_72883C.1
cccacgcgtccgtacagctgcgagaagacgacagaagggggagcgtgagcacgaggccagaccaaatcaaagttattttagtacaaagaaaaggagacacattattattgtgttgcactgagtgcagtgaccatgacgagaactccttgttgtgagagaatgggatcgaagaagggaccttggactgctgaagaagatcagatattggtttctcatattcaacaatatggccatggaaactggcgtgcccttcctaaacaagctggtttgttaaggtgtggcaagagttgtaggcttcgttggataaattacttgaggcctgatattaaacgagggaaattcagcaaggaagaagaacataccatcctaaagctacatggaattcgcggaaatagatggtctgctatagcggcaagtttgcccggaagaacagacaacgaaataaagaatttttggcatacccatttgaagaagaggatccagaaaagtggagtgcacaatggcaatccttcctcacgtatcttgcaagaggcacaagcaaatactagttcgaatgcatcaagtgtaatgattgccaattacggtttaccctcaaggaatattaatccacctattgcaggattttacggtgcagtctcctcagatacttttggagaaattaaggacaatcatggttcttgtcagctcagtgaagaaatggaattttggtacaatatatattcatcaaatcagggcaaacatcatgagacaatggaaatctaggatattatatagctagattgcatgagatactacatataatttgtctcactcctacaaattaactttttatttttatttttagatatcaacctttaattggtttcagcttggtgtttgtgtacaaaacttaaaatccattttggcaaagcaaattgccagatgaaaactaaagatgatcgatggataatttttaaataaaggctcgagagaagtttgtaaatgcatatatactgaaacaaagtacttttgactgccattttttttggtagtgacttttgactgttatttgaggcaaaggcaaacttttccttcaactttaaacttcaattcaattatgtagttcttagttcttaggaatcattgcaattacaattattatttttgaaaacttttttctgtttttaaaaataaaaatagaaaaaagaaacagtgataataattttttaaagtattttccagtataacatcttctttttaaaaaataattaatattctactttcaatattttatcatttatatttttccaattcagtatcttatcttttttgctttttatttctattctaaaaaaaattgtctttttaattacaaaaataatacatacacttattgtgtactttaccaataaaaaaaaccttactgtgtaattttttctaatgttgacaatacttgcctattattaaattctttttaaaactgaagaatcgaagtaaaatctaacacggcttgccgaataatattaaactcttaaaaaataacaagtcttaaaatagattgactgtactgcacagtggtgatattaaacactttgttttttttatgataatataataatggcccgttgatgtcgctttatgattactatgttagtttcaaatgttttccacagtaggaaaattattttggttgtaggatataccgtaagacttcctcctacactggattattctttttctttttaaaaaaaaaacaatgttttcctttcctattatgcaaatcaagttcactgtctcccttggttccatcaagcttcttcctttgcttcccacagtgtcatgacctcgtctacaagaagctgtcgttggtgtcaaaaagctctccatggatgcctactagggctttttttgggttcaccacggaaatcaaaatatcctgagtaaactccaccacaccaagatcgcataagtgttttttttttcagtttagtttttatatattttaatttattttattatgttcttaaaaaaaattatattgatgcttgtaatttaatttgggatctggtgaatatatggtgatgtttgtaatttaattttagatgttggtgaataaattgtggcttattt

SEQ ID NO: 112820 - DNA, 362 bp, Glycine max
  Clone ID: PAT_MRT3847_72884C.1
ataaatctctttgagcgttttgttattgagaacaagaaatgcacaactagttgaaaacaaaagcagtaaagttctcatatgacaaactaattaaacttattcataaaacacaataaaggagtggttactctcataagtaaaatccacagcctacatatgattattctttatctaaagctttagcaccaagtaatttggtcaacccaaaagtgatagccatggctatccatcctccaagaaggaaccttacacaagatttgatcttataagtttttcccagctgggcccaccatcccttccaaacacgaccaaagccaagttaaccatggccacaaccaccatgaaccttagtcctggaattt

SEQ ID NO: 112821 - DNA, 257 bp, Glycine max
  unsure (1)..(257): unsure at all n locations
  Clone ID: PAT_MRT3847_72885C.1
tgctctatctctacctctccntctcncctcnaaattttgcttnattttgacgcgcngccgtggtttcngcnggcggtactcctatccacngcgcatncatgcngcttccntctactcgcttcncntnacaaaagaaaaaaaattaaaaatttntnngaagactgtgtattatggttatcgttgactgagttaggttttgctgttcttngtagggttttattgtgtccaataacaagaggagggggaaagaaacaaaa

SEQ ID NO: 112822 - DNA, 255 bp, Glycine max
  unsure (1)..(255): unsure at all n locations
  Clone ID: PAT_MRT3847_72886C.1
cacagnacnaatanagnntnagnatgctnnntactgtanccgannctatgnaaggancgggngagctattttgaagttccannccntcatcancgtgcagntttcncatttgcagtantttcangtggattatccgatcctagacttgtggcaatttcggttccatatcatttgcaaatccnanagcatntgtgtatccgtgccntgctgtaggaaaatcttgggatganatgncagttaatggacaagggatat

SEQ ID NO: 112823 - DNA, 390 bp, Glycine max
  Clone ID: PAT_MRT3847_72887C.1
ggctcgagaattacaggaatcggctgcttagacctcatccatgcacaaggctttggccgcatacgaagatgactacgtctttcctgcatcgacgctgatatatcactgtgacgagactgatcggagacacctgtccctactgccgagtccactgaggcatgattgggagccacatacgttatcccttaggagaaagcgcttttaagtattgataccgtttctacgttgcaggatcagacttactctccgtctcatgatacagacatgctgcaatccatgcttgcaactagggatcttgactttacagatcttaagtgggaactgccactactcaatagaatctgtgatgctctagactgatccacagctcaatggtttgagctcgcctat

SEQ ID NO: 112824 - DNA, 374 bp, Glycine max
  Clone ID: PAT_MRT3847_72888C.1
tataaatgtagttgtgaaagctaaaatgaggaagagatggcagatgttggagaggaacatcgtgatagctattaaaaaacctctattacaatttgagtatttagatgctcaaagtcttcgaggcttaaactggtttgattcctttattttgttggttggcatgtgtatttagttctcaaactctaaattttggtcattaactatgaatgtctttacttgtaggtatttctttttcggcatgcatctgcgtactataatctatgttaggcgcatgttaaaacttcaaaacgcaatcttgctacctgttatatgcgtgctgggaccaaactgcttcatgccactttctgggatatatatttcgttgctattcttat

SEQ ID NO: 112825 - DNA, 491 bp, Glycine max
  Clone ID: PAT_MRT3847_72889C.1
caacatgctcactctcaccgcagccgccatggccggtgtcgccgccaccatcgccaccggtgacgcgccacttctggctctaaaactatcctccacgctcttgttctctgcctccacggggatgctgatggtgatgaacaaaatacagccttcacaactggccgaggaacaaagaaacgctacgaggttgttcaagcagctcaagtcccacatcgaaacaatactagccattggaaaccctaccgaggaagatgtcaaggactcaatggaaaaagttttggcacttgacaaagcctacccacttcctttggtaggagccatgattggaaaattccccaaaaaatttgaaccagcaatgtggtggccttcaaagagaaacaactcccaataccatgaaacaaacaaacaacatggtaagaacaatggttggaatgaaaggttagaaattgaacttaaagatgttttgaaagtggtgaaggaaaatgacatga

SEQ ID NO: 112826 - DNA, 256 bp, Glycine max
  Clone ID: PAT_MRT3847_7288C.1
gtgtttttttgtttgaggtaagataaggatttcaatattgacccctctagagggggaaagtcgaagaaagtaggccttcattaagcactcatcatctgtgcgaattcttcatagttgacctggccgcctccatcattatctgcttctatgatcatttcgcctacttgatcatctggtagcttttccccgaggattgacatgacccggcgcaaattatgccgcactgatggagccattgccatccttgtcaaagact

SEQ ID NO: 112827 - DNA, 307 bp, Glycine max
  Clone ID: PAT_MRT3847_72890C.1
gagatgaagactacatggatcattccatgagcacatacaacagaaacatggcggtgatctttctgtagcggaggggagaatgtcaccgagccattatcaccacatgaccttttcgaagcctaatgacatctcaccatactatgtttctacatgtcttccgtcgagcttcaacattttctatctgagcaccatagtaaataagactacgccttatttgattccgacaaagttgatattaacgatttcttaaagagaaacataatttaaaacaatctttatgtcgatctaaatacagaacatgagatca

SEQ ID NO: 112828 - DNA, 172 bp, Glycine max
  Clone ID: PAT_MRT3847_72891C.1
aaaccgcgatcataggtcgccgaaccataaaaccgggaacaaaagcaatcgttacttgattacaagaatttttcaatttattcctacttttttgcgtacgaacacttaaggggaagaaaaacactctctgagctgatcacagactctgggaaacattttttttaccattctt

SEQ ID NO: 112829 - DNA, 842 bp, Glycine max
  unsure (1)..(842): unsure at all n locations
  Clone ID: PAT_MRT3847_72892C.1
atcgcagtcgtccgccaactctcagttttcttgcgcttttctggaagaaaatatttttgattacctgatcccttttaagctttttttctcccacatgaatcattccattttcagccacttctgttcctccatcctttagaatcctcatcacaaactacacaagaccaaaccaaaatatatattaaaaaaacccctcaattcaagtcctttcactactccatcttcccacttcataatataacacaaattaataaataaaaataataattaaagaatgcactgcttagcttccctatctaaccatcttttttcctagccatgatataccctcttcacttcatttctactactccacagaaaaaccctagctagctagtcttcctcgaaagaacaacttaattaataaaatctagatatatatttatattgcagggtagcgatggatccttctacttgaacctactaatattatcatcatcaagctcattatcctcaagatccaagtgaaatccaaataagaaagcatcagatctcaacaatggagagcgtggcatccccaatagtaaccttgttcaagcaacaacaatggtagtggtagtaataacagtactactactactcctagcaggtatgagaaccaaaagcggcgagactggaacacgttttgccagtacctgcggaaccagcggccaccgctatcgatggcggtgtgcggcggggctcacgtgctggaattcctgcagtaccttgaccaattcgggaagaccaaagtgcacaacccgacatgccccttcttcngactgcccaaccctccggcgccctgcccctgcccgctccgccag

SEQ ID NO: 112830 - DNA, 235 bp, Glycine max
  unsure (1)..(235): unsure at all n locations
  Clone ID: PAT_MRT3847_72893C.1
cttcttaattagcctctctcattgcgtgcaccaccccaaaaaaaatgtgcatatacatatatagagaaaagaaacaacccccccccccccannannanacaatagggagacacactagaaaacaactaccgcatgacgttaggtggcatctgtataaaaagttgatctagatgtttccattttgtctgactggggaatttaaaattaaacgaaagctgaagtttatgcataaatt

SEQ ID NO: 112831 - DNA, 416 bp, Glycine max
  Clone ID: PAT_MRT3847_72894C.1
ttggggggggggggggggggggtaggggggaccacccggcaggatgacgggagaacaaacccccaagtgggacaaataaatattcacagattttagagcctatcaaaagctcccctaaaaacccgggaacagaaaagattataggaagccggctaaacccggaagtttccccccaatgctaggcgatgacctgtggggagttgtatcccaaataagacccgaccgtagattccgttcgtaaaccccagattggttgcggggagtttcccctggtttttttgaaatgccgtttcaatgtaccctggatccgttttgctgggttaacggagagtgttggtaggcccgttttgaaatgcaaggaattcctttggcgggggtaattcatgcctgcccaaaatttgccgcggttttaatgg

SEQ ID NO: 112832 - DNA, 366 bp, Glycine max
  Clone ID: PAT_MRT3847_72895C.1
ctcgcaattcctctcgaggcttctctagagggcctcgccctgcttttatcttctcttccatctggcctgttagcactgggggctcacgcactacacagcgcctcactgatctccaagcccctcatttcgattctgcactctgtcaccgcgcaccaagcccagagttgcagatacatcacatagaaggcatgtcatggcccacgtcaggtgactagcgatcctaaaggtcatcaccatgcctcgatgtggccgtctggaccttcaccatccgtgagctgagcctccctactggagagcgcattagtgatatgcctacacctgagattgccagagtggtcttcggtggacaatactactgtcccgaat

SEQ ID NO: 112833 - DNA, 263 bp, Glycine max
  Clone ID: PAT_MRT3847_72896C.1
cgccctcagaagctgtgctgcggccactttgacctaaagtcccactctaaccccattgaaaaaaacggcatcgcacatagacggatacccccgtgtggggcccatgagagagctgaagttcgctgtcgagtacatctaggatggcccgaacaacgcctaggatgtgcagaaggtgtcctctgatctcaaggcatccatctggaagcagatggctgatgctgggatcaagcacattcccagcaacactttctttcactatgacc

SEQ ID NO: 112834 - DNA, 382 bp, Glycine max
  Clone ID: PAT_MRT3847_72897C.1
agcggcttttatccctgatgatccatctacctttgctaacgcttccctggatggcacctagaccatctagaccctcgattcctatgctgctatttctacgctgaaaagacaccaaatgagagtgaatagtgtagattacttggtaacccacaacaaccaatatatgatccttggtactgatgactacaccgacacggtatgtgattatcatcctagaaactgtgtccacacgctgaagtgacaggagaccgatgatgctgcaatatagtgctcatcctgatctatctataatataacacctacagaggattctactgataaaatgtgggaagctgtcacttacaggctatagaccactttgaactatcgtctcaatagagta

SEQ ID NO: 112835 - DNA, 169 bp, Glycine max
  Clone ID: PAT_MRT3847_72898C.1
tgccttaatcagcacctgagtgttatggataaatcgggtaaggggtcgagcgttacttcacaaacgcgctttgatacattaataaaaaagcttttttgagaatggaaatgtcctcgagcgcattcgaaatttggagaaaggtgcggataataagagcatgcctttctct

SEQ ID NO: 112836 - DNA, 313 bp, Glycine max
  Clone ID: PAT_MRT3847_72899C.1
gtctggattagacgatcaaattcctactgccttcgatccttttgctgatgcaaatgctgatgactcgggtgctgggtcaaaggactatgtgcatattcgcgttcagcagctaaatggtatgaaaagcctgacaaccgtgcatggatagaagaaagaattcagctctaacaagatacttagagacgtgaagatagagttctgtcgcactggaacaactggtcatgacccaggactaggacaggtgattcaactttaaggtgatcagaggaagaatgatactacttacctagtagaggctggtgtcgtgaagaat

SEQ ID NO: 112837 - DNA, 121 bp, Glycine max
  Clone ID: PAT_MRT3847_7289C.1
ggaggctgaggaaagtgagttaggatagccccagacatagaaactcgacgttactcacttactcaactaccaccagcaccaccatgttctgatattcccccaggggcacacagtcactctt

SEQ ID NO: 112838 - DNA, 420 bp, Glycine max
  Clone ID: PAT_MRT3847_728C.1
ggattgccgaaagactcaccccttacatttttattttagggtcagatggtagcatccatggaaatcataaagatttattcttcaccatttttgtcgtcttcttcaaatgcatcaaagcattgataagagtgacaacggttggtggggagttgccctattttgaggagaaccccgatgaggatatgttgaatgtttcctcacaaaagtctcaatgttagggatcttctaaactactgaccttttgcttcaccctttttgcatatagtttcttccctagggttaggatagggatgaatggtatggaactgggtgttttcctttcttttgggtatgggtggggagacctagggtgcaaatatattggtgggacttgcagtcatgaggtttttattatgggtgattgagggcatatacacactc

SEQ ID NO: 112839 - DNA, 557 bp, Glycine max
  Clone ID: PAT_MRT3847_72900C.1
ggcaaaaactttttccttggcccctttttttttattttatttttcgggaagtatgaaaaagcggctaagaatcattggaaactacaggttccaccatttccaaaggaattttaaaaccaacaacttggccaagggccggaaaccaggaaatcaaatccggggcaataacaaaaccatttttgttcaaagaggactcactatgaaagaaaagcttcatccagtgcctgggcccacagggatggaattggaaccatggcccggtcaaatatggatggccctggggggttataaaaggccattgggattcggaccgtaactttgcagagggaccagaaagggccttttcaatttcgttaaacgggaaaaggggcccatcactacggggcgaacggagggccaaaacgggaaccctttttgaagccctggagacaataggaaaatctgagggggttactttatgctctggacatactaaaggggctttataaaagggcccttctctctgagagatgggggacccttctttccctgggagactcctatcaccctcttggtcc

SEQ ID NO: 112840 - DNA, 485 bp, Glycine max
  Clone ID: PAT_MRT3847_72901C.1
attttcatgagtttaatttctctgtattattaatgtgtcaactaattagatgtcatggtatgtatcactttcaaaagtaattattataaaagttaacaaacttaacatacatggtcatttgtgattgaattttacacactttaatacactttgaaagggattacatttctaagtttcatcgaagaggagggatctgcttccatctcaccgtttattttcttggaatctaatggttaagattagtcactctttacaaccattggttttttagaaaatgaatggtgagatgaggaataactcttttaaagttactcttagagtaacttgatccctcttggaggaatcgtcattgtttcaggcttataggtatagtgtacctgcaaagtttcaatccaagtatttagatgtcatggtatgtatcactttcaaaagtaattattataaaagttaacaaacttaacatacatggtcatttgtgattgaat

SEQ ID NO: 112841 - DNA, 368 bp, Glycine max
  Clone ID: PAT_MRT3847_72902C.1
cagggatacacttccttttggcctttgcattttttagaacaaattctggctactagctttagtagctcgggtagaattgaagaggttaaatttttatgacaatgacaatgtgcaatatatctattatttggtcataatttttaggctatggctcactggtttgggataatattaggcaattcgtgattggctttcatagaatataagactaggtcataccatttttgagcataggtaccatcacaggtgagcttcctcggtttcaagctggagttacaatggaaatatcctgtttggatgcttggtattctgacaaagatggcaccttagagtgccgagcaacatacatcgtgaaaggactttgtcgt

SEQ ID NO: 112842 - DNA, 390 bp, Glycine max
  Clone ID: PAT_MRT3847_72903C.1
cttacagctcatgtgtttcttgtaaagaactgctttcaccgtagatgggttcaacatcatgaccttgactctatctattcgtacagcttctatctgttcttggcgattaacgatttcacttaatggatcgataggattgatcacacgcaaaacctccgccgccatcaaagacagggactagaagaaacccatttcatgtacacatagtgccgtccttcaattcacagcaggatgaattcaccgccttatgaagtcaatgacagccgctcatgatagattttgggccacatctgctgtctactatgctgctatcttggagtatctcactgctgaagtattgcatctggcccggaatgctagcaaggatctcatcgtaaaacgtattactac

SEQ ID NO: 112843 - DNA, 460 bp, Glycine max
  Clone ID: PAT_MRT3847_72904C.1
gaaatgatgccaaaatagtgataaagtttctcaagaaaaacattttctcaaggtttgggatgcctaggatactcataagtgatgggggttctcacttttattattctcaactcaacaaggttttgaaacatgattcagtgagacacaaggtggaaacttcatatcaccctcaaaccaatggacaagctaaagtttctaatatacataaagagaattcttgagagaaaaaaatgtggcatcttcaagaaaagattggtcatccaaattagaggatgctctttgggcatgcaagactgctaaaaaaactccaattggtctgactccattccaaatggtctataggaaggcttgtcatttacccgtagagctaaagcacaaagcatattgggccatgaagtgtttaaattttgatcctacaattagtggtgagaaaaggaagcttcaaatagcataattagaa

SEQ ID NO: 112844 - DNA, 383 bp, Glycine max
  Clone ID: PAT_MRT3847_72905C.1
cgaacgttcaccgttattctctctctctctctctcctcttctgagtggcgctgccagccatgcgtctttctgttactcttactctttgagacgttccaattctctccctcacggttacacttacacccaccgcagcagctaatagaatagagccgttgtaatggaggaataatgtctccaatgccacccacttcaccttcgtgctagacaaagagaacattctttcaccagatctgcaaaggaaaacaagaatgccttagatagagccaatctatgcagaattagtcttgtgttgcagtgtgaaaaaaggtagagcagaagaaacacctcgttccttgctgctgttagaagtggaaggaaaaattctgaaatggaatttctac

SEQ ID NO: 112845 - DNA, 1383 bp, Glycine max
  Clone ID: PAT_MRT3847_72906C.1
cacaattcgttttcgtatacacgctttttttcagtcaatttaaatctcccgtctcgtgtcgtgtcttcttctctaaaataaaaaaccctaacttctgaacctttcaccgcatcgccaccgattccctatctccactaatcaaagaaaagaaaatgagtagacgctcgagcagaactgtctacgttgggaatctacccggtgatatccgtgaaagagaagttgaagatttgtttctgaagtacggacacataacacacatcgacctaaaggttcccccaagaccacctggttatgcatttgtagagtttgaagatgctcaagatgctgaggatgcaattcgtggtcgtgatggctatgattttgatggccaccggttacgggtggagcctgcccatggtgggcgtggtcattcatcctcaaaagatcggcacaatagtcacagcaatggccgaggtggacgtggggtatctaggcgctctgaatatcgtgttctagtcactggattgccctcttcggcatcctggcaggatcttaaggatcacatgcgcaaggcaggggatgtttgcttttctcaagtttttcatgatggaaggggtactaccggtattgtggattacacaaattatgatgatatgaaatatgctattaagaagcttgatgactctgagttccggaatgcattttccaagggatatgttcgggtgagggaatatgattcaaggcgggattcttctagaagtcctagtcatggcccatctcattctagaggaaggagctatagccgcagtcgtagccgtagccatagttacagtcgggaccggagccaaagcaaatctccaaaaggaaagtcttcacagcgttcacctgctaaatctccaaaaggaaagtcttcacagcgttcacctgctaaatctccatcaagatctccctctcgttctcgctcaaggtcaaggtcccgttcgttatcaggatcacggtccaggtccaggtctccattgcctccgcgtaataaaagccccaaaaaacgcagtgctagcaggagtccaagtaggagcaggagcaggagcaagagtttgtctcggtaagctctgattgttgcaattgaagaagttgtggatgatggtgagtgctaccaagtttttctagtaaaattgacattagccaaaaaaggcatttgggttttatatttgatcttctttttaattgaacttgagacttctgacctattggcgtcttagttttaatattgaggatttgaaggaccctagatttctgtaatagactgttaaatgtcaaaaacatgtgctatttggttaattatgccagtttatttaaaaaaaaaagaaaaaaaaaaaaaaaaaactcgagactagttctctctct

SEQ ID NO: 112846 - DNA, 319 bp, Glycine max
  Clone ID: PAT_MRT3847_72907C.1
gggagttaggttctgcacgctctgcttccagcagagagttctttcttcgttacacaccttaatttgaacacgctgctcctccagcttgagaaaaggcacaagaaacctttctatccacatctgattgtggaaacgagggtcacccagacaagctgttctatcagatctctgatgcagagcttagtgcagaccttgaacaggaccctgacagctaagctgcctgtaagacatgcaccaagaccaacatggccatggtctttggagagatcacacccaacgccaacgtagactatgaaaagattgtcccgtagacacatgc

SEQ ID NO: 112847 - DNA, 819 bp, Glycine max
  Clone ID: PAT_MRT3847_72908C.1
ggttggtgaacaagaagagaagcttgctgaagggatcaaactttatgcattattagccactgccacttcaaaacggacagttctttctgatcttataactgtttatgcaaagggtgggaagactattgtttttactcagacaaaaaaggatgctgatgaagtatcaatggcattaacaagtagtatagcttccgaagcactgcatggtgatatatctcagcatcagagagagagaacattgaatggttttcggcaagggaagttcacagtgcttgttgccactgatgttgcaactcgtggacttgatattcccaatgttgatttggttatacattatgaacttcccaatgatgctgagaccttcgtacatcgctctggtcgtactgggcgtgcaggaaaacaaggtaatgccattctgttgtacaccagtagccagcggagaacggttagatcccttgaacgtgatgtaggctgcaagtttgaatttgttagttcaccagctatggaagaggttttggaggcatctgctgagcaggttgttgccacactttgtggagttcatcccgagtctgttcagtttttcacccctactgcacagaaactgatcgaagaacaaggagcaagggcccttgcagctgcactagcacaactgagtggattctctcaacctccatcatgtcggtctcttatcaatcatgaacagggatggactacattgcaactgactcgagattcagatacttctggaagatatttttctgcaagatctgtcactgggtttctttcagatgtttattctcaagctgctgatgaagttgg

SEQ ID NO: 112848 - DNA, 431 bp, Glycine max
  Clone ID: PAT_MRT3847_72909C.1
accaggaaggtgacgttgctttgtccatgtaaaggttgcaacaataggattcacagtgcggtgttgaagaataaaaatgtcatttttatctatttattgatttgacatttattttttatttgtgtctttttattgtcgtgtgttgaaatggtgtggcgtaggagttaatgacgttcgtcgctgatctttctcagcctcgatcgccacatttacctggcaagatcaggttttcattttttattccaatattacttctggttattgttattgttattattattattactcaagtcaagtgaccatgactatgctaggttgttgcctacgatattctcgtgattcaaatttgtcttttgaatcaagttttgtgattttaattttgctggttaatttagaataccttggtagagttgtgtttaacacaaatgccg

SEQ ID NO: 112849 - DNA, 337 bp, Glycine max
  Clone ID: PAT_MRT3847_7290C.1
ggaccggccggaaaacccgggcgacccacgcgccttcttacaacaaaaccaccaaggacgcacagacaaaaagaggaacggccggaccccccagaggaggacccccagaggaagccacacaagcgcacacccaacggagacgagggccggaccacaaggaaagaatacccctagccacacccgaggggacacctcacgtgcccccacgcaaaaacggagaaaaaggcaaaaggagaccagcacccggggaaggcgaagagaagacaacgaccccgggaaccagagacgaagaggccaacaacaagcaaaaaggccaacccgagaaaagagcccccac

SEQ ID NO: 112850 - DNA, 139 bp, Glycine max
  Clone ID: PAT_MRT3847_72910C.1
aggttaatacagagacgagattccctatgaagtggccaaagaaattgatgatgcaatttttgatctgaggaaggcgatgtcagaggataatgttgatgaaatcgagtcaaagcttgatgctgcaatcaaagctgtatct

SEQ ID NO: 112851 - DNA, 939 bp, Glycine max
  Clone ID: PAT_MRT3847_72911C.1
aacaaaatgagttcttcaagcccacattgacattgctacactataacattatagaataattttattttaatatttatataaacgtaataaaaagaatccctataaaaatgagacccttggacagtcgtccaccgtgcccgtgctcatgccactgcagaatatgcatctaaaaatctcgcatataggttaattgcatagtgaggttgacgtgtgtataattgcaacaaattttatctaaacttcagtcttgccattgatggggacaagctccaaagtctcttcttcatctaccttatcactcgtgttctttcctgaaacctcaaaaggaagcagttcctcatattggatcagtcttagggacaagaaaaaccaaagcaagtgtagcaaacctaagcatgtcccttataagaacagccaaccaaaggtttgtaaagtcagttctagtgatgtgaaggacacgaagaagcacccctccaccccatctggataagagggcaccaatgctatcaatgcacattaacagagcaaaaaaggttccctcaatgcctaaagggcacaactgggtgctgagtaccatcatgggcatccacctgattttgcttgtgattcttgtggcactttcttcaatgacaacaaagaagtagtcagggattccaatgaccaaattccaacggaggatgaagatcaggtccaatacaccagatatgccatataggagttgtgcatagaatactaggtctctaaatgggtagtcttttagtgccttgtggtagattagaacccctatcaatgaagccactgcacctattgcatagatcacccccacaaactcctgagagaatgcaggaccggcttttggatctgtataccagtaaaaatggccttcgtgagtggttacattcaaagccagggcaaggaacatgtaaagagaaggcttcc

SEQ ID NO: 112852 - DNA, 273 bp, Glycine max
  Clone ID: PAT_MRT3847_72912C.1
atatgtttatttttgcgagaaaggagtaacaatatgtaaaataagaccgtttaaacaggctaggctccctttaacttgccaacgggaggtttcatttacactatacacatgggctcactttgcaaaagagtaacaaacttgagggactgacatataggaaggggcaaaggtttacattaccgccttcaagaagcaagaggagctttcaaacgtgtggggctcggaatttctcacgccgttgcaagaattcggtgcatttttctgcccgaatac

SEQ ID NO: 112853 - DNA, 366 bp, Glycine max
  Clone ID: PAT_MRT3847_72913C.1
cacacacgatcggcatatatagcactaagtacgcgcgttgagtgctgaggactgaatcggactgcacaggtatctacctaggaagaggaataaatgggatccaacggacacatctcggtctgaccaatgggataacagacctgacccagtgactcgcatacaatgaatcaaaggaaacagaacaacacggtgctttgcaagaccaaggcagtcgcttccaccggagtgaacaagttgaaggagggtacccttgatgaactgcattggatcaagacccactatcacaacaccacccagaagcattaaactacttcttacttatcttaatatgattgcttctgtacatatttataataatctttgtct

SEQ ID NO: 112854 - DNA, 404 bp, Glycine max
  Clone ID: PAT_MRT3847_72914C.1
gctttagtccataattatatattggaattattgaaaaatcatgatgtgtttctaaaataaaaacgactaaatatttggtcgaactttttttcctattcagtggtattgtgctccgtttgtcacttgtcagcatttggtatttgtggatagaaaacaatgccagtttttttgataaaatgtttctactttttcatctttttgcatacctagtggtttcctatgcatctttgtctatggcaacccattttggggggatttctttcattttttcttgttttctttctttctactaatttatttttctagactacatattttttttagctctattcagtaatatttttcttttttttgcaattaaaacttgtaaagtaatttcaattgcacattgaggctgtttaaat

SEQ ID NO: 112855 - DNA, 946 bp, Glycine max
  unsure (1)..(946): unsure at all n locations
  Clone ID: PAT_MRT3847_72915C.1
cttgctccggttttcaaaaggattgtgttgtatgcagtggaaccactgacagtatagctgcatttcttgcagctcgtgctacacaacccgggaaagctgtcacttcattgggttcaacactagctattaaactactcagcaacacaagaattgaagattctcggtttggggtgtacagccatcgccttgatgataaatggcttgttggtggtgcttcaaacactggtggagccattcttagacagcttttcaccgatgatcaattagacaaattgactgaacagatcaatccctcacaaccctctcttctgcattactatcctctaccaaaagcaggtgaaagattcccagtagcagatccaaatttggctccaaggctacttccacgtccagaaaatgatgttgagttcttgcatggaattttagaatccattgcacgtatagaggcaaaggcatatgggttgttaaaggagctaggagcaacccaggtagacgaagttttcacagccggtggaggagctaaaaatgagaagtggataaagatacgagagagggtgattggtttgcctgtgagtcgtgcaaatcaaacagaagctgcatacggagctgcattattggcaatgaagggcgatcaacaaaatattttgtgaaaatattattacaccacctgtttgatcatgatgcgtttgaagagtaattcgtcattcgaaatgttacgagagcaaaaaaacattagaagaaatttctcgggagcgtggaggaggaccgaagaatgtttcaacatggcgttactttctcgaaatggattccactgttccaattcatgcgaacatgtcatgtaatgtatctattactgtttagtggcccccaaccaaggtacatttccattttccatatagatcccttttgtcatttgtgcgttgaaggtccnnnntcaatacaaaca

SEQ ID NO: 112856 - DNA, 2255 bp, Glycine max
  Clone ID: PAT_MRT3847_72916C.1
acgcccacgcgtccgggagtcttggtaaaaatgcagccggaattgatcatatgccctccatagagactaaaaacataaagaaacccttagagaggaaacgtggaaaaactgagaaatcaatcagtcttgaagtcttgcaacgttattttgctgggagtctaaaagatgctgcaaagagccttggtgtttgccctaccacaatgaagcgcatctgcaggcagcatgggatatcccgttggccatctcgaaagatcaacaaggttaaccgttccctgtcgaagctcaagcgtgttatagaatctgtccaaggtgctgaaggagcatttggtttgaattctcttagcaaaagtccacttcccattgctgttggttcctttcctgagccttctactccaaacaagttcagccagtcagcctcattaagcattaagccatcagagcctcagatgaaagagaatgaattgaatgcctccaaagcattagaaacaaacagacaggctggaatggaagaatcaattgctgggaggaaggacacagaatcttgagaaagtaattaatgataaaggtgggtacactcgagaggttgggagagaaccaaaaaggactagaactaggaatggctcaagtgaggatagcacaaatcctacttctcatggttcatgccatgacagtcccccaaacgaaagttctcctgtaaaggatatattcattacttccaacaatgatcaatgtgctgggataaagagatcacctgagtcaacactgcagccaactattaatacgccaagccggccaactgcttaccctatgcctgactttggccgtagaacttcaagagccatttggagggatgctaatagaggatgctggtagttccaaagacttaagaaatttgtgtcctttagtagccgaggtcattttggaggatatgattccagaagcttgtgggactaatcttccaggtcctgatttgtctcctaagctaagcatgggtactcctaataaagcagtgacaccttttgcagctatgaaagaaatgaagacggtgacaatcaaggcaacatacagagaagatatcattagatttcgagtctcattgacctgtggcattgttgaactgaaagaagaaattgccaaaagattgaagctagaggtgggtacatttgatatcaaatacctggatgatgatcacgaatgggttttgatagcctgtgatgcagacctacaggagtgcatggatgtttcaagatcatcaggaagtaacataatcagggttttggtgcatgacataacttccaatcttggaagctcatgtgagagctcgggggagtgagaagtggctgtatataggttgagtctgtactctaattatgtaggttcttgtggtgtttaggacaataggaaaaagaaaataggttttggttatgatctgctctaattgtaagaaacttgagaagttgagatcagataaaaggagtttgaatctttggtatcactcaaaaaagtaagttcctgactcatcatgaggaaaagcgaggattctttggtgacacataatgtggtcagcttttgaaataaaatcgtgttggcattcaaatttataactgttcggttcatatcttggatgaaggggaaattatttttgttgcaaaaacatgtcatttctcaatgaacaaatgcagtgtcacatgtgctttcagtgaagccatggtttggcctaatggctaaggacctgtttaaatacatggtataagtacttttgagagttaatctactgaaaaaatagtttttttttttcagtagagaagctctcaagagctatcaaaaggacttttaaccttgtatccaaacagatcctaaatagccccaagcaaagggtcccgattgttatgccccccgtcttctttttgttttcattatcttttgttgttttcttcttgtcatgttgttgacttgttgtcttcgttcggtgaatgtgaaaagattttagttttctgattttagttttctcgaggggaaacatcttagttctgtcataatggtacggtttcttgatttaaaatgtagctaacgttgaatccttgtcctgttgtcttctctaaggttgattgtgcaaagcattgtatagaacagttggctgcactaaggagcctaaagaaagttcgtttcaaattcctagtactagtaaaagtcacattgacaagtactcaagtaaaaagtagcatcttttgttctttaagaacaaagacataaag

SEQ ID NO: 112857 - DNA, 564 bp, Glycine max
  unsure (1)..(564): unsure at all n locations
  Clone ID: PAT_MRT3847_72917C.1
aaatataagctaacctgaagggttaattnnctgtccaataggnncatccagatatgaaccagcaagcaaagtgctatcaacaccaaagagttttgaggttggtccatctagctcaaacttctgctcccaattaacaaccaagggctnngcntctgacttgagtttaaccggaggaagcctaggaatctcttgcttcagattttcaggggggagaggaaaacttaagcttcctatcatcttctgttcnnnnnctgcctggcnncttgaccaagtaaataggcctccccaattgacccacctgctcttcaatagatntcctagtatcactaatttctaccttttttttctcctctatattgtaagaaaaagtggtaccatcaaaggttgtatacacgtccgcttttgagaaggggaagacagtcttgacagagcaatctgtggtggagtctgaagacgaatgcacattctcatcctttcttgggcaggnagtatgtgnnaagtncacttcaagagatgaactattgaatttaagctggcgatcaagttccctaggctctttgcttt

SEQ ID NO: 112858 - DNA, 636 bp, Glycine max
  Clone ID: PAT_MRT3847_72918C.1
atgggtatcattccgacaaataaagatatcgctgaggatgcaattaacttctttaattactggagtggttcctcaccaaacccagaatacaataaattgattgtagcaccatccgatattcgagacgtcttcattgatcgtatcgataaagagatacgtagtcatttacaacatggtaacggtaaaattatgatgaaaatgaactctttaaccgataaaacgattatcgaaaagctcttcgaagcatcccaagcaggcgttaaaatacaactcatcattcgtggtatatgttgtcttaaaccaggcattccagctgacgttatgacacgtaatatgattaaacgtgtcgaaatattattccctgttgaagataaatcaataggacaacgattagttaactatatgaatttacaattatctgacaaccaaaaaggtcgttaccaagatgcacaaggcgtttatcattatgtcgaaaacaattcatctcctttaaactctcaatcttacttgatgcaagaagcaattaagtatggagaagaactaaaaaaacaatcggtacaaccttctggacaacccgttcattctagacgtggtggtagttggatgcgaaaattaaaaaacacatttaaaagataa

SEQ ID NO: 112859 - DNA, 211 bp, Glycine max
  Clone ID: PAT_MRT3847_72919C.1
tccaaaccttattatggattttccttgaaaaatggattattgtgaaggagttcacccggctccattcaaaaaattacttaagggaatggatgaaaacaacaaatctatggcaggtgctaaaactgatgaagaaaaggaaaaatttaaaactaaaaagcagaatgctaccactgggttgcggacttgcaattaccatttgaacatgacaaag

SEQ ID NO: 112860 - DNA, 379 bp, Glycine max
  unsure (1)..(379): unsure at all n locations
  Clone ID: PAT_MRT3847_7291C.1
acagnggacccccggcgcaggaancggccgaggaggagngggnngaacggaacgacncgagaaaaacacgccgcaaaccggagaccnncccgggngagaagagctttccaccggcgcgacgccggcggggggcccggcgtgagaggaggagtgtgagagaggggtaaggtggcaccggatagctctctctcaaggacaagccaagaaaaaatttgcacttcctncttcttttctttccgaaaaaacggtaataaaaaaaaccaaaaaataggaaagaacagactttttttttttgggtctaccgccctgaagaagcaaaagaatgaggatccaggaccccagaaaaaaacccgaagaaaagaaaaattgcagaaccaac

SEQ ID NO: 112861 - DNA, 277 bp, Glycine max
  unsure (1)..(277): unsure at all n locations
  Clone ID: PAT_MRT3847_72920C.1
gggacattaaaaaggggacatttcaagactntccggttggccacctgggggcgggggaccgttattagtcccattagtgcggaggggggacctattgtggggtccgcatttcctgggggggacttgagacaaacaagcccggcctacttccctgggaggggggttttctgggccccttttcagggccgcgcattcctttgactttccacttggtgcaggctaagcgtcctgcaaaaagttacatgcgccttcaccgccggggcttaaccgccttccg

SEQ ID NO: 112862 - DNA, 1930 bp, Glycine max
  Clone ID: PAT_MRT3847_72921C.1
tacggctgcgagaagacgacagaagggggacataatgtagtagtataaatgcatctagcagcaagtgttgaataggagtagcgatggagaagaagaagggtgagctaaagtcaattttccttcctttcctttccactagtcacataatcccgctagtggacatggccagactcttcgccttgcacgacgtcgacgtcaccatcatcaccaccgcacataacgccaccgttttccaaaagtccatcgatttagatgcgagtcgcggtcgccccatcagaacgcacgttgtcaacttccccgccgcacaagtgggtctccccgttgggatcgaagccttcaacgtcgatacgcctcgggaaatgacccccagaatctacatgggcctatcccttctccaacaagtcttcgaaaaactcttccatgacttgcaaccggatttcatcgtcaccgacatgttccacccttggagtgtcgatgctgctgctaaactcggcattccgaggatcatgttccacggcgcaagttatctcgctcgctccgctgcgcactccgttgaacagtacgcaccccacttggaagcaaaattcgacaccgacaagttcgtgttacctgggttacccgataacttggagatgacgcgcttgcagttgccggattggcttaggtctccgaatcagtacactgaactgatgaggacgattaagcagtcagagaaaaagagttacggttcactttttaatagtttttatgacctcgagagtgcttactacgagcattacaagagcatcatgggaactaagagttggggaattggaccggtttcgttgtgggcgaaccaggatgctcaagataaagctgcacgagggtatgctaaagaagaagaagagaaagaagggtggcttaagtggctcaactccaaagcagagagctctgttttgtatgtgagttttgggagcatgaacaagttcccttactctcagctcgttgaaatagcacgtgcgcttgaagattcggggcatgattttatctgggtggtgaggaaaaacgatgggggtgaaggagataactttttggaggagtttgagaagagaatgaaggaaagtaacaaaggatatttaatatggggttgggccccacagttgttgatactggagaatcctgcgattggagggttggttactcactgtggttggaacacggtggtggaaagcgtgaacgcggggttgccgatggcgacgtggcctctgtttgcggagcattttttcaacgagaagctggtggtggatgtgttgaagattggggtgccggtgggggcgaaagagtggaggaactggaacgagtttgggagtgaggtggtgaaacgggaggagattggaaacgcgattgcttcgttgatgagtgaggaagaagaagatggaggaatgaggaagagagccaaggagctaagcgttgcggcgaagagtgctataaaggttggtggatcttcgcacaacaacatgaaggaattgattcgggagctcaaggagatcaagctttccaaggaggctcaagagaccgcacccaatccttaagactggttctgcttttccatcttttgaacaagagtaatgtattttgggacactcttattagtcttagcagtatcagtatcccagggaaatccatcattttctttttcttagtttcattgtttttgtaacttctagtactcaggatgtccatcatcattttcgtgagtatgtactacgaatctacgatcgtgttgacaacttagcgatttcctgacaatgcttttaataaaaatttagagttttattgtaaaaaaaaaaaaaaagagtctcgatagaaaggaagatgtttgatgaataaaaaaggaaaaaaaaaaaaaaaaaaaaaaaaaaaaaaaaaaaaaaaaaaaaaaaaaaaaaaa

SEQ ID NO: 112863 - DNA, 427 bp, Glycine max
  Clone ID: PAT_MRT3847_72922C.1
accgacccacgcgtgcgtccaggcgtgcgaacaggtgagatacgacttatgggaccccattctacaatgaaggtgcgggtccattgtgaattgtgaattatgatgttttcagaatctttgaatgggattttgatccaaaagcaatcttgataggaccaataacaatttcatgttattcataatctattatcttttcttatgttaaaatactatgatattttatgagcttatgaactatcacttttgacttcttcttttaaaaataccttgatcctttaaatttccacttacctcaattaagattgcttacatagggttgtgatttaaaacttaaacaatttatttctatataatgaccattgcattaaaaataaactacttttaggcttaattacatattttgtcttcaaagattaaaatgtttgat

SEQ ID NO: 112864 - DNA, 132 bp, Glycine max
  Clone ID: PAT_MRT3847_72923C.1
cgacttacaaccaacgcactaagcgagtgacttactcatgtcatgctaagatcgcatgggggacacccatcaatggatggaccttactgcacatgtagaggacatcaataataacacatgttcgcgatctat

SEQ ID NO: 112865 - DNA, 423 bp, Glycine max
  Clone ID: PAT_MRT3847_72924C.1
aaagacgacagaagggcctctgcattatgcttgaggttatggtccgcaggcgtgacggattactcggggtgcgttctcggtgatgatggtggagaagacatataacaatctggttgagggcagtatttcaagggacactttcctgaccaatgatgaattttgacatcaaattccggaaaaagcagtcgtcccataacttgaacatgagagatgctgcaccatatatagtaatccaatttatcaaagatgaaaaacagatcagcaaacagatggcaattggttctcaaaataaaaaatcattctacattaggaaatcaagacaagtaactcgtggactggaaattttgatcaaggtagaaacaactgaaaagctaattaagatgtaggcaatgaactaacaaaaagaactcttaaagaaagaag

SEQ ID NO: 112866 - DNA, 384 bp, Glycine max
  Clone ID: PAT_MRT3847_72925C.1
ggtaaaatgtgagctttttttttttatattttttgggccaaaaaaaaggggtggcataacgggggaaatacaataattttcctggacagattaaacaaagccctgctcctttcattttttacacgcccgaatttttaaattgacgacctcttgccttcgtgaccaaaatctgattttttttttcccaggcaaaaaaacccctatttgtttgttggtgcccttgggggggggaaagggtttttacccctcgcttccggtttccttgggggttaattgaaaaccctttaaaaaaaaggggggttgttgaaattccactcccgttttttggggattttttgtatttttatccaccaaaaacacccatgggggccctcaaaatttttt

SEQ ID NO: 112867 - DNA, 714 bp, Glycine max
  unsure (1)..(714): unsure at all n locations
  Clone ID: PAT_MRT3847_72926C.1
gtagtgctgatcgcagttggcatggtttaccttgggctgaaaanccctgttgctgagggacaggttgaagttaggaagcttgagctgcaagaattggtgaagatgtttcagcatgaagcagagactcatgctcaagtccggaaaaatatttctcccaaaaacttacctcctactgctggtgatggtttccgcagtgatgcagattatcttgtcatacaatagagatattaataatataattgtccaaggatgctttaacaataattacttttggtgttaatgattgttccaagtctgaagttaaagcatgaattggaaaagcatatctcgttgcgtattcacaaccgtggttgtatggatgggagatcagtgatgataagctcatagctacttttagacattcgaaggcctcagtctcaaacaaagccgaaatttttaaagacttgctctatacatacaagttttttattgaataaattagaagttttatatgaaatgaatatttgtatgcctcatatgtcgttttttcatttagcagaatttgcaaacgtcattacaacttagtgtatatagaataatttttcataaacaccaaagtgaaagatgtgatactagtgagactttaaactttctagttctactacgattaactaggatttgtaacttttcgcttcctatattctttagtaaaattggcatttgctagttcaactc

SEQ ID NO: 112868 - DNA, 221 bp, Glycine max
  Clone ID: PAT_MRT3847_72927C.1
tcgtcccttcgttcgccctctcgttgggggggggggtgtggcgccccctgatgcgtgctgcgggtccttctggacttataccctcgggcccggtttggtcccgctgtgtcccgttcggcttgcggccgctgtcgttacggtttctcctgggtgggtgctgtgtgttcgctccctgttgcgtggggggggggggtgctttggtccctttattccttcctcct

SEQ ID NO: 112869 - DNA, 170 bp, Glycine max
  Clone ID: PAT_MRT3847_72928C.1
ccgacaacgtggagtacgagaccgagaaccgtcactacacccacgtagactgtcccggccacgctgactacaagaagaacatgatcaccggcgcgacccagatggacggcgccatattatgtgtatgcggcgccgactgccccatgccccaaaccgaagaacacatactc

SEQ ID NO: 112870 - DNA, 116 bp, Glycine max
  Clone ID: PAT_MRT3847_72929C.1
gttcttaatggcaacgaggggcggccaccgcctcaacgggcacagattaagaaacaaaggcggcattatcccaagcccggacgggaaccggaacggttcaacggcacaagtttccc

SEQ ID NO: 112871 - DNA, 292 bp, Glycine max
  Clone ID: PAT_MRT3847_7292C.1
aggccatagtgaagtcggagaaattagcataagattttcacaagaaatagactcatcaaatgtgcaggaaagctcatctatgagctctgcactggacgaagcctcacttgaagcaactagctttcgccaactgcaacaggtcatggatcagttggatattagaactaaactatgcataagggacagtctataccgcttggctaaaagtgctgagcaaagacataatgataccaatgcaagtggtcaaattggtgatgatgttgaagcctgccaagcagtaatgatacaggac

SEQ ID NO: 112872 - DNA, 256 bp, Glycine max
  Clone ID: PAT_MRT3847_72930C.1
gaggacattagggaaggatgctcataacctgctggagtactgtaagagaatgcaagctgagaaccatggttgtttctatgcgatccaacttgatgaagatgatcgtgtgtctaatgtgttgtgagcaggtacaagatcaaggacttcctacaaacatatgggtgatgcagagtctcttgacgctgcttacggaaagcatagatatgcagtgtcatatgctccatacactgggcggaactgtcatgggcgaatgatt

SEQ ID NO: 112873 - DNA, 788 bp, Glycine max
  Clone ID: PAT_MRT3847_72931C.1
ggaaacaagaagtgaggttgtctttcaaagatggaagaggagacatttgaaaaaccattgttgaagaaaaactatcatgagaattgtcctggttgtaaggtggatcaagccaaggagctcaaaaaggatgtttcctttagaaatctttcttatatatggctggcggtgttatgtggcactttgcctgtagcatcattctttccctttgtttatttcatggtgaaggattttaatattgctgaaacagaggaagacataagtacctatgctggatatgtgggatcatcaatgatgcttggcaggtctttgacatccatattgtgggtgtcattttcaacacattatttggtcttagcacgaatctttggatggctgttagcatgcgatttcttcttggatgtttaaatggtttacttggaccaataaaggcttatgctactgaaattttcagagaagaggagcaggctcttggactctcaacagtttagtcattggtccagcattgggaggttatttggctcagccggtgttgaaatacccacatatatttccaaagggttccttttgggataggtttccatatttcttgccgtgcttcataatatcagcttttgcgtttgcatcagcaattgcttgcatttggcttccagtatgtatatcagttcatctaccctcttcgatttttattacttttattctaaacatcaatatgattgacatataatctacattctgatgtatgtatgaaatctttcaactcaggtcctggtttatccagtacctgttgt

SEQ ID NO: 112874 - DNA, 990 bp, Glycine max
  unsure (1)..(990): unsure at all n locations
  Clone ID: PAT_MRT3847_72932C.1
ggaaacaagaagtgaggttgtctttcaaagatggaagaggagacatttgaaaaaccattgttgaagaaaaactatcatgagaattgtcctggttgtaaggtggatcaagccaaggagctcaaaaaggatgtttcctttagaaatctttcttatatatggctggcggtgttatgtggcactttgcctgtagcatcattctttccctttgtttacttcatggggaattcccgggttacgaaacacgcgtccgggcagacataagtacctatgctggatatgtgggatcatcaatgatgcttggcagggctttgacatccatattttggggaatgatttctgatcgctatggtagaaaacctgttataatttcagggattatcactgttgtcattttcaacacattatttggtcttagcacgaatctttggatggctattagcatgagatttcttcttggaagtttaaatggattacttggaccaataaaggcttatgctgctgaaattttcagagaagagaagcaagctctaggactctcaaactttgttgctgcttggggagtaggactagtcattggccctgcattgggaggttatttggctcagccagtgttgaaatacccacatatgtttccaaaggattccttttgggataggtttccatatttcttgccgtgctttataatatcagcttttgcgtttgcatcaggaattgcttgcatttggcttccagagacccttcacaaccacaaaagtagcagtgagtccactaacagtgttgaagctttggaaatggaaagcaatgagactaacaacgataagatgatatctgcatcattgcaagagacccttcacaaccacaatggtggtagcattgagtccactatcaatgtcaaagctttggaaattggaaagcatgaagcanacaaagaccagacgattcanaaagaataaagcatcttccaaaatttgcccttnatgtcatccatca

SEQ ID NO: 112875 - DNA, 233 bp, Glycine max
  Clone ID: PAT_MRT3847_72933C.1
gctagctaaacatctttatccgaaaatttttgtgatgttatgactcctttatggttcactgtacacagaggatctattccacacctctttttaatgggatcattattcaaagcatccgcattcatttgtacactgaaattaatccaagctcaaggtaatattctatcaattccaaaattataaatcgcgagggctattaccatacctccagcctgaaattacacaaaccggct

SEQ ID NO: 112876 - DNA, 188 bp, Glycine max
  Clone ID: PAT_MRT3847_72934C.1
gggtctccaactcattctcacatcactggatgcaggaacacgctgtctctgcagggagcaagaccggcaaacgagaaatggcacacagagattttggcgacgatttaacctcctgcacgtcagtgaaagcatcaaatcagtgcgttgtcggaatctactgacactcgactcatctgaataaacatcag

SEQ ID NO: 112877 - DNA, 241 bp, Glycine max
  Clone ID: PAT_MRT3847_72936C.1
ctaatattgctcttaccaagaacacagtttaatgaggcattttgcgtattgaggtattggcaaattttttgacattcggtcactttagagcaagtgttgatttgttgctgcactcatcgtattataggaatgatttaaatggtggccacagttggctttactgagaattcaggtatatcattggcctgtgctatataatatttttttttaaggtgcgcgccaactctttttttttacacca

SEQ ID NO: 112878 - DNA, 244 bp, Glycine max
  unsure (1)..(244): unsure at all n locations
  Clone ID: PAT_MRT3847_72937C.1
ttcaaccttcaccttgggaacgaaccctgagaaggcaacctcgtcccttttacaatcagacacatgacagaaattgcttccttttttcctttttcatattttcaattagaatcaattgaaagtcacattcacttgggacttagaactggaacancagaagtaaaaaagctttacctgtaaagccatatattttatttttttggtaagaaaccataagtatcattcagataatacaaccctgctc

SEQ ID NO: 112879 - DNA, 101 bp, Glycine max
  Clone ID: PAT_MRT3847_72938C.1
ggagagaatcttgtgcagcaacgcagtgttgtgagtgagttgggtctggtctttggtatttggcagtcgtatattacgctcgggttctttcactgtatcct

SEQ ID NO: 112880 - DNA, 485 bp, Glycine max
  Clone ID: PAT_MRT3847_72939C.1
ttgtttttgggtttgtttttacattttttttccttttattttgggtaagtttttttttctgttttttatttttgtgttttaaagaggtattcgattctgggtgattaactggattgggagcacttgggggttcccataatttggacaggttactgggacaaaaccacatgctgaagaaccccggaaagaccgggaaactgaggggtgatataacatatccaacgcgagacctaacagagtgaggtattagggcataaatatagcgctaaaggaagaattttttgcccaaaaccaaggatgtcagctcaggggcatcaatctctttgatgccccccggtttagagcaaccattgacagggtctgggacccacgaaaccttgtcagcccctgctgctaaaacctggtcttcccctgacccgccaatgatggaggcggggggcgccccagaagcgctcggagtcgatactggggacccacgcctggtg

SEQ ID NO: 112881 - DNA, 688 bp, Glycine max
  Clone ID: PAT_MRT3847_7293C.1
gagtctaaccaacatatccaatatatttgacacaagccctttatccattgcaagagccagtaactcatagcctatggatgacaagctagtcaaagaccaagtcttactcgtaccagtaacctgtggttgcactggaaaccgctcttttgccaatatctcctatgagatcaaccaaggtgatagcttctactttgttgcaaccacttcatacgagaatctcacgaattggcgtgcagtgatggatttaaaccccgttctaagtccaaataagttgccaataggaatccaagtagtatttcctttattctgcaagtgcccttcaaagaaccagttggacaaagagataaagtacctgattacatacgtgtggaagcccggtgacaatgtttcccttgtaagtgacaagtttggtgcatcaccagaggacataatgagtgaaaacaactatggtcagaactttactgctgcaaacaaccttccagttctgatcccagtgacacgcttgccagttcttgctcgatctccttcggacggaagaaaggcggaattcgtcttccggttataatttggtattagcttgggatgcacctactggtttctggttttagcagtgtactggtgtatgtatattggctgaaatgaagactttgattagagtgcttatcgctgaactgcagataacctactt

SEQ ID NO: 112882 - DNA, 1358 bp, Glycine max
  Clone ID: PAT_MRT3847_72940C.1
gggaggattatcaatgccgaagccatggataatgcacagctgtggttggcttgggtgcaaagctctagttggcttgcaagccttatttttcagtttttacccaatatgatcatatttgttagcactcgagccgctcgagccgctcgagccgctcgagccgattcggctcgagggcatttgacagtgtctggggagcaaagagctgcgctcatgaagatggtttgcttcttccttgtgaatctcattctcttgaggggtttggtggaatcgtcgttagagagtatgatcttgaagatggggcggtgctatttggatggagaagattgcaagaggattgagcagtatatgagtgcttcgatcctgtccaaatcatgcctctcctcacttgcatttctgatcacaagcactttcttggggatttcttatgatcttttggcacccattccctggatcaaaagaaacattcagaaatttaggaagaatgacatgcttcaattggtgccagaacaaagtgaagaataccctttagaaaatcagggcatagataatcaaaatagtcttcagaggccactgatgcatgacaatgcttatgacattgccaatggggataatgttgagggacaagatctttttgtttatccaatcactggaagctcgcctgctcccaagcagacatttgattttgcacagtattacgcctttaatttgacaatttttgccctgactctagtatactgttcatttaatccccttgtggttcctgttggtgccatttattttgggtatagatatgtggttgacaagtacaattttctgtttgtgtatcgagttcgtggcttccccgcaggcaacgatgggaggttaatagacactgtaatatgcatcatgcgtttctgtgtggatctgttcctacttgccatgctcctattcttctcagttcaaggggactctacgaagctgcaagctatattcactcttggattattagtcgtgtataaattactgccttcaagtaatgatagttttcaaccaactcttttggagggcattcaaacagttgataacgttgttgatactaggccaattgattatgaggtcttttcacagcccaggtttgattgggatacccctcaaatgtgactcaagctttgatatgcatagcttgctatcctataacgatgtatctgttcccaatcacgtatgtaacagaaaaaaaaattagtggtgagggatagggatggggacaggggtcacgctgggccagggaagagggttcctcttgtaactgatgttcaaaatttgttatacacgcatttatgacatgccaattcttctcttccttttcttgagtacaaaaa

SEQ ID NO: 112883 - DNA, 729 bp, Glycine max
  Clone ID: PAT_MRT3847_72941C.1
gtttatggatgtgtatactgctaataaggctgttcggcattttcagaatgagaagaggaggagaattggcaagttcttttcggttatggagttgcggttgcggcggaatcagtggaaggttgagcgtgctcccttggcgactgacatttattggaaaaacatggggacgccaaggatgtcgctgaaactgcggcgggtgtttgtgaacacttgtttgttgctgatgcttttgttcttcagctcgccacttgcggtgatcagtgctgctaagagtgctgggaggattatcaatgctgaggctatggataatgcgcagctgtggttggcttgggtgcagagctctagctggcttgcaagccttatttttcagtttttacccaatgtgatcatatttgttagcatgtatatagtgatcccttcagctctttcgtatctctcgaagtttgaacggcatttgacggtgtctggggagcaaagagccgtgcttatgaagatggtttgcttcttccttgtgaatctcattctcttgaggggtttggtggaatcgtcattagagagtacgatcttgaagatggggcggtgctatttggatggagaagattgcaagaggattgagcagtatatgagtgcttcgctcctgtccaagtcatgcctctcctcacttgcatttctgatcacaagcactttcttggggatttcttatgatctcttggcacccattccttggat

SEQ ID NO: 112884 - DNA, 580 bp, Glycine max
  Clone ID: PAT_MRT3847_72942C.1
aagacgacagaaggggaaggtgtccactgaactgaaatggtgtccttcatgggatcttggaattgaaacgaacgggacgtgtctgtctccgatggcttcctcataccgtgaccgcacgtcggagttccggttattattggagactctgaagaagatcggaagtccggtgcaacccgagaatgctccttcgacctctcatggcgagtcgtattcgagatccgaattcaaccgaaaggcctcgcgtatcgggttggggatccacgagacctcgcagaagatcgcgaggctcacgcagctggcgaggaaatcgtccatgttcaacgatcccgcagtggagattcaggagctgactgttctgatcaagaacgagatcacggcgctcaactcggctctcttcgatttgcaaaccgttcagaacacggatatggctgacggcggttactcgcaggatacgattgtgcattccaccgcggtttgtgatgacttgaagagcaaactcatgggagccaccaaacaccttcaagatgtcttagctgctaggacagagaatataaaggctcacgagaacaggaagcagata

SEQ ID NO: 112885 - DNA, 2456 bp, Glycine max
  Clone ID: PAT_MRT3847_72943C.1
ttccgcccgcaagccgcgggtccattccgaacaagaagaaagacctagaatgttgcgcattcgggttaatggagagtgatgtggagtgtcgaagagctggcgaaaagaaaaaaaagaaaaaaaactgccgcgaaaacagaacagggactcactctcttcgcagcggcactctcggtggctttcatcttcttggggtgagttgtcaagatgtacacatcgaggaagaaaattcacaaggataaggatgctgagccaactgaatttgaggaatcagttggacaggcattgtttgatctagaaaataccaacaatgagctgaaaagtgatctgaaagatttatacataaactcagctgtccaaattgatgtttctggcaaccgaaaggctgtggttatccatgtcccctacagactaaggaaaggattccggaagattcatgtcaggcttgtgagagaacttgagaaaaagtttagtggaaaagatgtaatcttgattgccaccaggaggatagtaaggccaccaaagaaaggttctgctgttcagcgcccccgcaccagaacactcactgctgtacatgaggcaatgctggaagatattgtattgcctgctgagattgttggaaagcgtgttaggtataaaattgatggttccaagattatgaaggtctttttggaccccaaggagcgaaacaataccgagtacaagttggagacttttgctgcagtatacaggaaactttcaggcaaaggtgtcgtgtttgagtatcctactaccgaggcttaggttctatttgttagctttgaatttcttcctgaattacatatggtggatgctggttttgttaagttggctttaattctggattttctttaggggtggtacttatagaaaatactgtctcctggtttatcaatgtagaatttgatatattttcttgtaacatcctatgaatccgtatttttaagaaaaaaaaaaaaaaaaaactcgatggcttcctcataccgtgaccgtacgtcggagttccgattactatcggagactatgaagaagatcggaggtccggttcaacccgaaaatcctccttcgacctctcgcggcggcgagtcgtcgtattcgagatccgaattcaaccgaaaggcctcgcgaatcgggttggggatccacgagacctcgcagaagatcgcgaggctcgcgcagctggcgaggaaatcgtccatgttcaacgatcccgccgtggagattcaggagctgactgttctgatcaagaacgagatcacgacactgaactcggctctctccgatttgcaaaccattcagaacacggatatggctgacggcggttactcgcaggatacgattgtgcattccaccgcggcttgtgatgacttgaagagcaaactcatgggagccacaaaacaccttcaagatgtcttaactgctaggacagagaatatcaaggctcatgagaacaggaagcagatattttccaagaatgcatcaagagagaaccctttccagcatcagccaaagccagctaatgagccgccaccttggtcaaattcatcgaatgcatcagagagtttgcaacaagaatcagcattaccatcaaatggagctcctgttggcaatcaactaagacgaaggttggctgtggacaacactccatcccagcaaatggaaatgtctatggtacagcaggttgtgcctcggcatgaaaactatgctcaaagtcgagcaactgctctgcacaatgtggaatctactatcacagaactaagtgggattttctcacatttggctacaatggttgcccatcaaggggagcttgctatcaggattgatgacaatatggatgagtcattggcaaatgttgaaggagctcacagttctttattgaggcatctcaaccgaatatcatcaaataggtggcttctaataaagatatttgccattctgatacttttcctcacgatcttcatattctttgtcgcctaatatacttccatatgctaatcatggaagtttcacttcgtggcttacttggatttgttttcgttcttctgtggagacaaaaacacaagagcaggtaaatgtgcggatgtattctatttgaatgtagatagagagctccgtcatctgtaaacattttacaatattcccatattcttagtttggcaatcattataggtgttattaaaatttcgttggtatgtaatccccatattaagcaaattgagtaagaaatatacgagtgtttggtaaattgatatagattcataatatttttgaagtttccaagatgcaaaatagagggagaaagaaatatctcgtttctagatactgtagtggacaagttatcaaattaatggtagcatacgagaattcctttgttcacttacgtgataatgtaagctttttgatattgtaatatcaaaattgatttttttttataacta

SEQ ID NO: 112886 - DNA, 245 bp, Glycine max
  unsure (1)..(245): unsure at all n locations
  Clone ID: PAT_MRT3847_72944C.1
ctcaatcaaccattgcaataacattctactcctctctcttaaccccacccctctgcggtctgataaccagctaccgggcgctcccatctcatcaagcaaaactcctacctatacttctncaacccgaatcccttcaagttcttcataacaatcatatcatcagccaacaaccagaccaccaagtcaccaacaaaagtcaattcttcaccaatcctgttcaccccaccagaactttacccaaacac

SEQ ID NO: 112887 - DNA, 1077 bp, Glycine max
  Clone ID: PAT_MRT3847_72945C.1
cgtacgtatagcttggatcctctagggcggccgcttttttttttttttttttttttttttttttgattcttgagatacagtacctgatttgtttgaacttatgtctcctgactccattttttgtggagtgtgaccaacatcttttcctgtatagaaggcaaaattgaggagtttaagggtctgaataacagactcttcaccgaaataaaatattccattcatcaggaaagacaaaatatctccatgccttaaacagtacttttgccagttacgaggacgtgcagctgcaacttcggccatagtggaaaggcatttcacaatctttacacttctttcatatgggataggattattttgaaaaccaccagatttgtttatgtgtttataaagtcttttcgcttcagtagagaactgccaagagtctcgaacactgtaataatgagacttgctgccacagagatgcagaaaaagcctcctggcatatcttcttacaaaattggtgtgaggattgttaatgtaagtgcagagaacatcttgatagccatcgagcttcaaatccttaccatgtgataacttgtagaccttttccttttccccagttttgtcatgcttttctggccgaacaagggtgttacaccagctggaaagcattctctaatagaagcctgtggtagtccatgaagatatctgttcgatgcactttggcatatgaatcagaaaagaaaggtaaaaaattaccagctggtaaatctctgcgtattgttagtagagccccacatcctggcccagcattactatgaacaccttcattgttaacaggagatttgaagacatacactagctgctgcaatatatccattaaataatttacaaaagattgctgcctaagagaatcacaagctcgaagaagttgtgatgtaaagtcaatcttctcttgatcatctagtgaagtcttagcactggccgaggtgggcagtggaaattggactacatttttatcatgcatgtcattagttccactctgtcttggcatgggaccatcactaccaggctgatgccagtttctaagcatcaatg

SEQ ID NO: 112888 - DNA, 417 bp, Glycine max
  Clone ID: PAT_MRT3847_72946C.1
acccttccgaaaaaaaaaaacgggattggttctttttttttattaacccacaaacccaccaaccgggaaggggggtgggggaagatggggtggcctttaacaaacctgttcagatggttgttggcgatgaaggaaatgtggattttgttgttaggtttggttcctgttggtaggacacccatctggtccaggcttatgcttgttgaatttgttgcaaccttcccaaccttcggttttaatgttgtgccggtgaaatccaagaccattaactttaactttggggaattgggttgttaaggccaggctcggtcccttgtttaggcatttttttccagacctatttggtttttattttaagtgtgttttaatcttttttttgggtttatacttttttagctctttatttttatgtttttt

SEQ ID NO: 112889 - DNA, 485 bp, Glycine max
  Clone ID: PAT_MRT3847_72947C.1
tttcgatttcgcgtccggctaggtgccccctggagaacgtgaagggcttcttgtaagccatccctccattgcagatgcagctgtcgtcccgctatgctttaaatcggaattgtaatggcttattattgtgcctatatagtgaacatgactgactgactgactaataataatatcaatatgtaaacagacataaggatgttgctggtggagaagttcctgttgccttcgttgtgagaacaaacggctttgatctaactgcagaggcgtgagaaagagtttatacgctaaacaggtatgtgacggtgacaataataatattttactagcttcttctatacaatttgactcacttgatgcatatcgatcaaatccatcacaccatgaagtgatttacattagtcaattgtaaatactgcgcatataaattgatgtgaagcttattgtctaatttgttgtcaacaacaggcggtgttttacaaaagact

SEQ ID NO: 112890 - DNA, 485 bp, Glycine max
  unsure (1)..(485): unsure at all n locations
  Clone ID: PAT_MRT3847_72948C.1
gtatatcagcatcaattcttcttaaaccccacttagaagaatcgatcgatcgagttcaaatatctttcttagaccattcagcaaattacactagtaattagctagctagcagtatggcaccaccccatggagagtctttgcctagctcattctctaagaacaacaacgttaacatgtcgaaacctccaaggctctcatctgatcatcacattcaaagaacaatctcagacatctcgtttgagctaaccaaggaagggattgatttgacgcttccaccaataactgaggttgtggatgccaagtgtgagtgttgtgggatgagtgaggagtgcacgcctgaatacatagagcgtgtgcgtgacaagttcttggggaagtgggntgtgtggggttgtgtgctgaggcagtgaaggaagagttggagaaaaatggtgggaagaaggaagaggcattgagttcacacatgagtgcatgtgttaggttca

SEQ ID NO: 112891 - DNA, 221 bp, Glycine max
  unsure (1)..(221): unsure at all n locations
  Clone ID: PAT_MRT3847_72949C.1
tagaaaccggatntcatanataaatgtcttcctagccagattagttttagatgcagtgatctaaangaaatnctnctncatngagattaactgggtntgccggtgtactgttgcanagtngtttaataccagtttttngagggaaaggacaatgggngtacntngaatttngccnctcgggaaatngctaaaatttcanaaggggnnnngnnctatcgnnt

SEQ ID NO: 112892 - DNA, 175 bp, Glycine max
  Clone ID: PAT_MRT3847_7294C.1
cgaaaatgcgaaagcctataacccgaacctgtttgctcttcttagatcattggttgggacacctttgatgcctgggaactctgtggacccttacatttatgcactctatgatgaggatctaaaaccagccccacgatctgaacgtgcttttggtatgtgcacaactgatctcacc

SEQ ID NO: 112893 - DNA, 459 bp, Glycine max
  Clone ID: PAT_MRT3847_72950C.1
gaaaataattagatgcatatatttgactttggtgttattttgggatttttgtaattaaataacacaaacactgacgttcatcacacatgtgtagggcctgtttcaacttaaaattaaaggaataacattggcccatgacgcgacaggtgcaccacctagtaatcataattttacatctttacatacaaaaaacaaagactttaaattttaaaaagaagaaaagagataaacagatcatcttaatgaaatgaaaccaaaacccacaaacattggctagatttttgtagttgttgttgaggccaacatgattaatcatgaaccgagagaacgaatcactttgactttaagggaatggccctgattaccaactgccgtttgagtgctgcaagagctgaacttgtgaatggtgccacccaaaacatccacagtttatgcgaaacaggggacttgttgaagatg

SEQ ID NO: 112894 - DNA, 855 bp, Glycine max
  Clone ID: PAT_MRT3847_72951C.1
ggaactctacccattttacatggctattgttgagcttatgttgtccattgtctgagaataagatgatctcctttgaaatgatgacatagaattccttatcatagattcaatgatttctccatgatacattcaatttctcgctgaagtaggaaattgatggcccttcctgggaaagaacaacataaattcctatacatgaagcctcaccacacactccaaagacagactttcttgaagttggctaatgaaagaatgggtgcttctataattttcacttttaatcaatttgaaacttctttgagatgcctcaggtcactaatatgtttctccttttaagcatttggtgataggggcaacaattgtgctaaaccccccgatatgagttgctgctattaagatatttggccatggaagctgtgaaccttctttgaaagaatttggtgatggccataatataatagcctgaacctttgtcagatccatgctaattccttcaaaagatatacatagactatttaggttaagttcttgagatttgcatagaagcattgttcatcatgcaccttagaaactgcatcagtgatagcagtttgtgaccaacagataccttcggcattttactccctaaactgcatcagggatccaaatccatattattttcaaaatctcaactgcaccattgtctaatgcttcaaatgagacttatcaaaatgcaggaacaatctgactagaaaatcattcaaaatatgtcttattctttgcaatatacgtgtaatcacttcaggttttgtacatattatatttaattacacagttacgtatcttcaatataattttgatattttgaggtaactt

SEQ ID NO: 112895 - DNA, 224 bp, Glycine max
  Clone ID: PAT_MRT3847_72952C.1
ctcgagccgattcggctcagttagaattacattggttaaacagctcatttggtcctgattggtaacactcatttatgattcagttactgtatgagaaaaattgaagttatagtccatatatgctcttattactaattagtacacattggcccctgcttttactatgtctcttaagctgtagtccttatatgcccttatagccttatagagactaaaacttaagc

SEQ ID NO: 112896 - DNA, 1107 bp, Glycine max
  Clone ID: PAT_MRT3847_72953C.1
ccacgcgtccgtctgagcaaagaggctttctgcaacatcatgcaatttttaattgcttccatcaagaaggatagacaaatggaagctctcgtggaaaagctatgtcatcggtttagtggtgttacagatgttagacaatgggaatatatatcttattgtctctctcagttatcgtttactgaaaaagggatgaaaaaactaatagagttatttaagtcctatgaacatgtcttgtcagaggattctgttatggaccatttcaggaacatactgaacaagggaaagaagtttgcaaaacttgaacttaaagcttgcattgaagagtttgaggataagctgaataagtttcacacagataaaaaggaacaggaagttactgctcgaaatgctcaaatccatcaacagaagattggcagcagggaaggttttaccgtgactataaattctgaagatcacttgtcatctaattcttcttcagatgaaacagaaggtgaaataattgatgcttacactgaagaggcaactatgcctttaaatgagagatcagaatctaaacttgtgtcagaatcacattctggtgcttcaagtgagttgacagagtcggatcaaggggatattgaaacccgggatattgaaatccaatcaccccaggttaagacaaaaggagttcaacggtccagaactaataaaagcaatgttaaaggtggaaccaaaagaactattcggtcaaagaggtagatactgaggcgccttttgatgagaagatatactttttcagtttgatgtgggatgtggttatatagcaaatggaatttggaagatctactgaacagatgcaaatatatgactgcatattcaagtttggatacataatgcttaacagattttagtagaggcaactacggttgcaatgctttaatatttaaattggcataaattatgtatactgttttacaatatcaatttaaagtgtgtatcacagataattttaggatttgattcctaaaatatatctcatttgaggaaaatatgatttgtaaaattgcagggcccacttatcccaagtagtaatttaatgtttgcaaatgatttgttgctatttggtcc

SEQ ID NO: 112897 - DNA, 341 bp, Glycine max
  Clone ID: PAT_MRT3847_72954C.1
gggggggttttttttttttttttttaaaaaaaaaaaaaaagttttcaattgaacgaagcataattgtttttggaaaaataaacacgtggatttggtgcaattaacttttcctcaaagggacagtgggacaaaccccaaaaattatttaaaatctatacctccttcaatttgtggagggtggaactacaaagttggctcccggcatatacctgggggcccctaagggggaaaccgtctacaaagttcctccacaaattttgctcttgaaattttattatcagaattagcctcgaagattttcaattgcaccaccccttctttttttttttctgggcatagac

SEQ ID NO: 112898 - DNA, 125 bp, Glycine max
  Clone ID: PAT_MRT3847_72955C.1
tcgctcacgcatacgttgacgcttgggcagctatggtgattatgtctgcctcgatcacattgggatgtacaccaccatcatccatggtggtacccgggattgcaacgctcagctctgtgacactg

SEQ ID NO: 112899 - DNA, 525 bp, Glycine max
  Clone ID: PAT_MRT3847_72956C.1
gcgggggactcattaccagggcagaccctttagttagtgatttgctgagctatcccaagcgccagggcagcactagaacgaacagttcttgtactatcctgtagacacttgacaaatgttgggcaaccctccatctttcagggaagatgtggcggagtatagtagaaagatgagagggttatcactgaaattgcttgaggcaatctcagagagtttgggtttggaaagggattacatagacaaagcactggggaaacatgggcagcacctggccataaactactaccctccatgtcctgagccagagttaacgtatggtttgccagctcatgctgacccaaatgcaattactattctgctccaaaatgaggtcccaggcttgccaagcctctatgatggcaagtggctaaccgtcaatcctgtccctaacaccttcattgtcaatattggtgaccaaattcaggtattttgtgccctcaactttgaaatattaaatggtaattatgtcatctaagagaggaaaaa

SEQ ID NO: 112900 - DNA, 939 bp, Glycine max
  Clone ID: PAT_MRT3847_72957C.1
gaaaaaataaagccttgattgtacttattgggcaaatatttatatgtacatatatatttagcagttgagctttattaattgtttcccattagatatatgaagggttaacatagttttgaaaataatcaagaagccaatcagttccatcaatgtgcgaaatattcgtgtaggagtttgcttcgtaatccctgagttgcttggcataagggactctggatgtataatttgctccaggtccaagacaacggtactccccaaagaagacactctggtctctagagggatctctccaatcattccatccattaggagctacgacatcagacatgtatgttcttgagaataccacagaggcataggctccccatgctgtttcaagccacactctcccactcccaacaatgctgcaattcacaaaggaaaatccactttcctcattcatcgattgtctcccttgagcggtgatcgacccgctaatcccatccttctcttcttttgctacacagtttatggtacaatcctcataaagtgatctagcatttccaaatatgaaatcaatggatccttggatgaagcattctttaaaataatgtctcccaccatcatcattgagtgtgtcctgcgcaccataaaacccacaaccatagaaagctgcttgatcaccggttaccctcagtgccactgcttgtgccccaacaactcctggtgacggtggaggagccgtgttcttaaagctgatgttgtaagcagtgaacttagaagcaaagacggcgaaggagtagctataggaagtaccgccggtggaatttgcggtgtcgttccattctatggttgtattcagatacccttgaccttgaactatcaagtttgttttgttggcctgcaccactaccttctctctgtatgtgccagaatcgattatgataagggtggtatcag

SEQ ID NO: 112901 - DNA, 291 bp, Glycine max
  unsure (1)..(291): unsure at all n locations
  Clone ID: PAT_MRT3847_72958C.1
gaattccccggtcacncacgcgntcggctgtttgaagcaaagagaaagagagagaagggacaagggaggttttggtttttggcattggtgcttgtgcttgagaaacggaaaagaaagcaagaaagaaagaagggaacagtgacagcgccagtgtgatgagtggtttcactgaaaggttggtttcttttcaggtagaaaagaagaaaaaaaaaaaaagcacaagtgtagtactcaaactcaaaaccaataatacatagcactcactcatgcttacgtccgcgtgctttgatg

SEQ ID NO: 112902 - DNA, 506 bp, Glycine max
  Clone ID: PAT_MRT3847_72959C.1
gtaaccgcttttgttttctgcttggggtctttctcggtgttggccactgataagaaacaggggtgggctatcgactctttctatttatacaaggaattcaggtatagtttgtcagtgaatgttattgggtttgtgcattccgcgttgcagatatgtgatcttgggcggtactttgcaacgggaaagcacttggtggagccccagctaaggggttatttcactttcgcgctggatcaggtaaagcaagttctatgttctctctgactttgaagggattgattgagggtttttgtctattaattattgttatacgaccgaaagaagcctcgcttggctttaaacgaaatttgtagttgattggggctggtgtaatttgtggtgaacaataatcatatgagaaacctcaaaggaaagactatagtcgagtcttgctgggtttggttccaattttttgtgaaaaccatcttcagccaaaaagaaggctaaaatatctttttgattttttt

SEQ ID NO: 112903 - DNA, 440 bp, Glycine max
  unsure (1)..(440): unsure at all n locations
  Clone ID: PAT_MRT3847_7295C.1
gcatgccaaaacaacagttcaatttagtttgttttgcattttatgtaaatggactcatcttgtagatactcctgtgttttgctccttttgtgcaatattatagttgtaaaattcatcaatgttgtatgtagctgaggattgcacatcataatatatatcatgatatatagcattctattgtataaaggaaccacaatttactgtccaatcttctttctttatgcagttgaacatatccagtttggaaatattatgaataaagatatttcgaacacttatgtgcgtgtatcttgatgcacataagcgtacatttttgtgggggaatatacctaggagtggattcatgggtcatgcatatctttaacttcagcagataagcagaaagcatttgacanagtggttgagaaggtaatgagaattcctgttgctccacgttctat

SEQ ID NO: 112904 - DNA, 688 bp, Glycine max
  Clone ID: PAT_MRT3847_72960C.1
cttgcggcctgggcctgaagctagcggctgtttgagctcggtccccacggggggttgtccccccccgcccgcgacgacgcctctccggggcatttatgcgtgcattcggggcaggggtggtcgctccagcggcgccctggagactcgaccgaaaggtccgctacgcttcggcgtcccacttttggcgtcatcggaatcccaccttgctttgagggttagtgttaacaacttagtggttcccgtcataatagatcccaaaatcaatttcaagaaccaagaccctacggaggccacatctgataaatgtctgcagtcagtcaaagattatttatcaccacatgatatgaagcgattagaggcgtatgttgacaacctggctgactttcatctgttaggagagagaggagtattaatgacaaagattttagatttggttccaacccttacacatctgtacttccaagaaaagctcccagttacgttgtcgtatgctcaagcttctgtgttactctgcattggtctgcagaatcagaacatttcatacattgagggtacaaacgaatttggaaaaggcaaacgatattggtctctatttataaaggttatggaagaaagtctaccaatatctagaatggccttgcctcccaaagagattgaatcaacccttgccaagactgaaaagaagtaa

SEQ ID NO: 112905 - DNA, 930 bp, Glycine max
  Clone ID: PAT_MRT3847_72961C.1
cattttggatttaattttccttttccattgattccgcacttaaacgtgtgggtgctaattgaatattgaatggtttgaattttggtaaaatagggaaaataatggcaagaatccaactttgaaacaaacaaaccctgagataatcaaatcacaaaaatggtctccatttcaacattgtcacttgcatttgttgtaatcaaaattgagctcatcagcaacccagaaataaacgcatcacagttcacagattaaaaaagcatcaccagtcctttacacatcgagattggcttcctccgggatcacagtcaaagtcaccaatttatcacccgctctttttactagtaccttaatgggcaccccaactttgtcccctaatacttcaataacctcctttaatctttcaacaggtctcccatcgaattcaataacaacgtcaccagggaagaaacctgcacgctctccaggggacctgggagttaccattggtacaagaatgcctttgttgacattagggaacgaaggatcttgctttttaagctgcgcaataatcatctcattaagatcaagcatctttagcccaagccaaggcagtatcactctcccacttatcttgaaatgctctaaaattttacacacggaatcaattggcacagaaaaactcaacccatccgcagcggccactttcatgatgttaaccccaataatttctccatccatgttgacaagaggccctccagaatttcccatattaattgcacaatcggtttgtaaatactctcttggcatgccactaaaacccagatcactacttttgcggtcaacacaacttacaattccagcagtgacagtattctgaagagaaagtggacagcccatggctattacccaatcccctggacgtagcctacttgacgaaccctcgtgcggcag

SEQ ID NO: 112906 - DNA, 785 bp, Glycine max
  Clone ID: PAT_MRT3847_72962C.1
gaggggcaactgtagatgtacctttttttatcgtctaaattagttaatctctttgacactcaataatgaattgttgacgagcattctccgatccgagacactcaactctcaagtctgaagatactcgctactcagagttgaattgttgacgagcattctccgatccagaatcgatggatttggaaatggaggttgaagttggaagggaaatttggagcaaaagcttcaagtgtgcaaggaaatgcattaaagatagttgctaagcctgaatttcaggctaagctaaaattcagacagagagcaaaagattcaagcctggctaagcaagaactggtggctgaggaagagttctgttgtgttcatttgagatctgtgtactttggctaagccaaagtttatggctaaccactgattaaaaaaaaaattatggctaagcgaagattattgccaaaaatggaaaattttctgatatatttaaagtggatgtctatttagtatacattatctctccatatttttctcttgtacggaggcatgaagttcccactattcctttggagagaagtttttcccttggctcctcctctccatttctcttccacctttcatgtattttggagttactcatggctatgagtagctaagttcctccattgttggggttagatgtaaccttactcaaactctcttgtaccccttggtatatatatattcagttgtttgtgtttaatgttagtattttgtttctttgtttaagaaaaaaaaaaaaaaaaaaaaaaaaaaaa

SEQ ID NO: 112907 - DNA, 304 bp, Glycine max
  Clone ID: PAT_MRT3847_72963C.1
ttttgtgtttttatttttattttttatgattaataaatgttggttttttaattttataaaatgttttttttttttttggattcatgggttgacccggtaattttggtccgttcttgattgcgtaaaagaaaaaagtggggggaaaatattaaaaaaagggggacttttggtctcggggcgcccggtgggaaaagggaatacgggtcggaatttcccaacaacatacaaacttttatcataaaggggaaagcaagggggggcgaatgaaagagggaactcacgttgggtgggaaaaactgattgc

SEQ ID NO: 112908 - DNA, 798 bp, Glycine max
  Clone ID: PAT_MRT3847_72964C.1
aattcggctcgaggttttccccttatactccccaacattctttttgtttatatatttttcaacccaggtaatggggaatgaatatataactctaattaataagctctactttctaatttctcaaccatgtggaatagcacattttgatatccccaacatatgtgcatttactagactattatataaattaaaacatagtacactttgtttttttttttctttctttctttatatgcacttgttcttactttacttgcatatgcagtacattttatattgagaagcacacatgtctccagcaatggtaggaagtggtgagaagggtgagagtgatacaccaggaaatcaatatcagaaaggagtgaaacagcttgttgagaatggccttcacacaatacctaaaaagtacatacttcctccttctgatcgaccagctacaaattcagaaaattcaaatgttgccaagcaaaaccttcagctacccatcattgatttttctgaattgattggtccaagaaggccccaagtccttcaatctctagccaatgcttgtgaacgctacggattttttcagctggtaaaccatggcatatcagatgatgttataagcagcatgagggatgtgagtggcaggttcttcgatcttccttttgaggaaagagccaaacacatgacaactgatatgcatgcaccggttagatatggaacaagcttcagccaaaccaaagatagtgtgttctgttggagggacttcttgaaactccctctgccatcccttgcctgatttcctccctcatt

SEQ ID NO: 112909 - DNA, 407 bp, Glycine max
  Clone ID: PAT_MRT3847_72965C.1
aggtcacaagtgaattcgatttttcaggagttttgctgctgttggagtagatcctgcagtcatgggtgttggccctgctgttgctatcccagctgcagtgaaatccgtgggccttgaacttggcaacattgacttatttgaaatcaatgaggtaaaggttttaacagttgtcattacaggttctatttagataaacttctccataaacactgatagcctataggagaagaaaataagaaggcaaaattcattgagtttctctcataagctaaaatcaacttatgcaccttaacttttagagaagttaaatgttagagcttctatagaagtcaagtgcacaagtttattttaacttataaaagaaactcaaattattttaccttcacattttcttatcctataattgc

SEQ ID NO: 112910 - DNA, 424 bp, Glycine max
  Clone ID: PAT_MRT3847_72966C.1
tcaaattctgaatttgacagggaaggtatttttttttctgctaatattaataatatatcagagtagcaatggggagacatcggacttcttcatcttcaacaactttgtcaaatcacaagaagacctcgtcggtgtctcgtttgaggaagggttgtttgtctttcgcagcttcattacagaaaggttttcgatatgtaaaagcgttttttgtgggtcaggtgaagactattactgcaaggaatgagaaggaagcaagtgaagctgaacttgaggctaccaagatgcaagttgaggctacggatgctgctgaagatataaagaacagactcaataaatctgcataattgtttgctcgtcactagttaattactacaaaatttctgtctttttttctgctactgatgcataagggaaagtgggaaac

SEQ ID NO: 112911 - DNA, 196 bp, Glycine max
  Clone ID: PAT_MRT3847_72967C.1
tgcaacagcaaattgggtggattcaaccggcaacattgagaccaccctggaatttcggttctagcaagcagagcttcaggaaaatgtctattgaccttttcggcggaagaattttattacacatagctgaactaatggatcacacctgatacaacattgtccaatgatgaacttgcatataggtgctcattggaac

SEQ ID NO: 112912 - DNA, 650 bp, Glycine max
  Clone ID: PAT_MRT3847_72968C.1
tacggctgcgagaagacgacagaagggggaagggaaaaaagaaaagaaaagaaagcagtgaaggagagaaagatgggtaagaaggaagtggcgttgttgttgtttgagatgcgagcctattccggtagaaagggaaccttctctgtacttcttctctttctcctcttgattctaattcttcccatcatttaaagtttcttccttcgttcacactttctcttctcttctcttcttcttctttattcaaagacttcacctttttgttctaaacagagagaaaaactcgttttctattaagggtcttgtttattttttcgtggtaatgctcgaatcggttcctcactgcattctgggtgatttagggatcggttagtttttgtgggggtctcattagcatttcaaagtttcgtgcttttttgttgctgggtgttgtggagagcgagagaaaaaaagagagaggttctcgttcttggttcgtgatatttgaaacattgttgttgttcagtggttattttggatttttttttctattttcggtgtaaatattgtttgattggtgaaatcttagattctcgtcgttatagttgtcgcctcctcctcctttgatattatttgatcccctggaggatttggaaaaaaaaaaaaaaaaa

SEQ ID NO: 112913 - DNA, 276 bp, Glycine max
  Clone ID: PAT_MRT3847_72969C.1
attttaagattggttatgcatcatcacattatacgactatatgaagttctggaaaccccatccgacatatatgttgttatagagtatgtgaaatctggatagctcttttattacataatagaaaatggtctgctgcaataagattaaacccgtcatttttttcagcagataatttctggtgtggagtactgtcacaggaatatggtggttcattgagacctgaagcctgaaaatttactcttggactcaaaatttaacatcaatattgcttatttt

SEQ ID NO: 112914 - DNA, 259 bp, Glycine max
  Clone ID: PAT_MRT3847_7296C.1
cctcatccggttcaattccgggcaggtagttctccatagcctggtcatcaaactcaactatgttttctatcatctgggcacggtaatcctgagcctgctcttgaaaatcttttggaatatctacaatatcaaccttggcacccaggttttctccaaaccaaactatagccttattcctaacaggggctataactccttaaaagcaaccttctgacccaattggtacctgaataccagggggttaaccccccaaatccgt

SEQ ID NO: 112915 - DNA, 305 bp, Glycine max
  Clone ID: PAT_MRT3847_72970C.1
ttggaaagtcggacccgcagaccggtccgattacggccgacccagcgccgttaacgacccttttctattattgcggctgcacctatataccattcctacgacacaatattctgtagctagctgtcgccaaataaaatacaaaatcacaatggcattcaccgggaccacagaaatgcaggcttgcgacaaaaccgttcactctgcaagtcatctgcgaggagcgctatccaagaactgttagatgcagccttgcaaggccttccgcgataagcaattactatccaccgaaagaaccagtctgcagg

SEQ ID NO: 112916 - DNA, 709 bp, Glycine max
  Clone ID: PAT_MRT3847_72971C.1
tcgcctattcttttgaaaaaaaaaaaaaaaaaaaaaaaaaaaaaaaaaaaaataaaaaaaaaaaaaaaaaaaaaaaaaaaaaaaaaaaaaaaaaataaaaaaaaaaaaaaaaaaaaaaaaaaaaaagggggggcggtttaaaagaaacaaattttacatacgcttcaatgcaacgtaaaagtttttttataggggaaccaaaattaaattcatgggccagcatttaaaaacgttgaaattggaaaaactttggtgttaccaaattaaatccctttgaaaaaaatccccttttcacaagttggcgaattagaaaaaaggcccgaaccaatcccctttccaaaaagttgcccaccctaattggcaaatggaacgccccttgtaggggccattaaatcccgggggttgtgggggttacgcgaaaggggacctttaaatttgaaacccccctagccccctctttttccgtttttttcctttaatatttgatacaatttcgccggttttccccgaaaaaatttaaaaaggggggctcccttaagggttccaattaaaggtttaaaaggactttaaccccaaaaaaattttaaaaaaggaaaaggttcaagtttaagggggcaaaccccccctttaaaaacacgtgtttttacccccttttaaacctttgggaaagcccacaattttttaaaaaaggggaacctttttttttctc

SEQ ID NO: 112917 - DNA, 232 bp, Glycine max
  Clone ID: PAT_MRT3847_72972C.1
taagtaagataggaattaagatagagtaaggatgaagaagaagaaagaagggggcaaaagtgagattgttgatagagataaatagaaaaagtgagatgaaaatgaaggtaattgtattattagttgataaaatattggtagaatggaaatgaactgagtacgaaatgttcaatataagaatgaaaaatggatatggtgaaagtaataaggaggtgaaatgagaaagttggag

SEQ ID NO: 112918 - DNA, 562 bp, Glycine max
  Clone ID: PAT_MRT3847_72973C.1
agtaataaattgtaaaacaattatcattatactgacatctaaggagaaaacactgaaaaaatattttgatgtagctagcgatactattcacaatccctgttgcgaggagggttttaaaacgttgctaccaagctaaataaaatattgattgctatatatgtgtaggtaaatgtttgcaagatgaataaacttaagacattgctaccagcaaatgataaaacgggtcaatcaaaactgttgaacaggctcaactgaatgccactggctcagagcatattgagagttgtgaagcataatgagctttaaaccgtttgcaacaccctttgatggcttgcttaaacgaccatatttctaccttaagactacgtcgtcttggcaagaccaagtctgttctcgaggaacgctgttatcccacaagaacctctcagagaatggatctactagactgtcacgaaacttctgcactggctcacatagcaacccctctgccatgcatttgattttccaagtgacatccttactaagcaggacaaggtgtccatcatttttgttgttctgttag

SEQ ID NO: 112919 - DNA, 230 bp, Glycine max
  unsure (1)..(230): unsure at all n locations
  Clone ID: PAT_MRT3847_72974C.1
tcccggtcgacccacgcgtccgtaatgcgtcaatactacataggatccgttcctttcgttcttcatcagttagtacttagttatggtaatataacaagttaatgactatactatagtccgattacagtgcttgaaaccgctcaatcagtgtaatggccaaggaagaagtgtttgagttccttgtgaacgttnctctacttctggggggggggggcacacttttttttttt

SEQ ID NO: 112920 - DNA, 196 bp, Glycine max
  Clone ID: PAT_MRT3847_72975C.1
ttttgggtttttttcaaaagccatgtttttttgttttatagagaaaggatcctccacgattctaacacagccacaataaaatttgttagtggaagacaaaacaatcaacgatttaaaactttgtcaaaggaaattagaaaacaaaaactttgtacaaaactaccaaacgctcaagtctattcattcaaaagggggg

SEQ ID NO: 112921 - DNA, 368 bp, Glycine max
  unsure (1)..(368): unsure at all n locations
  Clone ID: PAT_MRT3847_72976C.1
attgaatanccaccgaggcaaacaggaggatggggaaaccgactttcccccagggcaccccccgaagcggcaaaagaaagcctcctcctatagggggaggagccggtgcaaagaaagcctaaccacatgaatacgccaaatgcttgccacacaaagcggagacaatacgacggagaactcgtctccgaagtttccaagatgaccaacacctacactaaatgaacagccacaaacttcaaagcaacaggaaaaccggccgaagacaccattaaacctgaggcattaccccacaagctggcgcagcacggagagaatcaggaaaaagacgccacgaaattcccacaagaagaaaaccccacagcctggcc

SEQ ID NO: 112922 - DNA, 310 bp, Glycine max
  Clone ID: PAT_MRT3847_72977C.1
aaggacaaaaggccccgccccctcattttcataaactcaaagagaaaaagaaaaagaagaagggccctggtttcaaacacacaatatcgatcggctggttaacccgaaaacaatggggggggaaacccaaaaaagcagtcaaatttggccccactggcacttagaaccaactttacaacatccttttttatttttatttgcaagggggggggtgccaaaaaaagaaataaagccaaagtttttttcaaaaaggggggaaaaaagaaagggaaaaaggggacttgttctgattacaaagaaattttgagcc

SEQ ID NO: 112923 - DNA, 247 bp, Glycine max
  Clone ID: PAT_MRT3847_72978C.1
ggctcgggatgctatcggggtcacttccttgtacattggataggggttatatggctctgtttggatttcatcagaaatgaaaggcctgcatgatgattgtggatactttgaagtgtttctacctggtcacttgtactctagcaaacaaattgggtgccgcagattgtacaatcctccttggttctctgaggctataccatctgcactctatgagccacttgtatcaagacacccttttgagcaggct

SEQ ID NO: 112924 - DNA, 296 bp, Glycine max
  unsure (1)..(296): unsure at all n locations
  Clone ID: PAT_MRT3847_72979C.1
ttgaaattctcctaagagcagaaaccgaaacccagggacccacctagccaggggccggccccaaacaaggcccccagaaccccagacgaacaccctccacgccaacaacgcagagccgancccgacccgccgccgaccccgaaccganccaagccaanggcgggggcagccgccgcacaggaccaccaggacaacaaaggccgagnacccaacaggcgcgaccaccgcggagacgacaccgccgacgaagcngaaccgcccatcaccaaacacaccgaaaaagagggggaaccgca

SEQ ID NO: 112925 - DNA, 271 bp, Glycine max
  Clone ID: PAT_MRT3847_7297C.1
cgagtccagtgtctgtgctagacgagttcactcgttcgccactcagtccgagttgccactcgggacggcattcatttccgcgaatacagcaccagaagcagcagttgctaaagaagccaggagaggaagacatcagcagcacatacatctacgagagaatggcatacgagtcagtgaataggaaagtcaacgacgaagatcatttggttatgtggagtagcaaagccatgataaaaagtgtggatgaagtgtgcagggacgttgcatgggg

SEQ ID NO: 112926 - DNA, 562 bp, Glycine max
  Clone ID: PAT_MRT3847_72980C.1
tccggaattaacggctcgacccacgcgtccggttacttaattgatacaattctattttctgttcgaagatcatgatccttggttcatgtgtctctcttcacattgtttgaggttggcaaatttgtacgtgcacgctgctaaattctagaatcactgaactgaaaaaaaaaaaaaaaaaaaaaaaaaaaaaaaaaaaaaaaaaaaaaaaaaaaaaaaaaaaaaaaaaaaaaaaaaattttttttaaaaaaaaaaaaaaaaaaaaaaaaaaaaaaaaaaaaaaaaaaggggggggccgtttaaaagaatcaaagtttacgaacgcgggcttgcaaagtaaaagtttttttatggggccaccaaaattaaattcatgggccggggtttaaaaacgggggaatgggaaaaaccttggggtaaccaaattaaatcgcttggaaaaaaatccccttttcccaagttggggaaaaagcaaaaaggcccgaaccaatcgcctttccaaaaatttgcacaccctaaaggggaaagggaaccccccttgaaccggcgcataaaggggggggg

SEQ ID NO: 112927 - DNA, 446 bp, Glycine max
  Clone ID: PAT_MRT3847_72981C.1
ggcccccggcacccccataaaaacctcttttttggaattcggcccgcccaattcaattaaacccaaggggggcccccttgggaggggggggggaaaaacaaacaacgggccagacccccataggagcccaggggaaatcatcaaacaaggggccccccccccgggaatattagggggccaattcagggaaaacccccccccccagggttttgggctttcagctttcccttccccctaaaaaaagggggggccttccaaaaacccggggggggcaaactataaaattcctggacaacataagaaaacttggcaacatttttttaataaatgggagaagaaagggccgccaacaatttatattcccgggtcccggaaaaggggggacccagtcccggaaatcgttcaaaggcaggggttaaagcaacaccgtcctttttacagagggg

SEQ ID NO: 112928 - DNA, 469 bp, Glycine max
  Clone ID: PAT_MRT3847_72982C.1
cccacgcgtccgcccacgcgtccgcccacgcgtccgcccacgcgtccgcccacgcgtccgcccacgcgtccgaaaaaaaaaaaaaaaaaaaaaaaaaaaaaaaaaaaaaaaaaaaaaaaaaaaaaaaaaaaaaaaaaaaaaaaaaaaaaaaaaaaaaaaaaaaaaaaaaaaaaaaaaaaaaaaaaagggggggccgtttaaaagaaacaaagttaactaacgcgggaaggcaaggtaaaagtttttttatagggccaccaaaattaaattaacgggccggggtttaaaaacgtgggaatgggaaaaaccttggggtaaccaaattaaatcgctttgaaaaaaatccccttttcgcaagttggggaaaaaaaaaaaaggcccgaaccaatcgcctttccaaaaatttgccaaccctaaaggggaaagggaaccccccttgaacggggcaataaaccgggggggggggggg

SEQ ID NO: 112929 - DNA, 627 bp, Glycine max
  Clone ID: PAT_MRT3847_72983C.1
cccacgcgtccgctaaactttagtataaaaaaaaaaaaaaaaaaaaaaaaaaaaaaaaaaaaaaaaaaaaaaaaaaaaaaaaaaaaaaaaaaaaaaaaaaaaaaaaaaaaaaaaaaaaaaaaaaaaaaaaaaaaaaaaaaaaaggggggggcggttttaaaggatcaaagttaacgaacgggggaatgcaaggtaaaaattttttaaagggggcaccaaaattaaattaatgggccggggtttaaaaacgtggggacgggaaaaacctgggggtaaccaaattaaatggcttggaagaaaatccccttttggcaagggggggaaaaagcaaaaaggcccgaaccgatggcctttccaaaaagttgccaaccctaaaggggaaagggaaccccccctgaagcggccaataaagcggggggggggggggggtaaccccaagggggaccgttaaattggcaagggccttagggcccgttcttttggtttttttcctttcttttttcgcaaggttggcgggttttcccgggaaagcttaaaatggggggttcctttaagggttccaattaagggtttaagggcaccttaacccaaaaaaaattgataagggggaagggtcaaaggaagggg

SEQ ID NO: 112930 - DNA, 420 bp, Glycine max
  Clone ID: PAT_MRT3847_72984C.1
ttacgatgtgaaaggattgaggaatacgcaattgaaaatttagcgcgactttgtttttgtaactagttgctgctcttgatttatcagtgcgtcggcaataatttttggctatggtttctgctttgaatttgtatgtatgtatgttctttaacataattcatttaaggcaaaaattctttatcaaatttattttcaatgaagagaacaattagagtactattataatgttttattttacttttcattctctaatatcatgactatttcactttattgaggaaatgaaaactttagctccgatgcactatagctcgatatagatctgatggtttgttcaagaacatgataacaattctgtcaatatcgatgttaattgattgaattgccctatgcttgagggaacatgtttgtgggggttaa

SEQ ID NO: 112931 - DNA, 391 bp, Glycine max
  Clone ID: PAT_MRT3847_72985C.1
gaaattattttgcagtcttactttcatggtcgataaatattcattcgataaatcatccaaacaatgtactccaaattgtaccttagggcttaggtaggatgacaagtctcaaccacctaatagtatgagtaataatattttttttttggcttgttttaaagtctaaatttaaataaacaaattaattttcgtgtattgaaagcgtaaaaattctaatattatcaattaattgcaaattacctcagttattttttttggaagaagttattatataaagaattatatatatttgtggtacttggtaattagtgttattttcatttcgtctctttaaaaaattggttcatttgtttaaaatgcgattgtttcatgtttatccttaaagtgtttt

SEQ ID NO: 112932 - DNA, 336 bp, Glycine max
  Clone ID: PAT_MRT3847_72986C.1
taacagccttccttaccacaccactattatttatttattaacgcatctaagctcttaaagacgcgggatttttaaaatcatgcactttcaagtcatatttccacactctattaacatctgtcttacctacataccattccctaacatactcatacctctcctcaacaattaaacaactgtaccctttttcacactataagtctctcgaccaaacctccataatgttctctccacattcctctaatccaagcttgtaacacatactattcattcacacaccccagagcactcacctggaatccctcatgctctttatgcttaaatctttgatatctc

SEQ ID NO: 112933 - DNA, 484 bp, Glycine max
  Clone ID: PAT_MRT3847_72987C.1
gaaggtggacagtctgcagaaactttgttcatcactggagcctattcttcgtagagttgtaagaaaattaagttcattgtggtattgatttgcttctgggaggactatattgattatttgaaattatcacttgtaccgatcaatcaattgattatcccttgaaacagaaaccatgggttacaggcccatttgagaaaaccttttgcccttggctagatatgtcagtcacgtcactgctgtgaggcttaagataaaattgggtagaggactagagatctcatattcaaaccttaacaagctgaaaaaaggttaagtcttttttttttaaaaaaaaaagaaatttgtccttgtgagaaaggcttccgggaataacatatttaattacctcactcaggcgctagcgatatagtctccatcattctgtcctgtggcttatttgtgtcttgtgctgtctaatagaattcaatggtctgtcaaaaaataa

SEQ ID NO: 112934 - DNA, 772 bp, Glycine max
  Clone ID: PAT_MRT3847_72988C.1
tacggctgcgagaagacgacagaagggggagcttgggaggaaataatatcatttccgttctcaaaatcataacagtaccttcgcgtgccctagctcactccgtcgctcctcacccttccggcagtgcttggtcgtggccgtcacggttcaaacttcaaaggcatttgttgtgttggagtaggctatggatgacttgtttgattcttcgctgaacttggaggacacccattacaaggaaggctatgacgaaggctacagccatggccttgtcactggcaaggaagaagctaggcaggttggcctcaaggttggctttgaggttggcgaggagcttggtttctataggggttgtgtcgaaatctggacttctgcgatccggctcgacccaacctgtttctctccacgggctaaaacatttatttgccagatggaggagttgatccagaaataccctctcatggatccagaaaatgcacaagtgcaagagatcatggatagcctcaggctcaagttcaagatggtttgttcttccttgcatgtcaaacttgagtataatgggtatcccaaatcttctacggaggtcaatgatattcaattctgagctagttatgatattttcagtctttagggatatccatgtgtagggaacctctgagttgggttagttgatgaacaaattacgtgttatcattttacaaacatttgtgcaagtcaatgtatcgaataattattttatattaaaaatgatgatatatacattgtttatgaacgt

SEQ ID NO: 112935 - DNA, 349 bp, Glycine max
  unsure (1)..(349): unsure at all n locations
  Clone ID: PAT_MRT3847_72989C.1
cctcctcctgaccttcatcaccacctccactgttccagcattcaaactctccaccaaagttaaagttaacaacaccttaatattaaagatcataataaccttgcatctaatatacacaatctacacaactaccattaaccccaagaaaggtaatttagaaattattactcccatcaccattaatttcattatcagaactaacattttattagataaaaccttctctaaatcangcatgaaccccactatgacatttaaacctactgtggtaagctgaacctagaccaaccactagatctactaggccgagcctgtcatcgataatagaatcgctagccttatttacgaa

SEQ ID NO: 112936 - DNA, 299 bp, Glycine max
  Clone ID: PAT_MRT3847_7298C.1
gcgagaacccacacgcggtggtggccttgggtggttaaaaaacaaaatgacatactttactaaaacacatcaacaagcatttaaaacaccgaccatactggtttcccttaaaaatatacccagcgcagatcaaaaacgataaactagatttgcaacctattagcctatcacccaatttttaaagataagtaacgtctttcacacacaagacatgctcaatccattcatatcatccataacacccttcttttatacttctcctttactgactaagtgcatataacattaattgcctaaca

SEQ ID NO: 112937 - DNA, 149 bp, Glycine max
  Clone ID: PAT_MRT3847_72990C.1
agtaccataaccagcgaagtctatggaaatacgtgcaagtcgagttttaacgccactaagtcttttactggataatggcacgagtataattcaacaaaaacgtaaaatcaacctcatattttccaaaacactcttttttcttaaacttt

SEQ ID NO: 112938 - DNA, 392 bp, Glycine max
  Clone ID: PAT_MRT3847_72991C.1
cccctgaagtggaaaagtgtaatctgaatgagaaccttgtgaaattatgttgttaagaattatctgttcatttggtctatttaaatgaacagaaatacatgcaatagcacaaacccgtactaattttggagatactgtgtatcacatattatgtgaaggcataataatcatttccaatatcttcagagaccacccaaagacagaatttactactgtcctgcaacatacagaaagttgatgaccatgataaatgttcttcccttttaggcataggtatataatgcccaatttttcagaaactcagaccataatgatcgttcaactatcaacgataacagattgatatgaaaatttcagtgtcagtgggaccatatttggtaccgggggcttaa

SEQ ID NO: 112939 - DNA, 215 bp, Glycine max
  Clone ID: PAT_MRT3847_72992C.1
gcgagagcctttgttttgttttttactatcacaccggccgcaacagggtataacatacttgagcggagtgactatgttcgcaccagaaggacaagaggcctggggtcccatatgtttcctgattccaaacaaaactgttctacggcccacctttcacgccagggctgcaaatgacgggcactctgactgtgggcgcggagactagatcagacccc

SEQ ID NO: 112940 - DNA, 389 bp, Glycine max
  Clone ID: PAT_MRT3847_72993C.1
gaagggaatcttccttatcacatgcactttttttattctgtctatgtttattggtattttcggacatactttaggttgtgtctaatatccttgttgttctgtctccttcctcttactcactgcatacttgcatactatatatatatatatatatcttaaagtttttttttcgtcttcgagactggggctagaaatattttttttggtattattatttaaataaatgaaaggctgaacctccgaacactgagaaagctgtgaaatggttacgtaaagcttctgtttgtgggaatgttcgtgctcagtaccagcttgcactttgtctgcatcgaagtggtgggagggtccgtagcaatctgaaagaagctgcttaatggtatatgaaaagc

SEQ ID NO: 112941 - DNA, 240 bp, Glycine max
  Clone ID: PAT_MRT3847_72994C.1
acccacgcgtccagcagcgtccaaacaaagtggaaatcggatagagagttttagagcgagacaatcatactgggatgcggggaactaattagggggagttatgatcaacataaatgttgagcataacaacaaaactaacgttggaataaacataaaatgtggtagagaaatacaaaagtggtgaagatatggacacaacattttatataccagcttattgaatttggtaactctaaactg

SEQ ID NO: 112942 - DNA, 341 bp, Glycine max
  unsure (1)..(341): unsure at all n locations
  Clone ID: PAT_MRT3847_72995C.1
gcagagtagagcagcagannaganagaaancggcantncagccgtagaaggaaaaccgncnatggttcacgtntcttgtgacaggaactatggtaagacgtttaagantcnccgccgnccgtacgananggagcgtctagacgcggagnttaagctggtgggggagtacgggctgcggtgcaatagccgagctgtggagtgtgcagtacgcgctcanccgcatccgcaacaacgcgcngnatctccttaccctcgacgagnagaacccgcgccggatcttngagggctaggctcttctccncagaatgttccgctacggactcntcgncgagatcaganca

SEQ ID NO: 112943 - DNA, 423 bp, Glycine max
  unsure (1)..(423): unsure at all n locations
  Clone ID: PAT_MRT3847_72996C.1
gagaactaggtgtctatgaagtatgaatacaatgcaagagattattaggagtagaaaacatatgtcttgtggtgcctaatcttgcttatataccggtaaaacagctgtcagattaaaattcctttaaatgtcatgaggtaacattcaacaaataataaatatttacaaccaacccattaactcaaacatgaatgtgttttgaaatatgcatgcacaattgagttgtcatgattaatatatgttagtggacttaagaatgaaaattacctactttatccattgcaacttttcaacaagactgatgcaacaaatgtttatgtaacttcaagtacacataattttgttaatgttattaaatgctgttgtgttgcctgttgttctgggatatgggggatgnncttcactgatatacagtatactgtc

SEQ ID NO: 112944 - DNA, 664 bp, Glycine max
  Clone ID: PAT_MRT3847_72997C.1
tggatcctaaatcaagtttctgggagagtaaccccttgaagaaatctcttcccagatataattttcaaagtaacaccactgcacacagtcataggccaactattcattccagaaaggcctcttacaacaatatagacaagtatgaattaggatttttcaattctccaggaagcttgggcatttctagggaaaactcttactcgaacgattattcctttaattgttcggctgtgacaaatagtttgcctcactggctcagagaagcagttaacactcctcctattcaaccaaatatgtctgcagcgatttcgttgagttctcatcctgagataccaggaacttcagatcgatgctttagtgctggtaagtcatgctttgtgcctcaaaattggttcaatggtttgacgccaaatgagatatacatgtcaaatgggtctcactattcaacctattcaagaagaaaatatggggtggtgaagatgaacaagtctctggaacaacgtgtccacaaaccggataacttgatcatcattgatagtgacacttcttctgaagagaccatatctgatgatcaccgttccagcttgtagatcagaataatggatttgatgttgatgttgataaaatgataaccctggttaattactgttgtaagctgtagaaa

SEQ ID NO: 112945 - DNA, 539 bp, Glycine max
  Clone ID: PAT_MRT3847_72998C.1
ggttgtgttaacccttttttttttttttttttttttttttttttttttttttttttttttttttttaaccttaaatctattccaaaatttcaaaaaaccttgcgggggcctttaattcccaaagggattaataacccttttggtaaaaaaaaggttttggaaaaaaaatggaaagaaaaaatgggaccgacttttttttttttaaacctttaaacctcctacatgatactaccttagctgggctggtcaaaaacaggcaaagattttggctgaaaatttgatttggggggaaatggccctttaaactgttttagggccctgggtcttttttctccctggaaggaaccttctttttcaggacccaaatgtgccccctcccacaaaaggcccgggttcccctttaccttttttggaaaaaccccttttggaaccctgaccttttccccggaactggttgaacccccctttggtttttcttggcttaaaccattcattggacttggggggcttggattaaaaacctgcttgttccctaaaaa

SEQ ID NO: 112946 - DNA, 1620 bp, Glycine max
  Clone ID: PAT_MRT3847_72999C.1
gaggcacacactgggaccccactctgcctggcaaccggagctaccactctcttgcccgcgaccctagctctcccactctcgctcgacgctggttccgcttgcaacccttgctcgcggtggttcagaacctatgccttgacaaacctcagtaccaagaaccccggtttgttcgcacttcaatctccaagtcataagtacactcttctctccccattcactggcattggcttttggtagttgaagtcttcctttgttgtcaaattcagaccagtatttgaaaaatagacaagaagagcaagaaaataaagcagcagaaggggtgaagatagggatggcgggcatgtctggatatagttgctgctggcagtgggcggaggtgaaatccatgggaatgggctattggttcccttcctcaactaccaaaaggagtttccggcctgtgcttgtttctgtttctgctatctccgatgataactctcactcttacactagcagcggaagaaagctagaagaagaaggcatcaaagggtcaggaactaccgccagagatcgcaggttgcttagaattcgccaagagaaacgacagcgggaatacgacctccttaacaactaccctgcttgggcaaaagtcctggaaaacgcttgcaaagacgatgctgaactccgtgccgttctcggagatagcattggcaaccccgaactcatgaggaaacgagtcgaagatagggtgagaaagaagggtagagactttcaaaagtctaaaacaggatccgtccttgctttcaaagtcaccttcagagacttcaatccacttgattcatatatctggtttgaattgtttggatcaccatcagatcgggatgttaatctaattggtaatgttattcaatcatggtatgtcatgggtcgtcttggtgcctttaattcttcaaatttgcagctggcaaattcatcagtggagtatgatcctctatatgatgcagataaaggtttcaaagtgatgccgtcatctttccatgatatcagtgatattgagttccaggaaaactggggacgtgtttgggtggacttgggtacatctgattattttgcaattgatgtgctcctcaactgcctaactgccctgagctcggaatatcatggaaggctacaaattgtttttggtggtcgccgcatgggtgattgggaagaggggatgacaagccctgagtatggttacaaatatttcaagatttaaactgggacttgttgcagctgatttcatttcatgcattgtactttccattttgttcaaaaagggttgtagtgcatttgtgcatacgaaaaggtaaactttttgggccatggccattccttttatttcgtattgttgtcatttggagaaaaaattgtaggaaggaataaaaattgcataaatagaacagaaacctataaatcgaaatcaaaagtaaatggcaagaatataaaggacttgactgtggatgaaaaaaaaaaaaaaaataaaaaaaaaaaaaaaaaatgcatattcttcattaacttgtattgcgacgtgcgtggtgttacaaagatttgtacaagtatttcaaaaataaataaatggctttgcagttccctatttat

SEQ ID NO: 112947 - DNA, 497 bp, Glycine max
  Clone ID: PAT_MRT3847_7299C.1
acgaggttctattgttttaaattcacaaaacagagaataaaatccatgtgttatgttccacctcatctaacacgtttgtcaaacactagcttagtttctgactctctggtaaggtgtaatgtgttcactatttttttccaatctgatttttttttttttaaatgactgattaacctttcattggtagaaaataggcattggcatgaaatagcaagtaagcaggtattcacaaggacttacttctcacctagtctgagtcacttgacctaaaagcttagttattaagctatgggagacaaacaaaagtttttacaacttcaacacaccccttcaaatgaaaccccagtgggcttgaaatgtggacctagtatagtgttacaggttccttgttctgaacttaaatatttacataatgaaatttatgatggaaggtgaaaagtattgaactctaatgtctaaccagttaaaaaagctgtgatatttgggcaaaaccctta

SEQ ID NO: 112948 - DNA, 604 bp, Glycine max
  Clone ID: PAT_MRT3847_729C.1
ctttttttccttttttttttttttttttttttttttttttttttttttttttttttttttttttttttttttttttttttgggggggggaaactatttttttaggctaaaggggtaaaccgggggaagggagttttttttacaaaaaaacataaactcggggaccccatttggcaccccatcacttaaataaaccccacggggggaacaaaatcgggaagcccccaagaggaacaaaaaaaaaaaaaaggcaaccaacaaaccccgggaaacccccacaaacccaaaaattttaaggccgggcccagcccgggggggaagaacaaggcccccaactggaacaacttccacccaaggggggaaggaaaaaagccaaacgggcggggggcggcaaacaggggtgaaacccggggacaaaaaaaattccctcccccaattttaaaaaaaaaccgggaaaaacccccgggagggggggccccacaaaggggggccaaaacggagaaccctttcgctttttccccgggttttacaaaaccccatagaggggccaaaatagggcaaattccccccacgcaagaagaaaacccaaaaaaaccaggttcctt

SEQ ID NO: 112949 - DNA, 536 bp, Glycine max
  unsure (1)..(536): unsure at all n locations
  Clone ID: PAT_MRT3847_72C.1
acgttacacaaatcaagtgactgcaactcttaaaccctttgtagtttaaacctctggtctagtctggtgcttattgttgaaaacaacacaaaggagctcctacgaagatgcagggtgccgtaagaaaactaaccaggataatttcacacagacaagttgtaggttttcgttcctattgcactgacaaggttgttgttgatattggacaaccaacctccgcgtctcatccgcaggtttattatagttttccatttgtgtttatattaaagtttaaaaaacaaaagtaaaaaaaaaatgtgaaatgtaactagaagtatttgaagtgtctgttgtatgtttgacacaggtacgattgaaatgtttgggcttccttgctttgcacaatgtgctattgaagtggtatagagcatttagctaaactattgtttgttaagactattttttttttttttttggcttggtacattatagctactaaaagatggggatctcacaccgggtatatctacngaggaatacatcctaagaagaaaaag

SEQ ID NO: 112950 - DNA, 498 bp, Glycine max
  Clone ID: PAT_MRT3847_73000C.1
aggttgttcatcaaaaatgttgacgtagtagggggaccagaagcaacaagcgggaagggaaaacggacccccaccaccgggcagaaagaccaaaaagaagagccaacgaaaaagaagccaaaaacagacgcagaaagacggcggaaaccggagccgcagcaccaacgcagccagcagccaagacagcagggggggacaggaaccacggacggtgcaaaacgggggagaagcacaacccccgcggaggaaaaaagaagggcgggacaagaccaggaggaacaacgaccctgctcatcccggcagaaggaaaaccccctctaaccgcggtggaggaggacgaagacccagaaggaacgagcagcaagggggaagaaaccgccgcagcgacggacgccgtaggagaaggcaacgcgccgcaaaaggaaaaggagggcccgcacgccgactagacgggggaccatggtggggcgcttgcgactaccacccgccgggggggac

SEQ ID NO: 112951 - DNA, 102 bp, Glycine max
  Clone ID: PAT_MRT3847_73001C.1
aattcaaaggccgaccgacccgtcaacccacgaatccgacccgccttcttccgagaaacaaatcctttgagcaacaagcgcttttcaagcgcaaggggaatt

SEQ ID NO: 112952 - DNA, 265 bp, Glycine max
  Clone ID: PAT_MRT3847_73002C.1
ggggggctgaaaggggataaatttaaaattatgatagcctaaagcggtggctcacttgtaagttttgactcaggatcttacaaaaacaaaagttgagataataaagactttggtggttgtttctaaccgggaccatagttaactattggaatccttccggcttaacaaggccctgttttaatgtcagggagacatgaaatttacttgctttgccggtaaaaaaaccagttctttttccccaaaagcctttgggggggaaaccttt

SEQ ID NO: 112953 - DNA, 716 bp, Glycine max
  unsure (1)..(716): unsure at all n locations
  Clone ID: PAT_MRT3847_73003C.1
agccccctttgatcactcttgaatccatactactccaggttagatcaactttataagtacttgtaccaaaagaaactaaggagttaagatgaattatgcttattccataaacttaaaattaacttatgcataagttaaatcaacttaaaaaaaagttaaattagagagtttacacaaattaatttataagtttatgcataacttacgggagaaaatttatataatcttcttattttcttctattttttaagaaatttatctaaattgaactttcaacacatttcattatgtagatttgctttccttgatgcctgtgtgtagatttcacactcatcagtctcctattgtccttagatgtactgctgcttatcccaagataagaagatccccccttcagatttcttgctgcttttgggcttctcacaaagactaccctgaaagttactcttcacttgattgctaagctagacgaggttccaaaaggcatccttactttttaactcaaataacagaaccacacttgaaagttataaaattataatnnnnaaaaacaatttcttaaaaaataactatatcaaatttttattttagtttatcaaaaggnatcccttatttttnnntttatactcctaagctgaaaaannaatgnnnacattcagnngataaattcannnnnatacactcaaacaaaatatcaaaaannnnnntgaacccag

SEQ ID NO: 112954 - DNA, 582 bp, Glycine max
  Clone ID: PAT_MRT3847_73004C.1
accacgagggacaaatatactttggagaaaattaaattggaatacccaacaaaagatcctttttttttttaaaaaaaaggaacaaaagcctttaaaactatatggctaacaaacccggggatattacatcaagaacatacccatcatcactgaacaagaaaaagggagcctctaaagggggcactttttttcaactaagaatctctggttctttaagccgaggtgggaatcttgcagggggggctgggaaactaacgaaactagctgttttgggaaaaagcacaaaactcaacggggttacgtagtggaaaaaaaaacttccgggggggcccacttcggccagaagtttcattttttcacaaacaatctccatgggggcttaaatttccttcctaggagcagaaattagggctttttcctccggcggaagtccaaattaaacagatcctcaaaagcattacaatcaacttttaaacggggacaggggaaatccaaaaattggacaaacctcaagtatggcactgatattcacatcaaaaaaggattttgtttaaaacggccccgatccaggggaaaggctaa

SEQ ID NO: 112955 - DNA, 449 bp, Glycine max
  Clone ID: PAT_MRT3847_73005C.1
aactgaacagccttttgggtctgccgaaaacccattcttgttttttaaatccgacttaatagagttaagagagttcataaaaaaaaaaaaaacaacaattaaaaaaatggagaacgaagtattttcgaatatttttacgtttaagaaaaaaggtttttagaaaaattaatattgcaaaagaaaaatgggtcatcaaacccattttatttataaaaaaaagaataagagaattctggcaaagaaacccaattctattattgcaattgaaagaaatatacaagttgactgaagctaaaaaagaaaacaattcaataataagtaatggaatgatccaaagctcgtctgggtctatagattcgataattttgtcattgagagaacgaaagatgaaagagttgactgatagaataaacaccatgctaaaaataattgaaaaaatgaaaaaagac

SEQ ID NO: 112956 - DNA, 3118 bp, Glycine max
  Clone ID: PAT_MRT3847_73006C.1
gacccacgcgtcagcccacgcgtccgcccacgcgtccgcccacgcgtccggggatctggatccatagcatagagagagagaagaagaaaatcttggcttgataattcagatttgaaagagagagaaagataaaagggcaaaatgacaacactctttgtccagaaacccataagagccttcttctcttctgctgcaaccattttattattactataaacaattactataagcaaggcggtggtttggcttttctagtaactttgaccattctcattctctcttcaaaccttcatgggaatataacaaagaaactcactgtgccaccactcatctcaacttggtaggtagggcttgtgtgtgtggttgagaaagaaactttacttgttacaggagtgagtgagatacatgaccactagggaatagagagagagagagagagactcaacttgaaaaaaagcaaatttgatttttagggatagactagtttgctgtggaatcaagtagcaatattttttttggggttcaccgatggatggttacgaagctacaagaattgtgttttcacggatccaaaacttggaccctgaaaatgcttccaaaatcatgggtgtacttcttcttcaagaccatggtgaaaaggaaatgattagactagcatttggtccagaagcacttgttcactctgtgattctcaaagcccgcaaggagttaggtttaccttcgaactctccgcccacaccctctactcctccttctccttcacccttcctttccaggcaaaactccacttcttcaaggctcagtggtatcaacatccctcctgctctcactatcccaaacccttctcatggcctaccatgtctgatgatttgatcaggaccaaccatttggttgttggctcttctacttcttcatcttccttaccctactatgctaacggagggtcagatccaattgatgacttccaacttcaagaccagctttctttcctgaatgatggttctccaactagtactgcttttgcacacaagaccaacccagatttgttttaccctactaacaactcagacttgtcttcaagtcctactactgctgttgaccctaccctttttccttcctatggttggggagggtctattcaccgtaggagttgttcagtcaatgatgcttgtttgggctctgaggaccctagttctgggttgggatggaagccttgtctttactttgctagagggtactgtaaaaatgggactagttgcaggttccttcatggtggaattggagatgctgatggtggtgctgctgctgcaatggttggctctcctagcaagattgagatgatggagcagtgccatgagctcttaagatccaaatcttttcagcaacaaagattggctgctgcttctcaactcatggcctcttccatttttccgtactccccaaagagcatgaatttcctgttgcagcagcaacagaatgatactcaaagagcggcagctgcagctctgatgatgagtgaggatttgcataaatttggacgatccaggcttgaaagaaatgatttttctttgaacagtcctgttatggtaaacccagcttccaggcagatctacttgactttcccagcagatagcactttcagagaggaagatgtttcaaactacttcagcatttatggcccagtgcaagacgtgaggatcccataccagcagaagcgaatgtttggctttgttacctttgtttatccagagactgtgaagcttattctatctaaaggaaaccctcattttgtgtgtgatgctcgagtgcttgttaagccttacaaggagaagggcaaagtcccagacaagaagcagcagcagcagcaggtagatagaggagatttttcaccatgtggtactcctactggattggatgctagagaccaaatttgatcttcaacttggaggcagaatgctctacaatactcaagacatgctgtggaggaggaagctggaggagcaagctgatttgcagcaagctcttgagctacaaagtaggaggctaatgggtctgcaacttcttgacatcaagaagcatcaccagcgtgcactttccactggaagcccaattccttcccccacccactctcctaacatgttcaaccaaaatcttgttccttcttttcacatcacttcagagtccccaaaggagagtggttcaacttctgctccagctagtactgcatcagtttctgctggtcaacagccggtcaacatttctgttggcaaggaagtggttgtcaatggcgagaatggatatgatgaaggcaatggcaagcagagctctagtcatgacgattgtgatttgcaagaatgtttggagcataatctccctgatagcccttttgcttccccaacaaaagctgatggagacttcatggttgccttctccaatggacctaatgaggccaatgatgcagatgcctcagctgcatctgccaactccaaatttggtactagcacattacttcctgcagcatctgctcttgacatgggaactttcaaatcctttaattgccaaataccaaggttctcttctggccatgggactattggtatgttcgcgggcaccggtggaccaattggcatttagtttcctgatgttcaggaagttaaagatgaccaaacaaacccggacagatatgtagagaatcacaattatcaccaccaccaccatgacggccatcaccatcaatcttcaatactatactacttactacattacaaaatgcatacgtaaaaagcagttcagtaaaggaagtgggggcaggcattcgctttctttagttagagcattattattgtactattttcttttatctgtagtagctgaatgaaccacaggttaaaataacacacaaagaatcatccgagtcaatgtgtagtaggaactcaattttggtatgttcgcgggcaccggtggacttggcatttagtttcctgatgtcataagctagttcgtgtttatgttgctgctctgttgcatgttgtcttcatcgtgctgtaatttggctcaaaaggtctgctccagctagtattgcactcacttctgtgggtcaacaacaggtcaacatttc

SEQ ID NO: 112957 - DNA, 460 bp, Glycine max
  Clone ID: PAT_MRT3847_73007C.1
ctttagaaactcttagggctccacctttagcttgatatgtacaacgattagagtctaaagtgcttatagatattaagttcttcttgagtgcggggaacattaccttacatgtgttaatgttcttacaataccatcattcatcttgatcttgaccgtacctttgccagctatactacaagcaccatcattccccatcagaactttgccaccatcaacattttggaatgtggcaaaccagtctctgttaggcgtcatgtggaaagtacatgctgaatcaagaatccagtcatcatcattaacatttgatgagacatatagaacattttcaccgtgtgatttttcggagacaacagctactccaccaaactctgaagtactcactttatctttcttgagctccgggcagttcctttttcaatgcccttccttctgacagttatgacatttgttgttgttctta

SEQ ID NO: 112958 - DNA, 183 bp, Glycine max
  unsure (1)..(183): unsure at all n locations
  Clone ID: PAT_MRT3847_73008C.1
tntactttgacagtggtgcnggcnagtcagatatcncgcaatattanaacanatgnnatggcaaatgcnatncggtataatganctcagaggtccaggtggtatatttaganacccatangancatgtatcaagaagaactgttctgatttcttgatcaatggtnacaacgaagacgttgagt

SEQ ID NO: 112959 - DNA, 324 bp, Glycine max
  Clone ID: PAT_MRT3847_73009C.1
aagtggacgccctttattataatttttatttttttttttattatttttgcgaacacaaaccgaactaattgggaagggacattataacagacccattaaacatcaaagttgttcaaatgttttgggaacacattcaaaatttatacaaagagcttaaaaccccccactgagacggaggacaaagtgaaaggtagtatccttctggatgctgaattcagaaagggaccctacataatcaagctgtttgccagcaaaaataaagtctctgatggtccagggggaaacctttctttgattgaatcatggcctacacattgaaaatgg

SEQ ID NO: 112960 - DNA, 524 bp, Glycine max
  Clone ID: PAT_MRT3847_7300C.1
gatgttacgccgggaggaagaacacaatagctcactccggacgttctcatcccaatcttacacataagttatgcattgtaataacaaaaagcaagcgatcccaatactaaaacacatcactttaccaaaaaactttaagggaacctagattgaaaaaacgcattcaaccctttttttttaatgtatggtcaacgatacttctctccgatccaatatgggacagaattataaaactgcgtcattctacttactcagccaggagcccccccccggtcttgctggttggacagtcctatccgtaggggtttaataccgtactatcagtaccccacccaatattggatctaacctccccttgctgaccatataaacatttgcttttcaaatatacccaatcaccgctatctaaccccctttacataaaaacctaggggggaaccactcaacttccctcaattaaaaggtttccgtcttaaacctccctccaccggaggaaagaacacccaaataggccgcccccaaca

SEQ ID NO: 112961 - DNA, 422 bp, Glycine max
  Clone ID: PAT_MRT3847_73010C.1
aaaaacgaacccagaaattggccccacccaaaaaagtcggacaaaaacaaaaaaaaaaaacccgggcccttgaaaaaaaacccaccccctggggctcggggggttgattcccaaaaacattaccggggaaaaaaggccggacccagggacccaaaacggggcccggggggggcccccgaaaatccgggcgggggcctggagggggaccaagtttccctaaagggggggggaccaaaggtgggcgtaaaaaggggcaaaactggtccccggggaaaaagggtaacccgtcacaattccacacaagaggccccccggaaagataaaactaaaaagcgggggggcccaatgaggggcccacccccaattaggtgggggggcccccccgcccccttaaagaaggggaaaccccgcgggccaatgga

SEQ ID NO: 112962 - DNA, 1397 bp, Glycine max
  Clone ID: PAT_MRT3847_73011C.1
cccacgcgtccgcccacgcgtccgcccacgcgtccgtacggctgcgagaagacggaggaaggggattgtagattggtcttgttatgttatgatatcaatcaagatagataaccaaccattttgtgtccaccaaaacaaaacccctcaactcctcacccactagctatgggagagaaagagaagagaaacaagaacaagaagcaaaagcaccaacaccccaatgaccaaagcacaaagcagaactctgatttctccttcaagccaagctcagaggtaaagggtatcaaatttggaggccagttcatagtgaagtccttcacaatcagaagagcaagacccttggagcttctcaaggttctttctttcccaccaaccaacaacaccaacaaaccaaaggacaagctccctttcccttccaccacagcattcttgcccacaaacttcaccatcttggcacaccatgcttggcacaccctcacccttggccttggcaccaagaagtccaaggtgctcctctttgtgtttgaaactgaggccatgaaggcctcagtggacagaatttggccaccagagatagcacttggtgatgtcaacaagaggctcataaggggcctcaatggatgtgagatggcaaggttcaagttcagaaaagggtgcataactttctatgtctatgctgttaggcaagttggaagctttggcttttcctgtgctgaggatctaagaaccattcttcagtctgttgtggagcttaaggatttcttggatcacactgttatgctttccatgccaaaccaaagaagcatcagttactcacagtcacagtcacaacctcaggtagccatggctcattaggctaaagctgtgaatcaatatcatcatctcatcagagtttatatatatgtgtgtgtgtgcgtgtgtctaagggcttccttcctctcttcacattaacatcttcatcttcattagggtcttaaaagagatatattttaaggcttaatttgttaacttggtttcctagtctttttggaactttgggaggcttattattggtttatttgttgatgatcttgtttgatctgtatttttcttttgaattttggggaaaatgaaagtgtaatgtagcatgaataatgggggtactaaattgaaggttatacagtggatgaccgaatccaggttgcatttgtcctttttgttgacatctgctaatacaaatttgtcaagggggcgcagtttatgcttacttttttttcttattgctagctatagaatcttaatctattccaggcagacatatgttccagtaataaatagcgcacttgaattgtctatagttgaaatgtgttcttaatttattcaccactataactttagaaataaaaataattctctct

SEQ ID NO: 112963 - DNA, 540 bp, Glycine max
  Clone ID: PAT_MRT3847_73012C.1
cccacgcgtccgccattcttcagtctgtggtggagcttaaggatttcttggatcacactgtcatgctttccatgccaaaccaaagaagcatcagtttctcacagtcacaaccccaggtagccatggctcattaggctatagccgtgaatcaatcatcatttcatcagagtttatatatatatatatatatatatatatatatatatatatgtttccaagtgcttccttcctctcttcacattaacatctgcatcttcattagggtcttaagagatatattttggcttaatttgttaacttggtttcctagtcttttggaattttgggaggcttattattggtttatttgttgatgtttgatctgtatttttcttttgaatttttggggaaaatgaaagtgtaatgtagcatgaataatggtggtactaaattgaaggttatacggtggatgactgaatccaggttgcatttgtcctttttgttgacatctgctaatacaaaaaagtcaagggggaaaaaaaaagcggccgctctggggga

SEQ ID NO: 112964 - DNA, 835 bp, Glycine max
  unsure (1)..(835): unsure at all n locations
  Clone ID: PAT_MRT3847_73013C.1
gtacgcncttgcagggtaccccggtnnccggcgtccgctccaaacgacccctacttactagaaatcgccactcttgcattgtttccttcttgtactgttgttgtcatcattcttagttttatcagagggctaaaaggggttttcagtgggtctcagtataagtagtggtgctttgtacttgagtggtgggtggctttgtgcgttggacaagcagcagaggactagttttgagtagtttcatcactgtccaacttagaaaaaggtgggaaaaaaatgaagtatgtgttggtgactggtggtgttgtgagtggacttgggaaaggagtcactgccagtagtattgggttaatcctcaaggcctgtggtcttagagttacctctatcaagattgacccctatttgaacactgatgcgggaacaatgtctccttttgagcatggagaggttttcgtcttggatgatggtggtgaggttgaccttgatcttggaaactatgagcgtttcttggatatcaaattaactcgtgacaataatattacgactggaaaaatatatcagtctgttattgagaaggagagaagaggagattatcttggaaagactgtacaggttgttccacacataacagatgctatccaagagtggatagaacgtgtagcaaagataccagttgatgggaaagaagggccagctgatgtttgtgtcattgaattgggtggaactataggggatattgagtccatgccttttattgaagcacttggtcaattctcataccgtgtaggccctggcaacttctgtttggttcatgtcagcctggttcctattctccatg

SEQ ID NO: 112965 - DNA, 565 bp, Glycine max
  Clone ID: PAT_MRT3847_73014C.1
acctattctgaattttttaatatatattattttagatttttacatatatactaatgtgtattattaacaataacaatatatgtattgtttaatagaatatatattcttttttacttaatatatatatatatatatatatatatatattatttagaattttttaacattattcaacttattatattatatattatgcttcatttagtttttattactactatttgttagttgattatattttttattactataatttttctttcatttattatatcatatattatgctttatttagtttattattttatatgttatgttttaaatagtttctttttatatttttaatagtattatactttattattattatttaagttcatttacgttataccatagaacagtacaaatataacaagttaaaaactcacccttgtaaaaatatatagcagagaaatgttgcacttgaggcccaaggcccaacagataagaaaaaagaaaaagcaggccctataaagacccaaggacccgacccatcattcacaccttcattgacaatgcaaatgga

SEQ ID NO: 112966 - DNA, 217 bp, Glycine max
  Clone ID: PAT_MRT3847_73015C.1
aaaactactgggccaggctaaagctacatgtattgatgttacacactctgaataattttactgccgctgtgagtgcttagtgcatactacttaagtagggtgcatgaataatcaagactaacgctcgggataagtggcacattatactggactacatcacatgctggggtgttgcaaaactacagcacatgaacagcttagaaaggggcacactagt

SEQ ID NO: 112967 - DNA, 285 bp, Glycine max
  Clone ID: PAT_MRT3847_73016C.1
aaggcccaaagaaaaaacgaaatattattctggaaggggaattaaagaactatagtagataaaggtaagagtatcaagggatagaatatatgtaattattggaaatcttttatattctatcatcaaggtcttggggttcctctacaaacgatagttacataattctcatcattttgggtcttggaacatgtaactcattctgctatcagcagatgtgtggcccccatcaataaaaaaaatgtgtgctgtaatgaagccagactcatcactagccaaaaacaaaac

SEQ ID NO: 112968 - DNA, 388 bp, Glycine max
  Clone ID: PAT_MRT3847_73017C.1
gggttctttctccacttcctcttcctcttcctccaaactcttgttccgcccacttttttgagaagaatctttcacctacacttacctttctcctgatggctcgcgacccaaaaaaacccgcaccttctgatttgacccgttgggtaagacagtaaaccaggggatttgtccatctttgagccacctgggggttaaacttttgtattcccattaacacccttgtggctggccgacctgtgccctgggactgggccttattcgaacaaaatttcctttggtaaaaactggtttttcaaaaaccaaagggcgaaccgcaaactttttgttgggcccagggggaaaggccccatttgggaacctttttcataaggttccggaacctcctggc

SEQ ID NO: 112969 - DNA, 798 bp, Glycine max
  Clone ID: PAT_MRT3847_73018C.1
cttgcatgcctgcaggttcgttacgttttgctgattttgtgtttggtttgcacttcacgtgattgagttgaatttctttaggatcgtttacaacaaatgtggttgcggctgcaccggtgttatactgcaaaaggacgttggatatttccaacactgtaagagacttttttgtttctttcttagtttgtgctacgtagttttctttacaagccgttttcattgtccatggttttgtatggttaaacttctctataagcagttaagcacttataagaggagaaaataattagtcaaaataaattgagtttcttctataagttaaaatcaacttatgcatccacacttataaaagaaaataaaaagttaaaataaattaaatttcttctataagctaaaatcaacttatacatctcagattttgctgaagttaggtgagaggggttgtataaatgtatagtgatttctttgattctctctttctgcttgtttgatcgggtttgtgtcagggaatgggtgtttgctcatccttcagttaagattcctatagcataacgtgttttcattgaagtcaatagttcttgcttggttgctcgctaattaatcagttttgtaacatttcaggcacgtgctgtgttaactaatgcaggtcaagcaaatgcagcgacggtaggccaccgaaactctttgttttgtgtgtctgtgtgtagtatttaatgaatagtctactgaagtgttgtttcactatagtcacttcagatcattgatgaatgtttttccatgagtgtagttcgttcaact

SEQ ID NO: 112970 - DNA, 636 bp, Glycine max
  Clone ID: PAT_MRT3847_73019C.1
ttgcattatttgaggctcgaggccgtttctatctctctctcacaatggaaactcatcacggaggccagtggaataaagcgtttttgcccctactcttattactctccgtgttctccaccgtcggatcatcatcatcggccatacgtttcagattggcacctctggcacgaggtgccgcggagaggcaggttcccatgcaagcgggtgcacccttcaagattgcgctgttcgccgacctgcactttggggaggacgcgtggacggactggggcccacgacaagacttaaactccatcagggtcatgagtacggtgctccacaatgaaaatccagattttgtaatatatcttggtgatgtcatcacggctaacaatataatgattgcaaatgcaagcttgtattgggatcaggcaaccgccccagcaagaaatagaggcataccatgggccagtgtatttggaaaccatgatgatgctgcatttgagtggccattgaagtggttctctgctcctggaatccctccaattcactgccctcaaaacacaacttcatattcaggagaagaagaatgtagcttcaaaggaacaggacgtttgaatctgatgacaaatgagatcaagcacaatggatcatttt

SEQ ID NO: 112971 - DNA, 306 bp, Glycine max
  unsure (1)..(306): unsure at all n locations
  Clone ID: PAT_MRT3847_7301C.1
atcaaaactatgctaaaactattcncttctctattttggtgacccaaatagagaaggaatagttttagcatagttttgatttggggaatgctgggtggcgggatgggggatcaaacatggctttagcggtggccatggtgtgggcgttctagatttgggtcaccttagtgaggagattttgcgcgcatggcgctatcttggggatcggaggtctttgggagaccttgttatattcttgatgccaaagcattatccccttttgcctttggaaacccattttcagcccttccaaacaaaacctcctca

SEQ ID NO: 112972 - DNA, 1575 bp, Glycine max
  Clone ID: PAT_MRT3847_73020C.1
cctccttctagagggaattcaaagatatatatgttgtcttcgaactcatggaatctgatttacatcaggtcatcaaagctaatgatgatctgacaccagaacattaccagtttttcttgtatcagcttctacgaggtttgttttatatacacacagcaaatgtttttcaccgtgatctaaagccaaaaaacattttagcaaatgctgactgcaaactgaagatttgtgactttggtcttgccagagtggctttcaatgatactcccactgctattttctggacagattatgttgcaacacggtggtatagggctcctgagttgtgtggatcctttttttccaagtatacaccagctatagacatatggagcattggctgcatttttgctgaacttttgaccggaaaacctcttttccctgggaagaatgttgttcatcaactagaccttatgactgatcttcttggaactccatctcttgaagccattgctagggtacggaatgagaaagctcggagatacttgtgttgcatgcgtaagaagaagccagttcctttctcccaaaagtttcctaatgtagacccccttgctcttcgtgtgttagaaagaatgctggcatttgaacctaaggatcgacctactgctgaagaggctctagcatatccatattttaaaggcttggccaaggttgagagagaaccttctgctcagccagttaccaagatggaatttgaattcgagagacgtaggataacaaaggaagatgtgcgagagcttatataccgagagattctggagtaccatccaaagatgttaaaagaacatctagagggagaagagccaacaagattcattttgaatagtgctgtggatcacttcaagaaacaatttgcatatcttgaggagcattacggcaaagggggaactgttgctccgcctgagaggcaacatgcatcattaccgagaccttgtgtgttgtattcagaccactcaatgcagaacacatctgaggttgcagatgatctatccaaatgttgcatcaaagaagttgagaaacaacccatagaaaggagtagtgctatccctatgtctaggcttcctttacaagcaccgcaaaatattcaaggtgttgctgcaaggccccgaaaggttgttggttcagtaatgcgttacaacaactgtggggtagcagtgacggccgaggctgaacagcggagggtggtcaggaatccatctgtttcagctcagtatgcagcatcgagctgttcatatcctaggagaaacccaggctataaaaatgaaaggggggcagaggatgatgggattgaaggttcaaatggactgcagccaaagtacatggcaaaaaaagtggctgctgctcaagctggacctggtggtcagtggtattgataatgaattatattgaatctatgtggccaccgagagccttgtgttgtgccatgaaactctgatatacccgagtttcatgtgctatgcctaatgttgatcatctgaactgaaatttcccctttgaagtaccaaccaaaggggaaagcttaagggactcaagtcctat

SEQ ID NO: 112973 - DNA, 200 bp, Glycine max
  Clone ID: PAT_MRT3847_73021C.1
ctcgagccgcatcggctatagatacaccaattatggagaaaaatagttcttttaacacaaaaggctcaatggtttggaaggtgatggggggttaatttaagcttttatgctggtggagcatatatatgctctttatcacaacttgtttacattgacaaacaaaggtttaacatgcatgattcaattgagaattaagaaaa

SEQ ID NO: 112974 - DNA, 4563 bp, Glycine max
  Clone ID: PAT_MRT3847_73022C.1
ccacgcgtccgaagctgtccgcacaaccttcttaacttgaactcgaagtatgcggtttgtgtgggatccaaaagtttatgttcctttattcactctcaattttccatcataatctgcttcttcaattccccaatttcaagattcttattctgctttgaaatcctaagctccaccctttgttcggtgtctctatttattcgtcttctttggcagagttagtgattatcgccgcagcaaattctccaaggttatttttttccgctgattctaagctcaacgccttgtaccaattcacaccccaacttgatctgtgactttggccttttcagctacatttcaagagcttcttcatttcctttttgttttttgggggttttttgttccctatttttttattctaatacagtgatatcctagtacgtgtttttgtttttgttttaattgcagttgttgtattcgctgctaaactattctgggtctgtttttttttttttttttttttttgagcttcgttcaagtttgaattgaaagttttctcctttacttgttcattttgatttggtttttcttgctttgcattttgagcaccccttttgatctggggcgttctggtgtttgtgtggttctctgttttagtgttttctttttggggatttcggagtggaagtgggagtttgggtgatctgggttttgagttgaggtaaggggtttgttggatgcacctattggcttaaatcatttgaagggtttttatgcttagttgcaaagatgcttcctgatcagagaaaaaagtcatctgtagaggtggacttctttactgaatacggtgaagggagcagatacagaatagaggaagtaattggtaaaggaagctatggtgttgtctgctctgcatatgatacacacactggagaaaaggttgcaataaagaaaattaatgacatatttgaacatgtttctgatgccactcgcattcttcgcgagattaagcttcttagacttttacgccatccagatattgtggagatcaaacatattctgttgcctccttctagaagggaattcaaagatatatatgttgtcttcgaactcatggaatctgatttacatcaggtcatcaaagctaatgatgatctgacaccagaacattaccagtttttcttgtatcagcttctacgaggcttgaagtatatacatttttcacacgtgatctaaagctacaattcaccaaaaaacattttagcaaatgctgactgcaaactgaagatttgcgactttggtcttgccagagtggctttcaatgatactcccactgctattttctggacagattatgttgcaacaaggtggtatagggctcctgagttgtgtggatcctttttttccaagtatacaccagctatagacatatggagcattggctgcatttatgcagagctttagactagagaacttattgtccctatgaagaaggttctacatcatgttttccatttgacagattttctatggtcaaattttaatgggttctcatgatccaattgatgattttcttgctctctaatttgctaataaaagagtaacacgaaaggatctgaaaaaccatgaacttgaaggcaggccggttgcttcattgcataattgaagttgttacttttaccctagtattatttgggtaccaataccaagataatgtattttcttctttaaaaaaaaaaaaacttatagccaaactgccaaagtcatattctctcgtctatttctctatgggggtatctttggtgttagtagcttaataagaagcaacaatagaaacggcgtgttggcccccagtgtatggtgtatcatccgaagatgttgaaggaatttctagagggagcagagccaacaggtttcattttgacaagtgctgtggatcacttcaagaaacaatttgcatatcttgaggagcattacggcaaagggggaactgttgctccgcctgagaggcaacatgcatcattaccgagaccttgtgtgttgtattcagaccactcaatgcagaacacatctgaggttgcagatgatctatccaaatgttgcatcaaagaagttgagaaacaacccatagaaaggagttttactatccctattcaaagctaatcatgatctgacaccagaacattaccagtttttcttgtatcagcttctacgaggcttgtcgtatatgcgctccgccactgtggcgcaccgtgatctaaagccaaaaaacattttagctggtccggactccatccggttcagctcagtatgagcatcgagctgttcatatcctaggagaaacccaggctataaaaatgagaggggggcagaggatgatgggattgaaggttcaaatggactgcagccaaagtacatggcaagaaaagtggctgctgctcaagctggacctggtggtcagtggtattgataatgaattacattgaatctatgtggccaacaagagccttgtgttgtgccatgaaactctgataatacccgagtttcatgtgctacacctaatcttgatcatctgaactgaaatttcacattcgaagtaacaaagggaagagctcaagggactcaagtcctaatgttgaagtatctagaggatgatttctaattcacgctatttgcatggtcaaatttaaagggttctcgtggtctaattgatgattttcttgcactctaatttattaataacagagtacatgaaagatctgaaaagccatgaacttgaaggcagaccaccagttgcttcattgcagaatgggaagttgttacttttaccctatagtattacttgagtaccaataccaagataatgtattttttttttaaaagaacttatagccaaactgccaaagtcatattctcttgtccctttctccatggggtatctttggggttagtaacttaatttggtgtaacaaaagaaatgaagtgttggttcccaatgaatggtaactccttgtttcacatgtttgcttaaaaaaagaccatgtgtgttgtattctgataactcaagacaaaatatggctgaggttgcagatgatatctccaagtgtatcatcaaagaagttgagaagccagccatggacaggactggtggtatcccaatgaccaggcttcctttacaagctcctcaaaatattcaaggtttgatgattttgcttcaggtgttgctgcgcggcccggaaaagttgtaggttcaatattgcattacaacaactgtggggcagcagttacagctgatgctgagcagcggaggatgggtagaaatccatctgtttcagcccagtatgctgctccaagcagttcatatccaagacgaaacccaagctgtaaaagtgagagggcagaagaagtgatcgaaggtgctaatggacttcagactaagcctcaacacataacacaaaaagttgctgctgctgctctagggggacctggtggtaattggtattgattttggaaatgttgaatttgtgtcctgcaactgctttgtgtcagcatatcaggtttcttggcctacacggaacgcagatcaatcatctgaattgaataaagatatgagaggccatagcatcgacaatatcgaaggatgagagagctaaagggattagaatacaaggaagtctctagctgattttttattagatcttgcaattcggtccaccaatttgaagtttggaaggttcgacatggtgcaattatgattttcttgctgtctagttcgttaaaaacagagaatgaaagatctgaaaagcatgaaatgaagatggcagtgcagctgctgctacatatttgttctattctcttgctgaatataattgcctagccttcttattttgggcaccatccataacaatgatattgtagttttataacctagtggcttgtagtcaaataatcagttctttttctgtaacgtctctctctctgaagattatttagaaacgggatttggtcttaaaaatagttaaggaatcaataaattgaaagtgttggtccccaatgaatgttaactacttgtttcacaggtttgcttaccgaattccacgtgtgtctgatttttccctgttctcagcctgaaaatcacaatgcttgtcgtattgggtgaacgtgggacacttttctatttgagacagcttgggggggtgactttagtatacattttgacccttctctgtctcccgtttgttcttcctatctatgttacacacatggctgacattatttgataaaaagtgttgtgctgtcctgaagcttgtttcattttaattcatctctttttaatctttgcaaacatgtacttcttttttcagccacatggtggaattttgtgtgaatggctgatagctaaaagtctgtataaaaaaaatgctgaaataaagctgtggaattcttttatttaaaaaaaaaattttatgttttttgtaatcatattctttattctagctgccccttaatgtatccatatacatgcccataattcccaagatttggctacaaaatgtctggcagaatataaatactgtttttccc

SEQ ID NO: 112975 - DNA, 806 bp, Glycine max
  Clone ID: PAT_MRT3847_73023C.1
gtgcgagagcttatataccgagagattctggagtaccatccgaagatgttaaaagaacatctagagggagccgagccaacaggattcatgtatccaagtgcggtggatcacttcaagaagcaatttgcatatcttgaggagcattatggaaaaggtggaactgttactccacccgagaggcaacatgcatcattacccaggtcatgtgtgttgtattcagataactcaagaccaaatatggctgaggttgcagatgatatctccaggtgtagcatcaaagaagttgagaagccagccatggacaggactggtggtatcccaatggccaggcttcctttacaagctcctcaaaatattcaaggtgtgatgactgatcgtagtatgtactttgctgcttctccattcccccctttcttttttctttcctgcctctcatatgtgcatgacaggaattatcttcaaagagtgttgtgctcattgttgaggcttgttacatttggttcatcattctttgaaccaataagaattatgtttctggttgtgtgaacttgttcttgcttctgtcacatgatgggaattatgtgtgaatggatgaaagcagcaggacttgtattaatgagatagagcaatggattttttaagacggcctgaaaaggttgagggttcggtaatgcgttacaacatctgtggggtaaccagtacggacgacgctgaacagcgtagggtggacaggaatacatctgtttcagctgagttcgcagcatcgagctgaacatatactaggagaaactcaggctgtaaagtga

SEQ ID NO: 112976 - DNA, 531 bp, Glycine max
  Clone ID: PAT_MRT3847_73024C.1
ccacgcgtccgctacattagccgtacgaacttgtctcgctccctctgcgatccgatctagacttctccgacatgagatcgtaccttgacctacttacacactatgcatcttttatataacataccctaacaatctgggagaccttgactgatccattgtgagcaaatcaggcaaagtgctatgttctagaagcattggggatataactcgcatcaaaccctacggtcttctatcaacaataaccaaatggataggaacaggcaaacagcacacgtatggacaatctgaaaacgtgcgctctgcttacccaccactaaaaccactgtacctgcttcttgcccacacaaaaacagcaacatactgtaagactcccaaactctgagcacttctctctagacttgtacctaaacacacttactcacttgctgaatacctgctctgcaacatgcctatgagcaaatttttgcatttgataacatcatctatcttgctcactaggaatatgcctacgtcgcacacggtactcaatac

SEQ ID NO: 112977 - DNA, 485 bp, Glycine max
  unsure (1)..(485): unsure at all n locations
  Clone ID: PAT_MRT3847_73025C.1
attcatagtatgatacatgcatgataccacatatgttgttatnnatctatggatataactcagttttttttttcttttttggaggatacatccccgtagccattcactccttcaacgattaacacttctcaaattatctacactgcgacatagacttcgggagaatatgcagtcagacgcgtaactagacngtgcnngcatatgcgacacnnccaccttcacgattttggtggtctttacagtactctgcctggtactcgcatattgatttctctactgtatccgcctgcaaacaaaagcgctcgatgttgtggactgtgatgagaccatcatgactgcctgtgaccttcttaagnctatctctaatgctccttggcactaccgtcctaagatagtttannnnngtttcctcccacctcccagctggaactgagaatcctggcctctnntttcattccttatgaatctgtggaacgccatgtacc

SEQ ID NO: 112978 - DNA, 422 bp, Glycine max
  Clone ID: PAT_MRT3847_73026C.1
gaataaacaaggtacaccaataaacaattgcaatctctttaaacaaaaaaataaaaataatcttggtatgcattttgcaactcatctagactatggtatagctgtgtgtgtcattttgtgctagacccttcaccatggaagagaagtcaaacgtggttgaatattttgcaatagcctatataagatggtaagggtaaaggaccaaatgttcaagatttgtgcatgccctttaacatgtgcctagtttggcttatgttacaaggcaattcatgatgggtgcaagaccttggctatctgagaaggagacagagaaatagaggcagcaggaaattacttccctctttcaaactgcaatttcttccactataagttgccagagaggaccagttgaagtgtgtggtacacattacacaatgtgaaat

SEQ ID NO: 112979 - DNA, 248 bp, Glycine max
  Clone ID: PAT_MRT3847_73027C.1
cccgcgcgtcctccaaaaccgaatagattaaaaacgctaaaatctactaaatcgggaatgagaaatttaaaaacactgaaatccctctaaccgatatcaaaacgtacattgataaataaatcttcaaataatataacattaataagacgatatatacccaatcttcatattgactcttcaaaacagcgagacaagtaatccaaacacatattatcataaggaaaatgataattataatacaatgaact

SEQ ID NO: 112980 - DNA, 132 bp, Glycine max
  Clone ID: PAT_MRT3847_73028C.1
ttctacacaatgacaaggctacatatgatgggagccatgtcgatactcaaatatttctcttacgctagactgtgatataaagcacgagtgaatttctcttctcaatcttatgcaaggaaggcgtttctttat

SEQ ID NO: 112981 - DNA, 412 bp, Glycine max
  Clone ID: PAT_MRT3847_73029C.1
ttacggttggaaaaagacaacagaaggggttgcttcccaagggttagcccattcaatttgaatgggggaaacagaaaaaatagggcaatttttggattttgattttccaaccaaaaaatcaagggtttaccctaaaaccccactccctccaaagcgttggcaattcattgtttttttaaaaaagtttttaatggaaacactgattttcaattcgaggtttgagttagttctcacaaagaattgcagcattgggtctccctcgaaacgttgacaactacatcaaacaaaccctgaacaagacattagtgtttcctgtttcgccgaaaaccttagaaacaaaactttcaccttcccaaaactcgaaatggggcttccgaaaacaccaactttctttttttccccaatttgaacc

SEQ ID NO: 112982 - DNA, 381 bp, Glycine max
  Clone ID: PAT_MRT3847_7302C.1
gttgcatagaagtatttaatttataagcagagcttacaaaatatttgaagtgcaatcaagttaagtctaatgctatgaggagtttgtgaacatgttactgaacttcagttccatcatgtttaatctttttccattcagtttaagactaacatacaaattaattttagttaatcttctatttagcccgtttgcttatatataaacacaattgtctccacatcgttggagttttgatctattattgcatctactggatattcaattctgaccaaatctataacaatttctatcacttggagggtggggggcttggtggaggagaaagggtttccggaatggctgcacattccccaactttgggatattaaaacgtgggggggt

SEQ ID NO: 112983 - DNA, 787 bp, Glycine max
  Clone ID: PAT_MRT3847_73030C.1
tcgaggatattttccacaaaattccgaatcgttcccacatcacaacacaactcaagtttacaccaactaccccttttcttcgtttccgttttcttctcaaattgttcctattttcactgttattcaccccctcgagccgtgtgtttctctctgcacttgccaaccccgaattcatagggtctctctcttcttattttcaggttttggtttgaagaatggggattcagacagtgggatctctaggtaacgggcaacagtctcatttacagccttcatcattgtctaggcaaggttcatggtatagtctcactcttgatgaggtcaattgtcaattaggagacatgggaaagccattggggagcatgaaccttgatgagcttcttcaaaatgtgtggactgctgaagcaagcaagtcttcggtggtggtaggcgtggagagtgagaacatgtcgtcatcgtcttcctcgctgcaacggcaggccagcttgacgctggctcgtgcattgagtgggaagacggtggatgatgtgtggagggaaattcagcaaggtcagaagaaaaagtatggagaggatgtgaggagtcaggagggagaaatgactcttggtgagaccaccttggaggatttcttggtgcaagcagggctttttgctgaagcttctatcagtccagctgtggggttggatgcaatggattcccttgccacgcaaggtttccaacagaaaacaggcctgttatcatcctccccctcaatcgggagtttatcagacacgagactgggccggaa

SEQ ID NO: 112984 - DNA, 258 bp, Glycine max
  Clone ID: PAT_MRT3847_73031C.1
gaaaaggagaatttaagaatgtgaagagtaccaagttgttccaatgctccctggcatttgatgacttgttggctgaggaacaaaagtatacaagagctttggaagtgattgttcacgactatctgttgcctcttaggaaagccaatgagtccaaaagaaggtctattcttcctaacttcttgcaacaagtggtgatttccaaagatgatctcaataatgtcctctcaaatgtcgaggcattgttgaaagtccatacca

SEQ ID NO: 112985 - DNA, 292 bp, Glycine max
  Clone ID: PAT_MRT3847_73032C.1
tgcttgctcacatgttaggatacttattggatcataactcagaagggctgtcacatacataattattgactaaacaaccaccatctcgtatatatcacaagaatatatcatgctacctatgaattggattgacttgaacacaaacgttatcacccatgaataatgttgacgaagcgagtactataatgaacaagaactctatatgcataaaaatgaaatcgctactagggcatttgaaagtcagccctaccaaactaaaggttggacccaaattaaagtaccctaaccattg

SEQ ID NO: 112986 - DNA, 352 bp, Glycine max
  Clone ID: PAT_MRT3847_73033C.1
cccacgcgtgcggacggacataaatgagctgggtgcacggtggattgcagtattcattgcacgcacaattgggtgtatgccatttcatagaacagcgcgaggaggattagataacagatgtgcagagaggcccaacaattaggcccaattatttaacaccaaattgtaaaggattctttaaagcaactagaaattgcgataactgctgcttcaatagatgcatcttgcccctttcttttactatggaaaatgttcgaatacttgccagccatgcgattccaaaagctacgtgtgacatgcaaatcaaccgtaactgcaacattgaaatgtaatatattgccaaatgtgggat

SEQ ID NO: 112987 - DNA, 1609 bp, Glycine max
  Clone ID: PAT_MRT3847_73034C.1
gttagtggtaatcacaaaggttcttacctaacaatgctaagttccggtggcttagtttttgggattataaacattgttggaaattttggcactgtgtttgttgacaatggatattgggtgagtgccattgctgcaagaccttcatctactcataaggggtacttgttgggaggcttggtctggtttgctgtgccattttctttggctacatcattaggtctaggagccctggcccttgatttaccaataaatgaaaatgaagcaggccgtggacttgttccccctgctacggctgtagctttgatggggaaaggaggtctattcttcttcttaccatgctttttatggcagtaacttctgctggttcatcagaactcattgcggtgtcctcattatgcacatatgatatctaccgaacttacataaatcctaatgcaagtggaaagcaaatcctcaaagtgtcaaggggtgtcgtcctaggattcgggtgtttcatggggttgttagcagttatactgaacaaggctgaagtttctttaggatggatgtaccttgcaatgggagttctgattggctcagcagttcttcccattgcttttatgcttctatggagaaaagcaaatgcaattggagccattcttggaacagtgttaggttgtgttttaggaattatcacttggctgtctgttacaaaaatacaatatggccgggtaaacctcaatacaactggcagaaatgcaccaatgcttgctggaaaccttgtctctatactaactggaggagttgctcatgctgtctgcagcatgttgagacctcagaactatgactggagtaccaccaagcaaatcacagtggttgaaaaggaaaaatctaggaattcggcacgagggtttaaagaagaaaaactaatcagagctaaatcatgggtggtgaagtggggtgttggtttcactcttttgattgtcattctatggcctattctctccctcccagcaggggagtttagtaagggctacttctatttctgggcagtgattgctataggatggggtactgttggttctgctgtgataattgttttaccactaatagagagctgggaaaccattcagacagttattatgggcatgtttacaaatgacaggctcatggaaaaggtagaggagttaaatttcaagttgcagaccatcatgcaggcaatgccagaagctgagagactttacttgcttgagaaggggaaggccaaaaagttagactcctcggaacagcaggctagttctcttcctgcataagatcccaagggacaggaaacatttgctcaaaccaaaaaagaatttccaagtcttgctaatctggttcagacacaacataaatagagcactgcatttgggtcaaccttacacacgagtcacgtgtttttgatgttgcagtgtatatcacaaatgattgaaaagccacagagctgaggagtgtctatgatggatgagccgaataatctcacaaggaaaaacaagtgaacgttgtaatgtaaatgggattcaatttattactgatcttgaatgttcaataaagccaaaatcataggagtgaaaatatattaaaggtaaaa

SEQ ID NO: 112988 - DNA, 308 bp, Glycine max
  Clone ID: PAT_MRT3847_73035C.1
ggacgagatttttatgaacaaacacttcttgacattctcaagcgtcttactccaacggttcagataacttaaattgatctaacagatcaaatttaactgcattgccacacgtcataactcaaaatctgtgacctataatatcggaatgctagacttcgcgcggggtgtcatacaattgtcctaagaaggtgggctatccacatgagcaccttgtttggtgtaatatgaacttgtcgcttttcacaattacataacgagaaataatatctttgctaaaccgaaaaacgggctggcccagttacacaaac

SEQ ID NO: 112989 - DNA, 273 bp, Glycine max
  unsure (1)..(273): unsure at all n locations
  Clone ID: PAT_MRT3847_73036C.1
cacacatcttctttacagatactttgatcccaaagtcagagagtgtgaganatcattaatgagatttaaatatatacttgtaggccatganatgtcttatgtaatgaccaganagagganaatttagttaaatagctattacatgtcatgagccacgtgacaagccaaagatatcctcagaacaaaaattatataaatattagtattaaataataaaaagtnaatctaangcnaggggttgcatcaccaatgaatatcttaaaaagaaaaaat

SEQ ID NO: 112990 - DNA, 896 bp, Glycine max
  Clone ID: PAT_MRT3847_73037C.1
ggctcgaggcaaactgatgtcgttgtgaggatttttaagcaactcttggatttgggcattgttccaaatgtttacttctgctgttctcttctaaatgttctgactcaaacaccaaaagaagagcttggtaagctaacagattgcattgagaaggctaatacaaagcttgggactgtggtaagatatttgatggaagagctggagggtgatgaagcctttagaaaggaagcattagaacttttaaattcaattgatgctgaagtaaagaagcctttatgcaattgtctaattgatctttgtgtcaagctgaatgtgcctgaaagagcacgtgaccttctggatttaggactcatgcttgagatatatacaaatatccagttcaaatcccaaactcagtggtctttgcatctgaaagaactctcagttggagctgccatgactgcattacatgtttggattaatgacttgtctaaggcattggaatcaggggaggaccttcctccactacttggaattaatactgggcaaggaaaacacaagtattcagacaaaggcttggctagtgtatttgaatcacatttgaaggaactcaatgctccatttcatgagtctaaggctggctggtttttggttacaaaggctgcagccaaatcatggctggagtctagggattcaaccgaatcaattgctggtttgaactctctggttttaggtgttccaacaatggtcctttagtattgatagtgttgttttaggaacatgtgccatgttaatctttttggcatattcctattccttttgcggaaattttgtactgtatatttatgtatgaaacttcgcgtgaatacaagtaggaaaacatgattttaatactattttctaatattaatttaaaa

SEQ ID NO: 112991 - DNA, 628 bp, Glycine max
  Clone ID: PAT_MRT3847_73038C.1
ccacgcgtccgatgcctttgtgcaattgtctaattgatctttgtgtcaaactgaatgtgcctgaaagagcatgtgaccttctggatttaggactggtgcttgagatatatccaaatatccaatccaaatcccaaactcagtggtctttgcatctgaaagagctctcggttggtgctgctatgactgcattacatgtttggatcaatgagttgtctaaggcattggaatcaggggaggaccttcctccactacttggaattaatactgggaaaggaaaacttaagtattcagaaaaaggcttagctggtgtatttgaatcacatttgaaggaactccatgctccatttcatgaggctaaggctggctggtttttggttacaaaggctgctgccaaatcatggctggagtctagaggttcaattgctgatttgaactttgaactctatggttttacgtgttccaacttccaacaatgaccttaagtatcgataatattgtttgagaaacgatgtgccatgctaatgtttttggcattttcctattcgttttgtagaaattttgtactgtatatgattgtacagaacttcgtgtgaagaaatacaagtatgattatgaacacatgattttt

SEQ ID NO: 112992 - DNA, 149 bp, Glycine max
  unsure (1)..(149): unsure at all n locations
  Clone ID: PAT_MRT3847_73039C.1
gcgtaggcacgcgtacgtgggctcggaatgccggctcgagnggctctcaattccnanatcnccaancccgagttttgttccattnctnaaatacnanannnatgcatagttcagacacntagttncatancatcattncaganagnnna

SEQ ID NO: 112993 - DNA, 579 bp, Glycine max
  unsure (1)..(579): unsure at all n locations
  Clone ID: PAT_MRT3847_7303C.1
ggttctggtatcacatgacacagtgaaactaactataaagggcatttgacaccaaagcacacatagcaacatcgcaacgtccaataaacacggccgagtctgaaaatagggtttgactttgatttgatcacgcaacaaacacggataaaggacaaggtctaaaggggggaagaaaacgacgccgtagcgcagtagaatagatcaagacgaaggatggtgctgaacatcaacgtggtggcgaaagtggtgcacgcatcggcgcatttttggcaattcatcgcttgcaatcccgagaggttgagcagcgacgtcgttttgcacctcctcttctgcctccctttccagcgcttgtttcgttcactctccacctaccttggctatcgtcatccacactccgattgaaatttcaaattcccattcatattctctctctttctctctatctatgtatgtatttgtttgtcaaaggccgttcgtgcttatgtctctttctaggtttttgtnnnatacattctatttgacgttgtttctgtatgcattgctgaattagttttgtnnnnngaactatccaataggatg

SEQ ID NO: 112994 - DNA, 366 bp, Glycine max
  Clone ID: PAT_MRT3847_73040C.1
aatttttgctgtatggaatatagatgttcaaattagggttttaaagattgaacaccagtttcttaaagattggcccttgtttccgtgtcttttttaaacagatgaaatcaacattctacttaaattgtgcaaatcatgatggatacaaattagcataggtgctgttgcactaagtgtttttcattccaaattcttaaatttgactgtaggaatgaagcacaagataaattatacataaaaaccgctatattttgttggattgtggacacctgtcttttgaatggtgtattgtcaataaattttccaattttatttgagctatcttttgcagttattcgtggttggttggtcagaagatgctcaaga

SEQ ID NO: 112995 - DNA, 337 bp, Glycine max
  Clone ID: PAT_MRT3847_73041C.1
aaccaaaattggcatcccccattttattgctaaatattttttgcctaaaacaggggtctttcaagagttttttgaaccgacgggggtcaaaaatttttttttttaaaaacacaaaaactttttttctttctaaaacatttggagaaacccaatttctgggggaacatttgcttcacctgtttaaacattaatgttttttgccctccttaggaatgtttttggggggaacctttgatttaaattttttggggggggacttttccattgttttggatgaacggggggtttttttttttacccaattggaaatgtgttttactttccccccaaaaacggg

SEQ ID NO: 112996 - DNA, 1025 bp, Glycine max
  unsure (1)..(1025): unsure at all n locations
  Clone ID: PAT_MRT3847_73042C.1
cacgcgtccgctctcctgaataatattaaatttggagacaaaattgaaccctagcaggtccggtgccgccatggccctttaagaagtctcctctccagggcttcaaatacgatttgcccttggagcttcctcgcatcaccccccaagcccgcagccccatcagacctctccctcccatcctgtgcctccaccctctcacccaaaatccctcacacaaatcataaaaaactccttctccttcctctcaatcgtctccctaagccatgcctaaaaggggatccattagccattaagatctctaagtcagagtaccaagctggttgggcagattgcaaaaacatccttcatggaaggttttttctctcaaaaggggatgttcctatcaagatttggggacctgtgggccaagttcttgaccctgtggaagcccattgacccctagtccattgttctgctttgaaagggcttttacgaaattgttttcttctctgatgaagatctgtgaagtgtacgatctatgggaacttggaataatctgaaccctagtgtgatttgccttttagcatggacttaggacttcaatccaggtaagctaaagactacaaatacccattgttggatgtggctttatggtcttgcttatgaatattggcatccacagatcctagtcgaaannnggggcgcaatcgggtctccaattgctctggatgagaatactgtgaaaaaaacatttgggcattacgcccgtatcttagttgactttgatctcaccaacaaattgcttaagcagattttggtagagaggaagggtttgccttcttcgtgggggtggagtatgaaaaggttccacgcttctgctctacatgtattagagtatatgtttgtgtaactgttaaaacatttttgtaagggttattaggttgttagctttgctaactgcacctccctcctccttgttgttaattgttttacttagttaaaaggtctataaatatctcttgtaactaactctctagctaactttt

SEQ ID NO: 112997 - DNA, 159 bp, Glycine max
  Clone ID: PAT_MRT3847_73043C.1
gctaactaattaatagctagcacttagcacaagagtatatattcccatgaaataaaaaagaattgccagctacattagtgtcaaattaggtggaattatggggggagggggtttggcaaatggtataggaatctatgagcttgctttagttcggtaaac

SEQ ID NO: 112998 - DNA, 494 bp, Glycine max
  unsure (1)..(494): unsure at all n locations
  Clone ID: PAT_MRT3847_73044C.1
ctagtcttcggccgccctcttcttttttgtgtttttaaataacactcactcctcccttcattgcgccgtttctttgcatggtaggatttggtaatttgggcgaagcatccttcacatgaggggcttgccccctctccctggtggagtttggcagagcttcaggactaaagtaaaactcgaaattctcgaaagagcgagaggttttacggcttgtccaaatacatgggcgtcccgctgcggctctgatggcttgggttgtccatattcccgtgctttggggcttgttagagcatcgcctgcaattcccagtgactgtggactgggtgggaaggtgcctaccgtaacccatatgccttcatatgggctctgccctctcntaactggcccttttctttccggctcctgacctcatacccttttcgggaagatggttggcctcgaatgggggccgggggttctccacttacatgcgtttctagctcccggacgttggt

SEQ ID NO: 112999 - DNA, 512 bp, Glycine max
  unsure (1)..(512): unsure at all n locations
  Clone ID: PAT_MRT3847_73045C.1
cgggccgacccacgcgtacggctgcgagaagacgacagaagggggagtagcaaaaacagagaagagagttgctaaagattatttttgtagaatttaaaagaggatctcacataagacattatttatttgaatttattacacaaatattatatatataataagttgttgattttcataataaacatcttgtaaaataatttttaattgattgataatgtaaaaaatactaataatatatgtcaagggatctaattcattagttgagaaaatacattagttatgttgttttttattcttataatatcaaattttaggtttgaatatttttacttattttttatataattagaagagaaatgaaataaaaaagacataaaataaattatgaaataatgttacaaagacaggagaagtaacgcgagaataaagaattaagtattggaaactatattgaattaaaaaatgtcacataattattacagntatgtatatatatatactctactttttag

SEQ ID NO: 113000 - DNA, 569 bp, Glycine max
  unsure (1)..(569): unsure at all n locations
  Clone ID: PAT_MRT3847_73046C.1
gctcgaggccgnngccgggccgggttccaaaaaaagaaaaaaaaaaaaaaaaaaaattaacaaaaaaaaaaaatttaggcaaaattggaaagtttcaaacggatcatcaattggttaggagatatttgtttcaagtttccaggtaattggacttgggaatatcatattccttggggttcctaataaatagtggtcggacattatctcttttgttgatgtagttcttgctcgtattcgcccttttatgacatttcaacacttaaagatctcgattttaaacaataagtatgataataaagtgaaaaatggtctttaccggaatgattctctctatttatataaattttgttgaaccttgggccttcgtgagcaaattaccattgagatcatatgcgcctaagtgtgattagggggtctaaatcgttaatccttttagattatggtatgtcttgtttcttaaagggttagataggtatttagcaaactaggcagaatacctattcggtgtaccaggtttggtataaaatttgtaaaaatattcctagtaaatatttgattcgaaggattgt

SEQ ID NO: 113001 - DNA, 787 bp, Glycine max
  Clone ID: PAT_MRT3847_73047C.1
gcacgtgtgtctttagcagtgagtgttatatcgggttgcattggaggttccatcatggtggctgctagaggggtttgggggaatttgtttagtcatcaaaaaggggttgtaaagggtgtggagaaggcaatgttgctgatggctctggtcgaagtgtttaattttcctgtgacggtttgtcggaggcatagtacgaggaactggacgaccctggctaagcatgtatgctaagtcttggtgggttctatttcctgacactaccattgggtgtggtttttgccttcaagcttcggtttggacttggtggactccttataggactcctgattggtattgctgcttgcttggttctgttgttaacatttattgtgagaataaattgggtggaagaagctaccaaggcacaaacgtttgtatgtaacgcacaggtacatgaacaagtttcaagaaatgaggtaaatgaacttactgaaaaccctgaaggtgatcaagtgtgcaaagaaacctctatcaccccatattcatgtatataacacttggtgaggaagaatcagaaacgtatagaagtcgtagacacactcaagagtcaaaaccggtgatcatactccaatgttcattttgctgagtcctttctcaataccattctgagtgtttgcgatctcggatttgaaaattacaagattatgcattttaaatcaataggtagaagtagaactacccgttggtctaatatttgtattgaatgatcagaatgcactcaaggaaaaactatttagttcgtacatct

SEQ ID NO: 113002 - DNA, 102 bp, Glycine max
  Clone ID: PAT_MRT3847_73048C.1
aggcatgcttgtgagggctgctactggaaagggtgttacttatcaggctcgtaacacaaaagatgtcactatggaagtggataacatgcatgaaaagcagct

SEQ ID NO: 113003 - DNA, 380 bp, Glycine max
  Clone ID: PAT_MRT3847_73049C.1
gtgcttgttcgcgcgcgctatcttcaacccataccctttgtgcggtttccccccagaaaaacatccttccaaataaggtgcgccgtgactaaaaccagtctcggttcaggcgttttgggcacctttaaaagttgggggctggctctacctttacctgagggtgctcctttgtaagattaagatggaagtgacggttttttcaaacccggttaaagtttgggggcaaaggactgctttggttttcttggcccttttttttgttggtttgcgtttgggaattttttttcaaaaaaaggtggttttttcttggctgaatggggaagggacccttgttttaaataggataccaaagggttttttaggggggtttaaaacctttt

SEQ ID NO: 113004 - DNA, 630 bp, Glycine max
  unsure (1)..(630): unsure at all n locations
  Clone ID: PAT_MRT3847_7304C.1
annnnnnnntagcttgaataagcatccnnnnaaaaatctaaaatgtttgatttgattttgcaaaatatttaatatatgcactcgcaaaattgtgctgtagtatgtaactcataccaacaatgctcaaccaatgcatcatgttccattcgtcttgagctactggcctgtggtgttgggaagcatgcaccattcaacatgcgacttttgttacttaggtctccgacatccaatacagttctttatatgctttccttcctcagtttctgtttgagctagcaattttcctcaatggcattgatgcagttgttagagctgtgggaaaagacacggggttccagatcatatccataagcctcagaacatttgaacttggggatagataaaacaaaattcttctcttgtgatgcatatgaagaagagaactttttatgaagccagcgagttcggggaaagcagtcagactgattctctaacccaagggttgatggagctagaagctcatagttgcatccctcttccttgagagaatcaacatcctgaacaagaaattcttggagtctctcgatctggcctattcacaaacattttccttgagcttagcaaatttccttcagtacttctcaaagtagt

SEQ ID NO: 113005 - DNA, 236 bp, Glycine max
  Clone ID: PAT_MRT3847_73050C.1
tcgtgaatgtgttcccaggacctattgggttttgaatccacaaaatccttttgtgtttaataggcggatgggaaaactgactactccacagcgcactgaccgaactgcttactgaatgcctctgtgtatagcgcgcggagctggctctaagaatgactttttcacgtatctgtcagaagcatgtcttctaaagtgttgatattgtgttgtatgactctaggcatgcatttctaaga

SEQ ID NO: 113006 - DNA, 226 bp, Glycine max
  unsure (1)..(226): unsure at all n locations
  Clone ID: PAT_MRT3847_73051C.1
gactcgagcggagcgaggaatttcgatatttaaaaggcaaaacatatgtgaactgacttgctacaatgcaagaaagacttttgtgctgatactattatgcaggatgttaggttcaannaactacattaactctttaagtattatccacatgggcatcatagcatccacaaagaaggaaggcctgtttattattaaagactttgaaaggtcgatccaaacaaactta

SEQ ID NO: 113007 - DNA, 343 bp, Glycine max
  Clone ID: PAT_MRT3847_73052C.1
ggatagctgagatggatcaaatgtctgctccttcattaagggagcgtgcacaaccgcctatttgaaaagaaccatgcaggccgagagcaagtcgggtgaggtctgctcatgtgcaccgcccatctgatcctaatgcttgggaacaaatgcctgagatttatgaatcgattattctttaggatcaagctttctactgagccagccattattgaatatgccctttcggcagctggattataaacagattgatgagtttaggccatacttcaatggcgctctttattatgcaaatacatactgatcttatgtagttgaaaggcccttcgcgacctgatagataagt

SEQ ID NO: 113008 - DNA, 280 bp, Glycine max
  unsure (1)..(280): unsure at all n locations
  Clone ID: PAT_MRT3847_73053C.1
ctcttattaaaatgataggatgttgtaataagagcntganacgntacntnctatcttttanttctnaanctgaatgttaacttctatctaacagnngccagaaataaaagatagaaggtaacctttcacgctcttattaanatgataggatgttgtaatatatatttagttcactatgtgtatgcattttctaacattgatattttgtnaacagcggttatntgtcgcncggatatgcntgctggacaatttcagaaagtcagagttttagtctggagtt

SEQ ID NO: 113009 - DNA, 436 bp, Glycine max
  Clone ID: PAT_MRT3847_73054C.1
catgggtcttgagaaagaacttggctatacatcaagttgtccctcaggacaagaaggaggctgcgatcctcctcatggctttatcttatggccttgttcattgatgaaccttaatagctagctagagctaccaccgcttcacttaatttcagatcgttaattaattaggttaatttcttgccttgctgtcttatgactagctagtttttgttagattattattattgtgtgagatcaatggtttgagttatatgtgcgagaagagtatgtaatattgcagtactagctagttagttaggaaaggggagggaaaataaagttacatgggtgtggaggtgatcttatgtacttcatataatattatgtctgatgtgaacatgttgaggaccaaaaaatgtgggtctcttcttgatgtatcttaaaaataagttcaata

SEQ ID NO: 113010 - DNA, 821 bp, Glycine max
  Clone ID: PAT_MRT3847_73055C.1
ggctcgaggctgtagcaagtgggtaaaactctctggtatagatcttttgcctggtgatgttgtctccataggtcgctcttctggtcagaatggggaggagaagtctgtaccagcagacatgcttctattggctggaagtgtgattgtgaatgaagcttgattctgacaggcgagtctactactcaatgggagatttcaatcgcgggtagggcgatggaggagacattgtctgcaaagcgagataaaaaccatgtgttatttggtggaactaaaatattgcagcacactccagataagagttttcctctaaaaacacctgatggtggctgcttggctgttatcttgagaacggggtttgaaacaagtcaaggaaagttgatgcgaacaatcttattctctacagaaagggtgactgctaatagctgggaaagtggattcttcattttattcctggttgtatttgctcttattgctgctggctatgtgcttgttaaggggctagaagatcccacaaggagcaagtataaacttatactaagttgttcacttattggtacttctgtgatacctgagttaccaatggaattatcaatagctggtaatacttctctgagttacttctgtgattcctcctgagttaccaatggaattatcaatagctgttaatacttccctgattgcactggcacggcgtggcattttttgcacagagccttttcgaataccatttgctggaaaggttgatatatgctgttttgacaagacagggacactaacttctgatgacattggattttccgggaattgttgggttgaatgga

SEQ ID NO: 113011 - DNA, 216 bp, Glycine max
  Clone ID: PAT_MRT3847_73056C.1
tctctccatctactatctctcttttccatctcttccaccaatatcttcttcaaaaatcttttctattacattttctaaaatctattttttaaatcatattataaaaaacatcataacctaacttcttaatacaaccacacctcttatcaatacaattcaaactctaattacaaatttattcataccacttattattacctattctatactattttc

SEQ ID NO: 113012 - DNA, 357 bp, Glycine max
  unsure (1)..(357): unsure at all n locations
  Clone ID: PAT_MRT3847_73057C.1
acnnnatttttttttttttttgaaaaccatttttttgacgcataggtctatgacgatcagaggggacttatactgactagccagtgagacaacgatcacaaccacattgaaacagggatggcaacagtggacacttgataagaggagtgtctaaagacacctgatgatttggttgacagtgggggaataaatcgacaacttaaacccaagcttgccactaaacaacacctaactgaggtccaaactgccaccccccctggcggcataatcaaggagcaaaagttcttccatgcccaatacaaacgtggcagaagtgcttgcactaagaaagctgagcccagacctggaaacatcatc

SEQ ID NO: 113013 - DNA, 292 bp, Glycine max
  Clone ID: PAT_MRT3847_73058C.1
atctggcaaatagaaagagggcacattagttatttattgaaacagggaaatgtcaggaacaaccttggatttctttgacatggaaaaatcctggatttcaacttacaagcatattcttttgaaacgaaattccatccggtaccactttaatggtaaaaaggttgggcacctaagtttcctttagaaaatatgagagggtcacacttcatcaaatttattttgaagcaaaaaggctttcatagtggcctttgaaaaaggcaaaaactgggtttttagggggaaagcccttttt

SEQ ID NO: 113014 - DNA, 336 bp, Glycine max
  Clone ID: PAT_MRT3847_73059C.1
gaaagtcgagaagattattatggacatgtatcaactttggagcaagaaaataacgttgtgatcgttcgcctttgttccgcttttcctatcggcctcatcagacgacgtcgttgtgcgctctgaagataacttctcagaaagaaattggtcacgactgatgagctctcgttgagttctatgctccttgttgtagacactgcgaaaagcttgctccagaatatgcattgcttggtagcagcttcaagaaagccacatctgtattagtccgcacagttgactgtcaccatcacatcaattcgtgcaccatatatggactctctgggtatcgaacaattc

SEQ ID NO: 113015 - DNA, 486 bp, Glycine max
  unsure (1)..(486): unsure at all n locations
  Clone ID: PAT_MRT3847_7305C.1
tttaggtttaatgggtttcaccggggagcaataaaaaaaattgccgttttttataaaacaattccaacgangnctgccaaagaaatatgatctttgcaaattggtgcatctttatggattctttgattgccccatatcgtcaggcatatagaatatggtgtcttacactcatatttcataagtttgatcttctggttaaaaccaagcatcacactagtttgaatatcgacctcttataaataatcctgcaggaatgagtaaaatccttaacctataagcatgaagattccatcattctactaaacaatgtatgggcaaatatgccaaaatggtgtgcctatgatgttgaggtgaggtgccaagaaaggggtcagcatctctagcttattgaggggtaccccacctctggacccttaggcangcctctgggggtcaactggtcaagcatggcatgctcagtgcctaactgtggatctatgaaccccc

SEQ ID NO: 113016 - DNA, 604 bp, Glycine max
  Clone ID: PAT_MRT3847_73060C.1
gatccagttgccctcgaagatgtgctgcatctccaattcgaagatgtcggggtcggtgaagatgtcccgccggcagcgatagattccggtctccgggttctcctcgactgcgccctcgaccatctgatgcagatcgtccagcatgatgctctccctgtcgcgccggctgttcttgtgacgagggaggtcgttgccgatccacggggtgcgtggccggctctgaactgtctctcgtcttcacgcagggtggcagggtgctcgccatggactgtctcgtcccgagccccgctcgctccctgagcgtttcctctttctccagttctaaggaacgggcataccgaggtccaagaccgattgggaacaaaaccattcctgggaggaatgattggagctgcgccacctgcgctacttcgtggccgtcgcgcgcgagcagagcttcacccgcgcggcggaggcgatgcacgtcgcccagccggccctgagcaagcaggtgcagcaattcgaggaggagttcggcctggcgctgatcgagcgcggctcgcggccggtgcggctgaccgagccgggccgggtgatctacgagcaggcgctgcagatcctggag

SEQ ID NO: 113017 - DNA, 463 bp, Glycine max
  Clone ID: PAT_MRT3847_73061C.1
gggttctgaacttctctctctcagagagatcccctttttttgttctttctctgctcattcgatcttctcgatcaggttctccgacattctcgcgcccaattctttaactttctttgaccctcttcgcgtgtctctccacgaaattcggcctcgcgctctcgcttcttcgtttgctctgtttttctcggaatttcaattcgggattagggtttatggggtgtctcgcgcgtttggcctcgtcgagtgtaattttcctttctggggttctacaagttacgattttaacatcattcgcggcttcaatttaatgcgggtatcgtgatttgttccccgcagcgcgaaccatgattatcaaacggaatttgaaatcccaaatgccgagtctgaaacgggtcaaactcggtgactcggtgggcgaggatgatgagtattcttatgctcgttagaagagaaagaccaacaa

SEQ ID NO: 113018 - DNA, 670 bp, Glycine max
  unsure (1)..(670): unsure at all n locations
  Clone ID: PAT_MRT3847_73062C.1
tctcaagtgatattttcatgctgatgttgctttctttttttgaattttcctacatatagaatttatttggttgtgttactgttattatcattgctaaagtagttggttttagtttgcaacctttcagcttgatttgttcacatttgcactgaaaagcttcagcgtgggtgagctttgattttggtggatgtaattttagatcttcagccgatccagcttaacagttgagattgggggagtgatgtgacatgcaatacaattatacaaatgagattgtttgaaagtgggtattagattctatgaagatcagacaatagtgacaccaaaaactctgtttttaaagttagtctttttcttcgtgtaaaatcattatcaatcacatgttagtgttagatccgcttgcatgtgtgctagaagaaaataaaacaaagttcggatgaaactatagttgaaagagagttaagctcgtttattataaggtcttcttctgctagaaattgtgcccccaaactaccttatagattctaaatcagntctagtaccttttttgttaacatataaattctttgtgcttagataattattagatctattttgatggtttgcttggttttgaggctcattaatttcagtgtacacttgctatcgctttgagagggtactggcatcc

SEQ ID NO: 113019 - DNA, 550 bp, Glycine max
  Clone ID: PAT_MRT3847_73063C.1
ttccaaggaagcgtttcccgtcatcactgtatgacgctccgtcctgtcatttgcgggggcgggaggcggggcagccgcagctagatcactgctacagagtcagctactgacaaaccaacgagcgtacaaacacaaggcatatgtaacaggccaaagctgaaatgtcgcgtaaccggtgaagggttgagatatgagggttactattggggcagcgctactgtaaaagaatggcaccaaagggggaaaaaaacctaaggcgagaatggttatagcggatgggtgtgaccccaccaagaaggagagaaataaaaacgcgaaaacgaaaagtaatggcgcagtactacgtaggataatggggttgatagcgattagaagaagtaccacagttaagtagcaatatacccgggtcggcataggtgtttatcatgcgtttacctcccataatgcgtagtggtagtacctaggtattattagtgaagcgcctgcacatgggattgcgatgaaggccggggcgtagacaacgagggaagcgtacattatagagtatttg

SEQ ID NO: 113020 - DNA, 361 bp, Glycine max
  Clone ID: PAT_MRT3847_73064C.1
tcgttttattttcggtaacagttatttgcgatagcatttttaatgagacgctcattagatgtagctatgaaaaatgactgcgccaggctaaagctgcaagtatgttcgtacaatccttcaaaaatttagtttctttgtgggtgtatggtgatgataacttacttagtgttgatgaatgtgtcaagccttactatagtggttctaaactgaaaagcttgctagctggacataaaatccccattgctgatggtattgacaaaactagtgcgactctgcaatgaataacagcagcagactgcgattttctcaagagaaactataagcagatgtctcatgttttttgggcggtccctggggacaa

SEQ ID NO: 113021 - DNA, 271 bp, Glycine max
  Clone ID: PAT_MRT3847_73065C.1
ctttatgttaagtttgtcaagattactttgcttgtcttgattttatggattgtaataagagaagagagatgctctagatagtctctttaagtctgtatcccatgttcttattttcagttttggttgtttacctaaatctggttgaaaaaaaaccacaatagttaataatttctgatttgagttatttccttcatttttaatacttatcctttagtttctcgtgttatgcatccaccataatcttggggacaatgtatgtctttaatggggt

SEQ ID NO: 113022 - DNA, 306 bp, Glycine max
  Clone ID: PAT_MRT3847_73066C.1
ggttttaaggctggttgttattgtcgttgttgtttttgcagagcatgttgatggatataaagctgaatccgatgcagcattcaattgcaactttgcagaagctatgcatgaggtatcatatataccaaaacaagaaccctctccttaaggccaaatgaagtgggagcttaattaattaatccattgacggaacagctgcacgtggaggcccaaatttttgacacatggtagagaaacacatcctcactgtgacatcgttgagaaattttgctaatgcttttgaatctatgaattatattatgcgga

SEQ ID NO: 113023 - DNA, 585 bp, Glycine max
  Clone ID: PAT_MRT3847_73067C.1
cccccccccccccccccccccccccccaaaactggatatgtctaattcaaagctgacataccatgaattaactcttattcatataaaaattttctcgatacaattgaaatttataatttaagtcaatgaaattgattaattctatgtacaaattacaaaatgaataattctatgcctaactatctatctttaaatcgtaaatataatacgtaaattcatacattgcagtacatctaaacaaaaaaaatggtttacatcatcaaaatcagctattgtctgtagctctgcattgaacacaaaactttctgcaagctcaatttgaaaatcgaaaaacagtatcaggggtttccttacaaattgattataaatgcaaaggtatgatcaaagcttaactctcctttaaaccagccaagatagtgttctgagcattctagtaacaggaaacttccttccagtcctttccctgaaagcaacctggggtctttctttgaatcaaaacctccacgaaagacaaagtattgtcttcagaagtttcttaatgattttgctcggaagttgaagtagcaatgcttccattttaagcat

SEQ ID NO: 113024 - DNA, 591 bp, Glycine max
  Clone ID: PAT_MRT3847_73068C.1
aaaaaagtgttcttagcacttctatttattacttagtacaggattttaattttaacgttaaaaatgagacaaaatttacatgtgaatctggacaagtccatgctgacaagaagtttgcctcgtacttcttaaattaacgtttttttttaagcacgtggttgtttggtcccatcgtgaaatttcatgtcgtgtctcattttattgttgtagtgagaaataggaaaggatatttatctatggcgatttgcaagttgaaatctttgctttctctttcgaaatgcaactctgcgttggtctcctcttcaatacgcgctttctcttcggcacaggttccccctaatcacttgcggaatgttggattcattgggcttggaaatatgggatcacgaatggcaaataatctgatcaaagctggattcagactcacagttcatgacctgtaatttttaaacattttcttgatcttggatatataaggccacagattgaattcctctgctaacaatacagacaactaacatttgctaaaaaatataaaataaaaaaacatgcctttgttcttaagttcgtccctgtgtagtgctactatat

SEQ ID NO: 113025 - DNA, 151 bp, Glycine max
  Clone ID: PAT_MRT3847_73069C.1
taggtagaagatagattgcatgactatatgtgttgtctatatggtaaatgtgtgatctatatgatttagaagtattagatatagtatgatgtatagttgtatgatgcgaatgtatagagtttatgctctgcgcgtacggtcacgagctcgt

SEQ ID NO: 113026 - DNA, 459 bp, Glycine max
  Clone ID: PAT_MRT3847_7306C.1
gtggttttggtctagaggcaatcgcagtggcggacaaaagcattgcgctctgggcaggggaagtattcgctaagacttgccgagagatcatgaggcgccgatctcctcagattgatgatgtgagaactgataatagcagtaggccgtcctacactctagtcctttcatgatagcagcggctcggaatgtggtcagctgttgatgaatgaaatcatgccatcgcaccaaggtgactatactcgtgattctgcattgatgccacttacttgattcctgtctacgacggctctgtcataccgtacctcaactcaagttgcatgaacatacgacctcgagcgtctcttcggacggtcttctagtcttgcaacgttccagtggtcatatggtcctcactttctgcgcacacaccaaagcatctatggctgtctgtgcgaatcgtccaaattgtgagagtgatga

SEQ ID NO: 113027 - DNA, 3307 bp, Glycine max
  Clone ID: PAT_MRT3847_73070C.1
tacggctgcgagaagacgacagaaggggggcgtcaagattgatagttatccataagttatgtttatccttatttcattattgaggagttatatcaatttttttctaacacattttgttaatacattttttcttatttgttatatattataatattatgagaaaaatttattaaataaggtgtgagcgtctaaaatcatgtgattttcatacatttcttagtaagaaaaaagtgttcttagcacttctatttattacttagtacaggattttaattttaacgttaaaaatgagacaaaatttacatgtgaatctggacaagtccatgctgacaagaagtttgcctcgtacttcttaaattaacgtttttttttaagcacgtggttgtttggtcccatcgtgaaatttcatgtcgtgtctcattttacggctgcgagaagacgacagaagggagtgagaaataggaaaggatatttatctatggcgatttgcaagttgaaatctttgctttctctttcgaaatgcaactctgcgttggtctcctcttcaatacgcgctttctcttcggcacagaatgttggattcattgggcttggaaatatgggatcacgaatggcaaataatctgatcaaagctggattcagactcacagttcatgacctaaactctgatgttctcgagatgttctctcaaatgggagttcccacaaagaaaacaccttatgaagtttcagaagcaagtgatgttgtaatcacaatgttgccaacttctgcccatgtgattgatgtttacactggaccaaatggtttgcttcatggtggaaaactcctaaggccatggttgttgttagattcatccactattgatccacaaacatcaagaaaccggctgcgtccggcgatttgcaagttgaaatctttgctttctctttcgaaatgcaactctgcgttggtctcctcttcaatacgcgctttctcttcggcacaggtgattgatgtttacactggaccaaatggtttgcttcatggtggaaaactcctaaggccatggttgttgttagattcatccactattgatccacaaacatcaagaaacctttctgctacagtaactaattatattctaagagaaaagaaaggtgaatgggaaaaacctttcaagttggatgctcctgtatctggaagtgttactgcagctgaagctgggacacttacttttatggttggtggctctgaggaagcatttcttgctgcaaagcccttactcttttcaatgggtaaaagtgcaatatattgtggtggagcaggaagtggttctgcagcaaaaatttgcaataatttggctttggctgtgagcatgctgggaatatcagaagctcttgctctaggccaatctctaggtgtttctgccagcaccttgacaaatatatttaattgctccagtgctcgctgttggagtagtgatgcttacaacccagttcctgggctgatggaaggggtgccctcgtcaggggattataacggagggtttgcatccaagcttatggcaaaagacttgaatctagcagtagaatcagctaagctggctggatgtaaatacccactaacatcacaagcgcaaaagatatatactgagctctgcagcgttggccatgaagccaaagacttttcatgtgcttttcgccattattactctggaattgacgaacctcatgatcagtaaattaagacgttggttgtatgcataaaactgttgtgatcccatgcctagtatatatggcaagaagatcaattgagctcaatgaagttgtagaaacagttgcgagttattcttgttttcaatcagaaatagtgtggttccgcaagacgagcaaatatcaaaacacaaattctaaacgagtttgggcgctctggggaacccttggtcaacccccagccttcactcgacagtgtctgtttgtatgctaagaaattccatagactctaagaaactccatttggagaaaacataaagacaaccaaaacttctctccacaaaaacacttaggcaaacacatccatgatccaccgcacagtattttgcaatattaagctccaaatctcttctaagatcgtaagttcctcggttagttggttccttctgcataaatcattgacagctttcagtgctttcctccatgcttagattttgagggtatcttcccatatgctttaagcctcgattgtgataatttcaaattagccacttgtcgccttctcttggctttccttgatagattatctgtattaatatttgattcttctgtgcttggtttttcgttctcaacactttttgatgaagttatcttgccagaatcaacctttgaattcttccttttcttcttatccaaacttgacatccgaaggagctccttggctctcatcttcagcatgtatcttttctgtttgcttagtttccattcctcctcctggtaaggagcaagctttttcaaggaaatatactgattcaattccttgtcatccatcaatagtatctctgaggcactcaagccaaatctacttgattttgttttggcatacttgaatcttgtcttcaggtccccaattgtgtcctcataatctaatttatagtactcatccatcattgcctgtcttgctttctccaaaagtgctgttttgcgcttcctcttccgactaccttcctcaggaattttctcttctttttcatcttctccttccgggagatcgtcatcactagtattctcaaacctttcgttttcatcttctgcttcagggagatcgtcatcactagtattctcaatcttttctttcaatgctttttcccttgcagctaaaaacccaccattagatccgcatgcatcccagcctttaggaagcccaagtaattcatcctccttttcaaaatctggcttctcaatgtcatcaatgtcactacaaaagtcaaggtcagcatcctctgcattataatatttctcgtcaaatgccttcttcatcattctgtcatactcctctgggtcaaattcctcttcaatttctgccatggacaatggaataatatcatcaccatggatccctgcagtcttcattatctttttaaccttctcctgtatttcctgcttcttcaaattctttaagcgtttcaactcctcctccctctccttttgttctatagccattctctcctctttgctctttctctgctctttccttgcattcgtcttcttcctcactgatccctccaccttccgagcatgacccaacaccctatctcctggattttcctgaaatc

SEQ ID NO: 113028 - DNA, 335 bp, Glycine max
  Clone ID: PAT_MRT3847_73071C.1
ccaaagggaaaggaaaaacctatatatatatatatatcacatattaccacattaaatacatcacttgcccatatccttatatggaaataccaccaaacctgaaaaagcaatcttgctcacaccgaaggataacataacgcaaatactacgcattcaggttaaaaagcccatttcttgctttaaaaactgccaaattattccccaacatcaaaagggggacccgggtgtgtttttacttggaaacaaaaacacctttatcctgaggcaggaagtggcaaacaggaacagctcctggctgacccttaagcacttaaaccgccaaatgctagggattc

SEQ ID NO: 113029 - DNA, 602 bp, Glycine max
  unsure (1)..(602): unsure at all n locations
  Clone ID: PAT_MRT3847_73072C.1
ggtatggccagaagctctgcacatagagccagcagatgtttttgctttttcnatatgtcattccgtactgattaaatatttaattgtcacacgatgcttcaaacaattatgatgtgtgcacaaggaaccctcctttgactttccgtgccggaggactgaagcatgggctggaaaatgattcctattttcttgatgcattcttttgttaattgcacactggcagcgagtaatgagtgactcattggttgccttgatcttaaactgtttggatggtgactcttgctgcaactgattgtcttgattttttactgattggaaggggaacatctgttggtactgccagattgggggtgcagctctcaccttgtgcgtcgtagtaattcatttagacaacagagaatttgtacaggttgtggagagggggaggggagaggtacaagcttgtgcaacttgtttttctttttttgctgaaagctgagctgctctttctaattgagaatgggaatttgtaagtgaaactgtggtctttgcaactccaccacaattttgatttgtaacatagaactcttattttacgagaantatgtatgatagagaagggg

SEQ ID NO: 113030 - DNA, 1709 bp, Glycine max
  Clone ID: PAT_MRT3847_73073C.1
ggaaaggatatctatctatggcgatttgttttattgttaatctttgctttctctttcggagatgcgactctgcattagtctcttcttcaatacgcactttctcttcgtcagaagttccccctcgtcacttgcagaatgttggattcattggtcttggaaatatggggtcccgaatggcaaataatctgatcaaagctggattcagactcacagttcatgacctaaactctgatgttctcgagatgttctctcagatgggagttcccacaaagaaaacaccttatgaagtttcaaaagcaagtgatgttgtaatcacaatgctacctaattctgcccatgtgattgatgtttacactggaccaaatggtttgcttcatggtggaaaacttctaaggccatggttgttgttagattcatccactattgatccaagaaaggatatttatctatggcgatttgcaagttgaaatctttgctttctctttcgaaatgcaactctgcgttggtctcctcttcaatacgcgctttctcttcggcacaggttccccctaatcacttgcggaatgttggattcattgggcttggaaatatgggatcacgaatggcaaataatctgatcaaagctggattcagactcacagttcatgacctaaactctgatgttctcgagatgttctctcaaatgggagttcccacaaagaaaacaccttatgaagtttcagaagcaagtgatgttgtaatcacaatgttgccaacttctgcccatgtgattgatgtttacactggaccaaatggtttgcttcatggtggaaaactcctaaggccatggttgttgttagattcatccactattgatccacaaacatcaagaaacctttctgctacagtaactaattatattctaagagaaaagaaaggtgaatgggaaaaacctttcaagttggatgctcctgtatctggaagtgttactgcagctgaagctgggacacttacttttatggttggtggttctgagaaagcatttcttgctgcaaaacccttactcttttcaatgggtaaaagtgcaatatattgtggtggagcaggaagtggttctgctgcaaaaatttgcaataatttggctttggctgttagcatgctgggaatatcagaagctcttgctctaggccaatctctaggtgtttctgccagaaccttgacaaatatatttaactgctccagtgctcgctgttggagtagtgatgcttacaacccagttcctgggctgatggaaggggtgccctcgtcaagggattataacggagggtttgcatccaagcttatggcaaaagacttgaatctagcagtagaatcagctaagctggccggatgtaaatacccactaacatcacaagcacaaaagatatatactgagctctgcagcgttggccatgaagccaaagacttttcatgtgcttttcatcattattactctggaatggacgaacctcatgataagtaaattaagatgttggttgtatacatgaaaatgttttgatcccatgcctaatatatatggcaagaacatcaattgagctcaatgaagttgtagaaacagttgcaacttattgcaaatagtgagattccgcaagacaagcaaatactaaagcactaattttaaatgagtacatgcaatattgaaaacagagacgagcaccaacttttggtca

SEQ ID NO: 113031 - DNA, 493 bp, Glycine max
  Clone ID: PAT_MRT3847_73074C.1
gcactaaacctttaactggatactcatttggtcgggatgggaatataatttatgtttgtactgcttactatattacactctcagagctgaaagaagctactaataatttttcaaagaatattggcaagggaagtctttggatctgtttactatgggaaaatgaaagacggaaaagaggtggcagttaagactatgactgatccatccagctattggaaccagcaatttgtaaatgaggttaccctcttatcaagaattcatcacaagaaacttggtacctctgattggatattgtgaagaagaatatcagcatatactagtttatgaatatatgcacaatggcactttaagggagtacattcatggtctaatttctcacctttttgttcatttatttacctagttgtaaagttttcgtcatgaaaataattctaatgtcgtgacagatagttcgagtcagaagcaattagattggttagctcgccttttaatt

SEQ ID NO: 113032 - DNA, 756 bp, Glycine max
  Clone ID: PAT_MRT3847_73075C.1
ggcttctcctggggccctgatggaaagatctccatcatcaacaagcattgagcgcaggtatgtgaatagaagtagtgttaagcggaatcttgaaattgacgaaagtggaaggaggaacagtactaatgtaagagatttctctgcttctgatgatagacttggcagggagtctactctagagaaaccgctcttggatgagccctctcaagcagattcatctttatatggtaggactaatcagagcaatgcaccattgatttcacctccacctggtttcagggctaccttagatagaccttatatgggttctttagaggatgatgttagagataactctaattcacgatacagaagaagtagtgaacctggatttggaagaggacatggtggcaattcctggagggcagttccaaactggaattcaccagtaccaaatggatttgttcccttcccccctgggccagctcatggaggttttcaaacaatggtgccgcagtttacatctcaatctctctttggtgttaggcctcctatggaagttaaccacgctggcattccttatcatattgctgatgctgacagatttccaggtcatttgcgcccacttgggtggcaaaatttgatggatggtacaggaactgctcatttgcatggatgggataacaataatggtgtcttcagagatgatcctcacatgtatggcggttctgattgggataggaacaggcattccactaatagtcatggatgggaatc

SEQ ID NO: 113033 - DNA, 752 bp, Glycine max
  Clone ID: PAT_MRT3847_73076C.1
cagtgttgttgttgcattgtgatcatcacacatgacgtgtcactcctctattggcacgcgtcacgtgacaaaaccccccttcccggtttgtccccataacccaatccacatgacccaacccacacacaccatacatcaacattcaaccacaacactacactactctcccaccgaactaatgttcttcttcttcctcgtccaattccaacaccaactacattagtaagtaacgaattaacaacagagagagatagagatagagatagaataataataataatattaataataataataataatgaataacggcgttagtcaagaatccggtgtgctcctcgatttggcatcccacgtgaaccgcttcgccttcgattccttccgttccgactacaacaacagcaacacccttctctccaatttctcgcaattcaacaacacaagaaccggagaagcggcagtcaaacgcagcgtttcgctggggctgaaggttgggggagcgagtgtgcggtttaggaacattctcaatgacttcaacagagccgttaggtttcactgcgagaagatcccgattgggttcgcctcgcttcgcgtcggtgacggtgacggtgacggtaacggtgctgatggtaacgggaatggtgttagagtggatgagtggtacggtgtggagaatgaagggtttagaggggatggcgtggagggtgagaaacctaaagaagttttgattttgatgagtgacactgggggggg

SEQ ID NO: 113034 - DNA, 302 bp, Glycine max
  Clone ID: PAT_MRT3847_73077C.1
gtttattagaccactacttaatggtacaatgagatagtatagccagtgaatatagttagcagcttgtgatgtatatatatgcgttactgatgcccaacaaggttctatatatgctatatcaagctatacatgcacacacatgtatacataatgcaacactttactgcacatgctacttcataatgttaacccgctgtatgcttgatcccattcaatataatttctttactattaggcctgatttgctgtagtacgttgatgcttctagttataatatcttccacagaaaattgttgtaaaac

SEQ ID NO: 113035 - DNA, 826 bp, Glycine max
  Clone ID: PAT_MRT3847_73078C.1
ggctcgagcttgagtgagaagagatcccgcagcactggaacttgcaatctcaatgtcagaaacttccgatgagattgataatgttgctgattcagtagttccttcagtctatgtgggtcaatttgcccaattactcgagcaaggagataatgttgatatgctacctctcactgatgaagaatacatccactatgccatttctgaaggaaaaaggttccgagattcacttgaaattattgctcttcttaaaaaagcttatgaatcctacagcagtatgaaaattcagaggatgagctctttttgtgcattccagatgtctaaagaatattttgctgaaggtgatatcagtaatgcaaaaaagacttttgatagtatagctagcctatacagaaaagagggatgggtaactttattatgggatgtcttgggatatttgcgagaatgctctaggaaaaatggtactattaaagattttgtggagtattcccttgaaatggctgcgctgccaatatcatctgatactggtgtccggagagacattggtccagccggtcctgtaaatctactgcaaagagaaattgtacagaatgaggtttttgagcttgtccgtggagcttcaggaaaggcaacaaatgaacaccccagtaatcttaagatcatgggagatgaatcacttcagcttgaggttgatcttgtcagtcctcttaggttggtgatgcttgcatcagttgctttccacgaacaacaaaagaggcctggggcataaacgtttgacaagatctacctccatctgaagtgattcatctactgtgaggatgatcgatta

SEQ ID NO: 113036 - DNA, 402 bp, Glycine max
  Clone ID: PAT_MRT3847_73079C.1
tgttctgttgtttagaatatacttttgggggcagaaaagggactgagcgagccctccgatcttatgctcatgccactataattatatacgccaattccttagtaactacacgtctcgctatatacctcgtcccttagctggacgagtctgatattgtgcggtgcctaggcaaatatgagcctgaaccaacgcctttgctgacaccagggacgtctttctagtggtaggggagttaccgaacgtgttttaatagttccaggtagatgatccttgatgcgggagccttggattaaagcagttaaggtgaaacttatgcctgcttggataagctacaaacaagctttcctgttttaaatcggtccataacagtaacacaagtcagctgctctgggtggaccttgg

SEQ ID NO: 113037 - DNA, 2797 bp, Glycine max
  Clone ID: PAT_MRT3847_7307C.1
cccacgcgtccgcgttctctctctaaggcctaagctaccaggagctccctatctacagtgtttccctctctttctctctctctctctctgcaaaagctacgaagctgtgttctgatccttcaaattaggttgtttgctttttttggggagttaaatggatgctaggccgtggatttggtcaatttgatctcaattgaaattttttagtatttctgatggactcgaaaactagttctagagctctcccaaaacaccatcagaagacagctgggattcaaacccctgagacaaaagacacagggtcttcttttcagaagatggggaaaacggagctggctgctcctgtggatttatctatgtatgcagcgaacgcatccaagcagaatactggggaaactgctgaaatcaagaagttaggaggtttaaccctaaaggggtctgctgattccttgagcattaaaagtggttctggtgcttcctcatctgttctcgacaaagtagttcatgctgctaatgagaacataggctcacaggaaagctctattgatctagacaaaaagacgtcggaagatggaagtgtgaagaacagttctgtttctgccaaagttagtgatggggccagcagtcttgcaaagacaagtgggagtgccaagatcagcaaccgagctgattttgttgagagtggtaagagcagtatttgcagaggaagcacaagcagtgatgtgagtgatgagagtacttgtagtagctttagtagcaccataaacaaacctcacaaggcaaatgacttgagatgggaagctatccaagcagttcgaagtagagatggggtgttgggtttaggtcactttagattactgaagaggctgggttgtggggatattggcagtgtttacctctccgagttgagtggaactaaatgttactttgcaatgaaggtaatggacaaagggtctctagcaagtcgtaaaaagctacttcgtgctcagacagaacgagaaattctgcagtctcttgatcacccttttctcccaactttgtacacccattttgagacagaaaaattctcatgcttggttatggaattctgcccaggtggtgacctccatactcttaggcagaagcaaccagggaagcattttcctgagcaggcagtaaaattttatgtggcagaggtcctactggctttggagtatcttcacatgcttgggattgtctaccgtgaccttaagccagaaaatgtccttgttcgggatgacggacatattatgctgtctgactttgacctctccctccgatgtgctgttagtccgacccttgttaaaacctcatccacggattccgagcctttaagaaagaatgctgtttactgtgtccaacctgcatgtattgagccaccttcctgcatccaaccatcctgtgttgctcctactacatgcttttcaccccggctcttctctagcaaatcaaagaaagacaggaagccgaaaaatgaaatcggcaaccaagtgagtccgttacctgagctcattgcagagcctaccgatgcccggtccatgtcatttgttggaactcacgaatacttggcaccggagatcattaagggtgaaggtcatgggagtgcagttgattggtggactttcgggatctttctatacgagctgttgttcggtaaaacgcctttcaagggatccggtaaccgagctacattgtttaacgttgtcggtcagccactgcgatttccagaagcacccgttgtgagttttgcagcaagggatcttataagagggttgcttgtaaaggaacctcagcacagattggcttacaaaagaggcgctaccgagatcaagcaacaccctttttttgaaggtgtgaattgggcattgatcagatgtgccaccccacccgagatccccaaggctgtagagtttgagaagataccctcaccagcttcatcaagtggtggtgaaaaggctgctaaccatatctcaatagctaatcagaaaggttctgataattatctggagtttgatttcttctagagagagagagagagagagggtggagacaatatattgattgcaaatggtttctgttaaagagggggaggaactgtttttcaatgtttcaggaacagatatgatatgatgaggaattgtatgtttgtttttgttggctaatttacagtttcaaatttgtatggcataattaatgcatagcttctctgtcatctcaaaaaaaggcttataaaaacaacatttcaacactgcctgtcaatgcactactaggaattccaaccagccaatggtggtgatgatgctcttaaggtcccaatggtattggtaagtatgtaattgtggaaaatggagcacatgggcatcaaacaaaatgaagatttagtatatttttatttgctttgtaaacaagtgtcatgtcatcacaaaaggacttttttccgcttagaaattcaccattgcctgaatgcactgtcatagaatctaaatccaaaaatcaattaaaatgcagaattagtctgtttatgtgtttttatttatttgttatggcaatataattagtaagatttttctttccatgagcattactattggtcgttggacactgtaggattacgtttagttgagaaatttgtatcctctcctcttggtaaagttcctccaagggatgaatgtaatgtaagacattcttagctaattgaacgttttattttagacagtataagcttatccagccaaaccccgatctgtgattggatactgtaaatttgtacattgacatt

SEQ ID NO: 113038 - DNA, 399 bp, Glycine max
  Clone ID: PAT_MRT3847_73080C.1
aaacaacttatcggggctggtttaatgaaatatttagtaataaaaccaataagaatcccgagtcaaatttctaacgtatgaatggcctgtcaaaaatttctactttcaaacaatcccaaattagaaaagaaatttgagctggggccatattcgtggaaataatggggagggagctttgcttggctcccaaggcataaatgaattatgtcccaaatgggtggatccaaaagaaggggtttgataaaacataacccccaaattttgtttccatgggtggcccagccgccctgttgaaaaaccccacttcacttccatgggaaacacctgggctgaagcataagtcactgaatcatcatgggaattgggacacaaactttgcaacaaatggcccgcacccgg

SEQ ID NO: 113039 - DNA, 613 bp, Glycine max
  Clone ID: PAT_MRT3847_73081C.1
tgtggttgttgatttcaactattatcgcggaaacgatccgtcaaaccctaggttaaatcaagatgtgtgggaagaagttgagcaattggcattcttcaagcatggggctaagccacactgggctaagaataggaacatagcattcttaggggtgaatcagaagtatcccaagtttaacatgtttattgcagccaaaaaacaaatggatccactcaatgtgttctctagtgaatggtcagatgagatactttatgggcaggaattatcagagaaagttgatgggtgtgctttggagggactatgcatttgtagcgaacatagacattgtagcccacaaaaggggtattattgcagtcatggccttgtctacaaggaagccagggtatgtagatatttacaatcattcatttcatcaaccatagtatgatgtgtgcctttatatcatatcattgttttaaattatagttgtagttacagtcaatatgactgcaattacagtcagaaaactacaataatatatcttttgataatatatcatattacatgtagttttattttttgtactcagatcgtagtccccatcaaccgatcggagaataaatgtcattttgtt

SEQ ID NO: 113040 - DNA, 298 bp, Glycine max
  unsure (1)..(298): unsure at all n locations
  Clone ID: PAT_MRT3847_73082C.1
ggcaggcaagccccactcaancaccacacctgctcctgcgtncangctnacccgtnnngangnnatgactacctntcaagttntaaaagtatngnanatggcngagacattcctatttacctcagagtcggtgaacgagggacaccctgacaagctctgcgaccaaatctccgntgctgtcctcgacgcttgcctcgagcaggacccagacagcaaagttgcctgcgaaacatgcaccaccaccaagttggtcatggtcttcggagaaatcacgaccaaggcnaacgttactacgaga

SEQ ID NO: 113041 - DNA, 446 bp, Glycine max
  Clone ID: PAT_MRT3847_73083C.1
aataaaaaacaaaatgggggctaccttggaaaaaaacctgggttaaggaacatatacgacccgaccttagtttttattacatacaaaacaaccccgtttatttacatgtcccccgtatagggaacagggcacaaaattggggggcagtctacaactaaactactggttaaaaaacctttttgggggagggtttaaaaggcggaaacggggttataaaattttatacgaggtttgggggcccccttttgtttaaaagcaaaagctgtttttttttaaagggggcaacgggctttaagcaaaaaaaaaacaggggtattaaaacccctggcttttttaatgggttccaaaaaggcttcccacccctggccggaaaatggggaggttttatgggttggcaaaaaaaaggcagcccccacttttgggaattggggggtctgttatgaaaa

SEQ ID NO: 113042 - DNA, 250 bp, Glycine max
  unsure (1)..(250): unsure at all n locations
  Clone ID: PAT_MRT3847_73084C.1
ccaaattcattccaaacaggagaganaancaaagctcctcctgttgttatttcttggnggttggaggaggttcaaaggaaannnnnnnnnnnnnnnnnnnnnnnatcaattaactcttcaatttcttcaattttggagtccanttgatccatccctggtaggggaatcnagaaagtgggtgatactttgggctcnatatgggtgcnngcattcacnngggacaaactttgacttctcnncctantcntct

SEQ ID NO: 113043 - DNA, 575 bp, Glycine max
  Clone ID: PAT_MRT3847_73085C.1
aaatattaaaagggttgtttcttcattaactctcactcagggccaggccatatgccagccggtttggaaatatataactttttttttccaagccccattaaaacacttttggcaccaccttgcgttcacacacagcttgtcactcaaaagtgagatctctctcattcactcatctttcacttcccccacccccacccaatccactctcatccctttcctcatgataggtaactgactcaacatcaacaacatttgttattgatctatctgcctcaagtaagattgtccctcttcttctgtagagaatacttgtgatctctctgagagctatagcgacaatgcaagacgcaattgggattccagcatgcttcttttttgctctgaagtcaagtgatgatcacacaaccgtgactcgtttaggccagagcgtgcacatgtccctgtacagaacaaagattgctgaccagtgccgcttgatcaccatcacatggtgcaaaaacgtgatgctccatgggctttcagtatcagtggaaggcccaaaaggagaggcacaatactgctgcaaggtggagctg

SEQ ID NO: 113044 - DNA, 464 bp, Glycine max
  Clone ID: PAT_MRT3847_73086C.1
gtccgatgcaccatgtgctgttgttggattgacatcaagttacactccaactccattgttggaatctggtttgcaaaaagacagagggttaattgtggaatattttggatggatgtctcacgatgctcataacgttaaatacccccaatagaaagattagctggagggaaatttttcctttgatattaaatcacgctctagattggaaaaagtttcctttactaaagcacaatttgttagtggaaaaacctcctaatttgatataattggtgctggttcacattcttcagaagatttttgctgaaacagaagatcatgataaacccataaagatagatgccatattgatacaaataatatttcctcatttcattgaggattaggctcatatggaaacaaattttgttaaattgccttttgatgatgttgaaactctaaaggtcccatgtcgtaatttaaaattt

SEQ ID NO: 113045 - DNA, 458 bp, Glycine max
  Clone ID: PAT_MRT3847_73087C.1
ggctcgagcccagaagcaagaaagccgcaaaggaacctttatttttgccgaccagcgccaagcacacgacagcccaggactgacacggaccgccgaggaggaaagaaacagacgcgcaaaacacgagccagcaagagcaaggataggaggctatatatatcaagggtccaccatggcagataagccaccaggggctggcagagcccacgcgcattgcagcaacaggaccagcagccacctgcgccgtagagccactacatggcagcacaaggttaccgaaactacctacaaagaatgccacatacataaggagcaagcacggacatgatatggcacgaactggacagagcgatcaacgcacgccccgaaagcggaacgagagcctcaacatcaagtcccgacggcaacacaacaactcttaacgagccctgcaatcatcaccatcaggcggaacgaga

SEQ ID NO: 113046 - DNA, 641 bp, Glycine max
  Clone ID: PAT_MRT3847_73088C.1
ccacgcgtccgcaaagacaagacagacggaccgtgttctcacaatcgcacaacaaaactgaggctcacctccttaatcgcgtcttccattccatttcctcaccttcttcaaactaccataccataccataccatagcatgttctcttccttctcagatatttgatgcttagaaatataaggagagctgcccagtctgtttgtagaatcaatagcagatacctggaagtgagtgaaaatgggccagttgtctcagttggaccgaatatccaccactgccggttgtacatgcaatataagtttccaagtgaagcatgcagttcattcttgtggcatgggacaagggaaggctttcgtaaacgtggttctttcaggaacttttctgtaacctcagcaagtaatacagtcacgcaccattcccagattgcttggaaaaggctgtacagaaagtattgttccagtggtgatggtacatttcctcctaccgtcaatatgattgctcaggcagtaagcttggctttggctcggacttattttctagctcctgggattttggcatttacatgtggagagcttgcattagctcagcgaaattgggcagaagcagaacgctgccattacagaatggaccgatatgctgcac

SEQ ID NO: 113047 - DNA, 286 bp, Glycine max
  Clone ID: PAT_MRT3847_73089C.1
aatacggctcgagcgagttctatatattattgaattgacaatgaggcctgctcttgctttgcttccacttctagttgccttctcgttagcttccactacggtatcaagaatagatcttagggaatattggaatatgatcatgaaagatcaggaaatgtcagacggatttcaaggtcttgtatcatttcaatctgataataaccctaagtctcaagagtagcttggtaaaggttctaaaaaccattgtgaagagtctctagttacaaatacacaagtcaacagtgac

SEQ ID NO: 113048 - DNA, 1225 bp, Glycine max
  Clone ID: PAT_MRT3847_7308C.1
gcgcccacgccggaacccccgcggaatcccaggcgagttggaaaacaaagtatagagtgaaagaatgggtgagaaaagcaagattttgatcataggaggcaccggctacatcggcaaacatatagtggaagcaagcgcaaaggctggaaatcccacttttgctttggtgagggaatccacactctctgacccctccaaggcacaactcatccacaattttgaggctttgggcgttaatttggtccgcggggatctgtacgatcatgagaagttggtgaaagctatcaagcaagtagatgtcgtcatatccacgctgggtcacctgcagcttgccgatcagctcaagatcatcgctgccattaaggaagccggtaatgttaagaggtttttcccttcggaattcggtaacgacgtggatcgtgtccatgccgtggaaccagcaaaatctgcattagctatcaaagcccaaattcgacgcagcattgaagccgaaggcatcccctatacgtacgtttccagcaactacttcgctggctattttcttcccacattagcacaaccaggtgcttttgctccacctccacccaaagacaaagtcattatcttgggcgatggaaatcctaaagcaattttcaacaaggaagaggacattggaacctacaccatcagggctgtggatgaccctaggacattgaacaagattctctacctcaggccccctaagaacatttactcgttcaacgagcttgtggccttgtgggagaacaagattggcaagaccctcgaaaaaatttatgtaccagaggagaaggttctcaaggacatcgaagaggcacctcttccaatcaatgtggtattagcaatcaaccactcagtgttcgtgaagggtgaccacaccaactttgagattgagccatctttcggggttgaggcttctgagttgtacccggatgtcaactacaccaccgtggaagaataccttggtcagttcgcttgagaatttaaaaggagaaagatgctcttgtgatcggatatttaaataatctgagttgttgatttggagagtggaagattgtgttttatgtcaaaagatcgctatgtgatgtaatcttgcctttcatgtgtagaatgttcctacttgaatggttgaaaaataataaatgacttacgagttgagataataacagaatttaaaaacaaaacgaggctcttgtgatcggatatt

SEQ ID NO: 113049 - DNA, 185 bp, Glycine max
  unsure (1)..(185): unsure at all n locations
  Clone ID: PAT_MRT3847_73090C.1
ttttttttttttttttnttntttttttttgggggggggccctcggaagcagagagattgttttaattgttggaacctgggaccataaaaaggtgaactacttttaaaaaaaaaggaaaagttttcttgaaagaatcaatgcaaaatattctgtgtatttggatgacagggccctcccagtttagc

SEQ ID NO: 113050 - DNA, 664 bp, Glycine max
  unsure (1)..(664): unsure at all n locations
  Clone ID: PAT_MRT3847_73091C.1
caactccatcaccgatttccaattccttcgtcccaatccaattaacgaaatgggtaagaggaaacaaaaggacttacaacaatcctcccaaaccgacaccgtttcaacaccttccagcattttcagcaagctcttcgccatcgcgccggaacggaccaccgcaaccaccgccgcctctctattttccgatgacaacccctttcgaagaaaacctactccactttccgactcaacaaaccgcactcagaaccctaacgacggcgaccaccccgtgaacaccgattccggcgaggaaaagaagcggaagaggaacaaggaaaaaacggacaaaaccccagccccagccatcgataccgttgtttccgtaatcgaagcttcggataaatcggagaagaagaggaaacgcgattccgacgaaggaaaagaccttattgtgggtgcagaagcgagtgggaagaggaaaaggaaaaggggcgaagttgagaaagattgggaggagaagaagtatgggattgtggaggaagggcttgagaataaaaccgttgggatcaagaggaagacgttggatgatccagctgatatgatggtttaaagganggttttgatgatgaggataaactcttaaggactgttntcgttgggaatttgcctctcaaggtgaaaa

SEQ ID NO: 113051 - DNA, 321 bp, Glycine max
  Clone ID: PAT_MRT3847_73092C.1
tcgcgttacgcgtgcgctgagaatacaggtgtagcattgctctgtgctatgaaccgttctttctgggggcgaaccacgtatgatatctacactatctgctctcaagactgtgaagtatggaatcctgcttgcacaaaagcgatgactctgtcatttaagccaaacccgcgtgctgattcgtggagccaggaatcttgctgtcggtccgtgtttaacatgagatatcatttgtgtgactggatggacagccaccccaatgcatgaagctcacgttacaatcgtttgactgatttcctgtcacgaatgtgtactcgggaccta

SEQ ID NO: 113052 - DNA, 648 bp, Glycine max
  Clone ID: PAT_MRT3847_73093C.1
gttctttctctcgcaatcttcactacattcaccgagcatttgcattcacattgaatatggctgagactacacaatctaatgctgagttgttggagtggcctaagaaagataagcgccgcttcctgcatgttgtgtatcgtgttttatactgaatgttttgggatgaagcttttgaggaaaagagatattccagaggagaaatatgccaatgcttttcttggatttggccctgaacaatcccattttgttgtggaattaacatacaattatggggtgacctcatatgatattggaactggatttggacattttgctatcgcaactccagatgtttacaaattggttgaagacatccgggctaagggtggaaatgtcaccagggagcctggtccagttaagggtgggaaatctgttattgccttcgtgaaggatcctgatggttatgcttttgagctcattcaaagaccttcaacccctgaaccattgtgccaagtaatgcttcgcgttgggtgacttagagcgctcaatttaagtttatgaaaaaggttttgcatggggacaccacgaataaaccttttagggtcagtgactgtcacgcctcaagaaagtcaacatccgttccgtgattttttgacttcagcaacaaca

SEQ ID NO: 113053 - DNA, 555 bp, Glycine max
  Clone ID: PAT_MRT3847_73094C.1
ggggcgtgcgtacggctgcgagaagaagatagaagggggttctggtttgtcgttctttctctcgcaatcttcactacattcaccgagcatttgcattcacattgaatatggctgagactacacaatctaatgctgagttgttggagtggcctaagaaagataagcgccgcttcctgcatgttgtgtatcgtgttggtgatcttgatcgcaccattaagttttatactgaatgttttgggatgaagcttttgaggaaaagagatattccagaggagaaatatgccaatgcttttcttggatttggccctgaacaatcccattttgttgtggaattaacatacaattatggggtgacctcatatgatattggaactggatttggacattttgctatcgcaactccagatgtttacaaattggttgaagacatccgggctaagggtggaaatgtcaccagggagcctggtccagttaagggtgggaaatctgttattgccttcgtgaaagatcctgatggttatgcttttgagctcattcaaagaccttcaacccctg

SEQ ID NO: 113054 - DNA, 755 bp, Glycine max
  Clone ID: PAT_MRT3847_73095C.1
agatcgacttcacggtttacgaacgatttgatttggttttgaacacacctagttgtagccaaatagttagttacctctttgcaaagtcttcagtagtttagtttgatccagtctatcaactttttttaatgctttaacatattgaggaagtgctgaaggattacaatgtagagagtgctgactttcaaatgctctaatcacagcttcaggattgttttgatggtaaagttccttgagatgagcaacttcagtagcttcatctgcatctcgcagtcgacgggtcagactgccaacatagctggaccgaatctctccggggagcagaaaagcttatttcctgcagaagtttgaaagtaggtgcaacaaatgataggtagataaaaatcagcagttacttggtccccagaacataaatgtacataagagacaattttgaagtctaaagaattctacagcaaaacaatttttcttgaacaccaaagaggtaaaataattcagaaaaacaaagctactataaatgagagaaacaaaaacaaatacttatagaaacacagtacaaactaaatgtgctataggaagaagcaatgtgtacttgtacagccttcaaaattattaaacgataaatagcttctagccaacaaactataaaattccatgtctaagaaaagttatacagcatacatatcacagatggaaaataccttcattgaatttagacatagggatcaagcatgcatacggcatgcataactagc

SEQ ID NO: 113055 - DNA, 517 bp, Glycine max
  Clone ID: PAT_MRT3847_73096C.1
ctcgcgccgagtaatggcccagcaaaagcggttaagaggtctggctcaaaacctcaaagacaaagcctcggtgatcgccgcagcgctatccaccaagcgtcacctctcttccgtccgtgtccacgtgctccgcgccaccacgcacgccctcgcggcaccaccctccgaggaaacaatttctgctgtcctcgcggtcgggcacggcggctcccaccgtcatccacgcgcgtgcatcgacactctcatggaccgcctccacaccacgcgcagtgccaccgtggcactcaaatgcctctacactctccacaacgtcgtcgtaaagggacccttcgtattgaaagaccaactatcttgttacccttcttacggtggccacaattttcttaacctctccaccttccgagacgtctcggacttggaatcgctcgaactcagttcgtgggtgcgctggtacgcctccgtactggaacagaccttaaccgtttcaagaatcttacggtattacttgaacgattct

SEQ ID NO: 113056 - DNA, 1632 bp, Glycine max
  Clone ID: PAT_MRT3847_73097C.1
cagagtagactacagaagggcgcgcgtgcgagaagacgacagaagggtacggctgcgagaagacgacagaagggtacggctggagaagacgacagaagggggacaccgacacagatctgtcttccgaagcaggaactaaatatggctgacttgttggaatggtcaaagcaagataagaaacgaatgcttcatgtcgtctaccgtgttggtgaccttgatcgcaccatcaaattttacacagaatgtttaggaatgaagcttttgaggcaaagagatatcccagaggagaaatatgctaatgcttttcttggatttggccctgaagaatcccattttgttgttgaattaacatataattatggggttacctcgtatgacattggcgatggctttggacattttgcaattgcaactcaggacatttataaattggttgagcacatcagggccaagggtggaaacatcacaagggaacctggttcggctgcaagttgcctacggttagtcacagacaccgacacagatctgtcttccgaagcaggaactaaatatggctgacttgttggaatggtcaaagcaagataagaaacgaatgcttcatgtcgtctaccgtgttggtgaccttgatcgcaccatcaaattttacacagaatgtttaggaatgaagcttttgaggcaaagagatatcccagaggagaaatatgctaatgcttttcttggatttggccctgaagaatcccattttgttgttgaattaacatataattatggggttacctcgtatgacattggcgatggctttggacattttgcaattgcaactcaggacatttataaattggttgagcacatcagggccaagggtggaaacatcacaagggaacctggtccagttcaaggtggaactactgttatcgcctttgttaaggatcctgatggttatacttttggacttatccaaagacctacagtccatgacccattttgtcaagtaatgcttcgtgttggtgatttagagcgctcaattaagttttatgaaaaggctttgggcatgaaggtggtgaggaaggttgataagcctgagtacaagtacactatagctatgctcgggtatggagaggagcacgagacaactgtgttggagttgacatataactatggtgtgactgaatactctaagggaaatgcttatgcacagattgccattggtactgatgatgtatataagagtgctgaggtagttaaccaagtcataaaagaggttggagggaagattactcggcaaccagggccaattcctggccttaatacaaaaaccacttcgtttttagatccagatggatggaaaactgtcttggttgacaacgttgatttcttggaagaactgaagtgaagagcaagctttatatgaaataagtagtcctgctgcttttgtatgaataagttgtctcgcattttatcattgtgcgttttgtatcagtaccagtcatcaacttgttttcttgcttttatgggttcttttgttgacttaaaaccgcaattgaaacctcattctgcatgctacctatgattaatctactagtttatcataaaaaaaatactactgagcagtgtttttgttttttttgtttt

SEQ ID NO: 113057 - DNA, 277 bp, Glycine max
  Clone ID: PAT_MRT3847_73098C.1
cccacgcgtccgcccacgcttcctgtcctatttagtcgaaggactgctcaaaaacgcaccatgtctactctacaagggggtcctcttgacacgcttcgctaccaaaggctacggcatgaaaaagggtgggatggtgaacgggaaaggaggccaaggagctggtttaggatcaaaaaggttccgattaggagaaggctcacactcaaaatttgaagctcgaagagactttataggaaaagggctgaggctggttatcaaatgtgaaattcatatgcca

SEQ ID NO: 113058 - DNA, 2559 bp, Glycine max
  unsure (1)..(2559): unsure at all n locations
  Clone ID: PAT_MRT3847_73099C.1
cacgcgtccggctctagtcacagacaccgacacagatctgtcttccggttagtcacctctcaaatttctcagacactttctttgatgactagtttgtgttggagctgaaattacatgcttcgcttgtagttataggaatgaatgttttttttattattgtgttgtttgtttggtttaattcttttgaaccccaatcatctaaacatgacattttcttcataatttctgaaccctggaggcttcagtttactgttgattttcgtgttatgcttctaccaatgccataagcttggtactccaccactttgcatcttgtttaagccttaaaacaacccgttctgaacccgttattgagcttttctagcttcttgtgtgacatttttgcttgctaatgatgctgaaattatgtttgcttaataattaaatcctatacatctgtttaatttttgttgatgcagaatggntgggtgtttaatttgctaagtttttgttataagtagtaagtttttatgtactgtgagaatgnntgnttaatggcctgtgtttgcagacggccactgaggttcattgaacctggacgtgtttttgggcgtggactggatgatggtaacgaacctttggcctcatcgcttccgtcagatctcattcttcatccattcacagccacatcccacagaaccatagaagcaggaactaaatatggctgacttgttggaatggtcaaagcaagataagaaacgaatgcttcatgtcgtctaccgtgttggtgaccttgatcgcaccatcaaattttacacagaatgtttaggaatgaagcttttgaagcacagatctgtcttccgaagcaggaactaaatatgggctcttcaatgtttacttataatggacttcgtgatcatttttgaggaatgttctggtttgtcgttctttctctcgcaatcttcactacattcaccgagcatttgcattcacattgaatatggctgagactacacaatctaatgctgagttgttggagggtgcataagaaagataagcaccgattcctgcatgttgtgtattcgtgttggtgatcttgatcgcaccattcaacgttttatactagaatgttttgggatgaagcttttgaggaaaagagatattccagaggacgaaatatgcaaatgcttttcttggatttggccctgaacaatcccagtttcccattttgttgttgaattaacatataatttatggggtatatgatattggaactggatttggacattttgctatcgcaactccagatgtttacaaattggttgaagacatccgggctaagggtggaaatgtcaccagggagcctggtccagttaagggtgggaaatctgtatgttctgaaggatcctgatgcctatgctttgagctcattcaaagaacttattgcctggaccattgagcctagtaatgcttggtttatgtggtctagagtgttcaattaatttattgaaaaagctattttactggttaatgaagttttggggcaaaaaaatatcccaaggagatatatctgattattttcttggatccggacccatttgtagttgaattacattaattaggggtacctctatgacattggcgatggctttgacttttgcaatgcaactcaggacatttataaattggttgagcacatcagggccaagggtggaaacatcacaagggaacctggtccagttcaaggtggaactactgttattgccttcgtgaaggatcctgatggttatacttttgagctcattcaaagaccttcaatccctgaaccattgtgtcaagtaatgcttcgtgttggtgatttagagcgctcaattaagttttatgaaaaggctttgggtttgagggtggtgaggaagactgataggcctgaatacaagtatactatagctatgcttgggtatgcagaggagcatgagacaactgtgttggagctgacatataactatggtgtcactgaatacaccaagggaaatgcttatgcacaggttgctattggtactgatgatgtatacaagagtgctgaggttgtcaacatagtcacacaagagcttggagggaagattactcggcaaccaggaccaattcctggccttaacacaaagatcacttctttcttagatcctgatggatggaaaactgttttggttgacaatcaagattttctgaaggagctggagtaaagagttatggctttttaatttatagtactaatgctattgtatgaataagtgatcagctcctgtatttatcagtgaagtagtagtgttcaatatggtttctctgatgtgtttgcctgtttggttgagattctagacagtctacagtgacatccaacagtatttcaatatatttagtaaaagttggagaataattaaaaccgcaattgaaacctcattctgcatgctacctatgattaatctactagtttatcataaaaaaaaaaaaaaaaaaaaaaaaaaaaaaaaaaaaaaaaaaaaaaaaaaaagaaaagttgtcatagaaaagaaaaaaaaaaaaaaa

SEQ ID NO: 113059 - DNA, 429 bp, Glycine max
  Clone ID: PAT_MRT3847_7309C.1
accaaatgctttgtaaaacattaaaaattagcagagtcgtcatcatttaaaaaaattaatctaattaacataatatgaaacaaaaaagaaaaaataacagaagcctagttgtatggaactaaaactaatgcacaacggatgccttttcaaggggtctgaatgttgtaggaaaaaatgccaacgggagaatctgagatgaacctgaaggaaactgtggtagatattgttgaagctgtttgcgttctgttgttggggctttgttgttctgaatgaacttaaaaaaggagccgtcactaaaatccggggccaatgttttattaaaacaagaatttttaattagcccacaacatttttggacattattcacaacctttcttctcgccgcctttttcattaatttcctatgcaaactttttttcgcggtcctta

SEQ ID NO: 113060 - DNA, 466 bp, Glycine max
  Clone ID: PAT_MRT3847_730C.1
tggaacctttgggctgatttatgtgcttgcatggtcgtggaagatgatagaaggggggaagagagaagaagacggtgctgagtggagtggcgttgccccggagggtagtggggacgatacatactatacatctaaatacacgtgtgaactcggctagggaccgttctaaggaatttcataaggtcgaagttactctctgcgagaaggcttaccccgtctctcttaaacgggctgatgttaagttcgaaaaattcatcacctgcctagatattttagagtagcgacttggaacagccggaagtcacaaacgtacaaactcccgagactcggaagcctaccgctaccccgaattccctcgcgacgcccaaccttcccgtcctccccccccctaccttacgaaacggaatacatatcggaccccgacccgtacgaccaactccgcaacaacaaaaagccaaataaacga

SEQ ID NO: 113061 - DNA, 2117 bp, Glycine max
  Clone ID: PAT_MRT3847_73100C.1
acggctgcgagaagacgacagaagggggaatgttttttttattattgtgttgtttgtttggtttaattcttttgaaccccaatcatctaaacatgacattttcttcataatttctgaaccctggaggcttcagtttactgttgattttcgtgttatgcttctaccaatgccataagcttgaagcaggaactaaatatggctgacttgttggaatggtcaaagcaagataagaaacgaatgcttcatgtcgtctaccgtgttggtgaccttgatcgcaccatcaaattttacacagaatgtttaggaatgaagcttttgaggcaaagagatagttcttatagcacgtcaaaacaagctccacacagaaacttggaagctttatggagatgctctttggtgggcgctatgtgcttcttctaatggcactgttttcaatctattgtggcttaatctacaatgaattcttttctgttccctttcacatatttggtgcatcggcttacaaatgccgtgatagttcatgcagggatgctcatactattgggttaatcaaataccaagatccatacccgtttggtgtggatcccagctggcgtggatcgcatcccgtcttgccttttctaaactctctcaagatgaagatgtccattctgctgggtgtggtgcacatgaacttgggaattcttttgagttatttcaatgctcgtttctttggcaactcgctggatataaggtaccagtttgtgccccagatgattttccttaactgtctatttgggtatctttcccttctcatcgttgtcaagtggtgtactggctctcaagcagacctttatcatgtaatgatttacatgtttttaagcccttttgacaatcttggtgagaatcaattattctggggccaaagaccacttcaaattgtgttattgcttttggctgtaattgcagttccatggatgctctttccaaaaccttttatactaaaaaagcttcatactgagagatttcaaggacgcacttatggtatactgaataactctgaggtggatcttgaggctgaacctgattctgccaggcaacatcatgaggaattcaatttcagtgaggtctttgttcaccaaatgatccacgccattgaatttgttctaggttcagtttcaaatacagcatcatatctacgactttgggcattaagcttggctcactcagaactttctaccgttttttatgagaaagtcctgttacttgcttgggggtatgacaatcttgtcattcggttagtggggctagctgtttttgcctttgcaactgcctttatactactaatgatggagagtcttagtgcttttcttcacgccctgaggcttcactgggtagaatttcaaaataaattctaccatggtgatggctacaagttcaggcctttttcatttgcctccttaacagaggatgacgattgatccattcatatgtatggtttcatggcaactatatagaaaggatatttccacaagtgaagggagcataaaatgagaatttgtagtgtcggaaccaaatttggcggctatggttgttaggtttgcttgatgatattctgcttgatattgacctggcaacaaaaagttcctgctcattttcccatggctacggggttgtaagaagatcacactgccgatgatcatggaaggtatctaacagaatatttgctttatagttattttttgttatttttcttttgcttagaataggaaacggaagagctaagggaagggactgtttagagtaatttttgtaaagaggagcagggatccatcagagtgtagctattggattttggttctttggggttacatacatatatatacatgatgtagggcaggttttgctgggaaataaccaatcttctgaaattttcttgtattgatagatgacaagttatagagccccaatttttttttgttaaggattgatcaaagtaaatacagacatctgaagttgaataatgtcatctgtataatgcttgtgtaatgcccagttggcaacttacaatttgaaatgttacttccaccatcccccaagttgaataaaatgcagagatatttgttttaattattcaa

SEQ ID NO: 113062 - DNA, 311 bp, Glycine max
  unsure (1)..(311): unsure at all n locations
  Clone ID: PAT_MRT3847_73101C.1
agatagcnccnncgancntcnaagcantcngcaanaatcnnatactagagaanantntctgnnaaaaaacgagtacanntnagagnntttatgtcacnagncnaggngagcncttnngtgttnnncgagnnagncctaccggagggtgnanccgntggtgatgnttantnntnatgngcatgcngtncgtnnactgtcgtngggcgnntagtcnggntnangttctgttcngtnacgnnggtgtncgcntggcngngtggcgnnnggtcggnanaggnccgtgtcngtnagcnttggtgcnnncacncngt

SEQ ID NO: 113063 - DNA, 437 bp, Glycine max
  Clone ID: PAT_MRT3847_73102C.1
gcagcaatgcattggcaaggataaatgttctattcaagtttctgagaaaacacttggacctacgaggtgtagagttgctgaaaatagaagattagcagttgaagcggtttgtgatataaacgtaagcggcgaagggaggaaacactagattttaatgtgctttgggaaatcatttaggactttagtttcttttattctataggtttcatttttcttttgagttggaatggttttgacatagaaaaaccttttcagatgtttgttttcggttcacaagtagactaggatgtagatagataaaactttctcctttacattgaatgatatatagttttacttttgggataatattaattattactttttatactagcttgcgattgagagaactacttttttgccttaaaggagccagatgaaaatatccaatgcatcat

SEQ ID NO: 113064 - DNA, 241 bp, Glycine max
  Clone ID: PAT_MRT3847_73103C.1
cgaacgttatcagatatttccccaattcaatgctctcctggctacctggaaactaaattaaagaaaaaccgttaagccaaagcaaagtaactaactgcatttattttctttctcccggtcaattcaagatccgctgttaagtaactacattaccaatcttccgccattcaatacaaagaaaccctctgtctagggttttcacttccatggaccttccgctcctcaggaagagtctccaatt

SEQ ID NO: 113065 - DNA, 136 bp, Glycine max
  unsure (1)..(136): unsure at all n locations
  Clone ID: PAT_MRT3847_73104C.1
caatctcacacacncnnacgtnagctacnnaattcnnctcaaannagngacacaacantngcgancantnaccnacacntngcnnntgctnccgagaantgcgnagctanagatgtacaacatngcaanannacgc

SEQ ID NO: 113066 - DNA, 396 bp, Glycine max
  Clone ID: PAT_MRT3847_73105C.1
cttcgtgtcaaaccgatcgcggctgcatcgtgatcgacggttacggcaagaccaacgtccccggcatctacgccattggcgacgtcgcgggccccccgatgctggcgcacaaggccgagcatgaaggcgtgatctgcgtcgaggcgatcaagggcctgcatccgcatcccatggacaagaacctgatcccgggctgcacctattgccagccgcaggtcgcctcggtcggcctcaccgaagccaaggccaaggagaacggccgcgagatccgcgtcggccgcttccccttcgtcggcaacggcaaggcgattgcgctgggcgaggaccagggcctggtcaaggtgatcttcgacaagaagaccggtcagctcctcggcgcccacatggtcggcgcgg

SEQ ID NO: 113067 - DNA, 1427 bp, Glycine max
  Clone ID: PAT_MRT3847_73106C.1
tttttttttttttttttttttttttttttttttaatagaatccagtgactaaaacccctgatggttttgcacttttatttcatgtaaaatcattgttcaacatcagagataatacaatttgacggttaagattgaatgtaggatggcataaccaatatgatttagatttcactcctacatatggtaaaatcaccataatgaacaactccctattccaatcttccttaatgttgctcaaaatgggaaaaagaatatagtcctgtcatttatagttctttggcctcaagccatttctgagtggtctccttacagccactttaagtgagttcaagttttcaagaatatatattagatatttcaaacacatgtagtgcagaacttcatgtaaaaaggatggttttccacaaatccttgttacaagttttaacgactaagaagctatcagtgacattaattgttgttccacttcttcccagttcttaactctggtcaccagtggatgctgatcaacagactcgttcttgcaccaaggatatgagttttcataatcaaaaagtaagactctaattccaacatcagcacactctatggcataccgtgggttatcatcaataagaaccttggcatttaaagacctacaaatttctgactttggtcttgacacaccatcaagagcaaagtggttaccaaagtgaatctcatgaaacagtccaggataattcttctctagccactcaattgtgtggtccttaattgcattctgtcgtgatgttacaactgataggctacaaaatcttgataacttctgaagagccatctgagcacctggaagagggtggatccctgacttgaaatatggtgtcttaaaaaactcatgaacacggatatcagcttcatcacgtgaacaattccatatctgcaacagaaatgaagggtgcatcagactccatatacaaatatgcacaaattcacaactatacaatgagggctaaatgggctgtaacaagtgttgattatctttttatcaatgaaattttatttaaaatagcaccactagtgcacaagcaaaatacacctgatgcagaactcagagaattaccaaagcagacaaataataccttgcagaactcatacacatgatattcagaaactgaataatttgatgaatatcgatctgcaatgaacttgttgagagaaaagtacaaagtttccggaagctatcagagacactaattgttgttccacttcttcccagttcttaactttggtcaccagaggatgctgatcaacagactcgttcttgcaccaaggatatgagttttcataatcaaaaagtaagactctaattccaacatcagcacactctatggcatatcgtgggttatcatcaataagaaccttggcttttaaagccgacgacgcgtggg

SEQ ID NO: 113068 - DNA, 344 bp, Glycine max
  Clone ID: PAT_MRT3847_73107C.1
atttattaaagtaagagaacatcaggcacttaattctttggagaagatgctctggatagatgacaagggcaggtggggtgtttaacgtgtatatttcatttcacggttgggtaaaggcagaatgaaagtgcaggcgaaaagggggaaaacaaattggctagtgctgtgcgtcacgtctaatatcttagtttgtctgatctaatctaaattttctcgcaaacagaagaaaagtcaagcgcggcacgaatcgcgatctttccttctttctttctttcgttccttcacaatcctaccagccgccaagccgcagagtcaacttgtacaaatgcccaccgaatccatta

SEQ ID NO: 113069 - DNA, 179 bp, Glycine max
  unsure (1)..(179): unsure at all n locations
  Clone ID: PAT_MRT3847_73108C.1
caggaaggagggtgatatatnnnnnctggcgtttttttttttgagaatacccaccgcccccccgagagataacagttacaagggctgaaaaaagaatttcccccaaccttactaaactgggaccttaacccactccccggagttaccggattattcaccaaaagattaacaaaggctac

SEQ ID NO: 113070 - DNA, 454 bp, Glycine max
  Clone ID: PAT_MRT3847_73109C.1
cactcttgcgctcaacaatcaacaatatctttcttactacttttttttttttcagaacaccacttttaaatacgtctcgttcaagtttaaacttctccatcatttttacacattcttaatacataacattcattccaattctcattaaacctataatactatttcctctctcaaactatttatacatctttaactttctaacaaaacctcatatcacacttctaatatactcaacaccacaatcattatgagttcaattgcaacctacaatatccctatcgttacaacttattccatatttactaaacttttctccaatcatacctcttctaatttcattttttataaaatttacattttcctttttcttttattatttttcaattttacattctttttatttttttaaaatttatgtttttttaacaattcgtatttttcatttatttattca

SEQ ID NO: 113071 - DNA, 347 bp, Glycine max
  Clone ID: PAT_MRT3847_7310C.1
gggtgagaaaagcaagattttgatcataggaggcaccggctacatcggcaaacatatagtggaagcaagcgcaaaggctggaaatcccacttttgctttggtgagggaatccacactctctgacccctccaaggcacaactcatccacaattttgaggctttgggcgttaatttggtccgcgtaagacttctctcaaactatttaatcttaatttcatttcagtctactaattaatggcaatggcagggggatctgtacgatcatgagaagttggtgaaagctatcaagcaagtagatgtcgtcatatccacgctgggtcacctgcagcttgccgatcagctcaaga

SEQ ID NO: 113072 - DNA, 503 bp, Glycine max
  Clone ID: PAT_MRT3847_73110C.1
gcgtacgtaggacattcggctcgagtcagcatttcagctaatgacacgaagtgagcgttgatcaccattttgatacattaatgatttcgtttctccgttcattcgacgattattgcatcaagcgatatcaaatcaccaatcaatcattaaagaagaaattaagtaaagacaaatcactaattagccacaagtcttctttacctgcggtgtgagttcgggagttgcggtgctgccggcgacggaactctcgtaccttacgtctctttcgcttgagcttcggttccataataatattggttatttatgaaaataaaattctcgccgtttttaattatgaaccggtttactgttccggtccggttcggtttttaaagcacgctaaaacctaagcttgctcatgtcttctctttctctctcgtacacgcaaacacttgttccggtgggccctctctctttcgcttcatcttcaacattaggtcttctctgactctgtagtcgtcact

SEQ ID NO: 113073 - DNA, 243 bp, Glycine max
  Clone ID: PAT_MRT3847_73111C.1
gttgtcacaccaaaaaagggaccccagggggagggagacccccaaaaacacacccaaagaggggcccgcagggccaaaggacccacgaaataacaagaggcaccggggcccccccaaaaacccagagggcacccaaaacaagcgaggccgggaaacgggaacgagaggaggaaaacgtggccaaacaggggataccaagacaagggagcaccccttaagactcccaaaccaacccccaggaaa

SEQ ID NO: 113074 - DNA, 1245 bp, Glycine max
  Clone ID: PAT_MRT3847_73112C.1
aattcggcaccaggctcaatatactgcaaatgttatcaaaaggatctttgtactttatggctttaattcacatttgatgtgggaataattataaatcctcctacaaaatcttcctactaatcctccttaccagatgaagtattggatgcattttaaaggctcgaggctcggagcttgaaagagtaaaccgcaatatcctccagtgtgtgtgtctgcatttgagctactttttttggcagaaaatcatgttaagaatgggtttgaggaagctacaagacaaggttgcgctgatcacaggcgcagctagtggaataggaaaagccacagctacaaaattcatcaataatggagccaaggttattattgctgatattgatcaagagcttggccaagagactgcaaaagaactaggacctaatgctactttcatagcatgtgatgttactcaagagtcagacatttccaatgctgttgatttggccgtttctaaacacaaacaacttgatatcatgtacaacaatgcaggaatagcctgcagaagtcctctaagcattgttgacttggacctggaactgtttgacaaagtcatggacataaatgttcgtggcgttgtggcaggcatcaagcatgcagcacgtgtaatgatcccacgtggaagtgggtccattctctgcacagcaagtgtcacaggtgtgataggaggggtgtcacaacacacttactcaatatccaagtttgcagttgtgggcattgttaaatctctggcttctgagctatgcaggcatggaatccgggtcaattgcatatcaccttttgccatccccactcctcttgtcatgggagaaatgagtcagatatatcctcatgttgatgctcagagacatgaggacattgttcacaatgctggtgtcttaaagggagcaaattgtgaacccaatgatattgctaatgctgcacttttccttgtgtctgatgatgccaaatatgttagtggacacaacttggttgtggatggaggtttcacatcttttaagaatttggacttgcctgcaccaaatcaagtgcagtaggagtttgtacaaattatattttagataaaggtaacaatgttaaaattaagtaattcaataagagtgagtcaattgaatttatttactcttcttgttagagaactataaagtcctacatgggacaaataaagacaaacaaagaagtatatataaacatggaggaattcatataaaa

SEQ ID NO: 113075 - DNA, 142 bp, Glycine max
  Clone ID: PAT_MRT3847_73113C.1
cagacgacgtaggtcatacacgtgggtggccaagagagataggacaactagagaccccattattgtatatgctgaatggagaggttaccagagaaccgaccttgatgcggtcgatgataatgctggcttggagggaatgcta

SEQ ID NO: 113076 - DNA, 260 bp, Glycine max
  Clone ID: PAT_MRT3847_73114C.1
caacttttgtctcaaaatgccaacttcttttccctatccttcttccatttgtgtatgttccactcctcccatgcatttttggccttttccaccttctcctctctatgcattatttttccgtcaccttttctcgcctcttcatcactctgaattctgacccttcataccttcaaaaaaattccagtcttcttccatccctcgcttgttttctccaaaatatcatctgggtattccctggaatttagtggggtgcctttgtt

SEQ ID NO: 113077 - DNA, 232 bp, Glycine max
  unsure (1)..(232): unsure at all n locations
  Clone ID: PAT_MRT3847_73115C.1
tttcatgtcattaattaaataccgtnacatgttcaaattcacaagattccttaaaacattcataaacatttataatttgtgtatttaatcgcctttttacactctttatcctttaacaactgatatttccccctgctattatcgcatcacctctgcaatttgtgctttcaatattgggtcactttttactacttctctctgttatgtgacttcaaaagaacatctttttttt

SEQ ID NO: 113078 - DNA, 198 bp, Glycine max
  Clone ID: PAT_MRT3847_73116C.1
atcaattaaaggactcatatataacggcctcttagggtcaaaaatatttataagctgtgtgagatcacatgtggatttgtatacaagacggtcccccaaattataaccatagacgccgttccttcatctataagaccccacctacgagtataagcacataacaactcccgtatccctcgctcttaataaacatcaatt

SEQ ID NO: 113079 - DNA, 324 bp, Glycine max
  Clone ID: PAT_MRT3847_73117C.1
aggtgtgcgaacacctgagagaagaccacttaagacgcctatcaatatgcacatctcatacgagtccctacaatatgtatttccaattcctcagtcttaccatttgtacattcatttccattacttgaaacgctctaaattgacagacgacatactagtcaagctgattggtctactattaaacgacatcctaaatgatctgataaacttcaacgttatcaacaagaactcaattaatatatagtccctaatgtactaatctcgaatctaatacacgattgcctacggagaatcacactgagtaaagatgcacatcagatttac

SEQ ID NO: 113080 - DNA, 205 bp, Glycine max
  Clone ID: PAT_MRT3847_73118C.1
cggtggaattttgcgttaagggcgaaagcctgacggggcgcggccgactgaaggtagaaggcctacggggcatgaacttggtatcccggagaagaagccaagacgcgatccggggaatacgcatcggcaaaccctgggccagctgtcgaggcgggagagcgggggcaagcgctattaacccataaaccggggaaggggccaacaa

SEQ ID NO: 113081 - DNA, 423 bp, Glycine max
  Clone ID: PAT_MRT3847_73119C.1
cacgcactcctgagaatccatgaccagcgtgggcttaccgacattagtgctaactaaagaaacgagatactccttcctgtagctatgtaccttattaagaacacagccgttgaagaccggagagcattgctaatattatttgcttttagaaacagtggtgatgtgaagaccaggctatataaaattcccacaaaccacgacctctgattctaggctcatgtctttcacatgaagatttatgtgttcgcgatcgaaataattgcatggagatatgatctaccgctcaaaagtgaaagataaaaacagcattattatgtttacgcgtttgaccagtgtatctagatagggaaatgacactcacttgactaactacattagcattcatattgttatttacaggtagcaaatggtctgggcgaacac

SEQ ID NO: 113082 - DNA, 970 bp, Glycine max
  unsure (1)..(970): unsure at all n locations
  Clone ID: PAT_MRT3847_7311C.1
atctcaactcgtaagtcatttattatttttcaaccattcaagtaggaacattctacacatgaaaggcaagattacatcacatagcgatcttttgacataaaacacaatcttccactctccaaatcaacaactcagattatttaaatatccgatcacaagagcatctttctccttttaaattctcaagcgaactgaccaaggtattcttccacggtggtgtagttgacatccgggtacaactcagaagcctcaaccccgaaagatggctcaatctcaaagttggtgtggtcacccttcacgaacactgagtggttgattgctaataccacattgattggaagaggtgcctcttcgatgtccttgagaaccttctcctctggtacataaattttttcgagggtcttgccaatcttgttctcccacaaggccacaagctcgttgaacgagtaaatgttcttagggggcctgaggaagaggacattggaacctacaccatcagggctgtggatgaccctaggacattgaacaagattctctaccttaggccccctaagaacatttactcgttcaacgagcttgtggccttgtgggagaacaagattggcaagaccctcgaaaaaatttatgtaccagaggagaaggttctcaaggacatcgaaggtctgtataaatatccttagtcctagtaattataattatgttgttttctatgtttcaaaatttgaaccttattagtacaatttaataatcgatgttagtcaggtagtgcattctttctgaatttggttcanagtatgcaatactatacaaattaagatgcatgatattccttttaattatttgttgcagaggcacctcttccatcaatgtggtattagcaatcaaccactcagtgttcgtgaagggtgaccacaccaactttgagattgagccatctttctgggttgaggcttctgagttgtacccggat

SEQ ID NO: 113083 - DNA, 318 bp, Glycine max
  unsure (1)..(318): unsure at all n locations
  Clone ID: PAT_MRT3847_73120C.1
ngtgtaccttttaagtgctgagcaagaagggagaaaagattaacagggttagcgggggtgatgaaaaattgaggcgacaaaggactcacctgatggtgccttgtctttcaaggatggaaatggagaaaaaaagaggtgacgccagcagaatgggggactccttccacatgctcgctcacagtggttagctataggataattaatgagaggctcattcactataggtatgaattactactgggccaggctaagggtgcacgactgcaactacaatgcttgaaagatgtccatactttgagggtgtgtggcgatgataac

SEQ ID NO: 113084 - DNA, 640 bp, Glycine max
  Clone ID: PAT_MRT3847_73121C.1
cgatgctattcgtggaaaggttgtccaactaatgaggctagattgcaagcgcgctgttccgttgttaatccagaatagggacttaataagtccacctgaagttgtgaatcaacttctaaatgcagatgataagagtgattgtagatattttttacatttatatctccactcattatttgaagtaaatcctcatgctgggaaagacgagaagacgacagaaggggaactctatgcggactatgatccaaagatgctgctaccttttctccgtagcagtcaacactactcccttgagaaggcttacgaaatttgcattaaaagagacctattgagggagcaagtcttcatcctaggaaggatgggaaactcgaaacaagccctagctgttattataaacaaattgggggatatagaggaggccgtagagtttgtcaccatgcagcatgatgatgaactttgggaagaattaatcaagcaatgccttcacaaacctgaaatggtgggcatattattggagcacacagttggaaatcttgatcccctttacattgtaaataaggttcctaatgggttggaaatccctcggctccgggatcggctggttaagattatcaccgactacaggactgaaacatcgctc

SEQ ID NO: 113085 - DNA, 3659 bp, Glycine max
  Clone ID: PAT_MRT3847_73122C.1
ccacgcgtccgtaaaaaaaaaagattttcccagagcaaccaaacagatctaaattcccacgcgtccgcactttccctttgcattctcctgtccgcgaggcatcacgcgataaccatcagaatggttccgttcccgtcagagaacggcgttgaaggagacgacgagagagaagaggaagacgaagaggaagaagaagaagaggaagacgaagaagtggtggaagatgaagaagacgaagaggaaccgaggctcaagtaccagagaatgggaggtagcatcccttcgctgcttgcgagtgacgcggcgtcgtgtatcgccgtcgcggagcgcatgatcgctctcggcactcacggcggcaccgttcacatcctcgattttctcgggaatcaggttaaggaattctctgcacatgcttctgttgtcaatgaccttagctttgacacagaaggtgaatatattggaagctgttctgatgatggatcagttgtgataaacagtcttttcactgatgagaaattgaagtttgagtaccatcggccgatgaaggcagttgcgttggatccagattatgcaaggaaaatgtctaggagatttgttgctggtggtttggctggtcatttatatttaaattcaaagaaatggttaggataccgagatcaggttttgcactctggtgaaggttcaatacatgctgtgaaatggagagcaagtcttgttgcttgggttaatgatgcagaggttcactctggtgaaggttcaatacatgctgtgaaatggagagcaagtcttgttgcttgggttaatgatgcaggagtgaaggtttatgatactgccaatgaccagcgtattacatttattgaaaaaccacgggggagcccacgccctgagcttttgcttcctcacctggtttggcaggatgacagcctcttagttattggctggggaaaatctgtcaaaattgcttcaattaggacaaatcaccaaaaagcagccaatgggtcattcaggcaagttcctttgactggtatgacccaggtggatattgtggcatctttccaaaccagctatttcatttcaggacttgctccctttggtgatgctttggttgttctagcatatattcctggagaagaagatggagataaggattttagtagcaccgctcctttacggcagggcaatgcacaaagaccagaagtaagaatagtaacatggaataatgatgagctttctacagatgctcttccagtacatgggttcgagcattacagggcaaaggactattctcttgctcatgctcccttctcaggtagcagttatgctgggggtcagtgggctgcaggtgatgaaccactttactatattgtatctctgaaggatgtagttattgccaaaccaagggatactgaagatcatatttcatggcttcttcagcatgggtggcatgaaaaagctttggctgtggttgaatctggtcagggacggagtgaactacttgatgaggtgggatctaggtaccttgatcatctgattgtggaaagaaaatacagtgaagcagcatctttgtgtcccaagttgcttcgaggatcagcttcagcatgggagagatgggttttccactttgcacatcttcgtcaactccctgttttagttccttacatgcctactgaaaaccccagactacgtgatactgcttacgaggttgctctcgttgcattggctacaaatccttcttttcataaggatctcttgtccactgtaaaatcctggccatctgtaatttattctgcattacctgtaatttcagccattgaacctcagctaaatacttcatccatgactgaatcacttaaggaggcattagcagagttgtatgtaatcgatgagcaatatgagaaagccttcttgttgtatgctgatcttatgaagccagaagtatttgattttattgataaacataacctacacgatgcaattcgtggaaaggttgtccaactaatgaggctagactgcaagcgtgcagttcctttgttaatccagaatagggacttaataagtccacctgaagttgtgaagcaacttctaaatgcggatgataagagtgattgtagatattttttacatttatatctccactcattatttgaagtaaatcctcatgctgggaaagacgagaagacgacagaagggttaggaaaatgggggtaacaaggatcaaatctgcgagtgcgaccacttaagctattaggtgaaaaaacacgtgaatggttttatatgtttattatcatgtcaagtgttaaaacaataattttttttatcaagacaaattttgatcgacattgaaaagcctaactgaaatttcataactaaaagactctgcgctaccagaaatccagtgcctatacatttattcacatgcaatcatggatgttgtggattttctctcgccttgagtttggtcatgtgtggttgaatccttagtttaggacacattgttttactgctctaacatcaaactgtcctatcttctttacataagaaaggatatatttgaacagaatcagcatctctaattgttgtgcaacaaagagtgtgtaccctggaactagaatctttaggtaatttaggtagaactctatgcggactatgatccaaagatgctgctaccttttctccgtagcagtcaacactacacccttgagaaggcttacgaaatttgcattaaaagagacctattgagggagcaagtcttcatcctaggaaggatgggaaactcgaaacaagccctagctgttattataaacaaattgggggatatagaggaggccgtagagtttgtcaccatgcagcatgatgatgaactttgggaagaattaatcaagcaatgccttcacaaacctgaaatggtgggcatattattggagcacacagttggaaatcttgatcccctttacattgtaaataaggttcctaatgggttggaaatccctcggctccgggatcggctggttaagattatcaccgactacaggactgaaacatcgctcagacatggatgcaatgatatcattaaggcggactgtgtcaatcttttaattaagtattacaaagaggcaaggcatgggatttctttaggtaatgaagatgagccgcgggttaaaatgagtgatactcgtgcttctcaggtatttgacaaatctccaagtctgagaactgtggagttgaagtcaaagactaggggaggtggaagatgttgtatatgtttcgatccattttctatacagaatgtatcggtcattgttttcttttgctgtcatggttatcacacaacttgtctcatggattcgtcttacactagtagtaaccagaaagaggtccaagccacgtccctagaggcggaaacgtatgatggttacaatggttatgaggaagatgctagtgaggatgatgaagaagccaagtctggtggtcctcgtatgcgttgtatattgtgtactactgctggctagttgagtgtgttttttgtatgtgtccacagttgtgtttgcatggttaatgttttagttcaaagttccatgcacaacgagcatgtgtggtttcctttgttgtcaatttttttttatcaaaataatcatatgcgcccctatttttttttagcc

SEQ ID NO: 113086 - DNA, 125 bp, Glycine max
  Clone ID: PAT_MRT3847_73123C.1
caagcaccggtctggctggtcagctatctggagatattggatcactatctgaattagagactgtggatctatcttacaacaaggacgtgactggagcacttccagaatccattggggaattgaag

SEQ ID NO: 113087 - DNA, 341 bp, Glycine max
  Clone ID: PAT_MRT3847_73124C.1
gacaacaagttcaagtattcactacatgttattgtccaccacctcaatacgaataccttcgccgaatcggaatttcgaagcaattaaagtgtgctactattccttcactatcagtttccgcctcttctgttcttcgtaacgcgtcgttttgctgcacctcttctgtccactgcaatttaccttcttcacccaaaatcttcgtcaaagggcttcctctctcaacctctgaaggacgtctgatgaaggtgttttcagagtttggtgacgttactctaggtaataataaattctttttgggttggtgttttcagagtttggtgaagttactctaggtaatacta

SEQ ID NO: 113088 - DNA, 216 bp, Glycine max
  Clone ID: PAT_MRT3847_73125C.1
acttaatcgtatgaataatgcgggcatcagggccaccatgtgtacatcatcaggactatttattaccatatacgatattaaacaatgacaataagatagcccatcatcgctcggtttacccttaagaacacactcttaaggatctttgtttatcaccacattcaacaccaaccaactatttacattctacagctgattgcagctcaactgctatca

SEQ ID NO: 113089 - DNA, 466 bp, Glycine max
  unsure (1)..(466): unsure at all n locations
  Clone ID: PAT_MRT3847_73126C.1
ccacgcgtccgcttgtatggaggttgtaaaggggtgggattaatactgtgtcataataggatgtgatccaattcacccttgtgttgttgttgacctcaattgcttggagtaaatccaaatgttctggctatttaagctgtttgtaagtttttacattttataaaatattattgtcatccaaaaaaaaaaaaaaaaaaaaaaaaaaaaaaaaaaaaaaaaaaaaaaaaaaaaaaaaaaaaaaaaaaaaaaaagggaggnccggctggaggccccaagcttacccaccctttccatccaacgcaaagccccctaatataccgccctttaaaaaaacttaactagagtgaattcccggacgttcccaattgaaaaaaccttgaagacaaccccctttccccccttgaagaacatccccttaatcccccctcctttaacatgtaaaagacccagaaagaccgcccttacc

SEQ ID NO: 113090 - DNA, 551 bp, Glycine max
  Clone ID: PAT_MRT3847_73127C.1
caatcaagaaactcattagagatctcttgctatacaaatgaaagaaataattggtctatggccgctaaagatattaactagacaagagcatacccatagttaggacatgcatgtgataatttacagagaaatatatgatttgataaatttccttgcttttcaaattttgtgcattgatataatcatgaaccagcatgtaacaatgagaacttagcccataaacatatctttcccttatccaagaccaagcttgccccagtgatcaaccaatggccaggactatcttgtggacctttacacaactgtgatgtgtctataaatttcaacagcttttgtgtttgcacaggcactggaggtcctgttggaaatacacttgaatccaaaagcacaaccggttttttctggttctggtctttaccagaaattgatgtgcttatgactgagaaaatgccagacctctgggataacccagaggagccctgtgtccaacttgattttacaactgcacaattagacaccttagagaacaacagcccggacgcgtggcactc

SEQ ID NO: 113091 - DNA, 479 bp, Glycine max
  Clone ID: PAT_MRT3847_73128C.1
acaaagggaaaaaaattcgttcccaaccaaacgaagaacaaaaacggcgtattaaaaaagaataacacaaatcgaacagactttgatacataacaccaaaaatagttgacatacctgctaaactaacctcgaaacagaacagactggaaggtatcctcaaatccccatccaagcaattgccaatttccccccccctagctttgaaaagttaaaaagattttccatgctatacctattcgcccaatataaaatttaaaaactgggttttgtctgtggcccatcttccaattatatttgtgtggggtccaaaaaaaaccatctccctttcaaaatcgatctataataaagaacaccaaactgttccatttccttcaccacactttgagtggacacatttaatcttctccactgactgacaaagggcactgtaggtgcaatcaaaagatgcatcaaaaatgttaccggactgcgcctttcac

SEQ ID NO: 113092 - DNA, 308 bp, Glycine max
  Clone ID: PAT_MRT3847_73129C.1
aacaaatcaaagacatggacatctccaatttcattatagaggtctacgactaggtaggcttctttgtggtgctacttaccaaggcacacttaaccgataccgcttattacaccttcaacaagttcaacctaatacaaccaaacattatgctccaaaaagacgctaggatctgatcctgtggggtgtgacaactaaccaaagatggcagcaacggggtgcacaccttgcaatctatcgcacgagccctttacgctgtcgcaatacagattagcgacagctgaaccggaagggtagccagctgcgctaca

SEQ ID NO: 113093 - DNA, 255 bp, Glycine max
  Clone ID: PAT_MRT3847_7312C.1
ttcaatttgaggtatatcatatttgaagtgctacaatgggtgaaagtatgcttactatgtgaagctaacgagaatgatgctgaagatgaaattaaaagtgccgagtcattgcacaccaacttgaacacaattcaagttgctacagaagactcctctgagtctaataaactgggacaaagaggattttgagctgtgtacaggggtaggctctctactggacagatgattgctgctaatacagtgacaagagattct

SEQ ID NO: 113094 - DNA, 433 bp, Glycine max
  Clone ID: PAT_MRT3847_73130C.1
cggctcgaggtctgaattacaatttggattttcaaaccccatgcccactttctcttgactttagccatctcttattccttaaagctagctagcttgatctccaagttctctctcccactctgttttctctctcttgacccatttctccattttcttatataatacaattactggccctcataaagccattccctcgttctttcacaattgcttcctgcagttaacaacaatatgtcacgacccagcactttgctactcctcttcatgcttctatttgcttcattttgctcatgtttagaagccagaaaacttgttctagacaagaagctgaacccatcttcaagaagggacagtttgttcctgagtgcactccctaagggcaccgtgccaccttcttcaccaagcaaaaaagggcactccatggaggttgatg

SEQ ID NO: 113095 - DNA, 227 bp, Glycine max
  Clone ID: PAT_MRT3847_73131C.1
cattcttatacgtatccacaagatgtagccgatagggaacgcattttcaagctttttgattccaatggtgatggctaaatctcttcacaagagattggtgatgcccgtaaagcacttggatgatggccgagattgacacagatggtgatggcttcatttcacatgaagagttcacaaattttgcacgagccaaccgtggcctagtgagggatgtagccaagattttt

SEQ ID NO: 113096 - DNA, 285 bp, Glycine max
  unsure (1)..(285): unsure at all n locations
  Clone ID: PAT_MRT3847_73132C.1
acgcgnacgnaagcacggaagggggggcgagggaacnctagaggggaacggcacaagagcagttaggccctacagggccaactacactggaggagttaaaacgggggggggaagccgataaccggaaccggctagtgcgagccacccacggaggacatcgagggaacaccactggtcgaaaaccttggggggacggaaagagacatgcgacgggggtaagcgggacaaatgcaaagaatgagggggaagcggacgcaaaacaacaacattggctggaagggaaga

SEQ ID NO: 113097 - DNA, 235 bp, Glycine max
  Clone ID: PAT_MRT3847_73133C.1
ccaacatcgattccgactggctcgatgtctatcactttattcagtccttgagaagagatgttgcgcgttggcttacaaaaccacccatgccttaacaaaaaatgtggctcacaacccatgcaagggtgttttgttctgacgacacgtcattatttgttctcgggggacttgaactttaataggggggatttcatccctttatgtgcggcctttccaaggcaacggattttagttc

SEQ ID NO: 113098 - DNA, 295 bp, Glycine max
  Clone ID: PAT_MRT3847_73134C.1
aaagtttgcacctcggatggttagtgcttctgccttcaccatagatgaaaagcgtttgactatcatccacgtgggaaagggcaggatctatgagggagtttccgtacatgcacttgatctgctcaatatacatcgtgcattaatttatgctggagatgcatccatcatggacggtgaccgcttcaatgctgggtgttggcaacaaaaacctgtgtataaagccctggtgaaaggaaaaactctctcgcgcgacaacattgcttatacatcatttgtgggatttgcctacagggcc

SEQ ID NO: 113099 - DNA, 227 bp, Glycine max
  Clone ID: PAT_MRT3847_73135C.1
tcgaccatgcgtccgacgtatatctagtcgtttggagcgacccgagttacactctgtgtgacatgttggtttaccaggagctccttacaggtgatgagcctctatgcgactccttccgttacaaggaaattgagaatggaatgctgtgggaagttgatgggaagtgggtcgcctaaggagcaggtgatgtcaacattgtggcaaacccttctgctgagggtagacga

SEQ ID NO: 113100 - DNA, 840 bp, Glycine max
  unsure (1)..(840): unsure at all n locations
  Clone ID: PAT_MRT3847_73136C.1
ggctccacgcgtccgtacggctgcgagaagacgacagaaggggatcattcataatccatcaatcaagaaagaaacagaaacttttttctttgataaatttgttctttgttccgacaatgcgtccaccgcggaagagggtggatttctcgcgcggcgacaaggtggagatctgcagcaacgaggagggcttcctcggctcctactacccggccacggtcgtgtcgcgcctcgacaacggcctctacgtcgtacgctacgacacgctcctcgaggacgacgcctcgttccagcccctcaccgaaaccctatttccgaaagagctccgtccccatccgccacgtgtccccaggacccacttcgcgctccaccagtgcgtcgacgccttcgacaacgacggctggtggctcggccagatcaccggcaagaaggacggcgagcattactatgtttacttttccaccaccaatgaggagattgcgtatcatgtttctggaattagggttcaccacgagtggagccatggcgagtgggttttgtccaattgaagttgaattcgaaggttgattcactttcttgggatcgtatatgtgtttgatttctttttcttggttttagtagtctctattatactgttgttgttgtaggatggtagaagtaattgtacactgtgcttgttcttgttgttcatatgtgtgtaattggaattgtacttccaattggtgatacaacttttccatatcgatccttccgcactgttcttgttgctgaagtaattggaagtaatgttggattcactttctggggatcgtnatatgtgttggatttgggtttgtatttttc

SEQ ID NO: 113101 - DNA, 389 bp, Glycine max
  Clone ID: PAT_MRT3847_73137C.1
gctggcgataagcccaattatcttgtattcgttcgtacacctgtgaaaattttttgggttatcaggtgcattaaagaaagatgtgaaatgtttacaagtgagcttacagaattaaaaaatgataatcgtgaaggggcttgttcaacttaaacataaaatgatctgatgcatacataaatcgaggcccttgaaaaaggaacaaggccagaaattacatgaacatgagacctcctaaacaataaactatatctgttacattttgagacccagaatgctttaccaactgtaattgttaaatgcaccgatcaaggttctcacagggagaacgataagtggaacttattccacgggctctgacaaatgtatactgtaatatgtgctgatatttg

SEQ ID NO: 113102 - DNA, 412 bp, Glycine max
  Clone ID: PAT_MRT3847_73138C.1
gatcgagatctctttgctgtttgccgaggatcggagcttctccgcgcccgtcatggaggtggctaggactgtaaaggacgtctccccgcacgatttcgtcaaggcgtactccgcccacctcaagcgatccggcaagatggagcttcctcactggacggatattgtaaagactgggaagttcaaggagcttgctccatatgaccctgactggtacttcattagagctgcttcaatggcgagaaagatctatctgaggcagggagttggagtgggtgcttttcagaagatatatgggggtcgcaagaggaatggaagtcgtccaccccatttctgcaagagcaatggggcaattgcccgcaacatcctgcagcagctggaggctatgaagatagttgaactagatcttaaaggg

SEQ ID NO: 113103 - DNA, 148 bp, Glycine max
  Clone ID: PAT_MRT3847_73139C.1
ggttatcatgctgatggggataaaagagaaaggggcctccaccataacacaagaaaagagattcatcacacttatatagattggacctgattggagcaagattgtccattaaaataccagacctcaattgtgggttacacaaaggggg

SEQ ID NO: 113104 - DNA, 425 bp, Glycine max
  Clone ID: PAT_MRT3847_7313C.1
gaagcttctagattctccgatagggtgttggagaggcttttctccaaggctggaacgggttttgtgtctgttgtggtgggaagctttgcgaggaacttggttttgggtttctacgatgccgaatccgtcggcacgaggtctcaatcggatgttcctggatgggtgaatgtgatttgtgatgagaggtgtgggaagcttataggggattgtgtgcagacttttgtgagtactgctgttgctgtttttcttgataagacaaaggatgtgaatacctatgacgaaatgttggccggattgtcgaatccgaagcaccaggagaatgtgaaggggattttggtttccatgtgtaatggtgctgttgaaacctttgttagaacttctcaccaggttttgacgaaccggagtgtgaggtcgaattcgggttt

SEQ ID NO: 113105 - DNA, 463 bp, Glycine max
  unsure (1)..(463): unsure at all n locations
  Clone ID: PAT_MRT3847_73140C.1
gagcacaaaaacacacttctgcagacgaccaaagcanacacatagggaaccggccgctatcaccacacttttaaaaaaaaggaaaattttggccccatgtgggaggcacaattaaaaccaaataattctcttaaaaaaatggcgaaaggcccaaaattcctttagccaacaacttgggggcggaccaaataaataaatttaacccccaataaaaaaacccctggccccccccaagcgcctgtcacaaattaacgggaacatccttttttaacccccttcctacaaattaatttacctttccatgggattttgaaaaaaaaattttcccccctgaaaaaaacttttggtggggggaacaaaggccccccctttttgagaataaccggagggggtggacttttaatccttattccccaaaaaaaaaaactccacctttttttccccctaaattttttccaaaacc

SEQ ID NO: 113106 - DNA, 272 bp, Glycine max
  Clone ID: PAT_MRT3847_73141C.1
catttggtgacaatgagactcgaaaagcagatatgccttcatattcatatccattgcaaaaacagaacagcagggcatctgttgatgatgataataaagaaaattgtggacacacttataaatcggaacaattaatgaattgttccccaattaaatctgcaactttggatgaaaagaactctcaaagagatactgttgacggcaattctcagcataatgtcaagcaagacctcttgattctaaaatgaagactactgagattgagcaacaac

SEQ ID NO: 113107 - DNA, 219 bp, Glycine max
  Clone ID: PAT_MRT3847_73142C.1
caaccatgtaattaaaaacggataggcggccacgaaacgattttattttattaaattgttcatacgaagcggaaaagacattgtgcatgactgggaactatttgagctgagaagcgacattacaatttgtgtggctaaagacctatatgccggactaccctttttattccctctaaattctgatggcccgggccatcttgctctcaggaggagagatct

SEQ ID NO: 113108 - DNA, 382 bp, Glycine max
  Clone ID: PAT_MRT3847_73143C.1
ttcacgcgtccgcccacgcgttttgaagataggaatataccttacagatgggggaatcaggaatcatttgggattgcatagtgcttttggtgacgaatatggatgacatagatagtgagagtgagaataaatctttgttttatgtcaatggcacgaatcattggtttttacagaagtgagcaacttactcctgatatgagataagtgagtttatttggggtcattattttaataagtggttatagtaattatactctataatttaagagttgaataaacatggtttgtaattgaaatatttaatagttcaaatttggtcctaattagttgtttaacacttttgacctcttttttctaattcataatttatatttataatata

SEQ ID NO: 113109 - DNA, 319 bp, Glycine max
  unsure (1)..(319): unsure at all n locations
  Clone ID: PAT_MRT3847_73144C.1
gtttggaggatacgtanggnaaggncggnatnnagngggagcgagagggttgtnagggagtagtgntgngnggggnggnagatntgtgtggngntaggggtnntgatgnagngagngangagaaggtgggngggnaggnggtnaaaagcagtgtngnngggtggaaggtggtggtggtggtgtnggnantggtgtatgtgtaggttntgtgntngaggnntgggagaaanntgngngngcnnggtnnnagaatnangngggatnaggtgngaggnggaggatgtgttngtgngtgaggangtgtnagtggtgnggtngn

SEQ ID NO: 113110 - DNA, 369 bp, Glycine max
  Clone ID: PAT_MRT3847_73145C.1
ggcagaaaaaactaatgggcttggtatttaagtgaaaaccgacactcttaaactagcttgcttaaaaaaaaaaacatgctaacttaaacggggtgtgatattaagagtacggatacaaggagtagataggggtgctagaaagaaacaaacttttcaccgctatttcctgatctctgctgtaggggtgccatgaccagagcatccacgcttggctcacaaccaattgtaacgtgggttgttttatattgcctgtccgttcatagcggcatcctttacttttatattgttcagcagttccttccacatcgatcattgcactttgagaatgaaaacaagctggcctgtacactccagaacaggggctgtgta

SEQ ID NO: 113111 - DNA, 716 bp, Glycine max
  Clone ID: PAT_MRT3847_73146C.1
cccgcgtccgtcttggtcatagttaacatacatggattatcaagattgtgttaactagttttaatcttatccatttatttgaattatatggttgagattagcccctgtcatgctatcatctgtcgccataatatgcttcctatattattatgagatttgctaaagtacattcacatattcactgtgagttataactttattttcttaaaacacatccatccaatgtatagcttgttaaaatactccttgtaaaaaataggtaggtgcacattaccaaacctgctgatgtggtttgctaatgtacagtcacctgttttttaggagtattttagcaagttacaacttcattgttcttaaaatacagtcaaggtgtagctttttagaatactattttaaaaaacaagtggatatgtataacatgttagatcaaatataaatatctgctgatcaaatgcattcattagatgtcttcaaataagaacaggaagatctccaaacatgtttttgtttgttaatgataatgaatatcccagagattaaaaattgttactacatttacatattacatatttaagttgaagtttatgcagtgtaacttatctgtctgtctcctcacagattgatggtgagatgtactggtattatgagtaccttgttcgtaaagcacctttaaaacttgttagtactttcttttgctatatttttttcatggaaag

SEQ ID NO: 113112 - DNA, 2324 bp, Glycine max
  Clone ID: PAT_MRT3847_73147C.1
tttgtattggccaaattaagttttgagcttcatctaactcttagccatcagattctcaagtatggctctagagagaaatattcagccacatatgtaatggtagaatgtcacaagcctcagtaatatcatttgaggggtgaagatgatacataaatactacttgagcaaagatagagccattctctaatctctagcaatttgacttatctgaagagagccattcttttgctgccaataaatcaggaagaacaactgcaccagatttcctccattccacagcatctggggtcttaaacctatccaacaatagtgcatgcatccctatgctcttagctggctcatagtctttgcgcatgctgtccccgatgcaaccagcttcttaaaatatccaaatttgatatgcttgtaaccgggcaaaatcacagaacccaatggaaaaaaagagagatactttcgaatatatttgtattgccaaattaagtttgagctacatctaactcttagccatcagattctcaagtatggctctagagagaaatattcagccacatatgtaatggtagaatgtcacaagcctcagtaatatcatttgaggggtgaagatgatacataaatactacttgagcaaagatagagccattctctaatctctagcaatttgacttatctgaagagagccattcttttgctgccaataaatcaggaagaacaactgcaccagatttcctccattccacagcatctggggtcttaaacctatccaacaatagtgcatgcatccctatgctcttagctggctcatagtctttgcgcatgctgtccccgatgtgcaaagcttcttcaggtgcaatatttccggccctctcaagtgcaatctcataaattttcgggtttggtttctcgacgccttcaaggccggaaaacacaccaaagtcccactcagatccctcgtttaaacccaaagctggaagaatcacatcttgatatcgatactcggcattgctcacaataccaactttgagaccctctccacgaagccatctaagaaattcgtacggctgcgagaagacgacagatgggggaagaaggaagcatcataaccggccaaagcttctctctcttccatttatcccccataaataaaactaggtgaaaaaaatatactctgtgcttctcatgatgatagtgtagctgaagctgcttctgctgcagcattggtgatttggacacaaaaaaagtttcaaacttttcagttctctgagcttctggtttatcaattttgaaggagttcaatactttaccctattagttggttccctgaaatttgtattggtattgctgtatcagaaattcttctgaacaatctctttaatcaaccatgtcattattggctaaactacgctgtgtcaccatagatgttactggtaccctaatggcttacaaaggggagctcggtgactattattgcatggcagccaaagctgcaggcaaaccttgcccagactacaaacgtatgcacgaggggtttaaaactttcccatacgaattggctcccagctattcatgtttcgggtgtgccgtctcaactccttccgggccatcccataatcaaccatgtcattattggctaaactacgttgtgtcactatagatgtcactggtaggctcgaggcttacaaaggggagctcggtgactattattgcatggcagccaaagctgcaggcaaaccttgcccagactacaaacgtatgcacgagggttttaagcttgcatataaggaaatggcaaagaattatccatgttttggacatgcagccaaaatgccaaacattgtgtggtggaaaacctgtgtgcgagattcttttgtcagggctggatatgaatacgatgaagagacatttgagaaaatcttcagacgtatatatgcgtcctttggttcatctgctccatatactgtatttccagactcccaaccatttcttagatggcttcgtggagagggtctcaaagttggtattgcgagcaatggtgagtatcgatatcaagatgtgattctttcccttgggcttaaacgcactctatgagtgtgtcgtgtttgggtttcgacgccttcaaggccggagaaaccacacccgaaaacttatgagcccgcatttaaacccaaagctgatgttcacatctgatatcatactcagcgttgccaacatgcccaacgatgatgcgctctgtggctgcatgtccaaaacatggataattctttgccatgcacttatatgcaagcttaaaaccctcatgggaacgtatgtagtctgggcaaggtttg

SEQ ID NO: 113113 - DNA, 146 bp, Glycine max
  Clone ID: PAT_MRT3847_73148C.1
atttttgtattaaaaatactgttcaaactcttcataaaaaaatgaagatgggtggaattcaaaaagatctgatctgttagctaaatatagaattcaaaacttcatgcttaagttaagcaaatgcctaataatttcctaactgtaca

SEQ ID NO: 113114 - DNA, 175 bp, Glycine max
  unsure (1)..(175): unsure at all n locations
  Clone ID: PAT_MRT3847_73149C.1
ngtcgcnngcacgngtgcncgggctcncgcctcgcagcacccncgccanggannacgccgnctntnancncnantcanacnnncgcccccngngccacgncccncacnnnngnnnngagnccgccantgncnnnggcngcagcacngccaccggncgaggnnacctnccacgntc

SEQ ID NO: 113115 - DNA, 194 bp, Glycine max
  Clone ID: PAT_MRT3847_7314C.1
aacaatcatttcaagcagcgtagtctgatttatggtgacagctaaaaaacttcatcacgtaccttgtacactaatgcagcatgaaattatcatagctacatcgtttctatcatgagacctattcattaaatctactcattagcagcgtcaattccccaagtgaaagaacttaccgtgcattttataagttcttg

SEQ ID NO: 113116 - DNA, 761 bp, Glycine max
  unsure (1)..(761): unsure at all n locations
  Clone ID: PAT_MRT3847_73150C.1
gaacatctaacaaaatcgattgggagaaaggcaaaggggatcgctgaaatcaattagtctggttgtagtgggaaaagaaaagaaaatgaaaatgggtggtgggtgcaagtgtttggtatcgttggtgttggctttggtgttgatgaggagtttggcggaggcgcaatcgggcagcagcaccacctgcgcccaggagctaattccatgtgtgaactttctgaatgggacaaccaccccaccaagctcttgctgtgaccctctcaaacaaaccgtggaaaaccaactggattgcctctgcaacatcttcttcagccccggcttgcttcaaagcttcaacgtctctgttgatcaggctctcgctctcagtcgccgctgcggcgtcaccaatggtatcaccagctgcacaaacgggtcagctccagctccgggttcagggccaccaccagtcacacctggaggtgacaaaggaggagcaggcagagtcacattcaccgggctttctttcctcctcttattttgggtatctatgctgtttaattaggaaggtggttctttatccttcggagcctctactatgttgaagttatctttgtatttctacacgttgattattcggtgatcatatgattgtattttcttttcactttttttcttctttagagacctctgattcaattgagtaaaaagtttatttaaacgaacattcttcattgtcaaattttagttggtagagttatttgtggtgcntttggttgcaccat

SEQ ID NO: 113117 - DNA, 611 bp, Glycine max
  Clone ID: PAT_MRT3847_73151C.1
actaaaaatgctgcttcaatatataaattgaacaatttctcaaacaatagactggataatacaacaatgtttccgatcatacataaattatagttgcacagatgcaaaatcgcaacttattaaaagttgttgaattacacatcatcttcggaagatacagaagaaacccgatccctaatcatgggaaatttatcaggtaatttatacaatggatcatcacttgtagaagtagacccttcaaatgcaaggcctagtgtgtatcctaaagctctagctactggaactgccactgcattcccaacttgaatgtacctttctttgaccggcccacacaacttgtagaaatctggaaaaccttggagtcttgcattttcacgaatcgtcaacactctgtcttgttcagggtgtaaaattgcctggttgtgaggttctgctcttgtcacaacagttggaacagtttcatcccaccataaccgagcaaaaggttttgatgaagttccattcacaaaagtcatggcataatctggaaccaatggttttcctgaatccaaatatacacgttcgacatcaggatcccattcaacctttgtatcagctcccacacgaacacc

SEQ ID NO: 113118 - DNA, 199 bp, Glycine max
  Clone ID: PAT_MRT3847_73152C.1
tttttgccagcattcaaccaaagttcattggggggggccaacaagaagctatcagccatctactgaatgtattaccaacccgttcaatcagcgactaaactgctgctagttcgtcaaaacgtgggacatgttctgctccgagtccttcttcatgaccttcgacatagcatcttaaagtctttctgagaaaagttgatcc

SEQ ID NO: 113119 - DNA, 310 bp, Glycine max
  Clone ID: PAT_MRT3847_73153C.1
tttaaagaaaagaactccattacacttagattaacatctggacaaatatacattaacattctcaagtctcaacgtacgatcctacttattaagcaaaagattacaaacaataaagtaaaatttaaacaaaacttcactctcaagttctaaactcatcttcctcccgttagctatttgtaacggagcatctaaaaacttaaaatttatttattaattaatagaaactaagcattatcttgttctacccccggaagcaaaatctggcgtgaaggattaacgaatgagagtttactaccttgaggcgactgac

SEQ ID NO: 113120 - DNA, 1394 bp, Glycine max
  Clone ID: PAT_MRT3847_73154C.1
gtcgtgcacttgttcttcttcccttctccttgtgaatcctccgccgagcacttcccgccaccacgcgatccgccgaaacctgagaatgtcccttaacaacaacgattcaaagctgaacccttcttctctgctgaattccgtcaccaaattactatggggccaatcgctcccgccggggctcctcgtcgccaccgtccgcaccgcctggaactccacgtggcacctcatgatgtcgcagctcgccccctccgactcctcaggcggctactcccgccccgcctccaaattccgcttctcctcaaccaccccttcccagggcagcagcctccacctctacgtgggcctggcatgcccatgggcccaccgcaccctcatagtgcgcgcgctgaagggcctggaagacgccgtgcccgtctcggtggcgtcgccgggcctcgacggctcctgggagttcaaacgggccggtgggcccgacacaaatacaattgctccgagtttggatagagcgaatggatgcaacacgttgaaggaagtttataggcttcggagaggtgggtacgatggaagatccacagttccaatgctatgggataagggttctaaagacgttgtctgcaacgagagctacgatataattcacttgttcaattccgaattaaacagcgtagctcaaaacccagggttggatctctcaccccctcaattgaagaaacagactgaggaatggtatcaaatcatatatccaaatgttaacaacggagtttataggtgtggatttgcgcagagtcaagaagcttatgatagagcggtgaatgacttgttttctacattggacaagttggaggatcacttggctaattcccgttacttatgtggagacacattgactcttgtggatatttgcttatttactactctgattaggtttgatcttgcgtataacgttctttttaaatgcactaagaagaagctgtgtgagtataccaatctacatgcctacatgcgtgacatttatcagattccgaaggtggcagctacttgcaattttactgagattatggatggttactacaaaatcctttttcctctgaatccagggagcattagacccgctatgccttctacttctgagcatgaaagcctttgcaggcctcatggaagggaatcactgtcatcagctacactagcatttgtaaaatagtcataagtgaaccacctcacagaactaaagtaaaatccctcgtctgtttgtgatagtgaaataatgtttaacatgcggtttctttcaattgttgcaacttgcaaatatagcacttctacttaaatgttatcatgtactttatgtaacgcctaaattagttcctaaatcaacctacctttcagtttcaaaaaaa

SEQ ID NO: 113121 - DNA, 145 bp, Glycine max
  unsure (1)..(145): unsure at all n locations
  Clone ID: PAT_MRT3847_73155C.1
nangncgcangcacgcgnacgnaagcacggaatncggcgcgagagaanncacnnggcaaaaannnngnngcagaggcagagagananggaacaccanaccacanngcacngcnnnnnnanacacaanaanacngnaanacncaaa

SEQ ID NO: 113122 - DNA, 483 bp, Glycine max
  Clone ID: PAT_MRT3847_73156C.1
gagaacatatcgtgcattggtccttagatttttgaaagatcgaattgcagctctattgttgcttgaggtaagcactaggcagctaatggttcctgtataatctgtttgactctccatgccatttgttgattgccctagtacaaaatctcagtgtataaaacatccaagatgggctagttgcatctgtgattagttagttagggatgactttacttttttttagatcagtggtgaaatgtaatctcaatcatcttattaatctgcgaggaatgatgaattaatttctttggttaccttctccagatttactggaatacaacataattatagggatacccacttctgtgatcgaattttactattttttagtagttacacttggattgagatttttattcagttaataactgaatatttaatttggccgttcttatgccagtgcacacttctcacagggttgttttgtttggaggtaatctctag

SEQ ID NO: 113123 - DNA, 526 bp, Glycine max
  Clone ID: PAT_MRT3847_73157C.1
ggctcgagatgatttctttttcatcttaggacccagagcagagctagctagcttcctcaacatgtttttgtggctctctaatttcatccgttcttggcctctactaatctatgctgccacttgggttactgtaatgacgtttacggtggcagtggcttcactctccacagaggtggcatttgtctccgccatatcttcctctgagaagtgcaagagtgatgggtcccttgttagagttagggttccggtggaggagacaccgtgtttcccagctcatcttttcaccaagtcccacatcgatgtcatcgttccaccgatctttgcagcgctcgttgtagctgcttctgcttgcgtagtaaaagttgtgggcctatgggagcatgattaaaccaactcatgcaactaaaactttctattctttgtggaatcaaatttattcatgtgaattttattctctgttgaaaaaaaaattcatttaaaagttctatttgaagctatttaggatttactgcgtgtttgggtctgc

SEQ ID NO: 113124 - DNA, 422 bp, Glycine max
  Clone ID: PAT_MRT3847_73158C.1
ttcctttttttttttttttcttttttttttttttttccttttttttttttgtctccggggggctaaagcaatttttccaaattaatgccttaaaattgttacattgaaagcctttccccttaacacctcccacaatttacttttcccacctctcttaggggtgggaccaaggacaaaaaacctgggttctttgactttttaaaaagggtctgaacccccaccatgggcctaaacccacccccggtgggaaaaaaaatggtccttaaacaaaaccttttccttttcaggagattaatcctattggttttagttgggagaactcccttggggcccccctctaatcctaaccaaaaagtttccaaccccccttacctgaccccatcagttttttacccttccttggagagggggggtggggtttt

SEQ ID NO: 113125 - DNA, 305 bp, Glycine max
  Clone ID: PAT_MRT3847_73159C.1
gggctaaaagctacttcttataaatgttgaatcaaaggattatcaaatattggagactataatatgtatgtcccgaatatgagaggaaatgggtggccaatacattattgctcacagatgtggaagtaattatttcactttagcgtcaaatgattgttcaagaaactattaggtggaacaattatagacgactgagtatgttatgtgaaatgaaaattcttgatgcttggaaggagaagagtttggaatgaggattcttgagtattatcatgcttaaaatctcaagttcttacctatgaaattgc

SEQ ID NO: 113126 - DNA, 280 bp, Glycine max
  Clone ID: PAT_MRT3847_7315C.1
tttgttctttgaaagctttgttttttctgcgatcattttccattgggtggaagaaagtctcaacctttagtcgaaagagcaaggttctgagtgagtgagcgatcatgtgtggaggtgcgattatctccgacttcattccagggggtcccgccggcgtgggcgcagcgcgtgaccgcctacattctgtggtctaatttgacgaagcggttttcgaagtcgttgctggaccatgatttcgaggcagggttcatagaattcgaggatgactcgcaaatccagg

SEQ ID NO: 113127 - DNA, 612 bp, Glycine max
  Clone ID: PAT_MRT3847_73160C.1
ccaacagcccctctttctctctcttcagcgagaagaaaccgccagaaaataaagtgtgtgtgtgtaagtgtttgtgtggtgttgttgacctttggaattggaagtgggaatggccatcaataatggtgggggaagcgaggaaggggcattgcagacagtgctttacatgtggggctaccttcccggagctctgccgcagaggacgcccctcttgacgccggttgccgttagggttccgccgtgtgattactcttggaatgatgtttgcggcggtggctgtggattcgctattgctatatctgaatcggggaagctcatcacatggggctcaacagatgatctaggccaaagctatgtgacttctggcaagcatggggaaactccagagcctttccctcttccaacggaagcctctattgtaaaagctgcagcaggatgggctcattgtgttgctgtaacagaacatggagcagtttatacatggggatggaaagaatgtattccctctgggagggtatttggtgaaccatcaacaggggtaagtcttgagaaagatgtgccaggaaggcatagtcaagtgtccacagagcaagtgagccctcgttctcaagg

SEQ ID NO: 113128 - DNA, 590 bp, Glycine max
  unsure (1)..(590): unsure at all n locations
  Clone ID: PAT_MRT3847_73161C.1
tcganaacgggctgcgagaagacgacagaaggggactgcgttgtgttgtgttgtgtctcttgtgtgtgacagcttcacctacgtgcaataatttattcaattttcttcttcacaacatgatgctgaagctgaaataatcaggaaaaagaaaagaaaaaaaaagattctttcttggcttgtctaatgaaggtaataagagcctccaagcaaggaggaacgtgtctgaatctccttataaacaccgagatttcagagagaagcagaatctcttgccacctcctacgttaagttaaaggaatcctatttttgggcatggaaatcctctcatatggatctggaccatgcagtcaagcagtggattcgaagtggaaattggttgacaaatgctcgaattcacgtcaatcaaggcttcccagtgttggaaatggtggagtttattataccaataccatttctagaagcggctcagctgagatttcatgatactaataaagagcttcaaagagattttgggtctctgagtgctcttgaagggtccaaaagaaccaattgcaaggcctatagtgatagttgcgatggctatgtgattg

SEQ ID NO: 113129 - DNA, 388 bp, Glycine max
  unsure (1)..(388): unsure at all n locations
  Clone ID: PAT_MRT3847_73162C.1
aggaaaaacttacttgggttttttccccccaacaaacccggaaattaacttctnnccttncanatncaaaggcgnanagggttgcgtnctgcaactctggaacttcgatttggcanagtgnatncccaancgaacancaactgttttcgggctttgccancaaaaaaaggctttcgganatncccanatttccctnccagttaaaccnatcctggcnaaaganngtccttgcttcnctttgcnanccatggcccaatcncaaaaaggcnctttaaggnacctatggggtccaaatgaantcgcaaaaacngtgnaaggcaaaggnngtcaaatnatggctggtcccagnaggntggaattcattacccttggggggctttctgggagg

SEQ ID NO: 113130 - DNA, 327 bp, Glycine max
  Clone ID: PAT_MRT3847_73163C.1
aaaaattaattaaagcctaagtggctccaaaaaaaaagccttcaccgggggggcgaggggtctaccaaaagtcttttttcaaaaaaaagacacccaaggttcccccttttttttcccaatttttttggtttcctaattcttaaaaccaggacttttaaactattattatggaactcattccaccccccaccaggaccttcttaaactccaacatgatacacaaattcattagttgattcgaaccaccccggacccaattaaatgacccttttcccaaattccaacctcccatgaagcctttttaaggggcccagcccctaaacatgc

SEQ ID NO: 113131 - DNA, 373 bp, Glycine max
  Clone ID: PAT_MRT3847_73164C.1
ccccataaagcatttagtataatcaatattccatttttttttttagcaggtagtgacgattgcttcgtcagaagcgcaatccagattccttggcgtagtttgctacagtaatgtacacgaccatatttacatcttgtttgcacatgtgacctacgcggtgcggtcgctgtgcacctcttcttcggtctctttcttcgttgcctcgtaacgcttccctcggaaagcgtacagtccccaattgctgcacgaaacgtcgtgcgggtccaggtcgtttagatcccatctcagactccggaagatattctctccaggcttaagcaaaatgtccatctcgttgccataccgcttgaacaagctcgagccgaactccgag

SEQ ID NO: 113132 - DNA, 432 bp, Glycine max
  Clone ID: PAT_MRT3847_73165C.1
gtcacgctttcggtgcatccattagccaataaccaaacctctcaacacacatatcagaacacacagcacgacacaggtcaggtttatcggttccctacacagctcctcacaccacaacacacacacagggacacaaagacgcactcaaagacagactgagaggtaacaagcctcgccacgtgttcccctacgcgctgccctccacgccgtgctctgtactacgttcaggattcctagcgagattctcacgacggagagaaaaccgtatcgacgtcgtttgacttcacgcccgttgttagcccctctgattcccgtccttactcgtgccactgctcttccacgcgcgtctataagaaggaccataggcctagtcttaagccgcgggagcaaatcgatgatattgtagaagaagggcttgttcaaggggatgat

SEQ ID NO: 113133 - DNA, 682 bp, Glycine max
  Clone ID: PAT_MRT3847_73166C.1
tgaacaccagaagttaccctttgcctccaaaaaccaacctaaggtatgtttctgctttgagtttgaagcaaataattcatgcaattctgtgactgacaggaagcgaaaatgaaagagattgtgactgtccaagttggtgatttcgccaacttcgttggttctcacttctggaactttcaggatgagttgcttgggttggctgggaatccctctgctgattcagtcttcaagaatcaggatcttaacatggatgttctttatcgtactggtgagacacagcagggtatcccttcatatactcctcgcctactttcaataaacttaagaggatcccttggatctatgagttcacgtggtacgttgtatacggaggttgcttccacaacaccagatgttgtcacctggactggtagagtttccacccaagcctctgaaccttataaaagaaatttgttcctacaaagactttatgaagaagaggaaagcttgaatatgataaatgagatccgtggttcgaataatggttctcaaagtgagtatgaggataaggatataactgaatgcctagaaaatggtgtacagttttggacagactactcaaaagtacattatcacccccggagtctatatgaattaaatggagtttgggcacatgttgaggaatttgacaattatggaattg

SEQ ID NO: 113134 - DNA, 329 bp, Glycine max
  Clone ID: PAT_MRT3847_73167C.1
aagagcaacaaacatgattgtaatactatctatccatgattgctgattattattcataacaactaccagctcatgttattagagtactggacaggattttacagccagaccatcattctttatgtatattttataaggcagcagcttacacatctgatatattattatctaaaactgctatcatgttatgaccactatatgtgggaatgaaatcagaatgacctggtatattgtctactcctaagataccacacgcacctcattgtgacctacacacaatacatcaccatgcccatcaagcatacgcttcccttacaagcgtgagggac

SEQ ID NO: 113135 - DNA, 413 bp, Glycine max
  Clone ID: PAT_MRT3847_73168C.1
accagttgcgagaagactacataaggggccttactcctagctatgcgatcttagagaaagagagatcaagaacaaattcttcttagatagaacatgactcatcaatggaagatctgaagaccaatgcataaaggatatggcaagcctctgtcctgcaagcagaacagagatgcaaaagacactgctgatgattctgccgcaaagcatagtagtatggagaaactgatacagcggggtattcatactagctcaatcaggctgtcgaacatacatagaagacacatgaagctggtatgatatggggaccaaacatatctcagcaacagagtcaatagtcaagaatgctactgataacattgagcaacatagtcgcaaagcccattctgcacgagttacagcagaggaagatgtgg

SEQ ID NO: 113136 - DNA, 1448 bp, Glycine max
  Clone ID: PAT_MRT3847_73169C.1
cccacgcgtccgtccaaatgcaagaatggccagaatagcttcacttgagagcatgctgaacatatcatctaattcacttgtagcaatggcttctcaactttctgaggcagaagaacgagaacgggccttcactaatcgtggacgctggaaccagttgcgctcaatgggagaagccaagaatttgcttcaatatttgttcaattctgttggagatgctaggtgccaactgtgggaaaaggacactgagatcaaggaaataaaagatcaaatcaaagaacttgtaggtctattacggcaaagtgaaatgaaaagaaaggaaactgagaaggaactaaaagcgagagagcaagctgttgcaaccacattggcgaccccaacttctggaaactctccaaattcattgaaacactatgcggaagacatcaaggaacctttatctccagagtctgtgccagtacagaaacagcgcaaatatatgccaggcatcactaatggccaagtgagggaatcagcagcatttgtagatcagagtagaacgatgatacccattgggcaactgtcaatgaaaaaactagcaattgtaggacaagcttctggcaagctatggaggtggaaaagaagccaccatcagtggctagtacaatttaaatggaaatggcagaagccatggagactttctgaacggattcggcacagtgatgagacaatcatgagagcaaggccacgttcgcaggctttgccgcatataatgtgaatctgaatgttattgtgatcatccatttgctttggctcagtgttcattttttaacctacaagaatgatcctagaaatcaggcaataaagaaccaaaaactaggtgcagttgcagggtgtaatattaatggtttctgacaaataacattatatatactgcccgaatgttgaaaatgtttccattgtttgctgcatatggagcatcttgtgaggtgtgtaaaaatgttgccgagggctacccaaataatcaagagaataggagatagttgtttgcttggaggcattggtgaagatattgttagacaaattatcttggaatgttttctgtttatactttataccaacactagaagggggaaaaaaggaaatattcttcaagtcttggaaatgtgtattgagggttttctatttcttgtaagttttaagtttctatgctcatagtatgtttgtcaatcattgatttttgttgataaaaatactgtagcgttcctctgccacaaagcaacagaaggaaaactcttctgttttacctctaggtcttgtgtgtaaagaacattaactatattgaaagagattgtaatttaccataccagagtttgtggcaagagaaggatgataaccgatacgctatatacacttgttaatcaatcccccacccccttgggttacgtaaccaatattgaaccattccattt

SEQ ID NO: 113137 - DNA, 303 bp, Glycine max
  Clone ID: PAT_MRT3847_7316C.1
attggaaaaagggagaattagtcataatttctcacaataaaaagagttctcatttgatatgcctccttacatttacacatgattcattggactgatgcaatatgtcgctcacgtttcaacaatacattagcccccggaagtcaaatatttctgaaatctatgttttgggcatatatattggcttcagcatgtaatgactaatgggatacattcatttggctgtcatagaatcaatagaactaaaggggaccaaagcttcaataatgtaataaaggatacacatggcactcagcatatggaagc

SEQ ID NO: 113138 - DNA, 521 bp, Glycine max
  Clone ID: PAT_MRT3847_73170C.1
agctcttttttttctcgagtataccttcctctattggccgtctctcacatttgcaaattatgaacttgtctaccaatttcttctctggtgaaattcccgacattggagtattaagcacctttgacaagaactcgtttgttggcaatgtagatctttgtgggcgacaagtccaaaagccatgtcgaacatcacttggtttccctgtggtgctaccacatgctgaaagtgatgaagctgcagtccctaccaaaaggccttcacattacatgaagggggtcctaattggagcaatggcaattttgggtctcgcacttgtcataatcctttcattcctctggactcgtttgttatcaaagaaggaacgagcagcaaagagatacactgaagtcaagaaacaagctgatccaaaagcaagcacaaaacttattaccttccatggtgatctgccatacacatcatctgagatcatagagaagctagagtctcttgatgaagaggatatagtaggatcaggaggattt

SEQ ID NO: 113139 - DNA, 395 bp, Glycine max
  Clone ID: PAT_MRT3847_73171C.1
aatgcggccgcgagttcgtgttgcgagaagacgacagaagggggaggggcatattatgtggcccctgaatgctcatatatctcatagccagacggctgttggatggagtttttgagactcaccattgttcctgttgtgcaaaagtcttcctttatgcacgcgaccggagtttgttaccccccgtgcagacaaagatgactgaaacctacaattcatatcttaatggtcaaaccagatctgagaaccttttgacaatgtgcactgccttcagaagaatgagccgcgtttgcttatgaacccggcctttaaatgggggggctctgcgggggatttttgctagcatcgagacatcgactcttagtttttcatctaagggcgggccacatcaggcaggg

SEQ ID NO: 113140 - DNA, 254 bp, Glycine max
  Clone ID: PAT_MRT3847_73172C.1
atgcgttgcccccaataacaaaagtggaaaattgaagaaaggattccaacaattggacatttcgactcaaacataaacagaagataaaaactcgtctgttacctactctgcgatatcgcagctttcactcttcgccgtccccttgcaggtgcagagcttcaataacgtaactgccactcatatcgttaattgaatgagtattgttgcgttacgtgcaagcgtctcctatttctcccgtccatggacagaagaat

SEQ ID NO: 113141 - DNA, 480 bp, Glycine max
  Clone ID: PAT_MRT3847_73173C.1
ctagtcgtcggccgcccggcttttgtttgttactgtgtactattttgaagtcacgggtgactccttgcaactcaaagcgtgaggttagtaatcatatgacctcaatatacacaatgactgtggcgcacaaccgacatacaattgggcctggttaatcaagcagaaacgacttgcaaatagccccgcatgtcagatttaaagcaataagtaccggtggtgagaaagcaattctagaacaattgacgatcatataacatggcagaaaatacacactatagcgtcttggacaaggtactatgatattactaagccaaatgatgtaccattctctccttctaattattcctgatacaacatctataagaaactcaatcaagctaggaaaaagctgccatgaccatcagcaaaaacccctattttaactgatcatctgatttgccaaatataccacttgctctacttgcaagctgcaacactcta

SEQ ID NO: 113142 - DNA, 863 bp, Glycine max
  unsure (1)..(863): unsure at all n locations
  Clone ID: PAT_MRT3847_73174C.1
gagcttgtggcggagggaggcagagggagactagtcagacatggcatgcagcaccactttacatgcttctattctaaaacttctcatcattttcttattcgctggttgggtttctctttggcttctgaagccaacccaaatatggacaagaaaatggaaacaggcagaagatagcgccaatgatacaatttttggatactatggtcttagctttgctgtgtacgcgtttcctataattgctattgctataattggacttcttttattggatttgaaagctggatatcaaagaagcagaagcgcaaggagtactccatcaaaatcaaacttcttctcaaatccactggtggtgaatactacactgggaatcttatctagtattgaaatactgatagctttccttttcattgtcttcttagcatggacctactactctcgtatttatacagacttcaaaaagttgatgccatacaaatcactgaagttgaatacgtggcaactcaagtatcacagaatagcaacccggttcgggttgctagcagaagcttgcatggctttgttgcttcttcctattctaagggggttggccgtgtttcgcatacttggcattcaatttgaagcttcagttagataccacacatggattggaactgcaatgatactttttgctacaatacatggcgcaagcactttgttggtctggggggtcagccaccatattgaggatgagatttggaagtggcaaaagactggacgcatatacctcgctggggagattgcacttgttgttgggctagtcatttgggtcacttcacttccccanattagaaggagaaagtttgaaatcttctactacacacatc

SEQ ID NO: 113143 - DNA, 312 bp, Glycine max
  Clone ID: PAT_MRT3847_73175C.1
gactggttttcatgggcaaaaaaattcgccatggtgttaaaccggagggtgccgattttcgtccttgaaaggaaaaaaccttttttttaaatgttcattttttgcttaaaattggtcaaccattgtgaccccaaaaaacttcttcttattcttaggaccaggatttggtcactgattccaggttttaggtggtttcctaatccaagataaagtttttttaattaatttttggctaggcaatccaaggtagtttcctaattaagattaataaatttagcttaatacttgccttgttttcagtacctttgttcc

SEQ ID NO: 113144 - DNA, 308 bp, Glycine max
  Clone ID: PAT_MRT3847_73176C.1
ctctctctctctctatctttctctttctctaacctttcaactctcggatacatctcgattgggtatctcttctgggtgctctctctattctaatgctgtgagctactttgagtgaaggataataatgactggctttatcttctcgaggggaatgatacaccatcatacaaacgttgcttactctctactctaatgtcttcccaaaacggatctcattaaatctgtattcctcaccgattcttgaatcccagtgctatgctcgaaacctttcttaatattctctataaaccgcttccatctgatccaat

SEQ ID NO: 113145 - DNA, 448 bp, Glycine max
  Clone ID: PAT_MRT3847_73177C.1
aaggaggagttttgtatatagcacttttttggtaccacaattggggaaaaaaaatttaaatttatttttggggcctgttattgaaacgcatgagtgtacgcttaaaaagaaaatctaaaaaaaaagggaaaaggttgatgaagaatttaaaccccaaacaaaaccatttttccaaacaccattcaaaaccaagggtgaaaaggggcccttttttttaatttttaaaaggtgcaacgtcaactttgagaaaaaaaaccttgggggaaaccctatagaaacaatgaaggttaaaaaaaaaaaaaggcttttaaaacccacaacaattttttctacgggtaaacctaaaaaccaattgaccccaaatacaccgccaaaattaaaaaggaaaaattggcaaaaaacacttcggcggtaaaaacgggggaaaacacttgaaaaggggtcttct

SEQ ID NO: 113146 - DNA, 1910 bp, Glycine max
  Clone ID: PAT_MRT3847_73178C.1
ggtacttgtttgtgccttattccctctgattctggaacaagttcccgttctttcttatctttctccactgttttattttctccctgatcttcctctaccttaatttctgtcctatttgttcttctgacagctactcttttaccttcaccagctcattcttcttctatcttcttctgctatatatgctcaacctttaaagggtatttctctctctctctctcaactagtttgagtttcattgtactttgatatcactgcagaagtacatgagactcttaaaagagggtatgctttaaagaccagaatcagaagctgattaaaggagagaacctttccaagacatggctatgtttgatctcaatgttgacatcaaccactgtgatgctgatgctgactcaagctgtgatcaaaagggattggtgctgcaaagtttcccacctgaaatctcagattccaggacctccagctcctctgtgtggaaccctgtagaggaagattcctcaaacaattcctctcccttgatttttgacatactcaagaaagagagggatgagtcagagtttgatgcagccactgaaagggtcaataaggagcaaaacatggcaccacaagaggcagagatagtggcaaggacacttttccctgtgactgctgctgttgataaaggagttagagtgcctgatttcaaattggggctgtgggggaagactgaatgcttgaacttgtccttaccagagcctgatggacaaaatggactcagaaccttacagcagaaggtacctcctgtgaggaaaaataggagaggaccaaggtctcgcagctcgcagtaccggggtgtcaccttctaccgcaggactggtagatgggagtcacatatttgggattgtgggaagcaggtttatttgggtggatttgacactgctcaagctgctgcaagagcatatgatagggctgctataaagtttcgtggagtagatgctgatataaactttagtttgagtgattatgaggaggatttgaagcagatgagaaatttgagtaaggaagagtttgtgctcttacttcgtcgacaaataaatggaatctctaggagaagttcaacatacagaggtgcattagcccttcgcaaagatgctcaaggagaaccacgaatgggaccatttgttggcatgacatgttatcctaagccatccatcaattgtgatgatggaaaagcggaggcaagttttaagccctgttcctataagggagaaataattgtgaattccaacatgacaggcacttgccataatcttgatttgagcctaggaatttctccgtcttctaaaagattgaagaataatgactatagtggagggtattcctttggatgtatgacttgtaagatacccgaggaaagaggaccaatggagaaggtcatggtggacagaataaaaaatgttcctttgcaaaaaatttccaacttggcttggcaactttgcagcaatggcagcattgtcccaaggccattccaaccaaatgcagcatcatcaggattcgtctcttcttctagctgtctcatcacccgcacttccaatcagcacacatattaattatgccaacaatttggcattaattggctcaaccacagtactactactagttgaaaccaccagaaacaaagcatatttaccctgcttttttgaagattagatgagcaagagtacttcataaccacatgtacctatagtataagattctattgatttcatcaagcatgatggtatttaataatattgctaagcattgcttacaatggctacccgatattttctgtattcattatcgtgatgtagaacacaatattgccttgtgtaaaagacccttgttgaagtatgtatatatttgttggttcttgttaatcattagct

SEQ ID NO: 113147 - DNA, 258 bp, Glycine max
  Clone ID: PAT_MRT3847_73179C.1
taaagacttcctttcaagattgttctcttagagaagctctgggttgacgtttatgctttcgctgagtctttacacggtcttggcgtgctcataaaactcaccatcctggaaactatggttccaagtgataggtagtatggtacatgcctacaggaggaagagcttgagcgtccaaatcttaaaggactggcaggacttcaacaatgtcctaatccgcgcgtaaagcatactactttagggaggtggcgggtttgcata

SEQ ID NO: 113148 - DNA, 453 bp, Glycine max
  Clone ID: PAT_MRT3847_7317C.1
attggcattgttgcagactccctcatgtttgaaccacttagagatgaagaatgtgatagacaagctgcgagtaggggccttgacttttgagctagcccggtaagttgatacaaaatcaatggaaaaatgtcaagttttgcacatgacaatcatatctatacaaactattataaacattattattattgaagagaattagcacacatgatcctttgtttttatttcttaaaaaacttttacttctctgttggtgacaaaaagggtcttagatcccctggttttcggtgagtacccagctgaaatgcgctcaatccttggtagtaagttgccagtgttctctcctaaggagaagagtctcataaaaggcagcctagacttcattggcatcaatcactatggaactctctatgccaaagactgcaccctctctacttgttctcttggagcagatca

SEQ ID NO: 113149 - DNA, 607 bp, Glycine max
  Clone ID: PAT_MRT3847_73180C.1
aacgttactattttcgaaattctttggagccaaacggcttttaaacttgtcacatgttcctctccccactctctctctctctctctctgggtgccatgcatgtcagtttctgactgagttactttcattcattatatgccaccttatcaacaacattcctcccctcttccccctcctcttcctcttcccaatagacatgggttgtttcatggcatgttttggtctatccaacaaaagaaagcgtagaaagactatctacaaagtcctagctggacaccaaaaatatggaaattatgaagttcttgccataacagaaaaatccactatcccggattctgattccagaggaagagatgaagttaaggagcagaatagtgttaaaaccaagaagaagaaagttaccttcaatttgaatgtacaggtatatgagccaaaccccactgcttatcagatattgaataatgaggaagaagaaaataggaactatgctgcagaaacagaaggatctgcaaccttgcctgtgaaatacccttctaatcacagatattacaattccggagatggatatgatgaagaagatggaatggcatatgaagattctgacatt

SEQ ID NO: 113150 - DNA, 360 bp, Glycine max
  Clone ID: PAT_MRT3847_73181C.1
atgatgagccagaagaaccaagttagtgccaccgacgatgtgtccctaccggcgaggagaaagttgagcacgatttgtcgcagcgcggatagtgacattggagggggagtacgatgtgggggaacggatcgagatgacaccaaattgggagttgcaagtgacgttcacgaagccaaagttgttggtggcgtgactggtgatttgaaggagcgtgatgataagcttgtcgaaggggtcggaccaggagaggaattggaggaggacgtggtagcgaaggatgttggcaaggacagtcaaggagaactggttgtcggcaaaaaggtaggagttgaggacgatgagaatggagagggaggatga

SEQ ID NO: 113151 - DNA, 556 bp, Glycine max
  unsure (1)..(556): unsure at all n locations
  Clone ID: PAT_MRT3847_73182C.1
ccacgcgtgcgatattctcaaaagtgaaagattaaagaacacgaagtcggtgaggttaccgggagactcagttaggaatgctgaattaaatgaaaatggaattcttggagatgcacaaaacagttcagggaacagaagcaatgacagaagagattctaagattcttgcaaaggaaataagaagtggtactctagatggaaaaattgagcatttagaaaagaagataaagatgcttgaaggagagttaagagaagccgctgctattgaggctgctttatatacagtagttgctgagcatggaaactccacaagtaaagttcatgccccagctcggcgcctttccaggctctatcttcatgctagtaaagaaaatcttcaagaaagaagggctggggcagctaaaagttcagtttcaggattagtacttgttacaaaggcatgtggaaacgatgtcccaaggttgactttttggttgtctaatactatagtgttgagaacaattataagccanacagtcaaagttccaccaaatcctgctggatctggtagaagaaag

SEQ ID NO: 113152 - DNA, 600 bp, Glycine max
  Clone ID: PAT_MRT3847_73183C.1
atggattcgcttgaaagagcctataaatataatattatccttattcatctctcttctcacctctgccatgcccctcataacggatctctcatcctccctctccattctcatcgtcctcaactcctacctttttgccgacaaccagttctccttgactgtccttgccaacatccttcgctaccacgtcctcctccaattcctctcctggtccgaccttcgcaccctccccaccccttcgacaagcttatcatcacgctccttcaaatcaccagtcacgccaccaacaactttggcttcgtgaacgtcacttgcaactcccaatttggtgtcatctcgatccgttcccccacatcgtactccccctccaatgtcactatcctctccttcataaagaagtgcgacgacgccaaaaaatcactgagtgtcaccgcgctgcgacaaatcgtgctcaactttctcctcgccggtagggacacatcgtcggtggcactaacttggttcttctggctcatcattaaccacctcacggtggaagagaagatccacacgaaactaatggcggtgtttacttccactcgcggcgacgaccagtggcactag

SEQ ID NO: 113153 - DNA, 419 bp, Glycine max
  Clone ID: PAT_MRT3847_73184C.1
caatctcctatatcacatatttcttcaccacttatattgtaatttgagagaaattaaagaataccttgggggagtgcttctatcatagaggtgctgtggctacccttgttgctccaaaccaaaaatctcaggttgaagacctccacgctctacataacgctcacaaaggatggcggactgatgaaaagacccttatacacctattcgatcacaggaaacgttcatcacacgcaactacaccaaaaagatttatgacgaaatttaccaagatgacctcatcaaacacctagagtctaacctctctggtgactttaacagagctgtctacctgtttatactgcatcctacatatcgtcacactctcttgacccatgttgccataaataatgcccccacaagttaccacataattgtggaaa

SEQ ID NO: 113154 - DNA, 771 bp, Glycine max
  unsure (1)..(771): unsure at all n locations
  Clone ID: PAT_MRT3847_73185C.1
cttgcatgcctgcaggattattaactgatgttatgattgtgttttccattctatctggaaaactgatacagtataagtttggtcttgctttgattggctactttttggagatgtggctaatataaatatagggacaatatcataatgttcttgttttcccttatctctcttttaaaatctttaacagtccaaccttttttatccagcaattttttctatgctaagatcataattatcaatccagggtagcaacatgtaatgcctgaccttgaaaactctatgattgtataaaggaaagcgggatggttgctcctagtacaaactaaataatttataccacacataaatactcactcgaatttattttttttacagaaattcgtgataaataataactcagtttcctcacaatcaccatcaatctaggagcataagaacatatgaatgatgcgaaataatgaagggttccgaatcctataatgtttctaaagcaaaaaatgcatcagagtaaatgtgcccgggtctgctcttgctactccactatagcatcataatagtgcattactagaaacacaaaatctgtttaaaagctcagtcaatggaatttcctgaaattctagttctggttgtattcatagagaaattaaggaaccggcataacctggttgagacatgatataccagtaacccagatttagctntataccacagttntgggatccatcttattntatctattactaagtggttaacccttttttttttttttac

SEQ ID NO: 113155 - DNA, 548 bp, Glycine max
  Clone ID: PAT_MRT3847_73186C.1
tttccgttctaattttttatccgtcctaaatttttttaaggagttgttgagtggtaaaaagaaaggtctccttcagttaccttttgacaaggcttttttgtttgaccctgtattccgccctctcgttgataaatatgcaccggtatgggtattctcttaatttttcgcaaaacattgattttttgaatgttgaacatttagtgatgtttgatttgctaatgatttcaggacgaaaatgccttttttgctgattacgctgaggctccccaaaagctttccgagcttgggtaagtattgatatttcatacattttaatttataactatgattttatgaagctttttttttagttttacttgacacgttttacgtcgttaattgggttttgattcgtgtcatgaatatgttacctcaggtttgctgatgcctaaacaacgtttaggggattgtttaaaaggcatggtgcccataatatttttttaaaaaaattgtatggtcatggtttttaatgccaatgtgggttccccagatttgagatagcttttgaa

SEQ ID NO: 113156 - DNA, 191 bp, Glycine max
  unsure (1)..(191): unsure at all n locations
  Clone ID: PAT_MRT3847_73187C.1
ttctttctgggtataaagcaaagcgtgtttgggtacgggggaaancaagggatgatttgaaganaagagtctacanncaacncnncacnncgngantcgctacggcgnctgctacganganancgnnggaggcatncttcgacgacgaattnggtctgtancgtcgatanctactctcccgccatgncgat

SEQ ID NO: 113157 - DNA, 340 bp, Glycine max
  Clone ID: PAT_MRT3847_73188C.1
ccgcgtacctcacctccgaattcggctcgagagagccgagagactccgagaccttcgcttatgatacgctgctaatgcagtgacttgcggtccacacgcggcttctgatgctgggctcaacaggggaatatactggcgcgttaacgatggagactatatgactgctggcacaggtggaccgaccacgtatccagacgccgatatgattcccgaagatctagctggggatcagccctattcctgcacagatatatcgcgtgcacgagaagtgcatactacgatgactgctgcatcacatgcgcttagcgctcaactgacgcaccctagatttaacccgcac

SEQ ID NO: 113158 - DNA, 237 bp, Glycine max
  Clone ID: PAT_MRT3847_73189C.1
cgacgcgtggggaaagattcgggggagggaattttttcctttgctccaaatctcgctctagacaggaaaaagttacctgtactaaagcacaattcgttaggggaaaaaccttcaaagttgatataaccggtgctggatcacattcttcagaagacttctgctgggaaagagagatcttgataagcccaaaaagattgttgccagattgagacaaagaattcatcctcaatacaatga

SEQ ID NO: 113159 - DNA, 140 bp, Glycine max
  Clone ID: PAT_MRT3847_7318C.1
gttgttagattggtattgcctttgtgcttatctattctaggctagctgaattgtatgtaaaatgtaccataagtagctttttaagtttgtttctggtgctactgattctaaatccaacattctgataaaaacttacattt

SEQ ID NO: 113160 - DNA, 366 bp, Glycine max
  Clone ID: PAT_MRT3847_73190C.1
cggaagggacactcttgcattaataccaacaacaaactacacacctgaaattatcatcccaaaataaaaaccgccaggagacaaaggaactacaccagcaagccctagacgatacggaccaggcccaaaggctaaccacgtatatcattcaccagttcacttgcgccttccttttgggcacttcctttcgcgcggcccatgattgccaggggaaccccattggaataccaagcttctgattcgcattgggccattgaaaacctgccatgatggtcgtcctaaaaagcattctacggtccaaaagcgatcccatataagccgctctcgacaccgtgaccatgaaacacaaggtgtttggatcttcca

SEQ ID NO: 113161 - DNA, 221 bp, Glycine max
  Clone ID: PAT_MRT3847_73191C.1
gcgtaaactcagcgggtagccccgcctgacctgaggggtccccttctgtggtgttctggcagccgtacccttctgtggtcttctgacaaccgtacccttctgtgaagcttctcacaagcgtacccttctgggggggtgtgggagacagacccttctgtggggttgtcgggaggcaacccttagtgggggttctgggagacggacccttgtggggggttgtg

SEQ ID NO: 113162 - DNA, 279 bp, Glycine max
  unsure (1)..(279): unsure at all n locations
  Clone ID: PAT_MRT3847_73192C.1
aaagaaagagacatgatatctgttgaacttgaacgtgttatgctaacagataagctggctagaacaggcctcaaatatcctgaaggcgggcagataaaaaaatacaaagatcgtcaagcacctcctactatagacctcctctatncaggggtagccacccttgtatggtctaatcggccgagggaagactgatcatgccttacctgtggcaaaactacttcattaccctattcgccaaggctgaacacacactccagcttcctaactaccggccccaat

SEQ ID NO: 113163 - DNA, 438 bp, Glycine max
  Clone ID: PAT_MRT3847_73193C.1
taaatatatatatttattgtgatgattggaatcccaatatatatatatatatatatatatatatatatatatatatatatatatatctaccgatttggaggacctgactaatcacttttagtgggattctttcctcccaataatcacaatttttttccatcaatagctcaaacccgctcgagggtatcaaatccaataccatacagatgattctattttgttcctatcttttacgcctgatctgttaatggtttatttatctgttaacagttctgtttcgcatatgaataagataagccttctgtatttacaatttcctctttgtttttctttacccactacactttatatttgctgttatacataaaaacaacacactattgtgtagaaagttcgaacataattttgactttgattttccatttatgttccaaattg

SEQ ID NO: 113164 - DNA, 486 bp, Glycine max
  unsure (1)..(486): unsure at all n locations
  Clone ID: PAT_MRT3847_73194C.1
ctcttgactcattctctctgctctttcctgctcagatttctgataaaaatagagagcataggggaacagataatgaaataggaaacccactcgtgggttccacagatacctaccgaaggcctactgtgtgctagaattgtagctcaggagttctcagtgtagctgctcactgaagttaccatggcaggtttcaactggcagaatccaggctccgtcccacccagagattctgatgaaattggtttagggtgtggctcgggcctcaggaattcagaaagcttcccaggtgcttccaatgtgcagccagggttaaggacctctaccctagacacaaagtattggacagatagacctggtgccagagatggccaagagctgtaagctaggacgtgccccacctgagctctgcactagctagttcaaacaggcgctntaaaggcagtgtgaaaggggacagcctgttctgccaggtctcagaatgtatat

SEQ ID NO: 113165 - DNA, 422 bp, Glycine max
  Clone ID: PAT_MRT3847_73195C.1
tgagtctgtaaggaaaggcaaagaaacaagaacaaccaaacatttcctaacttggattccgttttccccaaatcttaattactgcaatgccaatgcgttagcaaagtttcaatctttgccaaaagggatcatggggagggacccatcttctgccaccgtcgaggtgcaggttcatccgcgccgcgacaccatcgccggttgtgggcggaggctctctccttcaccgccgagcccccccgccgtgcgcgatcgtgacttcagcctcttcaagcgctggttcccatggctggtccccaccttcgtggtggccaacatcgtcgtcttcatcgtcacgatgtatataaacgattgtcctaagcattccttttacggttcctgcgttgcctcttttctcggaagattctcatttcaacctcttaaag

SEQ ID NO: 113166 - DNA, 475 bp, Glycine max
  Clone ID: PAT_MRT3847_73196C.1
ggaccaagaaaaatgggacactttgcccccttttaggatacagatagaaaaagtgttaacaccatccttgaatacagacgcagaagcagaccagctgccacatattaatggacaagaagcgaagtggaacatagtgactgacgctaatatgccatatgatacggttcaatacagctgggcatggggagtccaatagcagttttgggcctcctattggccacttcaaagacgcaggatattgctgcagttacccgacaccgactgtcaatgcacgcttgagagtgcatcatggaaggaccacatataatggggatccggcctttgacgatgcctactttgtgcatagggatgatccctctactgccttgggcagggacccaactctcttgctattcgagcctgctctaaaaactgagcccttctttctttgtctgctttaaaagaagcttcgagttgagcctctctgatgctaccc

SEQ ID NO: 113167 - DNA, 437 bp, Glycine max
  Clone ID: PAT_MRT3847_73197C.1
atcacgcgatcggctcaacaacacaacagcttacatctcataccttacccttccagaaagccctcattatcgtatctaattgtgagaatctacaattcttgtctaaatcattcgaccactataaatgtatctaagccgtagaaattgaataaaggcccaaatacaaatatatcagacgctattactgagactactgcgtaatctgaagatccaaaaaaactcttatcaactgacacataaatttgcaccacaaggaagagtattaagaagcaagagctgttatagatcccgaagcacatgcattgaaatccaacactttcaaggaatgtggggccacttttaaaatacacgcctatttggtgcatcacatgcaaaggcatctactagatgaaagtaatctataagtttctaaaatcattgtaaaattatgggtcaat

SEQ ID NO: 113168 - DNA, 313 bp, Glycine max
  Clone ID: PAT_MRT3847_73199C.1
gccgatcaaaaccatcgccgtcggagggcctgaaaaggcaactaaccccgacccgttgaaggcggttttggttgatttaatttaaaccttaatcttcgggtccgccggttaaggttccggcttcgcctacaccaggttaaccgacaccgggcttgccacccttgccggcctaatttccgcctcaatcgcccttgctattccctctttggtcgcgcgttccgtgggggccaacatttccgggggccacttaaaccccgccgaacctttggggccttgtgtgggggaaattaccttccttcggggaatttgttac

SEQ ID NO: 113169 - DNA, 247 bp, Glycine max
  Clone ID: PAT_MRT3847_7319C.1
aaagaatggttaaaaaataagggtttgtcaagaatcattcgttttaaaaaaatgaattccacccggaaaaggggcccaatttacattcatgggacgagcaagtccaatctcaatcctctccaaaagactggtcaatgacttccccctgaaccggatcccgaagtgcgccatgaatgggggctgggggctgaaacaatctgccaagactggtgggacctcctccttttccaacagtccctactttccc

SEQ ID NO: 113170 - DNA, 672 bp, Glycine max
  Clone ID: PAT_MRT3847_731C.1
actacctcatttttgttttctagaattcaataatattgtacatttcacgtgaactggaaaatttcctgcagcaaaatagttagtaaatttcaataaaattatgaaatttttaaggcagcattttcaacatcacttgaaataaataatttaattaacataattcgattgagtgtacttttcagattaccatcgggtgaaattttcacaaagccaccaatggtcactttttctaacttgagtcgtattgcataataattgcaattttaattacaatgaatcacatcatacggcacctagctgtcttcatctcatgaaaagattattgtaatattcaatatagcttgttttatctcatgaaaagatttttgtgatattcaactcaatctttccaatattgatcactttattttaactatcatttgacttgtgaataagatctcgatatatttattctcaaagatttcagttctttcaacctattatcacactaattttctaaaatttaatcacatttaaatttttttcaatagtatattatataaaattgaacttaaaattttttccagtaattttatgtgtgtaatatattaagagattaataaagtataaaataattttctattggattttaattacaaatcactatttaaatttgaattatttcaaaataat

SEQ ID NO: 113171 - DNA, 1220 bp, Glycine max
  Clone ID: PAT_MRT3847_73200C.1
cccaaggcgaattgccgcggccggccacgcataagcttattttttctttctcttttgcacttgtttcataaaatgccggaccaagatattttcagttgcattagtgaacctcgtcttgtagccagaaagttcttggccagacctcagcatgagggtgttggagccgttgttagaagaagcatagggagatttgaactcaagtactttgatcctttccttgtcttggatgaattctcagtgactgctcctgctgggtttcctgatcatccacatagaggatttgagacggtcacatacatgttgcagggagctgtaacgcacgaagattttgaaggacataagggaacaattgaagctggtgacttgcaatggatgactgcagggagagggttagttcactcagaaatgcctgcagctcaaggaacccaacagggtcttcagctgtggatcaatattgcttcaaaaaatataatgattgagctaaggtaccaagaaatggttagcaaggaaatatctgaaactatgttagatggtatcaaagttagagtattagaaggagaagctcttggaggaaagcctccgatctacactaggacatctacccagtaactgcatcttagtcctaggcttggtcttcacttccagcagctcacttccaagacaattatacccatattttggaatgctttagtgtacatattggaaggagagggtgtttttggaaaccaaaaatcccaacctgtgacctctcaccatatacttcttcttggttctggggatggcctagaggcatggaacaaatcttctaaggtccttaggttcattttggttggaggtgaaccattgggtgaatctgtggtgcaatttggaccttttgtgatgaatactcaggaagagattgaccaaacaattgatgattttgagaactataccaacggatttgagaaagctagacattggaggtctgaaagtgcaattagccttgattattgattttatttaatgtcacatttgttggttgatttgggaaagatgggaggcaaaataagttctaatgtatattggaatgtatgaattaggcgaagagtttctatcccttttatctttatatttatgtcaatattatatgtacgcgtaaattaaaatccacgtgtagtaagattatatcaaaaaagcagagtaaaattctagttagttaaaaaaaaacccccaaggggggg

SEQ ID NO: 113172 - DNA, 127 bp, Glycine max
  Clone ID: PAT_MRT3847_73201C.1
gggtgctgtcatagttcaacattttctgtgatcactcactttatctcgcttccaaccttgccatgctctgcgggcattttccgctatggccgaagaatttgtgaagggctctgttcatcaagacggc

SEQ ID NO: 113173 - DNA, 269 bp, Glycine max
  unsure (1)..(269): unsure at all n locations
  Clone ID: PAT_MRT3847_73202C.1
aacatgtaggtctgcattcatggatntnatccatactcgtggattcnaaggcttgtntnctggagtatcgccanntttagtggagnttataccttatgcangcctacaatttggcacatangatacatttaagcgntggggcatggcttngnatcatagagactccannactgngncagaagagnaccgngcgngctttcagcgtttccgtntnggaattgcagcggnnacanntnccangcntttctgtcatncacnagaagtgtgca

SEQ ID NO: 113174 - DNA, 1285 bp, Glycine max
  Clone ID: PAT_MRT3847_73203C.1
aaaataccctgttcagtgtgttacatacactttgacggaaagggttagctagcgtgacagtgcattcacctagtggaccaaacaagccactgcactatcttgtttttatatttattttcttttgcatcatttgaccggggtaataccctatgaccctcctctttattttctttaacacctcctcctctttcttttctcagcaagtatggccgtggaattcatgatggggtacaggaacgacactttcgcggaggataatgcggttcgtgaagctgcgtcggggctagagagcgtcgagaaactcatcaagttgctgtcgcatactcaacaacaataccagacaacctcaaagtcttccatggaaaacatcgacaccgactacacagctgtcgctgacgtcgcggtttctaagttcaagaaggtcatttcgcttctgggccgcaccagaaccggtcacgcgcgttttagaagagcccctgtgcctgtgcctgtgcctgtggcttcacctccaccttcggaaccgagagtctaccgtgctacgccgctgcagcagatcccgccacccacccttcacactcactctgtcactgaccactctctgatccccaaaattgagagaaaggactcttccaagaccattaatttctcctattcaaattcgtttgtctcctccctcaccgctggcgataccgacactaaacaaccgtgctcgtcgtcgccgtcgccggccacggcttttcagatcacgaatctctctcaggtctcctccgccggaaagcctcctctttcgtcctcttcgttgaagaggaagtgtagctctgagaacttgggttctgctaagtgtggcagttcctctagccgatgccattgttcaaagaagagcagaaaaatgaggcagaagagggtggtgagggtaccggcaataagcttgaagatggctgatattccaccagacgattattcttggaggaaatacggacagaaacccattaaaggatccccccatccaagaggttattacaagtgcagcagtgttagagggtgtccagcgcgcaaacacgtagagagggctctggatgatccatctatgttggtagtcacctatgaaggagagcacaatcatacactctctgcagccgaagctactaatctcatcctagaatcctcttaactaattaatcatcgttttcccatcacaaagtatgttctgatcatgtcattcatggcttgtacaattgaaatttttaatcgagcagagctttatctcgaaggagattaattgaaa

SEQ ID NO: 113175 - DNA, 395 bp, Glycine max
  unsure (1)..(395): unsure at all n locations
  Clone ID: PAT_MRT3847_73204C.1
atcttaaattacatattatttatacgtttatcaaaaactcttcagcatcacaaacgcgtattgttcaaaagcttgtctggcttcctttaccaaccccaaacatttcttttttgttaaatttactgattctactcatcaatcatcaatcaccaatcaccaatcatcaatcancatcattacttttccttgtatccatgtcaatttcttttctgtttcaaaaaccaatatctctttctctttttctaatttttttcttattttccttaaataagtaatttgcactttttttctattttcccactgatttataatcaaaaatcaacgtacatacacacaaaatttgttatcttcaatcataaaacatgattcttaaaaactttttaacaccaattctt

SEQ ID NO: 113176 - DNA, 364 bp, Glycine max
  unsure (1)..(364): unsure at all n locations
  Clone ID: PAT_MRT3847_73205C.1
agaaacncgaagcnacgggggaacccaacnaccaccaccaccaccaggnnccgacacccccggaaccacacacagacacncnnaaaaaaagaaccaaacgccaagcaaaggcaaagcagggcaaccaccanggcaacgagagcngcaccgacccacgncacagccgcacccncngccacgaaaccccggcgggacgacaagaacaacaaggngcacacacgcaggccgaagagncaagcggacacncccncgaaggccgcngccgcagagaacggcgnngggaccgacgnggagccgacgccggagcaagccgangcggagccggagcagccnacgccggcggagggaaangccgnggggacca

SEQ ID NO: 113177 - DNA, 2028 bp, Glycine max
  Clone ID: PAT_MRT3847_73206C.1
ggctcgagcctcaaatgaatttttcaacttgtccttcccttttactttcgaaggaagtcgcattaagcaatttgtttgaccatgttctgaggaaccgttccttcattgccacatctaactgttctactttgtttcacgttgtacagattgaactttccagagtttagattcgttagttgttttgtgagttttgcagagaatataactcttccttcgattcaacgctttcttcctcttttgtcaccttacaggttctgattttgattgagaaggctcaggcttcatatcagaatggtttccgttgataatggtaaagatgaaattgaagaatctaatggaagtaaagtaaatgagtttgcttctatagatatttcaacttctcgaataacaatgttgaacagtgaaaatcctcagaaagttcttcagggtaccttattcagtttttctattcctaataggatcaacttctttaaatttggttctgcatctgccaaattcacaacgcttgcttcctctattgacaaggtacagattccgatttttattgagagtgctcagggttcatattcgcatggtattcgtagataatgtcaaaaatttgactgggcatcagtcaagaaaaaaagcatggaatggattagaaatccagtgaacatggccctttttgtgtggatcatttgtatcgcggtttcgggtgctattctgttccttgtcatgacagtcatgttgaatggtgtgctaccaagaaagttgaagagaaatgcatgccttaggaaggtatattgcaagaatgtcaccaactatccccaggagtggactcctatgatggtagttgtcattctccgccattttaacggttttgttcaatatgcactttgtggtctaaacttagggtataaaaggtccgagagacctgccattggagttggaatatgcatatcttttgcaattgctggtttgtacaccattcttagcccacttgggaaggactatgattgtgagatggatgaagaagcacaggttcaaattacagcttctcaagggaaagagcagctgagagagaaaccaactgagaagaaatattcatttgcatccaaagatcaacaaagggttgttgaaaatagaccaaagtggagtggaggaatacttgacatttggaacgatatttccttagcatatctctcacttttctgcaccttttgtgtgcttgggtggaatatgaagaggcttggctttggaaacatgtatgttcacattgccatttttatgctgttctgtatggctcctttctggatttttcttttggcttccgttaacatagatgatgacaatgttaggcaggctctagcagctgttggaatcattctttgttttcttggtttattgtatggtggattttggaggatccaaatgagaaagaggttcaatttaccagcctatgacttctgttttggcaaaccttcagcttctgattgcacactttggctaccctgttgctggtgctctctcgctcaagaagcgcgtaccaggaataactatgatcttgtagaagataaattctcaaggaaagaaactgatactagtgatcaaccatcaatttcacctttggctcgtgaagatgtagtgtcaaccagatctggcacaagttctcctatgggtagcactagcaactcttccccttatatgatgaaaacatctagttctccaaattcaagcaatgtcttaaagggatattacagtccagataagatgctatcaactttgaatgaagacaattgtgaaagaggtcaagatggaacaatgaaccccttatatgcacaaaaataatatcaaaatactatagacattaactctgtcttatcatcttttatgaatctcaatatatttctgtgcatatatcagcatcagcgtcactgaattccttggacattgacactgaacactcatgtatgagctggagatatttattgtctttattgaacaaattcaagaaaaagaagaagaaataagcctcgaactttgattctt

SEQ ID NO: 113178 - DNA, 239 bp, Glycine max
  Clone ID: PAT_MRT3847_73207C.1
atgtacctttgacacttcacaaaaaagaaatactaaatggattggcaggagccagcaaccattcccaccaggggaaaggagatagcaaatggagcatgaacaacatcaacagcatcaagatcctttcatgaggtgacgatcatgatcatcaccacaatcagcagcagcagagacaacaacatcaagtaccactgagtcgctatgagtctcaaaggaaaaggaatggcacacctttggac

SEQ ID NO: 113179 - DNA, 1179 bp, Glycine max
  Clone ID: PAT_MRT3847_73208C.1
accagatttcgcaaggcgtgccttcccttttttctattgggttaagagagcgcttcagtggcatgtttgctaagaaacttgactgggtttcactcaagaagatgtgtttagaatggtttagggacccaatgaacatggccctttttgtgtggatcttgtgtgtcgcggtttcgggtgcaattctgttccttgtcatgacaggtatgttgaatggtctactacctagaaagtctcagagaaatacatggtttgaaataaacaaccaaatactcaatgcattgtttacactcatgtgtttgtaccaacaccctaagagattctaccaccttgttcttctgatcagatggagaccaactgacatctctaggcttagaaaggtatattgcaagaatggcacttacaagcctcacgagtggacacatatgatggtagttgtgattctccttcatgttaactgttttgctcaatatgcactttgtggtctaaacttagggtataaaaggtctgagaggcctgccattggagttggaatatgtatatcttttgcaattgctgctcctgcaattgctggtttgtacaccattcttagcccacttgggaaggactatgattgtgagatggatgaagaagcacaggttcaagttacggcttctcaagggcaagagcagctgagagagaaaccatttgagaagaattattcatttgcatccaaagatgatcgacaaaggcaggctctagcagctgttggaatcattctttgttgtcttggtttactgtatggtggattttggaggatccaaatgagaaagaggttcaatttacctgcctatgacttctgttttggcaagcattcagtttctgattgcatactttggctatgctgttgctggtgcactcttgctcaagaagcaaggacggggaatagctatgatcttgtagaagataaattctcaaggaaagaaactgatactagagatgaaaaaccatcaatttcacctttggctcgtgaagatgtagtatcaaccaaatctggcacaagttctcctattggtagtactagcaattcttccccttatgtgatgacaacatctagtcctccaaattcaagcaatgtcttaaagggatattacacttcagataggatgctatctaatttgaaccaagagaattgtgaaagag

SEQ ID NO: 113180 - DNA, 586 bp, Glycine max
  unsure (1)..(586): unsure at all n locations
  Clone ID: PAT_MRT3847_73209C.1
agcaaatctgtaaggtctgaacggcagcttatagcggtcgttgacggcaaagagagacacaaacgtaatctgtgagtttggaacattgattcgttgtttcctctgcaaaatcaaatcctcattgtgattgttgatgaacaattgaagtatccctccgatttgaagattccggtgacggcgagccatggccaccggcggcgacggtgacacttccaaacaagagctcttccagctcatcaaacgcttcggagcttacgtcactttcaagatctccaatctcttccctctctctctccacaacctcgtatttctattctctcctctttctctctctatggcttccttgctttaatcgcaattttactcttttttttaatcggccgatcattcgattggatctgatttcatattaaaatcttatctttttgctaattgtcgctttcccaattcgtaattatctgaagtttggatttgggtgctttctttgcccctttatcgttgattgaatggttttgatccgggactgtgtaatcctcaattctaactctgaaagtttattntttggtgataacactcaactgggtct

SEQ ID NO: 113181 - DNA, 391 bp, Glycine max
  Clone ID: PAT_MRT3847_7320C.1
ggctcgaggcactggccatgggcctattgcatttgtagcaaactgaaaattgagatgctgcttacaataatactcttgagacagctttgaggcttgacactgatggacaaagttgagatgcacaaggaaatcatgttgtagctgaccttcattcctcaactttgaacccacacttgatccaatgctggcagcaaagttctgattactcgctgcaagggatgaggcgatatggctatgctgttgaaatgagaaagttccctgatgcttcacatggagacttggcgggacttaagaacgcatatcttgcgacacttgttactcaactagggcaacaagttgtgctcctacttctgagccaaattgggcttactaaaggcttatatgggagtca

SEQ ID NO: 113182 - DNA, 1606 bp, Glycine max
  Clone ID: PAT_MRT3847_73210C.1
ccacgcgtccgccaaaacatcgtaagttaaattgcatttttagagcaaatctgtaagctctgacggcagcttatagaggtcgttgacggcaaagagagacacaaatgtattctgtttgagtttgaaacattgattcgttgtttcctctgcaaaattaaatcctcattgtgattgttgatgaacaattgaagtgtctctccgatttgaggattccggcgacagcaagcgatgaccaccggcggcgacggtgacacctccaaacaagagctcttccaccttatcaaacgcttcggagcttgcgtcactttcaagatctccaatctgttctctctctctctccacggcctcgatatacgctctatcggggcagttgctggtcttgctgttgcaattgttttcacatggaggctgttgagatctccttctgggtctcaacggaggcaacaaaaacggcaaggtccttcatctagtaatcctggagtcggtacaaattcaaattcaaatgcgtcggtggttccttcggatgcttgttcaccctcagatgattcaagggcgcaaaatgttgttgatgagttctttcagccagtcaagccaaccttggggcagatagttaggcagaagttgagtgaaggaagaaaggtaacttgtcgccttcttggagtgatccttgaggaaagtagtccagaggagctgcagaaacaagctactgtgaggtcctctgtgctagaagtactattggaagtaacaaaattttgtgatttatatctcatggaacgagttctggatgatgaaagcgagaaaagagttcttgtagcattggaagaagcaggggtattcacttcaggtggtctggtcaaggacaaggttctgttctgcagcacagagaatgggcggtcatcgtttgttcggcaattggaacctgattggcatattgattcaaatcctgaaattgtcactcagttggctaggtttatcaagtatcaacttcatgtatctccttacaaaactgaaagaactgctgcaaatgtgttcagtgctccatctctggaacagttctttggatccatatgaaactaaaaccactacaaatcagatgttattcataaatatctcctagtttatttctatgtgcatcttggtttccacattcaccatatgttttttttccagcttttctagatgtatgagaacaaggttagattttttttgaagttttaaggttctctcactctaggtaggtgaaagaccatatgtgtatgttgatgctttgaagaagttttactattttcttttttcttctttgttttgaaatttgtgcattacattgtatcccatccagacattttagactggcaaagtgacaatttttattaaaaaaaaaaaaaaaaaaaaaaaaaactcgagtttttttttttttttttttttgagagtattgaatactgttcaattgaatttcttattatagggaaaaacatgaaagattaggaaaaagaccaccggaactggaaggatgaggtacttgcgtaacgtgccccgtaaatttaagagtggctttagagacggtaccgaagctgcaccccagaagagaggagctgctgcctctacc

SEQ ID NO: 113183 - DNA, 374 bp, Glycine max
  Clone ID: PAT_MRT3847_73211C.1
gcgagtgatttttattatacacataacataatggcccctactcaatgtttcttggaccaccatactattaccacccctgccatatgctcatcacaacacactatggttggcaccctaactaacctgcctgttcggacggcccatacccacgaggatattgatgtgagcccaatctctcgccggctagctctaatcgtgctcattggtgctgctgctgctggctccaaagaccaacctgatgatgcatctcatggagacactgccaatgtgcttgaaaagccaaacactgacacagatttcctgccatccaatggagatggactcaaactatctacttcctcagagtggaacccaagcatagaggttgcacacac

SEQ ID NO: 113184 - DNA, 1371 bp, Glycine max
  Clone ID: PAT_MRT3847_73212C.1
accacgaaacgaaaaagagagcagttccgcttagagcgtctccaacaaatccctaatcgcaacaatgccggaatcacccggtggtggagacgccggcgctccaccgcagacgacggagaatgagaatccccaaactgaacaaaccgccgcgggtcctccagtcctctcaaagaacgcgcggaagaagctggcaaagcagcagagattcgaggcgaagaaggcggaaaagaaagccgcggcgaaggagcagaagcgaaaagaagtagagagaaagcggaaggagtgggaagagagccttgccggcgtctccgaagaagagaaagcgaagctgatagagtctcgaaggaacctccgcaaggagagaatggagaagaggtcgcaggagaaagagagcaaaagagagagactcactgtagcgagagaacgaggccaaaacgtcgtcgtcgatctccagttctctcacctcatgaaccctaacgaaatccacagcctcgtgcagcagattatgtattgttatgcggtgaatggagcttcccctgcgcatctttggctcaccggctgcgagggggaaatggatagcgcttaggggcggaggcctgaagcggattccggggattgataaatggataattgagaaggagaataggtcttacattgaagccttgagtgatcgtaaggaggatttggtttatctcaccgcggattcggagactgtacttgaggagcttgatttgaacaaggtttatgttattggcgggttggtggataggaaccggtggaaggggataacgttgaagaaagcagaggagcaaggtatcccaacggctaaactccccataggaaatttcatgaagatgtctagttctcaggttctcactgtgaatcaagtggtagaaatactactcaagtatttggagacaagggattggagaacatctttctttgctgttatccctcaacggaaaagatgtcaatccgattcagaagggaacgcagaagatacagtagagggagaggaagaacgtgaacaaaatgatgatataactgcaaataaaaagatatgcgctgaggaggtcccttctaactgttagaattgtctctggctcaaagttttcctacaaacctgttgatcttctcctggccattgcatggatgtgtacaactggaaggctaacacatcaagacagaagtttcaaatcagagcttcatatgcaacattaatacagacatagggaattggcattttttttatatgcttggtatgtaacaatctgtaataggatggaatcactctttttgattgttgctcctcgggttttggattcatttacaattattcttaattttaattttacattcattttcgtttct

SEQ ID NO: 113185 - DNA, 429 bp, Glycine max
  Clone ID: PAT_MRT3847_73213C.1
aataacttcaaacaaaataaaatagcactgctcttctaatgtttaactgacgcataaaagataatatatcaagcataatgtactttaatatccaaagggaggaatgcaacctaaaagcacaacactattggatcttcactccagaaaacacaataatggaaattgcctaaaagtgacaccaaaactgcttatttttcattataaaggtaagtctggccattgaagtatgtaaattcttctttcactttaatattccccactggattctttccatccaccatagctctcttcaggtgcatcataaccctgctcctcatttctctcagcagtttctggaatgctaccggcttcaaacactggatctaaatgaatggttgcctcgccaagacaatcatcttgactaaagttgtctttatccattatcttcag

SEQ ID NO: 113186 - DNA, 335 bp, Glycine max
  Clone ID: PAT_MRT3847_73214C.1
tcgcccactcgtccgaaaaaacaaacaaaaagatctaataacctaagatatagaaaaatgtaagtgcgattaatcaagtcaagtcttgcaaaacgttagggtgcatgaataggaaatcgagatgttaaatgatgacgagatccatgcttgcgcatgcaacttgtgacatgcatccttcgtattagacaccttagccttcgaggattacgtgctgactattggttactgtgttgtctacctaccaaacattattcaagtggctagtaatgacacattccatccaggcctcttcttctctgacgctggaagatttcaaagtaccacacttaaaccac

SEQ ID NO: 113187 - DNA, 209 bp, Glycine max
  Clone ID: PAT_MRT3847_73215C.1
tttttttttttttagagcaactgtcagttaacaaaatttgacttatgggttggatgttacaataaataaccaccaatattaatgacaataagttcacatattctattccattgaattgaaataaaaattcaatttttttaaaaaaaaaaaaaaattaagagtttttctttcgaattaaaggaaatatttattttttttcttccaatcac

SEQ ID NO: 113188 - DNA, 584 bp, Glycine max
  Clone ID: PAT_MRT3847_73216C.1
ctggtgaagagttttttcccaatgacaggcctatagatggaggaaccctaagcaagagatataataataactttggcgatgtttccttaatttcaaatttaccaaccctagatatggcctcttccttagtttcatgttctttgggattaaaccctaaaatgtttgatctgcatacaagttatggtgggagttgtggattaatccaaccttgctatgatacttttggtcttaacgagagcatatctttgagtcacagccatatgcatggccgtgaaaacagtccatcaaacagctcaagtaaaacttcatcatttgtaagtgaagttgcaacgaagaaaaggcctagcaattgctctctaccaaaagaatctgaagcaaaagttaagaagtcaaggccatcatgcccgcccctgaaggtaagaaaggaaaaattgggggataggatccaaactcttcagagactagtggcacctttcggaaagaccagtacagcctatgtgttgagtgaagccattggctacatccatttccttcaccaacaaattcagactttgagcatcccttacatgaaatccgcacaaagc

SEQ ID NO: 113189 - DNA, 293 bp, Glycine max
  Clone ID: PAT_MRT3847_73217C.1
tagaaaagcttggaatggtggtggtttgggaatattgaccagggttaggtgggggaaatgtggttgaaactgtgagattaagggtgtaaaaggatttgttggtttttgaaggagggaaaatttgccacctgggtttggtgaagttgggccttgatcttcatcccatagggaagttttgaaaaatttgtggttgtcaggggaaaatgcaccaggaccccaggaaaaaaagttcagcaaaaatggactttttttttgattatggggatgccaaccgctccaaattccacgaagtc

SEQ ID NO: 113190 - DNA, 260 bp, Glycine max
  Clone ID: PAT_MRT3847_73218C.1
catatatcaaagggagcaaaattttttctgatggcggtttggtagagaagatggttttcaatgagcgtggaacattggagagtgttggcgacgatgtgattagtgctcacctttatgaaggaagtgtttgtggtgaagaactatctgacatggtgtcttgagcatcctttagcaagcaaaggttgtggaaaagcaaggattccaaggcaaaagttggttagtaaccggacagtaggctgcttaacgaatgtggaggcatt

SEQ ID NO: 113191 - DNA, 406 bp, Glycine max
  Clone ID: PAT_MRT3847_73219C.1
gcgggaggtgtactttctccgtacgggcggtcccttcccgacttgctccgctcttccctagttctctgcttgtttttttttctattctcccctctaccgccgccaaacccaccgtttggcgcgcgccatgtgcccctcctgcctggggctgcacggcgggcctgcgaaactaagccgggggcggtggttcttgcatgactgttgcagcggccgaccccagaccgcggtgcgagtcgtggcggtcccggtctccgccctgtgcgagacgctgttcggggcggtggccttcatggacgaccccctggcggagcacgtccgaaccctcctccacgggtgcggcaagggcgcccgcgatccacgcctcgccgtggcggaggaagcttgggttccttctggccatgagctt

SEQ ID NO: 113192 - DNA, 248 bp, Glycine max
  Clone ID: PAT_MRT3847_7321C.1
tttttgggtttttttatttttttttgcgtttatcaccccgcaattgcgatgacacagaacgaactctttcgctttacatatccttgttaaattaaaagaaaaagaataacagttcctgattggaagaaaaacacacactcatcctaaggcagggactggatgaaaaaaaaggaagaaaataactaccgccaacccagggggagaccccctttatcaaaaacaagggggggatctataaaaaacaaggg

SEQ ID NO: 113193 - DNA, 1105 bp, Glycine max
  Clone ID: PAT_MRT3847_73220C.1
gttaataggttggttcgctgggttcccaaaaacagaggcagaaggaggaagatgtacaatgtgcccagaaagagtggcagaaggaggaagaagtagatgacgattagagggtgagagagggatactttgcgagtttgggtgtcggactgcctcactgagtatcttttgggcaccaacagagtttcttctaccattgtgactctttagctctcgaaatcactattgggattgtatggctgtctctaggacactgttatcttggtggttttgggggagtagcaagggggagaaagagcctgttctctagtggctctacactgaattcatcttctgaatggagttttaaggaaagagagactgtgaagtttccttcagtgaagggaacaaagatagctccttctcacaggaaggttaaaaggaaatggcagagcagggaagagaggagacatgatagagagtatgatgttgtgttggttccatctgatggtgatggttgtttgtcaagctctgaatctgatgactcagatttttccattgggtggttggagcctcatggctctgatttccttcagagtgatgatgatttggataatagttttgctgtgctggttccttgctataggaaggaggtggggagttcaaacaaggagcttttgagtgccatcaagaaccttccaaatgaattttcttctgctggcaaaaattacatggaacactggctggcttctctcaagaatttagaagcgtagaaaactacatcttctatatgactacggacctttctgacatccttctagaagtagagaggaggcaaaataatccatcatccaatgtattctttgtacatagaatcatcctctcctcttactgtaaaagcttcaattgaaatggaaaatgtcgatctagaaaattctgtatggccaatcaatcactactataaataaaagtatttcactattcatcacaattgggagtatggctgtctctctgacacgtttgtcatggtggttgtggggtcgtagcaacaaggagaaagagcctgttgtttctggtggctctacactgaattcatcttctgaatggagttttaaggaaagagagagtg

SEQ ID NO: 113194 - DNA, 290 bp, Glycine max
  Clone ID: PAT_MRT3847_73221C.1
ctgtcggggctcatgaatgataggaaaacgggcgataaccatacctggcttttcaacacactggagatacaaggttaaatcgtcactgtagaatgtacaggtttgaatcgaccgcttgaaatgcctacagaccgatgaattataatcaataactcacttctcgagggaatgtgcttaaatgcgcatgagctataccggaacacacaatatctagcaatgctgcattggggtaagaagcctacattggtatgacacacaagactgctttacctccaacattttgttgcata

SEQ ID NO: 113195 - DNA, 541 bp, Glycine max
  unsure (1)..(541): unsure at all n locations
  Clone ID: PAT_MRT3847_73222C.1
ggctcgagctcgagccgtgctggtcttctgtgacaagaaatctgaaggtcagctaaattctgttgttttcacttttcaatgtcactggatcaactttatggtcatcatctattattgcatatacttgttggctttttaatgttatctatctggactttcaattggcatttgttatgtcttggctaaagttactgttgtgtaaagatttaaagttatacattccttgtgcttccagccttgtactgccacatgtatatttgtttaatcaaacagcaaccattttctgtgtgaataaatggttacgtagcaaagtttaaaaatctgttctgaatattctttttgtaaatatatgttgctccttactgttttgggtgtggaagtgcagggtcaactggttcctgatcataagacatttccatctggaatcaaagctctagcagattatgtacatggaaagggactcaagcttggcatatattctgatgctggggtttttacatgtcaagtcccgccaggatcaattntccatganacagatgat

SEQ ID NO: 113196 - DNA, 450 bp, Glycine max
  Clone ID: PAT_MRT3847_73223C.1
ggaaaaaaaacccggcaccataatatataaaaatattactcagggcaggggactttcctttcatagaggaggataaaaaaggctttaataaacaagaaaagagggggccttaattatgaaatgtttaaggaaaaaggactaggggggcccaaaacaaaaaaggacccctcagggaatccctcccgggaatttaaaaaaaagaaaaggaaaaggaaaagacccagaggggatacaaaaaacccccttggacacaagcaggcttatcaacaattggaggcaggcccccagggtttgggcctttttttccaaacccccccaacaactggggctggtgagaggaaaaaacaaaaagccctaatttagggaacgggaaaaacggatcactacccctcctcaaaataaaaattattattcttggggggaaaccccaggcaaagccctggggggcaa

SEQ ID NO: 113197 - DNA, 410 bp, Glycine max
  Clone ID: PAT_MRT3847_73224C.1
ggtgtgaaattgagttggttgcatttcactttcaattgctccaaatttctattgtaccaagcaaatttaacatagtttttttttttccaaatttttagcctccctagtttctatcttttcatttgctttgcgactaaatcaagcacatccttaattttctcattcccttttgtcaaatatagatggcatgctgttgcttcatggacttgggatgcccaggatgaaacctgtgggatttgtaagatggcctttgatggatgttgtcctgacttgtaacttcctggagatgacttgccattgagtaagctactcttgatgatattattggcgactttcatcggtattatggtttgcaccaaattgtcttgagttatttttcttaactaatcctttatattttgagaattcta

SEQ ID NO: 113198 - DNA, 377 bp, Glycine max
  Clone ID: PAT_MRT3847_73225C.1
acgagctgctaccctatatgcaccacgaagcgaattaatagattggagaggagaatgaggtaagcaaccgtgatctttttttgtctgtcacctttggtctatattaaacttttaaagcaccacttttattgacatggactattcgggtgggctgaacatgtttgcttcgcattagctctttggagtaatttgctcatgcttgtgcatggttacaccatacatgatttgtaggtggcagggttttgtttcctattgtttttaattttaatatagatgggatatgttattaaggttgcattgtttcttgtatttcatgcaatgttgttaatggctgatggtggtacatggcggaaagccaaaaatccgccataaaaata

SEQ ID NO: 113199 - DNA, 299 bp, Glycine max
  Clone ID: PAT_MRT3847_73226C.1
cgcccctctgaaatgagggggttttttttgggcccgtccgggagacggcagttttaaatgacagggcacactttaatacatgttaaaatgattcttgacacttttacaaagcaaaaaggggttattttctttttttcaaagacactggggaacaataaattatttttgaacacgctgaaactcactaaaaaaagttggttaaaactgaaaccattttagaactgtggcacaaaaaattaatattgttggactttgggagcctgatatttttttaaatcctgttggagggcctggatttt

SEQ ID NO: 113200 - DNA, 299 bp, Glycine max
  Clone ID: PAT_MRT3847_73227C.1
cactataaattttcacaatcgtatctactatttttaagtgtttggacttgacacgacaacggttactatatgggtgtcacaatattgacacgattgtttagtatatattacaccagcgactttatcgccaagaagctcaaagctgaaaacacttggcgacataacaaccataagggaatcaaattaagcgccggacattggactaccgaaaatgacggaatttaagggacaataattattagttgacagaagcaatggctcggtagctattcaggtccttgacatgaatacatgcttat

SEQ ID NO: 113201 - DNA, 582 bp, Glycine max
  Clone ID: PAT_MRT3847_73228C.1
agaaattttaggaaagatggaaaatataacacagcttgagttgaagtacactcctttaaaagaattcccattttcattcagaaatcttgctcgacttcgagatttagtgctggttgactgtggaaatgttcagctaccgattagcattgtcatgttgccagaactggctcagatttttgctctgggatgcaaagggttgctattgccaaaacaagacaaggatgaacaagaagtgagctcaatgtcttcaaatgtaaactgtctttgtctctcacgctgcaatctatctgatgaatattttcccatggttttagcatggtttagtaatgtgaaagagttagagctatcgtgcaataacttcacatttcttcctgaatgcatcaaagaatgtcactctttaatattacttaatttggataattgtgagcatcttcaagaaattagagggattccaccaaatttagaatatttctcggctggaaattgcaaatccttgagtttctgctgtacagccatgttattgaatcaggttgcttttaaatgtatcttttgatttgataatttaataattgataatctagt

SEQ ID NO: 113202 - DNA, 273 bp, Glycine max
  unsure (1)..(273): unsure at all n locations
  Clone ID: PAT_MRT3847_73229C.1
aatnnnncccnnnacggctngttctcngcncgcngcngctcncccctccgcacntccatgcgcgaattctccgtcaccgcctccctctcctcnntcaccnaattctactaccaaatccaaaacccaaantccgaaccntctctttttcctccttgnatcttcctcctnctcgcctccccntcctccgacaagcacnatcncacgtccaganncacgagtacngcgcnttncagttccggcccgnggggtntccttcgagccccggtcctcgag

SEQ ID NO: 113203 - DNA, 455 bp, Glycine max
  unsure (1)..(455): unsure at all n locations
  Clone ID: PAT_MRT3847_7322C.1
agtacaggtcaggaatttttgggtagacagaagagtgaggaattctagacaaatgaatatgtagacattctggcctgtaaaaattatagaaaggtaagcttatagtaaaaaaaaaaaaattttaaaaaaaaaaaaaaaaaaaaaaaaaaaaaaaaaaaaaaaaaaaaaaaaaaaaaaaccttaaaaaaaaaatttagggnnnnnnntnaaaagtttaaaaaaaaaaaaaacccggggggagaggagggaggggtaaaaaattttgacgaaaatccagnggaggggggggggttgaaaaagggaagaagggaaaaaacctgggaggaacaaaattaaaggggttgtaaaaaaatacctttttggcaagttggggtaaaaaaaaaaaggcccggacgaagggcttttaaaaaattggggaaagcttaaatggaaaaaggaaagccctctgaaaggga

SEQ ID NO: 113204 - DNA, 225 bp, Glycine max
  Clone ID: PAT_MRT3847_73230C.1
gggcgaaaagaaaagattttttataactcccacaagttttatgtaatttgggcgggaatgtccaccaaatgagcccaattgacaaaatgtgtatttgccccccaactgggtactttttaagaaataactaagaggtttttgcttgaggataaaacgggtaaaaagattctatttttgcgcttacaaaaaaacctggttttaatctattcccatgccctgttccag

SEQ ID NO: 113205 - DNA, 832 bp, Glycine max
  Clone ID: PAT_MRT3847_73231C.1
agacgacagaagggggtctttcttttgtcgtctcggacccaaaccaatccgaagtattattcctctctctctctcttcctttgtagctttcactttcatttttctggttccgatttagggctcccgaactcggtctttgactcagaactagctctgatctgcttctcaggttgttatttggttgcaaggaaacacttctcagattgttctgaggactttgagtacaaaggaggaccattttcagcaagggatgatttttgggttgaccttttgaaattcatgtgatgtcggggttacttaattcttctctgaatggatctgcttcaaatcttccagatggtgctggacggtcttttgcttcatcgttttctggtcagtctggtgcagcctccccaaattttcatcacactggagctattcaaggattgcacaatattcatgggagctttaatgttcccaacatgcccggtacactcacatcaagaaactcaactataaataatgtaccatcggggggtgttcaacaacccactggaagcctttctagtggaagatttacatccaacaatctcccagttgcattgtctcagctatctcatggaagctcccgaattcaggaatcaccaatagaggaggtataagtgttgtaggaaaccctggatttagtagtagcacaaatggagttggtggctctattcctgggattcttcctacatctgctgcagttggtaaccgaaatgctgttccaggattgggagtcaacccaattttgggaaatgcaggtcctcgaatcacaagttctgtgggaaacatggttggaggagggaatatt

SEQ ID NO: 113206 - DNA, 507 bp, Glycine max
  Clone ID: PAT_MRT3847_73232C.1
tcctctcgtccgaaataatgtaccatcggggggtgttcaacaacccactggaagcctttctagtggaagatttacatccaacaatctcccagttgcattgtctcagctatctcatggaagctcccattcaggaatcaccaatagaggaggattgggagtaaacccaattttgggaaatgcaggtcctcgaatcacaagttctgtgggaaacatggttggaggagggaatattggaaggactggtggaggattgtctgtgcctgctctcgcatctcgtctaaatttgggtgcaaacagtggatccggtggtttaggtatgcaaggaccgaatcgattgatgagtggtgtgcttccacaaggatctccacaggtaatttcaatgctaggaaattcttatcctagtgggggtccactttcccaaagccatgttcaagcagtgagtaacttgaactcaatggggatgttgaatgatgtgaataccaatgaccagtcacctttgacatcaat

SEQ ID NO: 113207 - DNA, 905 bp, Glycine max
  Clone ID: PAT_MRT3847_73233C.1
atggctttggaactagttattaaattggattgggtcgacctgattatgatggattggttagtccaaattgagatgagtgctgtgaacatcaccaacgtcaccgtcctggacaaccctgcttcctttctgactccctttcagttcgagatttcctacgagtgtctcaccgctctcaaagatgatttggaatggaagctcatttatgttggatctgctgaggatgagacctatgatcaattattagagagtgtccttgttggtcctgcagatccacccgatccatcaaagattcgtgaagaagatataattggtgtcactgtgcttctgttgacctgctcctatctgggtcaggaatttattcgtgttggctattatgtgaacaatgattatgatgatgagcagctgagagaggaacctccaccaaaggttttaattgatagggttcaaaggaacattttgtctgataagccaagggttacaaagtttcccatcaatttccaccctgagaacaatgaaaatgaagagcaactcccgccatccgagcacccatcggaaactggagaagatccacttgctgtagttgatcgtgatcctccagatgagaaggattcttaacattttgtaggtatacagacctttcaattcccaaatatccaacattacattcactgtatggaatatgatgtcatttttgtgaatctctgttcgatgatgtgaatgagatttatgagctcttttggaagtagtggccttggagtgctaggttcaaaatgattgtaacgtgtgaaaaccagtttctttgagtgaagctttgcaatgaaaaccaaattttatgtattaacacactttttcacaaatcatagtctttatgatgtgtaaagaagattcactgtaagctttaggtc

SEQ ID NO: 113208 - DNA, 566 bp, Glycine max
  Clone ID: PAT_MRT3847_73234C.1
ctttcactttcatttttctggttccgatttagggcatccgaactcggtctttgactcagaactagctctgatctgctcctcagatcctcgttacacttccctcactccttcgcaactctgcacgcttttgttcttccgcttctccagcttcgaatttcggtgttgttatttggtaacaaggaaacacttctcagattgttctgaggactttgagtacaaaggcggaccattttcagcaagggatgatttttgggttgaccttttgaaattcatgccatgtcggggttacttaattcttctctgaatggatctgcttcaaatcttccagatggtgctggacggtcttttgcttcatcattttctggtcagtctggtgcagcctccccaatttttcatcacactggaggcattcaaggattgcacaatattcatgggagctttaatgttcccaacatgcccggtacactcacatcaagaaactcaactataaataatgtaccatcggggggggggtcaacaacccactggaagcctttttagtggaagaattacatccaacaatctcc

SEQ ID NO: 113209 - DNA, 201 bp, Glycine max
  Clone ID: PAT_MRT3847_73235C.1
ccggggttccattgtatgctaacaactcatgtattattagtcacgagaattgctgtacaaacagttcacacatggcttttaaccacaatttaatttgcattcatttctgagttctttatatgaatatcctttaggctgactagaatgtagtggcatgttgatgtactatgatttctgtttgatactttcttttcctggatc

SEQ ID NO: 113210 - DNA, 992 bp, Glycine max
  Clone ID: PAT_MRT3847_73236C.1
atcgagttatgcatttatccaacttgcctcatccggaacccatgcgtgatatacttccgggcgcgggcgagttgtgttgtcttgaaaaccctctcccgccaacacactttcttcttcttcttcttttttgtgttttgtgaatactgagatgagtgctgtgaacatcaccaacgtcaccgtcctggacaaccctgcttcctttctgaccccctttcagttcgagatttcctacgagtgtctcaccgctctcaaagatgatttggaatggaagctcatttatgttggatctgctgaggatgagacctatgatcaattattagagagtgtccttgttggtcctgtcaacgttggaaactatcgttttgttttacaggcagatccaccagatccatccaagattcgtgaagaagatataattggtgtcactgtgcttctgttgacctgctcctatctgggtcaggaatttattcgtgttggctattatgtgaacaatgattatgatgatgagcagctgagagaggaacctccaccaaaggttttaatcgatagggttcaaaggaacattttgtctgataaaccaagggtcacaaagttccccatcaatttccaccctgagaacaatgaaaatgaagagcaacaaccccctccatctgagcacccatcggaaactggagaagatccacttgctgtagttgatcgtgatcctccagatgagaaggattcttaacattttgtaggtatgcagacctttcaattcctaaatatccaacatctaattcgctgtatggattatgatatcatttttgtgaatctctgttcgatgatgtgaatgagatttatgagctcttttagaagtagtggcctcagagtgctaggttcaaaatgattgtaacgtatgaaaaccagtttgctttgaatgaagctttacaaaaaaaaaaaaagacgaacgctgtccggtatacaagattccggacgcgggcagggggcgtcat

SEQ ID NO: 113211 - DNA, 697 bp, Glycine max
  Clone ID: PAT_MRT3847_73237C.1
aattttacaagtggggagagagagatttgttctggtattgttttgatcctcggtcaaaagaacacgcaaagcaaacccagtcacccccaacaaacacgagacaagccgtgtgcaaacaatagtcggtgtgaacccccaaaccctaatcgccaccacctccaatccttcgtttctatgaccgagtgctgttggggtcagcatgcgctagcttcgtcgtcgattttttggttggtgattctcgtgattcttttcgggcagaatttttgggtttgacggcatggatttggtaccgagcgtcaaggaaaaattaaactattttcgtataaaagagctcaaagatgtgctcactcagttacacctttcaaagcagggaaagaagcaggatcttgttgatcgcatattatctgttctctcagatgaacaagtttcaaaaatctgggctaagaagaatgctggtggtggaaaagaacaggtagcaaaattagtggatgatacatataggaaaatgcagatatcaggggccactgatctagcttctaagggacagggtgcatcatatagcagtagtgtaaaggttaaaagtgaatgtgatgatgcctttcaaccagatgtgaagattcgctgtctatgtggaagtagattcaaaacagagaaattggtcaagtgtgaagatgcaagatgccatgtgtggcaacac

SEQ ID NO: 113212 - DNA, 3750 bp, Glycine max
  Clone ID: PAT_MRT3847_73238C.1
ccacgcgtccgcccacgcgtccgcccacgcgtccgcccggacgtgttgccgtagaaaaaccggattggatagtcggcgataggtccgaattttgtaagtggagagagagagatttgttctggcattgttttgagtctcgttctgggtagacccacgcggccgcctcgatcggtcaaaagaacacgcaaagcaaacccaacccagccacccccaacacaacacaaaccgtgtgctaacaatagtatagtgggtgtgaacccccaaaccctaatccttcgtttctatgcatgcgctagcttcgtcgtcgtcgtcatcgattttccggtttgtgattctcgtgattcttctcgggccgaattattgggtttgacggcatggatttggtaccgagcgtcaaggaaaagttgaactattttcgtataaaagagctcaaagatgtgctcactcagttacacctttcaaagcagggaaagaagcaggatcttgttgatcgcatattatccgttctctcagatgaacaagtttcaaaaatgtgggctaagaagaatgctggtggaaaagaacaggtggcaaaattagtggatgatacatataggaaaatgcagatatcaggggccactgatctagcttctaagggacagggtgcatcagatagcagtagtgtaaaggttaaaagtgaatttgatgatgcttttcaacgagatgtaaagattcgctgtctatgtggaagtagattggaaacagaggatttggtcaagtgtgatgatccaagatgccatgtgtggcaacacaccagatatgaaattattaccgagaaacctgccaaagacatctcagatgttcctgatactttctcctctcctcgctgaagtatgttcagtacggccccgcttgtagctttccattgaataacctttgcagcataggtcgtacattacgtccagtaaatcttcggttgtattaaccccagatttcagatttagaaaaattgtagaacgttgtgaggcatttatggtcctcgatgaaatggcaattaatacataatgataatgggtctgaggcatctcatggtggaacagagctacaaattaccctgtgccaaaatgcttgcacccaccccctttggcaaagatgttgtggccgtaatgattctttatgcttgatatctaaattgtccttgtggcagatgttgatagatggactttatcagccaaaaactctccattatatctgctaagagctattatctcccgttaattgtttaggggttcgtattgttaaaaggcgcagcatgcagcagatcctaaactcaatcccaaaggagtctgatggagtttcaaatgaagaagctcttgcacgtgtctgccgttgtgttgggggaggaaatgcagctgatgatgctgatagtgacagtgatttggaagtggtttcagatactttcactatcaaccttcgatgtcctatgagtggttcaagaatgaagattgctggaagatttaaaccctgtattcacatgggttgctttgatcttgaagtttttgtggaaatgaatcagcgatcaagaaagtggcaatgtcctatatgtctcaaaaactatgctttggagaatatcatcattgacccttatttcaatcgcatcacttctatgatgatgaactgtggcgaagaaattgcagagattgaggtgaagcctgatggttcttggcgtgttaaggtaaagagtgaaagtgaacgcctggaattagggaatctagcacagtggcgccttcctgatggaaccctctgtgtgtcaactgctggagatgtcaagagagtggatacattgaagcaggttaaacaggaaggtgtttcagacagtcctgctggtttaaaacttggcataaagaagaattgcaatggagtttgggaagtcagtaaacctgagggcacaaacacctcttctggtaataatttgaaaagggtttttggaaatcccgaacaggttgttattccaatgagcagcagtgccactggaagtggtcgggatggtgacgatcctagtgtaaatcagggtggtggtgggcatattgactattccactacaaatgggattgagatggattctttgtgtctcaataatgttgatttagcatatgaatatactgcacccaacacttctgcccaggtgggtggtgcagaagttattgttcttagtgattctgaagaagacaatgatctgttggcatctcctgcaattgcatataagaacaacagaaatgatgctacagatggttactctgtaccaccacctgtaattgttgattcatatactgaagatcataatcttggtggaaattcatgcttgggactctttcctaatgatgatgaatttgggatgtcttccctatggccattgccttctggaagtcaggctggtcctggattccagttatttggttctgatgcggatgtgtctgatgcgttggtccatctgcagcatggtcctatgaattgctcctcgtcactaaatggttatgcattggctcccaatactgctttgggatctggtagtatcttgcaagagtcctctgctggtcggtcagatgctgatttgaatggtggtttggtggacaatcctttggcctttggtggagatgatccctcacttcagatttttctccccacaagaccagcagattcatccatgcacaatgaattgagagatcaagcaagtgtggctaatggtgtctgcactgaggaggattggatatcccttagtcttggaggtggtgctggtggtaacaatggtgatgctcccactcaaaatgggttgaattctagacatcaaatcccaaccagagaaggcgccaagaatactttggatgatactgcttctttactccttgggatgaatgatgttagatctgacagggcaagaaggcaaagatcagatagccctttctcctttcctcggcaaaagcgttcagtaaggccccgcttgtacctttctattgattcagattcagagtaaaggtcagaccttgtgtctcaagaactttaggtactcttaacatcagatttcgtatttagaaattgaagaaagttgagaggcatttttggtcctcatgaaatggcagttaatacataatgataatgtggtctgaggcatctctggtggaacagagctacaaattaccctgtgccaaaatgctttcacctaccccattggcaaagatgttggccctaatgattctttgctcttgatatctaaattgtccttgtgacagatgtttgctgggggtatagtgctggtttgttgtatagttaatcattcaaatctgtagttcaaactttcaaatttggtggtatattatttctgcatttttgtctctgctgagagcaataacctgtaaatgttttagccacatatcagatccaacagtgaaatcaaagatattgtttctggccatttttctagaatactatgttgtctcaagtatcatgcctcatgatcggccaagatagacgcccatttcataacacctggacgttgatatttatttaacatgtttaggcacctatgatgcctccccgtaaggatctatctatatttcttgcctggctaagtatttggtttcagatgagcttcttgtcattatactttgtttgcatagtcgaatagagacaagagaaaagagcccctaaacgttattgattagcctactattattgacaattatcaagaaccaggaaaagtgaactgcttctagg

SEQ ID NO: 113213 - DNA, 507 bp, Glycine max
  Clone ID: PAT_MRT3847_73239C.1
gcggtgttgatgcgctgaccccccttcaaatctcatctgtattaattgaggggggcatattaggaaactggaatgtgaaatgtgaccatcctaatactgcttatttgttgcagagattggtaggagttgaaaatcagggataaggccgggtgcgctgaatgacatagtcataggggcaatcgcctttgcaaagacgttatctgcaattgttaccactcttatattgagaatacgattgagagattatcatgccgtttgcaggcgacgtgatgcatccaagatctctataaaaattgatggtgtaaggacctttagttatggagaattgtactgtgccacaaacaatgtcagcacctctgctcaagttggacaagggggctatgggaaggtttataaaggggctcattctgatggcacaattggagccataaaacgtgcacaagagggatccctgcaaggtgagaaggagttccttacagaaatatcattactatcaaggttacatca

SEQ ID NO: 113214 - DNA, 378 bp, Glycine max
  Clone ID: PAT_MRT3847_7323C.1
gcctcgtgccgctgagcatcacttgttaaaaggtgagggtgttgctgggggagctttcatgacaaaccagccgtgcttctcagatgatataacttccttaagcaagaaagactatccaatgtctcatcacgcgaggttgtttggattgcgcgctgctgttgctatacgccttcgaagcatctataatagcacagatgactttgttctagagttcttcttgcccgtagattgcaatgacattgaagaacagagaaagatgcttacttcattgtccaacattatacaaagggtttgtcgcagcttgcgcgttataagagaaaaggaattggaggaagctaacttgtcagttaatgaagtgatagcccttgcagacagtgg

SEQ ID NO: 113215 - DNA, 1678 bp, Glycine max
  Clone ID: PAT_MRT3847_73240C.1
ccctcgcgtccgaatcaccgttccattttcatttcgctcagttccatagttcgctttttttttttttaatttgatttaatcagaccgagtgctgttggtgtcagcatgcgctagcttcgtcgtcgtcgtcatcgattttccggtttgtgattctcgtgattcttctcgggccgaattattgggtttgacggcatggatttggtaccgagcgtcaaggaagttgaactattttcgtataaaagagctcaaagatgtgctcactcagttacacctttcaaagcagggaaagatgatctggtaccttactattaggtctggtttaagtcgattatagtgctccatatatgctgtaatttattgtctttgactttgttatcttttattcacattcttgtatttccttttatgcaggaaaatgcagatatcaggggccactgatctagcttctaagggacagggtgcatcagatagcagtagtgtaaaggttaaaagtgaatttgatgatgcctttcaaccagatgtgaagattcgctgtctatgtggaagtagattggaaacagagaatttggtcaagtgtgatgatgcaagatgccatgtgtggcaacacatcagttgcgttattattccagagaaacctactgaaggcatcccactagttcctgataaattttattgtgaactctgtcgtctcactcgtgcagatccattttgggtttcagtggcgcaccctttgcatcctgtgaagttgaccacaaccagtaatccaactgatggaaacaacccagtgcagagtgtggagagaacatttcaactgactagagctgacaaggacttggtatcaaaaccagaatttgatgttgaggcttggtgtatgctcctgaacgacaaggttccattcaggatgcaatggccacagtatacagacctgcaggtcaatggtgttcctgttcgtgcaactaacagacctggttcacagttgcttggggctaatggtcgggatgacggtccaattatcacgccctatacaaaagatggaattaataagatttccttggctcgaggtgatgctcgcattttttgtttaggggttcgtattgttaaaaggcgcagtatgcagcagatcctaaactcaatcccaaaggagtctgatggtgagaaatttgaagacgcccttgcacgtgtctgccgttgtgttgggggtggaaatgcagttgatgatgctgatagtgacagtgatttggaagtggtttcagatactttcactgtcaaccttcgttgtcctgtatggctttcatcaatagatgaattattttagcaattcatgaagtcctactaatcagttttttatttttggtgaaaattttagatgagtggttcaagaatgaagattgctggaagatttaaaccctgtattcacatgggttgctttgatcttgaagtgtttgtggaaatgaaccaacgatcaaggaagtggcaatgtcctatatgtctcaaaaactatgcgttggagaatatcatcattgacccttatttcaatcgcatcacttctatgatgatgaattgtggcgaagaaattgcagagattgaggtgaagcctgatggttcttgccgtgtaagggtaagagtgaaagtgaacgcctggaatagggaatctacacagtggcgccttctgatggac

SEQ ID NO: 113216 - DNA, 332 bp, Glycine max
  Clone ID: PAT_MRT3847_73241C.1
ttcattcttttcctttttcccccttcaaagaagccggggccaattccacgaaccttgtgggtacacaaaaaagtaggactgacttttgcgctcaaattctttacaaacttcaaaacaaggccgggcgggtcaaagaacggcggatgccaaccctttcattttcattaccccctgcgaaggcatttaaaccaaaggggggagaccttccaaccatgctccctttatgagcataatcttaaagagcacccctccgctatcaaaagccaagtgaggaagacccacatttcattgagcggcgaccattacctagcaccacccaactaaccattagt

SEQ ID NO: 113217 - DNA, 331 bp, Glycine max
  Clone ID: PAT_MRT3847_73242C.1
ggctaaaaaaacgacaaggcggtaactctaccaaaacagtaacgattgatgctcacctgaaaaaagatagaggaccaggacctgctcgcctacatcaaaactcctattgcactagcacgaaacttttggctactgctccgtggctgaacatggatattcatctacactcttggcggcgatactgtacttctagaaggctagaggttcctctcctttgtcaccttacttgctggaacccatacctaactgtgtgtccgcccttacacctggaggctgatcttgagaagtattcctgtacacgaccgacgtttctttgcccaactctataggg

SEQ ID NO: 113218 - DNA, 327 bp, Glycine max
  unsure (1)..(327): unsure at all n locations
  Clone ID: PAT_MRT3847_73243C.1
ttgccctcgttgctcgacgatacgcgagagcacggaaggccaaggaagcaatcganacgttcgagaaaatggaacagtatggtttgaagccgcacgcgtcggatttcaataggttggtcgatgttttatncaaatccaagtgtgtggaggaggcacacgaggtgtttgataaaatgcggcacttaaggttggaccctgatatcaagtcctacaccattttattagaagggtggagtcagcagcagaacttgattaaagtcaatgaggtgtgtagggagatggaggataaagggtttcagcttgatgttgttgcgtatgggataatca

SEQ ID NO: 113219 - DNA, 388 bp, Glycine max
  Clone ID: PAT_MRT3847_73244C.1
tgctgactgtttttgtgaacctttttttttggtggacaaaatgctacctttacacaaatatttggatgtaccaagacacattttttgaaaactagggcactgcttatcctcaaaagaattacatcttctcaactgggcttcattgttgacccagagagtcttaaccttgataggcaggctacaaattcatccatatgggcaactaagattaccatcatttagtatacgaggttgaaaagactttgatccttcccttgagatacgacagttgcgtatgaagaacaacaattcctttgtttaatccttggggcctcgcaccacagggtcgataggattcctctaactgctccccaatgtcataatatgtatccgtatccctgcctttaac

SEQ ID NO: 113220 - DNA, 954 bp, Glycine max
  Clone ID: PAT_MRT3847_73245C.1
gacccacgcgtccgctcacaacaatgggcaaacccgctagttcttcttcctcctctattagcagcaccaccaaccgtcacctcctcctttcaaccgcatcttctctcactcaagaacttcccactgatcttaggcttggactcggcatttccgccactcaacattttgcctcttctatttcaagggggcaatggcaacaatcacaccacccttttgtgaacatttattcacaagttcctgctgaagtgaatgattgcagcaacgatcatagcagcttctttgtgaaggtgtacatggaagggattccaatcggaaggaagctcaatatactagctcatggaggctactatgagttagtcaggactcttgaacacatgtttgacactaccattctttggggaacagaaatgaatggagtgcaaccagagagatgccatgtgctaacttatgaagatgaagaaggggatttggtcatggttggagatgtcccttgggagatgttcttatcgacggtgaagaggttgaagatcacaagggtagacacattcgggtgttaagtgaagaacatgacactgcctcttccttcaccggtgattttagattttgtcctctagagtgagactctaatgaggtcgctgatcagaaaatttagaaaaatcttagtgaagtatatgcacagataggtgatgtatatgcatagctcactctgctctttctttcaagataatggaaaaagaatagtgttgtatattaattcttacccattctgggctaccggatttattttctttctagaactcaacttctaactgttagaatttctcttttccaacttattttcctcaattttaagactgacgcagagtgaggaacgaggaatggaaagaaaaattattattatgttgagagcaaatgaaaatatgcattatgccaaaaaaaaaaaaaaaaactcgt

SEQ ID NO: 113221 - DNA, 822 bp, Glycine max
  Clone ID: PAT_MRT3847_73246C.1
ccacgcgtccgggcaacaatcacaccacccttttgtgaacatttattcacaagttcctgctgaagtgaatgattgcagcaacgatcatagcagcttctttgtgaaggtgtacatggaagggattccaatcggaaggaagctcaatatactagctcatggaggctactatgagttagtcaggactcttgaacacatgtttgacactaccattctttgtaagtctattgttttatatcctctcattttgttgaatattaacaacacattttttaacatgagcttcctaactcgcaagattttgtaatttataagacagagagtgttgaatcagcaaaataacaatggaatgttgtggtgtgttaacagggggaacagaaatgaatggagtgcaaccagagagatgccatgtgctaacttatgaagatgaagaaggggatttggtcatggttggagatgtcccttgggagtaagttaattgactcttttttgtttttttttcttatctgagaaacaaaagcattatatgttccattttgtgaattgatgtggtatttgttttgatggtgtaggatgttcttatcgacggtgaagaggttgaagatcacaagggtagacacattcgggtgttaagtgaagaacatgacactgcctcttccttcaccggtgattttagattttgtcctctagagtgagactctaatgaggtcgctgatcagaaaatttagaaaaatcttagtgaagtatatgcacagataggtgatgtatatgcatagctcactctgctctttctttcaagataaaaaaccacccggccaacccaag

SEQ ID NO: 113222 - DNA, 424 bp, Glycine max
  Clone ID: PAT_MRT3847_73247C.1
agagcatgcgagtttctaatcaccataggcttctaattcataccacgaatggactcactacaactactctcagaactgctggaagtactctgctcaaaacagctggcagtccgatggccctttgtcctgatggctcacatgctaagggtgatcatgtgacacacgcacgggagaacaactcgatctaggtgtgatgcttggattgctgatattagcgagtgaaacatctggttcgacacaagatgatcctttacaaactatatcaattaacttctccaggctgacgtctgttcaagcgtaatccagacgattattgagattactacaagcattcgtattcaccagaaggcactcttgagtgaaaaggcagcaactagaactgtatatatcgaaaacttgatgtctaagtgtgcagtacaactat

SEQ ID NO: 113223 - DNA, 191 bp, Glycine max
  Clone ID: PAT_MRT3847_73248C.1
cgaaaatggaacttcctaactgctacatgttcacgcttagccttcttgttctttattatcatactcccacttgtttgtacgacgatctaggaggcgggaccaggtgaaaagccctataaaactaccttaacctttttacttttgaagatggcaacatgagtccttgccagtccaatcttcacgccaacaaa

SEQ ID NO: 113224 - DNA, 480 bp, Glycine max
  Clone ID: PAT_MRT3847_73249C.1
ttggggggggggggggggcttaaaggggccgagtaagcgtcgtagagctgcgatgttaatagtatatccagttggaggtgtaagtgaaccgcgatagcgatagtgtaaggtgtaaaaatgtgagggataaatgcgccaaaagacaaggaggttggcgacaaaagggtgcggagcgaggctaagcggtatagaaggagttgatacgaaaagatgcagtggttggtctgcgtaaagccaggtaaagttagagacttacggtgagggagaagttggtgtgtaacgccaggagctacgctaatcccggttgggcatgagggggactgtaggagcgagcgtggatatcctcttggcggcgtcgaaacctgcactggtactagcaatgataggaggggctgccgttacgcctagcgaggcgcatagcagacttagcagtgtacacgttagcgaacattccacttgagagggcgacaatatcgaatt

SEQ ID NO: 113225 - DNA, 414 bp, Glycine max
  Clone ID: PAT_MRT3847_7324C.1
aacaacaatggaagctgcattgtgcagagcactcactctttcaccctgccaatgttatcccgcagcagatgctggagataaaaatgttgcttggcgggatcacaaagatcgaagttcctgcatgacaatggcacccactgtactattagggcatgggccagaatacctgtaaaagacaactatacaaacacaatctcctctacgggaatcgtatatacactggtggacaaaaggcctacacatccccaccctaccgagttctgctggacaatgacaacttggacctgcgacattatcgactgctcacgacgatagaacgtgataccaggaatgaccactcataatgccgttgacaacatgcaggacgcacattattatggactagcaagggtgatagtatgtgctgacatggat

SEQ ID NO: 113226 - DNA, 335 bp, Glycine max
  Clone ID: PAT_MRT3847_73250C.1
tcttttttttttttttggggccatataggtaaatgtttttttaaaaaaaataacgaatcttcacaattaattgatttaatgaatcctttttaagccccaaatgggaaagaaacccctttgtgtttttggagcatcacaatccttttaaggttaaactaacaacgtttgcgcgttctcagttctcaaccttggctgggggtttcttttcattggtttcaggctttgcattctttggctgggctttctttttttttggggctttagccttcaccttcttggcctcaaaaaggccttctttcttttcttcattctcattgagccaggggacaagagag

SEQ ID NO: 113227 - DNA, 329 bp, Glycine max
  unsure (1)..(329): unsure at all n locations
  Clone ID: PAT_MRT3847_73251C.1
gcttggaacctttgggctgatttatgtgcttgtcgtgagaagatgatagaagggggcttcagccaacatgtaccacctcttcaatgtccacctcccctagtctctcgttcntgatagaaacagccctactaggtctacccaacccattctaaaacaaaataaccccactccgccacggtctccccggcgcactccgcgtccccttcagtttctatcgactacctaagcgtctcccaccgcccacgtaaagacggcgcgagcgactaaatttcctagaaagtaacagaccacgtccgcggaaacggagtcgatcgcattttcacctccta

SEQ ID NO: 113228 - DNA, 322 bp, Glycine max
  unsure (1)..(322): unsure at all n locations
  Clone ID: PAT_MRT3847_73252C.1
gatgcacgcgtacgtaagctcggaattcggctcgagnttgcgcactcagttattctctctctctctctanagcgtcgtcgttnagttagggcagaaaaccccttttncggatcggtggagcnaacncttcgncggcnanacccccganggtnntnaattcggcnntcnancaacggnnnaaanccnaccnagnttnangntttncnnnagnanttcnangggaacnaactncgaatttgaagtgaaccnttncggaaancgttncgagntgagcaaaatnttggaatcttcagggngcncatntgtataccgtgtgcacagc

SEQ ID NO: 113229 - DNA, 196 bp, Glycine max
  Clone ID: PAT_MRT3847_73253C.1
gtaacatacaaccacttttcatcttaaccattttgacctttttatcatcggttaccttcatggagtccctttactgacataactaatctttatcaacaactccccatcaagatggggctctcatcattctaccacctaatcatacaatcaccctcccaactaacaaacaatatgagcctatatcatcttgcaacct

SEQ ID NO: 113230 - DNA, 365 bp, Glycine max
  Clone ID: PAT_MRT3847_73254C.1
cccactgtgagctttcctaaactgtgagactcacagaggggaatgttactgacggtgaaaccagcatggagaacgtgtttaccatgtggtgtccgctccttcccaaatacataaagcaaataagcaggatggggaactgcttgaccttcatccacccctaactccaaaactatcaaggtacgacagtggcattgtcatcgacactcaatttcatgtgaattttagcaaaacaggaaacaaagataatgactcatttcagaggatcggacaaatgtgtctagtccgggtggactcggagggagtggggtggtcttcaaggattcttggcgttgggacggcatgagctaccctgtagagtttattct

SEQ ID NO: 113231 - DNA, 369 bp, Glycine max
  Clone ID: PAT_MRT3847_73255C.1
ggaaacacaattaaaatgtcaatttccaaagggctaacatgatatttcgccctaaaagatgtcatgtggcacaaaacattaccttaaattgtcccaacaccatataaaatctactaaagccttataaaattcttggaaacactaaaattaaacagccccctttcccttatttttctggagttttttcatgtaaaacttcaactccttacctttcaaaatgtagccgtgcgtttttgccacatttaccatgtcgcgaggaaatgccatctaacaaacccccaccaccaaactggtcctcaattgttacttcaaacttacgatcctttttgccctttttcaattttttttgaaatgattcttttttttggt

SEQ ID NO: 113232 - DNA, 248 bp, Glycine max
  Clone ID: PAT_MRT3847_73256C.1
ggacactcgcttcacagttacatattctcagaaaagcatgcattgtgagagacaacgtctctgggtttccaatagtgctggggccctcacctcttctggtgcacacaactcccatggcagccgctgtcccatgtatccccgtctcgtcaagtccatgtttcgcggcattcacattctctctcccattttcgacaccttgttgctcgaaggtgaggtcacataggcttcttcactgtactgacgtcata

SEQ ID NO: 113233 - DNA, 265 bp, Glycine max
  unsure (1)..(265): unsure at all n locations
  Clone ID: PAT_MRT3847_73257C.1
tanagangangagactacatnttgctcgcatgcncacggtganctgccagagcagtgttggccaggagnctgnattanggnagcttcaccgttgcntgcataaagatgangagnccncatatngctgtaanancngttnagattgccgagnggacgcatatcaagggaccagtggccagantattatgacacaaagagatctcgattcgtcggnaagcnatgtcganctatntcananttngtcanaggcgggatggcnttaggc

SEQ ID NO: 113234 - DNA, 555 bp, Glycine max
  unsure (1)..(555): unsure at all n locations
  Clone ID: PAT_MRT3847_73258C.1
taaaggtttttagatggtttccacctccttgaactttacttcctcttatgttttatgaatggtgtnttactaaattttaacggtcttttacttgatgggcctcctatttcctttattggtaatcattattcactctagaagggttatgaagtcaatataatcaagattgattgaatgctatattccaaatgaaacactcagttagatctgtagtcctaacacacaatcgactccatctgttacctatgccctgatacacccattatgataacaatcgctgaactgctgagcaaaaacaaggatgtggttgacataagacaagatcaagaagaggaagcaaagacaaatgtcatgaacgaatacataatgcagataagaatcaatctggggcgaaacaaacacgcaagtggaaagaaaattttaaatcaaatcatcaatggatgatagaagtgtcaatttggagaaagagaatgaaccggagatgagaaagcttggaaacaaaactcacggacatattcgtaacaagtacaccaatgaaatatttaggagcgtgtg

SEQ ID NO: 113235 - DNA, 527 bp, Glycine max
  Clone ID: PAT_MRT3847_73259C.1
agtttaatttaatataggatctgctcaatgatttattaaatagctgcagtattttgactgtgcaaaggtagcataataattagtcttttaattgaggacttgaatgaaagatttgatgagaaataaactttattatttgtaaaattagaattttatttttaagtaaaaaagcttaaattatttaaagggacgataataccctataaaactttataaattttaattttaatttttttggatttataaatattttacaattaaaatttattttattggggtgataaaaaaattaataaactttttttaaaatttaacattatttaatgattatttgaattaaaatttttaattaaaggaaaaagttactttagggataacagcgtaattaattttttaagttcaaatttaaaaattagtttgcgacctcgatgttgaattaagattaatcttaggtgcaaaattttaagtattaggtctgttcgacctttaatttcttacatgatttgagttcaaaccggtgtaagcca

SEQ ID NO: 113236 - DNA, 265 bp, Glycine max
  Clone ID: PAT_MRT3847_7325C.1
ctaaatgttatgttttattgattatttggcccttatggccctatcagttgataaggttgaaattgagggtttattattgaatattgattgcctggccctatgtggtcgacatggaacggttattttgtccatgtcattgcattaaaagcattatgcatgagtttagattataaattattttttttgtaccaatagatgttaataatttgtgttgaaaccgtgtttttgaatttgtgttgcagagtatggtaactgcgaatttccc

SEQ ID NO: 113237 - DNA, 244 bp, Glycine max
  Clone ID: PAT_MRT3847_73260C.1
tcaaaataatattaatttactaaatcccgcaactgagcttgataagagaaaacacaagctcaagcgtcttgttcagtcaccaaactctttcttcatagatagtaagtaccagaagtacttcaacataaccactatctttagccactctcaaactgttgttggatggcaaaattgccaaaccatgtagtaccagccaacaagcgggcgggcaaagctaaccgaaaatactcctttaagaagaaaa

SEQ ID NO: 113238 - DNA, 766 bp, Glycine max
  unsure (1)..(766): unsure at all n locations
  Clone ID: PAT_MRT3847_73261C.1
ctgaagaatctcattccttcaaaatcatctcctaacttcaagtttgtgaagggggatattggaagtgctgatcttgtcaactaccttctcatcactgagtccattgacacaataatgcactttgctgctcaaacccatgttgacaactcctttggcaacagctttgagttcaccaagaacaacatttatggtactcatgtcctattagaagcctgcaaggtaactggccagatcaagaggttcatccatgtgagcactgatgaggtctacggagagacagatgaagatgctgttgttggaaaccatgaggcttctcagttactccccacgaatccatactctgcaacaaaagctggggcagaaatgcttgtcatggcatatggcaggtcgtatgggttacctgtgatcacgactcgtgggaacaatgtttatgggcccaatcagttccctgagaagttaattccaaagttcattctcctggctatgcaaggcaagcctcttccaatccacggnngatggttctaatgtgaggagttatttgtattggtactaagaaggaaaggagggttatttgatgttgccaaagatatgtgcaggctttttaagatggacccagagactagtataaaatttgtggagaacagaccatttaatgaccagagatactttcttgatgatgaaaagcttaagatcttgngnttggtctgagaggaccacttgggaagagggcttgaagaaaacctggactggtatatcaacaatcctg

SEQ ID NO: 113239 - DNA, 229 bp, Glycine max
  Clone ID: PAT_MRT3847_73262C.1
ttttaactaaaagtcactttacatatattgaaacacaactttggcccggcaagaggtaaacacaccactgaaatccgatgggttcgcttaaacaaccatgaaattgtgttagaccgaatttttaaagaagctggaccttgtcgcacccgtaccagaaaagcttatggcacctaaataatttccatagacaatgggtctagggggccttcatgaaaatttgtttttaaat

SEQ ID NO: 113240 - DNA, 3035 bp, Glycine max
  Clone ID: PAT_MRT3847_73263C.1
ggagagagagagagaactagtcacgagttttttttttttttttttttttttatacaacaatatttttgtactctaacaaaaggaaattaaatgaatatctcagtagcaccatccatttcactgcatattgtacaatgcaaatacgataaaagtataactgaataccccacaaaaaggatataatatatgagcaataaaaagaatacatgccttccaggatgcaaaagcttttaggtaacaagaccctattttctaaggctgctcttaacagaggacgctacaaactagaataaagctacagaaatgttaacttaggaaccatatctggcccaattattatacttgtcaccctctaaacacagtaacatgatggaactatgctgaaactggaatcacttgtagctatgagaacaagaactacatggctagcttttctagtaaggttcttatcaaaacccaacgaaataacaatgaaataaagagtgatctatgtagcccgcaacaaaaatgcataatctttgatttctaaaacatgaaaccgctttaatatatttaagcagttttcttgtttggctcaaagacatacttgatcagtgattccttgatggaaagaagctcagggaactcgttcttcagtttggatgcatccatctcgttgttgctccgtgcagcaattatcaccttggcttgctcttcaagattgaagttagcccacttgaagcttggatcgatgtaatccctgtacatctcaagaatctcattgtggctcacggccccaggatttgtgaagttccagatgcccctcaagtttcgctttgccatctcaattgaaataggcagaagttcatccaaaatggtcatgctgtttggaatgttgaccactttgttataacgagaaatcttggtgatgaaattgcgtggattgctcaagtcagatgaaattggcatgcgaaccctgagggtgcacacattgtcatattcttttaagagctcctcaaccatagccttagttttggaatagaaagaaccaaagaagttgggtctgtcttcctccttaaagccaatgccagaaccctctggatgagctgcatcatactcaaatatgcacccagtagcataatttatcatcaagattccatgctctctgctgacatcagccaatgttaaagtcccagcaacgttggtgcgaatggtttccgtcttgtgagattcacaccaatcaacattgggtctgccagttactcctgctgcattaaaaatgtgtgtcggcttcacattctgaatatcagccacaagtgatgatcggtcctctagtcgtccttttccatattcgtagggaatttcttgtttttcacacaacttccccagcaaacccccaatccaacctgttctgccatagagcaagaacttaaaaggatgtttctgtgaggagttaacattcttggatgtcggaaccaccattcgagtattagttgagacatatgatggaggtttttcttcgtcagatccatcaaaatgtctctccagtccaccgggcatcatcagcatccttggatggggaagcaatgcaccactgacatcaccccaccaatcaggattgttgatataccagtccatggttttcttcaagccctcttcccaagtggtcctctcagaccaacccaagattttcagcttttcatcatcaagaaagtatctctggtcattaaatggtctgttctccacaaattttatactagtctctgggtccatcttaaaaagcctgcatatatctttggcaacatcaataaccctcctttccttcttagtaccaatattgtaaacatgcccgacctctcccttgtgaaggataacttcaaaagcctctgcaacatcttcacaatacaaataactcctcacattagaaccatccccgtggattggaagaggcttgccttgcatggccaggagaatgaactttggaattaacttctcaggaaactgattgggcccataaacattgtttcctcgtgttgtgatcacaggtaacccatatgaccttccatatgccatcacaagcatttctgccccagcttttgttgcagagtatggatttgttgggagtaactgagaagcctcgtggtttccaacaacagcatcctcatctgtctctccatagacctcatcagtgctcacatggatgaacctcttgatctggccagttaccttgcaggcttctaataggacatgggttccatatatgttgttcttggtgaactcaaagctgttgccaaaggagttgtcaacatgggtttgggcagcaaagtgcattatagtgtcaatggactcggtgatgagaaggtagttgacaagatcagcacttccaatatcccccttcacaaacttgaagttaggagatgattttgaaggaatgagattcttcagattcgagcaataatcaagcttgtcaagaacaacaattttgtactggggataattccggataagacggttcgcaacatgagatgcgatgaatccagcagctccagtaatgaggatattttttggcgtatgcgtagccatgtcaagagccttgaattggcaagcggtgaagcagagaagagggagaaaagacgaagacaagaaagaaaggtttttcagacacagaagaaatggaaaatggtagttcccagatttagatttggactctacacactttctctgtatatatatatatatagacgcggtttttatgtatgaatatttgatcaactacgagtctgagacagttaaggggagccagaggatcatttcaagtggcgaaaataccctcccaaatttacgtgggacccattcttcatttaattttttaattaaattcccatgtgatttatcacatgattgtggcaccagttttttataatcgtggcaccataatttcttttgtttggaaaaaaaaaattcaacaatttattgataattaattgcaaatagttctccatcgattttaattttaaggaattagctgacgatctccctttgactatgtgactggt

SEQ ID NO: 113241 - DNA, 1834 bp, Glycine max
  unsure (1)..(1834): unsure at all n locations
  Clone ID: PAT_MRT3847_73264C.1
gtgtgacatacaccattgcccctggggctattcttctgttgaaatttggacttgtctcactcctttccttgccaaggcaatccaagccctcaggccattgaggataagacttggaggttctttgcaagatcaggttctgtatgatgtgggaagtttgaagtctccttgccatccccttcaaaaggttaaaggtggattgtttggattttcaaagggatgtttacacatgaaaaggtgggatgagctgaatcagtttttcaacgagacaggggccattgtgacatttggcttgaatgcactgcatgggaagcaccagattagtcataatgtttgggaaggagcctgggaccctacaaatgcgtatgattttatagagtacactatttcaaagggatacaagattgattcatgggaacttggtaatgagttgagtggtaagggcattggtgcaagtgttggtgttgcacaatatgggaaagacttgataaagcttaaacaaattctaagcacgttatacgagagctccaagttcaagccttcacttgtcgcacctgggggattttatgaaaaacattggtatgacaggcttcttcaggtttcgggttcaggcataatcaatgttctgactcatcatttatataatttgggcccaggtagtgatgagcatcttgaaaggaagattctagatcctgagcgcttgagcagggtggaatcaattttcggcaatctttcagaaaccattaaaatatatggtccttggtcttctgcatgggtaggagaagctggaggggcatacaacagtggtggcaatcatgtttctaacagatttctaaacagcttttggtacttagatcaacttggaatagcatcctgctacagcactaaagtctattgcaggcagactttaattggagggaactatggccttctcaataccaccacctttgctcccaatcctgactactacagtgcacttttgtggcatcgattaatgggaaagaaggttcttgcggtctcaagtgatgtttcttcaccctttttacgcacttatgcccattgcacaaaagatagagcgggtgtaacgttacttctgataaacttaagcaatcagacagatttcatactcaccgtccgaaacccggtgactgcaagtgttgtagaaaatgaagtggccacaagcacccataaggaaagttcattttttgataaactcaagaagacattctcttgggttggaacaaaagggtcagaggtcacattcagggaggagtatcacctaactccaaaagatggttactccagaagccaaaccatggtgctgaatggtattccattggagttaacagacgaaggagatcttccaccgttggatccagtgcgcaataacgtgcgatctccaatatacatgactcctttgtccattgcatttgttgtataccccaactttgatgctccagcttgtgctacacacagaaaactttagtctaaggtttctataataaaccaagtaactaggcactaggactcatgcaattgcaagctcatggtaattgtaagtagtgagctattgttgtcttcacaagaaagttataaccctggcaataatttgatatttaaaaggcatgcaagttgtatcatctaattgtttgatccaatttagttgagttccatgagaagtgtttttttagccaacgccatcgattgatttcattgtaattgcacaaattttccccagtatcatcaatgaaaagatgagttaaatatattgtcttaaaaaaaaaaaaaaaaaaaaaaaaaaaaaaaaaaaaaaaaaaanaaaaaaaaaanaaaaaaa

SEQ ID NO: 113242 - DNA, 1402 bp, Glycine max
  Clone ID: PAT_MRT3847_73265C.1
cacaaatctcggcagtataccgacactgaaaaccagagaaaagaaaagcaccttttttccgccattattggcccttcttgaaacttggtcatcaattgcgatgaaggactcaacatcttgacaccaccccatttcctaattgatttggattagtcgtgttggacctggatgctgctgctaatacagttgatccacaaatgagattccgcattgcattgtttctctttttggcttctcttcaagccactttaagtcaagatattgaacatggttcacttctagtagatggagctcagactaaggctgaaacaggtgataactttatttgtgccactattgattggtggcctcatgataagtgtgactataaccattgcccttggggatattcttctgttgtaaatttggacttgtctcatcctttcctagccaaggcaatccaagccctcaagccattgaggataagacttggaggttctttgcaagaccgggtgctgtatgatgtaggaagtttgaagtctccttgccatccccttcaaagtgttaaaggtgaattgtttggattttcaaaaggatgtttacacatgaaaaggtgggatgagctgaatcagtttttcaacgagacaggggccattgtgacatttggcttgaatttactccatgggaagcaccagattagtcataatgtttgggaaggcgcctgggaccctacaaatgcttataattttatagagtacactatttcaaagggatacaagattgattcatgggaacttggtaatgagttgagtggtaagggcattggtgcaagtgttggtgttgcacaatatgggaaagacttgataaagcttaaacaaattctaagcacattatacgagaactccaatttcaagccttcacttgtggcacctgggggattttatgaaaagcattggtatgacaggcttcttcaggtttcgggttcaggcataatcaatgttctgactcatcatatatataatttgggcccaggtagtgacgagcatcttgaaaggaagattctagatcctgaacgcttgagcagggtggaatcaattttcagcaatctttcagaaaccattcaaaaatatggtccttggtgttctgcatgggttggagaagctggaggggcatacaacagtggtggcaatgatgtttctaacagatttctaaacaacctttgcaataatttgatattgaagaagcatgcaagttgtatcatctaattgtgagtaaattgtttgatccaattcagtttttgagttccatgaaagtgattttgtttcactcttcagtagccaatgccatcgattaatttcatttgtaattgcacacatgtaaattttcaccagtttcaaattataatgaaaagattgagttaaat

SEQ ID NO: 113243 - DNA, 418 bp, Glycine max
  Clone ID: PAT_MRT3847_73266C.1
gaaacatctcttgtcctattttctatattttgtatcaaaatccaaaggcatctcttgcaggacttgccatgtaatttctaagagtttgtgtgtgtgtgtgtgtacacatacatatgcattttattcttcttcatagaattattgcttttttgaaatttgattctatcctgaaaagattgcttcatatgtttccttgaaaatgtttaaagtaaagccttcttcaattccatggttcttggttttgctattttagttctaggatttattcccctaattttgcttttccaatattaaaccttttcttttctcaattttattcatgcgctgctcttaaagtttccttttcgaataatgactgataatctgaagaaactgatatttgtctctctcctcaatcatattaatattattcttcacc

SEQ ID NO: 113244 - DNA, 298 bp, Glycine max
  unsure (1)..(298): unsure at all n locations
  Clone ID: PAT_MRT3847_73267C.1
tcagaattgaaaagtttcataaaatttntgttgacatttaatatgaacatttattngcgtgaattagcatggtgaagctctaattttgattgaaaaataacactaaaaacacctgatgaactgtatctaagctttgtccataacagaattggaaggccgatgtaaattcctggtacatacgactancntcattgattaagattgcaagtttgtgttggcttcaagggtagcatttgaattgagatattaataataggatcctgttatcctgtgtacttaaggtaatggttaaggaact

SEQ ID NO: 113245 - DNA, 311 bp, Glycine max
  Clone ID: PAT_MRT3847_73268C.1
gcaccaggagagagagagagagagagagagagagagagagagagagagagagagagagagagagagagagagagagagagagagagagagagagagagagagagagagagagagagagagagagagagagagagagagagagagagagagatatttgtggggaagctcttgcacgctctttatgtggttgtgttatgtgcactatattgagatgtgcgagatctccgcgttcgcgtgtttttgtctctttgcacaaggatgagcggtgttcagatttgaatatctatcctattctggagagtgtgtatttg

SEQ ID NO: 113246 - DNA, 1256 bp, Glycine max
  Clone ID: PAT_MRT3847_73269C.1
ccacaccagctcttctccactggcggtttccttccccctcttcccgtctcgtgctcaccgtggctcttctccattgtcgttttgcttctccctttttcgttctcattcaaaccctaatctgtccctcggatcccaaaattgccccaaattgagaacacgccatggcagcaacgttcgattcggttcgttccctcgcacttctcacccttgcatttgtgtgtagcgtcgcgaattcgatgcggttcgagcttcaatcgggtcacaccaagtgcatttcagaagacattaagaccaacgcgatgagtgtgggaaagtacagtgttgttaatccccgagaagggtacccacttcccgattcccacaggatcgttgtcaaggtgacgtcgcctcatgcgaacatgtatcactttggagatcatgtggattctggtaattatgcatttacggcatctgagtctggtgactactcagcttgcttttgggttcaggataccagagataccccgtcggtggtgactattgaatttgagtggagaactggggttgctgccaaagactggtccaaggttgccaagaaagggcagattgaagtaatggaatttgagttgaagaagctatatgatactatcctatccatccatgacgagatgttttatcttcgagaaagggaggaagagatgcaagattttaacaaagcaacaaacagcaagatgtttaccttcagtttcctttcgattgtggtttgcttgtctgtggctggtttgcaactatggcatttgaagacattctttgagaggaagaagctcctctaagttcatcacacgaattttgttcatttgtgctttagaattttttttattttctgttcctggttgttccttatgtatccaaatgtatgattagttcatctttcacttttacattttatggcaactagaaattgctgctgatcgcaagtcatgttaaatgtatgttacaattatgaaccggtattaactttagaaactatagttaaatttcttaacaaaaaaaaaaaacaaaaaaaaaaaaaaaaaaaaaaaaaaaagaaaaaataaaaaaaaaaaaaaaaaaaaaaacagaaaaaaaagaaaccaaaactaaaaaaaaaaaaaaaaggggcgggccctttaaaaaaaaaaaatttcaaccccattattagaagaaattaatttttttatttggggcaaaaaaaaaaaaaaaaagggggcgggtttaaaaacctcatgattggaaaa

SEQ ID NO: 113247 - DNA, 124 bp, Glycine max
  Clone ID: PAT_MRT3847_7326C.1
gaactgctgacaatatgtacatccttggagagctaattagccttttggtaacaaccgtttattaagaatgtttttgatgatactgggcctgggcaatagtatatggataaactgatactggacg

SEQ ID NO: 113248 - DNA, 1433 bp, Glycine max
  Clone ID: PAT_MRT3847_73270C.1
acggctgcgtgaatgatgactcttccttcattgtcctctgtattcttcttcttcttccctaactctctctgcaataacaacaccatcaacaaccccttcaagccggcctaaaccccattacccaaaactttttcttttttctttccttcaacactctctattggatcatcacatattcaatttcattctcttcaaaaattccccttcaaaaaaatttaaaattaaaaaaaagtgctctttttgtgaattttgagccatttgccaccgacagatttcgatcttctccgtgccaaagttgtaatcttttcgaattttggcgaggtgggtcgatctgatttcgctcgaataattgcgggttcgattttgatctgaaaaaggaaaagagaaaaaaagattgggttatttctgattcaagattttgtccttttttgaaatggtctatttccatagctcaatctctctctgcaagttcgttgatcaatcatctttcatggcgaattcaatatgttctgctgatttcggttcgaaatcgagacaaatcaatcaccttcagaagaatcggagaacccctagttcatcatcatcatcatcatcatcatcgaattcccttcagattccaccctgtgatcgatctcgatcggcaatggttgatgttgtgatgttcattgctgttgtttgtgcctgtggctttttgttcttcccttatgtagagtttttggtgacaaagtgttacgaggttattaagggtgttgtgtttttgattaaggaggaggtttctgtggcaccttggatctatatttccatagggttgagtgttgtgtttgctgcattggccacgtgggctgtggtggcttgcaccactaggaagtgtgggaatcccagttgcaagggtctgaggaaggctgctgagtttgacattcagttggagactgaggattgtgtgaagaatttggcttctgcgtcgtcgaatgtagcgaaagatggtggtggtggaacgaagaagggtctctttgaattgcctcgtgatcaccatagggagctggaggctgagctcaagaagatggcaccaccaaatggaagggctgtgctcgtgctccgggcgaggtgtggatgttctgttggtaggttagaggttccaggaccaaggaagcatcttcgaaagatcaacaagaagtagcagctatcgtgaccgagacgagtaggacaggacaggagaggacacccttttgatttattggatggaattaaggaaagggatgataattggatcaaatagaaatttgtacttgttgccctatgttcattgatctagtaggaaattagaatgtctttaaataagccccttggcaataagttgtaaggaactatgggtcatacacagtttagttggttatacctggaaatataaaaaaagaacatttttatttttattt

SEQ ID NO: 113249 - DNA, 696 bp, Glycine max
  Clone ID: PAT_MRT3847_73271C.1
gcacgaggcgtagaatggtatctgtgctagaaaattcttatgacaaaaaggcaaagccattgaatggaacacataaatctcatgtccactccacattagaggctggaattctcgcaaaatacaggccatggatcaataccacgttgttgatgacagagctaaatcaaacagaggagacagctgcaaaagccattgaatactttaagaacactcgccacattgttctctactatgaagatctcataaaaaatgccacgaagctgaaagatgtacaagaatttctgagattgcctttcagagatatgcacagcaggcaggtcaagattcacactgccccattattgaagcaaattgaaaactgggatgatgtgtataaaacgctgagaggcacatcatatcagaattttctcttctcagactaaccaaatataatacgacacaataactgattttgacaccaatagacaaaacaaagattgcttcttctttgactagcataggattattctatgtacttgggtgccacttcttggaaactttaatttaaagtaatcaagcatttaatgttgttaccagggcaatggtttagtcaacatcataaaaagaaaagttggtttttataattgaagttgatattttatgcaagaaaaatgcatatgaatgtaagttagaagtttcaactctctccctcctcag

SEQ ID NO: 113250 - DNA, 1541 bp, Glycine max
  unsure (1)..(1541): unsure at all n locations
  Clone ID: PAT_MRT3847_73272C.1
taaaaagtgctcttttttgtgaattttgacccatttggccaccgacagatttcgatcttctccgtgccaaagttgtaatcttttcgacttttggcgaggtgggtcgatccgatttcgctcgaatgattgttggtttgatctgaaaaaggaaaaggaaaaaaaattgggttatttcggattcaagattttgtccttttttgaaatggtctatttccatagctcaatctctctctgcaagtccgttgatcaatcatcttcgtccgcgaattcaatatgttctgctgatttcggttcgaaatcgaggcaaatcaatcaccttcagaagaatcggagaacccctagttcttcatcgtcatcgaattctcttcagataccaccctgtgatcgatctcgatcggctatggttgatgttgtgatgttcattgctgttgtttgtgcctgtggctttttgttcttcccttatgtagagtttttggtgacaaagtgttacgaggttattaaggttgttgtgtttttgattaaggaggaggtttctgtggcaccttggatctatgtttccatagggttgagtgttgtgtttgctgcattggccacgtggggtgtggtggcttgcaccactaggaagtgtgggaatcccaattgcaagggtctgaggaaggctgctgagtttgacattcagttggagactgaggattgtgtgaagaattcggcttcttcgtcgtcgaatgtggcaaaagatggtgctggtggagtgaagaaggggctctttgaattgcctcgtgatcaccatagggagctggaggctgagctcaagaagatggcaccaccaaatggaagggctgtgctcgtgctgcgggcgaggtgtggatgttctgttggtaggttagaggttccaggaccaaggaagcatcttcgaaagatcaacaagaagtagcagcaatcctgttcgagccgagtaggacacaggagaggacacccttttgagttattggatggaattaaggaaagggatggcagactcttctagtagaggatgtccggaatgttacctgtggaaaaggttgctcaagctcaagcatatgacatttttttatacagatgtgctgaaccaaggttattgcacaagtgaatctttgataccattgatgagtaactggaggaagaaaatgcagttctcatatggagtaatgaccagatttgaacagcgcgattagtaagatgttaatttataatgcattgagctagctattgatttctacattttttctttattgtatttgaatttattttttatgataatctgaacatacttgattttttcattgtcaatttgaatcctcagtctgtctcactcacagaaatcatgactgctaagaagccatcatgtctcatttgcgattttctagtctgtaacctggttgagtagagttaccttctatagttgagttatatacttagttctcaattgcactgngtatactggatattttctctggtcttttgcaaatagggtaatagtgattntagtttctaaaaacatg

SEQ ID NO: 113251 - DNA, 315 bp, Glycine max
  Clone ID: PAT_MRT3847_73273C.1
ggagccagctgaaggcatacttttgagggttgaaagtctgacttgagaaggaaatgaaattcacaatataagcatcacacaaagtgcccttactgtcactagtgaagaagctgggacaggggaacaagccaagaagatagtccttatgttcttggagagattgtctcatccattgggccttccgaaatcaaacaaacagcagagaaacacagacatgattgctcgtatattgccttacctaacctatggtgaacctgctacaatggatgcgcttgcccatcattttactccttacttgcaagattggagtacatt

SEQ ID NO: 113252 - DNA, 285 bp, Glycine max
  Clone ID: PAT_MRT3847_73274C.1
cagattttattataatgcataaaaatgcactctcctataaattattaagtgtgctttcatatgatttttaataatttttttttaattttttaaccagattttaggacactggttaacaagattctttttgttttattctctatgctgatactctctttcctaatttgatgatggaatggaattttatctagttcggttgtcccaactagaacattactaagttacataaagatgagagaaaaagagaagaaaaactagagtttgatacactcattgtctggttgc

SEQ ID NO: 113253 - DNA, 531 bp, Glycine max
  unsure (1)..(531): unsure at all n locations
  Clone ID: PAT_MRT3847_73275C.1
ggtccggagttcccggggggacccacgcgtccgaaacccccaaccccacgcacactctgggggggcgggggggggggcatttgcattgcgtcctacattttctttaccttctctctgggtcttccatactcacatcatgggtcgcgtgggttctaacctcgcttccaaagcaaggggtgcgaggagtggcanccaacanattggaantaggggggggttgagcgggactatgcggcgaaagacattaaatttgggggggagggggggggtctgatgcttaanggggggggggagcttgctgatgctgtcaaangaaccatggggcccaaggggcggaatggggtgattgagcaaaggtttngggcccctaaaggggggggagatngantaacctggtgcgnagagcgttggattcaaggagaaagggaagaatgtgggggccaggcttggaaaggaggggggtaatgcgactaatgagggggggtggggatagaaccacatgggctacaggccttacacgaacaatattta

SEQ ID NO: 113254 - DNA, 2995 bp, Glycine max
  Clone ID: PAT_MRT3847_73276C.1
ccacgcgtccgaacaatcatgggaggtgggaacagaagatcaaaaggtggtggaaacagaaaatccaacaacagcagtggctgcggcaaccctaaatctcgaaaaagaggttcggatgttaagagcgctttgttcgtcgaaggcggtttcttgtctgattggcatctcccttcccctacccaaaatccagagagaagttctgggtccaataacaaatccgggagccagcgtagagcagcagaaggatctgcatctaaaagaggtcgcatgtgctgggattggaaacaatggtgaagatagtaatttaaatcagctgcaacctttggttttggcagactccaagcagggtcaaattattgctcatatagatcaaacacctccttcaaaacccagcaatgtaaaatatgcgtacacttatgatgcagattttattttgggtgacagctctcatagaggattatgtctccctgctgaacaagagaaaaccccaagtggcattggcactttgtctgaacagatgccccaatcaactccagttttagattcaccatcatttgagaaggaggctggctctgatgagggctttgaattgggcaggtaagcattctgggctgcggggattttcttgagaaaatctttacttgatgatcagaaggtcttatgtgctagggattggttacaattgtgcagataataatttaaagcagctgcaacctttggttttggcagactccaagcagggtcaaattattgctcatatagatcaaacacctccttcaaaacccgacaatgtaaaatatgcgtacacttatgatgccatttttattttgggtgacagctctcgtagagtattatgtctccctgctgaacaagagaaaaccccaagtggcattggcactttgtctgaacagatgccccaatcaactccagttttagattcaccatcatttgaaaaggaatcattttctgatgagggtatggatttctggttaagcaatcagatcacagaagacttgccatcaaatgtgtctgctgagagaaattcagggtttctgacaattggaggtcttaaattatacactcaggacatctcggataatgaaagtgatgaatataatgacggagactcaccagatgaggacagctctgcgtcttctgagccagaagagttacttggatcatctgaaaccaatgactctgaatactcatctgatagtgattcagacattaatgaagaggttgtggaagattatttggaaggagttggtggtagtgacaacatcatggaagcaaaatggttgctaaaacctgttttggatgagtcaaatgatgatagttcttccagcagttgctatgacgaggcattggagaagttgagtggctttgtccttcaagaagcctccagggaatatggcatgaagaaagctcaaccatggaagaaacgctctgtaggttctggacctttagctttggaagacctaatgttggaaaaggatccaagatccatctctgctagaaagaagcatgttcctcgattccctcaatcttggccttcacatgctcagaagagtaaagcttccaaaagaattcatggtgaaaaaaagaaacttcgtaaagaaaggattgctgtaaagcgcttcgaaagaatgctgcagtttctaattgaatgttagaaaaaatcttatgattctgaagaagtttagctttaccgtgggatatgacctttctgttttcactcggttaaattgctggatttctagatcctagttacaattagcagcaatatatttattgcagagtagcagccaaggctctggcaaaaaaagatttgtgacagtgatgcgaacgcagtctacatccatgccatcttcaagtggtagacagcgcctggaaaagttgttgggagttgatgatgaggatgccgatttttccgtggctgactatgtgaataagaaatctgtgagtggagacagaagactgggaaagaaaaatgctaaaaggaatgattttagattccaagaacctcaatctgcccagaacaagtactcaggaagccataaagtgaaggacaagaaagggagtggacaaaagggttcatatgctaatcagcctgtgtcatttgtatcaagtggcttaatccattcagaaactgtacaggttacagttgatgctgaagagactaataggaatggtgtcaccagctctgctaatataggttcatttgaagaacacactactggttttggttcaaaaatgatggctaaaatgggatacacggagggagcaggattggggaaaaatggtcaaggtatggcacaacctattgaggttattcaaaggcccaaatcacttggtttaggtgtagaattttccaacaattcagctgagccagctaggaacaaatcttcaagagttggtgctaaatcacttggtgtgggtgtagaattctccaacagcccggctaagccagctccaaacaaatcttctaatgttggtgcttttgaaaaacacactaaaggctttggatcaaagatgatggcaaagatgggctttgtggaaggcacgggattaggtagagaatcacaaggcattaccactccgttgagtgctgttaggcttccaaagtcgcgaggactaggtgccaaaagttaatttataagtaattgtatgttggcttagtaaatcttatgattctctcgtagtttagctttaccatgggatgaccatctctgaaatcactcggttaaaatgctatatttctagctcctagttatttgtttttactttttttaggaagaactaagaaaactcagtcctaaagaggacatgtaattatgttgaatgtggccagctcttggatgaccacatggaatcatacttttccttatttttttcattaatcattatttaagttacggaccacttaacaaaaaatgagggaagtcaccgttttcgtttctcaaagttactgaatccgtgtccgtttcatttgtcc

SEQ ID NO: 113255 - DNA, 449 bp, Glycine max
  Clone ID: PAT_MRT3847_73277C.1
tcatttatatgataatatgacagtcatgttcaaagaaaagtgctaacaatacattgtttattatgggttaaaatttagtagaaatttcaaaatgagactcattgtataagtagaacctgcaaaattttgtaatttcacataaatttcaatcaatagtagaagactagagagtattcaaaaaagtgtattagagagtgttggtaccatttctcaaatcatgttaaaatatgacatgagactaatgagaagactcattatcatttttgtaccataactcctattctttattacatacaaatagctacaaaaagaaattgttctattttgttttattcaatttcattaggttggaagtaccattagtaataataacaatgagcaaaatgatgtgagttgctggcaacgacctgaagatatgacatatgagagaccagtttcaatttgtgatg

SEQ ID NO: 113256 - DNA, 1379 bp, Glycine max
  unsure (1)..(1379): unsure at all n locations
  Clone ID: PAT_MRT3847_73278C.1
gtaaagcgcagagaaagaatgctgcaccgtggggttgatcttgagaaaattaattcaaaattagaaaaaattgttttggaggaagtggatattttctcttttcagcctatgcattttcgggattgttcacagatacaacgattagcagcaatatatcaaatgcagagtaacagccaaggctcaggcaaaaaaagatttgtgacagtgatgcgaacacagtctacatccatgccatcttcaagtggtagacagcgcctggaaaagttgttgggagttgatgatgatgaggatgccgatttttctgttgctgactatgtgaataagaaatctgtgagtggagacagaagattgggaaagaaaaatgctaaaaggaatgattttagattacaagaacctcaatctgcccagaacaagtactcaggaagccgtaaattgaaagacaagaaagggaatggacaaaagggttcatatgctaatcagccagtgtcatttgtatcaagtggcttaatcaattcagaaactttacaagttacagttgttgatgctgaagagacaaataggaaagggtgtcaccagctctgctaatatanggttcgtttgaagaacacactactgggttttggttcaaaaatgatggctaaaatgggatacacggaaggagcaggattggggaaaaatggtcaaggtatggcacagcctattgaggttattcaaaggcctaaatcacttggtttaggtgtagaattctacaacaattcagctgagccagctaggaacaaatcttcaagagttggtgctaaatcacttggtttgggtgtagaattttccaacagcccggctgagccagctaggaacaaatcttccaaggttggttcttttgaaaaacataccaaaggctttggatcaaagatgatggcaaagatgggctttgtggaaggtaatggattaggtagagaatcacaaggcattaccactccgttgagtgctgttaggctaccaaagtcgcgaggactaggtgccaaaagttaatttataagtcatttcttttctgtgtttgtttctaattgtatgttggcttaaatcttatgattctctcgtagtttagctttaccgtgggatatgaccatctctgaaatcactcggttaaaatgctatatttctagctcctagttatttgtttttttttcatttttttaagaactaagaaaactagtcctatagaggacatgtaattatgttcaagatacttatgttgaatgtggccaactcttggatgaccacgtggaataatacttttatttatttttttctttaagttgttggtaacttgtataaatcattattcaagttactgaccaaagtcaccgttttcatttctc

SEQ ID NO: 113257 - DNA, 439 bp, Glycine max
  Clone ID: PAT_MRT3847_73279C.1
acggctgcgagaagacgacagaagggatcgatgggttgtgttgtgctgcagctgcagcgatgacgacggggtcttgacatttccgaaacaaaacacataagaaaagctttaaaataaaattgtagtatactctactaataaagcccgaaaagtgagtacaactgtaataataacatcacacgcacatgctaatgctatatgcctggactcaaggcatgaggagattatgtgtctttgtctatatgtgaacacggcttctttctagaaactgtaaaacaagtatataaataaagatatattattttgaatatttaataagttaaaattataatatatgcttaatttattttttattgatttattttaaaaataaattaaatgcactatatataattgtttacgtgtgtaatataaacatcgtcgttgtcatcaaacgccc

SEQ ID NO: 113258 - DNA, 389 bp, Glycine max
  Clone ID: PAT_MRT3847_7327C.1
tcccgttttgataccgatagaggttttttccatgttttaacaaccaaaaggatatgtttggactacgggagcattacactctttacaacatatatctaaaaaacattttcaaaaaaatggatctaccgggccaatgaccgcacgatgcccaatgggctacttccaaagacagcaccgaggcttacagagaaggcccatatttgtccactgccccaaaaaagctatcgaactggatgagtgaaaaccttatatgcaaatgtccagtacctgcatctaacaacctgtgtagaggacaaatgatgagacctctttgactcaccgctccattgtgggtaggaagatgaacacgaaacggcgaggcgtgaattggagtctatcctgcgggggga

SEQ ID NO: 113259 - DNA, 142 bp, Glycine max
  Clone ID: PAT_MRT3847_73280C.1
cttaaaggaggttggattcatcacatgggagatgttaattctcaggcatccatctgactactctggtaagctatcatttgattacaaatcagttgagagagagaacctggataatgagggatacagtatcattggtaacgtt

SEQ ID NO: 113260 - DNA, 713 bp, Glycine max
  Clone ID: PAT_MRT3847_73281C.1
ttgaatttgatgaagcattttcagcgagactcgagactcaagaatgctattactactagtcaattgcacaggactcggacaagattaatgttgaacattgtctacttatccaagagtggggatcggatactagtaaattcagccactggagctgacagagactagagcatggaactcaaggacttggcagccatgttatcttttctgcagctagtgattatatttggataatcacattgcatacagcattgactagctctccctggttcatccactatcatggttcatggcacgaagcatattcagcaaatagtagactgaattactgagagtcactacttgaatgtattaaaaaatacactcttggcaatttgactcaactcagacgagaatccacgagcctcaacattgaaaactttttgacactcagattcaccaacccttatgtattcatgatgtaccagatttgatgctaaagcccaattccaatgcaatagattttgtggaattcgccccgtgattataaccctggcctcatcacgtatggatcatcaccttaggctagaagagaaaaatataaataggccatcaaggattcatgtattccttcccacttttacactatttttatttagatatcgacttaagcgtgagagttcttgtaggttggctccaaccaaataaataaaattccattcgagtattccttttat

SEQ ID NO: 113261 - DNA, 251 bp, Glycine max
  Clone ID: PAT_MRT3847_73282C.1
agacactaaaaaggcttccaaaccatacgtggaacattagacatcatgcaaggacatgttacacttaactaccattaacaaataagcatgcgcgaacccatatcttatggaaggtactaaaagagctccaaagagctagttcttctactggaacatcggaaaaaatcgtcagatactgaaacctcaccgataatatgaacctagtccactatctacttcactaccagcaccaaatacataacctccatcat

SEQ ID NO: 113262 - DNA, 340 bp, Glycine max
  Clone ID: PAT_MRT3847_73283C.1
ggctcgagccacgaatgcctcaacaagaattgggtacgaacctggttttatcaatgacaatggtatttgggggatgctacatcttgatcaagtctaggatggcgtatgcatgacggagtgctcaaaaaggcgatgcacacaatgagtttctttaaatattgcaacgtcgcaagaaggggtgagagctcttgcattcacaagaacaattccaaccatttgaccactgacatcatcctgcatgtgctcaccaatgtaacaattttgttgttcgtggtacttattttggactagaggcggcttcttttatggacctctcaaacgaacatagacaagatcctgc

SEQ ID NO: 113263 - DNA, 336 bp, Glycine max
  Clone ID: PAT_MRT3847_73284C.1
tttttactcgagtaaaaaaatccattaattccgaagtttgtctctaaagctcaaatttagagttaacactcgattctttaatcaaaattgtatcatccaaaaaaaaaacacagaacattgtaaattaaacaggtactcaaggtaaagcctaatataatcttattcttataagaaagtttttggtcttccttctagagttctcataatcagggatgaatccaaaggtatatccaaagcgggccatttttttcttccgtacaaattatttttaaaaaaataatgacttccacaaaaataggaaaacgtaataaccacttaatccatccatgtagcaac

SEQ ID NO: 113264 - DNA, 270 bp, Glycine max
  Clone ID: PAT_MRT3847_73285C.1
gcgactcaagaaatgattttggcgtgaaaccttgtttccctacatgaacaccaataaaatggatcgagctaatttagccaaaatatctagcatctaaaattgttacattgaatgagcgctgttccttaccaatgccattagtaccctttaccccaatgattttgccgatgtacccccccattgccccacccagaaaatttataacatttgacgtatttgggtccacaaactcgctttcattaggaagggctagaaacgttcccccattgc

SEQ ID NO: 113265 - DNA, 179 bp, Glycine max
  Clone ID: PAT_MRT3847_73286C.1
aggctcgaggtcacaatgcaatcacttcttactcagtggctattcttcttgtcatcctatcaatcatagcattagtagatatatatggtccaatgattacgtttgtgatatgatattgatatatataacttcacaatctctaggtattcattctcatagaggattgttttggggattgg

SEQ ID NO: 113266 - DNA, 260 bp, Glycine max
  Clone ID: PAT_MRT3847_73287C.1
gggcctgaaatttcatgtgtacaatagaatttgccacataataagaataattatacaaaggcttctcaaaacacccattagacaattgtatataacttggcgacaaaaggtccaaaagaaaaaatttaccatttgcaaaggcgaactacatgtggtgcctctttggtgacaagctattatgcctggggctctttaaaacttttcccggggtggtaacaataatttttacaaattttcttttgggggggtgcttttttttt

SEQ ID NO: 113267 - DNA, 695 bp, Glycine max
  Clone ID: PAT_MRT3847_73288C.1
agagtgtcaactaagtaactaactgaaagcaaatttgtaattcacagcaacaaagttgaaaaatttattgacaaccacaagaacatatcacgcaattgtcataatacagaaaattgaaagttatgctcttctatagtacaatgaactaaatatgccaaaactttattcttctagaacttgtacagtttatttaaattcctatggacattgaaaatctcagataaagcctaaaggcaccagccaccagttaactacgataaattgatgcagactagccaactccatgagaatcaagaaaagatcgatctaatacttttatttgcttcacaaccttaaaggcagcaagtaggagctcccatcaaggccttttgcataataatttgtcaagatttctttcatattcatgtccctatagactggggggttttcttctgataacaattcctttattggaccataactcttcgatgtacatttagatatggtaaaattcatgaagaaggttgctacagaaattctagggcccatattcctcaacaagacccggtgataaacactgatgaacttgtcattagtcataagctgcagaatatctccaatgttgacaacaagagctcctcgcactggaggagcattaacccaatgattctcatgaagaacttggagacaccaatctgatcttgcaaaagtattgt

SEQ ID NO: 113268 - DNA, 682 bp, Glycine max
  unsure (1)..(682): unsure at all n locations
  Clone ID: PAT_MRT3847_73289C.1
ggtccggnattcccgcgtcgacccacgcgtccgctcccacgacgcgcttgccctagcagcagcttctctcctctgccgccataccttcctcttccgcgcttctcgtccatttatgcctgagctcctctgccgccataccttccacgttatctgccctagcagcagcttcgctccacgctcctcgtccgtttctgcccgcgctcctctgccgtcataccgtgcacgttatctgccctagcagcagcttcgctctgcgctcctcgtccgtttgtgcctaagctcccatccatgccgccgatgtaaattccgttaccactcacaaagataatgtggttggccaccctcttgaacttcaaaaacctccaccttaggctcaacaatctgactcaacttcagagggatgacatcgtgagcttccttcgcttaacattgttcctagtgcttttggtaagattcttggcttgctaccttttagtcaaattcatcccgatcatatttatgatcatacacagtttttgggctgattgcattttgatcttctgaagatttgcttcatgttttctcaaatctggcgagaaatatcaatttctttggacatacacgcattggtggttgggaactggaccaaagagcaagacccatcattattggcccctgtttttacttatcaaagaaatgtggt

SEQ ID NO: 113269 - DNA, 995 bp, Glycine max
  Clone ID: PAT_MRT3847_7328C.1
ccacgcgtccgtgtatatctaatttcatcgtaaaaattaggtgagaagcttcgttgtgcttcgaggttcgttcctttggtgctaaaaagtgttatgagtttgctcgtttgaaaaatgagatctttcatcggctgaacttagcgtggaggactggtaaaatttaggcggtctgcaagttggagggggaataaaatctgataattgtttgagttacattgaggaaggagcatgccatgtcattgtcacatttgaaaaattacaatattttcacataaaagagctcaaagaagcaaggattctcaaaacaaagcatgattttttgttgaatctcttcattgggaaattctcgtgcaactcagctcaccagcatatatacgagggacaaaatgcttttgaagccttgtcaaaggcacaagtcaaggaaaagccaacaaactacatttttgaaatcacagtaagcatgtgtgtaaattatataattttattaatatatttaaaaattaaattaaatttcatagattttaaaaataaatttagatgttttttttggtaaatttcagtttttttaaaataatttttaaattcgtagaactttcctgcggatttaaatttaaagcaaagtctataggttatttcttacggatataaaatttgcaggaaaatttccaacagactttgtttcagattttaaatccttaggaaaattcctgcaaatgtacatttgcagaaaaaagtatctatttattttgcagaaaatttgaattttggaagaaaatttgaattttaaaattcctgcaaatgtacaatctttgaaggatttacttgcgattttaaatccgtaagaaaatccattggaaacgcatttcttgcgaatttttttacaaaattcccataaaattttccatgtaataggcccttttctaccagtgattgcttcggactttggtaatgtttgcatagtagttggaaagctaagtaagtatatttggtctgcc

SEQ ID NO: 113270 - DNA, 736 bp, Glycine max
  unsure (1)..(736): unsure at all n locations
  Clone ID: PAT_MRT3847_73290C.1
atttgatgatggtctgaataactggtctggaagaggctgcaagattatgttgcatgattccatgaatgatgggaaaattgttccaaagtctgggaaattctttgcatctgcaacagaacgcacacaaagctggaatggaattcagcaagagatcactggacgcgtgcagcgcaaactggcctatgaggtcactgctttagttagaatatttggaaacaatgtctctactgctgatgtacgggctactttgtgggtccaaacaccagatcttcgagagcagtatataggcattgcaaaggtgcaggcaacagataaagattgggttacaatgcagggaaaattccttctaaatggttctccatcgaaagtggtcctttatttagagggcccccctccaggcactgacattcttctcaataatttgatcttaaagcatgcagctaaaacacctccttcaaccccaccggatttaaagaatattgcttttggggttaatataattgagaacagcaatctggctgatagcacaaatggatggtttccccttggcaattgcactttaagtgttaaaactggttcaccacacatttccaccaatggcaagagattctcttggttctcatgagttcctaagcgggcgatacatccttgtaactaatcgaacgcaaacatggatgggtcctgctcaaactatcactgataaagntaaactctttgtgacttatcaagtgtctgc

SEQ ID NO: 113271 - DNA, 184 bp, Glycine max
  Clone ID: PAT_MRT3847_73291C.1
ttactcggtcactgctaactgatgctaattgtgctttgccttcgctataaatactttgttttaagattgtggcttttgggtaagtactcctttcgatatttataaacggactatattgtatttacaaaccgccataaccatcgtaccatgtttaaaaacttttaaaaactatttacgtgggcaa

SEQ ID NO: 113272 - DNA, 504 bp, Glycine max
  Clone ID: PAT_MRT3847_73292C.1
gcgggtgttggaatgtgtacttttgctaaatgctgactattgtggtttcaacataactatatgatagcattacgatccagagcaggcccaagagaacccacaagatacctgcacgataccgtgaccctgcgtgaaggatacctgctgatagcctgaggaatacttgctgatatgatattaggatattaatagaaaagtgcatgtttgttatttgccttgttaaccaaattctgttattatttgaaagtttgttgggatagctgacccaatttcagcacgtgctcagacccacttgttataaatatatgaaagatgaataaaatcagcaaggagaaaatcatttctattacctgatatccatagatagcatagcttagttatctgtttcataccactatacctatcttgcttaagggactttgggatgaaatagacaaatatgcattccacatggtgtgtcactctatctaaagctttagaaaaaatcactgctgaatgcatgtt

SEQ ID NO: 113273 - DNA, 501 bp, Glycine max
  unsure (1)..(501): unsure at all n locations
  Clone ID: PAT_MRT3847_73293C.1
tttgctagctagctagggaggctaatgcaacttcatattttacggcaatcatttttattattctgttaacttctgttttaaagatatcaattaagcatttaataaatataacttttttttattaaaaatcacgatcagaatacattttaaattagagtttaatcactatatactaacaatataaaataattttacagtatgatccaatcataaatcaccatttaaattattttaatataattattttaaaaataaataaatttatcatataattatacatgttaaattatgaataaattattatataaaaaaattacactatcaatatatactgcaattctttttctcttaaaattatgataaaagtgtattgataacacttttgtgtaaattgttttctaattntaattattttcttaatgagtatcttatgtatacttgtagaaaaaaattcactaatatttcactttaccaatcatgtataaagcataatcctttatt

SEQ ID NO: 113274 - DNA, 639 bp, Glycine max
  Clone ID: PAT_MRT3847_73294C.1
ggaaaagaagaaagacagagagagaatggaagaagaaaaacgcgtattctgaaaaagaagccacccctctctcttcgccgctgttttctctcttctgataatttcccaatctcaaccaccgaacaaaaaaaaagtagggttagggttttccgaaaaccctttcgttttgcccactgcaactgaaaggggttttcgaagaagctctctgcgatgttttcttcttcttcagtgatcaaatggaggttccgtcacaagcccatgacgctcgtgcgactcttcccactcgtgtgcctccttttgttctcgctaaacgacgtcgtttcatccgattccgacaaatcagtgctcctcgagctaaaacactcgctctccgacccctccggcctgctcaccacgtggcagggctccgaccactgcgcgtggtccggcgtgctctgcggttccgccacgcgccgccgcgtcgtcgcgatcaacgtcaccggcaacggaggtaaccgaaaaaccctttctccttgctccgattttgctcaatttcccctctacgggttcggaattaggaggagctgcgagggctttcgtggagcattgctcggtaagctttctccgaagctcagtgaactcacagaacttaaggttttg

SEQ ID NO: 113275 - DNA, 500 bp, Glycine max
  Clone ID: PAT_MRT3847_73295C.1
ccacgcgtccgaacaaggcagacagacccattcaggtgagcacgcctgggtatttttgtttggaccctggtgcaaacctgcaaagactttgtttcctacttatccttttgctgccaaaataaaaaaaaaatgtaagttttttttgttaattttctaaagaggagataggtggcttactcatttgttgaaaattgaaattgcatcccgaatagttaaattcagtcttaatcaatgccatgttggcatcccttctggttaatgttttaacaccccataccacttgtggcgagacatgtttttgaactggcagacatgtaatactgttgttaatactaataaatccagagaacatttgccctgttccaccatgttatgttgaacttgtacgcgtgtttcaaactacgtgtaggtgatggtatgtactgaatgtgacattattatcttagtatctatgtccattttacaaataaatttcaagaataggactatgaaacttttca

SEQ ID NO: 113276 - DNA, 103 bp, Glycine max
  Clone ID: PAT_MRT3847_73296C.1
cgtgctggatcctatcatagacatctcggttgccatcacattgtcagggtctaagtctctgtacaatcgaattatgactcttgctgctctctctgagggaaca

SEQ ID NO: 113277 - DNA, 171 bp, Glycine max
  Clone ID: PAT_MRT3847_73297C.1
gatcggcgctttccttgtgtactaacgaaattctagggcttcgccaagaaaacaacgtgtttattatgccagagaatcaaatgactgctgctggccaggtatctagatgaagacagtacaaaaattttgacaagattgtttgccaaaataacacagctttacatggggtat

SEQ ID NO: 113278 - DNA, 731 bp, Glycine max
  Clone ID: PAT_MRT3847_73298C.1
gttttaaaaaaggcaaagatttattatgtaacgcaagaagctgaggctgttcccaagtcactctctttgcaacctccgaggaattttggtagcatcctctgcgatgttttgtcatcagtttcagtttttgtaaaagatagatagatagaaagagagagatataagtgagttgtttcagtttctgtgtgtgtcagtaagtgcttctcttttgtccattttttcttctttctcgtgtgggaaaatgctggttcggagaagggtgatgagttggagaagggtggcgaaggcccttcaggctctggtagctcatgtcttacttttcaccttcactattacccttgctctcaagcttgatcatgtcattcgtcactcatggtggaaggtattttttcctctatgggtttttcatgctgtggtagcacgaggcaggttttccttgcccgctccttcgatgcctcatgatcgccgatgggctccttttcattcactcgtagcaactcctctacttgttgcatttgagctacttctttgtatgcatctcgggagcagttatgtgatgaatttaaggattgtcttcatgcccctgatatttcttgaaatggcgattttgtttgataatgtcaggatgtgtagggctttgatgcctggagatgatgaaaatttgaccgacgaagcagtatgggaaaactcttccgcacttctgggtttcaatatccatggtcttctttatt

SEQ ID NO: 113279 - DNA, 201 bp, Glycine max
  Clone ID: PAT_MRT3847_73299C.1
cgtccgtttaagtacattccttgttttttatactcaatgacatctatgaacattgcattactgatccggtacgtttccttcatactccttttgggctcctcttaatttacatccaccaatacaaaacaacactcaaatttaatctattataccaaatatcccttttcaatctattcatctttttacccatatcatctctta

SEQ ID NO: 113280 - DNA, 505 bp, Glycine max
  Clone ID: PAT_MRT3847_7329C.1
cttggaattcggcttgagtgatggatttgaaaccttctgtttatgaactggctctcaaccttgatgggagggttttttttcagatcaaaattcgtcatgggagaatcaaagcaatctttcaaagaggaaaagttcaagacccagttagaagatacgaggcatggtgaactcaaaaagaagtgcattgactgtcttattactggtttgcttatcatgtcatcctcacttttgtatggtgcctatgttcattcctacgagcggattactaaagctactgaatcatgtacaccatcaacccaggaatctacctcctggtggactcccaagtcaatggccttattcaattcaaagatgcatattatgtggtgacaagttcaagttatgagccgaatggcatttggcatcttgacgatatatgctggtgcatatttgctcttgcaagcggtcgaccacaacattacagactatgccaagccacttcatccttttaatgttggggattttt

SEQ ID NO: 113281 - DNA, 288 bp, Glycine max
  unsure (1)..(288): unsure at all n locations
  Clone ID: PAT_MRT3847_732C.1
acacattacatgtaaaattaaattatctgttgcataaattttcatgggtaactatttacaaacaccaataattcacataacacanatatttttactttttaacaatatcctaaattctaacaaaaaaaaaaccttcatcactcactaaatatatataccaccatattttttataaaacattaaccattcttcaaacttcattcaaatactacatcttaacgaaacacgtactttacacccctgttaacatttctttcttcatacaacaaacatttatcttcattaatt

SEQ ID NO: 113282 - DNA, 846 bp, Glycine max
  Clone ID: PAT_MRT3847_73300C.1
attaatccaagacgacacaacatcgactgtgcttattcaaagctacagcccaaaagcattttataatgtaaacactaaaaaatttaacactacttttcttttcacaccattgagtgacaagaagaaaccagtgtataataataaaataagtaactttatgtgactatttaagtgagttatttacattgttattccaaatggagatggtggatgaagaacccaacccccaatccaacccatttatgtcttgaatgtagaaacttgatttggacaagctcaagagcattccatcagtatcttgagctccaaatggagaacacctggatcctgagttttcaccttctcctcctcctgctccatccaaatgcagcaaaaggggccatcagtgttggtgttggtgttggtgtgggtgttggtgttggtgttggcattggcattggcaacagcccaggcccctctggctccactggatcaaacctgaagaatgccttcacagcactccaggcatggaaatctgccatcactgatgacccattgaagattttggatacttgggttggttccaatgtgtgttcctacaaaggtgtcttctgtgcaaactctgaggatgataatggaatcgtgacaacagcagcaactgagtcttctgttgttgcaggaatagatctcaaccatgcaaacctccaagggactcttgtcaaagagctctctttgctctctgacatcacacttttccacctcaacagcaacaggttttctggctcacttcctgacacattcagggacctcacttcactcgaagagttggacctcagcagcaaccaactcacaagcccccgtgggcgt

SEQ ID NO: 113283 - DNA, 538 bp, Glycine max
  Clone ID: PAT_MRT3847_73301C.1
agcccatttatgtcttcaatgtagaaacttgatttggacaagctcaagagcattccatcagtgtcttgagctccaaatggagaacacctggatcctgacttttcaccttctcctcctcctgctccatccaaatgcagcaaaaggggccattggtgttggtgttggtgttggtggcagaggtggcataggtgttggcattggcattgggggcagtgttaacaccccagggccctctggatcaaacctcaagagtgccttcacagcactccaggcatggaaatctgccatgaccgatgacccattgaagattctggatacttgggttggtcccaatgtgtgttcctacagaggtgtcttctgtgcaaactctcaagatgataatggaattgtcacaacagcagcaactgagtcttctattgttgcaggaatagatctcaaccatgcaaaccttcaagggacccttgtcaaagatctctctttgctctctgacatcactctgtttcatctcaacagtaacaggttttctggctcactccct

SEQ ID NO: 113284 - DNA, 849 bp, Glycine max
  unsure (1)..(849): unsure at all n locations
  Clone ID: PAT_MRT3847_73302C.1
cccacgcgtccgcccacgcgtccgacggctgcgagaagacgacagaaggggcttgattttaatgggggctcctagtagttggaatagtagaggctgtattttgctcgatgtatctggttgagccttagtatgtcgttttgaaccaaacgacagttgcgtcagaactacgctgaagaatatcatcaccatcaaagtgtttcgttggaaggggaatttggcagattcattagaagaaaatggcgggtggtggaaaggtttcgttcaaagtcacactcacctccgatccaaagttacccttcaaagtgtttagcgttccagaggcggcaccttttactgccgttctcaaattcgccgccgaagaattcaaagtcccgccccagaccagcgctatcatcaccaacgatggtgttggcataaatccccagcagagcgcaggcaatgtcttccttaagcatggttcagaactgcgcctgattccgcgtgatagggtcggtgccttttagatgttacgggtgtctgacttgatattgaccttttttgcaaaatacatgaactgttgtagcttcctaagtagagtaatcaataaataccatggttactgatttcatatataatagtcttcaaccgataaagttttttctttttgaaataatcatataaatattttggggataaataccattgttactgatttcatatattgatattgagatcaaaggtgtcttcaagcgataaagtttttttcttttttcaataatgatataaatgttttgggaaaaatatagtaatcaataaataccattgttactgatttcntntattgatattgagatcaaaggtgtcttcaag

SEQ ID NO: 113285 - DNA, 463 bp, Glycine max
  Clone ID: PAT_MRT3847_73303C.1
gggtggtggaaaggtttcgttcaaagtcacactcacctccgatccaaagttacccttcaaagtgtttagcgttccagaggcggcaccttttactgccgttctcaaattcgccgccgaagaattcaaagtcccgccccagaccagcgctatcatcaccaacggtagcttttagcctttgggatcacaaaagcttggccacacccgcaatgtttttggattaagaaaatactttttatcatcgatttatcgttggtttcatggtgttggcataaatccccagcagagcgcaggcaatgtcttccttaagcatggttcagaactgcgcctgattccgcgtgatagggtcggtgccttttagatgttacgggtgtctgacttgatattgaccttttttgcaaaatacatgaactgttgtagcttcctaagtagagtaatcaataaataccatggttactgatttcat

SEQ ID NO: 113286 - DNA, 479 bp, Glycine max
  Clone ID: PAT_MRT3847_73304C.1
aaaaacccaaaaggaaaaattaaggaaatggggcaagagcacatgaaaaaggttttttacacgggccccaccaggatttttaataaaaagggtcccaaaccctggggggtcctatcgaaaaaataaaacatcacagggccactaaaacaacaacagggcctaaaccccccttgatcttgctcatttgggattaaaaaaaaacaatggggcttagggggggttatttttttgggaaagggaaaaaaaaaacttcaaaagggaggcaattcgaggaagtggaagaaacaactctgaaaaaaagtctttccgggacatgccaaggggtggcttgcccccaaaagcatttttgaagcccttttaagagggggggacaacaatttaaatttggggggcccgcatggaacaaagaacaggggaaaggggaaaacgttttttaaaaagagggccttaagaaacaacacttttcttggaatgggaac

SEQ ID NO: 113287 - DNA, 979 bp, Glycine max
  unsure (1)..(979): unsure at all n locations
  Clone ID: PAT_MRT3847_73305C.1
ttattgtaataaaaaaatnctaatttagttaaaaaacnngaacttaatgtttttgaaaaaaaaaaatattgtacanagataaagattcagaataattaataatagatcattctattttaattaattctatgtttactttttaataaccgaaccccttctttacaaaaaagataaaataaaaaccgacgaataagaaacaaaattcattagaatcataatttttttgtttattgtatggaatatacacatcaatattcatggatcataccttttattccatttccagttcctatgttaataggagtgggacttctactttttccgacagcaaccaaatatcttcgccgtatgtgggcttttcctagtattttattgttaactatagttatgatcttttcgcttgttttgtctattcatcaaatcaataatagttctttttatcaatatgtatggtcttggaccataaataatgatctttctttagagtttgggtacttgatcgattcacttacttctattatgtcaatattaattactactgttggcattctggttcttatttattgtgataattatatgtctccagaaggaggatatttgagattttttgcttatctgactctttttaatatttcaatgttgggattagttactagttcgaatttgatacaaatttatgttttttgggaattggttggaatgtgttcttatttattaataggcttttggttcacacgtcctattgcggcaaatgcttgtcaaaaagcatttgtaactaatcgtgtcggggattttggtttattattgggaattttaggtctttattggataacgggtagtttggaatttcgggatttgtttcaaataataaataacttgatttataaaaatgaagttaatattttttttcttactttggttgccctcttgctattttgtggctcagtcgctaaatccgcccaatttcctcttcatgtat

SEQ ID NO: 113288 - DNA, 470 bp, Glycine max
  unsure (1)..(470): unsure at all n locations
  Clone ID: PAT_MRT3847_73306C.1
tccacgcgtnagaacaggtgcgagaggacgacagaacaagcacataggcctacaagcaataaagaggtggactcacctgatcttaccggacgttggctatctacctgaacatgatcctccagaaattatacgtttcctgttgcgaggggggtagtgacaaaggccatcttggacaagagaaaattggtgacctgggtgtagcagctagtctccatggctcccaaccagctcacagtgttataggcacccgacagttcatggccccccattcatatgaagaagaatactatgagcttagtgatacgcactcatttggcatgcgtgttctgcaaatgctgacatctgatcatccatatagagcatgagcttaccctgcacagatatacaagatagtgacatcggggaagctacctgcatcatctttcaggatggaagacacagaagcgctaaggtttattggctagcgtcta

SEQ ID NO: 113289 - DNA, 132 bp, Glycine max
  Clone ID: PAT_MRT3847_73307C.1
cacttgcctacatagagtcttcttgagccttccttttctccttgaactcaaacatggcacataagggggttctgctatatttctggacaagtccatttggcatgagggtcaggattgcacctcctcaaaagg

SEQ ID NO: 113290 - DNA, 739 bp, Glycine max
  Clone ID: PAT_MRT3847_73308C.1
ctcgagcccacgcgtccgcccacgcgtccgtacggctgcgagaagacgacagaagggggggaaccctaattctgcgtggtgagtgaaaatggcggtacccttgctctccaagaggatcgtgaagaagcgcgtcaagaagtttatacgcccccagagtgatcgcaagatctccgtcaagccaagctggcgcagacccaagggtattgattctcgtgtcaggagaaagttcaaaggatgcactttgatgcccaacattggttatggctcagacaagaaaacccgccattatctaccaaatggtttcaagaaatttgtcgtgcacaatgtgaaagacctggaacttctcatgatgcataacaggacatactgtgctgagattgctcacaatgtatccacaaggaagaggaaagacatagttgagagagctgctcagcttgatgttgtcttgacgaacaagacggccagactacgtagccaggaggatgagtagatccaatacatgggagagttatttatgttttgtagtgagcttctgttgacacccttgatggtagattttgattttttgttattttcccaaaactttgttgcatgccatacaattttatatgttgcttattgtctatttgctgttgctaaagttttctacccccatcttaagtttaacttctgttctagttgaaggcaattttttgaggtttattgcttttgctttacctcgttgggcatgtgatgattg

SEQ ID NO: 113291 - DNA, 850 bp, Glycine max
  unsure (1)..(850): unsure at all n locations
  Clone ID: PAT_MRT3847_73309C.1
tggacgcgtgggcgtacggctgcgagaagacgtcagaaggggacactaacactacaagttcccatcttcaccacgaagcattcttagcattctacagagagaaaagtgacactctacaatggttccaaagcttagtggtgacgtggatgatggtggaactgggcttgaaactaagcctatctgaacaataccctcctcttccttcttctattaaggttgaagttcttagataagaagaagaagagagcataagatagccttttgaagctgaaagcaaattttgtgaagtagcatatatactttcaatttgtttagttcttctgggtggagttccttcatttggtgtttgtagtcatggaggtttcttggttctataccttttgcagctttttatggatccaaccatcccaaatgtgccaatggttcaaaagaaatgatatgataacagaagctcatctcctttgttaccagattgacctgattgagtgttagacttatttgtagaggcagatctcctttggaagtgtaaccctcaatattggaaaatgaagcttcatctatttcagatatctatttatgattgaagattcagctgtactgggcaaatcttctttggcaaaagttacttaattttcctttggttggatacttggattccaagtagtaaaaatatatcaacattattttttgccttcttaaaatattaccattcagagataatttctctaggaactccaccctttcttggggggcaaatctcctttggcatcttttgcttatcttggtctgtttcctccaatagccagaatttttttctttctgtaaaccaccaaaaaaannaaaaaaanaa

SEQ ID NO: 113292 - DNA, 764 bp, Glycine max
  unsure (1)..(764): unsure at all n locations
  Clone ID: PAT_MRT3847_7330C.1
tacggctgcgagaagacgacaaaagggggaagtgcagagggaaaagcaaagggatgatgatgcagagcaaaagggcagggtggtggttgctcagaaaggcaaaggcaaagctgagtcttaacactgaccgaaacctctcttcttctcaacacctcattctcgacaaccccaatctcaatcaggttttggtcgaaggaaatggtttctccagaatggccattctcaatagaccctctgctctcaatgctctcaacaccaatatggcggctacactgcataaactttataggagctgggaagaggaccctgatattggttttgtgatgctcaagggcagcggccgagcatttgcagctggtggagatattgttgcgctttaccatttgataaacaaagggaacttggaagcctgtaaagaattttttagaacggcatatagttttatgtacctgataggtacatatttgaagccacatgttgctcttctgaatggcattaccatgggtggtggggctggaatttcaatccctgggacatttcgagttgcaacagacaaaactatttttgctacccctgaagttcttattggattccaccctgatgctgcagcatctttatacctttcacatttacctggtcaattaggagaatacttggctctgactggggaaaagctcaacggagtacagatggttgctttgtggcttgctacacactattcttcaagtgcaaggcttncttttaatcgagaacaactggggaaa

SEQ ID NO: 113293 - DNA, 1015 bp, Glycine max
  Clone ID: PAT_MRT3847_73310C.1
tctcattggttagctttctcttccttccccaccaaaatttccctttcacacttcacaaaaaagaaatactaaatgatttgtcagtagcagcaaacatgtccagcaagggaaaggagatagcagaaggatcatcaacaacaacaacagcaacaagatcctctcatggaggtgacgatcatcatcatcaccacaatcagcagcagcagcaacaacaacaacagttaccactgagtcgctatgagtctcagaagagaagggattggaacacttttggacagtacctgaggaaccaaaggcctccagtggcactttctcagtgcagctccaaccatgttcttgagttccttcgctacttggaccagtttgggaagaccaaagtgcactcacaagggtgcttgttctttgggcaaactgagccgccaggaccctgcacttgccctctcagacaagcttgggggagccttgatgcactcattggaagattgagagctgcatatgaagaaaatggaggccttcctgagaccaatccctttgcaagtggcgccataagagtctatcttagagaggtgagagattctcaatctaaggctagaggaatcccttataagaagaaaaagaagaagaggaatgttatcaagcccaacggagacacctcctcctcaaacttgcctatgcagtaataatgaaagtattcatgtgatatctctaaattgtttcaaagtcatgaatctgttgctaggccttggatattataacttcagctggagtcttggaattctagttacaatcgactatgctagacatatccctgggtcaactttaaccctttccgcgtggtctttatgtgtcaaggagtgtattaattttgttattttgaatgagagtttagaatgaagttgacgaagagtttaattaggggtaagtccctgtattatatttacttatatatatttacactatcaagcatattatatagtcatgaaaataatgtgtatgatattgcatatggtattgg

SEQ ID NO: 113294 - DNA, 326 bp, Glycine max
  Clone ID: PAT_MRT3847_73311C.1
ctagaactggttgcattgggatctcatggcgaaggaagcggtactgctacgcatgcgggttcgataccgagggcacttagatggtggtcctcgagaaacggctttgtaactttcggctgactcacatattgcgctaaagcctacctcgcaaggctcaacaggtatgctcggtaagaacctttatctatcttgcgatccatacatgcgcggtcacatgcgtgaatagcacggatcttatatccctccatgtcttccagcccatgcacttgaaggatttgcagtatctatagctgtacagtctgcatagccagattacacgcctggtg

SEQ ID NO: 113295 - DNA, 1010 bp, Glycine max
  Clone ID: PAT_MRT3847_73312C.1
tacggctgcgagaagacgacagaaggggagggaagagaagaggaagaaggcgaagaagaatccaaaagcaatcccatctgtgtgtttgcacatcggaagggagggctatcaaacatctaagagcagtggttgtgttggatgctataaaaggccttcactgagtcccactgtggatgtgccatcaaaagggttggcaacacaaagtaacgtagtgaggaaaccaagttcatcagaggatttttggaccaccagcacgcatgatatggacaacagcgctgttcagtcacaggggagcatctcttcagccagtctaacaaaccaagctgtggtttctcatgctggttcttccaaaagcagcaccaaccccactgaatttgtaaatcacggtgtaattctttggaatcagactcggcaacgatgggttggaaataaaaagcctgagaaccgaacacaacaattacgagaacctaaattgaattggaatgcaacatatgaaagtttacttgggagcaacaagccattccatcagcctatccctcttgctgaaatggtagattttcttgtggacatatgggagcaggatggcctatacgactgagatgttgaagcttgaggaagtgctgaaaataattctagttcttgcttgtaggaagaactattgggcatatactgcagtttgtatatcagttgtcacatgcctatgaatatgaggaaaatttctctcggaaacatgagataactgtattatactttatttaatcgattaccttggctgcctctactatctcaagaggcaagtttttggaaaactcttgccttcgttgacagcaactttcatttgctctgcctttccgtgaaattagaccgaaattatgttgtataaatagtcagtaactgagatatagtttctgatttggtgtcatatccatcaagctttaagttttaaaaatcacccgtgcattggtggatctttatcttgatcttaataattgtcaatgatttgtcgttcc

SEQ ID NO: 113296 - DNA, 1833 bp, Glycine max
  unsure (1)..(1833): unsure at all n locations
  Clone ID: PAT_MRT3847_73313C.1
tacggctgcgagaagacgacagaagggggaagagaagaggaagaagacgaagaagaatccaaaagcaatcccatctgtgtgtttgcacatcagaagggagggctatcaaactcaaagatctaatctaatcaggcttttgggggtgtttcagacattgcatgcatatgggtggttgtgttggatgctataaaaggcctacactgagtgctactgtggatgtgccatcgaaagggttggcaacacaaggtaacggagtgaggaaaccaagttcatcagaggatttttggaccactagcacgcatgatatggacaacagcgctgtccagtcacaggggagcatctcttcagccagtctaacaaaccaagctgtggttcttcatgctggttcttccaaaagcagcaccaaccccactgaatttgtaaatcacggtgtaattctttggaatcagactcggcaacgatgggttggaaataaaaagctcgagaaccgaacacaacaattacgagaacctaaattgaagtaacttacattgttggattaatttattagcagcttcttaattttttgtaattgcaattttgtttgtgttaggtttcttgcaaatccatttttctataagtttttgttctttttccttgtgtgagttttatatacaagttgacattgtgattgtggttatactgttgtacatttggaaggagtcagcttttccaccctgtcacagatgggggaaaaatcaatttattctatactaaagctcatagctaataattagaaatttagaatgctagttgtagccttgaaagaaanaatgtgtgatgacctggtgtgagttgaaatccatggtgcagctatgtcctcgctgctacattataatgattgccatgtcaaaactcataaggagcttagcttacatttgaattttagtctttgtcagttctggcatgctaagttctttcatgttggtatggtgcatagcaaaactattcaaattgggcaataagatttccatatgtggccgatgaatttctttctgtcagtaattatgaatttgttctccccccaccatcttgtcagaacttattgtctgtgcgttgccaaatttttttggctttgcagttggaatgcaacatatgaaagtttacttgggagcaacaagccattccatcagcctatccctcttgctgaaatggtagattttcttgtggacatatgggagcaggacgggttcttccaaaaacagctgaagcccgaggaagttttgtaaatcacggtgtaattcgctggaatcaagctcggcaacgttatattgcaaataaaaagcctgagaacctaacgcaacaattgcaagagcctaaattgagttggaatgcaacatatgaaagtttacttgggagcaacaagccattccgtcagcctatccctcttgctgaaatggtagattttcttgtggatatatgggagcaagatggcctatacgactgagatattgaagattgaggaagtgctgaaaataattctagttcttgcttgtaggaaggactattgggcatatactgcagtttgtatatcaattgtcgcatgcctatgaatatgatgaggaaaaatttgtgtcttgggaacatgagatagctgtattatccttttgttaattgattgccttggctgcctctactatctcaagaggcaagttttggaaaactcttgcctttgttgacagccttttgcttgcatgtatgagtggctgcaacttttatttgctctgcctgcttttccgtgaaattagaccgcaattatgttgtgtaaatagtcaataactgagatatagtttc

SEQ ID NO: 113297 - DNA, 486 bp, Glycine max
  Clone ID: PAT_MRT3847_73314C.1
gattaatctggtgaaggtttggtgtgatgatcaaaaaggattgctacatgatattaatgaaaatcctgtgcaagctaactacatgggggatgtaacatgagaaggtattaacatactctgctcaagacagtatatacaaggtatttgacctagaaaactatacactgctgtactctatatctgataaaaatgtccaagagattaaaataaggttatttttcttacctagcttgtattatgattactttaagaaaacacttccatccatagatgagatgttctatagtcaaatgatcatgcacaacttatatgaaattatatcacatcaactattaaatttctaagaatagattaggtttgcctacaatctataattgctttgggcgaggctggttcctatacaaactccatggctcttgttggatgataatatgatagcccggaaatcatgctgttgatttatgctaaagcaagctatcatgttcc

SEQ ID NO: 113298 - DNA, 376 bp, Glycine max
  Clone ID: PAT_MRT3847_73315C.1
gaattattgtgcctgatttatatgatcctattcgtgatcaagaatcagcccaggatctacatggtaaccctgacgtagatatcaggcgctacacgtacttatgtgtcacagaacttcactaccttagccttatagctacatgaatgtttttcgaacctagctcgcccgctagatgatcgagaatgtccacggaactggatacgcaggttgatcactggtccactgcccatgacatctttgggtgagagcttgttagccgcgatcgaagcactggaacgtcaaacttgctggatgctgaacccctggttctgactatctgattcttcaagccgttaactcaccatgtgctccagaccctgggcgctcctcaatgaaa

SEQ ID NO: 113299 - DNA, 169 bp, Glycine max
  unsure (1)..(169): unsure at all n locations
  Clone ID: PAT_MRT3847_73316C.1
ggggnnggcataacaattggatttgttgtcattactcaaaaattggcaatttttacaattaagttgaaaaaatgccttttgtttaaaatggccactaatttatgggggtctcccacaaggagatttgtggtcttaattcaagggaaaagtttttttttggaaaacattt

SEQ ID NO: 113300 - DNA, 1091 bp, Glycine max
  Clone ID: PAT_MRT3847_73317C.1
cccggctcgacccacgcgttccgaccacgcgtcgcgagcggccgcccttttttttttctttcaattttgagagggaagagaggacgacgaagaagaagaatccaaaagcaatcccatctgtgtgtttgcacatcggaagggagggctatcaaactctaaggattgctctgaatcggtttcgtcttcttcgtttttcttcaaaatcctcgtgacagatctaatctaatcagccttttgggggtgtttcagacattgcatgcatatgggagcagtggttgtgttggatgctataaaaggccttcactgagtcccacagtggatgtgccatcaaaagggttggcaacacaaagtaacgtagtgaggaaaccgagttcatcagaggatttttggaccaccagcacgcatgatatggacaacagcgctgttcagtcacaagggagcatctcttcagccagtctaacaaaccaagctgtggtttctcatgctggttcttccaaaagcagcaccaaccccactgaatttgtaaatcacggtgtaattctttggaatcagactcggcaacgttgggttggaaataaaaagcctgagaaccaaacacaacaattacaagaacctaaattgagttggaatgcaacatatgaaagtttacttgggagcaacaagccattccgtcagcctatccctcttgctgaaatggtagattttcttgtggatatatgggagcaagatggcctatacgactgagatattgaagattgaggaagtgctgaaaataattctagttcttgcttgtaggaaggactattgggcatatactgcagtttgtatatcaattgtcgcatgcctatgaatatgatgaggaaaaatttgtgtcttgggaacatgagataactgtattatccttttgttaattgattgccttggctgcctctactatctcaagaggcaagttttggaaaactcttgcctttgttgacagccttttgcttgcatgtatgagtggctgcaacttttatttgctctgcctgcttttccgtgaaattagaccgaaattatgttgtgtaaatagtcaataactgagatatagtttc

SEQ ID NO: 113301 - DNA, 592 bp, Glycine max
  Clone ID: PAT_MRT3847_73318C.1
aaaaaaaaaaaaaaaaaaaaaaaaaaaaaaaaaaagagggaaaaaaaaaaaaaaaaaaaaaaaaaaaaaaaaaaaaaaaaaaaaaaaaaaaaaaaaaaaaaaaaaaaaagggggaccggttttagaggtttccggggtttccttccgtggcgccccccgctgcttcgctttttttttggggcgcccgtggtttcctttggtgggcccccctttttcccgcgttgcggcgggggtatccccttggggttcccgggcttacccgcttggcgccccttcccccttttctccccttgggcgttgttgctaagggggccggcccgggtccccccttccccccggtgccccacttttttttggccgtggggcccccccttgtagcggcgctttccccccctgggccggggtgtttccccgctttttgcccttttctctttcccgggccctgggccccgttccttccgttttttcgcttttttttttggctttgttcccgcggttttccccgccggggctccaaaccggggttttccttttgggttttgggggggcggttttccggcccccttcccccctttaacctggatccgggggc

SEQ ID NO: 113302 - DNA, 1710 bp, Glycine max
  Clone ID: PAT_MRT3847_73319C.1
acgaggccgtcacgaggcaaatgcgtcgtcacctacccacccttctccatttttatgtttaaccaaaccaaaccaaacagctaccccaccttcttcattattattaatataatcgttaatttcaacgacaaccattttctattttctagtcacacaacacacgtccgcaaccttcctccttcctctttcctgtgttgttgtgtgctgctatggggcgagggctgggtgttgtgctggtgttgttggccgtgtactgtgggctggacccgttccagcacagcccaatagcccacttcccggacttcgaggtcaagagggtcgacatgcccgcatggtccgaggttcccaccgaccaagacaagcacaatttgttgcagaagtcagagattaagttcgcgaatcaggtgcagggaccagaaagcattgccttcgaccctcttggtcgtggcccttatactggtctcgccgatggaacaatcgtcttctggaatggtcactcctggcttcacttcgcttatacctcccccaacagatcagagatatgtaatcctattgcatctgcaacaccatttagttatgtgaagaatgagcatatctgtggaaggcctttgggactcagatttgacaagaaaacaggtgatttgtatattgcagatgcatattttgggctcctgaaggtaggacccgagggtggtttagcaacatctcttgtaactgaggctgaagggattccattgagatttacgaatgatgttgatgttgatacggaagggaatgtttattttacggaaagcagtgctctttatccaaggaggaatttccttcagctggtattttctggggatgatagtggcagggttttgaaatacaaccttgccactaaggaaaccactgttcttgtgaggaacattcaattcccaaatggcatttccttgagcaaggatggttccttctttgtcttttgtgaaggggttgttggcaggttacgtaaatactggctgaaaggagaaaaagctggaacttcagagattttagccatcctacctggatatcctgacaatgtgagagtcaatgaagatggtgatttttgggtagctcttcattctagaaggtatatgtatgcatactacaatggtatctacccaaagatgaggaaaataatactcaagcttcctataccaataaagattcattacctgcttcaaatcgggggtcgccaacacgcagcggttatcaggtatagccctgaaggtaaacttttgcagattttggaggacagtgaggggaaagttgttaaagcagtgagtgaagtggaggagaaggatggtaaactttggatgggaagtgttctcatgccttttgttgcagtatacaacttgaaatgatgccgatgattagatgattctcccccaccaaggatctatttttttcttttctatcttgaattggccagttgaagaagttgaattttgattcaacattatcaataatggaccttaacttcctggttgaaaatcctgagatgggttttcgcttccacattgccattagtggttactaaattcttcatcatagatcagcattttttgtttctggttgaaattaaacaaatgaagagtaaatatgcaatatgttacatgaaagaatactattaatttggcttggaaaaaaaaaaaaaaaaaaaaaaaaaaaaaaaaaaaaaaaaaagag

SEQ ID NO: 113303 - DNA, 357 bp, Glycine max
  Clone ID: PAT_MRT3847_7331C.1
cggaatggaagggccgacccaaccatccgtacggccgggagagacaacacaacggggtgtgctttctgttattacacaacacactctgcgaagaatgaagagtttcttattccttatacaccccaccactgatcctcaatctctgattcacggcggatcatgaactacacatggacttgtacggtgaatccttccctgagactaattacatcaagaaacaacaccacaagcttttctactagcgccactccaacaccgtcttatcctggctcacatacttcttccatgactatgctttccagagttttgacgcgataatgcccctgcactatactcgtgggagcgggactccgactg

SEQ ID NO: 113304 - DNA, 201 bp, Glycine max
  Clone ID: PAT_MRT3847_73320C.1
gggtggttttttcttgtgatggtgtattggggtgtgaggttttgtttggatccgaggatattggctacatagggtgatggagagaaagttcatggtcttaggttacatttggtgggtggcggtggatcatccactatgcctgacttagctaacattggaggtgatgctttgcatagtctgtggacaaacttacaggatccc

SEQ ID NO: 113305 - DNA, 278 bp, Glycine max
  Clone ID: PAT_MRT3847_73321C.1
attttctattctctattctttttcgcacaagctgccattcctttcgacgggcgataccataactaaccgccaagctactcccacctcacacgatgtcatccttcaaaatacactacataattctctcttcccactaccactctaacaaacttatattcttttttatctcaacctttggaacactcttattcaccaataccaacatcctacttcttcttcttgtcaacaccatatatagaatatgactattcgtaatattaataatgaacattgtgcac

SEQ ID NO: 113306 - DNA, 265 bp, Glycine max
  Clone ID: PAT_MRT3847_73322C.1
agaaaatgatagggcatagtagagaatttcttgagtccggttcctcatcggtggtctcaaacgcggttcagcagcgcctgcaattcattctgcagagccgtcccgagtggtgggtatatgccatcttctggcaagccacgaaagacagtgattcgcgtctcaaattagaatatggcgacggctactttcggggcaaagaggagaatggagaggaacaaacgaggaacgtgaacgacatctaatgggtctacagaatgttgcaaac

SEQ ID NO: 113307 - DNA, 114 bp, Glycine max
  Clone ID: PAT_MRT3847_73323C.1
cttgatgaaagcaagctaaaaaaccaggcatcaccttcatggatagtaatcatcttcaaaagcaccacatgccaggcggaggagacagtccctatgatgaccctaacttgaatc

SEQ ID NO: 113308 - DNA, 472 bp, Glycine max
  Clone ID: PAT_MRT3847_73324C.1
cgagtcatcactcctggctataagcaccgcttcagtgcatatctgccttgatgcaagctccacgatactgttatcgagcttgcatacccttaacgctgtagaaataatttgggatggcattgatactctaccaaaaagcctactatgtgtgctgccggcctgccgtcgctcaatccaagactatggactatcttgaatttactacagcatgaatatccatgagggaaacgtctcacttgcatatgaaacgatcgggtgacctgcacgggcccccctgacaagcgctctcgggcctacttgcatgctcctttatgggcacttaatgataagagcgcgaatgacacagaggccttttgcggaatgaatgagagaaaaatattgcttggctgaccctcaaaatggttagatagacgttgctctctgccaaaaaaaacaaataagaggctgctcgatgtataatacacccttttgg

SEQ ID NO: 113309 - DNA, 186 bp, Glycine max
  Clone ID: PAT_MRT3847_73325C.1
ctctgaacgcgatcttgcatggcacgccaaggacgcaactaactagctaggtatgtatttttcatgcggcggagaccattcaaaatactatgctacatctgcgccagaacaacccgctatgacaaccctaatcacacatcaagttctacatcaaaggcacgcgaatacaaaaactcaacacggaca

SEQ ID NO: 113310 - DNA, 380 bp, Glycine max
  Clone ID: PAT_MRT3847_73326C.1
gttgagactgctatgctcgcgcagctctttaagatccacagtatacatattattcaatcaacctgactacttgaggaacatgatgtacagcttcatactcatttgcatggatcgcgaatactacctatgactgaggagctagcatttcaggtacgttgaactttacataaaggttgtcggacttttaagcataacatgacccgtacactgcttgtcaaatcaaggcatgatcgaatgtcacattccgagagctgttgccagggcccatgaccacggtgtgatgaatcaggcacaggttatgatggctcgagatccattactgtggacctactgccaatcaaaccgggttttgctttccagacgcaaattccttgcaaaag

SEQ ID NO: 113311 - DNA, 316 bp, Glycine max
  Clone ID: PAT_MRT3847_73327C.1
tccacgcgtacgtcagattgcaacccaaatttaaaacgaagaagacgatgaagaatatcgtgtcggggactataacaaattcaattcccacaatcaaacatctatactatttgcatcccctgttctctttctatggaaccgacctatcctcggctcctattatcataaaacctattaaacactctaccaatctctctgtcaccaactccgacactttcagcaatagaatcattttatacaccatttaaataatcatttcacccttctaatttcagatctcactcattttcaacctcacttctcaatccaactttct

SEQ ID NO: 113312 - DNA, 405 bp, Glycine max
  Clone ID: PAT_MRT3847_73328C.1
aacaaggaaaaagggttcttttttaaacccactttaatatacaacagtattttaatacaaacaacatatcaataaccttttttggggtgcaacgacaacattgaaaataaaacctaaatccttatgcatttattctaattccttacccctaagccaaccttattgggttacatatcaaaaaccttagacctcaaaaattttttttgcccccacttactgtttggttggagaaaaatagactttttgtcctttctgaaaaataaaaggaaaaatcctaaaacaacattcacaacaaagaaaacttcccagggagttccccaaagaaacagaacaaaatcttggttgctttcaccattacagtcacaataaatattttgtaatacactccctttgacactgacttca

SEQ ID NO: 113313 - DNA, 310 bp, Glycine max
  Clone ID: PAT_MRT3847_73329C.1
gaattacaagcataagaaccatgtttttagtaatttataatttacaagtaacatatcggttgtctctctaaaaaaaaaaaaaaggaaaaaaaggaaaaaaaagaacaaaacaaaaaagaaaaaaagcagaccaaaagaaaagagaaaaaagagaaagaatgaaacttaacgaccagagcacaaaagcaaaaaaaaaaagggggggccccaaagggttaaaggctaagtcaccgtgccatggaaagtaaagcccctccaaaggggccccccaacgtacgtaacgggggcgcatttttaaaaaccgtggagg

SEQ ID NO: 113314 - DNA, 702 bp, Glycine max
  Clone ID: PAT_MRT3847_7332C.1
ccacgcgtccgggcactgctgcttattcggatctatgtacaccctttctctgttttcttctttactttgcatttccctcctcaagtgatagatgaaccaaatactgctgcatgggactttgcacgccaccgtcttactggttgataggctcaaagctggaggggggggccactattttcatcagcaagcataagcagaactatgaggacacttgtcgtcatgcagagaggtgagtgacgtaaacggctatgacatactcatatgatcgtggaacacaagacaacacgtcgagaggactatgaatcatatgaaagatgaacatactaaatcccacgcatggaaatgagtgcttctgcacatgtctattagtagctgcatatggcatacaaacatcatagtcactgtgacaagatgactcattctattgtggcacctatacttgaaagagcttatgtgcctgtcacagaggtcatggtatggtgaagaaatagatatgagggttgacatctttgacgaagaatagaacccaatgcaggtagtatcaaagatgcatgagacgctgcaacagtaagatgacacaaaagaccgcaactgggctccaggcattagaaatgccaaagttctcagcggtccctatactttcttgtcacactgcatggatcgtaggtatctgtgcaccaagatgctcatgcacctgataat

SEQ ID NO: 113315 - DNA, 427 bp, Glycine max
  Clone ID: PAT_MRT3847_73330C.1
atcattccaaaaaaaaaaaccgctgaggagaaaggaccgcgatgcaggaggatcaagattcctccaaaaaccaaagaagaaaaacagcaaaccagttgtaaaccacaaaacaaaaatccccttttttcttcaacaaaaccttttccattcaaatggaacctcaggtagtcaaaggaaaccgaaaacttggccattcagaaaaccagtcaaattcactgatactcactctattacaacaaaaaacacaaaactgcattctcttcgagaattaagaagaggggtagtgactagtgagtcttaaaaccaaaggagaataataagaacaagaaaaataccaatcttgatagaggtaactctaagaccacaggccttgaggattaacccaatactactggcagtgactcctttcccaagtccactcacaaca

SEQ ID NO: 113316 - DNA, 476 bp, Glycine max
  Clone ID: PAT_MRT3847_73331C.1
tttatgatatgatttttttttttttttttttttttttttttttttggacattttagaaattttataacttggtataaaaaatttatttcttatataaatttataaaaaagggcctttttgaaggatacctgcctttaatggcttggaaacatgcctttattataacagttactttacctagaggttaacagtaagagtaaccttgtttgaaccaaaagggggaaggggaccgtctcccttaggaagaagaaattcccaattcatttgtttaaatcagccaaccttgccagggaattaaaccccaattttagggtaaggcacccgcttttgggccaaaataaaagcccgaacaaattcctttttgggggcttcccaaaggggagggttaattccccatttttccagttaaaaaaagcccctgttcgctgggatttaaaaaaaccccctaaggaaccggagtgccatttttttcaaaa

SEQ ID NO: 113317 - DNA, 164 bp, Glycine max
  Clone ID: PAT_MRT3847_73332C.1
tgggacatctaatctagtcatatgtcgccaccatggcgcctgggcgacaacctactgcggtttcaatcactgtatgcatccctcggcttttaaatggacctaatctctctgagtccaatcgctatcaacatatacaacttgttatcaatccatcttcaatcatt

SEQ ID NO: 113318 - DNA, 340 bp, Glycine max
  Clone ID: PAT_MRT3847_73333C.1
attgcacttgactcaaataaaatataagcaaaccagggagggcaacacctcagaaaatggaagaaatgattcaaatttgggttccctgtttatctgcagattttggagacaccaagcctcttggctgagggctcgtccggtgtgaaaaaaaacatcttcaagcagaaacccccacagtctgatgcatcaagtagtggctgctgctcatggtgattgtcatgttcacgaggggcactcaccttccacttcttggtatgatctgggtttcaagtgcgtcaatttcattacatgtatcaactatcaaaaataattttattacaacccatatatctagattaaa

SEQ ID NO: 113319 - DNA, 438 bp, Glycine max
  Clone ID: PAT_MRT3847_73334C.1
ctcgtattcaacttttggattggcaatagagttgtctgagacccgagaagacagcgggaatggattcctcatttaatttggcttttcttatcaatggaagcccatgcatgcacatagatagatgaaaagtgaaaactagtctcctctatatatccttgtcgttggttacacgtttggcctatagagaaaactaattttcaaaaaatgaatggtaaacataaaactggatcacggagaaagaatgttcctttccccgcaaacactagtacaactcgttgccttttttcttctaagatgaatagttcaaagcgtgctggggaagcaaaatttacctgcagtggttgcgaacgcaagtttctattacctacaatcacaaatgcataccgttgctataaatgtgatagtgtcgccaattcaactttaggttctgagcaatca

SEQ ID NO: 113320 - DNA, 601 bp, Glycine max
  Clone ID: PAT_MRT3847_73335C.1
atccttttcattttctttttttaatattctccttcgtgttcttatcatttgctttttttttcttttaacttttaaatcatttatataaaatagttcaagaaaattgttcatttcacatgttaaagagggagcgtatattagattaattaagaataagagagatataaaacagataaaaataataataaacgttagtagagatataataaaaaaagaaaagtaaagagaatcataacacaaaagaaaaggtgtgaaaagaatgaaaaaaaaaataaagtaattaatattttttctttgctcaaaagctttcatcatttaaatattttcatagaaatttaataaaaaatattttatgaacgttaaaatgtgataaaaaaattatttatttaaaagtgtatttccaaaatacgtacttacacaaataatttacagataaaaataaatatttagaatatcacactggcacttggaaaacgataattaaatgaaacccactaaacaacaagtaagctagatctatggcacggttgagaatgaactgactcaacttagaaaaggctaagaaatccaaaggaacaacttttaattttaatgattccgc

SEQ ID NO: 113321 - DNA, 494 bp, Glycine max
  Clone ID: PAT_MRT3847_73336C.1
aaattaacaatttagttgagtctgtcaacaccatttattatcatgtcaaaggatatggaatttcaggctttaaagccgggttttacgggtccttcatcattgtaatgatacccataaacaaccctacttctaaaagctctagaaagaatgcgtgtgatttatccaaaaaaaaaaagcaaaacactgaggagagcgccttttatcccacacaatctttctgacacaccttaggaataatgcatcactggaaggtattttattattttccctgctttttccctttctttgctccaaaagaaaggcgccctggattgaacatttggatttgctggacctgcattctccgaacatgaaaggccaagggtttgcggagtgcatgcttggacatgtcttgagcacctgcagcccatgttgtttgttgagtacgcaaaagatatgcgctgcttagaagactttctgtttcttgtttgaccccacataatacttacttgccc

SEQ ID NO: 113322 - DNA, 278 bp, Glycine max
  Clone ID: PAT_MRT3847_73337C.1
acgaacgggaggtgggggatttaactcttggacaatccctttttattgcccgcctcaaccctgggaattttaagtcgacttttgagcctaacaaaaaaaccggcttgttcattttgctctttacaagaacaattagattttttttatcgtttcctctcactgggtgtggaaaaaccctcggatgtccaatcaaattttagggattggggtattccttggaccctgggcacaatcttatggtattgccctgggaagggggttgccaatcctttctttat

SEQ ID NO: 113323 - DNA, 107 bp, Glycine max
  Clone ID: PAT_MRT3847_73338C.1
atgtatcgttacatggatggttccagagtcacactagatcggtgcacagtggatctggctacctctgggaacggctggctgtcttacaccatctgtccccaggccgt

SEQ ID NO: 113324 - DNA, 366 bp, Glycine max
  Clone ID: PAT_MRT3847_73339C.1
aaaaaatggctttgcgaggctaaacctggttttttaaattaaacggattaaacttaaacgcatgtcctaaccaacgaatacataactggggcaccagcttgaggctagattccaacaaattccgcaacaacttaacgggtaagggtgcttcctaatgtcacaagaaccgccttttgggtaacttattctaggactaaaatttttcaacatggaattgctttttttaaaggggaaaaacaagtgtggttcacgaattccatcaagcaatggaggggctgaagttcaaaaattgaagcctgcccctcattaaaggttacagggggacccaaagcccttaccaccacatttttcacctttcacattagt

SEQ ID NO: 113325 - DNA, 1784 bp, Glycine max
  Clone ID: PAT_MRT3847_7333C.1
cggacgcgtgggcggacgcgtgggtctcactcaaccaaatctcagttttgagttcaactcaactaaactatgtcttccttatccctatatgccaacctctcctctctaccatcctccctcaccattcgttcttcttcatccaaagatacctctttgaaacaggattggaggacaaagtccaaacctatcccaccaggtggcacataccctgcaaaagatcattgcagtcgttgtgggttgtgtgatacttactatattgcccatgtcaagaatgcatgtgctttcttgggagatggaatgtctaagattgaaagattggaacctgttgttcatggtagaggcaggaagactgataacttggatgagacctacttaggggtatatgaggaactgctatatgctcggaaacttaaccctgtggaaggagctcaatggactgggatagtaacaaccattgcaatagaaatgcttaaatcaggcatggtggaggctgtcatttgtgtacaaagtgatcctgatgatagatttgctccaagacctgttttagcaaggacaccagaagaggtgttggctgctaaaggtgtcaagccaacattgtcacctaacctcaatactctcgcacttgttgaggctgcaggtgtcaagcgccttcttttctgtggtgtaggttgccaggtgcaagcattaagatctgtggagcaccacttgaatttggataagctctatgttttaggcacaaattgtgtggacaatggtactaggcaagggctggataagtttctgaaagctgcgagccaatcaccagaaacagttctacattatgagtttatgcaagattacaaggttcacttgaagcatttggatggtcatatagaagaggttccttatttctgtctgccagcaaacgatttggttgatgttattgccccatcttgttacagctgttttgactatacaaatgctttagctgacttagtggttggatatatgggagtgccaaaatattctggaatcggcatgacacaacatccacaatatgtaacagtaaggaatgaacgtggaagagagatgttgagtcttatagagaacttactggagattactccaacaattagtactggggataggcgaccatttgtcatggagactgttaaggctgatgatgaagctaagttaggaagaggtccttctcagcctgccccaaagtttattggaaatttgctggcttttatactaaacttgattggtccaaagggtcttgaatttgcacgctattcacttgattatcataccattcgcaactatcttcatgtgaatcgtatgtggggaaaggaaagggctgataggcacatgcctacatatgctaagaaaattgtggatttgtacaaccaaaatggtcaaattgagaagatgctttctaacaagtgattctaacatattaaaagctcccaatcagtggcataggtgacttcaaagtatgcattgagtctatttttcattttacactgaagtcattggaaattatcatgaggtcataacttagtctatatttggataactcttgattcatataaatgtatttaggatagagcactcagcaaatatgaagatttaaattcgaacttgctgattacaagtctactcaatttttgagctttgcaaaactgcctattgagttgtaacaagaaaaaattggaaataatgttatatttttgttacttttgtggcataatattagaagttaaagcaaatgattagataatataaaaaaaaaaaaagaaaaa

SEQ ID NO: 113326 - DNA, 497 bp, Glycine max
  Clone ID: PAT_MRT3847_73340C.1
atcaattaatacaagtctcattaatgttactagaggatggataaggagaaggcaatacaaggccgcccattcgcatgtatgaagaaggggtaggcttgtgttctaagttctatagggtaatctgccacacacccaattctaggtccagctcctgttgaccatttaagcgaaagttggtgtcctaactgataggacttcgaagccttcttggaattgattctttgcaatattgcagtcttaggcaccacagctctcggactctgaagaccacattttaccaatgcttgacacttcagaggttgctgtttttcaataacattgctctcctcatatatatcagagtcctcatttgccttgtgcaactcaacttcatcaagcttgacgccattttccttgagatatgataagaaactgtctagagtgtcatccgttggccggtagtgtccacttaagaatttcattctctgccaccagccttccagcagctaatgtagctc

SEQ ID NO: 113327 - DNA, 504 bp, Glycine max
  Clone ID: PAT_MRT3847_73341C.1
caaaagtgttggctttccagcattggatcgaagctattgatccacgacatcgctatggacataacttacaatactactataaagaatggtgtaaaacaaatgctggccagccgtttttttttattgcaagagagagaacaatatgaatacattgtgcgtgaggacaaaattatcaacaagcaatatggagatttgtttcatacaaatgaagattctgaagatgcaaaatggatatttgtcatgagcacctctaagaaactttatgctggcaagaaaaagaagggattatttcatcattctagttttttggctggaggagctacattagctgctggaaggctggtggcagagaatgaaattcttaagtggacactaccggccaacggatgacactctagacagtttcttatcatatctcaaggaaaatggcgtcaagcttgatgaagttgagttgcacaaggcaaatgaggactctgatatatatgaggagagcaatgttattga

SEQ ID NO: 113328 - DNA, 246 bp, Glycine max
  Clone ID: PAT_MRT3847_73342C.1
tcctctagacggccgcttttgggtttttttttttttttttttttttacaaaaaaacgggctaaactgaataataaattgtttaggggccggttttaaaaaaaaacacttattaagggctatctctttttaaaaccaataagaaatcccatgcttatgtaaccaagcaccctactgattggggggggggacacacaccacagttgaaaccttggtgaccaacccgccaatctttgagggcccgggaa

SEQ ID NO: 113329 - DNA, 1742 bp, Glycine max
  Clone ID: PAT_MRT3847_73343C.1
aaaagatcatagtttaaatctccaattgatatttctatcaaaactaacaaattaacatttaccataaaaaaaaacataaacatttacctgagttcattacatataaatcaattaacacaaagtcccatcaatgttactaggggatggataaggggaaggcaatacaaggccaccaattcgcacgtatgaagaaggggtagggggaaatttgggagaaaggttaagcatctccaaggcctgtgttctaagctctatagggtaatcagcaacacacccaattctaggtccagctcctgttgaccatttaagcgaaagttggtgtcctaattggtaagacttcgaagccttcttggaattgattctttgcaatattgcagtcttgggcaccacagctctcggactctgaagaccacctgataaagtccttgtataagtaacagattcaggtagaggatcctcctcaactgaggatgaagtattggaagctccctcagatatttcaggcacatacattttagcatcgtttgacacttcagaggttgctgctctactaagattgctctcctcatacatatcagagtcttcatttgccttgtgcaactcaacttcatcaagcttgacaccattttccttgagatatgataagaaaccgtctagagtgtcatccgttggccggtagtgtccactataagccgagatagacttaagaattccattctaagccaccagccttccagcagctaatgtagctcctccagccaaaaaactagaatgatgaaataatcccttctttttcttgccagcataaagtttcttagaggtgctcattacaaatatccacttggcatccttagaatcttcatttgtgtgaagaaaatctccagattgcttgtggataatattcccctcacagacaatgtattcatagtgctctctctcttgaggtcctagatactttatgcattgctttcggagcttcgatctggggcattgttcaagatcaatattttttccatttcccaaatccaaccaataaaagaatggctggccagaatctgttttgcaccattctttgtagtagtattgcaagttatgcccatagcgatgtctgggatcaatagcttctatccaatgctggaaagccaacttttgtgctttggcgtccttggacaaacctttacccaccttggcagcgttcaatttaacccgactccagcgtgacgcagcagtttccggcaaattaaagaacgagatggtgctgtggtttagcctcgcgaaatcaatcacttgccaccatagctcctcggcgacgacagcggaatcagccaacctccgccgtgtgcggtaactccggtagaccttttgcaccttgagggcggcgtttgtctgggggcacgcgcgtcccggcgcgtgagtgagtgtttgtattggcgggtcatgaagggagtgtgggaatgtcggattcgggtattcagagctccgaaattggggctgatgaatgtccaaggtgtgagtttgaacctccatttagtcaaagaaaaaacagaaactggaatatgcagcagaatggaattctgaggatgtggtctgaatcagagagagagagagagaaatagggcttttgtttctgaattgtgggtttgatcgttggactaaaacgacgtcttcgaatgttaagagtgatgaagaactaagaagcacgccggacgcgtgggtcgtacccgggaattccggaccggaac

SEQ ID NO: 113330 - DNA, 196 bp, Glycine max
  Clone ID: PAT_MRT3847_73344C.1
ggttgattggggcccggtggtgatcacaggggtgctgatcttgctgatatgcccggggcttctgttctagatgccatccatgggaagggtaatacagtgcgggatcaagcaaactcgtggggccggcattttggatcacgccgttatctactcgggtctgatcactatctctctgtttgccatcggcgtcacactt

SEQ ID NO: 113331 - DNA, 277 bp, Glycine max
  Clone ID: PAT_MRT3847_73345C.1
gcaccagaaaaggttctacatcattgtttttgcgtgctgaatgttcatgcataaacaatttcattgttcacaccgtcactcaaagagatccttatctaacattttttattatcgaacataatttgcccgctgacctgatctactctgataccacaacacctttttaaagtacacactatgtgccttaaaacactttcttgataaaaataacgcactattactcatgacgcctttcaagatataataactatcaggattaataacttattctgcactc

SEQ ID NO: 113332 - DNA, 411 bp, Glycine max
  Clone ID: PAT_MRT3847_73346C.1
aaaaattcgccacaaaaattaggttttggggctacaaaaggcccccgaggtggggcttgggggagaggccaaggggcccaaaagggggggttatttaaggcctttaaaacaaacaaactgggcagggggggggggtttttgtcacccggaaaagggaacggggcaacctcccaaccggcgagaaaaaaaggcccttgggggggaggggagaagaaaagtgaaaacgggaaaccccgctgaagaaaaaaggggggacccatcttgggggggggggggaaaaatttgaaaaaaagccgggaggcctaaggaaaaaaggctccattccaaggatccaaccatgggttgaaagaggcccaaaaaaccgggggccccgttggggaattctgaaaccgggggctgcaaggggggggg

SEQ ID NO: 113333 - DNA, 442 bp, Glycine max
  Clone ID: PAT_MRT3847_73347C.1
cattctttctttcactttttctatgaatatgaatatgtttttttctctttttttcacgggaataaaggaatttctttggcaagctgttcacaaaaaatcattcaaagaaatggcaggattccattaatcctaacctgatttttacaatttattattttaacaatgttttataatataagggtgttggaaagaaaatctattttgatgaaacagctccctacaatctaaaagtatgagcgctaggttaaaatgactttcaaaaatctgggagtggtcattaggtattcttcatttaaccacaaaggctgcaacaaattcagttatgaggcagccaatccaacaaccatttggttggatcaatttgtttaaaggcaccacactttgcctgaaataatcattcagacatgtaatcttccgctccactaaactgatagtaggcctg

SEQ ID NO: 113334 - DNA, 406 bp, Glycine max
  Clone ID: PAT_MRT3847_73348C.1
gtgaaagaagaagagaatgaaattgaagggtcaaacacaggctacaaagttggttaatctatacagattttgcgtttcgtcttcttcttcttcaatctctcgcttcaaccacttcactctcactaccaccgattacaataaattcaaattcgcttgcgcgaaagcgaagaacctccaactctcactctcccaacgcgccttcgtttttctttcccctcttaacgttgccgctaattacctccgtagttatcgcgtttctggcagttacatatgcagcggaagcattttaggtgtgtcaattgcatctgcaccaattatagctcatgccatggatggtgagctgcatatctgattggtattatgtactttagtttttctgtttattttcttagtaactgtcctcagt

SEQ ID NO: 113335 - DNA, 553 bp, Glycine max
  unsure (1)..(553): unsure at all n locations
  Clone ID: PAT_MRT3847_73349C.1
tcgatctgtcgctagcnaatcgtgccagagtgcctgtgcactggttgaaacaaaaaaaaaaaaacaaaaaccaaccacagaccaaacccggaaggcaagttaaaaaaaacaacacaaaaataaaagccctacccgggccatggcacagactagcggctgggcttgcagcatagtagccggtccctcaccatttggatagggatgatatagccaatcgcattgatcctattaggcttttaggcccgcgtttttaatacccgagttgtagtaagccgtacgggtttccttttcaaagtaatgttattactaataataatcgccgtagtaagcgtggtaataattgtcagcacttgtgtggcggtatagcctagcgcgcgttaatacaccaacaatgtggcctaacagcctatacgcccgctttacgctttgagtcttttagctattaatgatattgattctgggtaccggaacccagtaaaggccaatggatggtgatgatttcattattcctggctaatctctaggcccgcctaggtccccggggaccagtggt

SEQ ID NO: 113336 - DNA, 254 bp, Glycine max
  Clone ID: PAT_MRT3847_7334C.1
gttttgtcctttcgtcttgaggatgagatgtttggagaggttatgctgcctgagagcttggctcatgtatcctcggttgcagttatggtgaaggttgtcagaggtgcaaacgggaagactctcactgtgtaccatggagagatctgtaagtaatcatggaggtgtttaggtagtcaagagactgatcctacaacattgagcaagctaatcagtttgatgggtggtgtcttggggcaacataattatttactgct

SEQ ID NO: 113337 - DNA, 270 bp, Glycine max
  Clone ID: PAT_MRT3847_73350C.1
gggaatatggggcatgtcttgataacttacaatgcttctgccaaactccttgctgtctcatggttttttgagggaagaaatagttctagttctgcgcctgaagcttctctttcacaccagattgacctcggggaaattctaccagagtgggtcactgttgggttttcgggtgggaacgggaattccaaagggaaaaatgttattcattcctgggaattcagttcaaatatggatctaaaatccactcgtaatccagaggtaataaacaaa

SEQ ID NO: 113338 - DNA, 112 bp, Glycine max
  Clone ID: PAT_MRT3847_73351C.1
aaaagccagtgccccagcggaagcacagctcagagctggtctgccatggacatcctggtcccactcctgcagctgctggtgctgcttcttacactgcccctgcacctcatgg

SEQ ID NO: 113339 - DNA, 301 bp, Glycine max
  Clone ID: PAT_MRT3847_73352C.1
ttcaatcaacaccaatcattcccttgggaatttcaaaaaaaaatcagaggcttataaaataaaacctttaacacaacacaatccaaaatattataaacagatacccaaaaatgtaaccatgattatttacactccattataaatataatatcaccacacacaactaagaatacttcactaaatcttcgttccttatgaccactatatattacatactgcttaagcccacaatattaccctttcattctccttcaagcatagttgttgtactaactattctgtacgtataaaaaatggaaag

SEQ ID NO: 113340 - DNA, 425 bp, Glycine max
  Clone ID: PAT_MRT3847_73353C.1
aaggggaaaaaaaataccctcggcaaaaaacccaaagcaaaattctgccccaaaaaaaggttcaggggaagccccctcttttattcaactttttcaaaccccgagggaaatataccccaaggggggggggggccccataaaacggccccccaacaaagttagcaggcccattgggaaaaccctccccttagggggaaccccaggggggaacctttcccagggggggcttttttaacggccccaaaaagcgaggccttaaatttgggggggggaacgataacccccgaccccccctcaaaaacctttccttttaaaaagcccaaagggtcccccgaagcatccggggggaaccccccagcttaagacacaaaaatgcggccagcaaaaggaccccattttttttcacggaaccctttgggggggaa

SEQ ID NO: 113341 - DNA, 498 bp, Glycine max
  Clone ID: PAT_MRT3847_73354C.1
aactcggaatgaggggtgagcttaatttgaaaaacttcatatttctataagggtattttatttattatatttatgacaaacaactcggatgcggtctattatgctgttggggctgggcctctcaaaccttccatattactcaatgacaaaaaggccacttgatatcctgcattaatagacaaattaaccgcttattcattctctacttattattctaaaatacacctcgatggttcattttttaccatacctgctccgctaactaccatggatactgccatcactatttattaaccaacttatttaaaaaaacaaagcacaccaacatgcaggtccattgatcatgcattccaatcattatgaacaacatacttttaaagaatttaacccattgcaagaaacatcagactatccaccccatattcttgtaccaattgccaattgttcagatgaaatggaaatctctatcatcatttatattctgctaataacaaaatc

SEQ ID NO: 113342 - DNA, 196 bp, Glycine max
  Clone ID: PAT_MRT3847_73355C.1
agtatcaaaacatgctcgcattcatttcccccgtaaattaaaataaggcaaattcattaattaacaaaagaagaataccattaccacaaatcttaagagcctaataatagttttgataaaatttgcaaaacaagaattccatattaaaaaaaaaggccgcccctttataggatccaaacttaccttccccttcatt

SEQ ID NO: 113343 - DNA, 138 bp, Glycine max
  Clone ID: PAT_MRT3847_73356C.1
tttgttatttctttatagctgttcgttttttgaaaagagaaaacgcgtatcaaattatacatgagtaacaaaaatctaaaacttgactaacttgagcattttccaacgactctcctgactgagctcatcacaggatga

SEQ ID NO: 113344 - DNA, 233 bp, Glycine max
  Clone ID: PAT_MRT3847_73357C.1
ttctaaaactgaaagaaaagacaaaccaaagcagattcttggactaaaatccaatggtttaagggtcttcatcaaaaaaaaaaaaaaaaaaaaaaagggggccccccgattagtaacctcttcacccggggattaattccgggccgggtccctgcagggtaaccattttccccaaaagggagccgttttaaaccttggcgaaaccagggccaaacctgttccctggggaaaat

SEQ ID NO: 113345 - DNA, 263 bp, Glycine max
  Clone ID: PAT_MRT3847_73358C.1
cacgagacgaatctgctttacttacatcaacagatcttaatgattattcagatcatgattgtgattgacgaacttggaactagagtaccgttcagtaactctgatacctttgtcctctgtgtctttcgttcctatggcagttcctattttctcaggagtgcgaggtatgctcacgcgtgtgcgcgcgctctcacccagcaactgcctaactcatcacttcagcccactcaatcgcagatgcactcaaatcaaatcgtagtcct

SEQ ID NO: 113346 - DNA, 311 bp, Glycine max
  Clone ID: PAT_MRT3847_73359C.1
tcgagactgggtgatcttgctcctgttatgtctcgagaatttttcgtagcgtgtgaaattttttatcgccacttataccaaattgaactacctttcaattttgctgtgaggtgctttcgttatctggatcataccattctgatatcctgatcatcttaggaagctgttttttatttaattgcgtaggttgtataatttttgacatccagaagatttccattgccttgggaaaaaagaataaagctgtatcactgtgttaccctttgcctgctctaggcataacaatttttccactataaaaaaaaaaataa

SEQ ID NO: 113347 - DNA, 783 bp, Glycine max
  Clone ID: PAT_MRT3847_7335C.1
atcggtccttgccctcgcagctccggccctcgacaccaccggcccctccgctggtgacgcccccgcagaggcttcgccgtcgccgaggccttctctccgcgactcgtcgccgcaggattctactttcactgggttccgcccgcacaccgccaccattgacgccatgtcgagttattctagtgaccgagaccgcggccgggatcgagggtttggtgcacctcgatttggagggagtagaacaggacccctctctggaaagaagtttggaaatcctggggagaaactagttaaaaagaagtggaatcttgatgagctgcccaaatttgagaagaatttttatcaagaacaccctgatttggcaaggcgcaccgcacaagaggtagatacatacagaagaagcaaggaaattacagttagaggtcacaactgtccaaaacctgttctgaatttttatgaagcaaactttcctgcgaatgtcatggatgtgattgcaaggcagaactttactgaacccactgctattcaagctcagggctggccagttgctctcagtggattggatatggttggagtagctcagactggatctgggaaaacattatcttatttgctgcctgccattgtacacataaaccaccagccattcctagagagaggtgatgggcctatttgcttggtgctggcaccaactcgagaactggcacagcaggtgcagcaagtggctgctgaatattgtcgagcttgtcgcttgaagtctacttgcatctatgggtggtgctccca

SEQ ID NO: 113348 - DNA, 505 bp, Glycine max
  Clone ID: PAT_MRT3847_73360C.1
ctggtatcggaagcaatctgaactggatgagactaacttcttaatctattgctactgtctttgtgtgctgtgtcctgaaggggacacaaaatcacatctctgtgtcttgccgacagagctacgtgacatatcatccttttacactctggatgaattggctgaacactgttctgattagatgtacgactgcatgtcatatttaaaccatgtatggtacttcgtcagatctgtgcttaataccaagctaggctggtgacaactcagattagtgctctcactcttctatctggtatatgtcctactgagaagactctagcataagcgtgctttattatgatctgttgtgatgactggtccacagtgccgtgcataggggtcttattcagaaaaacacttccgcgtcgttgcagatgacggctggcataattctctctggagacgacaggctcactgagaaaacaatctatactagcagagatatggacatcagggtggtttcttatac

SEQ ID NO: 113349 - DNA, 394 bp, Glycine max
  Clone ID: PAT_MRT3847_73361C.1
gcttaagtattatgaatctgacctagaatgtcccaggggtgctaaataggtcatgaaacggcttagagcaggtcccaagattatatttgttataaccaccctctgtgatatggattaatattagttcatgcctttacttaagaacgctatacatagctgttagataaagatgccctgatattagaagaccactgcttgtaatgaatactataatgcttctccaaatgagtgacccttgtctatatctaaaagattgcttcatccatttttttgttaggattgattgtgccattagaatagatcatgttcttgctttgcttccatatggtccatgttgaggctatgcctcatcatttccatgtaatagctcttattcccgctgtaactccatata

SEQ ID NO: 113350 - DNA, 448 bp, Glycine max
  unsure (1)..(448): unsure at all n locations
  Clone ID: PAT_MRT3847_73362C.1
gtttttatatgtggaatctccagagacggtatctcctgaagaggattgacctagggccaaaaaaaggggtttgacttaaaaatagttctgtatgggcttgctgtgctgaagtcgtcttgacacacaacattaaatttattaatgactagaatacatggtctgtagttctaggaatgacttaagactcatgcactgccgcttgaatctatgtaggtggcctagcctatagttttgtctagtattatcagtttgcatattgcatactattttgttctccattttgaaagacggattattacatttgtagttggcacaagagccagggaaggagtggttgatggaataattattaccttttgtaaaaaaaaaaaannnnnnnannnnannnnnnnnaaaaaaanataataaaaaataaaataataaaaaaaataaaaaaaaaaaaaaaaaa

SEQ ID NO: 113351 - DNA, 356 bp, Glycine max
  Clone ID: PAT_MRT3847_73363C.1
atgggggggggacctttttttccctcatttattaagtttaaacaaaaccccatggaaaaaaaaaagggttatggggaaaaatttcacaggggtgaataacagggcttgggacttggcttatatattaacccctgccacaagggttttttacccccaaaaaggcaccaacaacggaaaaacatccttcaaaagaattgttacaaccttcccccgggccttcccttggaaacacgaccatccccaaaacctttggttttcccaaaaaagggtttttttttgggttttgacttaggtaacttatggatggccatcacctgaaatgggcattgccttatgggaaaaaaaccctttttggg

SEQ ID NO: 113352 - DNA, 301 bp, Glycine max
  Clone ID: PAT_MRT3847_73364C.1
actatgtggaaccgagtacaactaccttcttataccattttctcatttaaccccatctcaacatatattcatcaacctccatacttcaagctcataactaaaaatcctccttcatctcattgataaaaatatgcctattatcttattaattttgtttacactataactcttctatacttattcttccttctctaaacattaatcttcataattcttcttctaattaactttttatatctataattaaaacaaatatacttaaatcccttatttattcttatcttcaaactataatatatct

SEQ ID NO: 113353 - DNA, 268 bp, Glycine max
  Clone ID: PAT_MRT3847_73365C.1
atttgctgcttgcgatcccatcacgaagtgcaatgggaatcccggtgctcacaaaaaaccttcgcctattacctttctatttcctgaacccaacgcaacacctcagcacagggtaaataaacttaattaaaaactagcttaataccactctctgtctatttctcttcgagggaaggggataaacctcctcccttggagaaaaaaaaaagccaccagtgcaacgcccgtcgtgcatttttgaggcgccgatgaactgtttgggcgtggt

SEQ ID NO: 113354 - DNA, 2339 bp, Glycine max
  unsure (1)..(2339): unsure at all n locations
  Clone ID: PAT_MRT3847_73366C.1
ccacgcgtccgggttatcaaatgattgaacaaccgggagcaatttacttacgatatttagttgacattcataaaaagtatctaatgatttatgaattcaatacatcctgtttagcagaaagacgtatattccttgctaattatcagacaattacttattcacaaaccttgcggggggctaatagttttcatttcccatctcatggaaaacccttttcgctccgcttagccctacctccccctagtaggggtattttagtgataggttctataggaactggacgatcctatttggtcaaatacctagcgacaaactcctatgttcctttcattacagtatttctgaacaagttcctggataacaagcctaagggttttcttattgatgatagtgacgatattgatgatagttacgatagtgacgatatcgaccgtgaccttgatatggagctggagcttctaactatgatgaatacgctaactatggatatgatgccagaaatagaccgattttatatcacctttcaattcgaattagcaaaagcaatgtctccttgcataatatggattccaaacatccatgatctggatgtgaatgagtcgaattacttatccctcggtcttttagtgaactatctctccagggattgtgaaagatgttctactagaaatattcttgttattgcttcgactcatattccccaaaaagtagatccggctctaatagctccgaataaattaaatacatgcattaagatacgaaggcttcttatttcacaacaacgaaaacactttttcactctttcatatactaggggatttcacttggaaaagaaaatgtcccatactaatggattcgggtccacaacgatgggttcaaatgtacgagatcttgtagcacttaccaacgaggccctatcgattagtattatacaaaaaaaatccatcatagacactaatataattagatctgttcttcatagacaaacttgggatttccgatctcaggtaagatcggttcaggatcatgggatccttttctatcagataggaagggctgtttcacaaaatgtacttctaagtaattgctccatagatcctatatctatctatatgaagaagaaatcatgtgacgggggggattcttatttgtacaaatggtacttcgaacttggaacgagtatgaagaaattaacgatacttctttaccttttgagttgttctgccggatcggtcgctcaagacctttggtctctacccggacctgatgaaaaaaatgggatcacatcttatggactcgttgagaataattctgatctagttcatggcctattagaagtagaaggcgctctggtgggatcctcacgtacagaaaaagattgcagtcagtttgataaggatcgagtgacattgcttcttcggtccgaaccaaggaatcccttaaatatgattcaaaatggatcttattctatcgttgatcagagatttctctatgaaaaatatgaatcggagtttgaagaaggggggggagtcctcgacccacaacagatagaggaggattttttcaatcacatcgtttgggctcctagaatatggagcccttggggctttctattttattgtattgaaaggcccaatgaattgggatttccctattgggccaggtcatttcgggacaagcggatcatttatgatgaagaggatgagcttcaagagaatgattcagagttcttgcagggtggaaccatgcagtaccagacacgagatagatcttccaaagaacagggcttttttcgaataagccaattcatttgggaccccgcggatccactctttttcctattcaaagatcagccttttgtctctgtgttttcacatcgacaattctttacagatgaagagatgtcaagggaacttcttacttcccaaacagatcttcctacatctatatataaacactggtttatcaagaatacgcaagaaaagcattttgaattgttgattcattgccagagatggcttagaatcaatagttcattatctaatggatttttccgttctaatactctatctgagagttatcaatatttatcaaatctgttcctatctaacgaagcgctattggatcaaatgacaaagacattgttgagaaaaagatggcttttcccagatgagatggttgttgctatctgctccaataacgaatcattggtttaactgaataactaaaaaaaaaaaaaaaaaaaaaaagccgccctagtggaggatccaacccggcgtacgtgccggcccggtccctgagggggtaccagttttcccaaaagtgagtcgtatnagagc

SEQ ID NO: 113355 - DNA, 261 bp, Glycine max
  Clone ID: PAT_MRT3847_73367C.1
cccacccgtccgcccacgcaaacataccgctgctatatactacagaacgggatccacatcctccacaccacatctccactcttagctgccattggcttttcttcttccatttctcttcctttctaaccttgtttctattacccattctcgtattctgtcctaatcactcttgctccttccaaactttcctccttttccgagttttctcccaaacccacttttggggattctcttaaaataccaacttgctccgtttccctc

SEQ ID NO: 113356 - DNA, 254 bp, Glycine max
  Clone ID: PAT_MRT3847_73368C.1
gggagggcgggccctggcgcagtgaaaaagttgtgccttggtgactgatcagtcatggattcatctagaaatagtctctttgcatatgcaagaataaggtttcatataatgatcctccctgtacctttacatagtgaggaggcttttggcattggggtatgttagttactgaatggaagagaatagtgtctagaatcctctgtaaaaaaattcacagggtagaattttgtttttgttcctccagtggagtagtg

SEQ ID NO: 113357 - DNA, 537 bp, Glycine max
  Clone ID: PAT_MRT3847_73369C.1
aaaaaaccccccaacattttaagggaaattatcattgtataatttataaaacatgctattccttaaactcccgattttaaaacacaaattttcgccccagcaacaaaatttttattaatttgcaaagccggggagcaaaaagttaaaaagtaactattgcaggcaaaagatcaaatttttttaaatgacaaactttgcctgaaacaaaattttcccgatcgcaaattttgtttccacaactgttcaacgatgggcctttgcaactttttaaatttaatccttttttttgaaaacaaaactgggggaggacccttttgctgcattaaaaagttcatcagccaagctttttgcaattgttttaatttttttaaaagcagtttcccgggctccaattgtaaaaaaaaagatagcctggttaacccccctaaggggggagaaattcaacagttgtttcctaacaactccggttgaaccaatttttgttgcattttccgggggaccactgttgacaacagtttaaaaaaaaacctaaatggg

SEQ ID NO: 113358 - DNA, 185 bp, Glycine max
  Clone ID: PAT_MRT3847_7336C.1
cgtgctcaaaggcgtaaaacagttacttggaaattttttcataaaagggtgcattcccccctttttttggatataattgaaaaacctttatttcttttctttcgatatgtttcaaatcaatgaaagatattttttatgttctaaattttgatgcgaataaaggaagaatttgcattttttagtta

SEQ ID NO: 113359 - DNA, 283 bp, Glycine max
  unsure (1)..(283): unsure at all n locations
  Clone ID: PAT_MRT3847_73370C.1
tacggctgcgacgacagaaggggattgtaaaaaatttcatttatgacaagagagaagggagcaaaatctggaaaagcttttgaagaggaaaaaaaggctgagaataataaataaaaagtaaagaaaagaaggaaggaaatggtgtgtgtatatgtgttggngcntnngnatgnnancaaatnagngaagaaantgagnaatattantggnagntnaaatttntnatttataanaaggnagnntnaggaggaaaatnanatnaaggagtantnatggaggaggg

SEQ ID NO: 113360 - DNA, 167 bp, Glycine max
  unsure (1)..(167): unsure at all n locations
  Clone ID: PAT_MRT3847_73371C.1
ggaannacaacntantcnntcgcnancacaagtnganagtcctgtntctgtntcattctcggnntcttgctccncggacgncgntgacgaggnaatcgtgcaagacgtagtgtcgggctcgatcccgtcctantcactcgagtcgcggctcngtgatgtccgtcggg

SEQ ID NO: 113361 - DNA, 543 bp, Glycine max
  Clone ID: PAT_MRT3847_73372C.1
tgggaaaaccgttgcagcaatgagcttccaactcttaaccaaggcgagaaagcgaactgtgttttcatatctactctcacgcgcattctctcaccgatcggaacgagcttgcaggcctacatttggcatcgctttcgacatcgacggtgtccttttgctcggaaactcccccgtcggtggctctcccggagcactgaaaagattatacgacgccgatggtaaattgaaaatcccttacgttttcctcactaatggtggtggctatcctgaagctaaaagagcttttgaactaagtaaactgttgggtataaatgtcacaccttcgcaggttttacagggccattctccatttaaacaattggtcaagagatttgagaacgatctcattgttgctgtgggaaaaggggaacctgcagctgtgatgacagaatatggttttagatatgttctttcaattgatgaatatgcctcatgctttgaaaacattgatccactggctccatacaagaaatggacaaccaagctggctgttacacagaatgc

SEQ ID NO: 113362 - DNA, 273 bp, Glycine max
  unsure (1)..(273): unsure at all n locations
  Clone ID: PAT_MRT3847_73373C.1
aaaattcaggcctacactccctcatcacttgcttagtttgttcttcctnctactagcanagcaaaaacaaataaaaaaaatagagaaatgcaggggggtgtgaaggagaagttgttgatcanagagncacaaacatcagancaagaagaagnggcattatcattggtgaanngggtgtggatgagagcnaggtgatgngggtagtggcagcacaggcatttttccaggttctcccactttggnctcatgttataagccaagcatttattggtc

SEQ ID NO: 113363 - DNA, 229 bp, Glycine max
  Clone ID: PAT_MRT3847_73374C.1
acaaaaataaatacaagttgtcatttatattaaacaatcactatggcatcaaaaatgcttccggaataattaaccaaaagcctccagggaaaacccgatctgccagatgcccactgcataaaaacacacatcatatcactatgtgttgacatacatgcatggcaaggagtggatatttcacagcaattggtccctttatccctccttaacacttatgccgaaaatggca

SEQ ID NO: 113364 - DNA, 240 bp, Glycine max
  Clone ID: PAT_MRT3847_73375C.1
atgacgactcctcctattctgacgaccatgccagggccctacactggcccggcgatgactaataattggagagtcaccactgcgaagagcccgccctgcaccagcttctcacctgcccggacccgcaccctccccattccacccgcagggcataacacaaagatctttttgacatacacccccgacccaccaccatcacccgaggcttgcggagcccccacgtcttacttcccggacatg

SEQ ID NO: 113365 - DNA, 137 bp, Glycine max
  Clone ID: PAT_MRT3847_73376C.1
aggtaatggtatttttggcatgatattcccgggttgtcctagcagttatcaagagccgcaagaatggcaacaactatgactaatccaaatgccccaataccgtcaccaaaatgtacatctcttcagagaaggttatt

SEQ ID NO: 113366 - DNA, 573 bp, Glycine max
  Clone ID: PAT_MRT3847_73377C.1
taagaaaatgaaggaaatgggagtaagaaaagaacctggttgtagttggattgagcatggtcccacgcgtccgaagtttttgtcaggggatgcttcacacccacaaagtaaagaactccatgaatatcttgaaactctgtcccaaacaatgagaaaggagggctacgtgcctgatatttcatgtgtccttcacaatgttgatgatgaagagaaagaaactatgctctgtgggcacagtgagagactggcaatagcctttggtcttttaaatacccctccaggaactaccatcagagttgccaaaaaccttcgggtttgcaatgactgccatgttgccactaaaatcatatctaagattatggacagggaaatcattcttagagatgttagaaggttccatcatttcgcaaatggaacttgctcttgtggggattattggtaaaagaaagtgaatagtaaaatattttttttcttctaatttattcatctcaacttttcccttctttcatgagcaagaagttcagttgagatcatgtattattgcaaatgcatagttacataatttggataact

SEQ ID NO: 113367 - DNA, 398 bp, Glycine max
  Clone ID: PAT_MRT3847_73378C.1
ctggactccaaccaggaatcacttccactggactgctgccaaccactgggttgacttccacctaccaaacatccaccctcggaatgaacgatctcaatcgaaacggaatcccagacaatctcgaaagacaaggacttgcaggacagggcttcaccactggaacaactctgccatccagccaattccaaggattctccatcttaagcgatctgaatggaaatggaatccctgacaatcttgagagacgatctaatctcactggaggtctcaacgacctcaaccgaaacggaatccctgataatctcgagagacaattcggacagactggatttgtaggacagcagccgctcactggattgacttcattgaacgacagaaatggcaacggaatccctgac

SEQ ID NO: 113368 - DNA, 153 bp, Glycine max
  unsure (1)..(153): unsure at all n locations
  Clone ID: PAT_MRT3847_73379C.1
ttgncgctttgagaaaaggcgttttttatttnnnnntacaaaaaactacttttctttgtaattatgggttctacaacctagaatagggctagtaattcacctttttatatgtaataatcctgaccccactctaggggcaaatttacaaaattt

SEQ ID NO: 113369 - DNA, 280 bp, Glycine max
  Clone ID: PAT_MRT3847_7337C.1
ttcgatgctcctctgattccgtccaccaccaccaccactaccaccagctcccctcttcctttcacctgtcgtttgtttacactccctttacgtcaccgttttgattgctaaacgcaaccctccacaccataaaccaactaacaacaacaccctctaatatatatatatatatatataatactttccactgttaagaccaattcagttacaaagtcttccttcacacgcatcctccttcccatgttttttcgtgttctctgttctctgttctcttccacac

SEQ ID NO: 113370 - DNA, 439 bp, Glycine max
  Clone ID: PAT_MRT3847_73380C.1
ggaaaaaatcaaatctaatttttcttcatatcaaaacccccccatgattttctctcatcaatcatggggttcccctaccctttttgacttacaattacaaccccccgtccccgttttttttttttttcacctggttaaatcctcccttttaaaacccctcccccctccccatattttttctttttctccttggaaaaggaaatttcctttcctcccaaataaatttgttagtttgagccatttttgcccttaaactttaccatccaaaaccctcccttatttgctgaaggccccctttttttttttttttttgggccaggttaaaaaggtttttttccattttggggttttccccttttccaaaataaaccactttttttgaactttttattacccacttgcctttatttccccgtgcaaatccattacttgccttttt

SEQ ID NO: 113371 - DNA, 220 bp, Glycine max
  unsure (1)..(220): unsure at all n locations
  Clone ID: PAT_MRT3847_73381C.1
cagattgccagttcagttttgagtaaacaatgagcacctagaaactagaacantgcacacctcacacattatgagacacgactataaccataagatgaccttcagaataaaaaagnttaggtgttaacaacattcaccacttgctaagatcttctcttctgtgcatggctctagataccatagccctcaatttttctctagctaataatagacgagggta

SEQ ID NO: 113372 - DNA, 245 bp, Glycine max
  Clone ID: PAT_MRT3847_73382C.1
ccccctgtcatgaacgagactttagtactagacttattcacaaacttgagaaacataatccgaaggggcaaatacacctcagaaaactcatgccggatgcatatccatgtataattaaacttgccatatcaacctccatcgagtccaatatcttgcttccactagagccgtcattaggaagagaaagacagctaaatgttgggggttacacctacatgagccaagagccttagctgcacctgata

SEQ ID NO: 113373 - DNA, 140 bp, Glycine max
  Clone ID: PAT_MRT3847_73383C.1
cgacccacgcgtccgagctattgcatctgcactttagagaagggccaggccaggagggtgcttaaaacgaaccagagcgagaatgaagacttacctactctcagttaggtcgtgatgctgttgcttcttacttgggctgc

SEQ ID NO: 113374 - DNA, 605 bp, Glycine max
  Clone ID: PAT_MRT3847_73384C.1
gaattcgagctctgtacccggggatcctctagagtcgacctgcagactctgttattacaagcacagtaatcacaaccagcttgaaaaggacctgattatcagatcaaaaattaataatttcaaaagcatcaaaattgtgataaatccgagataactaggcgaacttactggtataaacatttcagcacatgcctcaaaatcacccaagagttcctttgacaaaaagcacaatagatggcaatgcctagaagaaagcaaacaacaagccagaaacagttgggtataagaacctaacctatggacaggtccttcagtaattataatgagagaaaactaacaagcatactaagagaaggaattcatcaaaacaaatgaatgtttcattctaacatacgcaaaggcaaagaaggattgcttcaagagaaaaaaatcaccattctcctaagttcccaaaacagcaaagaaggaacaggaaattataactttcacctagacacgttttacaaattaataaaagggaatatagaacaataataatattagagcacctgcttcacaatggtagatcttcggtctgacaattgtgtgcttaaaggtccaacaag

SEQ ID NO: 113375 - DNA, 440 bp, Glycine max
  unsure (1)..(440): unsure at all n locations
  Clone ID: PAT_MRT3847_73385C.1
cggacgcgtgggcggacgcgtgggcaaaatttggacatggtgccctgtattctggtgacttttgagaatgaacaaattgtggtttggaggggaaaggattatgagccccggaaggatggatactttcttaaagatcgagaatcagttgacgacattggtggcttgtgtgtgggaaaagagcaacaggctatgtaacaccacaatcaggtgtgataattaaatgaaatctttgtgcaaattgccgccatgaataagaagttcccttgagattggattgttgtgttatttgtacattggaggtgttaatttattgtttttgtcacaaattcacagcacagctaattaggaatcaattcatggttttgctgacagccaagcttggaagagactnntgtaattcatgatgtcagagaataatggaggaaactcagttcaatagt

SEQ ID NO: 113376 - DNA, 219 bp, Glycine max
  Clone ID: PAT_MRT3847_73386C.1
cgtccgcccatgcgtccgcacacacacagctagcagatattacagacacgtgaatcactaattaagccaatggacacgagcctatgtaatggaatttcaagatccaattggtttgtaaatattgtggtttaagtgaattaagttatgaggagtacgtcgcagtggcgaaggtggcttttaaaaatataattttagaaagtgtagaatctgaaatggttt

SEQ ID NO: 113377 - DNA, 427 bp, Glycine max
  Clone ID: PAT_MRT3847_73387C.1
agcccctcaaaaaaggtggtccctttgggggaacatgaacaactgacaatagctttggtccaaaaaaaaggttttccaatggccctttataaacaattggacccggaatttatgcctcaatattttatgaaggtcaaaccaaaaatgggggggaagggggccttcagaattatgcccaaaattgaccttgaaaaaaattggttcccaaaaccaaaagggaccttttttctccggggggtttttattttttcaggggtgggggggccagacattcccttaaactttggttttagggcccggaactggccaaaaaaactataaagaacttttttaagcttttttttaaaaaaaaaaatatcttggggaagggcaaatttatggtggaaaattcgggccggaagggcaaaaaagttgactgaaaaccttt

SEQ ID NO: 113378 - DNA, 196 bp, Glycine max
  Clone ID: PAT_MRT3847_73388C.1
cccttttcgtcttttcacgcgtacgtgccattgggatagacatgtcgccacataccctaatacagtactaaactcttagattcattttttcttttaaacctggactgaagaaacagaaccataaaatattcccggcctttctaattgtgcaaataaaaaatttttaacccttggaataattagtatataaatttta

SEQ ID NO: 113379 - DNA, 1928 bp, Glycine max
  Clone ID: PAT_MRT3847_73389C.1
atcttagtaagtttgaattaatgtgatgaagactttctcctcaattcagccaccccaccattttcggggcacaagatttttctcaaacgcgtaccgcaagggctcaacttccctttcctgcaaaggtcttcttttgccaggcaaaatctgaccttcatggtccggtgttttttactcaggcacagacggatcattgaatttaaaagtggtgtctcccactctgttagtagcagaaaaggaagaagccaaggctgtgttgaccttgtttttgaagaaacaaggtttgagcaatgccattgacactagaaccagcaagaagtcagatcattttattgataaccttagtacaaggcttcatcctaaacacaaatcttggtatcgcgctgggagagagtttcaggttagaggatgctcagatacactaatcccttatcttgaatctcttttcgcgcaatagctgcgaatctttgtgaattgaaaagatacggttatactggaacatggtcaatctatagctagctcctgaaaccaaaatacatttcatgcccatgaaattaagaagcttaaagctgtgtctcgagtgattgagacagaccctcataatttcaatcttcgccctcatattgaatatctcatggaccttgggctggatattgagcagattacggagtatcacacgacgatttccatcttttgcctactatagcttggagggtaaaatgtagccagtggtagagttttttcttgaacttggagtgccaaaagagaacattcttactatcctcactaaaagacctcaattatgtggaatcagtctatctgaaaatcttaaacccaccatgaagttctttgaatctttggggtgttgacaaaaaccaatggccaaaggtgatctatcgcttcccagcactgctaacttatagcaggccgaaagtgatggaaagcatagattttctccttgaattaggcctctcagaagagagtataggtaagattttaactcgctgccccaacattgttagttacagtgtagaggacaatctccgacccacggctaagtacttccattctttgggggttgaagttggcgttcttctcttcagatgccctcaaaattttggtcttagcattgagaacaacctaaagcctgcaacagaatttttcttggagcggggatacactttggaagaaattgggaccatgatttcaagatatggagccttgtatactttcagcttgactgaaaatttgattccaaaatgggatttcttcttgaccacaggttacccaaaatctgagttggttaagttccctcaatattttggatacaatttagaggaaagggttaaacctagattcacaattatgaaaaaatatggagtgaagttactgctgaatcaggttctttcactgtcaagcagcaactttgatgaagccttgaaaaagaaaatgaagaaaatgcaagttagttaggattctagtcatagcagcaaagttgctcaatcagatattggaaaatgagactttcaggcaatgtttcaggttagaaaagatgctcaacttcatgatttttgcttttcgggatattgatggcgcaatggctgcgaatttatgtgaagtgaaaagttgcggttatactggaacatggtcaatctatagctagctcctgaaaccaaaatacatttcatgcccatgaaattaagctgtattggagtgatttagagcatgttagctcctgaattcacaatttgtaaccaagtctctttacatgaatgacactgacctggttagctctacttgccaaatgctgctgttgtatgtgattgattgattctatctccttatactaactggagtgccatcggtgtatttttgagtaaaataggtgactgatgtcagtatttaatattaatacatatttgttttat

SEQ ID NO: 113380 - DNA, 555 bp, Glycine max
  Clone ID: PAT_MRT3847_7338C.1
caggtgaaagacaaactcttcagtcagaggaaaccagttgtgaagataaccggtgatagcatgtgttttctgtgccataagaaaatagggacaagtgtttttgcagtctatccaaatggtagcacactcgtgcactttgtctgtttcagagattctcaaaatatgaaagcagtgggcaaagggtctcaattgaggaagcgactatgaagctgagaggccataccaattggtggtctagttgtcatgttttgagcgtgtttttacccccggtacctgttggtaggtggatcatgatgaaagtggctctgtattttatcttcagaggtctctttttttttttttttctttgcctagtcaattcgtttgaaaagtgagatttggtatgtgaagagcgcgatgtgtctatctttttttttttttttttttgtgatgtaaatattgggttagaggatcggacatttatttattttgaccattgaaagggggcagatttcctccctcctttttcatgtgttgtataaccgcaccgaaatatagaagttaaatttcaatatt

SEQ ID NO: 113381 - DNA, 269 bp, Glycine max
  Clone ID: PAT_MRT3847_73390C.1
tagaggcaggaaagttctggaagtctagaaaggaaggttatggttctgagattttttttttcatgaaaaagtttaattaatttcctcttggatatataatgatgaacccaattagtgagattttatgtagaggttaaaaaaaattaaataatatgtgttttttccccctgttagtatttagccttgcaggacctgatgttgctttctcaatattctccttcacgaagacaagaagttttcagcctcagccaaccaggtattgctaaaag

SEQ ID NO: 113382 - DNA, 391 bp, Glycine max
  Clone ID: PAT_MRT3847_73391C.1
acgtcagtgctaatagaaagaaatagattaagctcttatggaactcatactgaatcacgtgatgactcatagcgagtgagggtgttcctacctgatatctgatggtatcttccttttacgcctcacctatgatcgcaagtcttttctgaagaaccatccccattattttatttcgaatcctgatactctgcccgatttaacctttaactttaatttttgtcattacactattccctttaagactgtcacttattcgtatgttttctacttccctcttactctacactttatttaatactacccattcatatcttcaaattataaattcccacatcgtttctttccaccctaatttttatccttcttttactttttgctatcctatacttaa

SEQ ID NO: 113383 - DNA, 1089 bp, Glycine max
  Clone ID: PAT_MRT3847_73392C.1
ccacgcgtccgaaatcaccgtagtatttgtttccttcctgcgatcccttgcaaccctagtcttcgatcgaattgccccagatcacaaaccacattaaaaaaagactcccacgttctcttctctctccgtctctctctctctcttcatttctcattgactctctctttctctctctctctgcacagtgccaatggcggatccaatcgcgaaggctctgatcgcgtttgcgctcttagcttcccttttgctgtgcttgcaagcttcctccgatgtccccttcatcgtcgctcacaaaaaggcctccctcaacagactcaagtccggcgccgaaagggtctccgtcaccatcgacatctacaaccaaggaacctcgacggcctatgatgtaagcttatcagacgatagctggccaagtgatgcttttgatgtaatcagtggtagcacatcaaagtcatgggaaaggcttgatgctggtggcatcatttctcacacatttgagctggaggcaaaatcaaagggagtatttgctggtgaaccagctgtcataaagttccgtgttcccacaaagtctgctttgcaggaggcatattcaactcccatattgcctttggatgttctttctgatagacctcccgagaagaagtttgaatgggctaagaggttgctggctaagtatggatctctaatctcggtgatctccatcatggtcctgttcatatacttggtagcttcaccatcaaaatccagcgcaaagggaagcaagaagaagcgttaatcattggcaaattagagcatttgcaatcagacactttggaggctagatcatgatattctgatggtggtcagtttttacatagttggacttttttgaatgaatggttaaatgagttagtgagagaacaaattaatttcttgacggcatagcctaaacagttgtttctggttctcactggacggaatgtatcttttagctagcaaaagtatatttcttaattacctgatctctctgccattttggattgaataccatattttctggtgaactcttaagtttgatttcctttgtaaattatttgccgcctcatcaaa

SEQ ID NO: 113384 - DNA, 325 bp, Glycine max
  Clone ID: PAT_MRT3847_73393C.1
acgaccaggacctattgggtttcgaatccacaaaatccctttgtgttaaataggtggatgggaaaactgactttcccccagggcacttgccgaagacgaaaaagaatgcctctttctatagggggaggagctggagcaaagaatgctattctcatgaatatgccaaatgctgatctctcaatgtggagatattttgctggagagctcacctttgaagcatttaatatgacttttccctacattaaatgaacagtctctatctttatagcatttggaaatttggctgatgacactcatcaattctgatgcctttccccacaagctg

SEQ ID NO: 113385 - DNA, 274 bp, Glycine max
  Clone ID: PAT_MRT3847_73394C.1
aaaaaaaaaaaagacaactcactgtattcgttataaaaaggaaaaaaaaaaaaaaagggaaaggaaaaaaaagaaaaaggaaaaggaaaaaaaaaaaaaaaaaaaaaaaaagaaaaaaaaaaggacaacaaaaataaaggatgaagctaagataaagacaagtacgaagatatagccaatatataggataaagaaagtaaattgaaaaagctcaccaaataaaaggacaaggctggaaaaacataggtgaaaccaaaaagaagttatttgaagt

SEQ ID NO: 113386 - DNA, 510 bp, Glycine max
  Clone ID: PAT_MRT3847_73395C.1
tctacattccgttccaggaaggtttcccgtcatcactgtatgacgtcctccttctttggggggggggggggggggaaagtaaaacaagataggctaaaacctactagaatgtggaaatgtggataagtagggaagagaagatagatgaacgcccataagaaccggggcatagcgatttgaattgcgggagcaatatagataataaattagcgaaatctgggctagtgcgtgagtattgttgagcacaggggctaattatggggcacagttggtaaccaaagttaaaccggacggggtgaaagtagtactatgcggatggaagcaggggcgtatggagcgcatgaggcgcgttggttcataaatcgttgagaagtggccaggatgggcacccagagacaaagttctaaagtggtatcaagtgcaagagtgcccagaagttaactgcgtgccagttgcgaaatagttgtaacgttaacggacaacgtggcgacttgtgtgggaacaacatgg

SEQ ID NO: 113387 - DNA, 120 bp, Glycine max
  Clone ID: PAT_MRT3847_73396C.1
caggtttaaggggaaggcgttgaggaacggggaggttcagaaccattggatggtgaatgttgcttgtcaggttcaggggttcatgggtccgatcaaagattacagaatacggtgtaccac

SEQ ID NO: 113388 - DNA, 529 bp, Glycine max
  unsure (1)..(529): unsure at all n locations
  Clone ID: PAT_MRT3847_73397C.1
gcagatcttcgtcaagaccctcaccgaaaagaccatcacccttgaagtggaaagctctgacaccatcaacaacatcaaggccaagatccgaaacaaggaaagaattcccccgaatcagcaacatctcatcttcgccaaaaagcanctcaaagacagccataccctcgccaactacaacatccagaaagantcaacccttcaccttatccttcatctccataataacatacagatcttcgtcaaaactctcactagcgaaaccataaccctagaagtcgaaagctctaacaccattaacaacatcagaaccaaaatccaagacaaagaaagaatccccccagaccagcaacatctcatcttcgccagaaaacaacttgaaaacgagcgcacccgtcgcgactacaacatccagaaataatcaacccttcacctcggcctccatctccataataacatacagatcttgcttaagaccctcaccaacgatactataaccctaaaaatcgagagctgccacgccatgcgcaac

SEQ ID NO: 113389 - DNA, 908 bp, Glycine max
  unsure (1)..(908): unsure at all n locations
  Clone ID: PAT_MRT3847_73398C.1
ccacgcgtccggaaaaagagaacagtggcaagaagtcagacaatgttgacagcttgggcatttctctggctggaattttagattcatccactgagtcaactggggataccctttccgaaattccttcattgaaatacagagagaataatggcaagaagtcagacaatgttgacagcttggacgcttctctgactgatttgtttaattcatccactgagtcaactaggggtacactttccaaaattccgtcatcaaattatagagagaagcaacggtctcataagaactattcctttgttgctgatccagtcttacctaacaaggagaagctggttgatgacctcaagaaagcagatgagtcaaagatgcaaaactgaggagttcctggtgcaagcaggacctgggtcctagaattccaaaataaaaaatttgggattctcataactcaatattacagacagaacgtgatggtgatacagttctttatatcaaataattgcagttttagctagccttggccatggcattttgaggaagattccgatgattgctagttgcaactctggaaattctttccattttaacatttactgtacggttattctttactgttggaacagttgagttttgttttatttcaatttgaataggaaataggaaataggaaattcttgactgctggagcagttaagttttggtcttttacgtgctgtcttggcaggtgatcatattatagcgatgattgataacactctttcaaaggagcaagaaccattagacatggaatccagtaaattcctttaagggctctatcccttttcttttccttccactttctgtttttggtcattcctttcggcactactgcttctannnnactaggtaatgatgacccnnnaannnnnnnt

SEQ ID NO: 113390 - DNA, 135 bp, Glycine max
  Clone ID: PAT_MRT3847_73399C.1
acgtaacctaacagattctctccttttacacaggatttttagagcacttaatgcatgggaggcaccatgggaatgtctgtcaccagtggcttcacatacaatacacttgtaaagaaaccctgtgctattaatact

SEQ ID NO: 113391 - DNA, 162 bp, Glycine max
  Clone ID: PAT_MRT3847_7339C.1
ggctcgagcttaaattcattcttctccgaccaagtgtataactgtatatcctaatttggggccaggaacagcaacacttctcattacagtgatcagctccactgacaaaaacgacgaagacttcatataccacggactgctctggatatctcctcttacaga

SEQ ID NO: 113392 - DNA, 216 bp, Glycine max
  Clone ID: PAT_MRT3847_733C.1
gacgtacctggtgacccacaaggccacgaaggatcagttcgcgtgcaagtcaatcccgacacggagactggtcgaccgctactacatggactacaggcgcctctaggtccaaatcatgcaccacctcacctggcaccgcaacatcctcgagctcaaaggcgcctaccaagaccgacacttcctcaaccttatgatggagctcttggccggcgggga

SEQ ID NO: 113393 - DNA, 133 bp, Glycine max
  Clone ID: PAT_MRT3847_73400C.1
ttctatatgtgagcatccgtaagatatcacattgcgactgtgacgcgtgcgtttctacagacgatcagtggactagtggagaatacaccatggtcgcttaccacaactatagatcgcgcttgcagtaacagtg

SEQ ID NO: 113394 - DNA, 142 bp, Glycine max
  Clone ID: PAT_MRT3847_73401C.1
acaagactacattgtaaggatagtgaaaccaatatacaaagcaaaggggattgtaaagattgaatcatacttttcctcggttaatccaacaatagcaggacataagaagaaccttgactcatttgcatgccaagcaatgttt

SEQ ID NO: 113395 - DNA, 732 bp, Glycine max
  unsure (1)..(732): unsure at all n locations
  Clone ID: PAT_MRT3847_73402C.1
gaaaaattgacatttcagagttcagacttttcctattttctccgaagacttgtgttctgctgttcacttcttccttccttccttccttttcctcatcatcttgttacacttcttctttctttcctttttagtactgttgtttaggctcacatgctcagcacagagccacgtgttgtaacctttgcatgttgcttactttgcatgtcgtggtgctgactgcataacttcatctcagtggcagagcattccttgaaagaggccattcatccaaaaattgttggggggacctttgtctttcttgggattgtttgttctgcactagctaccaagagttgttccttcacacctagtctagacatggaccctacagccattgacttgaatatgttttctttccatcatctcaatggtcctgcaaattagtaatttcctcatgagaatgggacgtggtctctttgagtgctgcttcactagctcttcttctgacacgttttcaaagcagagtaagtggcgaatcttgccctacaagaaacttgcaaaagtcacaaataattttaaccaatctcattgtcttggaaagagaggatttgccactgaatattatggaaaacttgaggatgggcgtgagataacgatccagtgctttaatgaagacaagcaccacatgttgcaacagtttatcaatgaaactgctatcctaaactacttgcctcacanaaatattgtgtcaat

SEQ ID NO: 113396 - DNA, 451 bp, Glycine max
  unsure (1)..(451): unsure at all n locations
  Clone ID: PAT_MRT3847_73403C.1
caccgttctctttctctctccaaaaattatacggtgggtttgaacttcgaactatgaagggcgaaatcatgcacagtaccatgcagttacagggtttttgaaaatctcaatggacactaccgctgcacgtgattgagtagaattagcctcctgctccaacttgcattgctgtttcaaatcttcaattttccttttttattttttactttcatgtaatgggtagtgttgaaatccccaattggctgaaagggttgcccctggctccggaatttcgccctacagacactgaatttgccgacccaattgcttatatttcgaagattgagaaggaagctgccaactttgggatttgtaagattatcccaccgtttcccaaaccttcaaaaaaatacgtnttttccaatttgaataggtcactcttgaagtgccctgattttggtccagataatag

SEQ ID NO: 113397 - DNA, 437 bp, Glycine max
  Clone ID: PAT_MRT3847_73404C.1
ccttttcttctcttcggctttccgtctctgctcaccacccactggcaacaacatcaccgctctccattcccgttcgccgagtgagagtagtttgggcgaattcatgtgcgccctcgagaaagttctagagaataatcgcattgactttagatttcggtagttggttatggattcgagcgacagtggtcgcggttactccaagcgcgagagggacgacgaggattgggagtttagtgataagcggaaggataggtctaggaagttcggtgccaatggcggtgacgacggcgagggttccgacggaggcgcgagaaggaagcgttctatcagaaccaccacggatggcaacgattacgattccgcgctccaagcaaggggccaagaagaggcaggaggagagcaccctggagaagtgagcagttggtatgaggatgggg

SEQ ID NO: 113398 - DNA, 476 bp, Glycine max
  Clone ID: PAT_MRT3847_73405C.1
ggagagagtaatagtttgaagacgagttttgttatttacttgcattttatttgtttgtattttgtgttaaaagtagggtatggagatattagaatttatagggctcttaaccctcaaaattgacttgtacaatgaagattgcccaagctttgagctcaatttaagccatatttctagttgatgtgggactaaattccagtcaattgggcatttgggactgcaattaagataactttccatcaaaagataaaaagcaaaacagaataattttgttggttgtttgcagtttacctcgtcttgcattgtgctgttgttgaattcaagtggagtttcaattaggatcttgctaatgctatttgttaaattaaggcaaactcaatctctatttaagtcatatcttttgtcggtgtgagactaaacaccacccttgaggttgcagtcaaggcagccccaaagagtctgcaactaagacggac

SEQ ID NO: 113399 - DNA, 737 bp, Glycine max
  unsure (1)..(737): unsure at all n locations
  Clone ID: PAT_MRT3847_73406C.1
aggtaccccggtnccggnnaattcccggngtcgacccacgcgtccggtttcgttggtgagcaccagaagaaccccttttcttctcttcgtctttccgtctctgctcaccacccactgtcaacaacatcaccgctctccattcccgttcgccggtaagtccccccttttttctcatctcaattttgttaccaaaaaccaaaacccttatttttcattcaattttcaaatcattaaaccaaaaccccccccgcagagtgagagtagtttgggcgaattcatgtgcgccctcgagaaagttgtagagaataatcgcattgagtttagatttcggtagttggttatggattcgagcgacagtggtcgcggttactcgaagcgcgagcgggacgacgaggattgggagtttagtgataagcggaaggataggtctcggaagttcggtgccaatggcggggacgagggcgagggttccgacggaagcgcgagaaggaagcgttctagcagaaccaccaccgatggcgacgattacgattcgcgctccaagcaagtggccaagaagaggctggaggagagcaccctggagaagttgagcagttggtatgaggacggggaattggatgataaagccgcgaggaagcgcggcggtgacggtgagtttcatgagagtgtggtgtgtaaagaggatggtaagggtgagggcggcggtggcggcggtggtagggagaagggtgggcatg

SEQ ID NO: 113400 - DNA, 167 bp, Glycine max
  Clone ID: PAT_MRT3847_73407C.1
ctaactccctatactaatatgcatatctttattggacctacacataccaaccctacgtgaatttaataaaatataggtcatcaaattcaaccaaacttcatcacctaaaagcacaatccatcttacaaaaaacacacatatcagctaattgctatacaacatattac

SEQ ID NO: 113401 - DNA, 253 bp, Glycine max
  Clone ID: PAT_MRT3847_73408C.1
gagtctatagccttggccgacaggtccgggtaatctttgaaatttcatcgtgatgaggaagagagcaaggaataagggaggtttcggtgtttcatcgatatcatcacagatgatgcagcagttgaatggtgaagtgagtggtgtgttgcaagatggagggaagagtgcttgggagaaaaagcagtggatgaagaagaaggtggtgcagttggaggagcagcaggtgagttatcaaatgcaagcgtttgggatg

SEQ ID NO: 113402 - DNA, 280 bp, Glycine max
  Clone ID: PAT_MRT3847_73409C.1
gtttcagagctcttagagatgtcaggattcctcctggaccgaggcttttgattattgaccagatcgacaaggacccggattggaaagagaagcgaggacatcgaaagcgactgggatgaaaagcatgactgggagggactttgaaatgacaagcaaaatgtatagtacgacgaaagcgattcgaggacagtcgactcttgccgactacaacatccagaaggaagtaaccgttcaactcgtgctacatcttcgtggtggcatgcaaattttcgttaagacc

SEQ ID NO: 113403 - DNA, 463 bp, Glycine max
  Clone ID: PAT_MRT3847_73410C.1
ttgccgtgctacatgtgtggagtgccgccttgcttgggggggggggggggggggggggcaaaaaaacaaggaagaagggctagaaaacaaaaatacagcacagtatgagaagggtaggggggtcacattgcgatgaatgggatgggcccgtaaagggatataaaacgttgtcgtaatagaacacatgttcgtaaacattataatctaaagcggcctgggtagacgggtaggtttgtggggggttcgttatcaattcaattgtcggtctagttcttcggattcgtatcagttcatccgtagtgaatcgtttttcgtaccgggttcaaatcatcatcgtcaggatgtaatgtgaggaagccttcaaatgaatcttcctactcctacggaatccaacaatcgcatccgctgtatttgtcgaacgtatgaggactagtggccccggagtggctctgtctgtatcgct

SEQ ID NO: 113404 - DNA, 372 bp, Glycine max
  Clone ID: PAT_MRT3847_73411C.1
ggaaaaccttgactatctttctctctgcaagcaagcgaccatggcggatggaagcaacggcggagtggtgatgcttcaagccccaccgtattacggttggcctaccctatctaacacggcaataatcgactcattgctcttacattgttgacgactacccagaccccagagtcaaacttgagggtgaccggctcgtggaggatgagatgcgttgcagcaccaataagcccaccgcttatctcaaagattatcctcctgtttccaacttcaattttcagcaaaactacccaatgattgctagagagtccgaaccttttatgagccgttagacctttccgtgctcgtgattgattgcgctacgaattggaaatg

SEQ ID NO: 113405 - DNA, 202 bp, Glycine max
  Clone ID: PAT_MRT3847_73412C.1
tgcacatggatctcggttatcttcaccgtccataattcatcacaatcgagtgagatatgttctccatatgaatgatgatagaagcctattactgagagtttccgaataacagtgctctctaattcattggctcattgtaactagtgcccatgatgacagtgtgacaacattcacatgggaccagttccaactgccaatcatt

SEQ ID NO: 113406 - DNA, 513 bp, Glycine max
  Clone ID: PAT_MRT3847_73413C.1
cggtctcgtggggtgaaattttggattagtgctcccactctcctatctggtataggacttcgtgggtagacttttctatttctgtcctttctttcactctcttcttctcactgaacccgattgccgttcaaagtggtcttattttgaaaacaatttggtcgttggtgcaaatgtttgctttcgttaatatcctttggggacaacaggcttactgagaaaacaatttttacttgtagagatttggacattttggttgtttattatacaatagcaactcaatttagaaaatttctaccgtattacattaaggtggcatcttgatacctagttgatctacattctcccatcttttctcactgctgaaattaaaaataagctgaatctgagtaaaattcatatttccggctatatttacgacggcagatacaaattcttgactaaacacaaaaaaatttttgctttacagaagagaaaagatggatgtgattagaatcaaggcatccctgtgaagtt

SEQ ID NO: 113407 - DNA, 307 bp, Glycine max
  Clone ID: PAT_MRT3847_73414C.1
taaagtaacaccctcttcacacattatttcgacgtttataacaggtgcggcattcctcaaatcggcagtgcatacttatcacgagggtcgtgccttattgcctttattgatttagcctaccgatcactcgaatgaaatcacatgttcctgatcatgccgaggattgcgtattctcacaagatctggcagcatcctgtcgaacagaaaaagctggcctcagaatctcaccacctattgtgagatcttgaaaaattcccaggagaatatcgcatactgtagactgcccggcattgtcaatattgaacct

SEQ ID NO: 113408 - DNA, 2298 bp, Glycine max
  Clone ID: PAT_MRT3847_73415C.1
ctgagctatccacggatggacaatttctacaattacgtgcaaagcaggtaagatcaaggagaatcactggggttggggatgggttcattcaaggaacagaagctcttgcccaaggtgttgcctttggtgtctctggtgttgtgagaaagcccgttgagagtgcccgacagaatggtatcctaggattggctcatgggcttggacgtgcctttttaggtttcattgtgcaaccagtaagcggggcacttgattttttctcattgactgttgatggaattggtgcaagttgttccaaatgctttgaggttttcaacaacaagactgcattccacagaattagaaatcctcgggctgtacattctgatgggatactaagagaatattgtgagagagaagctattgggcagatggtgctttaccttggagaggcaagccaacaatttggctgtgctgagattttcaaggagccttcaaaatttgcgttgtctgattattatgaagagcattttactgtgcctcatcagagaattgttttagtaaccaataaacgagtcatgcttcttcagtgtcttgctcccgacaagatggataaaaaagcatgcaagattatttgggacgtaccttgggatgagttgatggcactggagttggcaaaagcaggcagttcccaaccttctttcttgatcctccatctgaaacatttccggagatctgaaaattttgtgcgagtgataaaatgcaatagtgtggaagtgtttgaaggaagagaaccccaagctattaagatatgttcagtggtgcgtagagcatggaagacatatcagtctaacatgaaaaacttgattctgaaggttccttcaagtcagagacaagtgcatttttcctggactgaagttgatagtagagaaccacgaatccccaataaggccattattagttctagggagatttcatcaaacagtactgcatctgatgatagacgatttgtgagacacatcattactttttcaaagatctggagcagcgaacaagaatacaacggtcgatgctcgttatgcagcagaaaacagatctcgcaagatggcagaatatgtagcatttggaggcctgtgtgtcctgttggatatatatatattggggatattgctcgtgttggtatccatcctccaaatgttgctgctgtctaccgcaagattgatggattttttgctctcccgatgggatatgacctggtgtggcgaaattgtccggaagattatgttactccattatcaatttggcacccacgggcaccagatggatttgtggctcccggatgtgttgccattgctggttatttggaaccagagcctgatcttgtttactgtatcgcggagtcacttgttgaggaaacagaatttgaagagttgaaggtttggtctgcacctgactcatatccatggacctgtcatatctatccagtacagagtgatgctttgcattttgttgctctacgacaaagcaaggaagaatccgactggaagccaaagagggtccgtgataaccctcactgtcagttgcaatcaccttagtctttaaactggttaacctccgttttttatttctttggaggtcagctccaaagaatgtgcgtgtgccatctccgaaagaagacagtaatgtaagttggacgatgtttataataggagaggctgtgtttgtcgcgtgattattattactactttccagcatccaatggtgatgggactcagattgggatcatgtatattctctctgattctgtggtatatagtgtataaaagcaccacgtcggaaactgccaaaaggcacatgtaacttgtctacttatccttgtgtgtgttttgctcatgtctcagactattttgcgaagatgcgttggcgttttctttttcaaaagccacatacatacttgatttgcgagggatagaatattacatggttgacaatctaggcaaagactggccaccgaggtctatttttgaagatatgccaattttatgatgcgattcgaacattatatttccatggctcaattgatgaactatgtccttgagcgaaaactctgcttgacaaattgtgtgcatagccttttcttggttgattccatactaaatttgtaaattaggattattttttgtcttagattaatcatgttgcatattgaaataatcaagttgtttaatgagcgatctgattttgggttttcaaacattggtattcgaaagttaatttttactgaagagttgagtgaatccaacaatacaaagttattcttgt

SEQ ID NO: 113409 - DNA, 497 bp, Glycine max
  unsure (1)..(497): unsure at all n locations
  Clone ID: PAT_MRT3847_73416C.1
cccacgcgtccggaatttttgaaccaatgttttgccacgagcaaaccgacaacttacaagtcttaagttgcccattgaagtgtaaagtttttgcatagcagtccgaatgaaatttgcttcctttaaaaaaaaaaaaaaaaaaaaaaaaaaaaaaaaaaaaaaaaaaaaaaaaaaaaaaaaaaaaaaaaaaaaaaaaaaanncccatggnggnaaattaaaaaaaaaaaaaacccnaaaaaaaaanaaaaaaaaaaatataaannnatttaaaaaaaaattaaattttaatnnttggggggggttttttaaagggaaaaaactgtttttcctccccttaaatgctttgttttttttttgggatttgcaaaagttttttttagtggccactttttttaaaccggtttgggtggaaaaacccttggtaaccccttatatttttttggggcaaacacctcccgctttttcaagtggggggaattaggaaagggggcccccc

SEQ ID NO: 113410 - DNA, 367 bp, Glycine max
  Clone ID: PAT_MRT3847_73417C.1
gctgcgagaagacgacagagggcgacacgatgaaacgaaaccatagatagaagctttaaacattacaacctgaagttccagagttgtaatattacattgcacagaaaatgtctttgactccaagtttctttggtggcagaaggagcaatggcttggatcctttctccctcgatgtgtgggaccctgttaaggattatccttttcccacttctctttctgctgaacattcagcggttgagagcgcactagtgaattgtaacgagacaccagaagcacacgtgttcaaggctgatattccagggctgaccaacgaggaaatgatcctgcagattacgaacacagaattcttcagataagtggacagagg

SEQ ID NO: 113411 - DNA, 851 bp, Glycine max
  Clone ID: PAT_MRT3847_73418C.1
aaactgtagagtgcataaagccacaaaaaaagtaaccgcttccctgcaaagcaaagcttacttagagatagcaacaatgaagaaaaaactacataaattctccaattgtctcagctgttttttgtgaaaccgtagggtgcgtaaagccacttttgtgtcatgagaagtaaaaaagttttcggtgcattttgttccgcactactaaaaaaccaattgatttttccttattactactttgaaaacaattggatgggaaaaggacaagataagctccttaaactgaacactagaattgggaatttatcagaaatttgagatgagacgcaagttattccaacttaatgaagccaaagctcatagagttcaagtataagagacgactaccatggaaatatctcattgtattaatatgataaaagatgatgaattattacaaagatattcctatttataccagtgatgtgtgtctaacaaactaagtcaatctgaaccattgaacataacagtgatcttatgatgtttaacagaattcagaagagaaaaggcagaaaggaatctgaaaagaaagtaccaggaaagagatggaggaaccaaacccaacagagaggaatcgaccgaggcaagaatcagcaatgaaagcacctatgagtggtgtgagattgcttgttgcagaggataagagaagcacctgagttgctttggctaaatgaaacttgtaactccccatcaaatacaacatcatgttcgttcgaagaccgatattcgccacgcttgcaagtgcttcatttgctgcgaacacaaccaaaaccaaaaacaatgagaatccttaaccaaaccaaatccatgttttt

SEQ ID NO: 113412 - DNA, 837 bp, Glycine max
  unsure (1)..(837): unsure at all n locations
  Clone ID: PAT_MRT3847_73419C.1
tcgtctacgcgtccgtccacgcgtccgttttttttttcacagtagccaaaattaataaataaatagaagaactaaaattcaaactcgtcatctggacgtcgccgagagacgtgacacgttttcagttctaaatacagttcatttccttgttttttccgaggaagattgcaagcaaaaaacaaaacagaagaaattttcgtacaagtaccaaggcagcaatagatgcttacatacaaagtattcaacaaaactagagcgaaaccgttaagacagacgtgattccaaagtggaattcgggaagctcaaactcaaaacaggtacaggaccctgcacaaaactcgtttatcaaccaatttagtaatttacatacctcgccaggctcatcacaaaatcaaaagatcttggaaatttgatgctgctctttctccaaacatgccaataggagattcttgagttaaatccatttaagtggaatctgccaaagtagcatagtcttgccagtcgtggaagcccaaggggcattcttttctgacttgcataaattacatccccactccccagtcaaaatattgtcaatgacttatgctacacatggtaattcattcctaccttaatcagactaatctgaggaatgtttagtcctactgcaggtgaccggcaatttttccggagaaaagagtagaggttgatagcaaacctctttagaaatggtgagttccacttggcctttacgtgagaatgacctattacataggctgctccagcacgcttggcttctacaagttcatgagctnnnctnngacacgtngatctttatatantacatttagcaactca

SEQ ID NO: 113413 - DNA, 1408 bp, Glycine max
  Clone ID: PAT_MRT3847_7341C.1
acttttttacattttttttttttttttatcaaatagtagaaatatactaattgaagtcacactacaattcaacagaaaacactaaaattcgtattgaaattactggacaagtatgaaaaccagattagaaaatatctccaatctcataatgcatgatgtgaacatggaataaaaataattgcataatagtcatggcacttacacaggtattaaccctgcaaatgcaacagctatttgatgtcacgatccaagagaaaaataacataaataaactctttgaagtatgaagtggctactatcaaagaatggcacaacgaccttcacctcgcttgcgaagttcttcatgtgccttctcaagatgttctctgagttttcgtatttcatcatctgatctcatttgagctaacattgcattctcctctgccttaagtcttgcagcttgctcttctgccaattgttgctcaagcctcatagttgcctccctcaactttgattcaaccatctcagtaattcgctttaattggtcatcatatgtttgctgcatttgctttttaaacttcaatatctctccttttgaatatccttttaaagaatcaacctctctttgttggttatgcagctccattgctcccttcttcagttgtgtaaataactcatctgtataaggtcgtccaccattacgtgatagaactgtgtttacaaaagagagaagttgttgaacttgtccaaagcgcttcccttcatccttagtcttgttatcaaaaagtacgcaacgattgtcacacaaaacaagaatttcctttaaaggctctggacattcacggcctaaataatcctcaagtgtctcagcattttcttccaattcatctcctccagtgaagaccacaatcatgtaatcaacaattttgcttccaaataatgtctgcaagctccgaagagcagtttcttcttcctcagtaaagcgtgttctaaccgagaacactacaatgacagcatggatcccatccttggccaaatcaatgcatttgacaatttccttaccaacaaactcagatccgacagacaaatcaaataatcctggggtgtcaataacattaacaatttgtccgtcgtttaattctgttgtctgcaattcacatgaggtggatacagcagaggagctagcccttgacttgaagaccttccttccaagaatggtattacctgttgcactcttgccattgccagttcgtccaactaagaccactgtccgaccctcgttagatgaggaagtgagctcccagtcatcaccaatagaacttccacccatcacaaatcttcctaccctgtagtgtagggagagcctcttccaagcaacgcaaacacaagaacagaccactcgtcagcccacgcgtccgcggacgcgtgg

SEQ ID NO: 113414 - DNA, 441 bp, Glycine max
  Clone ID: PAT_MRT3847_73420C.1
aataacactgctaaccgaggacctggtggtcctcaaggattgctcattgctgaaaactggattcaaaggattgctgtggaactcaagatgagtccagaaaagataagggaaattaattcccaaggagaaggatccattctgcattatggccagatagttcagtacagcacactagccccactgtggaatgaacttaagttatcctgtgactttgcaaaggcacgcaaagaagttgacgaattcaatagtcacaaccgctggaggaagcgtggcattgctatgattcctaataagtttggtatatcctttacgacaaagcttatgaaccacgcaggtgctctggctcaagtctatacagatggaactgtattagttacccatgggggtgtcgaaatggggccaggttagcataccaaagttgcccaaagtgctgcttcagct

SEQ ID NO: 113415 - DNA, 340 bp, Glycine max
  unsure (1)..(340): unsure at all n locations
  Clone ID: PAT_MRT3847_73421C.1
tctgtttattaatttttgtcatttcatttgttgcattaagattatctttcagctgttcttattataccttggtgcactttcttgaaatttgaaatagattggttcaggggttggcctagttggattatgtcttgcccatgtgaaagcttccaaggtatagccatctatacttgatgactcatgcattaacattctgattgatgacatttctgctattaaagtatgatgttttagttaaaacagagtgaaatttaaaccaagaaaaaagtgctattttttaaattattatatggtaataattagggtattatatttggnagtgatactcaatttgaagttt

SEQ ID NO: 113416 - DNA, 390 bp, Glycine max
  Clone ID: PAT_MRT3847_73422C.1
agtggttctttaagtagacatggaatgggtgaatgctctcctagaacttaagtgtttgaatctaagaaaaaccatgattttcttgttaactcgaccacgttacaagcttaataaagtccttagtgatccatatcgtgtgtgtgattgcattgaataagatgatgtgcagagttggggattataacttcagtcgacttaaatgaaatacaaataactgaaacacttgtgtgcttgagagaaacactagcctcgtgagagtgaaacatagttgatctttctgtgatacttatcgtacttgctaacctacttcaatctctaagtgcattctttgcatgattccatcatgaaaaccatggcaattgtgaaattgagggttggaagctgaaattg

SEQ ID NO: 113417 - DNA, 272 bp, Glycine max
  unsure (1)..(272): unsure at all n locations
  Clone ID: PAT_MRT3847_73423C.1
cacagagcacgancgaaaaaaaacaacacagataaagtaacanancagtggnaaacttctaatcaataatcttntgccttcatnancatcttcttcagttgnatctggaccganttcctcataatntttctcnnagggnagcaagatnttcacgagcntnagagaactctccntcttncatacnntnannaagntcancaatgaanaaaagcnctcttggnatacatgaggnnaatttgtggtcgatgngagagaagactaaacaaaggggg

SEQ ID NO: 113418 - DNA, 289 bp, Glycine max
  Clone ID: PAT_MRT3847_73424C.1
tgaataagctcgatctgctcgagctagaccgagaccatgtaatttttatttcagattcaggtaaggcataaatgtaagcaaataaaaatatggaagtaaccaatttaagtaccttgctatatcttaatgagtttaagaactaatctatacaaaaagaatacatggtatggagcctgtgacatgagcgaggttcagatgcatcttaagaatatatatattttagctcgtgcaatcatgttttgcaggtaagctcacgtatttcttctattgctgtactcatgctataaag

SEQ ID NO: 113419 - DNA, 386 bp, Glycine max
  Clone ID: PAT_MRT3847_73425C.1
gggttgggttttagacaagaaaaataatttatctaatttgtattaaaaatactagccggagacctgcaaaaataaatgcacagaataacaaatcgtcacacggactatgaccctggacatgacgaacgctaacactcatgtattcctgcttgcaaggggggagatacagattactctcaggctctcatgaacttaagtgcatgaggaacatggagagccttcaaccttacagatacaccgttggaaccagcctgataggaattgggcaggggtgaactgatcagtttcttcggggttaatagagaccgcgggaacccttccacttgatccttacatgaacgtaggcaccaggtccatcctttggcgattcagcatagtgcgcggag

SEQ ID NO: 113420 - DNA, 500 bp, Glycine max
  Clone ID: PAT_MRT3847_73426C.1
cgagaagacgacagaaggggaagggagttggcacaaggaggataagattcttgatgacaaatgtgttcaacaaagatggaaaaaaggtcaggaaagagggtcaccgactgatacttcacatttggttggattgaattgggaaattttggtggtaaatgagccagttcttaatgccttctgcttacctgatgggaagatagttgtgttcactggtttgtttgatcattttaaaagagatgcagaaatagcaactattattggacatgaggtattatacttgtgcttggtttaagtttaatatgcctagcataggagacctatagcttataccttacaacttgctaatgtgttatttgcacaaatgatatgccaacatgtcagtttatacatattctcttgttaattaggttgggcatgttgtggcaagacacaatgcagaggggattacaaagaacctgtggtttgctattctaagaatgatactttatctacttttcata

SEQ ID NO: 113421 - DNA, 377 bp, Glycine max
  Clone ID: PAT_MRT3847_73427C.1
ggcatctccactatattacaattactactttctctctctctttgtaacttgtaagcatggagtcctcaaagatctatgcttacctcttcctttgcatgctcttcctgctcctccgccaactcccattctcggttgtggctactgtggcaaaccccccaaaaagcacaagcctggtaaaacaccaaagacacccacagtacccgttgttaagccaccagtcacaatccctcccattgttaagccaccagtcacaatccctcccattgttaatccaccagtcacaatccctcccattgttaatccaccagtcacaatccctcccattgttaatccaccagtgacagttccacccgttgtgttccaccatagtgaagccc

SEQ ID NO: 113422 - DNA, 252 bp, Glycine max
  Clone ID: PAT_MRT3847_73428C.1
ttcgagccggtattgatacgaaattcactgcgttgttgtcaagattgttggcacctgaaatcatcacaagaaggggttatgcagccaaaaggatccagagttcgaaaccttgtaattcagtggaattagaccgttagttgttcataattgttgtattctcattcaccaattggtaaagtggattacatcaacaatagaataaaaactgtatctggttcttgagcataaatcaatcgtatgttttttccgttt

SEQ ID NO: 113423 - DNA, 152 bp, Glycine max
  unsure (1)..(152): unsure at all n locations
  Clone ID: PAT_MRT3847_73429C.1
anatagtnannnacgcgtangtaagctgcggaattcggctcgagccacaatcgattttgcccttgaaaannnaanatcaaagatttggtnnnantaggtnnntctgtataggttgccaggtagacatttggtaancgantgcgggtngcnag

SEQ ID NO: 113424 - DNA, 459 bp, Glycine max
  Clone ID: PAT_MRT3847_7342C.1
acggctgcgagaagacgacagaagggttcctttttgtataaactccactttaagaatatattaactataatcctcatatgccgaaaataattaatgaaattaagccagttaacgagatttacaaatataatttatcaaaaaaattacatgattctcttgttggtcttgttcgtttttttaataacttgacaagttaatgaattactaacgtaattattaagttacagtttaatgttaacattattaatttgaccacttgaaatataatttctttttagaaattatcgtaatagttttggtttttcaatgaagccttgagaggctcacagactttattccttaagtcaactaaaatgttttggtcacgaaaaaatttcagatggaaacatgacaatgccttgtaactaaggcattcaaaaagtgacttgtatttttttcaggtccgaaagggattgagct

SEQ ID NO: 113425 - DNA, 375 bp, Glycine max
  Clone ID: PAT_MRT3847_73430C.1
gcagagcatgacagcgggaaaagattgacagcagaagagaatggcgggaacaaattgacgagcaaatccctttcattttccctttaaatttatctctattatttacacccataaaattgatttaaatcaaaccaacctataagcaaaactaatatatcactgaattagaaaaaaaaaatggggaagaagaagagaagtagggtttccgaagacgaggaaatcgaatctgacaccaaccctttcgatcaaaacgaacacactctctaccaggttcttggtgtggagaaaacagcatcttaacaggaaataaagaaggcatactacaagttggcattgaggctgcatcctgataagaaccccggcgatgaggaagct

SEQ ID NO: 113426 - DNA, 456 bp, Glycine max
  Clone ID: PAT_MRT3847_73431C.1
gaaacagcaacttccttgattgaatgaaagctgtgaagttgcaccttttagagtgacaggtttgataacagtactaaaatgcagagatgtctaagtaaactatgtagccagcgcagggcctgattctccaacaaaacacttacatttaatagcattttttattggcaggcctgaaaaatgccaacaggggtgctctaaaatgcattatacaggatcccctgtcctagcgtatctcagatcttccattggaacgcttcccagaaaacaggtgcgtgggcttcagataaggtgtgactctataagcttctccacgacgggcatacttgtttgtcttgttgacagatttctttgcaagtgtgaccgccttgacctttggagcagaagcctcgaaggcttttgcaggcacaactctatgtggtgggcgtgacactgtcctggaccgtgacagtggtctac

SEQ ID NO: 113427 - DNA, 343 bp, Glycine max
  Clone ID: PAT_MRT3847_73432C.1
gttatgggatttattttaatttctccccggctctgggcttgaaacgaacaaccaacccaagcaaaaaggaaaggagaaagcagggctcggacatggcacgggcaaagaccaagcccatcccctggacgagttgaacttgaactaggacggagcgcccttgcctgaactgaggggttgcctacggcctaaaacaaaataacaaacaaaacccggtcctcaccccgaaccgaacaaaacaagccaagcgatgagagaagaggaaagatgggttgcctaccctctcctggggcggacccaaagatcagtgcctgggcagaaaaagagagccatggcttggcttgga

SEQ ID NO: 113428 - DNA, 496 bp, Glycine max
  Clone ID: PAT_MRT3847_73433C.1
tacggctgcgagaagacgacagaagggatgactatggcttttgacaatatcattgagagattgatcaataattactacttcagcataatatactgaaaaattatggtagttatgactgtgtcattgaggtattgatagacaattgctactttaatatgatctcattaaattagaacatgattacgaaagtgctcaatctttctttttctggttaacctgactagtatttaatcccaaatcaagcagtcctataagggacttggtgacatgtagtcaggggttgaacccaaattagtttctgcttagaggattataagttatataggagccacacagagctaactttcctacaaatcagaaaacagcatgtggagatttatgaatgcttgttgcttcaaactaaaatcagatattcaatgtctatcaataagaaagatcagatattcaatattctgagcaagaaggaacttattccaaatttcaaactctccatgta

SEQ ID NO: 113429 - DNA, 527 bp, Glycine max
  Clone ID: PAT_MRT3847_73434C.1
gtcgaacaccgtctctgtgctacggttcacgcacctccgaacactagttctaggacgataacttctctctcgactgctggacctaaatagtggatctcatcctactgtgtactgctcccggggaaactcccctggaggcacacctcgtgtagttcgctatacgcacgggtctggcgcaacctgcagaagcatacctatgtcacctaacgatcctaatgtgacggcgagcggcctatctcactcctagcgaggataaaagtctgtcttagtattttattctacctatcttggggctaagtctgagaattcaaatgggcggtcagttctacatgatcctagtcatactaacgcttgcatgagaagacatgcttattctatatcgccacctaaatgcaagcattgggacgacttctaccctggaaagactgacaaaacacttgtactacctcaattatgttgccgtgcatccaatctgccttgtcttaagtgatgtgatataaaaaattgccgtaccgtacgtcctgact

SEQ ID NO: 113430 - DNA, 350 bp, Glycine max
  Clone ID: PAT_MRT3847_73435C.1
gttcttactttcaaaatttgacctctttgaccgtagatggatgtgaacggttgacacatattttctcatactctgtggctagaaaacttgtcaagcttgaacatctcttaattagttcgtgcaaatccgtggagcagatatttgtggcggatgaaaactcgggtcaccatcatcatttcagaatatctgctccaactgaactggttccgattttccccaacttggagacatttgggatttctcacatggacaacttgaagtcaatatggcccgaccaactcactgaaaattccttctataaattgaaaaagatggaaatcacatcctgtaacaatctcttgaatgtgttc

SEQ ID NO: 113431 - DNA, 254 bp, Glycine max
  unsure (1)..(254): unsure at all n locations
  Clone ID: PAT_MRT3847_73436C.1
gggancgacgggnaacaaaaagaggaggaccacttacaggaggggggggagcggnaaagtgccaaatataacattttgaagggggcgaaccaacaggaggggaagaaagggaagatgagtttgaggactcttgcaatgctactggggtgggcggaaagacaaagggggagactaaaaaaggaccaatggacaggggttggaagaatccaaaaaaacggaaacaaggagagaaaaaagaaaaaggggagggaaag

SEQ ID NO: 113432 - DNA, 424 bp, Glycine max
  Clone ID: PAT_MRT3847_73438C.1
gtccaaggataaaatgaccataggatcaaggtatgtggagctgtttccttctacaccagatgaagctagacgggcagagtcaagatcaaggcagtaatcgtggtattttaccttgttttaggtcttttaccttgttccttctggtgctactataatgttctgaattttagattatgtactttatttttactagttcgacttgctgttatatttgcatgtctgaactggatgcattaaattaattaatagaaagggcctttgaatatatggttcggtgcatgtgaggaaggatcctatcagtcaaggcagaggcttgtctggattttgatagataaaattgtcactgccttcattgggtaccttgatagttgataccaagtggagatgaaatactgagatccaacccttgaccaatgtagtcact

SEQ ID NO: 113433 - DNA, 368 bp, Glycine max
  Clone ID: PAT_MRT3847_73439C.1
aaaagacttcgtcatccaaacattattctctttatgggggctgtgacttcacctcaacatctatgcattgtaacagagtttctcccacgagaaacacatccaaaattgattggagacggcgagttcatatggccttagatgttgcacgaggtgtaaattatcttcatcattgcaacccacctatcatccatcgagatttgaagtcttcaaatattctagttgataagaattggactgtgaaggtcggtgattttggtctttcacgtcttaaacatgaaacatatctcactactaagacaggaaaggggacgcctcaatggatggcaccagaagttcttcgtaatgaactgtcagatgagaagtctgat

SEQ ID NO: 113434 - DNA, 174 bp, Glycine max
  Clone ID: PAT_MRT3847_7343C.1
caaataacaggaggacattttgggaagaatttgtgacattttatgaaaataaatatcattaccattaatttgctccaattgtaaatttgatgttcatatttacaattggagcaaattaatggtaaatatgaacatcaaatttattgaggttaacaaagtagtactcaaattttc

SEQ ID NO: 113435 - DNA, 762 bp, Glycine max
  Clone ID: PAT_MRT3847_73440C.1
aacataaccatccctcttcttcctacccatttatgcacccacatccacacactatacatgcacacaacaacaacaacaacattaacaatttccacagcaatacaccttgttttgtcgaggagggtcctagccgcctgcttgtggggggagcattgcaagaggatgcaaggcttgcgttgtttaggcttgatagtggcgaggttcttcagtatcaagtgtttgttaaagcagacagggtttctccctttgaccttgcagctagttggagggcttatcaggataaattccgtccttcatctgtgagatggattccggatgtgagcataaattcagcacctcagaccggtggggagaatggttgttctgtgggtttggaacttgatcttgagcattatgttgtcccaactcccgcaactgctgcaaattcagctcatgtatatgccgctaacatgacagagaatccaaggtcactaatttgtgggtctggcagcagttcatatcccatcaaggaaatgcaggttattgtgcctgatccatctaagatgtttcaaagttctggaatggttgaatccaagtcagttggaacattttcacctctgcaaaagcaagagagtcagaggggactttttgttgatagaggtgttggatctcctagacttgtaaaatcttctagttcatatattttctctactgatctcaatttggataacgaaaccaagaattcaatgccagctgctgctggagctgtcgctgctgcagctg

SEQ ID NO: 113436 - DNA, 242 bp, Glycine max
  Clone ID: PAT_MRT3847_73441C.1
gtcgagcacaatcagctctagacgccataaaactacaaaatggtcaacatgaaagacatcatcaatgtggggaacaaatatggaggaacagctcttcatttttcttctattcataatatccaaatttatctaaagggattacttaatttttttccattaatttattttcaaatttcctattctccttttaatacccccctctcatcctttttaaactctaaattcccatcaccattcttttt

SEQ ID NO: 113437 - DNA, 532 bp, Glycine max
  Clone ID: PAT_MRT3847_73442C.1
gtggtatttttttttttgtttgttgttgttgactgtgttgggattaagcttgtgaactcatttgaggtcctttcaagcacagaggggaccaggaccactttggattagcgggggctgtgtggccacatgcttgtgcgggaacccgcccctgttaaaaaagtccaataggctgtctagaacttgaacttttttttttttgccaaagctattgaggatgctataaagggggcaccctttcttccattcttgatttggaggcttgggttacttggcaagcctttattaaagaaaatttattgttgtccaacttttccttgccctccaattagggatggaaaaagcgtccccctttaatagcattctcggtggcttttgcgcaaagagaccatgctaagtttttgaggaccaaacgggcttttttagaatgttccgggttctggaacaacttggaaccacagcgggcagtgtttttgaaattgttttctggttctttagaggtgggggggcccttttttggggtcccaagtttttt

SEQ ID NO: 113438 - DNA, 226 bp, Glycine max
  Clone ID: PAT_MRT3847_73443C.1
gcccactgtgattgatgaggataggactgagacgtaccgtgcactatcccatactgagctgctcactagtgtaaaggatgaggcagcaaacaactttgcccgtggccactataccattgggaaggagattgttgagctgtgctaggaccagatcagaaagcttgctgacaactgcacaggtctgcaacgacttctggttatcaatgctgtgggtgagggacctggt

SEQ ID NO: 113439 - DNA, 258 bp, Glycine max
  Clone ID: PAT_MRT3847_73444C.1
aattatactatctattataattccaaaactcaatatacagcttgatggaagacaaggaaagatacagaacataacttaactagctgtgatttccaagggaaaacattcgccggctattgcaagcattcctgcccatttactagctgcaggccgccttccaacgcccattcacaacactttgcatacaacctcccacccgtctgcaaaactctcttgagctccccttcgaccagatattaacggaaaggtgtcctcttc

SEQ ID NO: 113440 - DNA, 303 bp, Glycine max
  Clone ID: PAT_MRT3847_73445C.1
ttttttttttttttttttttttttttttttgtttttttttttttttttttttttttttttttttttgggggcccactctgtttccccaattcccttataaaccttgttgacaatttcaaaaaggcccacaatttaattttttgttaaccacaaaaaattttttaatgaaaaagaaattggccaaaaggttttccctttgcaattggtgtttttagaacaattatgggtgaagcttaattgcgattaatgacaagaaatgttcttatttacttgggtaaaaaaagaagccttttgaacggcggg

SEQ ID NO: 113441 - DNA, 619 bp, Glycine max
  Clone ID: PAT_MRT3847_73446C.1
ttctcgcgtccgccctcgtgtccgcccacgtgccggttcttcaatcttctagagagagagagagagagagagagagagatggcgttgaatcctcaactgtttccaaatggaatgcccgttcctttcgtgaacgagatgtttgtgttggccagagacggcgtcgaattcgaggtcgataagattcctgcctctgggtcagttaccaatttttttcccctcttctttctataggattgattctgttcaatttttcaacgaaaaaaaagagagaagaaaaagaatatttggggttgttattcatacgatagcagagacaattgttggttaatttcaagatagcgagaagttgaaaagaaattattagagcaacaaacaaacatgtgattataaaaagattgatataaaactaacaataacttgagactctactttttatatgcttatatatatgctgggtcaaattagggggtcttctgctaactgtgtatttggaacatttgaaaattgcttatttatttgtagttgattgaggtctatatgaaatgtttttttttttttttttttcatatggtatcaaacaactcttgtttggcaccttctaatatatttttttttttta

SEQ ID NO: 113442 - DNA, 843 bp, Glycine max
  Clone ID: PAT_MRT3847_73447C.1
gctcgaggttttgtggaagaaagagaggaggaagggaggacaaaattgactaaaaacaaacgggggaagctagatgagacgaggggtagagaagaagatgacttgtaagacaggagaaatataaagagagaaagagaggaaattggcgtggcgtggcgtgatcggggcacagtctgaatctgaaatccatcttcaaaatctcaattcaatataggagggagctgtgccctgccctgacgttaaaaaaatgtcgctgaatatgaaaaccctaacccaagcattggcgaagaccgcggcggtgatcgagaagacagtgcagacgacggtgcaggaggtgacgggcccgaaggcacttcaggactacgagctgctcgaccagatcggctccgcggggcccgggctcgcctggagactctattcgggccgggcccgtgatccctcgcggcagcaccagtatccggtggtgtgtgtgtgggtcttggacaagcgctctctttccgaggcccgaatgcgcgcgggcctcaccaaggccgccgaggattcctttctagatttgattcggatggatgccgccaagctcgtccgcctcaggcatcccgggcgtcgttcacgtcgtccaggccctcgacgagagcaagaatgcaatggctatggtcaccgaacccttgtttgcttccgctgccaatactcttggcattgtcgacaatattcttaatcttcctaaagatctcaggggaatggaaatgggaaatttggaggtaaagcatggtttacttcagatagcagaatccctcgactttcttccacaccatgctcatcttattcatcgatctatatcacccg

SEQ ID NO: 113443 - DNA, 503 bp, Glycine max
  unsure (1)..(503): unsure at all n locations
  Clone ID: PAT_MRT3847_73448C.1
aatgttgcccttttgcgtttgtctttctattttgttccggtctttttttattgttttannnttgcccccnnnnnntnggatttaggttccttgccctgtggcgttgncntctctggctcccttgannggtccttgctgatggtctgcgccgcctcggctccttgtctccgactggacctgatagccttcttcgtggcctcgacctccgctctcccttatctgcttgttttgttttacgcgntgagattcgctcccggttattccgggngcggccttctccggcttctgtcgttttctttgttttggtgtttgacctggtnttctccttgcttgcnngtcttattagacgtgtnntctgccgcgccctttttttgttgatttctcgctcccgtttctcttgtcccccgnngtccttgcgggagcttttcccttccttntcgtggtggtttcttttggcatctcggccgtgggtttccctatttgtttttgcgctggtgagtttt

SEQ ID NO: 113444 - DNA, 335 bp, Glycine max
  Clone ID: PAT_MRT3847_73449C.1
cagcctcaaccacacgtccgtggcgctgcgacaagacaactctgcgtgatgatgttgaaagagcatggtcatgagcatggacatgacagcagctagaggtacttatgtcattagcctgctgcatcagctatatatttaaaaggtttatcggaccattcatttccagggctgtgccatactttctctctctctctctctctctctctctctccctctctttttccattttccccaccttgtgatcgatctatgaatgcctaaacaaaaagctcatagactgtgtgtgtatccgtctgctagctcgagtgctatcaccaccatggtttggttggttt

SEQ ID NO: 113445 - DNA, 282 bp, Glycine max
  Clone ID: PAT_MRT3847_7344C.1
acggctgcgagaagacgacagaagggactacacccacactaccatccagtttcttagatggctttgttattccttatgataattgctgctccttgcaagcagaggaactgcaacagaaactcttctccgagacacaatatggtgatacttgtgttgatcttccatgtgagaagaaaggcaatgagagaaccatatctccacagagtgtagcgccgagagaaaggagaagaaagttcactaagaggactcaagagcttgggaagttggtccctggtggaccaa

SEQ ID NO: 113446 - DNA, 107 bp, Glycine max
  Clone ID: PAT_MRT3847_73450C.1
ccacgcgtccgagcgttccgtatcgctcccctgcgtcgactataacgccaacgccctgtagtcaatataagccctggcgaacctagttgcgcatctcgatttattgt

SEQ ID NO: 113447 - DNA, 188 bp, Glycine max
  Clone ID: PAT_MRT3847_73451C.1
ggggggcagattacttaacattttgtaaagatgggctaaataaagaaacattttgccggggcttgttaaactgccgtacatgacttttaggggactttaaagagacatttcctcgggttaaagggatttaaaattttttaccgccgagccgacaaagggaactttgtttaacatgcgggggccttggg

SEQ ID NO: 113448 - DNA, 1049 bp, Glycine max
  Clone ID: PAT_MRT3847_73452C.1
acctatcttccacagttccaccttttcctctacacaacacaacacctatcactcttctagctctgatcgtcgatcatccacaaaagataaattacaaaatggtgaagttctcaaaggagctagaagctcaactgataccagaatggaaagaggccttcgtcaactattggcagctgaagaagcagataaagaggatcaagctctccaggcttcccaagcaatcccaccaccacgcaaaaccagactttggtctctccattttcgattctttaagcttctttgttaagaatatcgctcaaaacttctcagcttccgaccatcatgacctcaacatcattcaggtgaggaaggaagccccaatggttgtcgtagttgtattcttcgactctgatcttgcgcttgtgctttctgaggagggcgtcccgcgtgtttggtttatgtggctcgatgaagagctgaacaaggtgaatcaattttaccggagacaagagagtgagttcattgaaagaggagaaaccctgaacaagcagcttcaaatattgcttgacctcaagcaaattatcagtgactgtcgccggaaaaattctccgtcaaagccatatagcaccggagtatcccctcaatattctccaacccgggattctgattattccgtttgtgcagaaaattttggagattcagatgaaacaaattcagagatttcacagacggatgaggtaatcacaacattagagaaaaatggtataagtttcgttaattcagtgatgaggacaaaaactaagaagggaaagccaaagatggcaatgagaattgatgttccagccactaatccaactcgagcaattacagctatcactagcatgctgtgggaggatttagtcaagaatcccaccggagacttggttcacaagagaaagctccaatgtgctgagaaaatgattagaggtgcctttgtcgagctctataaaggatttggcctactcaaaacttacagctcactcaatatggtagcatttacaaagatattaaagaaatttgacaaggtatct

SEQ ID NO: 113449 - DNA, 451 bp, Glycine max
  Clone ID: PAT_MRT3847_73453C.1
aattcggctcgagggacgaaggagagaacgctcgccacctgacacaagtgtttcgagactgccacaacatgctacgcccattatctagagcaaaattgcgaccaaaaggatgaaaacactcttaaaaaagtctcgaggaagcagaacaatgctttgagagctaggatgctctaggctatcagagaggactctagagagaagaagattcctaggtatacaagccttttactggcatgaacgcttgttatttaatgcctatgatcgaccatattatgaggcgctacagacatccgctgaatataatacacgtatgttatactatatatataaggcgatatattctcaaagatcctcacaagatgctatatggacaatatccaagtgctagaacagaacacaagatcttctactgcatacggaagtctatcagcttataatgtcatcatgattt

SEQ ID NO: 113450 - DNA, 492 bp, Glycine max
  Clone ID: PAT_MRT3847_73454C.1
ttttctcgtccggcccgtcgctatgatactcgtgcgacaatcttctctccagaaggccgtctctaccaagttgaatatgcaatggaagcaattggtcaggctgggacttgtcttggaattcgagctcccgatggcattttcattgctgcacaaaaactaacggcaaacaaattgcttgatgatcgaatcatgagcgagaaaatctacaaggtgtcggcgaacatcttctgcacggcggcggggatcaccagcgacgcgaatgtgctggtcgacaaattgcgcgaaatggcggtgatgaacactttggatttcggagagaacattccggtggaacagctcgtgatcagactgtgcaacaccaaacagcactacacacaagttggaggtaaacgaccctatggagtgtcacttctttatgccggttgggacacgcaccacggctttgagatctaccaatctgaccccacggaaattacgcggttggaaggcgac

SEQ ID NO: 113451 - DNA, 542 bp, Glycine max
  Clone ID: PAT_MRT3847_73455C.1
aataaataaatattttccgagccggtccaatattctgtcacaccgcgacagaaggggcttgctagccagccagatcatctgcaaggacttgttctccttccttcccaacagccatgtcttcttttcttcccgcctcagccgagtcacttgatctggcagtggaggccaaagacccgtctgagtccatctccattctttatcaggtacttgatgatccttcttcttctccagatgctctgcgcatgaaagagcaggccatcacaaacctcactgagcatctcagggaacagaatagggcagaggatttgcacagccttcttacacagttgaggcccttcttttccttgattcctaaggcaaaaactgcaaagatagtgaggggcataattgatactgttgcaaaaataccagggacttctgatctacaaattacactatgcaaagaaatgatgcaatggactcgtgctgaaaagcgtacctttctgaggcagcgagttgaggcaaggcttgcagcacttctgatggaaagtaaagaatattct

SEQ ID NO: 113452 - DNA, 522 bp, Glycine max
  Clone ID: PAT_MRT3847_73456C.1
ttcagaaactttgaccgagtagagttggtttcccttcaactcttattctgcattccatcatcttccaaaaaccaaagatggactgtcaagggcaaaagataacagagcagctaatgcagctaataattgttgcatttgctgtgattgcatttgcaacaggatatcttatggcttctttccaaatgatgatcctcatatatgctggtggtgtggttctcaccacattggtgactgtccctaattggcccttcttcaaccaccatcctctcaagtggttggatccaagtgagttatagaagcatccaaagcctcaaccatctccgaatgtaagtttttttaagaagccccccaacaagtaggcttctttgacatatcttagtgctagtattttcttgagttaaaaaatttcatgctttggcagaattttgtatatcttactcttcttccctccctttccccttcattggatattacaatgtactttacttctttggactgcaaaggttatatctgttcgctttg

SEQ ID NO: 113453 - DNA, 270 bp, Glycine max
  Clone ID: PAT_MRT3847_73457C.1
ctgcgagaagacgacagaagggcacccttttagaatctgattgttccttatctctgttatttttatatttccagttaagttcaatgcattattaattgcactgcgatctcaaattccttatcatgttcatttacttctgtagaaataggctttttttttccttgagattttgttaagtgaacaaggttcacgctagatagagagtatcaagtgatattgttataaattcaactgatccgttgggcattgtaaatttatataatgccaata

SEQ ID NO: 113454 - DNA, 238 bp, Glycine max
  Clone ID: PAT_MRT3847_73458C.1
aaagggaaggcaaacctttcagtttgcttttttttttactaagcatgccatgttgtaataacaataacatttacaaaaggggccaaacaaaagcttataaacttaggggatttttggggggacacacttttacaagcctttttacttatgcaccaaacagaactcctgtttggggtaacttttacaaaactggtttttgtttcgatagaaaaaagttctaaatcaaaagttttgccgc

SEQ ID NO: 113455 - DNA, 304 bp, Glycine max
  Clone ID: PAT_MRT3847_73459C.1
aagggtcaaatcctcaattggatacctaccttttttcccaaaattttttcaaattttcccagagaaagaaaactttaaaagccaaaatatttggcaaagtaatttaatctatccccaaattaacaatggggggccactccaaactcgtttcacttttatttgaaggccaaagtaattgaagtattttggctacttggggcctcctttattaaaaattttttgcaggattcaaaaatggaacggccaaaaattttagccaagcaagggaaggctcaatttggggcaaaaaatggggagccagggg

SEQ ID NO: 113456 - DNA, 122 bp, Glycine max
  Clone ID: PAT_MRT3847_7345C.1
gatgaattgggctttatagatattcttgattgggcctatacatttgggaacctcttggcagactttgttttgacaagatgctgacccctgcgttgacaactactggattcgaactttttttt

SEQ ID NO: 113457 - DNA, 338 bp, Glycine max
  Clone ID: PAT_MRT3847_73460C.1
gggggaaaaaaaaaaccccctgaattgggcttgtaaagaaataattctggattttcagggttttaaaaaattttttttttccaagaaattaacttttttttactttataaaggcaaaggcccggggggttcccttttgggaaattcaaccaatgttttttttacaatatatcctttgggcaaccaaaatgttttagctggggggggaaattgccttattttttttgggagttcccacatattttcccgcttagtgtaacaatgttttttattttaagtttaccccccccctctctctttttggggcacgggggtttttttttttttttttttcacggg

SEQ ID NO: 113458 - DNA, 430 bp, Glycine max
  Clone ID: PAT_MRT3847_73461C.1
tacggctgcgagaagacgacagaaggggcactacattatgaatatagtatacaaatgtacgggatggatactctaatattaggatattacaaaactaaacaaaatgtggtttgaaatgctataatgtgcctgaaagattttatggtgaatgcaacaaatcaactagatgtagctaaacaatcagtacaaatatttagagccaatatgaaactagaaggatagcttctacaggacaatcataaagaaataaaggattgtcagaataataaaaaattctgatgaattcacaaaatgctatgctggcatcttccatcacaataagcaccataaataacgaagaaaaagccaaaagtcaaggcacagatgcatgccatcatttagcataatcaaaaccttcctcaagatgaattacaatcattaatcaaaactt

SEQ ID NO: 113459 - DNA, 295 bp, Glycine max
  Clone ID: PAT_MRT3847_73462C.1
gtagcgtctagggcctatacatcaccattctgtcttaagcaaaagcctgcttccttaaaagcgtatagagcacgtggtgtgggtatgctgaaatgggccaggtccgggcctcaggatacaggggtgccacatgcccagaggttcggactagcccatgaaaccctactatctgacggtggtgtcgttctttggtagagaggttgcactggacctaaccatcatgaaaatggaagaggccatctccacttagtgaaaacatttcttgataaccagggggcggatactgcgatcgcat

SEQ ID NO: 113460 - DNA, 576 bp, Glycine max
  Clone ID: PAT_MRT3847_73463C.1
cattttttactttttcaaaataatatctaaaacattataaggaccaaaacaaaataaatatattttgtaaaaataaaaaaataaaaaatttacaagtaaaaataaaaaaatattaaataataggaacaatatatatatttaggagtagaatttattgaaaaaaaacaactacgaagtagagacagttgaacattattaatggccaaagcagagtagctctgctttcatttgctgcagcccataccttgcacagataaaatttgtttctggtctttttcatctcacatgaatataaattaattaaattaagtgttttaactcatttttaattttataaaaaaataaaatacttaggacacttcaaagtatttttgaaacagattataacgtcagtaacacaaaccgaaaacaaagaataaaaaaacagctgaaatatatggagtaaaattaggtcaggccacccaacatatgtttttagcctagtatatattaggtctaggacataccaagtcttttaggaaataaattagttcaaagtttttattaaaatttatttagttaaaaaactagatttta

SEQ ID NO: 113461 - DNA, 201 bp, Glycine max
  unsure (1)..(201): unsure at all n locations
  Clone ID: PAT_MRT3847_73464C.1
ggangtgagtgaagaagcagagggantagcggcatnnaaaatgcagatcttcgtgaaaactctgacagggaagactataaccctcgangtcgagagcagcgacaccatcgacatgtcaagggccaagattcaagacaagganggcttcctccggatcagcagcgtttgnttttcgccggnaaagcagttgaagttgnaggt

SEQ ID NO: 113462 - DNA, 269 bp, Glycine max
  Clone ID: PAT_MRT3847_73465C.1
gacccacacgtcagtagggtggcaaaaaaacaacggagggggcacaagtgagtctctagctcgagaatcaataatgtagtctacccaacgcttatgtcgttcgttcctgcatctctgtgatgtcatgactctcacagctcacgttggacaatctgtccgcacgcatcgggaagctcagtttagcgggtggtacatcctagatggggccagcaacttgcggaggtttcggtggtgacatgggactataggcggataggaaactcattctg

SEQ ID NO: 113463 - DNA, 363 bp, Glycine max
  Clone ID: PAT_MRT3847_73466C.1
ttgtctgcctcttgagaagattaccaaagacctgttttcttagacaacttattgataacgggactccttggtgtttggccttaacagccgaaatggcaagctctccttgatttaggttggatcgctcctgaaggagcggggtacatctcttgtttagagacaccaggaacacgctttacatcgtaactgagcctgatgataagacaatgattctactgtaatcaatgacgcactaatgatgggagattgttaacattgtctgggtagttagaacctgttgtctagagttgggttgctagttaagatgataaggaatgacgattgttatgctgagcaattaatttatgtaaggtgcttggtctt

SEQ ID NO: 113464 - DNA, 292 bp, Glycine max
  Clone ID: PAT_MRT3847_73467C.1
tccctgcccgccggcgtcctctcagccttccaaatctctcgccttaaaacttccagaaaaggcaaaaaacccacaaaaaaaaaaaaaccaaaaacggcggccgcggccctttaagaaaacgccgcggtaccggccctctgcattggcagggagccgtaatgccacagaaaaggctgctgttaagccgcgggacgtacattgcatagacccaagaccggggagaagatccgtccggacgccctcgacgaaccggaagcctcggccaccagcctctagaaaggaaaaaggacgt

SEQ ID NO: 113465 - DNA, 449 bp, Glycine max
  Clone ID: PAT_MRT3847_73468C.1
ggctcgagtggaaatttggtgacaaaaaatgatactttcggcatgcatcacgagagatgtatggcagatcacgagctttggctaaagatagatcaataaacagatctatactccgaacctatgcccacgaagatgggagtgctggatcctggtatatcgggcttgatgggaagcatgtcgatgaggccaagcattgttgctcatcttggacgacaggagcaatcagagctggtgtccgagttgagtgcagggcattcttgtgagaagatcacacacgttatgcacaggaatcatcaattgacagaagggtagcgtcctacgatattcaattgctagtggaagcacagtgattgctagagatgcctggtgcaaaggagcttttggtgctagagttgacgacatgggacaatctagtaatattagcttatgagtacaggtggcaagttgcg

SEQ ID NO: 113466 - DNA, 299 bp, Glycine max
  Clone ID: PAT_MRT3847_73469C.1
ctcttatatcttaaaaaatacgtaattattattaggagccaggcgtacacttgaagtatgaataaaaagacacaccaaagataccattgttaaaagtttgggcagccctaggcacaaaagaaagtggtgattgatggctactcctccggtgaattcgttgccaatagcataccaagcatggacaagcctgggagtcccagattggttgaacaaaggagacaacgcatggccaatggtgtcagccaccttggttgggattcaaagcatgccgggcctcgtcatcctctacggaagcatcg

SEQ ID NO: 113467 - DNA, 268 bp, Glycine max
  Clone ID: PAT_MRT3847_7346C.1
atcctgctcaggagagatatagtatggcacaatctatgcggcaaaaaatatgaggtgagtggctggtagcagcatctattgtctcattgcctctgatgagtgcaagagaacagtgctgatgcaatatgaaacattgactcacgccaactgaacatgtatggagccgaagttactgaggaaccacaggcaccacaggaagaaaaacgagaagagcggagaaaccgccacggaagaagaggacagcggcactcaccacaaggagactacc

SEQ ID NO: 113468 - DNA, 394 bp, Glycine max
  unsure (1)..(394): unsure at all n locations
  Clone ID: PAT_MRT3847_73470C.1
ctcgagccgagtcgcctcggncaccatccacggttggcaagtacgaaatagaatgacagtttggaagaagcacgtgcgggagtggaatgtggaacccctgatggcttgccgctcacaggtgttcgccttagcatctttaatgagatgcacgggagatataggtctgaggaagactgcgccaggctaaagctccaagtgtgttagtacaatccttcaaaaattttgcttcttggtgtgcgtatggcgaggataacttaatcagcggtcatgcaatatgccacgccacactttagcggctctaaacggaaaaggtggctagctcgtcctaacatctccattactgttggcctggacacaactagcgcaactttgcgctttataacggttgcaggat

SEQ ID NO: 113469 - DNA, 808 bp, Glycine max
  unsure (1)..(808): unsure at all n locations
  Clone ID: PAT_MRT3847_73471C.1
ctttcaatagatcgcagcgagggagctgctctgctacgtacgaaaccccgacccagaagcaggtcgtctacgaatggtttagcgccaggttccacacgaacgtgcgttcaacgtgacgggcgagagggcggccccctttccggccgcaccccgtttcccaagacgaacggctctccgcaccggaccccggtcccgacgcccggcggggggagaccccgcgccgccgcggggacgacgcggggaccccgccgagcggggacggacggggacccggctatccggggccaaccgaggctccttcggcgctgccgtatcgttccgcctgggcgggattctgacttagaggcgttcagtcataatcccacagatggtagcttcgccccattggctcctcagccaagcacatacaccaaatgtctgaacctgcggttcctctcgtactgagcaggattaccatggcaacaacacatcatcagtagggtaaaactaacctgtctcacgacggtctaaacccagctcacgttccctattagtgggtgaacaatccaacgcttggtgaattctgcttcacaatgataggaagagccgacatcgaaggatcaaaaagcgacgtcgctatgaacgcttggccgccacaagccagttatccctgtggtaacttttctgacacctcctgcttaaaacccaaaaggtcagaagggatcgtgaggccccgctttcacggtctgtattcgtactgaaaatcaagatcaagcgagcttttgcccttctgctcacgggaggtttctgtcctncctgagctcgcctt

SEQ ID NO: 113470 - DNA, 152 bp, Glycine max
  Clone ID: PAT_MRT3847_73472C.1
cggctcgagtatctgatgaggtgagataccttctaaggtaaaccagcgctatccattgggaagactgcaaggatcaaattgatgtacttgcacttgcatccatagagcccatcctttcctatgatgaggtggtgttatatgtaggatggaac

SEQ ID NO: 113471 - DNA, 286 bp, Glycine max
  unsure (1)..(286): unsure at all n locations
  Clone ID: PAT_MRT3847_73473C.1
tatatggaaaaaacccccaactttcgtgaacttaaaaagggcccacggtctattcaccatcccanttanacacaacctctcccattccccaccatctatatctgtttacataagcgcaaatcacttcatatctttctttctttacattttccaaattttaattttccttttcacttgttcctcttatattttccataaacataaattcaccttctttcttaattataatttcttgccttttatccttattacatatcttaatatcttctgtaatttcataatttta

SEQ ID NO: 113472 - DNA, 1264 bp, Glycine max
  unsure (1)..(1264): unsure at all n locations
  Clone ID: PAT_MRT3847_73474C.1
ctcatactgaatactgtttatcaatgtatgtcatgggctcatggctacctaaaatactgttacaaaacaaagcttcttgctactttaaatcgagtgcagatactattgaaaaatcttatactgttacaaagcttctgccaatccaacttttgtggactagtaaagtattttccactacgctctaaacttttcatctatgattctttatttaaaatataaatgatttattcctgtgcgcacatgaaattctcgtttttatgctccacattgaggaccataataaaacaagaaagataattacattttcagtgaaaagaagcctccactaacgccatataatgtaatctagtccttatttgtaggataggaagtttatagcaaacatttcagtctcaaacggagtgttaagggaagaactcctcaaatggagacacctttagtgatccagaagttcacttcagaatctgactacttgccggtgaaaagcttgaaggatttgaagtttgttttgtggacagagacagtgaagatatggagaatagcattccctatggcactgtctgcactgtttcagtttctcacaatctcctcaacttccatctatgctggccatattggagacattgaactttcttctatctctgtttaccaaggtgtcatcagtgccatctatttttacttgctgtttggtatgtcatctgcactggcaacactttgtggccaagcttttggagcaggaaaaattcaatctacttgtatttatgttcaaagatcatggattatacttactgccacttgtataatcctcttgcctatttatgtatatgccactccaatcttaaagttgcttggccaagatgaaggaatagctgaagttgctggaagatattctatacaagtaattccctacatgttttcttttgctgtagcttttcccatccagagatttcttcaggcccagagcaaggttaaagtaattatgtgcatagcatttgtggatttgcttatacaaaatgggttgctttacatattcataaatgtatttggttggggtataaccggcttggcaatagtgactaatatcgtagggtggttatatgctatggctttggttgtgtataccattggttggtgtaaggaagaatggactggattttcatggatggcattcaggggatttgtggtcatttgctaangtaagcctgcatcatctgntatgagttgcttanagcaatggtatgggacatgcattatactacttgct

SEQ ID NO: 113473 - DNA, 247 bp, Glycine max
  Clone ID: PAT_MRT3847_73475C.1
ctttacgatggtaactctttgcaatattggatatgtagatatcgttcctgactccacgtttaccaagatatttacatgtgctttcattttggtgggttttggatttcttggttttctgctcaatggattggttgcatacatttgtgatatacaagaggccttcttgttgagcatggtggatgagaatagatataagaaaattctcaggacttatatggttgatgaagagaaaggaagaatgaggata

SEQ ID NO: 113474 - DNA, 307 bp, Glycine max
  Clone ID: PAT_MRT3847_73476C.1
gaagtccattatttggctatatattaaccccgggctcccaagtcactgtactaaggagaagaaacacgcactgtttacgtatgcaaccagcgcacacatgcagaggcagtataatagcattctatatttcagactagcttataatccagggggcttcatttaaataggacactgattctaatgacctggcacatgctaatacactgactaccctgttacatgcatattattgttgctccagtgcacactcacattaggaaccgacatcggtacaggttgcagatatataattggccagtgaagccgt

SEQ ID NO: 113475 - DNA, 276 bp, Glycine max
  Clone ID: PAT_MRT3847_73477C.1
gagattgcttgccatttctgattcccactccgaggtctttcttttatgtggtgaccactgaactctacttgatagatcatacccacatggatgctaccaatctcaccttgcatcaagaatatcactcatctaacttttatctgaaaagattgtgcgcgcacatacactatctgctcatgctacacatgtgaaatctgtttgttcaacgcccttaccctgccacatcatgaccagtacatttactgatgatgctactctcaaactcttccaaagtta

SEQ ID NO: 113476 - DNA, 773 bp, Glycine max
  Clone ID: PAT_MRT3847_73478C.1
gctttgtttcacaacacatttaattattatattaattaagtttcaaaaaaactatggaaattgactatggtttcgactttgaggactgcttcccttcgatgattgcgcggttgggcgcggaagggttcattggggagctttgcaacgggttccagttgctcatggatgtgaacatggggctcataacgttcgagagcttgaagatgagcactaacttgcttggtttggaggttagggatgatgagttgttgtgcatgctcatggaaggtgatttggatggagatggggcccttaaccagatggagttttgcattctcatgtttaggttgagtccatgcttgatggatatgcaaggtatggttccagtgaatcatgttaatggcttaatgtcatataatgtagtgtaatatcgtaatacaatgttcttctagctagctagctatataacccacttttttctatttctctttttcaataacaatgccatctttctgtggtgatcagagagagtatatgtctgagagatgagaaattaattagggtctgtgtttagataagttaaaaagagtttttgagaatttttctactgaaaaatataagttttttcaatagatgagttcttaaaaaaactcttttaactttgtttccaaacaggtcctgaatagtacaggatcatcacgcgttcatgactccgagcaagagggagaagaatattgtagtaactctaatatatgtgtaattcaatgacaaaatcttctgtgtttgctgtgcct

SEQ ID NO: 113477 - DNA, 240 bp, Glycine max
  Clone ID: PAT_MRT3847_73479C.1
acctcggaatgtctggtagatggaatgagcggaacaagaaggagaccttcctgggtttggctaccatgaccctaaattctgtgaacaatccattcaaaagccaatggacatcatattgcttgtcaaggctaccgctcatgttgaccttaccatcaagaccctttcaacacgctgggataccggttagtgcatcattgttagagccgatgagacgagtcagaacattgacagaagatagaa

SEQ ID NO: 113478 - DNA, 285 bp, Glycine max
  unsure (1)..(285): unsure at all n locations
  Clone ID: PAT_MRT3847_7347C.1
agcnagaaggctgtccattctttgccaacctcaatctctgtcctttgggggaactncatccatccatgaaanttttccgacaaacctcctttcggtagacattggattancntantaggntggacaagnaaaaccaaattaagnctcnagatggttcaggaaaggtgcctttgaagggaaacgtgggtngtccagggaataacccaaacccagattctgagggngttctaaantccaggtangccaaattagaggnnngatnctggtnnttntngaacaantncc

SEQ ID NO: 113479 - DNA, 392 bp, Glycine max
  Clone ID: PAT_MRT3847_73480C.1
ccctcgcgttctcccacgcgtccgcggacgcgtgggggagtcgttgcagagctgcgcgtcgatctagaaaatggcgaggataaaggtttacgagcttaggaacaagacgaaggcggagctgctgaaccagctgaaggatctcaaggcggagcttgcccctgctccgcgtcgtcaaggtcaccggcggcgcccccaacaagctctccaaaatcaaggtggcgaggctttcgatagcgcaggttttgacggttatttaccaaaagcagaaagcggcgctgagagaggcttacacgaagaagaagtattttgcccttgtcctacgtaccaaaaagacccgcgccattcggagaccccttaccaaacaccaagcgtctttggagacggtacgcgag

SEQ ID NO: 113480 - DNA, 248 bp, Glycine max
  Clone ID: PAT_MRT3847_73481C.1
gatcgatttctcgcattaactcttgacctctcacattcgccaattccgcagctcgcgcaatcgctgctaaattccagggttccgcaatggactctggcggaaagctcaagaatggctcctgatgtacaactgggtgccgtcgatggacgtagctcgtcttcaagttcgtcagctactctcaccagttcgccgtcgggacatttagccgttatttgtcgtaaggtaagtacgctcaacgtgtcggtaca

SEQ ID NO: 113481 - DNA, 161 bp, Glycine max
  Clone ID: PAT_MRT3847_73482C.1
aacgggaagttttcctcgcgagtgtcactcttgaaaacattccacatcatggaaccattcactttgtttgccactcatgcgttggcggggcaatcgcttaccacagggatcgcattttctttgctaacaagacatatcttccaaatgcaactccaactcca

SEQ ID NO: 113482 - DNA, 577 bp, Glycine max
  Clone ID: PAT_MRT3847_73483C.1
cccacgcgtccgcccacgcgtccgttcactttcttccttgtattggtagcccaggcaaaacggccaatctgactttgcgatgtgtcaacggcgactcaaaagcaaagcccggacatagtttgtcttcacgtgggtttaacaaagggttgcttacagagtttcttggcattctgtccacctccacttcttggccctatctacgtactcggaggtggatatactgccaatagagctgtgttggcttctctttgtcaagcctccgtgatactataaatctcagttaaatacataaacacttttttcccatttttcttttctggctatcaattatatgaggatcccaccggtcgtttgcaaaaaaatgctaagaaatcggataaagagtagaacgcctcgagtcgcttgccgcttgcttctgcgctttctatctgtccctataatcttgtttccctccattcttatgaaaccctatatttcccttagaacttgggcctttccatgtttctttaattctactagtctagcgattgtttgatgtttctagtttatttcttaaaataaattcttgacgttgtgt

SEQ ID NO: 113483 - DNA, 331 bp, Glycine max
  Clone ID: PAT_MRT3847_73484C.1
aaaatgtctaagaggatgtgaatacaatcatgcagaaaatctgaaagacaaggatgtatattaaaaacccaacacgttcaaatatccaaccatccagtcatttctggaccgtgaggaaggcctaaatttcatcaactgtaataaatcggaggctcgacaaaagtaacaactaaagccaaacaaaacctgcaattgcccccaccaagctataaaaaccgactgctctaattccctaggccaagtttgataagccaataaatgattcttctacccatattatgaacaaaaaaaacccaatcaagaatgatttgcctattgacatgcatgcaaa

SEQ ID NO: 113484 - DNA, 430 bp, Glycine max
  unsure (1)..(430): unsure at all n locations
  Clone ID: PAT_MRT3847_73485C.1
cnnnnngcncgncnaagcanctactcngnnagctnaaaacccaaagataaaaaanattannntgtcnnncgcncnannganangcngagcagcnggntcacgagncacnnantgngangtacngngtgnncacgaaagnacaatcnacanagacnnaangaagnccnngnggcngcnaacngactnntaggncacgagcacagtacccacncncaaantangtngggntacangnatntgngnnncgggnncgtcgnttnggncntgagtnnangcctcnattntgtgacaaangtgatgctnantttcanacangnagnnntnnccttgnnangtanaccnngtgcntncacttgtcnggaaacaanaatggctaacnancnnggaganannnnaaatggaatccacantgagacaccaaaanancnac

SEQ ID NO: 113485 - DNA, 577 bp, Glycine max
  Clone ID: PAT_MRT3847_73486C.1
ggctcgagagacaatatcacaaccattgatttatcaaacaataagcttattggaactattccatcctatttttctggtcttccacgtcttcagaagctgtcaattgcaaacaattcattgagtggaagtgttccatctaccatttggcaggacaggattttaaatggaccagaaacacttcacctggacatgcaaaataatcaacttactagtatatcgggcagtataagtcttcctccaaatgtcacactctggcttttgggaaatcctatgtgctcaaataataacaccttagttcagttctgtggacctgaaactgaaagtgacggtagcatcaatggtaacttcagcgttagctgtctcagtcaagcatgcccctccccttatgtatccgctgtggactgtttctgtgctgcaccgttggttgttaattatcgattaaaaagtccagcattttcagatttccgcatatacacgaatgcatttcagagcttgatgtcaagtggtcttaaaatacatattagtcaggtcttcattaacaagtttgcatgggaagaaggccccacggtgggaatga

SEQ ID NO: 113486 - DNA, 328 bp, Glycine max
  Clone ID: PAT_MRT3847_73487C.1
cccacttgttgtttgacacgagggcggacgcgtgggggcagtggtgaaagactaagctggttgaaccataattcaaaaccatatatcggaaccaattaatactgctggctattcattatacacagtgcagattggccgctaaactcagcgcttcaatgaagagaccatattggtggacacggctggtttttcaaagaatgcaggtcgacgacctatgtccgtgcactgaatagtttccactgggggcggggcgcctctgagatccacaaaatcaggtgtcatgagtgcgcgcgcgcgtatgctgcatacgcagaggctatggacctac

SEQ ID NO: 113487 - DNA, 491 bp, Glycine max
  Clone ID: PAT_MRT3847_73488C.1
tttcttgtttttcccaatttgtccctgcctctcttctctctcacggtctcacctaccatctttccaattgcgatccagatccagaagtggatcacggccaccggaatacccctcactttcttcatgacgacgacacagaagagtaacgcgtcgcaggcggtgcgtggaggtggtcaatttgcgccttcatcatgatgcctttgttgacgtcgtcgaaggtgttcgcggaagcactgaggtaggggatgaagtggagtgttatgttgtcggtttgagttcggaggcgagccattggtggtggtggccgcggcagtggcggtggcggtgggtggagtttcgttttgttggcgtttggctttgccgctttggtgggtgtcacaggttttacggtgcttcaagttttgttttttttgtggtctaattcatatccatttctgcaagacttgtatggagtttgagtttcatttttttctgtttcaaaaaaaaaaaaa

SEQ ID NO: 113488 - DNA, 452 bp, Glycine max
  Clone ID: PAT_MRT3847_73489C.1
taaaagtctcagcagtcagcacaaaagggaggagaagaaagaaagaaagggaatcagttatgttctttctgaaatcagacttcaaacttctgcttctgcctatgatggtccacgttgaaaatcgaagtatttaggttcttaagtcttgataaggattcagtgtaacaacaaacttgtgaactacctctttttgttatatgttatgttttcccaacagaaaagagtgtcaaaatcagtgccagagctggaccaccaaaaggatcttgtttggaccaatggggaccatgttctaaaaggaaaaaaatgtataaaaatactgaattttgaaagagaaaaaattgcgagacccttgcttagaattgctacatttttactatgagtgcgagtaaaacctttatttgtacttctaccttctttgttaaaacaagacctttatacttcagctgatcttg

SEQ ID NO: 113489 - DNA, 367 bp, Glycine max
  Clone ID: PAT_MRT3847_7348C.1
gggatccattgcaaggaaaaccatttaaaagtgggggcaaacaaacaagctaatggattttataaatcggttttacactgtcatccctacattaaagtacaattttatgtttttagccacctcttttatacctttaattccaccgccaacacttaacaattttactatcatataaccccattttgaataggtttagtgctaacaaacatgccacttttcttatttcttcccgcgtttttaatttcggcattgctgtcggaaaatttatcttcatttttatttattccacccccaaaagttagcatttttcctagtaaacaaagcaattaataaaccctcgtcatttttagctggatctgtccgaacc

SEQ ID NO: 113490 - DNA, 479 bp, Glycine max
  unsure (1)..(479): unsure at all n locations
  Clone ID: PAT_MRT3847_73490C.1
nctcttttttttttttttttttttttttttggatcaacagcatgaaagtcaggtcaaccattcaatttaagtgatactttgccatgtaacatgctgaaagagtagcaagacagaagaaaataaagactgaaattacgaatctgctccttcgccatacaagcaattcctggacacatgaactcgttgacgaacaaaattaagaaaaaggccaatgatctcagcaaacaattcttttggttttgttaagacaccaacaagggcaattgtgcagaacctgcaagcatgaatagtatctgacaagttaaagcagttgaagcagcagctattacgtaatccacaccaattcgtaacttcaaagatattgctctatcttttttagatgcactagcactacaaactcttaacaccacgcaactacaagatttacaaaattgtttgccaataggcatatatttttacacctttgacttgcatagcct

SEQ ID NO: 113491 - DNA, 748 bp, Glycine max
  unsure (1)..(748): unsure at all n locations
  Clone ID: PAT_MRT3847_73491C.1
tcggtattgcatacttcttccctggctgaatgccttggttaccccaccgcctgtttaaaaaaaatgggtcctcatctggcatgacttgaatttgtcaagaaaggcagtgtccttcaaagctgttcgggagaaatacaagcaacacaagttcaaatatgtagctaatcattctgcacctgcacatgtaccaagttattactttgaagaacagtgatgcactggaaatttcttaatagataaaattcatttgaaaaaatagaagactttttgaagtgatctactcttatggaacttggtatcttttaaatcatgcttgatcaagcatgtcatgtgttgaacagtgtggtttgttcaaccattgttttgaatggcctggcttaaaaaattgacgggcaaggtttgtgtctttgaattgcaatggcagaaggatcaggtcaaattccaatgtcaattgcctttcctgttgaacaatcatggaaaggcctttaaaaaggaaagagcccaattaacaagatcttatatggtactactgcacaattatcattgtggccttgaaggaaacacaagattcaatcatgatctggactctgccgaaattttttggcagtctaacaacattgtgcatttggagaattacggcataggtacggcataggatgaggtgcagtagctggtaatagacatatcagcttgttttaatataaaaaatatcactttgaatntggaggatttgaacaaagtcaccttg

SEQ ID NO: 113492 - DNA, 353 bp, Glycine max
  Clone ID: PAT_MRT3847_73492C.1
aaaaccacagcactttccttttattaaagaaaaattaaaatcccacgggggggggaaagcaccccccaaggggatatcaaaggaattaccacccccttatattcgggatttttacaactcaagaagggtaaaaaacactcaattttccaaacccatatttataaggcatgggaacaaaaagcttggggttaaaaaaacctaagggggggcaaacactactggctttggaaggtttaaggcaaactgggggccaaacagtttttccacaatggctaaggcaaacccaagggggggtccgggacctctgcggggaaaaaaaaggccataaactaccacccggttttttacttcac

SEQ ID NO: 113493 - DNA, 299 bp, Glycine max
  Clone ID: PAT_MRT3847_73493C.1
ggtcgtcaaatgcgcagtgatgcacacttaaaattttccttggcaacttcaaagtacatcaacattgtctcctacgcctactgttctcttctctgtcacatcaggtatatattatccagtcgtcacatggataccaggtacatgcgactcttttctcatcgaaagcactaacacgattcctttctgatcactggacgagatcacagctctcaacagctttcacgcaatcatcaatgacatccatgcatacttatccagcaaattcatagcatgacagctgataactgccccaacggcat

SEQ ID NO: 113494 - DNA, 120 bp, Glycine max
  unsure (1)..(120): unsure at all n locations
  Clone ID: PAT_MRT3847_73494C.1
cctttcgtcgcnccgnaattcgcaanctctngcatgtaatgaaatccggccaagcgcgncgggncgaganggcggtgtcgcgctattngtgtgcgctcttcccggcttccctgcnctcca

SEQ ID NO: 113495 - DNA, 843 bp, Glycine max
  Clone ID: PAT_MRT3847_73495C.1
atttttaaagtatttattattgtcaaatacttacataatatttagaggattttaattaaaaagatagactaaaaaagtaatgtaaaaaagttaaaaaaatttaatattttttataagaatatttaaaaaaaaagtaacatattgtataaaaaataaataatttttatcataataacgaatttcgaacattttcatatttataaaaataaaaaatatatttgagctatttttaaacaaaattgtcaatgtacataatttgtcacggttaaatgtttaaataatatttagaggctttatataaattttaaaaataaaatatgtgcaattttcttaaaactcatgagatacatatataaattttataaaaaaaaaacatgtgtaatttcgttaaactcaaagaaaatatgtgtaatttacgttaaaatttattaaaaataatctatcatcatgaatttcacctctaaatcaccaagaaaaacattaaataaaaagtgagacatacaaaaatgagtaatttttaacaattttcacaattatgaaataatgtttgatttgcattaaataaaaagtgagacatacaaaaatgagtatggctagcgcacattcttgagtaaatgtaattgtgaaattaaaaataatgtgttttttttcacaattttcatattaaataaaaagtgagacatacaaaaatgaatgtggctagcattcttgtgtaaatgtattgagaacatagaaataatgatgattttttctctttctttgaataatttttgggatgcaatatgtttcaattgattgatgaggacaacaagttcatctttgatctaaatcgcttggaaaacg

SEQ ID NO: 113496 - DNA, 157 bp, Glycine max
  Clone ID: PAT_MRT3847_73496C.1
gtagcctcagatgttttggctggaatcgaccaagccattgctgatggagttgatgtgatttccatctctatggggtttgatggtgttccactttatgaggacccgatagcaatagcttcttttgcagcaatggaaaaaggggtggtggtttcatctt

SEQ ID NO: 113497 - DNA, 551 bp, Glycine max
  Clone ID: PAT_MRT3847_73497C.1
gggaaaacaaaaaaaaagacccccttaatactaattcccaaacaaacccttactttttttaaaaaccggggaattcccatggaaaacaaaaaaaaaacccccccaactaaaagatcaacttgggaaactaaaattaaaatggaaaagatcaaaacccaaattcccccaggttcttgggaataatacctaaaaccaccaggttaaccccgggataataaggaaaaaaaagggccccggaaaaaaacagggggggggggggggtttttgttttccaattcccaaaggaaacgaacccctaaccagagttttgttcgcccttggaagggggctttctgcaaaggatcatgggcctgggaaaaaaaaccccaaagccccccccttggggaaaaaagccgggggtcttgaaaagaatttaaggaacatggagggcccccttgggggcgattcccaaaggggggaaaacagggaccacaattgggttccgccagtacgcgatcctacccattttaaatgggctccccagggaaaaaccgggggtttggccaaatccc

SEQ ID NO: 113498 - DNA, 629 bp, Glycine max
  unsure (1)..(629): unsure at all n locations
  Clone ID: PAT_MRT3847_7349C.1
accaaaattaattaactcccacgcacnnnnaaaaagattaacagaactcaccaaatctcgtggagtatataaaaatattaagttcattctttgatagcagccaaacaacaacttaaacataggtgtttgtagcttcccaatcatgatatatattagtacttcgtacaattttgattccatgcaacaactcagagctaacgaaattttcttacttttggaaaatgttgttgtctaatctatctcatgatatatatgtataacataattgaaggagacaatttaatatgtctagggtcaatttaagctcacctatcttaacaaccttgttttgttgtagctgtcctttatacttcaacgtgtcaattcctttgcccagaagatatatagtgggttactataatgtgaagcaatcacgctcttacttgcccagattttttatgattttatccaatgaatgagcgtggctgnnaaaactgtcgatatatcctatggcctcgccgcgcacctcacaattgtttttcaataggtggatccctcaactgctgttatcaagagcttctttacgaatcttcataatatttcacttgattgtttatgtctttttatcatttagtttaattttgatgttg

SEQ ID NO: 113499 - DNA, 352 bp, Glycine max
  Clone ID: PAT_MRT3847_734C.1
tctacacttgcttatcatatcttaaaaactgtctacttattatataacattgtagaaccgtggctagatcttatagatgcacattcaattgtaaaaccacactatttaatactgatatatcaaactatctatcataaagtcctcatatgttaccttcttaagccgataactaaatatgattatgattataattataaatgagtaatattccttgaacattaagaccattcttttcacttctaccttaatgaattagattaaccagactatttatatattgaatgagacaattacatattgtaattatttgtgatcgacttataatagaatttaatgttgaagctaaatttta

SEQ ID NO: 113500 - DNA, 627 bp, Glycine max
  Clone ID: PAT_MRT3847_73500C.1
ttcccgatacccttgatgaggacagaaatattatgctaccatctacggccatcacattgcttgagccgctggccgcagcattatccgctcattgactggttgactgctaacgcacatgctgtagcgatgatgaaacattgactcaacacaactgaacttgatggcctgcatgcattatactgtctcataaatcctaccactcacctacacgataaatgctgtgcaatcattcgacaggccaatttgcaatgcctctcttcctaccagtctatcctaccttcatctggaaataaccccaaaagatgctttgggcttgccgtgctatctgtgtgtctactactgcctcctaattggtgagtgctgttgaatactttaacaaatgtcatgatcattacgcatcgccttaattagcaatcacaatggctttcatgagttttactaccactgaagataaattttaggaccggatttgcatcgcccctctcataacctagcagatcgcccctaatcacagtcatgcgatcctcaagcttatcgataccatgcgaacactattagtgttccatgaaccggaacactctatatctgtacttattatccctccatgccgatcgctacattacaaca

SEQ ID NO: 113501 - DNA, 2176 bp, Glycine max
  Clone ID: PAT_MRT3847_73501C.1
cacagggagtggtggcatctggaattgccttcgctgtacaaatatggtgcattgacagaggtggtcctgtgtttgttgccgtctatcaacctgttcagacttttgttgtcgccatcatggcttccattgctttaggagaagagttttacttgggcgggttagtcccttccacgctaattaattattcttctccttaattttcttcataatgtccatgatttaatgagttaaaacaatatgaaaaaggcttaaaaataagactaggtaatcttaagaagttcttaaataaatattataaataaatttaatgattatgtatataacacttcgtatattatcattaatataacttttaagataattactataaaaatcaataaatttatcatatataataatttgtgatttgtgattgaatggtagtataaaattattttattacatgtattttttttatcatacttaaattgataatttacattaataaaagagatttgttaaaaatgagtgcatttctattctaacacaacatatataatatctacattaattttagatgttaaaaggatgtacttatttttcaaagatgaaattaaaatttctttgactcatgcatatggagcagctggagatccctgaactaagtactcacactaggcaataatttcatttttcacacttgataactttgaccgcgtattttatgtaatatgcttagtccgaaatgacgaccaaaagtatgatgaaggttatttttgtagtcgggagatttagaaaatgacaaaagccagttaacgacaaggaggaggtagatcatagatgcacagtttaatttgttacctttcggtgagacctgataaaaggggcttcagctgaatgattcaaaattccagagggttaaaaaagtttgaagaattatactatgtaggacacattgaacagaagatcgtgtctcgtgtgcttctttatgttgtttactttttgctccctcataaattaccttttttttttccttctaaaataataacattggttccatggttttaaatatggatatatggcagtcacattgcagtttcgttgcttttgtctatatcgagacaaattgtggagaaatgcgacccatatgactctgtaccgaaaggcctcttcgtaatggattgtttaacctgctatagcttaggtcaagaagaagactatttaaccttatttgccaagcatgtttcccgatattggcaggtcaaacattataacatatcaaaatgttccatcatatcccaaaaatgttagtatgtgattctgtcattgctagctagttagatcttcgttaggtcaagctttctcatcgtattagcatattcccttaactccgcatttctcagggataattgggtcggtactgatattatagatattgatcgggttaaggcttggttagtaggatcaagtatatgaggatacacagtcccctaagtacaaaatgcgtagagatagattccaattacgagtgcaaacagtttaaaatcttgatattgcgtgatttcttgatattgcgttctaaatcacggtcgcggaccatttttttaaaaccttgattggttctaatttggttcttgcctttatgatgtcatataggatcattggtgccgtgttgattgtagcgggactgtaccttgtcttgtggggtaagagtgaagagaggaagtttgcaagggagcagcttgcgattgcatccactgagcatagcatcataaggcccgcaagccacgccaaagcatcacttgctcagccactcctttcttcatcaacagagaatgtttgaacaagatcaaaattccaacttcaaaccacacaccattttcttggtgagaagaagtaaaagaaaaaaggggaaaaaagataccagctataccttactagttactactgctactactacattatgtcagcaagtttgtgtgtgttggaaccggttttcatcttttcctttctttttttttttatttaattcaaatgcttttttagtaggtcatttagaatatgagagaattgtgggaatggttgtaatggtggatgccactttaagtggggctagagcctgaaatccccccatatgcttttgtatgtcaattaatttatggtttgatttaagaaatgaatttttgttttttgggtc

SEQ ID NO: 113502 - DNA, 245 bp, Glycine max
  Clone ID: PAT_MRT3847_73502C.1
cacagacgtttgctcgaaagccactgtggtcgatataacctcaggtgcacacttggcagttgctgtggacgctactattgcattgacaaacggggtgtttgtggttcaggaggcgaaccactagacatgaacgcacggctcacacagcgggcgcaggctgaggcactctcattttggtaaaaatgcggcacatgcatacaattttgatgtaactcgttcgtgcttattgaatgataggaactata

SEQ ID NO: 113503 - DNA, 542 bp, Glycine max
  Clone ID: PAT_MRT3847_73503C.1
ctaactcttctgtgagtggcttctacaacattgctcacacaaggactcaatgaactccaccaatccttcctctcccactcctccttcatgtcattccaattcctttcacaggtcatctcctctctccaatccttccattcccaactcaccattttggtccgcaagctttggttgcccgttggaggcaaatggttggatgaatacatggacgaaagctccaggctttgggatgcttgccatgtactcaagtctgccatttctggaatggaaaattattatttagctgcctctaacatagcttcttctttggatgcttaccattattttactccacaactttcacgtcaggttcatatttttttttatcgtcaaatattaatggttagtttcttagtttttttgttaacaaaaagaattaaacccacaatttttctctcattttcttctttcttaatcatccgactaatactatacacatgttttttttatattactgtttatcatagtgatttcatttgactcaagtaggattattttttatg

SEQ ID NO: 113504 - DNA, 334 bp, Glycine max
  Clone ID: PAT_MRT3847_73504C.1
gcattatcacttggacaagtacacatttttatgatggcggttctgaacaggattcaaaacaatcattcccaggatcacttaacactagccacatatgcctgtctatacactacaaaccttccccaatttgatagcttactggaggcaaattttgcatacacggttattatccatcattctcacccaatttattgttgtagcacctttttatacaagcgtgaagttggagtcttaagatgtgcattttacacgggcatcgtcctttctataattacacgcttggtgtggaactggatcacataagccggaaagtgcaattgaggcactgctatcc

SEQ ID NO: 113505 - DNA, 292 bp, Glycine max
  Clone ID: PAT_MRT3847_73505C.1
ggtgtttttttttttttttttttttataacaacatatatcccatcctcccttttaatttgtctttcattctctttaaagtattcctcccttactgagaaaatgatgcaaacttacgcctggacctgcggacgggttcatgcggcgaagttgcgctctgtgggggagaggggagccaatccccgcttgctactcgagaggaactaaaccctttacgcgagcactgacaggttgtcccctcaccccggagacaactgattaacactacccgcctgagagggcacccgctcaccc

SEQ ID NO: 113506 - DNA, 326 bp, Glycine max
  Clone ID: PAT_MRT3847_73506C.1
aaagggcaaatattacgtttagctggatattcaatccatcatcaaagttttgttcatttaccagaagtggggtgggaaaaaattgaaaaaagatcaacattcaagaactcataaactgctttacattttctccaaggtagcatgaaaagctctcaagtagaaaaatcaaagagaaaattaaaaaaaatttgaaaaaaggacctatactctttctcatcatgctcactaactagccagtaggttcaatatcctttagaagtccaactatctgttgcatgcttggtcgtttgaagggaaggtcagcagtgcaaatataacctatctta

SEQ ID NO: 113507 - DNA, 791 bp, Glycine max
  unsure (1)..(791): unsure at all n locations
  Clone ID: PAT_MRT3847_73507C.1
tatgagtcgctgccgcgtcgtcggtcggcttcggctagcgaattcgaaagtagcaagcagccatggaagcgatactcgtggattgcgtgcagaagagtcttcggcatttcatgcactccaacgccgtcttcctctgccagcgtctctgcgccgagttccccaccgagacaaatctccaattgttggctaaatgttacttgcagaataatcaagcttattgtacgtatcatatcttaaagggagcgcaaatggctcaatctcggtacttgtttgcaatatcatgctttcagatgggtcttcttagtgaagctgaagcagcactgtgtcctgctaatgagcctagtgtagaggttccaaatggggcagctggtcattatctgttagggctgatttacagatacactgacagaaggaaaagtgccatacataattttaagcaggcactctcaatggatcctctaatgtgggctgcatatgaggagttgtgcatattaggtgctgctgaagatgcaactgcagtttttggtgaagcagctgctctttgcatacaaaaacaatacctacattgctcgacctcttctaagttgcattcatcagctgaggattgtaatatagttgacactagacactctgcctcagaagacacaagtcctaggcaactgaaactcatgcagagcatgaaggatatttcctggaatcatcatgggccatccattttaggaggaactgctcaaccaattaataggggnctgtctaatatatcattttataccaccccatctccaatggca

SEQ ID NO: 113508 - DNA, 517 bp, Glycine max
  Clone ID: PAT_MRT3847_73508C.1
gaactagtctcgagtttttttttttttttttttttttttttgagacaagaactagtagtatataaacatatatcataagctcttgggtctgtttcatctcatgcttggtatgtttcaggttcatagacaagtcttctcttatgataaaactacacaaataatatactaacaattacatcacaaaccttaagctgtaatatctgaaacaagatttactagtgtatttcagggccctaatgagttgcaagtggcactccaaatttctcagtcaggcccttaatgtattcctttctagcaggattgtcttcctgtggtcgattatatgctgtccacactggctcgcccttaaacaacctcattaacttcacatagttacttgatcaccggagcagtttcctggccatcatgcaatgaaccggctcagatcagctggcccttctggatatggaaaatattatgtcgaggacaaaagtggttattacggacaacaaaacaatcaccaggggatgataactag

SEQ ID NO: 113509 - DNA, 1347 bp, Glycine max
  Clone ID: PAT_MRT3847_73509C.1
agaatgtgtagttttaatttgttatttgtaggtctattgtagggttgaaacagaccagatacaaaattgaactcatattccattccatctcacacattcatcaatattagcttagaaagccgtggacattgaagcaaacatggaacacaacacgggggtggagggacttagacgcggggtctcatcaaagccttcatgggggtggagggatttatctatgcttggttttccagcaatattcagtggaaggtgatgagtgcttaagggatctgttcaaagcctacatcacgtgaatatatgccagtatcactatctcctcaaaggaaaaaacttaatctaaacaactgaacacgggctaacagaacataatagcagtttcacagagacaaaagctagtagtatgtaaacatatatcataagctcttaggtctgtttcatctcatgcttggtatgtttcaggttcatagacaagtctactcatggtaaaactacacaaatattataccaacaattacatcacagaccttaagctgtgattaatatctgaaacaagatatactagtgtatttcagggccctaatgagctgcaagtggcactccaaatttctcagttaggcccttaatgtattcctttctagcaggattgtcttcctgtggtctattatatgctgtccacactggctcgcccttaaacagcctcattaacttcacatagttacttgggtctagggtgaagcgatgataaattcctgctggtaaaatgataagatcaccagccttgatcaaaatgcgaatccagcgatcatccttgtcccgcacgtcaaagtagccacttccttccaaacaataacgaatctcttcatcctgatgaatgtgctcagtgtagaagttcttcaacttctgttcataattttccaccttttctgggcataaatcaagcaggtccatgtagttgtatcccctatcttctctaatcttggccaactcttcatcgttctcatagatagttggattcagcttccagtataacaccccaaattctgctaattggtccaatgaaactgacttgttgggattgcgacggtgagaaagccttggatcttcattgctatcgtccatcaaccatgcctcaatcgccatgaatgacactcctttcttactctggctcgttctctctatcatctcttcttccgtcgcgtgacctgtgtacgtacgtgtggcgggtgtttccacccagaaaaagaatatcgttatcgtcgggttttttttttttcagattgtttgagtgcttgcgcccaattgtaaactttatctaattttgtggcagataaatgtttaaaattccag

SEQ ID NO: 113510 - DNA, 384 bp, Glycine max
  Clone ID: PAT_MRT3847_7350C.1
gcaccagagtaaggatcattgggggccaattcaggtgctttcttagctaatctccatggaaaccttgttctcttcatcatctttttcctttcctagattcaatttctcatttttctcttttgttcatgttacatacttgaatagacccattgagtgcattcaaagggctctttactctcttcccttcccctaagcaaatttcagggactacaaagaggatgggggtttttctatctcttctcatgctatttgtttttttatggagcatgactctatggaatgggtcattgtgacctttgaattgctcttttgtgcttgagaaattgaatttttatgtgcattatggctctgttttcggtgcagtggaaaaaagaaaaaaaaaaa

SEQ ID NO: 113511 - DNA, 234 bp, Glycine max
  Clone ID: PAT_MRT3847_73510C.1
gcgccctttttttttttttttttttttttttttagaacgaaacaaaatgctatattgtgcttaagagcaaaactcagtaaacattgtcgagtaattgaaaatgatagatagacaaacaaaacgcaaccattgaattactaatcaaagggaagccacatcactcctgtagtagaagaagcctgatggactaccaactgggaaagcagtgctactcctaacagccactaggcaaca

SEQ ID NO: 113512 - DNA, 399 bp, Glycine max
  Clone ID: PAT_MRT3847_73511C.1
ccgggccggcggacgcgcacgctcagagccaccgcggacgctgcaggcaaacttaccctcaatgcggggcgaactatctgcgagcctaccgcggctgccatggcttatgagctcgacacaaaggccactgcctctggggcgacgaatgctctcattttggatctccgtggaggcacttttgatgtctctgttctcaccatagaggagggtatttgcgaagtgaacgccactgctggagatactcactaggcaggcgaagatttctgacaacaggaatggcgaaccattttgatcacgaattcaagatgaagaacagcaaggatatcagaggcaatgccagatctttgaggacgtcgagaacagcatgagagcgatccaatacgactttgtcttccactg

SEQ ID NO: 113513 - DNA, 371 bp, Glycine max
  Clone ID: PAT_MRT3847_73512C.1
gggaccctaaagccccccctgggggggaacaaaagcccccaaaacattatggttcaaaacaaaagccttaagaccccctttttacctgaggaccaaagctttggccaaccccccaccccccttggaaaaaccttcggggaaaaacaaaaccttagggctggaaaaacccccccaaaaaaggggtaaaaaaaataaccgccccaattggtttatattacccccctaggccctcacccggaggggggccctaattaaaatctttatggaaccccggaaccgaaaaaatttatttgaaacctcttttaaaaaggcaaaaaaaaaccccccttccccagggcgaaccgcaaaaaacccccggcggcctaaaaagg

SEQ ID NO: 113514 - DNA, 1329 bp, Glycine max
  Clone ID: PAT_MRT3847_73513C.1
gaacctgtttgaatcatccacggtagcaactcagcacaatgcaagatggaagtgcttcccacttcttccatagagcaatcaacgattacaacaccggcacccgaaagcgccgaaaaatactagggcaagattttggtgatgtccgctggcacaagactggaagaactaaaccagttgtctttaatgggattcaaaaaggctgtaaaaagattatggttttgtatgttagcaatgtaaggggaggaagagctgagaaaactaattgggttatgcatcaatatcacctaggaacaaacgaagatgtataggaaggagagtacattatctctataatcttttacaagtagcagtaagtcaaattgggtgataaatatgatgaagatgttcctgaagcctctgaaattaatgtattaacaattgtgaaagtggatccagtcactcccaaatttgtgactcctgaaactccttgtaatgaaaggtggtgtgcagatctagaccttggacaagaaacacataacagtccgcagcttcctcagatggattgtttagatgagattcaagctgattaccaagaccttgcaaatgaatcatctatggtagaaactcaacacaatgaagggatggatgataaagaaaaaaataccgaggaaggccaaaaatggtgggacagtgagtcacagaatctgttggattcacaacaactggtcgaggcactatcactgtgtgacgatctactccaaagccagtctcccagtagagatggaaaacatgaagatcataagaaccaacccggtctttctgtttatgctcagctaggaccagaaaatctgaagaaggatattgaagagtgtcaaaatcttgcccttgataaagcaaatatagagaatgatacaccttcagagtttcgactaagtcagctggaatttggttcacaggacagctttatttcctggggctatggcaaggcagtgaactaatatggttcttcacctcagctgggcaagctgatgtttttgtaactacattttgttgttgagattcctttcaaaattatgggctaatccttttccccttttggttgaagggctaaactcaactgttgctcctttgcttgactaattgagctgtaatgttaaagcaatgaactttgttgcttgatactttgatcaagtagtattgtaattataccttgttttggcttgttgaagttattgtatcttccaggttctctttatatcttggatgtgtggacctgacttggccacatataagcatacaactctcatgctgaagtaatggacgcaggtgcatgtcactatgttgtaggaa

SEQ ID NO: 113515 - DNA, 293 bp, Glycine max
  Clone ID: PAT_MRT3847_73514C.1
gcgacgcagtcatcgcactcgaacatcacaaccttgtgcaacagaaatgcagcttagtgacaaccaactcagccactacctaccaccaccaacaccaacagcaccaacaccaccaggcggcgccaccaacgcagaccacggctttcgcagatgggggcctcttgccgaacgcggatgggtcccacatactgtacccccactgtgaggcgggcgctaggatcacgcagcttgaaccggctaagccgaagcgcgggcggcccaggaagtacggaacgccggaacaagctctggcc

SEQ ID NO: 113516 - DNA, 241 bp, Glycine max
  Clone ID: PAT_MRT3847_73515C.1
acttcactctctctcttcatcacagttcaatctatactcaaagtctatagaagatgaggaagaattgcaacttggagcttcgccttttccctccttccctctccgatcttcgccccatgtaagctggtcttctctctcttctctttttcattaaggtcatactttgtgatgcgtcttgatatatttgtctatatattaatttgcacaagcttgtactttggattgaattcatggtatctga

SEQ ID NO: 113517 - DNA, 244 bp, Glycine max
  Clone ID: PAT_MRT3847_73516C.1
ttcttttttttttttatgtgtccatgcacacgaattgaactaacgatactatcggagcgtttagtcaaccttatgtacatctagggaaaatgatagcactatacacgaataagggaggtctgtatacatatatagaccgaccgagcttatctctatctgagcttggacacaatcagaccctcacgtaacacgagtcatcacctgatacaactactggaactctctcaatactgttttactgggc

SEQ ID NO: 113518 - DNA, 133 bp, Glycine max
  Clone ID: PAT_MRT3847_73517C.1
cccacgcgtccgaataatttctcactccttcgacattgttctactatcggacgaaggattactcattagcctctttcattgcattgcatgtgtaagttgttatacaaataaagttatatgattcctatttcct

SEQ ID NO: 113519 - DNA, 280 bp, Glycine max
  Clone ID: PAT_MRT3847_73518C.1
aggacacatgcgttgatatcatttgcttttctcataatcttaataaatctgggtgtggttaaattaaaaggacctaagtatttcactataatacactcaatcacgcttactctatctatcaatcacttcatacttcaaataattcattatacatgcttaaaaaccttgtacctaacacatatgcccattactttccttaaaatatagaatctcatattacatacttatattattttactatttactaaacactaatctcatctaatgaatcaattaatta

SEQ ID NO: 113520 - DNA, 646 bp, Glycine max
  unsure (1)..(646): unsure at all n locations
  Clone ID: PAT_MRT3847_73519C.1
tttttttcatgtatgatgtcgcaacctatgcgaattgactgcctctcataactacgcttaaactgagattcatagtttgtcctccaatgacccatcaagttcttgtttgactaattgattcttcaccaactgctgcaacatttgcttaagctgagattcattgtttgtcctccctttcaagaacattgtggaagtctccatttcttcagtgcaggctttcatctcagtttactcttcttacttcttttaaagacgtggttatcatagcaatctttaaatcttttgatcaaagccatggaaaatgacttcaatctgaatcagggttcttttggttccaaatgtacaaccaatgcgtcacagcaccttccaagcttatgaatgcatattgcagcttatacaatgaaggaatttcttgcacctcacaatttttaaaccctaccaatccaaccaatcgcgcttctcctccatgaacactggcagctccaccttcttagcccaaatttgcacttccttcatctctaacagtggctctccatnnnnaccagtgactaacaggaacaacagnntattaactcgactggtanngcagnnggaaagcacagtngnntacnncggaacnnngcccctattgctgnngactnnctct

SEQ ID NO: 113521 - DNA, 683 bp, Glycine max
  Clone ID: PAT_MRT3847_7351C.1
ccacgcgtccggcagaggcaagcgaagcagcagctccgatctgaagacgatgatgaagaagaaggtgcaatggttctggacttgggttcttggttccgtcgttttgaggctcattctcctcttcttccccaaaaatctcaacctctcttctcgccccgaagtctccacccccctcaccagcctccgtcgtctggccgagggttactggctgaagcagtcatcgctgtcaccctatgctggatcaatgtaccatggttcccctttgttattgacgcttctcggcccgctcacagttagaagaattgaaggacaacccgatcatcttttatgcaggtaactttctttgccttttacttataattagtatttattcagatgtcttgttggagtataattgtgaggtgaagtccaacattgggtaaaaatgagaaagttgagtaacatataagcgaaggaaagacctataaacttgattcttaaggttttgagttgaagtgtggggtcaagttcacttatttggtgtgctctagccctattgctgaagatctccccggtggttatcccccttagattgcccaacatgtttgtttccatagcctgtgaatcataattgctgggatctccattcctcaataggtaggatttatactccgaaatgctggttggcattggatcttggatat

SEQ ID NO: 113522 - DNA, 484 bp, Glycine max
  Clone ID: PAT_MRT3847_73520C.1
ggctcgaggtgagttcgaaagtgaatctaggagaagaaggagtaaacaacacaaccaacaaacatcttcgatcttattctagggtttcaattgtgatgtgaatctaatgaatgtaacgggaaaagactgtagatagatgagctccagcaatttgacggggtttgtgttggccgtgctttccagcgctttcattggctccagcttcatcatcaagaaaaagggtctccaactcgccagtgccaatggcccacgtgccagtcagcctctctctgctctcacccaactttttcttttctttctttaaaaaaaaaatacatttttctgggaaataatgtttcattcgtggtcgtgttttgcattgtggcttttaggtgttggtggctatggctacttgcttcaacctctctggtgggtcggaatgattaccatgattgttggagagattgctaattttgtagcctacatttatgcccctgctgttctt

SEQ ID NO: 113523 - DNA, 217 bp, Glycine max
  Clone ID: PAT_MRT3847_73521C.1
cggattaattgcgttgcgggtccagtgcaacatacatcgtttattcctcatcctcctcgttggcctcgggaatcttgtagtatctgagctccgttgaggttttgtttgttgcgatgactctgagccaatcacggagctgttgctttttcaaggactttttggtcaagtacttcaaatagcgctttgggaatggagccctagcggcaatggcaagctt

SEQ ID NO: 113524 - DNA, 1143 bp, Glycine max
  Clone ID: PAT_MRT3847_73522C.1
cggaatacccgggtcgaccacgcgtccgctttctcacaaccatttgtcaatagacacaaattttgcagatgttggcctaatatcttccatccccaatatgaaaattgtagagctggcctcctgcaacctgacagagttccctagtttcttgagaaaccaatcaaaaataacaactttagacctctcaagcaacaatattcaaggatctataccaacatggatttggcaacttaactctctcgttcaattaaatctctctcacaatttactcagcaatttagaaggacctgtgcagaaccctagttcgaatttgaggctccttgaccttcatgataatcacctccaagggaagcttcaaatatttccggtgcatgcctcttatttggactattcaagcaataacttcagtttcactattccatcagatattggtaattttctgtcttcaacaattttcctgtctctttccaaaaacaatttatctgggaatattccacaatccttgtgcagtagttcaagtatgctagttctggatttttcctataatcacttgaatgggaaaattccagagtgcttaacacagagtgagagacttgtggtattagatctgcaacataacaagttctatggcagcattccagacaaatttccagtatcttgtgttctaaggactctggatcttaatagtaatctattgtggggctcaattcccaaatctcttgcaaattgcacatcattagaggtgttggatcttggtaacaatcaggtagatgatggatttccatgtttcttaaagacaatatccacactccgtgtcatggttttgaggggaaacaaattccatgggtcacgttggatgtccttattctaatagtacttggtatatgcttcaaattgtggacttgtcagtcaacaatttcagtggtgtacttccaaaaaactgcttcaaaacttggaaggcaatgatgcttgatgaagatgatgatggatcaaagttcaatcacattgcatctcaagtccttaagttttggtggtatatattatcaggggttctgtgacacttacaagcaaaggtttacagatgggagtttggtaacatcctaactggcttcacatctgttgacttcttatccaacaattttg

SEQ ID NO: 113525 - DNA, 202 bp, Glycine max
  Clone ID: PAT_MRT3847_73523C.1
cctaagggacccgggaagccagactgataccgctctttgcgcacaatctgaacgtgaatccggctagaatgcctgcaccggcacgagctccgtgacctcaccgttagaggattgcgacacctagggcggcgaccaggaagaacctatgtttcatatggcacagcgtcgcatctctcaaaacgaggaaggcgtatgcaacttg

SEQ ID NO: 113526 - DNA, 1094 bp, Glycine max
  Clone ID: PAT_MRT3847_73524C.1
gtaatcccaacctttgggcgttcctgttgggagcttcgaaagcattcattgcccattagcaatgggctcgagcaggtgcaagtgtttgcctatgctttgcttgaaggccaggtgtgtccatgtttaaaatctgttagaaaatacatgtcagccccccctgaaagtattatgaagagagaagcatttggtcaaaaaagggtgggaaatcttttgagcaagttaaagagcaggctgattgatagctctgctatgctcagaatggtgtggaaggagaatccaagggaattattttcagaaattttggattggtttcagcagagttttcacaagcactttgaagagttatggttacaaatgcttaatgaagtgcttatggagaaacaagaaagccctcttcataaaagttctaaaaaaaagaaaggaaaatataaaccactatgaaggaaaagaatgcatccaagctttaaccaagtcagtggtgactaggggaatatccatcatgtattcatcctgaactacctcagcacactaattgccgtagcatggtcaatcacatagctgaactaccccagctttaaccaagtcagtggtggcaaggggcatctccatcactgtattcatcctgaactacctcagcacactaattgccgtagcatgctcaatcacatagctgaactgatttatctgcatgagagatgtttcagaaattctatgctttcagttcgtcctctttggtatgctttgatggaagctgtatgtatagctttgtggggaaaaaattgagaaaattatgagtcgaaattgatacaaattgaattgttcttctcagtcttctatcttgctgaatttattggctaagattttcgtagtgagtagacaaatagtagttggatttggttgctcatgagccaaatttgaatagtttggtgaagccaggagtattaacaatttttgaagaagacttatggagcatattccttgattctacaccattaacaaattctattatactccaagctaatatgctgtctaagttatttctcagcttgtatcagaacatagaaaaggatatatacatcagcataatgaagtat

SEQ ID NO: 113527 - DNA, 331 bp, Glycine max
  Clone ID: PAT_MRT3847_73525C.1
ggcggggcccccaaaggagagaagggggcctaaaaacagccggcaaaaagaaaggggaaccaaaagaaaactcgggcatttttcggggccccgaagaaaggaaacaagggctataaaaccttccggtcgaagccaaaagccccaaaacccggaaaaaactgggggagggagaagacccggacaaaaaattccccgggggtttccacccttcttacatggaccccgagaaaaataaaaaaggggggaaaggtgaaaaccggcggctggataacccggatcaccatcttcccggttgcccctgggagcccccccccgggaaagcccgaaaggg

SEQ ID NO: 113528 - DNA, 437 bp, Glycine max
  unsure (1)..(437): unsure at all n locations
  Clone ID: PAT_MRT3847_73526C.1
ggtttttcctttttttttttttttttttttttttttttttttttttttctcggcatggccacaaaaaggcccgaaaaaggcggccaaaaaaaaatattctaaaaacaggtccgggggcacgggagcatcactgcttaaaaaaaaaggcaaatctggggcgggaggaaaaaaaaaatttttttttttcacaaagggaganccaaggaggaggcaaacggagggcgcaaaccnncaaaaggaacaaaacagggccccggaaaaagcannnccggacccccggacccccccaagcaaggcaaacaccccaaccgggggggaaaccaacanngggcagggaagggccggcanccaaagcagccaggcacccagggccagcagcagaaaaagcgggccaaaaccccggggccggaacanccccagcaggaaacacccccccc

SEQ ID NO: 113529 - DNA, 833 bp, Glycine max
  Clone ID: PAT_MRT3847_73527C.1
gaggcagcaaacatgatgaagaagattggccttcttgaagctgcaaaacggaagttcttgggggaagggttgggggcttgctccattgaggaactgcaatggatagaacaacagttggagaggagtttaagtaatgttagaacaagaaagatccaggttttcaaggaacaaatcgagcaactaaaagaaaaggaaaaagtcctacttgatgaaaatgtcaagctcactgaaaatggcaggctctctgagaagcatggaatcaatctacaaacagaaacaaagaaacagaatgtgaatcaaccccaatacaatgcaggtagtccaagttcagatgtggagaccgaattgatcattggacttccggatacaagaacaaggcgcatcgttcatcaggtttagtagaagattatttattccctggctatggaaaataaaataagggtaaaaataatgatagaataattccaaatcctcttacaatatcttcctgataatccttctaattattaataaaatgaagaaggtattaatttttttctctgtttccaaagtgttaaaatgtttttacaattttcctttaaaactttctttatgaagtattaagaagagtattgggaggatgcatgttataggaggatatattattataaatggcagtggtaattatgggaatgatttgttttgcttgataatatcctcaaaacctatggtctaatgacccgttgtattgatacttatactttagactcagcagttgtatagttgccctcctggggtttgataaatggatgactttccttgagtcttgagccggccccgctggcttttcttcg

SEQ ID NO: 113530 - DNA, 396 bp, Glycine max
  Clone ID: PAT_MRT3847_73528C.1
aaaaaaaccccaaaagaaaaaaccccgggggggttggacaggtttttaccacggggcctttgggcccacacaaagggccatacctgggaattaaataacgggggcccctggggtaaaggcgatttctccatttttccaacggggctttttttttattcaagggaaccgggctaaaagagccctaaaaaccccaactaaggggggaccggggaacagggcacttaaggggcctatcgccgggggggggtcccaaaagaacgctccatggggccccaagggttccaaaggattgggaacctttttcccccaggttttttttttcaagaaaattggcaggaaaggggggttaacccggggtttcaaagggtttctggggaaataacttttcccaggggg

SEQ ID NO: 113531 - DNA, 131 bp, Glycine max
  Clone ID: PAT_MRT3847_73529C.1
gcagacacaccggcgaagccattaacgcctctccccgttaccccaaacactcgttgaccaccagcaaacccacccatgagacgcggagtatttaaacagcaccggtgtttcaaaaaacctgaccctgatga

SEQ ID NO: 113532 - DNA, 487 bp, Glycine max
  Clone ID: PAT_MRT3847_7352C.1
gccggcgtcatccacacaacgacgacggcactatctatcacgagtatgacttacaacttgcactgtatctatcgcactctcagtccctcactcactgatgaccaactctttatacacatacgctaccaccaccgacgtatcctactttgcttaatcaacctatagatccgtcggctaccgaacctgcattcgacttgccgaacatagcacgatatcgaccgctgctatgtatctccgcatatatggctgccagaatcacaacggcacaaggcttatgagggatagacagacgcacgagctagtagctgacaaggatatcggactcagtcataacagcgctgaggatgttgatagagagctcatcactcacaggtctctaacacatcctaacatgatcacgttggacgaagaaacttcaacagcaactcatctggccatagaaaacgaagatgcatcatggtggagaactattgagagaaaatcactc

SEQ ID NO: 113533 - DNA, 732 bp, Glycine max
  unsure (1)..(732): unsure at all n locations
  Clone ID: PAT_MRT3847_73530C.1
aaatttgaaaagagcgatagacaaagagagaaatggcatcggtgtccggaaacataaagggtttttacagacagaagaaaaccaccgccaccaaaaaatcttccaaaaaatctccgattcccgccgcggcccaatcaccggccctcatatcccacggcggaaaacccgacctagaagatgagtacaaggagagcgaggtggcactgcggcaattcgacctgaacatggcgtacggaccttgcctcgggatgacgcggctcgcgcggtgggagcgcgctcagaggctcggcttgaaccctccgcaggaaatcgataggctcttgaagagtggcaaggttcagactgagtccttgtgggatggtcgcatttagggttccttttgtgtatttaggttttgcttaggaaatcagcttctggctgtgttccttgttattatgtgactctaaaccaaacattaaaaaattggtgttgttttcttgcttctggttgttagttgttgttatgaaatcatgatttgcacggttaactcactggctgatccctgctgtaatctgtgtgaatgtgagtatttctaaatttataaattgatgcctgtctcttcactttcaaaaaaaaaaaaaaaannnnnnnnnnnnnnnnnnnnnnnnnnnnnnnnnnnnnnnnnnnnnnnnnnnnnnnnnnnnnnnnnnnnnnnnnnnnnnnnnnnnnnnnnnnnnnnnnnnnnnnnnnnnn

SEQ ID NO: 113534 - DNA, 331 bp, Glycine max
  unsure (1)..(331): unsure at all n locations
  Clone ID: PAT_MRT3847_73531C.1
cttcttacagtatttggttgaaagtttcaattatgtttcctttcagacaaaacgggcaagggataaaaacgactatggtggttatacataacaatctntttaatatcaacagcatcaccaattttggatgcatcgttcactaaagcttatgctttatatgcaattcaatccatgcacttactttttcaaccaccaaaatctccatccaattgattaattctaccaaagcttatttttgtaaactaaaaattttaaatatttcaaatttaataagaaaaatcacattaccaacctttttaccttgctaacaagcataccatgttaattttta

SEQ ID NO: 113535 - DNA, 209 bp, Glycine max
  unsure (1)..(209): unsure at all n locations
  Clone ID: PAT_MRT3847_73532C.1
cnacgccggtgacgttaaagcttcggggaaatttcggggcttcggaggggtaagtttngggaccatttccaatgtcaangtntccaagttcttgcaaattcaacaatnggggctgtccttncctttgctgccgcttcttcnagctccattaattcttcaancagcattcctttcncttncttatnnttcccncnantgcaananagggg

SEQ ID NO: 113536 - DNA, 308 bp, Glycine max
  Clone ID: PAT_MRT3847_73533C.1
gtcctctcgacatgagtcacatttggctaccttcagatactgggatactaagcagtcatgtccagtgcagacacagctactcgcatagcgctgctatgctatgacagtgagacatcctctgatggctgttggcactgctgatagatatcatactgtttacaacttgcagaaacctcaggttgatttcaagagaaatgtttcacccttgaagtatcaaataaagtgccatgctgcattccctgaacaacaaagtttcatggctcgattcatagcatgtacagttggggtggatcacttgggccatagtc

SEQ ID NO: 113537 - DNA, 367 bp, Glycine max
  Clone ID: PAT_MRT3847_73534C.1
attgtcgctgcgatcatcgacgccgtcttcgatcgcgatctcgaaaccatcggcctcgtcgcagccgaatatcggctgtcggtcggcgcctccggcatcggccttggactggcgcgcgcgctggtgtcgaccggcaaggtcaagtcgaatgcggcaggcggcgaatccggagctgccgttggcgggccggcggcgtgtcttgccggcagctgctcgcaggccacgctcaagcagatcgccagcgccgaacaggtcatgccggtgtttcatctcgatccggaccgtattcttacgggggcggacgaagcgcagcgtgcgctggactgggcaaggccgcggctggcggaggggccggtgctgatcgcat

SEQ ID NO: 113538 - DNA, 136 bp, Glycine max
  Clone ID: PAT_MRT3847_73535C.1
ccaataaatactatcctaccctaacactttttttctcatcggagcttccaacaaccgggtgttttcttaaaaaagactatcttcaactccccttgtctctacctaccatctacattacttattacaaccataagtt

SEQ ID NO: 113539 - DNA, 393 bp, Glycine max
  Clone ID: PAT_MRT3847_73536C.1
aaaaatattaaaaggactgaaataatgtccatagtgtccagatataggaatattgtatttcaacaatccaacatgaacttgctgagggaattcacctgtgtcaggtaatttaagatgtagttagcaaattctcactttcctggaatcacataaaatattcatagattcctgtcagtaattgcaaagttaaatttaaattcccattcctggctccataagataaaatatttctgtaggatctctattttctcgactttattattcttagtgcaattggaactattttgcaatcccgtgccactatgcatctagaacatagcatcatattttgtggcatctctccttcataattgtctttggagccatatattcatgcacatacatgcaaaatgc

SEQ ID NO: 113540 - DNA, 236 bp, Glycine max
  Clone ID: PAT_MRT3847_73537C.1
gtcacaccgccgaacaaactgcataagaagggggggattaaagacactacgggggggataaaggactagagagacaaaattggcgatggttttttggagtgggccgatggttgacactggacagccatggaagggtgccagaacaataaataggacctcctttcggaagggctctgactcactcttatccattgacaaccgatgaaggaaacgtgatgcgagcttgcgcatgacca

SEQ ID NO: 113541 - DNA, 464 bp, Glycine max
  unsure (1)..(464): unsure at all n locations
  Clone ID: PAT_MRT3847_73538C.1
tcattctaaagcaaggaatgaagtagcccgtatagcaagaaggaagggtataggaaatgcaatgaacttcatcgtaatagatagatcataatttaatgcgtcgaactcgtctatttagagtgacccctctatgcctactctactaatgacggcatctaattaataatatcgtcataagtaaatagtaggcacgatgccaattccactccattatgagctttcctaattctcctagttgtgcctaatgatccgaggaatgataatgacggctacgaagtaagccgaagaagagctagctactgtcatactaaaataaaggcagtcgcagctagatccaggttaatctaactcatgtgctattaactcaattatgaaatcataggtagctacttccttccaacttaaggcatctgacgctcaattcttattgntgttgtcaagtcttggactctgttaaagtgaca

SEQ ID NO: 113542 - DNA, 239 bp, Glycine max
  Clone ID: PAT_MRT3847_73539C.1
acgaaattcgctcgatggacctttaagcttcctaatcccatgtactacattgagtagtaccttcacctctctcaacaattctgtatccctgcctcaacagattccctctcattaagccgaagcattgaatagatccacgattatccaatgctacggctgaatgagagggaatctgttgaggcagggatacagaatagacgcgagaggtgccgactctgcgcactgtacgcatgggacta

SEQ ID NO: 113543 - DNA, 487 bp, Glycine max
  Clone ID: PAT_MRT3847_7353C.1
tcaactccacaaaccctctctcctttctctcactagcataaagcaaatatgagcaaggtcacgatcctgttcttcactgttctgttcctctgctgcatgatcacccactccacacgccctgaaccagctttatacaaggaatctttggtgtctacacaccctcaggatgttgaggaagttgatgaaagctgtgaaggatttaaagaagaggaatgtttgatgaggaggacacttacggcacacatcgattatatttatacgcagaagcataataacccttgaaagaattttctcccttcttgtattgatggttgtttagtaatattgtacattaggttctggtagcttgtttatttggacaaggctcgagatgctctttccttacttttatgcttatatatttagaactatatttatattattactgtatatgctatgaaatttaaactaccatggaaatacttgtctacctgatagttgtgtgggt

SEQ ID NO: 113544 - DNA, 194 bp, Glycine max
  Clone ID: PAT_MRT3847_73540C.1
gggttttctggggattttcttcttggctcttaacctcatgtttgctaatattctcattcttctgtccccgcatcgtccccttggcagggcacgcgctcgctctctccgcatgtttcctctcactacggactcctagagcagaggtaagatcattcggttgtctttcaacaaatccttttaaccagatccttgct

SEQ ID NO: 113545 - DNA, 368 bp, Glycine max
  Clone ID: PAT_MRT3847_73541C.1
cccacgcgttcgcaaaggtgctcagatttttgaagctctgggtctttcatcagaagtgattgaaaggtgctttgctggaaccccaagtcgagttgagggtgcaacatttgagatgcttgctcgtgatgctcttaaattgcatgagttagcatttccttctcgggttttctctgctggaagtgctgaagcaaatgcattaccaaatcctggggattatcattggagaaaaggcggtgaaattcacttgaatgatccacttgccatatcaaagcttcaagaggctgccagaactaacagcatagatgcatatgaacagtactctaagctcattcacgagttaaataaagcctgtaatttgcggggacttc

SEQ ID NO: 113546 - DNA, 354 bp, Glycine max
  Clone ID: PAT_MRT3847_73542C.1
cttctcttaagctttcttagaaccttttaaatattttttctctcaatccaactcaatccattttatccattcagccattatttaatgataacttgatgtctaaatgatactttctaattacatatttacatatagaaattcaaaatttacaactattcatataattgcatctctagaactgaaatactaaaaaatgattcaaaacctactcattctacttcacaatgttctaatcataaaaactctcttataatcagatactaaaatctcaaattcccaatatactaataatctttcaatattattaaaaatatgccctatgttttatggtgtggccacaccctttttaaaaat

SEQ ID NO: 113547 - DNA, 224 bp, Glycine max
  unsure (1)..(224): unsure at all n locations
  Clone ID: PAT_MRT3847_73543C.1
aattcccaaccttttttctgtttcttccacaccattaancatagcaccatttgatcattttcatagcgcatccaccacaccctccaccaccaccaccgctctgtccaaccttacgcatcataccccaatcatcaacaattaatcgcccaccacctactattccacacctcttataccccaatacaaattccacatcgttccttccactcctaccctcttttcct

SEQ ID NO: 113548 - DNA, 189 bp, Glycine max
  Clone ID: PAT_MRT3847_73544C.1
tttgcttcatcatttcctaaattttatcagggtcatcataacagttactatacctaaagctaacagttaagagaaacccccattgtttttggggggcaattgtgacaattttggtattgaatacaaaattcacaatttttatttttttttgagaaaaattttttttgaaatgaaacacatatttcaagg

SEQ ID NO: 113549 - DNA, 111 bp, Glycine max
  Clone ID: PAT_MRT3847_73545C.1
gggcttaattgtaagtgtatgttctggtttctggggccatgattggtatctacagtttttccacctgaacttttggctggtgtctgtctggaacaccatttttaaaaggtt

SEQ ID NO: 113550 - DNA, 217 bp, Glycine max
  Clone ID: PAT_MRT3847_73546C.1
ccgcggcggtgttctttctataaaataaaattgtcaccataattagttcataacataagatccaaatgcagtcttggggttttttcagaatagaaagttaaactattcaaaatttcaactttgtttttttaaccctgggggacacatagtccgttctgatgtggccttctacgattaatacacctttcattcatagaaaagaaaatgctctaattaa

SEQ ID NO: 113551 - DNA, 139 bp, Glycine max
  Clone ID: PAT_MRT3847_73547C.1
ctaccccctaaccttttatcaatatacttccacaatctcattcgggggtgtttaatatacattccataaacccactcttcatattttccccagtatttcaagtttacaacctctcttaacacttcttatgtttagagtt

SEQ ID NO: 113552 - DNA, 719 bp, Glycine max
  unsure (1)..(719): unsure at all n locations
  Clone ID: PAT_MRT3847_73548C.1
cttcctacggctgcgagaagacgacagaaggggggttttacttttcttctcagtaacaatgtccttcattcccgacgagatttgaattttgaagcatatattattgatcccttcctcgtcgaccatcgatttgcactgcacaaatactcggactcggagaccccttcacggagctccgtcgtgggctcgtggccaagcaccacggcaaagatcggtacctgctctcatcgccggtggcctcaaggacttgggcaccaaaaatcccgttctctacctcgatttcgaagttcccgcctaattcacacggcttatgctgaagacactgctgctgctgctgcaagaaaataaaataaaaattgccaaaatagggaaacacaaaattgttggtggtgttgaggtgctaattagaggacaaattgcaaatggctacatctgttaataagattggacactggaagcgaaaagagttgtggtttcttgtaatttatgcaatccttttctatgttatcatcatcaaccgttcacttcaactctctcgtgattattacaaacagcttcacggtttacgcccgggatggctcatagctcattacctcaatgatgtttcagatgctcagtggaggaatttgcgaggaaatatacctgttcttactcttggtcttgcaattttcactctgctggccaattcatgagggccttcattttagagtgaanggaat

SEQ ID NO: 113553 - DNA, 877 bp, Glycine max
  Clone ID: PAT_MRT3847_73549C.1
ctcactaaatctgccttgtagtagtagcattacaagtatatatccgtgtttcctattaataaacaacaactaggatgctgtataatggaaacgaggcacaactctgcaccaaacccctccccagttttgctttaaacggaaaaggatggaaaaaagagaccattacttcttcagcaaagacaaaaaaatcttcatggggatgcctcctcatcagaaaattcatcagcagctcgaaactgcttcaaatctgtactttctgctatctgtaatatttggagtggcagggacaactacttcataaagtagtacagcatctctagctgtgtgataaaattcaaaagcaactcttgtagatgacaggcaaacatcctgtagcgtctgatgaactagctccatcaattgtttggctgctttggatactagacacctctgtgataagaaaagcaaatctaccacatggttggatgactgggcagaagtttcatcactcttccaaatagaaccatcccttgtatactcttgaggagttgaaaagtcacattctaaaagcagatttctagctttagccaagatctctgtctttttcttaaatgcaaagtgaacctcaacattttcaagcaaaattgctcaaacttactatctggtgatggaactatcttcagtaaagccgattcttgatgcagttcctcaagaaaggatggagaaggatggagcagaggtggattcttttctcttccttggggcagcattttccgccattggagcatcggatgaatttgacatggccgcggccgtgtttgttgcgacctccattcctgtgcttgaatgtcatggtcgatggttgccgaaggttgcacactctagaacgcgagggcgt

SEQ ID NO: 113554 - DNA, 495 bp, Glycine max
  Clone ID: PAT_MRT3847_7354C.1
ggctcttgacatctattgcgtttttttttttctctctcctccttataaaccaatcaaccttagctttatccagatccaaaattcagagtgtggttggttgtgttgtgaaattgcaatggaggtgttgaaagttcaggtttttgtgatgtccattgtggctcttgctttggcttatgtggcaccttccatcaatgctcaggtccttcctcctgcccctgcacccacaagtgatgggatagcagtggaccaaggaattgcctatgtgctaatgctgttggctctggtccttacttacatcatccattaacccattcatctattcactatgtttttcttctctgttgtatttatttcttcaactctattctttcaatgaaattcttttttattatgtgtacgctagtctgagctttcgttcttctctatatattaaattcggcaaattagttattttcattaaatgaaaatagtagtaatctgttgtcaaacctaaaa

SEQ ID NO: 113555 - DNA, 276 bp, Glycine max
  Clone ID: PAT_MRT3847_73550C.1
tgcgcttattttggaagaaaggcactgagcggcttggggatgtctttcattgtccacatcactcagaaacccgcgaaagaaagccatgccaacaacaaagaccatgggcaaaatgcgagcagcaatgctcctattcctagttcactgccagatcctcctatgcccgtcccctggaggagataaaagtcccatgaagataaacatgcgacaccgcggcccatagatcctgttcagagaaattccgggatcaccgcacaaggtgccacgcagtccatc

SEQ ID NO: 113556 - DNA, 2267 bp, Glycine max
  Clone ID: PAT_MRT3847_73551C.1
tttttcacaagacctgaatgaaaaatgctatttccaacatttgtgccacaatcgtttatctatcagcatctaaaaatggtctcactaaatctgccttgtagtagtagcattacaagtatatatccgtgtttcctattaataaacaacaactaggatgctgtataatggaaacgaggcacaactctgcaccaaacccctccccagttttgctttaaacggaaaaggatggaaaaaagagaccattacttcttcagcaaagacaaaaaaatcttcatggggatgcctcctcatcagaaaattcatcagcagctcgaaactgcttcaaatctgtactttctgctatctgtaatatttggagtggcagctcaaactcgcatgatttttgcctaggtgaccgatcatctctgactctcaaactccagtgtgttcttcgtgatttataaatttagtaggaagttagatgaattctaaatgctcgcattttgtatcctccataaacaatcttttcttaaaggtgagtctgtaaatatagcttttatgaaatcttccacctcagttattgtaaagccacaagagagcaattctttattctcccaatatgctgtaatggattttaaaggcatatctaataattctgatagtttacggattttatgtaaggatgggataagatcttcaagagactctgcagggaactcatgtaaattctgttctccaggggccagagactcaaataatgatgacaagttttccagcattaaataaataagtctttgtagctgtaaagtttcctctgcagctatgtcatctaacagaagtatatctctggcaattgttgagaaaaatgactctaagactgtacacatgcttctcctgtaagttgaaggcagcaaaagtggctcccatatgatatgtactttttccagaatgaaaacaacctggtctatgctgaatttagctgactcaaactgtttcatctgatgagtattctgaaatccatcagcaccatctatagcctccttcaaattataaataacaaggtgaacttgtctctgcaatatttcttctgccaacagctgaaatcttggagctaaatcaacaaacacagcatgctccttcatggaacttggaaagtctgttcgatactcaaatgcaaacccaagaatctcctgggagagataaagacagtcattatgcaacagaatggctacttgattgatgccattgagctgcctctctagcttgacagggacaactacttcataaagtagtacagcatctctagctgtgtgataaaattcaaaagcaactcttgtagatgacaggcaaacatcctgggcaaattttcatttgcattgatcagctgtagcgtctgatgaactagctccatcaattgtttggctgctttgaatactagaaacctctctgataagaaaagcaaatctaccacatggctggataactgggcagaagtttcatcactcttccaaacagaaccatcccttgtatactcttgaggaattgaaaagtcacattctagaagcagatttctagctttagccaagatctctgtctttttcttaaatgcaaagtgaacctcaacattttcagcaaaattgctcagcctgttatctttgtcatctgattctgaaatgtacataagctcttttaaagccatctcaaatttagatgtacaagcaatgatcttctgaaagtcaggaagttttgatgcatctgttgggacaaccttcgaaagaaagctagatattattagctctgatatcctaggccatgtcaaccgtccaaaacatcgcatccaagaacttttctggaagcaaatacttctgtaaataaatttgataaacagcagaatccctgaatagagaaactctccatccaaatattcaaacttactatctggtgatggaactatcttcagtaaagccaattcttgatgcagttcctcgagaaatgaaagaggtcgtccatgatttacaaaaggagtaataacatacttgatcatcaaatcagcaactttagcaagcccatactctagaataccaactacatccattgcctccagaactgtttgtaattgaatcccattcacattctcaacttctaagtgatacttgatttcaacttgattcaaatccccatcaaatcgtactgccttttccataaagttcacgaggacctcttgaatctacaaacccaaatcgaattcctctcttcaaagcactgagaccactccttcctcaacaagc

SEQ ID NO: 113557 - DNA, 196 bp, Glycine max
  Clone ID: PAT_MRT3847_73552C.1
gacagcatctgctcatcatgcagctgtggattgatccggacacgcttctggacatgttcactgacaaactcgcgcagatgtttagggcaaaatacctacagaagatccttctaaggaagagtgggaaacttttgtcttgattaaaaagctccgtctttcgaaaagggtagcaccacaaatcgagaagccagatcca

SEQ ID NO: 113558 - DNA, 417 bp, Glycine max
  Clone ID: PAT_MRT3847_73553C.1
gtcagcatacattaagaggtataccattagcaaagggaggcagccgttttttagattttaagtgaaattagaccttgactccttgccccttacctcctgtcccagtcaaatggtaggcagtggattgacggagtatgtaatgcatattgcagttgaatacaacaatgtgctaactcaactaaaattgagatggaaactatctccaacttattagaacatatatgatttcagtatggaattaagttataatatggaaattatcttccttttctatcaacataatcgtgcagtgaaatcttagctataaattcatcatagtatgatttcattaatctttaatttctcttggcgatcattgaaacagtatgacgattcattttccatttgaccacaagacttatttttgaaactcatgac

SEQ ID NO: 113559 - DNA, 468 bp, Glycine max
  Clone ID: PAT_MRT3847_73554C.1
ttttaattgttgcactcatcttaagcttttggttgtaatgttatgttctaatgagttatcctgttccacagactgccataaaaaaaaaaaaaaaaaaaaaaaaaaaaaaccaaaaaaaaaaaaaaaaaaaaaaaaaaaaaaaaaaaaaaaaaaaaaaaaaaaaaaaaaaaaaaaaaaaaaaaaaaaaaaaaaaaaaaaaaaaaaaaaaaaaaaaaagggggcgcccttttaaaaaaaccaagtttacattccccgtgtttcaaagtaaaaattttttttatggggccccaaaaataaattcaatggcccggttttaaaaaactttagaagggaaaaacccttgggttacccaaattaattcccttggaaaaaaatcccttttatccaatttggtaaaaaaaaaaaaagcccccaccaaagcccctttccaaaaatgggcccaccctaaaaaggaaaagggaacccccc

SEQ ID NO: 113560 - DNA, 602 bp, Glycine max
  Clone ID: PAT_MRT3847_73555C.1
gaaaaacagacaccaacttccattccctctctatctttcaccttggttggttggtgggtccacctttgccttctgaattctgattagattacacacattctaacatcagtaattaacctcagaacaaatccacttttctcttttacttttttcctctctgcttgtctgttcttcatccccacccttttcctgagaccgagatctgtgacaccctttagaatttggtttgtgatttgcatgttttctctgattctggtcttgttctgaagctgctggattcatttttgtgggttttcccttcgaccctttgtttggtttgagtctctaattgggtcggtattaaaaagttgggcacttgtgcatttcttggccaatcatagttttgcaagttgtgttttttattattttttttttattttacttattttctttataggtttttttggtatcagttgttgggtttttggccttttggggtgttggggattgacatagttttgttgtgggatttgtgatctttcaatggactgtttcgatgaggcgaatggggagcttgaaaatgttgtgagtgttgggtgtagtgaagagggtctgagaaagag

SEQ ID NO: 113561 - DNA, 241 bp, Glycine max
  Clone ID: PAT_MRT3847_73556C.1
ccgcagtaccgtccttataccgggtcgcttatcttcctttcggttttatagactactaagtttaagtaggtgtgagcataattgggggggtttgaggttgcacctttctgtttatggaataagtgtgagttctgggaaggtccttggtttggccttggatcatttttggcttgctcagatgctataaatattttattggtttttatttgatggtgattttgttggaatatgtttatctttt

SEQ ID NO: 113562 - DNA, 216 bp, Glycine max
  Clone ID: PAT_MRT3847_73557C.1
cacattgaaacacactaaaactgaaattacagaaaacagggaaggaatcgaaacaactggccttgagtgtccataaaaagcaataaacacatataagacaaacaccggctactgggaagacaaaagatcccaacccgaaccgtaataacatacacgctttaaatagacccggttcagtatcagctgtctgaatactcttgaatataaactaagcct

SEQ ID NO: 113563 - DNA, 884 bp, Glycine max
  Clone ID: PAT_MRT3847_73558C.1
ggctcgaggacttagtgaagtgggtgaggaaaggattcgatcaagaaagcccgttatctgaaatggttgatccatcgctgctccaagaagtgcgtgttaagaaagaggtgctggctgtgtttcatgtagcactgtcttgtactgagggagaccccgaggctaggcctaggatgaaaactgtctctgaaaatcttgataagattggaacgtaatgctcgaacatgtgcagtgtgctagctctaggactcagcctgagactgcagtttacacaaaagatgcatttcaatctaacaacgcatttctgtgataacactgagaaggttttatgatgtgcatcaatatggtgctgcaaacctgatccttccatcttggataagcccctttacatttgttttggaactcgagcaatttttggagagctgtaattatcatggtctcacttacattccattctcattttattattttttgttacatatcaggaaattgttagatattttatttttttgttctgatctcttttcctccaaaatgttattgcaataccacaacgccttgcattatcatttaagtttccaaattaattcaggttggtgttgtgcatgtgccattggtacctgtagccgtttggggtttgggaaagggattatttgggttggaatttgttaggagtgaactagtaaaaatgaacgcaaacttgaagaagttgaatagagagagggaaaagggacctcggaaactcagcatggggattatagaaagttttaaagaataagtctgatgtattttatatatataaggatcctataattcctcatctattaaaggaatgacagctgcacaaattacctcagttgtaataaagcctacattacagctaacat

SEQ ID NO: 113564 - DNA, 606 bp, Glycine max
  Clone ID: PAT_MRT3847_73559C.1
atgctagaatatctgtaatgggtggtgctcaggctgctggtgtgctggcccaaatagagaaaggcaacaagaaaaggcaaggaattcagtggagcaaggaagaagaggataagttcaaagggaaagtggtggaggcatatgagagagaagcaagtccttattactcaacagcaaggctttgggacgatggaatcattgatccagcggatacaagaaaagtgattggtttgtgcatctctgcttccttgaaccgtgccattctaaatacaccatattttcggataaacacaatagctgtagctggagaggagattcgcagaagaagataagggatgtttgggttaatcggaagaaaggccaatttgttggtaggatcgggaacaagaagaaggtgtgttgagcttcgcaacaacatgccacaaccacttctaatggtggtgcgcatggaggagggcttttgccattgaaggacattgatgaatgtgggtatgagagggatagtgggtttgtgtggctgaagcagaagaacagcacacaccacaagtttgagaacattgggaatctggtttcctatgctcgtgagatcactgcctatcttgacgttcg

SEQ ID NO: 113565 - DNA, 445 bp, Glycine max
  Clone ID: PAT_MRT3847_7355C.1
accagctccaccagagcctccctgcacgcgttactaccgtagaaaaccctctgcagcagatccaaaaacctaaacgtgttagcatactcggcgtcccacggcttcaggtactccctcctcagatcacactcgtcaatcatcctatccccaccctccgaagcccttacgacaccgtttccgcacacgcgacccgatttcgccgcgaaataaataccctcacccgaacacttggtcacgtagccagcagcgtctcctacgagcgccacgcgtcccctcacccgaaccggacgcgggtgttccggaatagggtgcgcctccactttgatcactttcccaccgttgatctttggtttcactctttccctgatcccgccctggtacagcttaatgtcttctttgaccgcactgtacccgtgcccactggcacgtggtcgactggggaaaa

SEQ ID NO: 113566 - DNA, 436 bp, Glycine max
  Clone ID: PAT_MRT3847_73560C.1
aaggttttgcagatggaatgtaactttaaagaacagcttaaagaaatccatgatgctttagacagtgtaatcattgaattggatgaaacaatatgtgaaagaaatgaaaaggaatttgaattgcaaatatggaagtcaattgttgagcgcttgaagaatgatcttgaagaaaatcatgtactgcgtagataatttgattacttcacttcttgcacaagtagattttggtgaaatcctcaagcaagaaaaagttagcttggtttataagttggaagagaaagagaggagcctagattatctgcagcgacatgttgagctattggaacgtgagctaagagaaaggggagaatcagaggtgtcctctgagtctgataatgtcaggtatctccagatcatagcggagaaggacaagattctagaagagctccagaaagag

SEQ ID NO: 113567 - DNA, 336 bp, Glycine max
  Clone ID: PAT_MRT3847_73561C.1
gaagataatggggctatatagccaaactcttatttaagctaaagaagatcacactatagtttaaccaatggagctttaaacacatccgctaacacacaaggaatcacactgcgtttcatacattaacacactgaggggataactcgaggggttaataaggaactctcatagtgttatgtggcgtttagctgtgtgggtgtaatcacaaggggtttcacgtcactatcaactgggtctcattttgatgcgatttaagaaattcaaaagaatgagaaaagattgggcgaagagtgagaatgagaccaattcgaagggcgtaaaagatatgtgccagga

SEQ ID NO: 113568 - DNA, 491 bp, Glycine max
  Clone ID: PAT_MRT3847_73562C.1
acgaggtaaatttgatggattaattagggggtgataagagaggcagcttaaattctgaagttaacaaaatttgatttaggtgtagcatctatgtactttgagtttttaggaagatagcacccaccatagaccaattaataataacatctccattcaaaatatcgtctagaaataggatttaggtgacatgctgctggaataggttgtaatcatcctgcttttaatgattaggactgcatagtagttataatttgaaactgtcaacttccattttaatataataattgaagacatgtagagaaatctgaagcctagaatttttttttatataaaaaatgttatatgaaatgtatcttttggttgtcgttggtgaccatggaattttttttcatgtgtcaaaaagaactgagcccaagaatgaattgtttgccttgtatttgtatataattatgtatgtttgtaacttattttggttggtaggtagagaacat

SEQ ID NO: 113569 - DNA, 1245 bp, Glycine max
  Clone ID: PAT_MRT3847_73563C.1
gaatctccgtattgattagctgatccacccaattcccaccactctcagacgacaagcagcgtacgttagcacccgaccggttctgtttcttcctatgttccacttcatcactccacaacaaaactagctaccaacgatctatttccattttgtggtcgcaatatctcaccttaaattcaccaaagtcgcatcctttttcgagaaagcgaaagcgggcaatggtgggatgaggataaaaggggaagagaagaagtcgatttgttcctacaagaaaatcactcttctaatttgccttttcaacattgttgttgctctatactctcttcgctctctctatgcttctctccatatctactctggtagcgttgcacgaaacattgtggtgtataggccagatcagattcggaagatggaagagtctaaccgaatccggaaggcttacaaaccagtggagttgatgaaattggtgaaggaatttgaaggggagttttcaggagaaactgtggtggttgagttgccgcggcatttgaaacagaaaataattgatgaggtcttgcagagactagggagcttgaatggaagtagcaaaaacatctctcactcccaggtcatggccaaggagcgagaagcaattgaaaattggcgcaaggaaaaattggaggagggtaagttggctgttgtccaagggacttccaactcgaccattccccatgaagaggcaggaatgctagtaagagctttggagtctgattgggctgtgctttctgaagaaattggcctttggatacctattgaggttgctaatgaagaacataatgacaaacctgagggtgcatcagagatagaggaggaagttcttcccggcagaccccttccacctgaatgcaatcctgaacttcatacggactatgatggcactgcagtaagatggggtcttactcatcacaaagatagtgcagctgattgctgtcaggcttgcttggaccaggctaaacgtgccaaagaaggtgaaaataaatgcaatatttgggtttattgcccatcacaatttgggtgtcattcaccagatatctatcaacccaaacatcaggaatgctggctgaaatatgtaagatgccccccatgaatgtgattcactactttgccccttctctgtgtagaatgcttaatagcctttgattctatattctctgtgagatcttacaaaatactctgaaactttcaaataggagtttaatttctctc

SEQ ID NO: 113570 - DNA, 478 bp, Glycine max
  Clone ID: PAT_MRT3847_73564C.1
acggctgcgaggacgacagaagggcctaaaattaaaattaagcctcatctttgtcaaagttggggaaacctgtgggcaacctaccctcttttttatttataaaaacaatttacttttatataattttaaatgaattatatattaagttattgattatgttttaatttaaataatatataaaattaataataacacatacaaaaaataattttttcaagtattaaattacatttttatttatttgtataagtttacttttattatttagtcattacgtgtgttgcaaaacaaatttgagggcaaggtttcacatcctcagtctttattattgaactcgactccattctacataatgaagaaagcttgacctcaactctagtcaaaacaagtttattttcatctaaaggttgagtcaagattaagctaatatttataagtttaaatttaattattatgcctaattcataattactttcag

SEQ ID NO: 113571 - DNA, 992 bp, Glycine max
  Clone ID: PAT_MRT3847_73565C.1
ttttttttatctacttcgaccttgagcctacatcattaaagtatgtgtctaaacaaatacgtgatggtactcctgagtatcattaacacttggaattcaatgccaaacatagaatgtatcgtggccaaaccattcctatataatcatcagattgaaaagaaaaaaaatgatgtgaaatacaaagcttaaaatttacatacaaagactcaacaaaaaacaaggcagtctttgagttggaacatagaagttcagactggaatggagggttcctcatttggttcatgcaaatttgcaatgcaagttcttgactccaaggagtgaaggcctcttagaacttctaccatggatggccttttctcaggcaccacagaagtgcaatgaagcgctatgtctaaagctccaatcatttcttggtgacaagtgtgtgatattttagggtcaagaacttgttgcaccccattagtgatattcactttccttctgacccacttcacaatgtcaagtgagtcatttgactctgtttgctctgcttgcctgccactcactagctctagcaataccacaccaaagctgtagacatccaattgttcagttgctttcttagtgtagccattttctggtgcaatgtaacatgaagatgctgcttcagagttcaaaactgattgaaaagcagcttctcccacaactcgatcaagagcaaaatctgtgagttttggctcaaagtttgcatccaacaaaatgttacttgacttgacatttctgtgaagcaagtgagggacataatccttgtgaagatatgccagtccttgagcaactccaatggcaattcttaatcgaattccccactgcaactgaaaattcggactagaaatcaaatcctctaagctccctccatgcaagtattcataaatgagaaacactgactcatcagagtggcagaacccaagaattttaacaacattcttatgcctgatttttgccaaagtcttgac

SEQ ID NO: 113572 - DNA, 443 bp, Glycine max
  unsure (1)..(443): unsure at all n locations
  Clone ID: PAT_MRT3847_73566C.1
aaagaaaagatacgagattatattatttgtcttggtcgtacaccaagctgacgattgaaacaaagaaaaccttgtgaacatttcaatcattcgaaaaacatactaattgttgcttgagtttcatgaccatcttaagtttaatttggtcaccttgttcgtatgttattttatcaactttggactaatatatttcttccagctaacataatcaatatgcataaagtgtcaatccttattctttaagccagttgacaagcctattaagattctctaatgatcgacctccattggttatgtttttcataactttgtccttcaattccagagaccttgaatttatgttctcatcattaaaagagtggtctacttttcttttaactccatgcgtgacacgagtccatttntatctttgtcaactcccagcccgaccttcaactcatcac

SEQ ID NO: 113573 - DNA, 216 bp, Glycine max
  Clone ID: PAT_MRT3847_73567C.1
gagctttcaattggctcaggtgaggtagtgatctgcgaccgtggggtctcagcaatagctgcatagtcgtatgtttcagatgtatgtcacaagcatcactctgaggtcgtgcgcttcttgcagtcagtgaggtgcttggagtgtaggtttgaatgttttaatgttcagcttgcaactgtctattcgcccggacagggtccgtctcctgggacttca

SEQ ID NO: 113574 - DNA, 1026 bp, Glycine max
  Clone ID: PAT_MRT3847_73568C.1
ctccctcctcatcccttctctactccattatccacacaacttgcaactcttcccggatccccaacgccatacctcagatctgtacgtcgtcgtttctatctacctcttaccgtttccgttcaggattaataatttagatcccctgatgttgcaacagaacaaggaatcttcttagattctttttctgcgtttattagcgtttcacaaatagagagagagaaacagaaacagaaacagaagaagaaacttttcttatttatatacagtctctgattgatcggtttttcggaaactctttttccgtgaaatccacgcgcgcgcttcggttatggatttggacgatttccgatccgtattggacaccgcgggcgtcgacgtgtggatgttcatcgacgccgcaatcgccgtcgcctccgcggattccgccggtgagctgaagcgccgccgcgacggaatcgtcgagcgcctctacgccgccacggcggctactccgaagtgccggatttgcgacgacggaggcaatgacctcaacggtcaccaaatcaagaagcagagcagccccagccctgaacggcaaccgcaccaacgccgcgccgctgccatcgcagctgccgcttccccggcgacgccgcagtctctcgaaaacgacaacgacggcgaggaggatttagatccttacggtggtttgttcgacgacgaacagaagaagattctcgagattaaagagcaactcgaagagcctgaccagtctgaagattctttggtggagttgctgcaaagcctagcggacatggatattacattccaagcgttgaaggaaactgacatcgggaggcacgtgaatcggttacggaaacatccttcaaacgacgtacggcgattggtgaagttgcttgtcaggaagtggaaggaaattgttgatgaatgggtgaagttgaatcctcagggaagaagcaacactctgatggctgatggagactcgccgcctgtgcagaaaaccacccaaaatgggcatcatcatcagca

SEQ ID NO: 113575 - DNA, 415 bp, Glycine max
  Clone ID: PAT_MRT3847_73569C.1
tcggctcgagtttatatataaatataaacatataactgacgggttatttgtggtgtttgtgcggtggtgtatttatagccaaaaggcaaagaacgattcaggtgatggacatccatgagttaccgaagtcaaaacccaagaataatgccttctttgggaagaacaaaggtggtggtggtggtggtggttctcagggaaggcactggtgatggtgattactattatgatgatgcatgtttttccattgttggtgccattttgcgtgtaaaaaagccttgtgggaggggtgcggatataagtcaagtcccaaaccctgttcatcatccctgtggaatttttctccataaaccttttttttttccttgtggtttttatttaaattaataaataagcgaagaaaagaactcctcaatat

SEQ ID NO: 113576 - DNA, 739 bp, Glycine max
  unsure (1)..(739): unsure at all n locations
  Clone ID: PAT_MRT3847_7356C.1
acgccggaaccggggccgcagccagatgctcagcaccatgaccaagaagcagaagaagcacctccgcgacttcggcgaggagcaccccttctacgacagggtttccaagaaggaagccaagccgcagatttgtcagctgccagagagttcagattcttcacattctgaaagtgaatcagagagtgaacaagagcacgtttcagggtaccacagactgcttgctacattaaagaatgtttctgaggaagaggaagaggaggaggaggaggaggaggaggaggaggaggaggaagaggaagaggaagatgacagtgctgtaggtgatgcagaaatgaatgaggaagctggcagtgaggatggcagtgtgggagaagctgctgtctcggaggctgctgaggaggctgctgagacacaggaacatatgtctctagctgacaactcaaaagaaaaagatggtgaagagccacctggtgtatcacagaaatcctcagaggagttcacagatgtgaaacacgagtcactgttcagcctggaaactaattttctagaagaggatagcgggggcagttgttcccagaggccatcccaagatccgtttcaacaacatgtcaacaaagaactgaaagagaaggaaattcaagctgctgcttccagccctccagctacccagcaactgaaatggccagtcctgggacatcttgtcttttcataaagtncagaagacggaacatttaaacct

SEQ ID NO: 113577 - DNA, 2299 bp, Glycine max
  Clone ID: PAT_MRT3847_73570C.1
ggaagaagcaacaaattctctactccattatccacacaacttgcaactcttcccggatccccaacgccatacctcagatctgtacgtcgtcgtttctatctacctcttaccgtttccatccaacaacttgaaactcttccgccatacctcacctcagatctacgtcgtcgtcgtcgatcttctgttcagaataataattttagatccctgatgcaacagaacaaggaatcttcttagattctttttctggaagaaagagaaaacagaagaagaaactcttcttctttagacccgtcttatatatttatatacagtctctgattgatcggttttttcggaacctctattttcactcaaatccacgcgcgctcttcgggcatggatttggacgatttccgatccatattggacacagcgggcgtcgacgtgtggatgttcatcgacgccgcaatcgccgttgcctcctcggattccgccggagatctgaagcgccgccgcgatggcatcgtcgagcgcctctacgccgccacggcggctcctccgtggtgccggaattgcgacgagggcggccaccgcctcaacggccacagaatcaagaaacagagtcgccatagtcccagccccgaacggcaaccgcaccgctccaccgccacagcttccccggcaacgcccgcagtctctcgacaacggcgaagacgaagacaacgacgaggatttagatccttatggtggcttgttggacgacgaacagaagaagattctggagattaaagaacaactggaggagcctgatcagtctgaagattctttggtggagctgctgcaaagcctcgcggacatggatataacattccaagggttaaaggagactgacatcgggaggcacgtgaatcggttacggaagcatcctttaaacgaccttcggcgattggtgaagttgcttgtcaggaagtggaaggaaattgtggatgagtgggtgaagttgaatccacggggaggaagcaacactctgatggctgatggagactcgtcgcctgtgcagaaaaccactcaaaatgggcatcatcagcagattcctgattttgcatactcgcccaatccacacaatgggagctcagggtctgaccgtaacaactcagaagcagaacgcaaacccaaagtagttccccgcagtgaacctaggccaaaacacgcgccatcaccgtcagtttcaacccctgcttccgctactcaaaacagacagagggagagcagttttgacgcggagaggcttgcttcggcgagaaggaggcttcaagagaactacaaagaggctgaaattgccaaaaggcaaagaacgattcaggtgatggacatccatgacttaccaaagtcaaaacccaagaataatgccttctttgggaagaacaaaggtggtggtggtggtggttctcagggaaggcactggtgatggtgattatgatgatgcatgtttttccattgttggtgccattttgcgtgtaaaaaagccttgtgggaggggttcggataagtcagtcccaaaccctgcttcatcatccctgtcgaattttcctccataaaccttctttttttccttgtggtttttatttaaattaataaataaccgaagaaaagaactcaatataatttttcttttcttcttgaaagggtacctatcgaaaccgcgtttgtcggtttgttgaggagcacgtgatttcagggaacagggtagaggggatgggatggaaggggtagggctaaaaaaggtttttccttatataaaacatctttttttttagggtgaagtttgaattctggtatattaggtttaatggatgcattactccattaattgcattttagccttttgcttaaagaaaagcaacaaacggaagtcaagaagtgatcacaacttcatgattttgctccggttgtgtgggtggggattaatgactggggcctttggtaagcttaggaagttgacacgttcacaaaacttgtccttgcttaatgagctcgaatcctttgccgtaaaaaaaaaaaaagtgttttatttggtgcagcaagccatttacctcccctttgtctaataattgaaacacaacaaatggacaaaagtcttaagttttacgggggtacttgtgtcaaaagaaaactcttgtaattgccaaattgtttgtcaggcactagttagtaatacaagttagttacgtaacagttccttataacactaaatcagctacataccttgtagttttattttatacttttaatgtgggaaagttgaatttggtgtgaa

SEQ ID NO: 113578 - DNA, 140 bp, Glycine max
  Clone ID: PAT_MRT3847_73571C.1
tcggaatcggctgcggtcgtttttagcttgaatgacgatattttcattctcacagtagaaggtgcacggccatctacctatatgtatttcagtacctctggtactcttttatctatatataaatacatatctttgctgat

SEQ ID NO: 113579 - DNA, 117 bp, Glycine max
  Clone ID: PAT_MRT3847_73572C.1
accgaggtgcatttttatgaccccaacgcacagttgattgagcctgatgctaagaaaacacggccagatttctacatatcagaacgaggtcatgaaaccgaccgatcctttcggttg

SEQ ID NO: 113580 - DNA, 221 bp, Glycine max
  Clone ID: PAT_MRT3847_73573C.1
ttacagtgcaaccaagtagcctaaatgataaaaaggttttgttctgtaccatttgctgattactgagtcagtagatactgcattgttatttgtgtttcttttttgactttgaggtcatacttttctcgacacaaattataggtgataaccctgctgcataatacttcccagataaagaaaatgaaaggaaaataaagtgactgagattcaaaatatcatta

SEQ ID NO: 113581 - DNA, 1058 bp, Glycine max
  Clone ID: PAT_MRT3847_73574C.1
caaaaacaacacattctatatataaaaaaacacacaattccgataacattattcccagccatcgcaagctgcatttggggatggtaatgggacaacagaaaatcgccctcgcccctccctcttcgtccttccgcctccgcagccgcagcctcaactccctccgcctccgccgcatcttcgacatgttcgacaagaacggcgacggcaccatcaccgtcacggagatcagccaggcgctgagcctcctcggcctggacgccgacgtggcggagctggagtccatgacgaaactctacataagacccggcaacgagggactcacgtacgaggatttcatggcgctgcacgagtcgctgggtgagacctactttgggttggtccaggacgaggaggagcagcagcaggattcggatctgtgggaggcgtttaaggttttcgacgagaacggcgacggttacatctccgccaaggagttgcagatggtgctggggaaacttggcttggttgaaggaaatttgatggacaatgttcataggatgattggatctgtcgacaccaaccacgatggtcgtgttgatttcgatgagtttaaggaaatgatgcgcgccactattgtcccggccagtgcttgattcactaccggatttggcttcttacgatcactcatccaattcaaaatgcttctaacttttttggtttcatacatacatagttatcttttcatggaaataaataataattctgttccagatgttaatactttaattttcttaggagagattgaaatctcggtttaatttcaaggaattcgatcgatcaattcaggttctgtcattgcaatttgtttcttaggtttcctttcaattagtttgattgcgggtatatatgaatgaatgttgtatgctgttcaataccagctcttcatattaccctcccatataatatgcagcctcttgatcaaaagttttcatatatatatggtacacatgtaaacgattttataacaaccaatggagttaagctaaaatatactcgtagtacttttgttctcgtcttaa

SEQ ID NO: 113582 - DNA, 398 bp, Glycine max
  Clone ID: PAT_MRT3847_73575C.1
tcgcggtctcgtggggcagtttggagagagggacgaataaagttgttattgaaatctttacaagaggaacttttaacagcttggtcaacctaggtgcgtcctgcaacaacttttgttggctgatgggtgtccatatttgtatggtatggcgcatgatagttcagttgatacaataccaggtgattttgtcacttggtgttaagatggctaccataaacaatttttgcgcatatgtgtttataaccggtattttcaggatcttgtcatttggtcacctattccttatgccatttcattataaactgtttggaatacaattgcaacagggagtacaccattgtatttatgtttctattcaagccgatgcttcttgtcaatttctctattggacctttctc

SEQ ID NO: 113583 - DNA, 636 bp, Glycine max
  Clone ID: PAT_MRT3847_73576C.1
aagggtccctacgcaggacaatgatacggtgttctgggagcccaccatagggagcagcatcggcgactacagggacgttgatggcgtcctcatcgcgcatcaagggcggtccatcgcgacggtgttccggttcggggagctctccatgcagcatagccggacccggatggaggagatttggaccattgatgatgttatgtttaatgtacctggactctccatggaccatttcattcctccagctgatatctttgacaatataaattctccatgatgatgataataacctaactttttattaggggggttttttgggttactttttttttttgttaatctttccttgtcaatgtgaattgtaatattacttaatttggggggtggtataatcaaagaattggtgggagaaggtgtaattttacttgtctttgtttcttgtttgctaatgtaaggttttagagaccagtaagtagttagtttgtgtgtcatgtcattaagctcaaatgacaaattcaagaggggggtggaataattgttacgtacgtagtcaactggtataagatattaatgatggcacataattatgtacttcctttggataaaaaaaaaccaaaatgtaagaataattccaaaagg

SEQ ID NO: 113584 - DNA, 266 bp, Glycine max
  Clone ID: PAT_MRT3847_73577C.1
ttcggctcgagcgaccggcgacaccccatctccccttcgtcaattcacatcaagatgtctctcgctgcatcacgtgccgtattacggcaatcgacgttcgccgtccgccgcgctggcatccgcaatgcctcgacgaccgccgaagccaccaacaccgtaaaggaaaccgcgtcaaaggcacagtccaaggcatcagagggtctcaccaaggtcacaagctccgcgagctctgcggcgtcgggtgccggtcaagccgtcaacaatgc

SEQ ID NO: 113585 - DNA, 412 bp, Glycine max
  Clone ID: PAT_MRT3847_73578C.1
atcatggttactctttttttcacgtttaattacaactggagcataaagtgttttgcatggacaagacttcataattataagtatgagatatataacacgcatataaagcttcaataaaattaggaaaagacttcacccagaaaccaaaaaaacaaaaatggggggaaaaaataaacacccccccaaaaaaaagcttcaaatgagaatacaaaaaaaaaagggcaaaaaacaacccgcagggatgaaactgcttgcgctgcaatgagaaaagaaaacaactttgcaggaaaaaaaacgtggaccaaaacaaaagggggaaaaaacattctggccccaaggctaaggggagaaggacccttcaccattttcagaagaaaaccacttgcaaccctatccgctggggggagaaacc

SEQ ID NO: 113586 - DNA, 469 bp, Glycine max
  Clone ID: PAT_MRT3847_73579C.1
tcggttgaatttttaacggcgaggcaaaggggcacgccataaatgcgtgtccaattcggcgcaaatgacatgggtgcggaacgcggcgcctccaccatcttttccacccgttaacgcacaccctctgaattgatggatgggaccaacttcgatccgtgtgcaactgccgctgactcagcttactccaatccgccccttgatcataataacccttcccccctaccgttttcaccgtcgcggagcataataccctgctgcatctgttcctggatcgccgccgacgttggttcctgcaccttagccctacgctgccaaagctgggccttaactctaaaatgcatcgtgcgtgcctacaactccttgttatggcacggggttttcttcaaaaccggttgcttctgcctgaatctgcgtgacatcgattcctcctttgcccttagcagagtccagaacggtctgtgcctttttc

SEQ ID NO: 113587 - DNA, 230 bp, Glycine max
  Clone ID: PAT_MRT3847_7357C.1
gttactttccaatttgaattgatccattttcatttctttcgcaaaagttgcaactacttcctcagaaaaaaagtttctaagttaaagaaatccagagagacaataatcccaggaaacggtttaggtaaatgcaaagaaattcttcttggtgataattgtccaccttattgaagtttttttaaattatgattacaagttgaattacggaattttttagggattaaccattt

SEQ ID NO: 113588 - DNA, 212 bp, Glycine max
  Clone ID: PAT_MRT3847_73580C.1
ttttatgtttgggaagagacgagaagacatccaacggttattagaacccatttgccgctctggcacatatcttcaacaacgtaaccagaagaatgcgctagacatcatatactaatgaatgatacatacgacgctccaggaaagactcaccaaagacctaagtggcgcccatagcactcacctaaggatgacaccacgcgcatatgattcta

SEQ ID NO: 113589 - DNA, 1045 bp, Glycine max
  Clone ID: PAT_MRT3847_73581C.1
gatagggctaaatgtaccccctttgtatacaaaatggcagcaaaatgaacgatctttaggcagtgcaaatgactaaatttaagaagcatcataataacgttctggagaaccctaggaaatgtttgagcttcaaattaaatttaagaaaaaaaagtgtcaaggatatatatacagctcaaaaacacttgccaagaaattcggctactaatacattagcataagaatgcaaaactaaatcatgctggtttatagaatgtgaatggcatttgactccagccttgcattaattgccccggcaatagctccagtatccaagtgataataaattttatagcatatgcactgaagcaggtccaaacacaacgactcatagttgaatcagtcatcactagttgacaaaaaaaaacgttcatcagtgctcattgctcaacaagaagcattatgatcatatttaaaatacaagcagcaatactagagtcaattttccaaaataatcacaaatacagaaaagaaaatgcagttttgatcatgtggaataatagttggattgacattaatactaccacatgcagtcaattgattggaataatagttggattgacattctaaatgatataatcaaaaacccatgatcagtgaaacactcaaataatacttccattttatcgttattccattcaccgacttaattcttgtacgagacacattaatttcattactagtttactaccactggctattcaaactaagacataaatacactcactaccatatgtgtgaaagaacctaagcagaaaaatggcttattaaaagtttgagatggaatatacaaaattgaaggatcaaggataccatagatgttgctgaattttctatgaatccaataactgctaacgccaaatcatgatgaggaatcaaacagttgtccaatgcttgcacaatttaatgagtataataaaatatttctccaaggatttggcaacatgattactaacctttcaatgccgcagcattagatgataaacaaaataattcaatgatgaag

SEQ ID NO: 113590 - DNA, 243 bp, Glycine max
  unsure (1)..(243): unsure at all n locations
  Clone ID: PAT_MRT3847_73582C.1
agttctttccgggtattggatatgttaaggatgattttgggtcttccatctcttgtacgcctgtagctactaatttgttgtcaggagaggacatgctcattaaaactgttatggctgantccccagtagagccgaggaaggggntngancttcagtcnttctagtaacacctgtggaagagaaaaggcatttaatatgtttaataatccaaaaaatagctctgtggatcctgtgctaaatttg

SEQ ID NO: 113591 - DNA, 139 bp, Glycine max
  Clone ID: PAT_MRT3847_73583C.1
acatacacgtacgatcattagcgaacttcatagaaaaacgagcaagtcaagctccagcgcccctgggcaagcctcctgataatagcccttttctaacttaaaaaaaacgtactattaaacggatgttttccaaatcgct

SEQ ID NO: 113592 - DNA, 412 bp, Glycine max
  Clone ID: PAT_MRT3847_73584C.1
gctaatatgtggttgatgttaacaaaatttaatcaggaacaaagctgaaggacttcttggccacaattgagtcatcttctacctttcaatcggagatagcaaagctccgccttgatgttgaggagtatgcaaaacaatttccaaccattggttttgataaagcaaccatgaagcacaagaattgagaaaagaaaattttccattaggtatgcgttattctttactcattttctcatttgtttattcttattcattttcgtttgtcccatattggttgacaaggtcatagacaagaggtagttagccacagaacttcaaaatggtgcactagagtagagactttgttcttttttcattcaaaaaaccttgtctactttatatacttatatttcatttcatagtgtccactcaa

SEQ ID NO: 113593 - DNA, 365 bp, Glycine max
  unsure (1)..(365): unsure at all n locations
  Clone ID: PAT_MRT3847_73585C.1
aaaaaaaaaaaaaaaaaagaggaaaaaaaaaaaaaaaaaaaaaaaaaaaaaaaaaaaaaaaaaaaaaaaaaaaaaaaaaaaaaaaaaaaaaaaaaaaaaaaaaaaaaaggggggggccgttttaggggtcccaactttccttccccgggcttgcgccgtttttctttttttttggggccccctaatttcatttcccgggccgggtttttccaccgtngggatggggaaaccccggggtttccccaatttattccctttggggcccttccccttttccccagtggggtttttaggaaaagggccccccccgttcccctttcccaacatttgcccaccctgatggggaatggggcccccccttttac

SEQ ID NO: 113594 - DNA, 320 bp, Glycine max
  Clone ID: PAT_MRT3847_73586C.1
tttttgcgtagttcatcgacaaccaattaacatgagtgaaggaaattatgacgcattgcttgatggcagcattgaatatgaggtatgtacaatttcaaatgattgcggttcattgggtgttggccaggacgggagtcacaaacaaattgttggagtccatgttgctggaagcaaatggaagactgcgatatgcttcattgataccatatgttgagccagttgtgcaagctcaaagagccgaagtttactttgatttattccctgtggaggttgatagtcaagagggaggcgtttacatgggagaattgaaatctggtgcg

SEQ ID NO: 113595 - DNA, 153 bp, Glycine max
  unsure (1)..(153): unsure at all n locations
  Clone ID: PAT_MRT3847_73587C.1
angncgcctncacgcntacgtaanctccngaattccgcancttgncatcctctagcagncngccnccgactagtgancttcgtncgacacgggcaattaattnccngaccngtcacctgccagncgtacccancctttcccctcatagtgagt

SEQ ID NO: 113596 - DNA, 363 bp, Glycine max
  Clone ID: PAT_MRT3847_73588C.1
catgggccaaaaagctgacccaaattttccttttagaaactaaatccccttctaatccaggaaacggcccctaactggccaacattccaaaatttcgaaatttcaaaacttaaccttagtaaaagactgtcccccaatctttgtttttaaaaacccaagggcaaaccaatatttaagttggatttaataaactttttccattttgctcccctaagcatgggcataagcatcggcgtcctcgagggggggcttgtaagcttttgtttaaccagctttttaataaatgctcagcccaagcttaagaatcctgggaatcctgttcccgaaggggtggggatcatcaagggtgaccccaaaattttg

SEQ ID NO: 113597 - DNA, 517 bp, Glycine max
  Clone ID: PAT_MRT3847_73589C.1
tgacgtcccatgcacgcactcgtaagctggcaacctggctcgagctatttctatacacctaaagcaagcgattctattaatcataaaaaatacagtggggtgcattgacttttaagatactactatgtgagatgagcgtcggtggagtacactataacaaagtgtgtttcttgtccctactcaagaatcagggtaggacatcatcaattgggtactaaataacccgagcagatgtgggttactacttcccaacaatgagagcgtttgttagattttttatttgcaatgacgcgtgagttgtatactgcctgacctatgggcattcaagaacattgtgagtgaccttaaaatgactgtgacgttgaccacagcaatacagattccacatgctataatgtaatctcttaagaatactcacccaacgggcagtgtgaaatagagggccaagtaaaactacagttttaagcttattagtaagagctataagcttcggtccactcagagccaatgagactgc

SEQ ID NO: 113598 - DNA, 256 bp, Glycine max
  Clone ID: PAT_MRT3847_7358C.1
cgcgacgacgacagaacgactacatgctttacactgaaaccactcttatgattgactgaatatctgaggatggcccctacccaatattatcgagatcatcattactcatatcctccttgtagctatcctatttccttattttatgatactgctacctatttaactttaattgtgaggatcataacatcttatgcagagcgcttggattgacatgatgaacataacatgaacacagtgatacattactttgtatcac

SEQ ID NO: 113599 - DNA, 445 bp, Glycine max
  Clone ID: PAT_MRT3847_73590C.1
aaaaaggacaatttcaacattccttcaaaggggaggttccaccccagcaaggacccaaaaaacacccggtccaggcgttggcataaggaaaaaaccatcacaggggtgggggaacacagttatttttttaataaaataaaaacacctcccttccctagcccctaaaaaaaaaaacataatcttacccaaaaaacaggaggggaaaagcaaccccacaaaagttttcaaagaggcaacccatttaaatatacattacccaaacacaaatcaccccagggcatactttggggcccagctgcgggcaggggcctaatactgggcccggccagttttgaacatgggagcgattcccggaacaaggggatcatcaggattgggaccagccagcaaggaccaaataaaaagcagccccttaaaaagggggagggcagggctccactgctcc

SEQ ID NO: 113600 - DNA, 404 bp, Glycine max
  Clone ID: PAT_MRT3847_73591C.1
aagcccccaaaagcccactttttttttttacagaaaatttctaaaaaaggcgggcgtgaggggaaggcttaaacaattggggtacaggggggggggaaaaattgggggaaaattctaccggaaatccccgggggaattttttttaaaacaaaaaaattccggcttagccaaagaaaacccaagcctttttgggccccacttttaatgtaaaaagggaaaagctttggccccaccttacaaatccaagactggagggggcaatcccaaccctgggaatcccccccgggggggattaaggggctttaacatttttccggtccccccaaaagccacaagagccttcaaggggggggggggggggttttcccgcattgggattacaaaaacctaactccttttggggg

SEQ ID NO: 113601 - DNA, 612 bp, Glycine max
  Clone ID: PAT_MRT3847_73592C.1
cccaaaaaaaaagaggcttggcagcagcagatatagatgagctgattttatactttgagtgttgcccgtagtagtccacctgatataagaccagtgctagcctcttaccaaggatgtgatattccaagtgagttcatcaggcgttccaaagagcatcaaaggagaatgcaagaacaaaagaatcgtggtcgcttctggaaatgagattcagtttcattgcaagttgaaaagaaatgttctttgttgaggcaagaaaatgagattgtcagtttaattacaagttgatcgatcagttcaccaaagattttgaagtcactgcaagttgacaagtgattacatgaaatagagaaaatgtagattttgttttacgcaaaccttgcaactcatgtcttgaaacatttttttcttttttgcctattgtaattctgttgctggaaagcacttattaatttcggggatggagttcttaatgctagatgtttcttgcaaggtgatttaaccttgagtacatcgctgcgcagaagtggttatggatgaatttgaccataaactgaattgacacaataaaatattttacttgattttgttgttttaaaaaaaaaaaagaaaacc

SEQ ID NO: 113602 - DNA, 461 bp, Glycine max
  Clone ID: PAT_MRT3847_73593C.1
cgattccgttccaaggaaggtttcccgtcatcactgtatgacgtcctccttctttgggggggggggggggggggggggggggggggggggggggggggagtccggtaacacacggaaggcttataactttaaaatgagcaaaagcgtagtagacggtaaatatgggttaaccgggattagcgagataggacagccctaagacccccaaaataaaagggcatacaattgaaagtgattaatggatatgaacaaaagggtcccgagaaattaggcaaacctgctggggcggtaacgtgtaaatggtttagacaaggtactttagttcctaaaacattcaagaggtgaccgatgcgaataccagggtagatgggatcattaagaaaggacgagtaagaggaggccgagaattacatggggttgcggggaaggggatgccagtaaaggtgccccatgttattaag

SEQ ID NO: 113603 - DNA, 587 bp, Glycine max
  Clone ID: PAT_MRT3847_73594C.1
aattcggctcgagccagcggcaacatttgtgttgaataatttactttatttgtggtttgaggagtgagtgagtgagtgatgtctgagtgtggctgttccgagtcagacccttcgtgtggttgttggtcgagcagcagcagcagatctgtggcctcaactgaactgaagctgtaccgagcattcatcttctgtgttcccatcttcttcactctcattctcctctttctcttctatctcttctacctccgaccgcgaactaggctccattggatttcacactttcgccttcccagcaacaacaaccgcaataatgccatctccacattgggtttgggcttgaacaaagaacttagagagatgctgcccattattgtctacaaggaaagcttcttcgtcaaagatactcaatgctcagtgtgccttttggactaccaggcagaggataggcttgaacaaatacctgcatggggccatacattttatatgagctgcattgattcttggcttgccacccataccaccttgttcttttggcgtttctccctactaaccacttgctaaatcttcaacgcaggcattctgattgc

SEQ ID NO: 113604 - DNA, 376 bp, Glycine max
  Clone ID: PAT_MRT3847_73595C.1
gtcttaaaaaaaacaaatgggcttttctataattttaaaaggctaaccgtccaattgaggattttaaaataattttcccacccaggctaaaattcttggttacatatttgggggggtaaaattctttccccagggtgattagggacagattttttggggcatgcattcatgcgtctggggcactttttattgcttgagcagcagcttttatgccttcttgacaatggggttgacttcagctttaacaagttggtgcaaaagaaaagggtccaattcttcgaaagagtcaagggcctctttttattttctatggtggctccaagctggttaccaaatagcctctgggggctatgactgttctgagtaaagagaaatc

SEQ ID NO: 113605 - DNA, 289 bp, Glycine max
  Clone ID: PAT_MRT3847_73596C.1
cacttgcggttgttgacatgatgtattgtactacggtctacaagttcgcgaacaacatgacccttatacacagtgatggtggaggatcataactgcatactggggggaggaagaatgaggctaaggataggcctggaccttctgttagggcacggtaaaatgatgtgtgccaaatacgactaatggatcacgagggaatacatgacatctcatgtcaagagactacagaactgcactgacagtgcaagatagcaagtctcaaggtactggactagatgacggcatctat

SEQ ID NO: 113606 - DNA, 185 bp, Glycine max
  Clone ID: PAT_MRT3847_73597C.1
tttgtgagaaagacttgctcaaagttgttgatagggagtacacattttcatacattggtgacccctgccgtggaacatacccttttattgcaaagcttaagcaagtgcttgtgggctatgcattggccaatggagagaacgagaagaacacaaacacatcaatctttcaaaagattgcaacattt

SEQ ID NO: 113607 - DNA, 570 bp, Glycine max
  Clone ID: PAT_MRT3847_73598C.1
gtggtcaaaggtttcagcaaaaccggtaattatgaatgtgttatctaattgatacttttcccccctcaaaagtcaagtattatcgtttcagaattgacaatcacttccatcaacacttacaagcacaatttttattctttaatttcttgtttgctctcatcatcttctttgttgtcctcagtaggtatttgcattgaacttaccaattattattaatattgattcatgtattattaggagttaattatagtctgttaagttgtaacttatctcgtttgggtgcttctagtatatattttttcttgcccaaatcatcaactatgattccttgaaaacttgaactttaattttaatagttttgttttgaacttccattgatttttttttattagggctgacatttaattgaaaggatcatttagtatttgtggtgaattgtttttgttcatgcctgtgtcactagtgatgagttagttcccgaagagaaagcaaaattcacccttggattgaagtactggggtagctgacaaaatattgggatcattggaatttgaaaatgccaaacgaata

SEQ ID NO: 113608 - DNA, 1462 bp, Glycine max
  Clone ID: PAT_MRT3847_73599C.1
aattcggctcgaggcattacaatggcgatatctgtcctgtggcactcttgatctatataccattccagtcaacttcttttttcttccataattccctttggcgtggaataatgcctttctcgtgtgctgttttctctcactgccttcccaaatcaccaatttaacagcatacattcacaagacggttgatttgcttgtcttgtgttaaatctcttaacaggatttgggttttgaagcctactgggatgtaacaaacagaaacagcattcttttgggatacccctttgatatctgattctggacacaagctgtaggtgttacttcaactggattctggatagatattagatacagcttgaagttatgtctgcttatggccatcaaatggagcggatgtattctacaaggagtctctcaggtggtggttctgagttgcggaggagcagttttgtgctggaatcaggattctatatcacatcctttgtcgccaccatctttgttgctgcattagccgctacaggacttttattgattactttattggtttcactggcaatgatgctgcaatcttgtcaaagtagccatgctggaattattgagcttcagaatataaatgatgagtacaattattgcaagctttattctctgcatgctaagctcaataacttggaaggacataattttcctagcctctgcaaggacctggctatgaagtatatcaagggaggtcaatatgctagagacttggattcaaccaagtctgtgattgaggattacttcaacagtgttagaccatcagatgatggtcttgatgtggtgttgatagacatagatggcatctttccaccaaatccccattcttccaatttatttaaaagcattaacaattttgtattataggcaaagaatttaaagaggatgcttgttttaagattatacatgaaccttcaagctggtgggtggtccataattttgttatcaagagagcatggaacacgccaaaatgtcaccatcaatcatcttctttccgctggatttagagattggtcttccttgatgatgagtgaagaaaatgaagaatctcccaaagggaatgagtgttttgttaggcaaaggaatgtgatacaaaagaagggcttccgcataataagtatcatgagcagtcaaatggatgctttgactgttgcagataaaggaataagaatttttttgcttccggaccctatatttgccaagtttaagcagcaaaggagagcatagatgctggatatattagtttcatcctccaaaacaggataatttggtttttgttcgactagtttaattctctgcatctctcctattgttcatattagggatgttgtaatcgcatgtcattgtctgccaaagacaatgtagggaacagatttgttttaattgaacccagcattactggtagataatattttcctcgttgggccat

SEQ ID NO: 113609 - DNA, 360 bp, Glycine max
  Clone ID: PAT_MRT3847_7359C.1
ttttttttttttttttttttttttttttttttttttttttttttttttttttttttttttttttttttaaaaaaacaagggggggaggggacttgctataaacaattttttcagggcataacaaaacggacaagggaacccctctccaaatttcagggaaggatttatggaaaggaaaaaccaaattaggcccccccattttttttttcattccaaattctaacttaaaaggatgccccctaaggcagccaaagggttaaaaaatattttgtcttcaacaaactacaaaaaattcaaccttggttggggaaacaagggcaaaaaaaaggggggtctatatgccttggcgttttaaggaac

SEQ ID NO: 113610 - DNA, 397 bp, Glycine max
  Clone ID: PAT_MRT3847_735C.1
cggacgcgtgggggagaggtggaagtagctgcttcatttaacatcattcctagcagcactggagctgccaaggctgttggaaaagtcctccctgctttgaatggaaaattgactggtatggcattccgtgttcccactgtggatgtctctgttgctgacctcacagtgaggctggagaaggaagcctgctactatgagattaaaaatgctttcaaggaggaatcatagggcaagcggaagggaattctagtttacactgaacatgatgtagaatacacactcgttgctgactcaaaggctatcaacaactatggactcctaatgccttgatctgtttggggataataccttccaatctgaatagtttgaccaacatgctgaaggggttctgttcata

SEQ ID NO: 113611 - DNA, 236 bp, Glycine max
  Clone ID: PAT_MRT3847_73600C.1
ctgaagttgagagttagaagaagccaaaatggcgaagcattcgcaggagcaagacatgcgcgctaacactcatggcgctcttctccctctcctcctcctcctcctgcacccaacctgaggttcggaatttggaagcgcctcaggctcggactgaatccaagttacagaaccctctgacttcatgaggtccaagctcgttctcatggtctcgcacgaactctctctctctctctctc

SEQ ID NO: 113612 - DNA, 813 bp, Glycine max
  Clone ID: PAT_MRT3847_73601C.1
gcattagccgctgcaggacttctattgattactttattggtttcacttgcaatgatgctgcaatcttgtcaaagtagccatgctggaatcattgagcttaacatgcagagaataaaccttgcaataattgtactgatcatttatattctgaagctcactttcttcttatctggccttattttcttcctcaaacacaaatccaaatccaaatccaaaaaaattcaacctccctccaggaccccctggatggcctattgttggaaacctcttccaagttgctcgttccgggaaacctttctttgaatacgtgaacgatgtgagactcaaatatggctcaatcttcaccctcaagatggggacaaggaccatgatcatcctcaccgactcaaaactggtccacgaggccatgatacaaaagggtgcaacctacgccaccaggcctccagagaatcccaccagaaccatcttcagcgaaaacaagttcaccgtgaatgctgccacctatggccccgtgtggaagtctctcaggaggaacatggtgcagaacatgctcagctcaacaagacttaaggagtttcgcagcgttcgcgacaatgcgatggacaagctcatcaacaggctcaaggacgaagccgagaataataatggtgcggtttgggttctcaaagatgctaggtttgctgttttttgcatacttgtggctatgtgtttttggtcttgagatggatgaagagacagttgagagaatcgatcaggttatgaaagagtgttctcatcaccttggatccgagaattgatgactatcttccaatt

SEQ ID NO: 113613 - DNA, 2659 bp, Glycine max
  Clone ID: PAT_MRT3847_73602C.1
ccgaaaaattggtcaaaccctgagatcataaaccccgaaaggtttatctctggggggtaggaagctttcataaccggcacagggaaaacttttggtgttaaaggtttgccctggcccctcgttcccgacgcacgagagaggtgttttatttatccggtctcacattgcatcctcataccactttttctcattccctctctccctaaaatggccactctcccgtcctgtctcaatctcctccaattccctaaaatggccactctttcctcctacgaccacttcatcttcactgccttagctttcttcatatctggcctaattttcttcctcaaacagaaatccaaatccaaaaagttcaacctccctccaggaccccccgggtggcctattgttgggaacctcttccaagttgctcgttctgggaaacctttctttgagtatgtgaacgatgtgagactcaaatatggctcaatcttcaccctcaagatgggaacaaggaccatgatcatcctcaccgacgcaaaactggtccacgaggccatgatccaaaagggtgcaacctacgccaccaggccccccgagaaccccaccagaaccatcttcagtgaaaacaagttcaccgtgaatgcagcgacctatggccccgtgtggaagtcgctgaggaggaacatggtgcagaacatgctcagctcaacaagacttaaggagtttcgcagtgttcgggacaatgcgatggacaagctcatcaacagactcaaggacgaggccgagaagaataacggcgtggtttgggtgctcaaggatgccaggtttgctgttttttgcatacttgtggctatgtgttttggtcttgagatggatgaggagacagtggagagaatagatcaggttatgaagagtgttctcatcactttggacccgagaattgatgactatcttccaattctaagcccctttttctcaaagcatagaaagaaagcctagttgtttcgcagagaacaggatgaattattaggtccaattataaaacaaagtacagaagaaactgaaaacacgttttcatatcaagccacaattttgtgtctctaccttgaaacattttatgaagcaacttttgaaggcgacaaaaagtcaacagcagttgcagaattggtgtctttatgctcagagattcttaacggtggcagcgagacacaacagcaacagcggttgaatggggcatagcacagctcatagcgaacactaacgttcagacaaagctgtacgaggaaataaagagaacggtgggagagaagaaggaggatgaaaaggacgttgagaaaatgccatacctacacgctgtggtgaaggagcttctaagaaagcaccctccaacacactttgtgctaacacatgctgtgactgagcccaccactttgggagggtatgacataccaattgatgcaaatgttgaggtgtacacaccagccattgctgaggaccccaaaaattggttaaaccctgagaagtttgaccctgagagattcatctctgggggtgaggaagcagacataactggggtcacaggggtgaagatgatgccatttggggttgggagaaggatttgccctggcttggctatggccacagtgcatattcacctcatgatggcaaggatggtgcaggagtttgagtggggtgcataccctccagagaagaagatggatttcactggcaagtgggagttcactgtggtcatgaaggagtctctaagagcaaccatcaaaccaagaggaggagaaaaagtgaagttgtaaaattttcctgcttctattcttctgggttttaaatttcacagacaacataaatattattgctattatcatcatcatatatgtatacatcatcatggtttgtggttgatttgcatacagagtactgcaagtttcatcccatcattatattgtcttaattggtctggtttgttggagttgtgacaaaaatggatatttgttggatatttacagttatcttctttatttaattattatgtgaacatccctttttgaagaaatccatatatatctagtggtaggcataactttttctattgggaatgaattaactagtttccttcttgcatgcatgtgcatatccgagagtcatagtgttatctaaagaagcagtaatgctatgttcaattaaaacaaatctgtcaccgacttgtctttggcagacaatgacatgtgattacaacatccctaatatgaacaatgaaagatgcagagaattaaactagtgagcaaaaaattcaattatatatccagcatctatgctctcttttgctgctcaaacttgtcaaatatagggtccggaagcaaaacaaatcttattcctctatctgcaacagccaaagcatccatttgactgctcatgatactttttatgcggaagcccttcgtctgtatcacattcctttgcctagaaaaatactcattccctttggtagattcttcatcttcttcactgcaaaaactcatcatcaaggaagaccaatctctaaatccagcggagagaagatgactgatggtgacattttggcgtgttccatgctctcttgataacaaaattatggaccacccaccagcttgaaggttcatgtataatcttaaaacaagca

SEQ ID NO: 113614 - DNA, 340 bp, Glycine max
  Clone ID: PAT_MRT3847_73603C.1
gaaacatgtgattattttataaaggcggttttcattgaactagcacgttattctttgcatgaagcattaatggaaatttacgcttaacccgaaaaactttccatcttgcaccccaagcagtgactgaactatcaaatcaacatacaacttgctctgaatccacgccaaaaaacttacaccctcctgataaaaaacgtgacgaaaagatcgaaagcaccccacagaactaggaaaccttgttatccacagccttttgccagagcctcaaactctgtctctgatggacctatccacctcgattgtggagcaacatgaccacctctgggtgaaccctcgagcc

SEQ ID NO: 113615 - DNA, 390 bp, Glycine max
  Clone ID: PAT_MRT3847_73604C.1
cgtccggcgagcttgagaaaaaggttagtggaaatgatgtaatcttgattgccaccagcaggataggagggccaccaaataaaggttctgctgttcagcgccatagtaccagaacactcactgatgcacatgacgcaatgctggatgatattgcattgcctgctgagattgttggaaagcgagttaggtatataattgatggttccaagcattataaaagcctctttgtaccccaatgagcgaaacaataccgagtacacatggaagacttgtgctgcatgatacaggacactttcatgcataggtgtctggtgtgagtattctactaccgaggcttatgtgctatttactagctttgaattgcatcctgaattacatatggtggatgct

SEQ ID NO: 113616 - DNA, 273 bp, Glycine max
  Clone ID: PAT_MRT3847_73605C.1
ggggcttaacaaccaaaaaatttaccttttttttatgggaccttggagggggccttattacaaaaatggggacacggagtaaaatattaattgtttttgggggaattgagccaaaaaaaaaattagggggggaaaactggaaaattctttctggggaggaaacatcctagttgaaatcatggaaagcttgactggtcaaacccaggtagaaaaattggctaaagggtttatttgggggggacacctgcgaactggtttaggggatttgggttt

SEQ ID NO: 113617 - DNA, 322 bp, Glycine max
  unsure (1)..(322): unsure at all n locations
  Clone ID: PAT_MRT3847_73606C.1
tttcacattctattttggtagacagggccctgtggctcctgctactctttacaaggccctanttacaaataccaacccccccatcccaaaggctcttgattccttcaagagtgttgaaaacgttgagggaaatggtggcccaggaaccatcaagaagatcactttccttgaggatggagaaaccaagtttgtgctgcacaaaatagaaagcattgatgaggcgaacttggcatacagctacagcgtgggtgggggtgcttcattgccacacacggggttaaaatccattcgcctccaattgggtgtttgtccccatggaggt

SEQ ID NO: 113618 - DNA, 477 bp, Glycine max
  Clone ID: PAT_MRT3847_73607C.1
ctttgcttgcatatcatagacaattcagcctaatcttgttgggtcttcttactataaagaactgtttttatcttgtatattttcctgtttctttcaagataatttgactatcaatttccatggtaattgaatatcttgtttagttttctgactagtgaatatgtggtcgcaggtcctgcaccactatacgtgctatgtttccagtaactgtgcttaagaacctaacttgttttgtgtataaagacgctcagagaccagaccttcctttttttcattttattagttttttgtttaatacttttttcttcctaattgttattattctttctattttctatattgagtatagccagatgtcagtctcggaagtgttgtataaattgaagatggggctaggtcagaatctttgtggaacttgtgaaaagctcgcttttcaactcttgccatgaataagaatatttttatactgtgctcttt

SEQ ID NO: 113619 - DNA, 1360 bp, Glycine max
  unsure (1)..(1360): unsure at all n locations
  Clone ID: PAT_MRT3847_73608C.1
nnnnnnnnnnnnnnnnnnnnnnnnnnnnnnnnnnnnnnnnnnnnnnnnnnnnnnnnnnnnnnggcccaagggccggnccaagcagtgccccagcccccaaccaggtaagccgccgacccaggccaggccccantgcaaggngcggggttcacggccagacccttaaatagaagttggtgatacacttcagaacgcagttgccaatggggacaaagctcaggatctagctttagattgcttggaaagtgcagaaactgaatctactaacagcttgtcaaactatgaagagggagacaatgatacggatcagcgactagacaaagaatgtaatttcatcccaagggctgaatgttcagattatgtaccaaatgccagctcccagaacctcaattgcgaggtgagttatttcatttgaggacttttttggattaggaacgttgtggatggcagtgaaaaaactggaagtctgggagatagtgagtcagggatctttgcagggtgatgtttgtgtggctgatccagatcagttctgaagagtgggtgttttcttggaaatagagtatttcaaaatatcggggctcaggaatataaggttttgaattttctaatctcattgttttctcggtaataaagactatctgatcttataataatatactttttacctcatctttctttgctttatgcctttatggccgttaccaaaattttatatttcatgggttttcagaataaagagtctaatcttgtttttctgatttgattttttttttcttttcttctgttatagctttgcttgcatatcatagacaattcagcctaatcttgttgggtcttcttactataaagaactgtttttatcttgtatattttcctgtttctttcaagataatttgactatcaatttccatggtaattgaatatcttggttagttttctgactagtgaatatgtggtcgcaggtcctgcaccactatacgtgctatgtttccagtaactgtgcttaagaacctaacttgttttgtgtataaagacgctcagagaccagaccttcctttttttcattttattagttttttgtttaatacttttttcttcctaattgttattattctttctattttctatattgggtatagccagatgtcagtctcggaagtgttgtataaattgaagatggggcgaggatgagtttggagtaaatcacatgatatttgggaggtgaatggctgaaattgctgctcacgctgctaccttgtgctatgctcaatggcttgatgtggattaggtcagaatctttgtggaacttgtgaaaagctcgcttttcaactcttgccatgaataagaatatttttatact

SEQ ID NO: 113620 - DNA, 559 bp, Glycine max
  Clone ID: PAT_MRT3847_73609C.1
ctttcgcttgggcggacgcgtgggtgagatttagacaaacaatttcctaaaaatgttgagccgattttctaaaatcactgttcgtggctatgcaaaggatcttaagtttggttcggaagggaggaaagctatgctctccggtgttgacatgttagcggatgctgtcgctgttacgatgggtcccaagggaagaaacgtggtcatcgaacaatcctggggcagtccgaagattaccaaggacggtgtcactgttgcaaaggccattgacttcaaggacaaattccaaaacatgggcgccaaacttgttcaggatgtggcaaacaagacaaatgaggaagctggtgacggaacgacttgtgccactgtgttggcacgtgccatcgcaaaggaaggcttcgagaacatctccaaaggtgctaatccggtggaggtgcgcaagggactgatgaacgcagtggacgaattggtcaaggaactgaaggcaatgagcaaaacagtgacaactccccgagaaatcgctcaagtggccactattgcagcgaacggagacaaaaccatc

SEQ ID NO: 113621 - DNA, 435 bp, Glycine max
  unsure (1)..(435): unsure at all n locations
  Clone ID: PAT_MRT3847_7360C.1
tacggctgcgagaagacgacagaagggggctccaaccactttctttttcccgcagtcatgggcaaggggaagatcgggatcaacggatttggaagaattgggcgtttggggggcagggggggtctgcanagagacgatgttgaactcgttgccgttaacgatcctttcattaccaccgagtacatgagatacatgtgtaaatacgacagtggtcacggggcctgggagcgtcacgatgggaccggtaagggggagaagacccttctcttcggggacaagccaagcactggttttggacacagggaccctgaaaagatcccatgggagtcnacttgggctggcatgattggtgagtccaccgggggtttcaccgataaggggtagggggccgcgcatttgaaggggggggcgaaaaaagggattatttctggcccc

SEQ ID NO: 113622 - DNA, 238 bp, Glycine max
  Clone ID: PAT_MRT3847_73610C.1
gcgcttgcgctccctggctgctcctgtcatagcgaagatgacgtcctgacgtcggagacggcctccttggactacgtctataagctggtaacatatttgagcattcacttttggccctctgtattcggtatctttcgcggattgtctgcatgatctcaccatcatgattatcctataccaccgaccgctagggctggtccgtaaccgcccccatcctatacggggtcgtattacgcgc

SEQ ID NO: 113623 - DNA, 1159 bp, Glycine max
  Clone ID: PAT_MRT3847_73611C.1
gcctaatcttgttgggtcttcttactataaagaactgtttttatcttgtatattttcctgtttctttcaagataatttgactatcaatttccatggtaattgaatatcttggttagttttctgactagtgaatatgtggtcgcaggtcctgcaccactatacgtgctatgtttccagtaactgtgcttaagaacctaacttgttttgtgtataaagacgctcagagaccagaccttcctttttttcattttattagttttttgtttaatacttttttcttcctaattgttattattctttctattttctatatttatagcttcccagattgtgagccagatgtcagtctcggtagtgctgtataaattgaagaaggggctaggatgatgagtttggagtgaatcacctgatatttgggaggtgaatggctgaaattgctgctcatgctgctaccctgtgctatgctgtggttgttgctgtgctgagatcctctgatgtgaaggggactaaggttataattgaacagtgaggagctgatacaaatgatggctgtgaaagatttgagtttggggtatggcattgcgatggatggtcgtatgtgtacatagataaaccgcatgatggagacgcttaaaaatgtggtcacatcctgttgtgtgtgaaacatgggctcatgtcattttcagagctatgaattgtctcataaaccttaagatatttacttatctggatttcaaaagagtgggacctttgttgtttgcttgtgatgtggatgtgatcgataagttatgtaaatgtaacaaatagctatttcggctaggttatttggaagagaaaacggtaaaacaaaaattattttggcggcagagtcttatctatccttgctttggaagttacggtgtggagggttattctgtcaatggggggattcgttggtctttcaatttagtgaacagttgccttgtgaaaatggtttctttcattagtgttctcacacggttttcttttatgtttgcgtaattaatttgtttggtgtttagtttggttcagagtatgggtaataaacataatgaagcagggaattgttctggattatgctgatcacttggacaatcgtattgattaaacaaatccccaatataagttattaaattgagtt

SEQ ID NO: 113624 - DNA, 864 bp, Glycine max
  unsure (1)..(864): unsure at all n locations
  Clone ID: PAT_MRT3847_73612C.1
tcgaggatnnctgatgcacntacccaggaagtgtgactatatgcactgaggtagcatgacatgcgagattagatgaacacgggccttgtgtgtgacaccacactatgatatgtggtgaaatcaagggagtgtgtgaaatgtcccaaattggagaatggagttgctcaatggggggacaaagctcacggatctagcgtttagaattgcttggaaagggtgcagaaactgaatctactaacagcgttgtcaaactataaagagggagacaatgatacggatcagcgactagacaaagaatgtaatttcatcccaagggctgaatgttcagattatgtaccaaatgccagttcccagaacctcaattgcgagggtgatgtttgtgtggctgatccagatcagttctgaagagtgggtgttttcttggaaatagagtatttcaaaatattggggctcaagaatataagccagatgtcagactcggtagtgctgtataaattgaagaaggggctaggatgatgagtttggagtgaatcacctgatatttgggaggtgaatggctgaaattgctgctcatgctgctaccctgtgctatgctgtggttgttgctgtgctgagatcctctgatgtgaaggggactaaggttataattgaacagtgaggagctgatacaaatgatggctgtgaaagatttgagtttggggtatggcattgcgatggatggtcgtatgtgtacatagataaaccgcatgatggagacgcttaaaaatgtggtcacatcctgttgtgtgtgaaacatgggctcatgtcattttcagagctatgaattgtctcataaaccttaagatatttacttatctggatttc

SEQ ID NO: 113625 - DNA, 681 bp, Glycine max
  Clone ID: PAT_MRT3847_73613C.1
cccacgcgtccgggtcaaaggttggctgctatcacaatactcagaatataagagctgtcatagtctttcaagaggaaaggtgatgaattgcatgctgatttctgcttaaactttgattggcgaaagtgttgctcccctgtttatggtgattaaatgtaagtatttttttttattcaagttataataagtagattgagttggattttttgttccttctggcatttccttctttctacccctccctcttttaagcagagggatggttgattttgaagcattaaatttttaccttagtctctctggctttcatagatcttgattttttttccccacaaggttgagaactcaccatagtgaagtatttctctactagctagttgcatgcaaattgcagattggctgtgtcatgaacttgtgacagagatggttggactatggagaaagctagtggagttgggcattgaaaaatgcctgtctggaaaaatgatttactctcagcccttgtgtcaccaaaaattaatataaaacattagtggaaggaaggggtgaaaagaggtttttagttggtgattgaaattaaattttatgtaagaacaagtttgatgtattgataaatacttcaattctgcttctcggtccagtcacctaaacggcttatatcatagtcactttgttcttttt

SEQ ID NO: 113626 - DNA, 226 bp, Glycine max
  unsure (1)..(226): unsure at all n locations
  Clone ID: PAT_MRT3847_73614C.1
gctntnggnaagnntaanaggatttccaagggaaanangggtggcaaganganagccgntnatccctttgccaagaaagactggtacgatatcaaggcnccttccctcntccaggtcnngantattcgnagaancctcgtctctcgtacccagggannnaagattncatccgaagnctcanacatcgggtttttgaggtctcattggctgatctccaaggggatga

SEQ ID NO: 113627 - DNA, 1257 bp, Glycine max
  unsure (1)..(1257): unsure at all n locations
  Clone ID: PAT_MRT3847_73615C.1
cccatgtttcccacatcatgtggttcatctattgtacacatacgaccatccatcgcaactccataccacaaaccncaatctctttcactgccatcatttgtatcagctcctcactgttcaattataaccttagtcccattcacaggatctcagcacagcaacagccacaacatagcacaaggtagcagcgtgagcagcaatttcagccattcacctcccaaatgaattataaataatgttgtagaatttttattggagaaatcatggatatgattaactcaatttaataacttttacacattagggctttatttaaccaatacgattgtccaagtgatcagcatagttcagtataattccctgcttcatcacccatactctgaagggtaataaacaccaaacaaattaagtacgcaaaaataaaagaaaaccatgtgagaacactaatgaaataaaccattttcacaaggccaacgaaaccctagacagaataatcctccccaccgtaacttccaaagcaaggatagacaaggaaggctaccctattctgccgccaaaatatttttgttttaccgttttctcagctaaataacctagccgaaatagctgtttcttacattaacacaacgtatcgatcacatccacatcacaagcaaacaacaaagttcccactccttttaaatccaggtaagtaaatatgttaaggtttatgagacaattcatagctctgaagatgatatgagcccatgtttcccacatcatgttgttcatctattgtacacatacgaccatccatcgcaactccataccacaaaccccaatctctttcactgccatcatttgtatcagctcctcactgttcaattataaccttagtccccttcacaggatctcagcacagcaacagccacaacatagcacaaggtagcagcatgagcagcaatttcagccattcacctcccaaatatcatgtgatttactccaaactcatcctcctagccccttcttcaatttatacagcactaccgagtctgacatctggcttatattcttgagccccaatattttgaaatactctatttccaagaaaacacccactcttcagaactgatctggatcagccacacaaacatcaccctcgccccttctgtcgtcttctcgcctcgagccggcatttggtacataatctgaacattcagcccttgtgatgaaattacatgctttgtctagtcgctgatccatatcaatatcaccctc

SEQ ID NO: 113628 - DNA, 602 bp, Glycine max
  unsure (1)..(602): unsure at all n locations
  Clone ID: PAT_MRT3847_73616C.1
aaaaaacctccctctctcaattacaaaaccgcatgcctgatctcctttcagggttccactgcttgctcaccctcagaaaaaacaaaaatccagttttggaacttcccctgatctaaaaatctgaactttttggcatttttgtcaattattttgaattctgtttctgggtttttgttttcatgggactgtgtcatggaaaacccattgaaacctcacaaagtgaaggtgggcaccacgctttccccggcggcgagaaagatgcggtggtggtttcggcggcaagtccgaaaaccgccacaaaaggctcaaagtttccgttttacagcccaagcccgttgccgagcctgttcaagaactcgccagcgaactcgagcgtgagttcgacccctctgcggctcttcaagcggccctttccgcctccgtcgccggcgaagcacattcgggccttgctggcccggcgccacggctccgtgaagcccaacgaagcctccatccccnaaagaagtgagtgtgaggttgggctcgacaagagcttcggcttctccagccacttccaagctcactttgagcttgggcccgaggttggccgtggtcactttggc

SEQ ID NO: 113629 - DNA, 409 bp, Glycine max
  Clone ID: PAT_MRT3847_73617C.1
ggttcattttggaacatggcggatggggaaactgaatgcccatcagaagccttacacacggggacacatcctgctgataaacatccgtgggggagcacatgctaattattctctgaacacaactctgccaggtgctggtgttccagtcaggagatatgtagatgtggaacacggcgaatgacctgataagatgactccccaatagaaagccgggccagcaccacacctaagggcagcagccatgaccctctactacacaatgaacttaatggcttataagctcaacaccgttcttttcggacagattcatgcaaaagatggaaggtagtttacactccaggaatttaccactcatcgaacggctcacgggctagccgcttcaacttttctgactaatggctgcacctat

SEQ ID NO: 113630 - DNA, 390 bp, Glycine max
  Clone ID: PAT_MRT3847_73618C.1
gaattcccgtttgactacgcgtccggattttttagccggaaatacccagaggatactgggggccaatttttgtgaattggctttatctctccagtcaattaccttcagaagctgtcgttgcaaatgatacatgtggaagtggacgtggaggtatacccaccactgctcggatatagacttgcaggtaataatggctcctcagatatcaacaaaaggatccggacagaacttgggaaaggtaagaaaatcgtttctacttactagagttgatccttctccagtagcagtactggctgtacttactggccgtaagaatgaaatactgagttataacgccactaaccctatgctgacgcgacttcttgagaactggaagagtctcaaatatct

SEQ ID NO: 113631 - DNA, 552 bp, Glycine max
  Clone ID: PAT_MRT3847_73619C.1
ctcggaattcggctcgagcagccaagccacagagcaactgtacgaggaactgatgctgaggtacttgggttcagcctcctcatgttcaggaactcaactttataaatctcttccatgcttgggtcccactctctaaacactatacatacactctccttttctttttctttgttttcttcctcttcccttttcaaacacaagaaagaaagaaaagggaagatctcaaagggatttatttctgtctgcttctctgcgcgatctgcatccttctcttatctttgacgcgttgatttctgcagattcgctcaactctggtatggtcggtgaacctttcttctgttttccccctcacttttgtctcatgttatgagatttgccaatataagcgattttttcttgagtggttttcaaagcccactgacttggtgccatggaaattactcctcctcttcttcatcatctgtggtttttgttgttgctgctgctgctttgttatcttgttctctgtgcttctgccaaccatgttgaatttgacaactgcaactgcgatga

SEQ ID NO: 113632 - DNA, 1615 bp, Glycine max
  Clone ID: PAT_MRT3847_7361C.1
acggctgcgagaagacgacagaaggggagataactgcggcctttagaccacatcaacaccacgacgagatctggatatcgtgttttggggcctgaattctagatcttgttatcggcttcgacgaaggagatctggttgtcgcggatataacgcctcgccgccgcgtcgtaagcacccgctgcctcctccaccgtgtcgaagccccagccagtggcagcaccgcccgatgcagtcgcgtatcttcgttaaccacctcccccgcgatcccttcctcgctccttggtagctcttgctcacggacgattgcgcgaaaatccctttctaaacaatagaaccttttcttagattctgtggaaaaagcttctcaagctttgaataagataaacaacaatgtcttcacttgcagctgctagagcagacaacttttactatcctccggaatgggaaccgagtcagggttcgctgaacaagtttcatggtcaacatgccttgcgggagagggcaagaaaattagatcagggtatcctgattataaggtttgagatgccctttaatatatggtgtggaggatgcaattcaatgattgcaaagggtgtccggttcaatgcagagaaaaaacaagttgggaattattactcaacgaagatatggagtttcgctatgaaatctgcctgctgtaaacatgagattgtcattcagactaatcctaagaattgcgagtatgtcattattagcggggcccagaaaaaaaacagaagattttgatattgaggatgccgaaacttttgaattgcctgctgatgaagagaagggtaagcttgcagatccattttaccgccttgaacaccaggaagaagacttgaagaaaaagaaggaagctgaaccagtgatcgtacgtctccagaggcagtctgatgcaaggcattcagatgactattctcttaataagactctccgtgcccaacttagaggtcaaaagaaaagagttgctcaagaagaaaatgcttccaagaaaagaggccttggcataagacttcttccagctactgaacaagattctgccacggcaaaatcagtgaaatttccagctaagtttgagagaaataggaaggacaagagggcattgatcaattctgaatctatcttctctggagtctctagctattcgatatctgacaagagaaaacaagagctagagtcaaaacgaagaaaaatttgtgccacttcagcatccaaccttctagctggtagggtaaagccatcatcatggtcacagtcttcaaccaagcaaaagggaactatgagacgttagaaagctgaaacatgtctctgacattggttagcactggtcattgacaaccttggtggcaattggcattggaattttgtacataaaaagttgcttttgtgtgataactttgtattatgttttcggttgtgaaccatgcatgaatttgttaatggaagtaattatattttttatggtaattttatattatgttttcggttgtcaaccatgtatgttaatggaagcagttacacacagactaagaaagcttgtttcctcttcaccttaatatatattggtaatttgttttagctagaattgtaaaaa

SEQ ID NO: 113633 - DNA, 313 bp, Glycine max
  Clone ID: PAT_MRT3847_73620C.1
ttcttcttttttttttttacttctgaaggcctccaactcaacaaaatactgttttttatctaataggccgtgtcctcaacataaattatactcacaatataacagggaactaatcttacggtgtgaggatcctacttacttacacagtacaagatgtgaataaacaaatgatactctatgaacattacgaatttgcactctgattctcaaatgggcaaaacttattaaattaacccgccttatgttccaatttccttttaagatactcccctcgtcgtgtaagcccccaatcctaaaaataatacaaccctat

SEQ ID NO: 113634 - DNA, 518 bp, Glycine max
  Clone ID: PAT_MRT3847_73621C.1
tttttttttttttttttttttttttttttttttttttttttttttttttttttttttttttttttttttttggggagggaaaaaagggtttatagcatttagcatagcatagggttttcatacattgtttttttggggggcacatgcagaaactcagttttactacatgattttttttatttaaaaaacaaagttttaccaattaaacaaacttttcagttggggtttgcattttaaacaaactgtttaagggccttatccccaggggtgtttttcacattaggatttaaaggtgaagcttccactccaaaaaaagactcatttttaaaggtgggttgacccccctttacaaaaaaaaaggggttaattgaaaggatcacattcacgggggggggggactttttaatttgtttaaggagttgtttttttggaaaataaattttttaaaaagttttaccaattttttccttccaaaggggaaaaaggtttttaaacgaaaagggtttagctggggggtt

SEQ ID NO: 113635 - DNA, 431 bp, Glycine max
  Clone ID: PAT_MRT3847_73622C.1
cagctgactaggaaggcggccgcgcggcaaagcaggggatgttgttgaatactctgaaactattatgggccaaggcctagttagaccaggccattctggaagatctacaaccagactatgactgttgaactgaggtttgttttttgcaaaacttaaactctcacactttaatcggtgcacccgcaaacaccatatctttcattattcatagcataagcactgggtgctctttcgcggataatgaccattggggagaatccgcggtcgatggggaaaccggaaagatctcgattgcgtgaatcaggatgatgtacttcgggagaggaattgctatttgactgaatatatttttcagacacttttggaggcgcattcctggtcctgagtcttgcagccataggcgatgtggctttgttttctcgccacataca

SEQ ID NO: 113636 - DNA, 824 bp, Glycine max
  unsure (1)..(824): unsure at all n locations
  Clone ID: PAT_MRT3847_73623C.1
gcagcactcagcagccaaaccccccccccgtctccgtcctcgtcggctcaggacccgccctctatcagaaacctgcggcggaggagcgagaagcaaaatgttctgtgaaagcttaacaacaacaacaacagcaagtaataataataacaactcgctgcatgacactattccttgtgctctctctcttctgtcatcatcacagacgcacacaccaggagggaatggtttgaaccaaatggtacagcagcctcctcctccctcaatgtccctcatgatgcagcccttaggccttagcttgcaggataataacaacaacagcttagagtctgtggatcattgttcctccatatatagcttggcttctgatcatcatggatcccactgcaatgaagcagcccctcaactgtttccctttcaatgggaatagagataaggattaattattcacactttctttgttcattcccctaatgaattctttcccccccaaggactagtcaattaattctgatttcaccctccctttataatgaaggcaatgcaatgcctatgaacaatctcatggtatttctatttgtatcttcaggagagaaaaaaaaactcaataattttacataagattcataatatatgggagttgtaaaaggaaagtctatatgtgtacacctctaatgggaataatgttagatggtaactgacaaaatttagtaatttacatggtaagttccaatcaagtccaacctcttattaggttatggngcttggtaatgttaaatccgattcttattttcatccaattcatctacttgattaagtttcttttt

SEQ ID NO: 113637 - DNA, 436 bp, Glycine max
  Clone ID: PAT_MRT3847_73624C.1
ggaaagaattcgtgagaacaatggcataactcaagtaagaatgtagaatccatcagcttctcgaacagttttcaagaaacaactagacgtatcactacaccaagaaatcctctaacggacacatgaatcatctagatacgtatttacaagaacaaatgatgtagcatggagcaccacaattagtaccaaaacccaaaatgcccaaaccaacgcaaaaactgatgccattagggtcacattccatatgggttgcttagcatctttcaaaaatcttatacagtttctccagcgaagttacctgaacaaaggttccatcagtagccataaaagcagggggtttgaaaaagagtctcatggaaggaaaaagcacatgttgtattgaccattcacgctgggcccatgcagtctcagcttcaaaaaacattttatgctcaac

SEQ ID NO: 113638 - DNA, 320 bp, Glycine max
  Clone ID: PAT_MRT3847_73625C.1
caaggaccaacaaaatattttttccagttgtggcaaaaaatacctttctgggtaaccccaaaaaagttccaggggtttgctccaccccaaatggttgttttaaacttcttccttaaaattcaaaccttaaaaaacctcctaaaaggtggcaaaccccctagcttgtaatttcccacaaaggattttgacatcaatcatgcaatgcccccagtttttaatcgtctttaaacaaatgatcctttttgttataaagcttcccctcagtcccccctttttcaggcaaaaaaacggggtccctttcttttacagccccggaaatt

SEQ ID NO: 113639 - DNA, 419 bp, Glycine max
  Clone ID: PAT_MRT3847_73626C.1
ccgaccggttgcaaaaagacaccaaaagggttggacccacgggtcagcaacacattgtaccccttgttaagcatcatgcatggtcaacttccataacagaggatgatcatcatttatcagaacaaacatattttttcttgtgacgtcaacataccttagagcattcattggtagtacctagattagagatggaagtcagtaaagatcttaaggtcaataaagaggacactggttaattatatgaatggagtcctaccaatggacgaggagctgagatcatagcttcagtaagttctatagtccaaacatgtgttattcgagttgctggaggccttccacatgtttgattatctagtggtggcatgaagtgaagattgaatatccaatctctctctgaagcagcataaatgatgatgata

SEQ ID NO: 113640 - DNA, 435 bp, Glycine max
  Clone ID: PAT_MRT3847_73627C.1
agcaattggatatcatgctttgatcttaaacatagtaaatattccgtacaaaagtaacattttaaccaactggaaatgaaacaaaaaaaataaaccaaaggttgatctatgcaatctatgggagcttcctaaatcatcagccatccctgccgtcatgggacatagaagatccaaaatttggatgacggttcattttacagttccgttacaggatttgtagcatggttgaagtcccttaaacgcaaaacacccaaatcttcataatacctagccgtagcagttctacagccatctagagccatgggataacagccagatccagcttcatcagttgaagagcaaagcagggaaattgattgacaccagggccaacttcccatacattcacataagcattgtaaaggccggcagtaactattttgcatggatccatgt

SEQ ID NO: 113641 - DNA, 403 bp, Glycine max
  Clone ID: PAT_MRT3847_73628C.1
ctcgagccgaaaagatttggtttgatgaggtatcgattcagttaaaacacgtcgtgtcctaagactactggcactaggtaggttgtacttctcttcatctcggagaaacaaatggctaggtctgcgaaagggcatcacgatgaattcgacgaagatgatgaagaagaactcttaactggaaacatctcttccacagtgaaggtggatgaacccaccacggggaagagggggaaccctcattcgtcaaagcattcataaactgtgcaacgccgaaggagcacgattaacgaaaggggttcagttctgagagatctcataccctccaatgatcccaaaagagacaaggcgccctccttgtttgaggggattgagtatattaaattccccccgaaaaaaaacaaat

SEQ ID NO: 113642 - DNA, 232 bp, Glycine max
  Clone ID: PAT_MRT3847_73629C.1
aaacctgctcattatagggttgtgggcatttaaataacatggctcaatctgtaacttaatttaatttactttttttttttcccacagaaggggcaaaccaccctagctggctataaaacccacacgtgcataaccatatcactcccttgacatagaaataatggtaaaaaaaagaaagaaccgatgggggcttattaaaaatttattaataaagggctctataccttgccca

SEQ ID NO: 113643 - DNA, 442 bp, Glycine max
  Clone ID: PAT_MRT3847_7362C.1
ctttgtaatatctggatggggggggagtatgctttctgctctgtttatccagtcccacatttttgttggcgcttctggtgcacttcttggcgtgctcggacgcatgctttctgaactcattactaactggtctatctttcgtaacaagctagcggcgctccctccccttgggttcctccttgttttcattctaacaggcggaattctcccacctgtgggcggttctgctcatatgggaggcttgcttgctggctttcttgtcggatttgtgtttgtgatccgtgccccgcccgtatgggttaaccaatgctgtgctccctttgatctttctccgggactactcgaccctgggttccagaaagatcacctcatcttgtgggtcttttgcctgttcttctccttgctcggcttactcgttggctggtatggccttttgcggggg

SEQ ID NO: 113644 - DNA, 998 bp, Glycine max
  Clone ID: PAT_MRT3847_73630C.1
cctttttgagttgctgtgcaatattgagccatgggaggcgcattcaactgcgatgttggatttgtgtcagagaatcttaccacctaaatttctagcagaaaatccaaaggaagctggcttttgtctttggcttttgcatcctgaaccttcttctcgccccaatgccagaatgattttagagtctgaagttatgcgtgaatcagaggaatcaaattctgtagatgatgttggaatatctgatgacgaggctgaaacagagcaattactagattttctaattttaatcaaagaagcaaagaaaaaacgggaagcgaagctggaagaagagctaaatttattgaatgaagatattaaggaggtagaaaaaagttattcatttgtgacagattcagtatttcctttggtgcaaatgaacaatcctgaagtgagaggagacaatttatattttcaagattcttccggttcagacattagtagatccattcgaaggttgtttggttatgaagaaagatttatgagtaacataaatcagctagagaattcttacttttcctcgagatttcgagtcctgccaaaagaagcttcatctgtttcaagcaatgataaaaatgtgatggaaagtagatggaggttgcctcaagtagagaatgttaataaggagtctagaagaattcagagttctgttggttgtctaggatccttctttgaaggtttatgcaagtttgctcgttacagcaagtttgaagagtgtggcagattaaggaatagagatttgcttagttctgccaatgtaatgtgtgctttaagttttgaccgtgatgaggatcacattgcagcaggaggagtttcaaagaaaatcaagattttcgacctcaatgctatttcaagcgattctgttgacatccagtacccagtagttgagatgtcaaataaatcaaagcttagttgtgtgtgctggaacccttacataaaaaatcatctggcatctactgactatg

SEQ ID NO: 113645 - DNA, 363 bp, Glycine max
  Clone ID: PAT_MRT3847_73631C.1
tcactggcggcggccgcccgttttttttttttttttcaaggaaaaattacctttcttcataagtaaaaggagaaatatggacaggttaggaatgagggaaccgagaataaccctctgtgtgaagataatctataggttgtttgctgtaggtcaagattgtaaaatgacccttgtctataggatcacgttccaagtgtcagaaaatcctggaaaacaccaacggacgcaaccggaataacaaggaagatcagctttgacttctccagtaagctaattcccaagccttatggacctaacagaatttgccccatcttatttcaattctggctaataccttacctaatcgaactacactggctcctt

SEQ ID NO: 113646 - DNA, 312 bp, Glycine max
  Clone ID: PAT_MRT3847_73632C.1
ggaaaggaaattcttcttttatttatgcttttcccagcataggtacttgagggactcattacacaaggggacataatttctttacccgtttttttacacttaaaaaaaggcatctaaacctttggttcttttattcattgctatttacctgggccaacactaggtggagcccaaaaggacaaaagggggggggcacatgcaaaaagggctttttaaaccacaagtttcctttgaaacccctgagggggaaccaaaaaactgaaaggggggggggtctttacctgcctggaccggtggctttttaaggtaaaa

SEQ ID NO: 113647 - DNA, 217 bp, Glycine max
  Clone ID: PAT_MRT3847_73633C.1
tttccccttttcttattgatgtaagaattgggagtgactaatgagatgtatttggttgtttagaaataatcttgtaatgatgtccttctcgtcatttgttgttcaattatttctactagggttttagggtgagtcctggcacaatggtaaggtttttacttgtgacctcttttaggttcaaatattttcataaggaaacatttatggtaattatttc

SEQ ID NO: 113648 - DNA, 207 bp, Glycine max
  Clone ID: PAT_MRT3847_73634C.1
ggaacctgcttcctaactaactgagcgaacagcaggaagcatcgacgtaacagccactgctgaccggtttcaatgaaaccgtgtaagactttatttcagtcattcagcacgtggataccaagaggccaagtccaatcattcaggtgacaggtcaatcgtcgacattaagaatgtctgtatgcacggctctatcgcatgccactgtgc

SEQ ID NO: 113649 - DNA, 479 bp, Glycine max
  Clone ID: PAT_MRT3847_73635C.1
aaattgctttgtcgtcttgcggtctgactttttcttgttttgtttttttttcttttttttttttttttctttttctttttttttttttcttctgttttctttgtgagacaaaaaccattttcaaaccaaaactgggggggtaaaaaatcgcccacccccccccaaaacttttggggaccaccccaccccagggccccgggaacaaaggacaagggaaattttgggacactgtccccaggggaaaaaaagggggccccaaattgggaacgccccttcaattcgagggggggggggggtaaaaagggggcccccctctgggggggggaaaaaaccacccactttatcctaagacgcacaagggttaccgcggaacaccggggccccaaaccttttgaaaaccaaccctgtgcaaatcccgccctcccggctaggaaaaatgggggggcccccccccgttaaaagcttggggcgggggcctc

SEQ ID NO: 113650 - DNA, 617 bp, Glycine max
  Clone ID: PAT_MRT3847_73636C.1
ggcggatgacatatgctttaaccctaatctacaaatcaactacacccagtactacgataagagatgagcaccactatggtacaaagacctagtggtttgtctggagaactttggaatatttaaccgcttataatatggattaacaatagaatgccttgtataactgggataatgacaacgacttatgctgatgaacaatggccttgacaaaagaggtctgaaaggtttcttggcagatgacatacagagactacttaatctacaaatcctaaacttgagtaagaacaacatccatggagcaattccatccttgcttggtacaataactagccatgaagtgcttgacctatactacaacttattcactggatcaattccagaaagccttggacagttgacatcattacaaagactgtaagattctccagtgtttaactaacccataaaacacatatgaaggcaacaaatgagtatcacaatgtcttcatgcaggaacttaacagcaacctcctatctggaagggtcccagcaactgtaggaggaagactactctacagagctagcttcaagtatgtaatcaaatattaaactctagacaaattatagaatacgtaatt

SEQ ID NO: 113651 - DNA, 666 bp, Glycine max
  Clone ID: PAT_MRT3847_73637C.1
agaacataaattcatttaaggaaacagagagttggaaataaacgtgaatcacgggacatacactagttgtataatgaaaaataattgcataattgtctattgtaatgggaaatagaaaatggggaagaaaagacccggagaacacataatctccaatgtctataaattagtactcacaatgttgagcaaaaacaagatttactggggttgtccatttcattgtgaactaaataacgctttgctaattatgcctgtggcttcaatatatcgatctacgcacctagagatgcaactgctttcactcccaccgaggcttgaacctggttttgtaacacacttctcaaaacactttcttcccactgtctcaagaagttgttgagcatactcaatggcgagttggttcttcaactggtttttgagatcctgagcagataattggctcgacgaccctctcgattgatttgagaacgaatccattgcttccccgactgtgtagtgtagcttagaaactccatgtttgccgcccccttctgtcgtcttctcgcagcctaaataaccccaaaaaccctaattcagcatttctttcggacgcgtgaattatccacatttttcaagaattacaagtagctggagcaaatcaattgcacctcgagactttttcaaata

SEQ ID NO: 113652 - DNA, 1150 bp, Glycine max
  Clone ID: PAT_MRT3847_73638C.1
cccacgcgtccgttgtattatttctacctggggctctgatagttaaatatgactgcgccacattctcaatggtgctgtgactcatttttatactctgatgcattgctgtggctataattaggaactcttgtttcacattaatcatataaagaagaagttgagaatttgctcgagccgattcggctcgagtacggctgcggagaagaggagggatatcagaagctcagacctagggatttcggccgtttgctccccaaaaggtttcggcgcaatcggcttctgcttcaaggaaggagagcttgttatttgcaatcaacaagaaaaaatgtcaggtgaagaggttgttgttgcagttgagcctgctgctgccatcccaggtgagccaatggacatcatgactgccctagcagcttgtgctgagaaaatctctggcttatggtggtcttgcacgatggtcttcatgaaggtgcgaaatggtgttgagaagccatgctgcacagctctgtgttctagcagaagattgtgaccagcctgactatgttaaactggtgaaggccctttgtgcagagcacaatgttagcctgctgacagttccgagtgcaaagacccttggagaatgggctggtttgtgcaagattgattccgaaggaaaagcttggaaaaggttactggttgctacgtgtgtggttgtaaaggatttcgggtgaggagcatgaagcctataatgtcgttctgcgagcatgtgaaatctcaatgaggtgcaagattcctagattttttgcatttatttttaagttattatatgagaatgatttttgccttttatctggtttacatctaccttgggttttgattgtttaatatgattatcccgttctcattgttgctgattttttcttggtgaatgcttttttaattactattggttttctgtgtttttaagactgacctgttgagttattaattgcttacacttcatgatagtactgaatgtgttaatacgtaatgcgactactaattactatgtacttggctgttatattcaagatcgtgatagaccactcccaatggagcattttatctaaacttctgctgcttcattcgtctcccgtgaaaaaaagaactcaacagatagaacaaccaaaataac

SEQ ID NO: 113653 - DNA, 278 bp, Glycine max
  Clone ID: PAT_MRT3847_73639C.1
tacgtagacctaatattgttattattatgagagttcacatcgcaagtacgtagaactttatcgcctctctcacttatttacatactccttttactaataaaaatagctatagatatagtcatcgtaaacatagaaataatcaaaagtggtcgtctcacacgacttaattccatgcatgtccgtacgtgattcaacagtcatctcacatacgctattcagtattaaccaatctcttactcgagcataacgatacgatcgcgaaaatctcgaatccattt

SEQ ID NO: 113654 - DNA, 714 bp, Glycine max
  Clone ID: PAT_MRT3847_7363C.1
cccttcatttgaaagaacaaattgtccttcggtggttgatgttggcttatgcaagcctgtttttggtagattcctgggtagatcttttaaaggaagggatcgcaggaagatgatctcatggaaagacatgaaacttaattccagctgtatctaatagtggtaggttcctgtctggatcttccagagggtaggatcaaattgttcttatgtgaagatacccctccaaattgtcccaagcaggaatgttcagctttggaggtgacaaatggatgctacggaatatggtaccgcaaggataatgatgttgtacctctgtaatatgcgttgagccaaccgtgcaacttcattgttcttgactctacaaccaaaaaactgactgggatactatgatagattttgaaggggtcatttttggtgtttgagtgtttgttattatgctttaatttctggcaaatgcagctagttgggttccagtataagagcaggcatcatgggtggaatttaagagttgtacattactaaggtctactacatagttgttgtagacttgtagtattttcttttattggttatatttaattctttccattctgaatccgagattccctagcaaagacgagatgatttcctgtcagcggaatttttaagaataaaggacattattacaacaagtaggttgtattgtatgttactgcaatacatcttttttgcact

SEQ ID NO: 113655 - DNA, 598 bp, Glycine max
  Clone ID: PAT_MRT3847_73640C.1
gggcgttcaggagatgacggtctgcgccggcattgcctggtactgcgtgggggccctgtcgacggttccaaagctgcgctgcccctcggtcattccgttccgagtatctgctcctcgcgtggggtgccgtttgactgggtccgggggccgtttgctggcggcctccattggcgtatacgcgaaggtgcccgtctctggccttgccctccaggccaagaccccgcttgctgttgtctgcgtcctgttgctgcctttcttcaacggctgaccgtgcagctcctgctgtgcgttgacatgggaacgtctctccagcgtcgccttgggctgcgctgtggctggcggaagccgcaggagcatagccgccgttacccagcgctatgcttgcgtaccagccccagagcgggcgttctgttaactgggtcctgggggtgcctgtcgtcgcccgttgaccgtggctctgctgcggtccctctactgtcgatcagctctccagcagggccgtgggctgcgctggtcggcggtaggagcggaggctgggccgcccttccttggcccgtggcggaagaaagagagaaaaagtaaaatttcctgcggcggt

SEQ ID NO: 113656 - DNA, 437 bp, Glycine max
  Clone ID: PAT_MRT3847_73641C.1
gggaaaaaacctttaactttggggggggggcgtttttttcccataaaaaccccccccccgagttttcccggaaaaaaaaaagggaataaaaacaggggggggaaaaaaaaaaacccccaaaaaaaaaacaaggtttgtccattttaaaaaaggaaccccggttttaaaacccgggaaaaccaaaaaaaaattaagggggagctttggggaaaggggaaaaatctttcaaacccccgggaaaataacccttcagggaaggggggaggggccgcccccccgggaccaaaaggggggggcccccaaaaggaaacgggcagggggttgaaaaaccccccaaaaaccccccggggcttttcggattggaaaggggcgtgtttttcgggcccccccaaaaaatttcaatttcccgcccaaaggccttaaacctaagggccccc

SEQ ID NO: 113657 - DNA, 296 bp, Glycine max
  unsure (1)..(296): unsure at all n locations
  Clone ID: PAT_MRT3847_73642C.1
aaatnnaaaagagggagaaaaaataatttgttggttgcccctggaccccgaaaccaagaaccaaaaacaagataaggggtaagccttaagcctaaaaatcaaaatttctattttatgacccgaacgccaaaatattaaatacaatgtcaaaggttactaagacccaattccttattcttggtttttggcgctcaagattcattttaaccaatatagaaaatgtggaaggtgcaaaaaccctttatgttttaagcttgagattttagaccaaacccaacccaaacctcaaaatggac

SEQ ID NO: 113658 - DNA, 314 bp, Glycine max
  Clone ID: PAT_MRT3847_73643C.1
ttcttacggctgcgagaagacgacagaaggggaccacacttgcttctcttgcttccacttccattccaccatgccttctaatgatctcaaacatggggtcaccaccactacaggatccaccaacgacttctataggaccagctgtgggaaacgaatgctgagggtcgaacgcggccttaagtcactcggcataggcgttggtctccatctatctctgaccgtcttatgagcttacataggctccttctgctacagtgcccattacgcttcgtgaagccccttctggttcccacccttcggggccctacacttga

SEQ ID NO: 113659 - DNA, 309 bp, Glycine max
  unsure (1)..(309): unsure at all n locations
  Clone ID: PAT_MRT3847_73644C.1
gttncnngcactgaaacaacanacacatacccnccctccccacccccacnccccncncnccncnncaaccccnancccccacccccnacnaccccaccanccaanaagnaaaaacnccaaccnccncncaaacaccaccactcnacaatacctagnnactanactgacannannctncanttggcnanaggnacgtgnagacacaagncgagtacgagcctnnaacaagacnagatcntgatacacattatatcagagcncaagangcgngngcttnatgatntatgttcaaaacaagatgatganatt

SEQ ID NO: 113660 - DNA, 542 bp, Glycine max
  Clone ID: PAT_MRT3847_73645C.1
ggtccggaattcccggctcgacccacgcgtccgctccatgcaggtgctgaggtcaaagtagattgcatgttcaaagcactttcagagaaaacttctgagcagatttcactttcagtgaacagaactaccaataagtatgggatgtacaagctggaaatcccttcagtggatggagtgaaatgtgcagaagattctgcagttgtgtcttcttgccaagcaagcttaataggtagttcatcctctgcttgcaatgttcctggctacaaaaccacttctaatgtgatagcaatcaaagcaagaagagccaacctctgcatatacagcttcaatgctttgactttcagaccatccaagagggacatcaccttgtgtggtaattaaaagaagcagcttacacaagtaggcctagtactttggtcacttgtgtatacatacaaattcgaagaaaataaaatgaaaaaaaaaaactatatgttctctttttgcagccctttaagggcatagatcttttctctctctctcttcattgttttgctgcatta

SEQ ID NO: 113661 - DNA, 478 bp, Glycine max
  Clone ID: PAT_MRT3847_73646C.1
acaggtacaggaacaagttccaaaatataaggtaaataaacttgttcaacaccataagaatgatcggatgttaaaaaaaacctctatcaccccaaattcatgtataaaacacttggtgaggaagaatcagaaacgtatagaagtcgtagacacactactctagagtcaaaacacgatcatatatatatactccaatgttcattttgctgagtcccttctcaataccattttgagtgtttgccatctcggatgtgtcctgaatatcattgctagttgtaattgtagtaacgaaagcagtgatacttcagacttgaagattacaagattgaataggtacaacgaccctttggtctattgatgttataaaaaaatggttatactgcccggataaaaaattttacaaaataatccaatcataatccaacataataaatttttttatttttaaaaaaattatgtaatttaaccaatatttttt

SEQ ID NO: 113662 - DNA, 545 bp, Glycine max
  Clone ID: PAT_MRT3847_73647C.1
tccgcgcacacttacatgcgctgctgggctggtacgaaaagagactgtcttgcgagtgaacacgagtgcagaaatggctactgttgctgaattgggaatagactaccacagacaagcccgctagcgtgctagttcatactcgcgacaatacgcttcgtgttatcaagctatactgcagtgtgttgatctgctccaagcacagagctgttgcaaaggaggtgttacatgtcctactggcgagacatactgagccggatgctatatgaaatgggcggaccttataagatgctaggataatcacggatcgagagtccgtactatccacacgattgatctttattacgtacactcgagttgaagatgcactgaatgccatataagccgtggatgctcagacctacatgctcgctgcgatctagatgatatatgctaatgaccgacctagcggatagggtggatgtggctgggttccaaactgtgctgtaggcggcggtgactgtgaaggaggcaccgtctgtcgaagaggttgatggggagacatctat

SEQ ID NO: 113663 - DNA, 217 bp, Glycine max
  Clone ID: PAT_MRT3847_73648C.1
gccgtgtgcaagtcatggcgctctccaatcagcaacgaatccttcatctccctccagcgccgccactccccttcctttctcctccttggcgtcagcagcaagctcctcctcccccaacgccgccatcaccaatgatcctcgctcagccgctcctaaagcctcctccgccttcactccttccgcgatctcgagttccacgtccattccttctgtaatg

SEQ ID NO: 113664 - DNA, 168 bp, Glycine max
  unsure (1)..(168): unsure at all n locations
  Clone ID: PAT_MRT3847_73649C.1
ggatgatgaagttgtgggctttgatgtcgcaagannaagaattgattggttggttagatagtgacagatcagagcgcacagtcatctctgtggtaggaataggaggacaaggaaaaacaactcttgccaagaaagtttttgacaaggtggctgagaagttcaaacgcc

SEQ ID NO: 113665 - DNA, 1499 bp, Glycine max
  unsure (1)..(1499): unsure at all n locations
  Clone ID: PAT_MRT3847_7364C.1
atttgattctctgcagaatctggggttgttcctgctttggtctggtctctcagctctgatagattggcaccgattctgggtgtgagccaaaaaagctttcttttgtttcctctgtttttcttttcggcaaagtagaagatatttgtgattttcttctgtgaattgaattcgagtcgttgcttctggcttcggtgcttgctgttttgttggcacaagttattggtccaattgaaatgaaagagtttgagtgaaaaggagacttagactgtgtggtctggccatggagaattcttataaggcaaatggaaatggaccaactgagaatggttactctgttgcaaggcattcttatcaaccctccttgaaggggtcattaccttggctggacataaaggtgttttatgtaagagtgtgcaagtgtgagcttgatgattccactcctggatctcttacactgaatcatgttcctttgaatcctgacactcttcttgaaattaatggcgttcgtactagtatatattctgatgggatgtcaacccttctcaagagagacagggtagatagaaaatcagaagaagtgacatttgtaagcactgatagcataaggatgagtggtagtgtcaagttcgaggtgtttgataaagatgttctgctgctttccggtgctttagaattgtgtaataccaatggtgttgttggggaaatcaagttataatggacaaaggggggaacatgaactgtgagtcatatataattccaggcaccagcttctttaaggggaaacaatttgctgttgccagactcaaagtctcncaacaattgaggtctacattgccggctccttctcgagtactccaattatcttgacaaaaaccttgcagctttctcagaaaaagcatacaaagaagggagtattggatgcaattccagagcatgaggccagtgaaaatgggaaagatatttcttcagcccatgctttgcaggtaattagtgcttgttcagcaatgtttttggtgtgcttcttatattatcctcttttgctatgtcagttcatcggtcgagttaacttcatgccttttaggcctgtttttgcgatgtctgactttgcttttactgccttaatgcacttgcagttgagtcatttgaaaattgagattgtttaacagacataagcatttgtatctgatggatatcgggacctctcagactagcagatgggacatacataatataactatgatacaagtacaactgaataacctttgatctgtgtccgacgttttactttctgtcctaaaattattttgttcacttgtgtattgttttttatggatagctagctgtcaagaaaaggatacaattaatgtccagttcttcatttaagtttggtcccccccttgagcacttgtaatttgctaatcagcattacatacccttttttcacaaattatagaccatcattcttaatatttacatgccaatcctgcaggcatgcaaga

SEQ ID NO: 113666 - DNA, 762 bp, Glycine max
  Clone ID: PAT_MRT3847_73650C.1
ctttactcgtcatattaccaatattgacatttgcattccacaagttctgccagagacgttttgagccagcatttaggaagtaccctcttgaggaagcaatgtcaaaggatttattagagaagagcacagaacctgacttgaacatagaggcttatttggctgatgcttacttgcacccaatcttcaggtcatttgaggtagacgacgaattggttgaagtcagagtagataatcaccaaactaatgtagctgattcccaaccaagtgagcctagttcaccatctccaccacatcatgtgcaacaaccatccccaccccatcatatccatgaaccatctccacctcaatatagtgagtatcaaacttcaccaccaagttattactaccaataccatcctccatccccaccccattatgtttatcaatactaagttgagccttcttgaaccagtgcataccaattaaccatgttgcttgagaccccttaccaaaaatttagtgtttcaatcaacttagatatgttttttttatttttatctatccatcgcaaatgtaaatgtttattttttccttacatgtaaatgctttggattcttctaaatatgcggtggctaaagtaggcaggattttacttgatcaagctgctagagaggtttttatgtttgccaaattgatttgttttgattaatagggtgattgccttgaatattgctattatgaaagtgattcaatttatgcaaccctcggagtggtcttcggtcg

SEQ ID NO: 113667 - DNA, 286 bp, Glycine max
  Clone ID: PAT_MRT3847_73651C.1
attttgcagttgggcggacaatgaatccatagagggagctaaagaactaacatgtgaggatctcaatatggtggaggaaggtttatgtgtccaagacaagttcttaccatagtatcttgatcaaaaacctgcataatgactcactcctaaggatctaactacaccctgacgagagcctaaggggcaccaaaaagtgggacacgtattaacttgggggacatcatctcctgcgaccatatgataatatcaacaccatcaatcatgcttttggagagcaaacggaccc

SEQ ID NO: 113668 - DNA, 439 bp, Glycine max
  unsure (1)..(439): unsure at all n locations
  Clone ID: PAT_MRT3847_73652C.1
gggaaaggaaagaccccngcggggaccgggccggaaaacccggggcgacccacagcgcgcgaataaagcacgggaaccggacgcaaaaggaaagggggccaacaaaggaggaaacccacagacacccccccggcaaaaggaggcaaaccacagaccccaacgcacacaaaaaggccggcaacacccaaaaaaaaggaagcaccggaacaaaccggagggaaccggacgaaaaagaaagggaaagaaagcaagcagaggacagaaaaaaggcaacaggcgagaagccgacaacaaaacgcagaccccccacgccaaccaggacccccccgcacgagcacaaggaccaagagaacgcaaagaagcaaccaagcaagcaggaacacaaaacgggaaacggggaagccccagcagaagagacaaaagcagaaggcgagaaaga

SEQ ID NO: 113669 - DNA, 693 bp, Glycine max
  unsure (1)..(693): unsure at all n locations
  Clone ID: PAT_MRT3847_73653C.1
aaggattggaatgtttgggtgagcaattgaatcttgcagaagggatgaatgatttacaggagccagaaggagtggatatgtctaagggctttaagcacagtacatcttcctcaactcaaggatcaagatggaagtctatgttaaattctgttgccaagcaagtttcacaggttcctctctctttggcaataagagtagcatccctcaaagggacattgcgtttgcagataaagccacctccctctgaccaattgtggtttggtttcacatttatgcctgatatagaattcagcttggaatcatttgttggagaacacaggataactaattcacacatagctttgttcctggtcagtcgactcaaggcagtaatccgggaaactttagtgctcccaaattgtgaaagcatatgcattccatggatgctagctgaaaaggatgattgggttcctaggagtgttgctccgttcatatgggtccacccagaattggggaacgagacttcaacctcagttgataccaataatcaagcttgtggtggattaaaagccagtgctagcaccttaagtgatgatggtccagaactcanacaacatanaccaccaaagtgtcccaaatctagtcaggaaccagctaggaaatcagattctgtggcactcacaccaatttcctctagttcagtaacattaagga

SEQ ID NO: 113670 - DNA, 335 bp, Glycine max
  Clone ID: PAT_MRT3847_73654C.1
cttggttaccaatttttgtgaattgtctttatccggtaggtcaattaccttcagaagctgtcgttgtaaatgttacatgtggtagtggacgtggtggtatacataacacttgttgtatgagtgtttcgctctattattcatgtcccaactgtaccacagaggactaggtcgcgtcactggcacggacacttagtcgtacggcggactagaggcgttgccttttcaaggtgtttactgtctagacttgttggcgttaacagtggaaggttgggttgtaactccactaattctatactgactcgactttctacgaactgtaagagtccttaaatttc

SEQ ID NO: 113671 - DNA, 369 bp, Glycine max
  Clone ID: PAT_MRT3847_73655C.1
ggggtacatacattttatggcttgaaaatatcattctccattccagtccactgcgagcaacactaccaaatcgccatggcaacactcacacagcgaacagtggcatcttccattttccattcccacacactcccacgcaaaccatgcttcttcctccgctttcgctttccctccactttctgcaacttcacattttccccttccaatttcgccgtgaaatcttcttcgcgcctcgccgtcatctccgcttcatcttcctccgagcaccaccacaactcctcctcatctccagacatcgccgtccttctcgaagtcgacggggttcttatggactcgcaccgcgtcggaaatcgcctcgccttcaataaa

SEQ ID NO: 113672 - DNA, 161 bp, Glycine max
  Clone ID: PAT_MRT3847_73656C.1
tcggctcgagctgaaaccaaacactttttcaatatatctattccaggctattcccctaaaccttatacccaagctatcacacactcggttgctcccaacccaacaggggggagggaaacatctacttacactacttctcttgacagaaatttcataggctg

SEQ ID NO: 113673 - DNA, 945 bp, Glycine max
  Clone ID: PAT_MRT3847_73657C.1
ccacgcgtccgtagaactctctctccattgtccatatttaataacaataaatataaatacataaaacataagattaaattataatctttgtgtatgttgactttttgtcgtttcttagaagagaaattatatatatattttctaagaatcgatccttattattcaaaatttcacaaacttcgcgacaacaaaattatcacatttttttatatccaaaatggtcatttagcatcctaacatacatcatcatcccgggagttgatccattccactgcaaaatgaggattgagcaagagagtgatggagtctccgcttccacaaagcacctcgtctttgcgtattacgtcactggtcatggttttggccatgccactcgagtcactgaggtggtgcggcatttgattcttgcggggcatgatgtgcatgtggtcactggtgctcctgatttcgttttcacctccgaaatacagtctcctcgcctaatcattcgtaaagtgcttttggactgtggagctgttcaggctgatgctttgactgttgatcgtcttgcctctttggagaagtattctgaaacggcagtaaagccccgtgctcaaatcttggctcaagaaaccgagtggctgaactctgtcaaagctgacttagtgatctccgatgttgtcccagttgcttgtcgagcagccgcagatgctggcattcgctctgtttgtgtgaccaatttcagttgggacttcatctatgcagagtatgtcatggctgctggacttcatcatcgttcaatagtttggcagatagctgaggactattctcattgcgagttccttatccgtctcccgggatattgcccaatgcctgcttttcgtgatgttattgacgtccctctggtagtgaggaggttgcacaaatctgcaaaagaggttaagaaggaacttggggtaactgatg

SEQ ID NO: 113674 - DNA, 577 bp, Glycine max
  Clone ID: PAT_MRT3847_73658C.1
cgactacttaattatcacatttttttatatccaaaatggtcatttagcatcctaacatacatcatcatcccgggagttgatccattccactgcaaaatgaggattgagcaagagagtgatggagtctccgcttccacaaagcacctcgtctttgcgtattacgtcactggtcatggttttggccatgccactcgagtcactgaggtctctctgtctctctcccaattcatatcctttttcgttttcgcgtcatttttggccaaatggggtgcttgatcacgcattctatttcaaaattgaattttgtttctgggttttcagttttggccttgatcatctgatattttttttttgaatttttcaaagtgtgtctgttttgtggggattttttttcttgttatgtgatgtgaattttaattcggaatgaatgcgtaggtggtgcggcatttgattcttgccgcgcatgatgtgcatgtggtcactggtgctcctgatttcgttttcacctccgaaatacaagtctctcgcctaatcattcgaaagtgcttttggactgtggagctgttcaggctgatgc

SEQ ID NO: 113675 - DNA, 304 bp, Glycine max
  unsure (1)..(304): unsure at all n locations
  Clone ID: PAT_MRT3847_73659C.1
cccacgcgtccgtcacgcgtccggattctggttgattatccaacttcatagcaattcatgcatcgatcgtnatttgatcacttgacggaaaccatcttgtcttgcccacaaataaaagtgattgtccagctcccaagtctccaagaattaatggtatcccaattttactgtaccatatatcaaaggttgaatctattccaagttaccttgttaatccactaaggaaattttaggttgatttcattcttttacctggatacctcaaactttttccattggaattgatcccagcttccaaaagatc

SEQ ID NO: 113676 - DNA, 440 bp, Glycine max
  Clone ID: PAT_MRT3847_7365C.1
aattcggctcgagcttttaccaagtgcaggttggattcagaatgcagcttccaaagtatattgccgcatcattcttctgcctaatctgctcatccattatttactatggaaaagcagaggcgcatcaagttaatttctatgtgcacaataaatgtccctttccaatatggccagcaactgcaccaaacagtggccaaccagtgatagcagatggtggattctaccttgctccaggccaaacccaacgtgtcatagcaccatggacatggaatggtagaatttgggcgagaacaggctgcaattttgcttcaaattggaaaccagcttgtgaaacaggagactgtgatggaagactagcatgcaatggactcataggcacacctccagccacactagttgaagtttcactccaaagaagaaacccgaatttctatgatggt

SEQ ID NO: 113677 - DNA, 121 bp, Glycine max
  Clone ID: PAT_MRT3847_73660C.1
caccgacaacagagccggagccggcatgggagaaccatacaccggccccaaatacatggctggataccccaagaggaagacgaacaaggacactaccaccatcgcgagcaacggcggaaga

SEQ ID NO: 113678 - DNA, 412 bp, Glycine max
  unsure (1)..(412): unsure at all n locations
  Clone ID: PAT_MRT3847_73661C.1
gcttcttcaggaaatgtattgagtttcataaacttgcaagttttgatgtgctttttttggtcttcatgggtttatttttgggacaaaacttggatacaattatatagtttcttaggtgctttttggtatttagaattggagttttaacttggtaatatgcataataaaggtctgcattaaagatttacgctcattattgaggtgaaactccaactctaattaaagaattgcaccaaaaagtacatatgtaattgtatctaacttttctccttatttttattctcacttaattgcttttatgctctacaccagccctactaactatacattaattgttgaagaaattcttaggttctangtatttctttcactagatacctagtgtcagcatgtatatttttggatgcttgta

SEQ ID NO: 113679 - DNA, 289 bp, Glycine max
  Clone ID: PAT_MRT3847_73662C.1
cccacgcgtccggattaacataataagcaagcaattaattaagaagaagagaagagtgggatggttgtggtgatttctcttcctttcataatcttctgctttcatctgggttttggatgttacttcttttgaagagccatatgattgaaattggttcaaaccaacctacatgtatttttgattcctattccaccttcatgttctgtttcatctaacacctatttttcctttttctccatcaccctactcttactctttgctatatctctcttatatttcttgattttta

SEQ ID NO: 113680 - DNA, 122 bp, Glycine max
  Clone ID: PAT_MRT3847_73663C.1
cagcgccagcgcgttgacgaagtcggcaaagccggccaccggcacgaagtccctggccggatcgaagccgggctggcgcgacaccagcggcaggatcgagatggtgtggtcgtggctgatga

SEQ ID NO: 113681 - DNA, 180 bp, Glycine max
  Clone ID: PAT_MRT3847_73664C.1
gaattagatactcgcttacgccatttgtactaagctacgttcgtcagatcactgtgcatggcactgcaccacctcttcgggatctatggtttctatgactcagaggtcgcacagtaacatcggtaaaggttttcttggtgtcatattgaatctgataatctagatagggattgcaaggtt

SEQ ID NO: 113682 - DNA, 671 bp, Glycine max
  unsure (1)..(671): unsure at all n locations
  Clone ID: PAT_MRT3847_73665C.1
cttccatgtttcttaactccggaactacttacaagatatttcacacatcatagttcccgagtcaatataatttgacatataaatccaggcatgttcaaatcattgaaaaaagcactaggactctaaggaataagacaattcctttggtgaaagtagtttgggaaggattaactcggaagaggctacttgggagcttgaggaaggcattagacatcaatatccaaacctcattaattatggtacattcactctcaaattgttaataacgctaattgttaatatggttaataggtattactaatttcgaggacaaaattctttaaggaggggaaaaatgtaacatcccaaaaataatccaataattatttagatgaagatatctaaatatatcttttagtaaaaataataatctaaattgttttaaaatattaagattgttttttattttaaaaagatgttagcataataatatattagaattggctaaagataattataattaaagataatagaaataatagataaagaaaaatcgattaaacaaatttcaaattatatataattcttatataaggatataccagttctttcttctttaagggtagacagntcttttctaggattagcatggttgttcaaggactcagaaaatanagtatgcagggaaattc

SEQ ID NO: 113683 - DNA, 262 bp, Glycine max
  Clone ID: PAT_MRT3847_73666C.1
cccacgcgtccggtgatttcagtgagtgatcggtgttcacttgatctcatcagaatcgtcagcgtcaattgattgagattccgatcagaaacagcggcggcggaaggcctggagaggcgactcaccccgacacgttgaaggcggctgtggctgagtgcatctcaacctgcatcttcgtgttcgccagctcaagctccggcatcgcctacaacaagctgacgggcaacgtggctgccacccatgccggcctggtctccgcctc

SEQ ID NO: 113684 - DNA, 203 bp, Glycine max
  Clone ID: PAT_MRT3847_73667C.1
tcccccaaatccatcatacacacaatatctctcctcacatccatcaactaacctacttcctaacaactcctcttgttcatcctctctttttcctcatattctccaacttcttcaacattcaacccactctcttcctcattgactcaccctaaccttcccacacattccttccttcaacctttctttcccacttcaacctcaca

SEQ ID NO: 113685 - DNA, 1492 bp, Glycine max
  Clone ID: PAT_MRT3847_73668C.1
atcagatgcaagatttttgccacctgccgctgctctatgttcactattgagtgtcgcgagactcatgcataatgtcttcctccaacgctctcagatcatcaaaactggtctcatggaatagaactgggaggctgcagcaaaccctagcggattgcgtggagcggcaaggcaaggcgttgcattcgggaaaggtttcgacggtgagactgtgtcccgaacgcgcttcccgaggcaggtacttcgattttcgttccaatttcgttcccgcctctgttgaattcgctcaggtctcgcccctctgcaccactctgtacaaaggcgggttccgaattcgaaccgtggagcacttgctttcggctttggaggcttcgggtgtcgataattgcaggatcgagattgaggattcggatactcaaggacacgacgcagagattcctatatttgatgggtctgcaagggaatgggtggctgcagtggaagaagttggtttgacagtggccactgatcttgatggcaaaagtgttgagaaaatggcaccacatgtgaatgaaccagtgtatgcttggagaaatgattcttttgttgctgcatttccttcagaagtggttcgaataacttatggcattaacttttcgcaggcacctgttattggctgccagtggttttctacaccccccttggataatttgggtgtattccatgcagatagctttgtcaagaaccttctgcatttatgaagaaggttgagcaaatgcgcaatgctggacttatcaaaggaggttctctagaaaatgccattgtgtgcagtgccagtaaaggttggttgaatccacctttgcatttcagtgatgaaccatgtcgtcacaagatcttagaccttattggtgatctgtcactgtttgcccagtttgggaatcaaggactcccagtggctcatatcgttgcgtacaagggtggccatgcattgcatactgatttggcacgccgcctgataggaatgatttgagaggctatcatgttgccagtggtttactaagaagttattggtattttaggtgacttcgttggagtagttgttcaacctgatgcttctgagctcttatttatgtgcagccaaggtggaagaagaaatgctgaaattcctaaacatcttgtattattattctgtctcttcattgtttctatcgtcatcaattttgtaatgaaagcatccaagcaaaccattttgtaaaagaaagccattcaattttccatcatttcagattttatagggaagccgtatagccataatcaagctcaaagatgcttcgacaacatttgatggaattatgatttaattcaatttttatgctaatagtaggaatccatctttctaataggatagtcaccaatgaatatccaccaatgccatgtggcgtgcaggtaacctaatgccaatagcaattctgtagggacacacaggattctcaaattaaggttctggtcttttatt

SEQ ID NO: 113686 - DNA, 375 bp, Glycine max
  Clone ID: PAT_MRT3847_73669C.1
ccacgcgtccgccttgccacaactaccactccaccgtctcacagtacacactctctactctactctactcatcatccatagaccatatagttccccatccccatccatattccataccagtaagtaagtaactcactcccataacattaacatttaatttaacacaccccacccccccctctctctctctctagtgggccaaaacttccatttttatcattctctgcactctccaaaaaccttcttcattttcactcaccaacacaaatcaattcaaacaaagggaagagccccagatgaaatcacagtctctggaacccatcaaatgagtttgagcttctccatctcttggttgggggtgaatggggggcaatg

SEQ ID NO: 113687 - DNA, 3399 bp, Glycine max
  unsure (1)..(3399): unsure at all n locations
  Clone ID: PAT_MRT3847_7366C.1
cggacgcgtgggctattatcttttggtttcctgaatccatttctttctacggttatcttatcttattggctaccatcttccctatcttcctcaactgggttctgcgtattgttttaagtttaggcttgtttcattttagtatttgattgctaattttatatttctgtattcatttgtttatttatttatttattactttgtttcattcacgattctagatgagctctaaggttagtgagggggttatttcctttatgttagatttaatccccttcccctttatcatgctaatgtataaatggttgttgccttttttgtcctccatccatccattccgagcatgaacgaacctatgaacagatcacattttatgtccttttcaattcaaattcacagaccaacccctaaatctccataactgatacattctctctttctctctctctctctggataagatcttcacatacagatggaccccacttcctccattaaaataacaatatccatcacttctcaattccaaaactgagaagaacagccatttgattctctgcagaatctggggttgttcctgctttggtctggtctctcagctctgatagattggcaccgattctgggtgtgagccaaaaaagctttcttttgtttcctctgtttttcttttcggcaaagtagaagatatttgtgattttcttctgtgaattgaattcgagtcgttgcttctggcttcggtgcttgctgttttgttggcacaagttattggtccaattgaaatgaaagagtttgagtgaaaaggagacttagactgtgtggtctggctatggagaattcttttaatgcaaaccgatattgccctactgcgaagagaggttctttttgaaggctctattgttcagttccccctaggtggccatttccgtggctggacataaaggtgttttatgtaatactttacaaatgtgagcttgatgattctactcctggatctcttaaactgaatcatgttcctttgaatcctgacattcttcttgaaattaatgatgttcctaacattatataattagaatacatgtaaacccgtatcatctgtgatggggtagatataaattcatatgtattgtcatttgaatgcatttattgctttatgattttttgttactgcatcgctgtcttgaaaatgttaaatttgatgtttattttctcctaattggtggtttgtcctcttgagtacttaaaatactgtttaatgaagaaaaaacggtgtattgcacaaattagagaacatgatacgtgatttttacatgattaagcgacagaccttagataacttttaggacttgctatagccagatccttgtctcccactcatcctggtctaagctgctggctctttcgcgagtgctccaattttcttgtccaatacctgtcatcgttttcatattaggcttacaaataagggtttattggacgcaattccagagcttgaggcgattgtaaaagggaaagatatttcttcagcccttgctttgcaggccccagattaccttttcgacaaacatgaagatgaagattataatagcctctacccaggaacagcatatgccgatggcgaagatggagaactttcatggttcaatgccggtgttagggtcggtgttggtattggacttagtgtttgtcttggcattggcattggagttggcctgcttgttaaaacctaccaaggcaccactagccactttagaagacggctgttctgatcggggcttctatttaagcttaaaactctctgctttttgttcatctccctcttaatccaaagacagctaaccttatttttgtccatctccctcttgagtcttgatccaaagacaacaggttaaatatcttgtccatctgagtggagggttttttttttttgctgtatgtaatatagtttatttttagtgccattctatgcgaggtatgatcttaacttcttaagtaaaacagcaagaactaagaagtttttgaattatttgccctacttattaaggtgttgaactggagaaagcatggttcgtttaaatcctgacactctatttgaaattataggcgttcgtactagaagatattcgatgggagtcaacccttctcaagagagacagggtagatagaaaatcagaagaagtgacatttgtaagcactgatagcataaggatgagtggtagtgtcaagttcgaggtgtttgataaagatgttctgctgctttccggtgctttagaattgtgtaataccaatggtgttgttggggaatcaagttataatggacaaaggtggagtatgaactgcgagtcatatataattccaggcaccagcttctttaaggggaaacaattgctgttgccagactcaagtctcccaacaattgaggtctacattgcgggctccttcttgagtactccaattatcttgacaaaaaccttgcagctttctcagaaaaagcatgcaaagaagggggtgttggatgcaattccagagcatgaggccagtgaaaatgggaaagatacttcttcaaccctttctttgcaggccccagattacctttacgacaaacatgaagatgaagattataacagcgtctacccaggaacagcatatgctgatggagaagatggagaactctcatggttcaatgctggtgttagggtcggtgttggtattggacttagtgtttgtcttggcattggcattggtgttggcttgcttgttaaaacctaccaaggcaccactagccactttagaagacggctgttctgattggtgcttctatttaagcttaaaatactctgctttttgtccatctccctcttaatccaaagacagctaaccttattttttgtccatctccctcttgaatcttgatccatagacaacaggttaaatatcttgtccaactgagtggaggtttttttttggcttactttctgtatgtaatatagtttatttttagtgcaattctatgcgagttatgatattaagtaaagcagcaagaagtaagaagtttttgaattatttgccctacttattaaggtgttgaactggtgaaagcatgattagtttagttttgactttcctattgatcgtaataatcctccttcaacaaagtaataagaaactagtcccaaaatgtatctatggtattaaaaaaatgtattttcttttatgacggtgtggtggttgggttgggcgttaaataaataatgcgtttccgggttcggtgatgtgtttgcatcaatgcatgtttcctgctagtgatgcttttgtcctcttactgtcttttttagcccgctattttgtcttanactctctacttagcagattcatttattttgctttgcgtttttttttttctttg

SEQ ID NO: 113688 - DNA, 786 bp, Glycine max
  Clone ID: PAT_MRT3847_73670C.1
gcatcagatatatggtatcagatgcaagatttttgccacctgccgctgctctatgttcactattgagtgtcgcgagactcatgcataatgtcttcctccaacgctctcagatcatcaaaactggtctcatggaatagagttcgtactctctctctcatgttctttatgcactatcgactgtttagttcccaaatttaattcaaccatgcacatactctactttcagactatcatttactcttatagtgcatttggattcacgctttttatatgtacaaggagttttccaaaaggacgttcttaagctcttttgacgcctttatgcagactgggaggctgcagcaaaccctagcggattgcgtggagcggcaaggcaaggcgttgcattcgggaaaggtttcgacggtgagactgtgtcccgaacgcgcttcccgaggcaggtacttcgattttcgttccaatttcgttcccgcctctgttgaattcgctcaggtctcgcccctctgcaccactctgtacaaaggcgggttccgaattcgaatgtggaagaagttggtttgacggtggccactgatcttgatggcaaaagtgttgagaaaatggcaccacatgtgaatgaaccagtgtatgcttggagaaatgattcttttgttgctgcatttccttccgaagtggttcgaataacttatggcattaacttttcgcaggcacctgttattggctgctagtggttttctacaccccccttggataatttggtgtacacttaagacttgtgcaggggct

SEQ ID NO: 113689 - DNA, 497 bp, Glycine max
  unsure (1)..(497): unsure at all n locations
  Clone ID: PAT_MRT3847_73671C.1
attcggctcgagcaaaagacaaaaaaataacctttaaataaacatctttctccacaaacctagcgggtctccacttatccaaaaaaagaattcactatccatcatggacattaggaaggctacctgtgccgttctcattgccgctgcctccatgagtgcagcattggctaccacagaggtctctgcacccgcccctggccctagcagcggtgcctccgccgccactgttggctccttggttggtgcctcagtcttgtccttctttgccttgttccactaaaatgtgcagggttatggggaaagaatgttgaaggaacatgcagctcaaggaagaaggctgcatatatttacttagatacacttatgtatggaataaagtgtgaacacaagagttatgtgcattgatatgtatcatcaacattgttaacaatgtagttgatttgtgttcataatgaaaattttactatactaaatatttgntagtttctttttatctt

SEQ ID NO: 113690 - DNA, 322 bp, Glycine max
  unsure (1)..(322): unsure at all n locations
  Clone ID: PAT_MRT3847_73672C.1
ncacanaacncnacnaaaannacatacannncaannnanncncaccacnnnaanccnannnanacaannaaantcanncccacaacanncanacaannanannannaaanannannnacaancnaccnnnaaaanaancannaaacnaanananncanncaacncaacataaacnaccaatnccacnnaanaccacannacacnanaaccnctaaacccnacaancnncncannanaacacaacnaccannnnaaccaaaaaaccnacnnacaaacaaacanaaannaaanacccacaaaanaaacccnanacnacaancaa

SEQ ID NO: 113691 - DNA, 224 bp, Glycine max
  unsure (1)..(224): unsure at all n locations
  Clone ID: PAT_MRT3847_73673C.1
ttcggccgaggaganactattccacttcggatgatcttatgatgagtcagaagcacacctttttttttttacggacaacccggattacactgttactacttataacacgacagggggaatctacatagaaggagtggtctagtcaatgttatgatgtcatagtgacatgacgagtatatgcatttgggtgcaaaggaaaactgcaccattttgactccattagc

SEQ ID NO: 113692 - DNA, 175 bp, Glycine max
  Clone ID: PAT_MRT3847_73674C.1
gaggagatataagcacccaaacgaagagatcatgaaagacaaaccagacatgtgtgcttacatggtacctactttggatgctaggcgatacatggaggtggtagaggtaccatagctcgggaaagaggctgcagcaaaggtcataaaggagtggggccatcgcaagaaaagaata

SEQ ID NO: 113693 - DNA, 334 bp, Glycine max
  Clone ID: PAT_MRT3847_73675C.1
aatgatgcggcctcgcggcggcaacgggaggagacaatatacgaacccgacgctcacatagctgaaaacttcctttcccagtgtctgttacaattcaacattcacgcttcaaagttcaaacctcacttcagattttgtctactggctgggagattaaatggtattggattttaatgttgaggttgctggctgaatttcagaaggaaagtgttcaaaggatccaatccatacatgagacgcaatggcaacaaacacactcatgttagcttcaatttgttataatcgtctgcactgtgattgatgataaagctagtgatgtaaaagatatggggct

SEQ ID NO: 113694 - DNA, 381 bp, Glycine max
  Clone ID: PAT_MRT3847_73676C.1
ctttttccttgttcagtcttctgttctgttccctctgcctccacggtcactttcccctgacccacactctctcttcaatacatcatctgaaactaatgcaaaatttccaaataaccgaaccacactactaatcacaacaacactccattcccattcctctcacatcaaattcacagtgccatgccatggacctccccagccacaaattctttcaacctccatctacattggcaccacatggggtagcactactcactgagagcaacatgagcatgtatgggaaaagcaaaaacaacccttttgcagatgatttccctgacccactttgcaagctcaacctgaaggaaacctctgagtttgtcaagtcattggctttacctt

SEQ ID NO: 113695 - DNA, 217 bp, Glycine max
  Clone ID: PAT_MRT3847_73677C.1
catcactaaggtcttcagcaatggggctgacctctccggggtcacagaggaggcacccctgaagctctccaaggccgtgcataaggctgtgctgaccatcgacgagaaagggactgaagctgctggggccatgtttttagaggccatacccatgtctatcccccccgaggtcaagttcaacaaaccctttgtgcttcctaaatgattgaccaaaata

SEQ ID NO: 113696 - DNA, 262 bp, Glycine max
  Clone ID: PAT_MRT3847_73678C.1
ttttattgacatttagtgaaccttggtttattaactttaatgcttgggcgggctttaacttttcaccttgaggtggattaaatgggtgggaccacataaatacccggaaacttgggggttgtgactggtttctaaataatcccccttccaacttcaatagattggccactattttttttttttaataaggttgccccctttgtccaccctctggaaaaccggggggttaagaattttttcttttgttaaaagccttgggggg

SEQ ID NO: 113697 - DNA, 467 bp, Glycine max
  Clone ID: PAT_MRT3847_73679C.1
aaaaaaacacacacttcacacgtcattacgacaattaaaagaggggtggaaattttcaaataggcagagcatactcaacaagaggggcatgcccaatttccttttttgaattaaaccaaccaaccagcgaaagaaaacataaattcccaaacatgccgaggattccccattttcaaaaaaactggcaataacctgtggaacaaaaaaaactgggctaaaaattttacccgcaatttcaaaatcttgaaaaattccccaaaaaatattaaaaaccggaaaccggttgggattggcaattaggaaacccaaatgcccttaaatttggtttgcccccctagaacctccccttttaaaaccctttttagggcccccttccctttttgggaaaaacaattcccaagaaagggggtcttaatttggccccttaccttccttaaaaagccttggaccggtggttgttggtaaaa

SEQ ID NO: 113698 - DNA, 235 bp, Glycine max
  Clone ID: PAT_MRT3847_7367C.1
tgttacgcgtccgaaaaaaaaaaaaaaaaaaaagagaaaattttaaaaaacaaaaacaaaaggatgctacaatcatagagagaacaaagatccttccctccgtgctgtgtccggctggcctttttctcgggtgtccgttattgtctttttggtggcctcgtttcccccgcctggttgggggacgcactttgttttctccggtctctttttttttctcccgtcgccccttttttcc

SEQ ID NO: 113699 - DNA, 462 bp, Glycine max
  Clone ID: PAT_MRT3847_73680C.1
ctctttgtccctttctctctctatttcttttccctagatctatgctttgaaagtgagcaaatggttctcttttccagatctaatatttctccaccgctctttgatggaaagcaatctgatctatgctttcgttctcactctctaaagttggtgggctttggcttcaaattgcacaacctaggtgaagggacacaggacttgtgaatcaatggtagttcttacttttactcgaggaactttgagaatcttttaaaagtggagtggttgtgcaaacactatgatgtctcgtagataatacatagaggcaacaccattatgggatgttatattccatacatgtttgcaatttaattgcatgcacttagtggcccttctactctatatgcactccactctgtaaaagatttttgggatccttgaggacaaagtaagccacactataagaagtcttgcgtcccttca

SEQ ID NO: 113700 - DNA, 506 bp, Glycine max
  Clone ID: PAT_MRT3847_73681C.1
ctaattctgaatgatactctttttctgttgttgaccgtagtaaatacagaaacaaagtgagtggatgcttgtctattgctctctgtgctgagctagtataaaataaggactttaggttgtttgtccactgcttttttacttccctatacttgtttctttctttttttgttgtataagatcatggatgaagtgctatagtgttaaccaaatggcttcaacaactcaaaaaggaggggttaattcagttatgaagtcaaaattctttaataaattaattgtgttgtcattttaagtccctagatatatattgatgtaagactatatatccattagaaacatcaattttatcatgcgtaactgagttggttaagatatggtcacttgtccttcaagaaaaatgacatttaattatgtcaagatattaatccattttttggcttatataatctattatgataagctagtaattgattattttgattcaagctttttggaattgaatattt

SEQ ID NO: 113701 - DNA, 317 bp, Glycine max
  Clone ID: PAT_MRT3847_73682C.1
gcaatgagctcgataaggggattggaacaattatttcatccccattacgagtcgctgttatcgccgaaggccatcctttgagcatttcgttcggtttttttccagttatgccgtcttgtatccctcttactggtgattggggtattgtggatggtctacctgaaggacccgctgttgaacttgctgagtacaaaaaccttggtgatggtgggtttaaaattgagaaagctcaccctctcggttataagcttttgctatgtccactgcttgacgctagcacatgtggagatattgtaattcttactgatattgatcac

SEQ ID NO: 113702 - DNA, 705 bp, Glycine max
  Clone ID: PAT_MRT3847_73683C.1
tcgtatttcacttcctcacacaatccacactcataacaaaaccctccccaaaactaaaaacgcagaaatcaaaattgaaattattaaaaaatttgtctgttattctttctctccaccaccatggctactaccataacagagcaagaagcctcatcacgtgccccgcacgtgctcgactacgccaccactacatccgacgacgacacggaaaaggaggaggaggagctggtacacgagcaaaacgaatcctccggcggagggcggtggtttccggcggcgtgcggtggcggcacgcggcggagcgggggaggcgcgttagggcgagttcttgacccaagggcgaagtgggtccaggaatggaacagggtgttcctgctagtgtgcgccgcggggttgttcgttgaccctctcttcttctacgcgctctccgtcagcgactcgtgcatgtgcgtcttcgttgacgggtggctcgccgtcaccgtcacggtgctgcggtgcatgaccgacgcactgcacgtgtggaacatggttataaggtgcaagatggcgaaacgcaccttcggactcggcgcctccaccacttcttccggcagaggaacatcctcgtcctctgtcggactcagagatacccgaccgcgtttcggcgcgatgggatatctcatgtcacggaccggattcttttttgatctggtcggaatctttctc

SEQ ID NO: 113703 - DNA, 741 bp, Glycine max
  Clone ID: PAT_MRT3847_73684C.1
gtccctttctgaaccacttaaagagtcaacagttgaaggccgagctgctctgttggcaaataacaaaatgcctcatccatttattttgatcaaacccaaggatgagcctgttgatgatataccagattatgagattccccttgcagtgattcctcctgactctccaatgggtgcagttgaaaagcaagatgtccatgacactgttgtatcacaatgcagagatgaagacgttgaacatgaagatgtttttccttcctcaaatgaagaagcaacttctaatgtatatgtagctttgtcatctatgggagaggaacaatctgtaaagataacacaaactgatgatgtttcaaaggaatctgagaccaatgactcatcaattgtcagaggaaataaagattcagtcattgcaaatgggtcaatcagtgttaagtcttcttcggccgtggctgaacttcaagttcctagttctatacccagcccgagtgatccggatgatgctgtactggctcccaagaaggtcgcaatgaatggtttcttacaaagtgatggtggaaaggagctggaggatcctatatccccaaattcatgtactttagtggttgttcaaaaacatcagcttacaactgatgatgtaagggccgttcatgatgttaatgacctaacaaagggagaagaaagagtgaaaatttcatgggtgaataacaccactaatgatttcccaccactctttcactacatacc

SEQ ID NO: 113704 - DNA, 1002 bp, Glycine max
  unsure (1)..(1002): unsure at all n locations
  Clone ID: PAT_MRT3847_73685C.1
tgagttacagcgacaagtcactgcattcctgaagatgaaaataatcagttcaaaaccttaatgtactggcaaacttcagacggacaaaagccctaaagatgcagagttctaaagttttcagcttaaaacagcattaccgcaatacaataactacaccacctatgcacgggcaaaaaatctttgacatcttgaatgtgtatcaagggcatcaagacattccattgaaatatctcgtgtatatagtatgccatattttcagcttcttcactaataagaatcgggaactttttcttcgtccttgttgggctgtttgtggagttggaaggcaataatatacaagaatatacataaacatcaatctacagtaattcttttccctcaacaatatggtactctactcttgtgctctactacattgatcctgtattggactgattcctccatgctaataaattttctaattgataaattagctagttactggggcaaaactctttcaatatacttattgataagatgaccaaaacaacattaattcatgagctttgggggcttgagaaagtatatactcctcacaaatcctttcccaacttcccccaccgcttttaacaccttgcaggggtcaactacatcctcgcgcttccgcttcttggaaggatatgactctccccatgttaggccgataacatcacctcccagataatcatgccatacttggaatgtggttgagaattcttgctttaaatctctgataaagcactttgatggatcaaaatctaccagcaacttatttttaagttcctctggcctgcccttcaaatctttaggcaacaaaaagggttggaaacacttgctggcgtgtccttctgcaacatgtgttccatgattaacttctgatgggaagagaagcctttggggatacggtagtttgcccttgtggagaataactactgcttcatnnnnngnttaaannnnnnctanaacnnnnccccccccccttng

SEQ ID NO: 113705 - DNA, 900 bp, Glycine max
  Clone ID: PAT_MRT3847_73686C.1
aaaaggttgagaaattttagatggctgcatctacattgttcacattgagagtaaatagtgttctaaaagtccttccatgccataacattgcaaatttgctttatgcaattttattgtgttgatcataatgtgttactcgattgtcttgtgatttaagatccggtggggacatctgtttcatctagcattctaaaggggctttgctccacatttaatgtggacacgttgcaaacatttagtttccagtattaatctttttaagatctctctatataagaaacggaagcatgatggagacgatgatgttaatgatgtgcacaaacacaaaaagagcaagcacaagagctcaaaaattgatgaattgggggcaattaaggttgcaggctaaaatggtaccgtacagtagttcacttcttttcctcaattggttgttgtcatttgttaaatttggaggggtctttcaattgacattatcaaatttcttgaggagggtagctagtgatctgactaaagattatcatgatggtgaattcacctgacgaaggaaaaggatgcaggtaaaattggatgaagataaaacttttttttcccttttgtacaataacaattaccttataggattgccagtaatttgcaaaactttggtcttcttccttttcccagtcttttggagcactggatatctcaacatgtatactttattttggtcttttaaaaaatattttgtagtgttctaaattaattggtagtttaaactagaagtaacagtttcttgtttaggttaactgaatttaactatggggagtatgtacattgattgcattcccccatatcatgtatctaacagttgaatgccccatgccttgaatgtatgccttgacctcaatcatatattaaaaa

SEQ ID NO: 113706 - DNA, 257 bp, Glycine max
  unsure (1)..(257): unsure at all n locations
  Clone ID: PAT_MRT3847_73687C.1
ggggcgagannacggtcaatcacctttatttctnctcctccttaaaccccccctncaaaccccactcgttttttaaaattccccatggcactacatccctctctctatttacattccaaacatacaaaaataaataaaacaattacatcaacaacatatatctataaaaataacccataaaaaaaatattaaccaaaacaaattaccaacccattccaaatttcacccaaaagttaaatcgattactacaaactcat

SEQ ID NO: 113707 - DNA, 367 bp, Glycine max
  Clone ID: PAT_MRT3847_73688C.1
gtaccatcacctcaagcaagtatataactaggagagtataatccaaatacggaacaccattatcattcaagatcctacttcttcaagcacaatcaattccttactaagcataacacttctagcactcatagcattttaccatcattgccattacattcaacaggtgtatgaggaaaaatagaattcaaactcaaaacacatctagtcacaagtgtgtccaatcattcaatagagattagtcacctaatatgaatgtcatgcatgatcataaaatcagtcaataattatcttggaattaatgcattatgtatgtgggtaccccaagatagtatttatatggcacccttggcactaagccggggataac

SEQ ID NO: 113708 - DNA, 185 bp, Glycine max
  unsure (1)..(185): unsure at all n locations
  Clone ID: PAT_MRT3847_73689C.1
cggcaggtacccgtgtccggatattctctgggttctgacccactgcttttccttantcggncctgcgaggaagacccgacagaacggggttgctggtttatataagaaaaaagagaagaacaaacaaaaagagaagaaaaaaaataatgagaaagtttcgcttttttcaaacttgttttgtctaa

SEQ ID NO: 113709 - DNA, 1650 bp, Glycine max
  Clone ID: PAT_MRT3847_7368C.1
tgttccttgttgtatttttccatatatttattttcgctctagctagcagttgattccttctttctcccctcgtgccccctctccccctgtgcgctgcccggccggtccctttgcctgtcgcttttggcgttcgggagtgtcggtgagcacggtacgtaccgcgtaaccgtctctctttgcttgcatagcatctgcgagacgctgacagtgaaaaagagtaacaccttttttacaacctctcattttctctgccatcgtccgcaagcagcagccaagacaagagtaacgcccactactccaactctcttcattcaattcatttccaacaaacaaacaaacacatccttaggatgctcgagacagttaaataccttctcggttcggccggtccaagcggcttcggctccaaaactaccgccgaacaagtcacggaaaaccacgccgatctccgctccatcaccgccattatcaccggtgctacgtctggaatcggaactgaaacggcgcgtgtgctagcgaagcgtggtgccaggctggttctgccggcgcgtagcatgaaagctgcggaagacgcgaaagcgcgcatagtgtcagagtgtcctgattcagagatcatcgttatggctcttgatcttagttctctcaattcggttactaacttcgttgctcactttcactctctcggtttgcctctccatctcctaataaacaatgctggaaagtttgcacatgaacatgctatatctgaagatggcgttgaaatgaccttcgccactaattacctgggtcattttgtgatgacgaatttgttggtgaaaaagatggtggaaacggcgaaggagacaggagtgcagggtaggatagtgaacgtgtcgtcgagcatccacgggtggttttccggcgatgcgatttcatatctggctcttgtaagccgcaacaaaaggcattacgacgccacacgtgcttatgctctttccaagctcgccaacgttttccacaccaaggagcttgcccgtagactccagcaaatgggggccaacgtcactgtgaattgtggtcttccgcgcgtcgtcagaaccagactcactagagagcgtgagggcttgctcacagatttggtgttctttttggcttccaagctcttgaagaccattcctcaggcagctgctaccacatgttatgtggccactcatccaaggcttttgaatgtctccggcaagtactttgctgactgtaacgaaacttcaacctcaaaattgggatccaactcaactgaagctgcaaggttatgggccgcgtccgaattcatgatttctaggggtccaaaagctgcctttgacctactcaatcaccttgaattttgaagttaatttcttgggacactgcaatatatatagtactagtatatgatatgattttacggaaaagatacatgggtctagagagagcaaccctgatattgttttgctctcttttgatcttaatatagtcaagataatgataggaagggataacttaatttgcacagttttatatatgaatgtgatcttatatgtagtatctaggttataatataaccatatgtcaatgtacaattattttgatatatcattacctagctggaggaaattaacttgttgtttttatttt

SEQ ID NO: 113710 - DNA, 274 bp, Glycine max
  Clone ID: PAT_MRT3847_73690C.1
aaaaataaaaaaaagaaagggaaaaaaaaaaaaaaaaaaatacaaaaaaaaaaaaatacctaataactaaaaaaaggggcgtcccccctttattaacctttcaaacccggaattaatttcggacccggtccctaaaggattccaaatttcccttataagaagccgtttaaaacctgggctaaataagggcaatagctgttccctgtgaaaaattgtaatccgttaaaatttccaaaaaaaatacaacccgaaaccataaagtgaaaaccctggg

SEQ ID NO: 113711 - DNA, 265 bp, Glycine max
  unsure (1)..(265): unsure at all n locations
  Clone ID: PAT_MRT3847_73691C.1
aaattttgaggcagccattgataggatcattggtggtttgtaaattatgaacaaggcaataagnctgctggaaaggtgtattgttgcctaccatgaaccacgccatgataaaaatgttggttcttggaacacgccgagcccttgttgaaagtaactattggaccacgtggcacctgcctctctagggaaagatcaaaatgttctcattgataaccttctcgtgacgggggagcagctttttgatatgacttgtatggcactaggt

SEQ ID NO: 113712 - DNA, 620 bp, Glycine max
  Clone ID: PAT_MRT3847_73692C.1
ataacataagattcaccgaagccaaaaagttaagagaatgtagaaaagataacaacccccataaaagaggaaaaagaagggtaatatggtcctacactacccctatgccaagtatcccacacaggctgttaaagggaataacaaataatgcaaagcctgattgctcacatgcatggggactaaaaccaaaaagcaaactgacacacaacacatgcccttgcccctcacaagtcacaattgcacatgcacatcccctaagcctcccactacttaataacacaatcctaaacctttttttcttctctctaataatcactttcttaaatcatcaactggaaattaattaaccacaccacacatctcgtaaatcagaaaacctttttctccccctacctaatctaatctaatattatacacaaagtgttataggtagcacattacatatatatatatatatgctctttaattagcacacataattttgggcttcatctcatctggggcaatttcattttttctcaattgaaattggaactataaagagtgctctgtggtgcaatggggggctagatgccaataaggcgcattgcaagtgtctggggcaagtgattaagtgggca

SEQ ID NO: 113713 - DNA, 491 bp, Glycine max
  Clone ID: PAT_MRT3847_73693C.1
aattcggctcgaggtttgtcactgctaataccctagtccaagccaccatcatccctcaatctcatatttcctctctgctatcactcgtcccctctctacacccacgatccagtctattcatggaagctactatgaaaaagatatactgcatcatttcctaggccttctcccttgttccctggctctagcaacactggggaccctcattgctgtctgaggctctctgctcttgccattgcccctgtctggaaagctctttatccagatgttacttaagcagttcctttttgtcattcgcttctctgctcaaatgtcacttcaaagagcctgcttctgaacagcctgctctgagaataaggggaagaagcagatggagatttctgggtttttttgtaataaatgctattaataaatacttatggtactatctgactaaactgcagatatttatcactttggtaaatgtttacatttaaaccaaatttaagaag

SEQ ID NO: 113714 - DNA, 709 bp, Glycine max
  Clone ID: PAT_MRT3847_73694C.1
acactgtaaccctcccaacaagcatttcgttctccccatcgaagcttttgagaagatcgccatttggaaagccggcaacatgcccgtgcagtatcgcaggataccacgcgtccgggaaggagggatgcgatttactgttactggttctggaatcttcatttcagtgctgatcagtaatgttgctggccacggagacataggggaggtgaaggttaaaggctccagaaccggttggctttcaatgggtcggaattgggggcaaaactggcatgtaaatgcgttgctgcaaaaccagcctctttcgttcgaggttaaagctagtgatggcaaaacggttacttcttacaatgttgctcccaaggattggacctttggacaaacctttgaaggcaagcaatttgagacttgaaagctcaatgaatcgaagagagatcttgttttaaagggaccattctccttccccaaatttttttaccccgatggtgattaaaaggtctacttgccggtggttttctttctacattttgattctttttggttttgtagaagactgtgtagatagcaaatgatttggggtggtttgtatgaaaaggttgtcaatgtgatgatgtacctttccatttatcttcttaggaagttttgtatgaaaaaaatatatactatatgtataccttgttggtcaaccagcgccaaagaagacttccaatgt

SEQ ID NO: 113715 - DNA, 1297 bp, Glycine max
  Clone ID: PAT_MRT3847_73695C.1
tccgaatccaaaatgttggcactcacactatccattctcatcatcgctacactctcttcttcgccactagtcacctctcactactcctcttccactctcgagtcccctccttcttctctagaagcctccccgaccttctccgaatggcgatccgcgcgcgccacctactacgtcgcggcggatccccgcgacgcggtgggcggcgcgtgcggctacggcgacctggttaagggcggctacggcatggccacggtggggctcagcgaggccctgttcgagcgcggccagatctgtggcgcgtgcttcgagctccgctgcgtcgaggacatgcgctggtgcatccccggcacctccatcatcgtcaccgccaccaacttctgcgcccccaactacggcttcacctccgacggcggcggacactgtaaccctcccaacaagcatttcgttctccccatcgaagcttttgagaagatcgccatttggaaagccggcaacatgcccgtgcagtatcgcaggataaagtgtaggaaggaaggagggatgcgatttacggttactggttctggaatcttcatctccgtgctgatcagcaatgttgctggccatggagacgtagtggaggtgaaggttaaaggctcgagaactggttggctttcaatgggtcggaattggggacaaaactggcatgtaaatgcgttgctgcaaaatcaacccctttcgtttgaggttaaagccagtgatggaaaaacggttacgtcttacaatgttgctcccaaggattggacctttggacaaaccttcgaaggcaagcaatttgagacttgaaagctcaatgaattgaagagaccattctccttccccaaagtttttaccccgatagttataaaagggtctacttgccggtggttttcttttctacattttgattctttttggttttgtagaagactgtgtagatagcaaatgatttggtgatttgtatgaaaatgttgtcaatgtgatggtgtaccttaccatttattatgttaggaagttttgtatgaaaatatatactatatgtatacctttttggtcaaccagccccaaaaaaaacttgcaatgtaaatgttgtgaggctctccaagacgtatcatcctactaacttcacttgcaagttatcttaaatgttactacatcatccaagctccgttaacgattattagataacccatcgcattagattagtttctactgtaacagtaatcagaatgctagatgtgtatgcataatttttggtgagatattttgttcaaggttt

SEQ ID NO: 113716 - DNA, 302 bp, Glycine max
  Clone ID: PAT_MRT3847_73696C.1
tcgcttactcgttcgtccacgcgtacgcccacgcttccgcttgaatttaaggttttaatttttgagtaccactaccaatggagattttgttcaatgaaaagatctttttatggttaaagataactgactcatgtgctgcatgtttcttgacattaagttatactccaactttattgttggaatctgtattgcaaaaatgacaagagggttaatagtggacttattttgttaaggatgtcttactaatgctaataaaggttaatcattccctatgagaaatatttgttggaggttatatttta

SEQ ID NO: 113717 - DNA, 516 bp, Glycine max
  Clone ID: PAT_MRT3847_73697C.1
aaatcgattaagaaatttggctcaaagcctcaaagacaaagcctcagtaatcgctgcagcgctatccacgaagcgacacgtgtcctccgtccgcgtgcacgtgctccgcgccaccacgcacgccctcgccgcgccgccctccgaggaaacaatctccgccgtcctcgtggtcgggtcccaccagaagcgccaccctcgcgcttgcatcgacgcgctaatggaccgcctccacagcacgcgcagcgccaccgtggcactcaaatgcctctacacactccacaacgtcgtcgtaaagggacccttcattttgaaagaccaactctcctgttacccttcctacggtggccacaatttcttgaacctctccaccttccgagacggctcggacttggaatcgctcgaactcagttcgtgggttcgctggtacgcgggagtgttggaacagagcttaaccgtttcaaggatcttaggttattacttgaaccactcttgcgagtcccaagaaaagaaaaagac

SEQ ID NO: 113718 - DNA, 590 bp, Glycine max
  Clone ID: PAT_MRT3847_73698C.1
gctgtgggctgctaaaggccgccagaaggggaagccaacatcgaaatttggcaaaacatttaatttctatctaaaatggtgacttatatctcaaactattctcttctctttgtaatgctggctctgactataacaggcctaatagaagtaaaaggaaacacatgttcacaaccattgggtggatgtggtcctatgggacaatgtgaccagagatgtaaagctctacacattgatggacaaggatcttgtgacttaggcttgtgcacttgctactacggttgtgcagggcctccaccaagtccaaccccacctaaaatatgcaataatggtcttggggtttgcactcttcagtgtggtgatgcatgctgtaatgcaaattgtgcaagaaaatataatcagggaacagggatgtgtagcaccattggtaacaacaacttatgtacttgccaatatagatgtggctgaagtttatgcctgatcatatatctagctaatttatccctcactatacgttgggatgtgtgtgggataagtatgtcatgaatcaattacaataaataatatacatggatgcctctttcaatttcaag

SEQ ID NO: 113719 - DNA, 204 bp, Glycine max
  Clone ID: PAT_MRT3847_73699C.1
attctttttcactatattttctaaagaatggtaggaagtggtgtcttttttgtacctagatcccccaccaattttcaggacgctattactggtgtagcaaagaatggcctctgattatcatatggacataactctcggtacaagaaataatctcgatataccctacgactgcaaaaacacctgaaattattgcatcacgcactt

SEQ ID NO: 113720 - DNA, 372 bp, Glycine max
  Clone ID: PAT_MRT3847_7369C.1
tggcttggaacctttgggctgattgatgtgcttgcatggtcgtgagaagatgatagaaggggggtagaagattaaggaggccgggtaggacacctagagtagggtataggacataagggaggtagtcgtaagggacgtaagggaggtagtcgtaagggacgtaagggaagtcgtcgtaagggacgtaaaggcggaagtaagggacgcaaagagaataatagcgatagtaataattgtaattgtacgacgagcaacctcgacaccagagggagtaccaacggcgccgcgcgacgcggcccacacggggaaaccaaaccaacgacagacgcattccccgtgtcacgcaggcccgcgcgccccggcccggcgctc

SEQ ID NO: 113721 - DNA, 400 bp, Glycine max
  Clone ID: PAT_MRT3847_736C.1
cttggttgaagataactggaagtttgaagggcctcgttcgcggatccacctagtatcacatcgaggtggtcatctctataggccaacagaaatttctaagaattggaatttgactccaccaaaatagttggaacactcaccttgtaacactgtgcctctattataaagtgattatggttgtgatctgcagataagaactgctatgccaatttctttcccccgtggtagaaaacacagctgttagttgttactctacatcttcaggtgacatgacatgtagttctgtgagggcatgaagattgcaaatgaaggttctttctatgcaagattgttagtcatattttctgctagtctttctaactgggttgagaagctggtgtttttaacatttatgtggtat

SEQ ID NO: 113722 - DNA, 434 bp, Glycine max
  Clone ID: PAT_MRT3847_73700C.1
ggaagatacctgagtgcaaccaaaaaaagaaaaaggaagagtaaaagtgtgggaagaacaaaaagaggagaaaaatagattgagggcatcttggtttgttagaacttaactgcaagaattatggagtaattgatgttgttttgcatgtactggaagaaaaagaaggtagtgattagatttaatttttaatagacatatgattgatttctgatatgctcaagtttgagatttctttctttctttttttttttgcttgaattatgagtaacctacaagcttggtccaatcatgcaactaatttttggctcatcaatctttaagcttgacccttttcagaaacctttgcgaatgattaaccttttggttgctacttttcatccaacctatttgaatgtgacctatatatgtatgcattggaggtttccaacttttta

SEQ ID NO: 113723 - DNA, 471 bp, Glycine max
  Clone ID: PAT_MRT3847_73701C.1
aaaccccaaaggataaaattttggaataaaaaaatcaaaggaagaattacaatcttctcattatagggggtctataaaaaaaactttaaaggaccgatcttttaattggggggggaaaatctttttgcaccaaaacaaaaggggtcttcaacacaaaatttcattttttacccggggctccagctggggggtggcctttaaccccaaactccggggggaagggcaaaaatatggagttctttggtggagcgggatggggattttctgcccctttgctccaatcataacaaaccggttaagcaaattgggaacccttttttttaaatggcctggaaggggggggctgaccacccctttgcatagccttgagtctttggttactggctttttcccagaaattaaaagccccctcaaatcccccagttgcaaaaggggggtgccccggggggaaatttaagggggggacggaaa

SEQ ID NO: 113724 - DNA, 297 bp, Glycine max
  Clone ID: PAT_MRT3847_73702C.1
ctattagagaaatcttgaagcatcgttgcttactgaagcaatcgatgcttcattctaatcattcttacagtgcttggaatggaaggtgtttcagaagctacactgcttcagtgaaggagttgcttctcaagcaatcgttgcagctgctctcaacaattctttatctctccaccatcctttcttcttctcaacactttctttcttttctttctttgttcatagttctttccttcttatttctgaaattaaaatgaatgttttcatgcctctcccttctgtcgtcttctcgcagccggg

SEQ ID NO: 113725 - DNA, 485 bp, Glycine max
  Clone ID: PAT_MRT3847_73703C.1
ttcccccccccccccccaaaaaaaaaactcttagctttcatggttgagttaagcccaattcatcaatataatatcaaaacctatctaatcagttaggtccaatccattcctaataattacattaagggatgttatgctgtgttggttgttaggtatgctcaatttcatatcacttttccatttcaggtatgttggagttggtgctcgacgtgtaagatccttatttcaagcagcaaaaaaaaaaaaaaaaaaaaaaaaaataaaaaaaaaaaaacaaaaaaaaaaaaaaaaaaaaaaaaaaaaaaaaaaaaaaaaaaaaaaaaaaaagccctttttttttttcctttcctcccacccattggggtcgggtcaaaaaaaaagggaatggaatcctgaaattcccgaccttccccccccccattccaaacttggtggccctgaggggggttaacaaaaagggccccccccaatgcctacggtggttc

SEQ ID NO: 113726 - DNA, 724 bp, Glycine max
  Clone ID: PAT_MRT3847_73704C.1
tacggctgcgagaagacgacagaagggggacgcttctgagcattttctcgttccaaagaattgtgaatatttgaattgattccccaatttcattcaatctttccctcatcagttttagggtttcgcctcgcttccctttctcacccataattgagtctatatttgattcaaacttctctctttcaactctcggctttgcgttctcggcacgataatactcattttaggatttcatttgattttcctcggatctttctggtctggggtatctgcttggtaggacttcatttttggagagtttagtttaatgtctgaatcagaagctgagcttcctactgcctttgttggtgatgttctattgtggaagaggtggcatgtttccttgggtgtcattgttgttgcaacagttgcctgggtcctatttgagtggaccagtttaccatttttaacaatttgttcagatgtcttgctgattttgattgtactgttgtttctgcatgctaactatgcttcccttagaaataaacaaccaccaacattacctgaactagttgtgtcagaggagatggttaataatgtagcagcttcatttcgggtcaaaatcaacaatatgcttcttatagctcatgacatcactattggcaaggattttagaatttttttcaaggtggtgatttgtctatggctcttgtctgtcattggcagcgccttctccttcttcaca

SEQ ID NO: 113727 - DNA, 144 bp, Glycine max
  unsure (1)..(144): unsure at all n locations
  Clone ID: PAT_MRT3847_73705C.1
cccctgaatanctcatggcaaactctnnngaagtttctggctctcaatcggataaaactgcatnttctaggagaactctcgcnncttcnagttnacaanctcctnnccaatntagctcnangtgtncccaatcttcatgtnctg

SEQ ID NO: 113728 - DNA, 322 bp, Glycine max
  Clone ID: PAT_MRT3847_73706C.1
ctaaatgggggggaatcgcgtcaccaacattcttcttcaccttcacaattggtattagttaaacaaccaaatgatgcggccggaatgcgatctcaaaaccctcctgtcgttggatggaccattcccagcacagggccgcgtcaaccctatgatcgctcttatcaaactggttatttggacccggtaccacataacctttcagaacaccgcataaaaccacatgccagagctgaagcctcttgtacaaacaatctgtctagggacaacattattttccatttgaaaccatcccagatgtgctagctccatgccacaaagatcc

SEQ ID NO: 113729 - DNA, 523 bp, Glycine max
  unsure (1)..(523): unsure at all n locations
  Clone ID: PAT_MRT3847_73707C.1
cgagannggcgtgtactgatctcaagtcttccacctcactntcataacatantgacttctactgcatttcctcttacccaccgtctatctctctgttggtgacctcacacttaggctggagaaacatcccctctcctttacaatcaaaaatactatcaatgatgaatcagaccgcaacttcaacggaattctttgttacactcaagatgatgtggtctccactgacttcttattnaataagcatttctataatatccttccataaactttcatccttttgcataatacccatttgatgggtggaccaattttcgggatgattacataatgcaacatccttttcatcaatcttcttgtattcgtatcccaaaattctcttttaatgtttaccttcaaatatcttttctactacttaatataaattaggcattcctatcttgctttaaaaaattaaactccttcataatcaatattctcccattcttctacttttctatatgaaacttctctttttgaggacatt

SEQ ID NO: 113730 - DNA, 639 bp, Glycine max
  Clone ID: PAT_MRT3847_73708C.1
gaattcgcgctctttacccggggatcctctagagtcgacctgcagctagtaaaagttttgatgagcaataagtaatttaaagcctgaagtagttcacctctaatacatcatagatagtcaaggaagcatgcgctaccacatggctaatagttgatgtattttatcactcactataacattgactcgtgttaaaagtcgttagcaatcattacggatcgaatgctgactgtgaatgagtaaatatgctagcgtgactcaatttatcctcaatgatgagcctgagacaaggtgatgtgttagctagagggtaatggtgattctcattttaatatcgcacggagaacatatattatacgctccactaaagatcatgtggtttcagacactatgttgatagcatatatgcgtccaatgctgtgcataataactatgctgaggatgagtcatatttttatataatcaatttgatagatattataatgaggatgtggatctaactaaaccctaattaaagcctgatggggagaagattgcttcctccttatatatactatcataggcttatctctaaccaacgtactagtaggcttgcttcacatgtaccccttcacgaccttatgctacagcactataggattt

SEQ ID NO: 113731 - DNA, 306 bp, Glycine max
  Clone ID: PAT_MRT3847_73709C.1
acgtaacttgtgggatatggtatcatatttggaaaagtccaaaattaatccattcagaattacatttgatgcaacataggcctaatcagaaaacaacacaatctcaatggattattacacaaacttggccgcgttttaatcgaaaaagggcactttggattttccttggaaatccattcttattccttgggctatagggacgggccatttaaaaaacggttctttctgcttcccttattgacctttcttccttctgaatggttgggaagtacataatgggactatccatggggaacctttaacgtc

SEQ ID NO: 113732 - DNA, 380 bp, Glycine max
  Clone ID: PAT_MRT3847_7370C.1
ctcatcttttttttttctctctcacggctcaataccctatctccctaccctatttaggtctctctaatacataatgaaaggaggaaagaacaataccgaatctaagagagcctatgccgaacttgctgaggataagaagggcgccgccaccaatactacgaaatcggccggataagcgaacgcagctaaagatcctaacaagccctataggcctccaagtgctttcttcgttttcatggaggaattcaggaaggcgttcaactaggaacatcccggctacaaagcaaagtctgctgagggcaaatctgctggagcaaaatgaaagacgatgtccgatgcttgaaaagcaccttatgtgcgcgaagcctatgagaaggaaa

SEQ ID NO: 113733 - DNA, 593 bp, Glycine max
  Clone ID: PAT_MRT3847_73710C.1
aattcggctcgagccgctgcttgccgccccagagtagataatttgggtatgggaaactgctggattgaaggacgaagctgcagcacatcaaatagctgcgatgaagacaatgaagagtatacagcagagacattcccgtggagaaggcaaacaagggacctgtcccgaggcgactctttcagtcaaaagacaatgaccatggggaggaactcgatgaaatttggaatgattgataattcattttatacctcagattaccagtatagtccacagagcaataacaataatgtacaggatatggcatataagtttatgaaaggtataccaaactttgtaaagatagttgaagttggtccaagggatggattacaaaatgagaaaaacattgtaccaacagatgtaaagattgaattgattcatagattggcatcttctgggttatccgtcattgaagctactagttttgtatctcccaaatgggttcctcagttggcagatgcaaaggatgtaatgcaagcagttcataacctgggaggcattagattgccagttctgactcctaatttaaagggttttgaagctgctatagcggc

SEQ ID NO: 113734 - DNA, 360 bp, Glycine max
  Clone ID: PAT_MRT3847_73711C.1
tcatatttacacactttattaaactctatcatccattgtgacttatgcatatgatactaataccttccctgtacgtaaaaacaactcccgaactattcacacttaaagttcgtataccacaccttttcaattttccctactctttcctcaaataaaaatctatttcaactccacgcattatcctttcatgtaatacgcacttgtaagtccctcatctccctcccttcaaatgatattattgctacagtactttcctctccttctaaatgctattaccttaattgaattaactaataactaaaattcaaactaaatctaaaatacactcacaaatcaaacattttccataaaaatcactta

SEQ ID NO: 113735 - DNA, 276 bp, Glycine max
  Clone ID: PAT_MRT3847_73712C.1
gcaggttagagatgatgggaactggatgaaacacactgtggggtaagtcatgtttaaatatacagttatttagtttgctatttacaaaagcaggcacttgagtagtagagttgaagttgagctttttatttctattttctagtaggaaccttgatccttttgggtaatttggtttgatggaaaggaatgggggtgggtatgaaatggaaatggaatacttattcctatgctttgtttgtataggaatgagatgatgactcttttccagtttcatat

SEQ ID NO: 113736 - DNA, 1834 bp, Glycine max
  Clone ID: PAT_MRT3847_73713C.1
ttcagagagaggggacgttaattgcagggaaagaggaaggggtaatgggagtagggtaagagttgtggttgatgcccctgcgcctggtgggaattacagttatatcgcagctgggtttaggcatgcctgtgtcatatctggtgatggtagcttgcattgttggggagacatggaggagggtcagaaaccaccgcaagctgggagcttcatttctctggcgttgggagagaagcgaagctgtgcacttggggacgacagaagagttgtgtgttgggggtccaataatttcagcatgccacgcagattgcaagacacttacttcgaatcaattgtggcaaagcgaaccgttttctgcggagtcttgtcttctgactattccttgctctgttggggttccaaaatatttgagtcaaacaacaaggtgtttgacgacgtcctcccaggaccttgtcggaacgagtgcccgtgtgggccccagtcaaattcagccaaactatgtaactctcctggaggagtcatttgtcaaccctgttcccccagagtggttcaatctccctcgcctccatcgaaccaaagtggtggttggagcagccaaatggtggcgtttctggtggttggttgtgtgggatgcagttctctattgctagtcacggccttcttccttaacaggtactgcaactccaaacgcagaggaagccgcgtccatgactctggccgcttggatgacgatccacaggcacaggatggatctcgtgttcttcagaagcgcttgagccacgccataagcatgggaaatgggagccctttggaggagttctccctggagacactgcttcaagtcaccaacaatttctgtgaggacaagagaattgggcttggtagcttcggtgcagtgtaccattccaccctggaggacggcaaggaggttgctataaaaagagccgaagcctcatcctcaacctacacagttttgggtgggcaagggcaagtggacaaagacaatgcctttgtgaacgagctggaatcactctcaagactccaccacaagaacctggtccggttgttggggttctatgaagacagcaaagaacgcattttggtgtacgattacatggacaatgggagcctgagtgatcatctccacaagctccaaagttcagctctcatgtcatgggcagtgagaatcaaggtggctctagatgctgcaaggggcatagagtacttgcaccaatacgccactccaccaatcattcaccgtgacattaagtctgccaacatattattggatgccaagtggacagcaaaagtgtctgattttggactctctctcatgggccctgaccctgaagatgaggatgcccacctttcacttctggccgctggcactgttggctacatggaccctgaatactataggcttcaacatttgacccccaagagtgacgtctacagctttggggtggttttgcttgagttgctctccggctacaaggccatccataaaaacgagaatggggtgccacgaaatgttgttgattttgtggtgccattcattttccaagatgagattcacagagtgttggacagaagagtggccccacccacgccctttgagatagaggcagtggcctacgtcggttatttggctgctgattgtgttaggcttgaaggtcgagatagaccaactatgtctcaagttgtaaataacttggaaagagcattggctgcatgtttagccaagccaatactctctaggtccaccaccgattctatttcttcacaatagctcatctttcgctcccttgaatggattctcaaaagaaattgtcaacta

SEQ ID NO: 113737 - DNA, 864 bp, Glycine max
  Clone ID: PAT_MRT3847_73714C.1
cagaggagtatgcagggacatcctggcatgagctgaattatatacgacaagccatcgggttcttggtaatacatcaaaagaggaagaaatctttggaagagattcggcaagatctttgtccggtattgactgtgaggcaaatctatcgaatcagcacaatgtactgggatgacaagtatggaacccagagtgtgtccaatgaggtagttagtgaaatgagagaaattgtcagcaaggacaatcagaatttgacctcaaattctttcttattagatgatgatctgagcattcctttctctgccgaagacatagatatggcaattcctgccatagacgttgatgaaattgatcttccagaattcatgtccgaatattcttgcgctcagtttcttagttcacatcagaagtccacaatttcatgattattactttagtttgacagtttgcttcaatatttcatctccggatttagatgacaacgccgcaacattatccacattggaaacacgagtttctctttacgtggacagcagcaatcttgattgtcatccgatttgtagttacatggtgcacttgctgatcatgatatcaaagataggagagtgattctcttggttgattggtaatttccaactaaattactacatagttcaacgaaccttttgtaattacccatagtatatagagttgacattgtaagcttgatacattgcctctattattttgccggtcagacagttaggtatatttattattgattttcatgttgtattttatgtaggtatgcaattgtaactaggcactggccagaatgatatttcattcattgatgtaaatatatttagcctcattgaatttttgccc

SEQ ID NO: 113738 - DNA, 449 bp, Glycine max
  Clone ID: PAT_MRT3847_73715C.1
ccgcgtttcacttgtttcataacatgcaggccacagacgcgtttagagtcaatgacttcactttatccatacttctcatcgcgtctacgttgttgatggaaggtcaacaggttcacgcgcatgctattaagttagggttggaaatgttgatgatgtggagtggttgtttgaggggatgaaagtcaaggatgttataacttggactgagatggtcatggcgtatatggagtttgggttggtcaatttggccttgaaggtgttcgatgaaatgccagacaagaattttgtgtcttataacacgattctggctgggttctgtcaaaacgagcaaggtttagaggccatgaggttgtttgtaagaatggtggaggagggtttggagttgacggattttaattctactagtgttgttgatgcttgtggattgcttggtgattacaaggtcagca

SEQ ID NO: 113739 - DNA, 238 bp, Glycine max
  Clone ID: PAT_MRT3847_73716C.1
caactcactcccaagagtgacgtttatttatttggaattttgcttttagaaatggggcaacctcccctcctggtgggtttaaaaaaactggtgcaaaaccggtttcccttaaattggcctttaagaaattttattaaaggagggtgggggaacttgtggattctttaattgaagaagcttttaaccgagatgtttttaataaaaagctttgttttgcggtttaatgtgccgcccccat

SEQ ID NO: 113740 - DNA, 2380 bp, Glycine max
  Clone ID: PAT_MRT3847_73717C.1
gcgcactcctcagtccaaagcgtctagtttctgtgtggaggaaaaggtttggagaagaagttgatcaagattttatttacattattgccgtggatcggatactccaattggaagacattcaggaggatggcatatgggtcacctcttcagattacaaaaagcatatgggtcacctcttcagattacaaaaagcatatgggtcacctcttcagattacaaaaatgctcaacccgatcctcttcgggactctgcacacaactttgtcactgaaatcaacaccaacaatatggaagacattactcgcttttgcaatgtctacgttgatttggatttcctaattcggctcgagcagaggagtatgcagggacatcctggcatgagctgaattatatacgacaagccatcgggttcttggtaatacatcaaaagaggaagaaatctttggaagagattcggcaagatctttgtccggtattgactgtgaggcaaatctatcgaatcagcacaatgtactgggatgacaagtatggaacccaaagtgtgtccaatgaggtagttagtgaaatgagagaaattgtcagcaaggacaatcagaatttgacctcaaattctttcttattagatgatgatctgagcattcctttctctgccgaagacatagatatggcaattcctgccatagacgttgatgaaattgatcttccagaattcatgtccgaatattcttgcgctcaaggttcggaagcgcttcttcaaaggatggagttgagcagtgggtgtgatctgaaagtgaaggtgaagaaatgcttcttcaaacgaggcaatttggcacagcgtgtccatgggtcagactcacacccgcaagcaaaagaaatagctcagtctcattgagaaggagcaattgtggcccaaaatgttcggtgtcccaattggaattgaagagtgagagtgagagcaaaacgaagccgtatccagcagaggcatcgaggaccataatggagttggctaaggtgggcacgctgtgtacgttgacccaagagggtttgccccttggtactggggttcgattcgcggttgaccctgaacatggcactcccttgttctgcttcaattccactgacaacactaacatcccctcttctcttcatgttcagtttgaacaatttggattgcgcactcctcagtgcactattcaaggaacccttaccaaaccacaggatccaaagcgtcttgtttctgtgtggaggaaaaggtttggagaagaagttgatcgagattttatttacattattgccgtggatcgggtactccaattggaagacattcaggaggatggcatatgggtcacctcttcagattacaaaaatgctcaacccgatcctcttcgagactctgcacacaacttagtcactgaaatcaacaccaacaatatggaagacattactcgcttttgcaatgtctacgttgatttggatttcctggtctccgaggcaaagatgctatgggttgatcgcttgggctttgacatgcgtttgtcttcccctcacaaaggcgtgtttgacgtccgcattcctttccccagagaagtcaccgatgagaaaggtgccaagtcgacgtttaattgtatgtcacaactcgcttgggaggtagaaagaaacttccaacatccagacttttcaaaggttaaagagttgaagccagtcaagtccccttttctgtaaccaacatgccaattcttcagttgttatcaaacatccatccttggttgtttttcaaagaatatgaccatgtctatcgtggctttgtttagttttgactcatctagtgttgatgcaatgtttgatgtacttctaaggtgttttgtagccacatcaggaaaaatccaatacacgtttgtgtttcaaaactctggtattaggcaatgcattttgatatcaaatccgggttgaatggaacaacaccgcaacattatccaccattggaaacacgagtttctctttacgtggacagcagcaatcttgattgtcatccgatttgtagttacatggtgcacttgctgatcatgatatcaaagataggagagtgattctcttggttgattggtaatttccaactaaattactacatagttcaacgaaccttttgtaattacccatagtatatagagttgacattgtaagcttgatacattgcctctattattttgccggtcagacagttaggtatatttattattgattttcatgttgtattttatgtaggtatgcaattgtaactaggcactggccagaatgatatttcattcattgatgtaaatatatttagcctcattgaatttttgcccaaaaaaaaaaaaaaaaggacggccagggcggagtca

SEQ ID NO: 113741 - DNA, 309 bp, Glycine max
  Clone ID: PAT_MRT3847_73718C.1
tactggtgcaagtagacgagggaaggggtattggtgtctaggtttcagtagcatatagaacaaatttaaaatttggaacttcaaatgaggatcttttatgatgcaattaggcttcagtaaagcaaatattaaatggaaagttgatcttaattcttaaatatggagcttgagtctctgatatgccctaaattcagtttaatgttggatggaattgacttaaaatttgcttttgatcttaacttgaacatgaaatgtttgttctttatttcctctctacccggtcttgttttttcataaatttattaccta

SEQ ID NO: 113742 - DNA, 574 bp, Glycine max
  Clone ID: PAT_MRT3847_73719C.1
catgaatcaggtatgccatacaaagcaactcattaattgcacttgcatgaccaaaattaaagcattgattgcaaaaaaatgttctcatctccatcacctatgttcaaatacagagtgttgatcagctactgtcaaagctgagttacattccgtccacactcttcctatcagaagtttcttacgtggaattcttagacagagtgcatgtttctgagaataagctaagagcacaaggcttgtgggaagttccccatccttggctgaaccttctgatcccaaggagtgagattcatgactttgctgaagaagtatttggcaatattcttaaagacacaagcaatggacccatactcatttaccccgtcaaccaaacaaggtgtgtattatatatggacacgacgacacaaaccaacgagtttaattaagaattttacattatcaactaatcaattaaaagtgaaaaaaaaattgacttttaaagaacaaaaatattgttggacaccctacaacctatttaacacttttaaaaaaaaaaaaaaaaaaaaaaaaaaaaaaaagcggccgctctagagga

SEQ ID NO: 113743 - DNA, 370 bp, Glycine max
  Clone ID: PAT_MRT3847_7371C.1
attcatattctggaaaaaggttaaatctgttttaaactcagcttatcttgaagcaattcatgttgaattcttgaacttcactgtttttttattgccttttcttactagtaataatttgatttttaaggaggctccaaaattactagtcattattcactaccattcaactacattttcctatcttctagaattgagcttgtatttcagagagagtaaatataatgattactgaattaacgatttcttgtttctgtttttctcttttagtaactaagagtcttaaatgttcattgtaatggaataatgtacggatatatgaagcaacttcattggagcacaatagaaagaaatctatccgaaattcagattt

SEQ ID NO: 113744 - DNA, 756 bp, Glycine max
  unsure (1)..(756): unsure at all n locations
  Clone ID: PAT_MRT3847_73720C.1
ggctcgagattatattaatcttgcaattggctagttctctgtcttcaaattcgcacaacaccaaacaccatgaacaaagttcacatcctggcgttcccatacccagcacagggccacatcctcccactcctcgacctcatccaccacttagccctacgaggcctaaccgtcacaatcataatcacaccaaaaaacgttcctatcttaaaccctctcttatcctcgcatccaaacacggtccaaactttagttctcccattccctccccaccctaacatccccgctggcgcagagaacgtccgtgaggtcggcaacagaggaaactaccccttcatcaacgccctctccaaactccaaccagaaattatccactggttcgcaacccacagtaaccctcctgtagcactcgtctccgatttcttcctcggttggactcagcaactcgcttcccaactcagtattcctaggatcacgttctactgctccggcgcgtccttaatcgccatcctccagcgctgctggaaaaatctacacttttacaattcacagggagataataatattattaattttcccgaaattccgggaacgccgtcgtttaagagggagcacctccccacgttgttcctccgctacaaggaatcggagccggagtctgagtttgttagagagagcatgcttcttaacgacgcgagctggggnatgcgtgttcaacacgttccgcgcgttnggagggttcttattttggatcacatt

SEQ ID NO: 113745 - DNA, 394 bp, Glycine max
  Clone ID: PAT_MRT3847_73721C.1
gtggctatgctactcctatctaatcaaatcaaatctctaataacattttttttcacttttttttttatggatgtgaaataattattgtaattgaactccattatgtcggcaacaccagaggaaatgacccagcaaggttgtttcaatttcactgataatctggttttgtaaaacaaggcagagataattgggtccaataggtccactcagtgcaatttttctacacgatgtgactagactagcaataatatgaggtttataagtcgtttagatagagacattggaaatagattgtgcataatgatggctcatatttttcaatttttaagctcattcggcgatacttttggttagaaaagtgagttacatttaaggaccttagtctttacataag

SEQ ID NO: 113746 - DNA, 1097 bp, Glycine max
  Clone ID: PAT_MRT3847_73722C.1
acaacagaatatagagcatcaacgcaatctaccaccactccacaccttgtatgaacctgccattcccctcacaacttgataattaaaatagaaatatgatttaactataaatgttacaatagcagaaataaaatcagagataagtagacacagagtgacatagtgggtattgatagtgaaggtataataaaaattttacacaataaatatgattttatgaccatctcaggaaatatttttttattactttctaacaaacattattgaaatatatattaccatctccacactcacaagaatccaataagatttcataaaataaatatcccttacatacccttcaaaggtcctagttcctagttccgtaactgtgcagattgaatcagttgggccaatgcagcagcatactgaacagctgtatgctgagaggtataattgtcagaaagcccatattctgcataatttggttctgtatgcatgaactgaccggctaatgattttttagacacgacttctttccatatatcaatgaactcttccaaaatttgcttggatttttcaactgacgagatagggagatactcaatctcaatcataattcctctgagactctccgcttgactgggaacaactttaatcaccctgatctgaaagtcacccaacttatacagcactccctcgaaatgaagggcgactttggacttgtaggactggagtttctccatgataagcaagatagaagaatcggcctcgagaacaatcttctggccgcgaatgattaagtagtatttgttcggctgctccagcatcgatatccccagaaaatcgcgaggaaaatcgatggtcaccgattggtctcgtaaattgggtctgtagaaagtgagggaggctttgcatcttccttctttgacgccgttaaggctttcgacgcactgcgagatctcattcaggacttggctgttcacaacgcttccttggttcggttgccaatgcagaatacatctgatgggcatcctcgcttctcgtttcaagccttgctgaatgactctgtcttgtgttttgtcttcctttcaatctcgagccgaattccgagcttc

SEQ ID NO: 113747 - DNA, 455 bp, Glycine max
  Clone ID: PAT_MRT3847_73723C.1
cggccggcctcgatattttaccctaccttctaacatcattgccattgaaattgacagtatagaacgatttcccgcttcaacacacgtaccatggaatatgtcgaggcgacatcctcctttattctgttttggcgcgacgtatatggctggtgtccttgctccctaaatctactagcagggtgggttggattagttcgtgtcccacgttatgactccctaatatacgtaactttgaacttatcttggggcgtatagtcaggagaaatatacccttctatcctatatctcaccatgtcggagataggggtttcatcgaacagttcctgctacggcgaacgttctggttttctgtatcaaaaacaatacttgactatttagagctcggacaataatatcctctcaagctcaatcccttgatctcttgaaggctaatctaacgaaggttacgtattact

SEQ ID NO: 113748 - DNA, 300 bp, Glycine max
  Clone ID: PAT_MRT3847_73724C.1
tatcacacgcactccacacgtagctcgcaattcaactcgatagtatcccattatcttaaaactgaataccctaaaaccatatgaccgtattattttaaagtatgatcattcatacctgcaaccctaacaacaatccatatcataataccacattttccctctatccctgcaaccataaacacaatgcccttattagacctacctacacccacattccccaatacacatacatacaacaatgtaaagatatttattgcatcataatcccaacttttcctaacacttaatcacaaccataat

SEQ ID NO: 113749 - DNA, 397 bp, Glycine max
  unsure (1)..(397): unsure at all n locations
  Clone ID: PAT_MRT3847_73725C.1
cacgcgaacgaaagacaggcttctggggagcggccgcccgggggggcccggggggnnnnnacaaacaagaaaacaggggagagggggcaancncggaacaaaaaagaaaaccggggcgggcgcgagccggaaacaagaangaacaacgacaaaggcggggggacannaacagcccgggggaccacagaggacnaaaaaaggggacaaaaaacttttttttttcggcnnnggacacacaggagagccccaacaccggggggggggcngcccccccccccccgaaanngggcaganannaacaanngcgggccggcgccgcggccccagaaaaaaagacaacggcaaagcggcgaagaagacgaccagaccgccggagcggggggaagggcggagcagc

SEQ ID NO: 113750 - DNA, 130 bp, Glycine max
  Clone ID: PAT_MRT3847_73726C.1
cggctgcgagaagacgacagaaggtggcgcattgaacgaaacttcgggactgtacgtgtagcaggaacaagcaccaatggcgccgaaggtaacacgcatggttagcggaaaccccgatttgataagggga

SEQ ID NO: 113751 - DNA, 123 bp, Glycine max
  Clone ID: PAT_MRT3847_73727C.1
cagtatggcaaatgagggatcatcaaatcctctctagcactgattctggatggaaatattgtactcgaggacaaggaaatagttgtgtatgcaatttctgtggcaaggttacaaaaggtggaa

SEQ ID NO: 113752 - DNA, 345 bp, Glycine max
  Clone ID: PAT_MRT3847_73728C.1
cccatgcgtaatgaatgttttcagaacaatgggtaagagaattacatggagattctatagagagatagaatgtgaaataagtaaaccttccatgactgaggatgaattcatgagagctgaaaaggagagggttggcttttacacatgaagactttaaagaaccagagagataggactgccctatattaactgggactgttgatgggtccatttcaccagactcaggagcctccaaattttgttaaactgagcctatcacatttacaagttgaggaagataacatgaaagctgtgaaaattgcttgcaaacgtccggtaatagactttacatgcaactgcctacat

SEQ ID NO: 113753 - DNA, 265 bp, Glycine max
  Clone ID: PAT_MRT3847_73729C.1
gagtcactgagggatccactcaagattgccacaagaaattcatccttacatatcccatcacagggtgccatattaagctggaatccaatgacgacctgaagcttcgagcagttcgggacaagaggttcccccacaaggttcctggtgatgctctgagtgaagagttgaacggagatgtgatctggatcacctctgggtgtgacagatacagattccctatgtcccaaggaatcctgatcactagtcgtttttgatcttagctcca

SEQ ID NO: 113754 - DNA, 630 bp, Glycine max
  unsure (1)..(630): unsure at all n locations
  Clone ID: PAT_MRT3847_7372C.1
ctgtttttgagggtgacatcgtgattgagaggtccaccaaccttgactggtacaacgggaccaactctccttgaggctcttgaccaaatcaatgacgcccaagaggccctccgacaagcctctaatgcttccattgcaagatgtctacaagattgggggtattggcactgagccagtgatacgtgtagagactgttgtttttatttctgacttggaggtgacttttggtcccactgcagctgacaactgacgttaagtatgtcgagatgcaccatgaggctctaacagaggctcttccaagtaacaatgttggattcaatgtgaagaatgatgcagtcaatgatcttatgcgtggttctcgcgcttccaacttctacgacgaccctgacaatgaagctgccaacttcacataccaagtcattatcatgaaccatcctgttcagattggtagtggatacgcaccactgcttgactgccacacttctcacattgctatgataatgtctgaaatcttgactcaatattgacaggcaactctggtatggagcttgacaatgaacccaaatctttgaacaatggtgatgctggtatggataagatggttccaaccaaccccatggngggagaaac

SEQ ID NO: 113755 - DNA, 202 bp, Glycine max
  unsure (1)..(202): unsure at all n locations
  Clone ID: PAT_MRT3847_73730C.1
atgcatcttccagggctgattatgactatcaggatgatggactcctatnggatcgacctttgctgccgtaggaggaccctacataggggcagagcatgtggannacaactataagacgaaaagggattcagtcaatnnacctgttgctggatttgctgcaggagcagctattgtnnnatacagaggaaggagtatcttgact

SEQ ID NO: 113756 - DNA, 442 bp, Glycine max
  Clone ID: PAT_MRT3847_73731C.1
ggaattaaaaaaaaaaaccccaagctttgggtcctaaaataggaaaaaaaccccagccctaaaagggggaaaaaacggaggcaaaaaaagggggcaaaaccaaaaaagggggggagggtacctagcctacccacggaaaaaaaaggggggaaaaccttacaaaaacaaaaccacctgggcttgggggatttggccccccaaaaccagcatggaactgggcaaattggggggcagggaaaaaaacaaagggccttgggtttccaaaagggggctttttattttaaaaacgggggggcccaattttgggaaactttttttaaggccccaaatccgggttcggccaaagggggaacattaaccgtttaagggggggcatggggggctttttacaaaggaagggggaatccgcccccaatattcctttgggtttatcccccaaaat

SEQ ID NO: 113757 - DNA, 190 bp, Glycine max
  Clone ID: PAT_MRT3847_73732C.1
cggtgctttaagcggccaagtaaggcttctggctatcatactccatagaaacaacatcccaacgctctgaaggatcctcacgagcctctgatactacagctttaccttttaataaaaagattatcaacaaccacagccgacaacctcaagaccattgagagatggtaccaaacaccaatgagagagccta

SEQ ID NO: 113758 - DNA, 355 bp, Glycine max
  unsure (1)..(355): unsure at all n locations
  Clone ID: PAT_MRT3847_73733C.1
agccggaagcggcgcgaggaccnaaacgccggccgagccccngagcgtttgctccgacagcccgagacgaacggacgggagcgtggacggggggggggactacggacctcccggctgcgccgtcaaggacaacggactctccatctggcgcccgccacacggggttggggagatgagaagaggggagatggatggggacttggcggaaacaattaaaagggacgatccccgaaaatgatcaacactggaaaactccactagagcatcgacggggggaactcactaggaaaaaccggcatgcaacggaactggaaaggacagggcaaaccacaccggggaccaccaagctgtgatg

SEQ ID NO: 113759 - DNA, 339 bp, Glycine max
  Clone ID: PAT_MRT3847_73734C.1
atatgagacaacactgagcatcgtctagctatctcgatcgaactgtccaaggtcctgtcacctaaccggagctcacattttatgccaagtccgacatccagtaccagggcggctaggggtaatgttgcaccaactagtgtccgtgtgtcgcacagcaagccggaaagcaggctgcgaaaattgtgcgatcggctttggctatacacaagacaacatacaacagtaaccggataccatgtacggggtatatagcaccttgcgcataagaatgttggtctgggtcttttcgagcttgtgtgatttgttgcacgtgttgccgtggccataataagggggcga

SEQ ID NO: 113760 - DNA, 334 bp, Glycine max
  Clone ID: PAT_MRT3847_73735C.1
aaaaacgaagggggccaaattttgaattcaatctaaattaaaattctcgccacaaaataaaattttccgggttccccaatttgaagttttaatttgctttggcccttaaaaaaaaaaaaaaaccttccaaaaagggaaaggggaaaaaaaaagggaagggggccaatcaaagtcccccaatgtaaccccttgttccttgccccactgtctttatttcccctcccaaagaaggaaggcgttttgtgaatacaaacccccggccccaaaacgttaaccctttgacccctaatacaaataatgaaggcccccctctcagcttcttgcccttttatag

SEQ ID NO: 113761 - DNA, 757 bp, Glycine max
  unsure (1)..(757): unsure at all n locations
  Clone ID: PAT_MRT3847_73736C.1
tgcaaatgttcggagcttttcttgggatacaaggctaaagactatgattggaacatctaggggactgaatttccttcactccttggagaagaaaattatatatagagatgtcaaaccctcaaatatactacttgacaaggtaagtttcattgttcaggcattgaatatcccatgatcacattttgcaattgaatatcttgaaaagtgaaagacaaaattcgcttatccaacttggagcatgcatactattgaagaagtcatggtaatgcaagaaaaaatctttctaatttctgcttttatcacagcattatacagtcaagttatcagactttggcttagctaaatctgtgaattcgcctgatcatagtcacatatcaacacgggttgtggggacacatggctacgctgctcctgagtacgttgcaacaggtcgtttgtacgtgaaaagtgatgtgtatggatttggaattgttttggtggacgaccctgacgggcaagaggataagggatatattggacncagtgtcagaaaatgtccttgagagattggctcaaaacaaatctattaagtagagcaaaaataagaagcaccatggatgcaaagttagaagggaaggtatccaaacaatttagctttacaattagctgaactagctctcaaatgcatccaaacagatnccaaagtcaggccataatgaatgggaaagttggttgaaacattggaacagattgaagcagccaatgagaaaccagctga

SEQ ID NO: 113762 - DNA, 443 bp, Glycine max
  Clone ID: PAT_MRT3847_73737C.1
ctgagtagtaactcgtaagggctttggttcatcgaaggctgaaattgctgaatcacagcttggttggaatcggtccaatgagggctttttgcacaaaattcccaccactggtaccaggttagtgccttcccttccattgcgaccatggctgcctggattcgatcttcttcctctacccctttaatctcgaaataacgttccaccttattcgtccagccaaacgcatcatctccgtcaaaaattggaatctcaagtttctgccactttacctctcaatcgcgattctggtgttctgcatggtcacgattgccgcttccatgatcggtgctcgacaagttccgaactgccaccattagctctgccatttgtgccttcagctccgctcgctcgatgcgttcatcttcagacttgcaacgtcctcacacgtgttgatcttgccttca

SEQ ID NO: 113763 - DNA, 199 bp, Glycine max
  Clone ID: PAT_MRT3847_73738C.1
tttttcttgagcatgatttccgtgaatagatgcgacgggggctttaggagaaggacgaccaaaacagatggccttgggaacattttcaaaaaagataccgcttttctataattcacataattgggactctttccttaaagatccttgagcactggcgctttgttggggggggaggccaccactggatgtaccctccata

SEQ ID NO: 113764 - DNA, 233 bp, Glycine max
  Clone ID: PAT_MRT3847_73739C.1
gaggcagtgtactttaaccgaaaatcacaaacagtgaagctcacatagcatgttgactagaccatgggtatttattttttgacgctgggaagggtcaaggaacatgacagagaccccccaaccaaaggagggggggagtttccgcaggggagaagacaaaaagctcaaaaaatagcttgtggagaaatggtatttacatacttaccctttatactggaaacataacataatta

SEQ ID NO: 113765 - DNA, 199 bp, Glycine max
  Clone ID: PAT_MRT3847_7373C.1
acgcacacgctttcatttgattatggcgaagttctacacagccgtcttgattccacccaacagagccagggactccgtgacttgatagatatgatatctctaaagattcagcacgctcacgttatgctactttgatcactactcttgggtgcgctttgggttgctattctgattaatggaaaatgggacttctatacgt

SEQ ID NO: 113766 - DNA, 271 bp, Glycine max
  Clone ID: PAT_MRT3847_73740C.1
cactagagtattcagatctagcatgctcaatgaagtagtaccgggaatagcagctcaagttcgtcatcacaaggcaatgtcttgtccaacgctaagtatcccttcttcatctcgtaaggtcatgttaatttatagggttgctgcgatctcaagttcacggcgttccgctcctctcattgatacggtcaatttcactgtgagagctgagactacctgcgatcgcacattcaatgccatcgtcgatgtgccgtcgtatactgtggatgaagtt

SEQ ID NO: 113767 - DNA, 326 bp, Glycine max
  Clone ID: PAT_MRT3847_73741C.1
ttgggggggggggggggggggggggggggggggggggggggggaaggggaggggggagcaagacaatgcgaggtaccgattaaacgaacaggcgtaacgaaaaagtagacgcacaaaacgatttaagcccttagtgagtcaagattgtagcggttaaacgcagccatcgttagatgtggtgcccggtagtgcagctaaaagccatgaaccccagtcgataatcggtacaggataatcgcacataaagatcctaaatgggcacgtagcattcccagatatgtaataaatgtcattaccgaagtaccatcaaccatccaaggcaattg

SEQ ID NO: 113768 - DNA, 397 bp, Glycine max
  Clone ID: PAT_MRT3847_73742C.1
aaaaaaggccctccaacattttttattttttgaatataaacgtccccaattacaaactttaaacgagtttttttttttttggggggggggggggaacaaaccccaccaagtttaaaaaggggcccccaataatgaaataattttttgggctttttaaatggcccccctgcccaaaaaaacattttaaatggtaagtccaggtccaaaaccaaacaacaccccccattaaagtccttcacctggggtttaaagccctttttcaaaaaatttcctcctttttttatccaaaaaaaaaaaaacccaaccccttgacatgttcccatattcactaaacacatttttaggggccttcattttttcaggtttgaaacctaacttttgctcaacttggacaaaa

SEQ ID NO: 113769 - DNA, 567 bp, Glycine max
  unsure (1)..(567): unsure at all n locations
  Clone ID: PAT_MRT3847_73743C.1
ctcgacctctcagatcggtcatcactttctggaaatttcccaccagatatatgctcttaccttccacaattacgtgttctccgcctcggccacactaggttcaagttccccatagacaccatcctcaactgttcccacctggaagagcttaacatgaaccacatgtccctcaccggcacgctccctgatttctcttccttgaaaaaatccctcagggttctcgacttgtcctacaacagcttcactggccagttccccatgtcggtcttcaacctcaccaacctcgaggagctcaacttcaacgaaaacggaggcttcaatctgtggcagttacctgcggatatcgacaggttgaaaaaactcaaggtcatggtgctcacaacgtgcatggtgcatggccaaatccctgcgtccatagggaacataacttccctcaccgatcttgagctgagtgggaatttcctnacggggacaaattccaaagagcttgggccagctgaagaatttggcaacagcttgagctttactataactaccaaccttngttgggaacatacctgaggagtt

SEQ ID NO: 113770 - DNA, 431 bp, Glycine max
  Clone ID: PAT_MRT3847_73744C.1
tagggcaatgttaagttttaacatgtctaatttatctcctcaatattttttctttgcatgtcgtggtgacctcatctatacaatttcatttcatttggagtggatttcaacttttatttgctatttatgatttagaaaatatttgaccattcctattatgcattagttatcccaaaattgataattgcaatagagaaacctttgtttccccctatctaatctcttttggcaggataacattcggatgctgttagatgttgcttctgagcaagtaaatagggagttactgctgcagaagcatttttttgcattgctttcatctgtctggaaagtggcatcacacgttgaccacaggcgaaatccatcaccctcctgtaatggtctctatttcgatcagagtttctatactttcattggccatccttcacaaa

SEQ ID NO: 113771 - DNA, 1289 bp, Glycine max
  Clone ID: PAT_MRT3847_73745C.1
cctcgtgggtttcggacaagaatatccctcaagacattggaataagacaaaccctatccttggtctgttccttcattcttattgtctccccgcatcgtacgccgccgacacagcttcgaatcgctgccaagtgctaacaaacgcctctgagtctctgacaccaacgcaactctctctgctcacatttttgaaggagatggtgaacgtgatggagtggcagaagcagcgttggcaaccgaatgggaacgcggaaatgatgtacgtgaaagtgatgaccgacgaacagctcgagactctgcgcaaacagattgcagtttacgcaaccatctgtgaacaactcatcgaaatgcacaaaaacatctcctcgcaccaagatcttgcagggattaggctggggaatatgtattgtgatccattgttggggtctggtgggcacaaaatagcttcaaggcagcggtggactccgtccgctatgcagcttcagattcttgagcgaatatttgatcaagggactggaacccccaccaaggaaaagatcaaggagatcactaatgagctcagccagcatggccagatttctgagaccaatgtgtataattggttccagaacaggcgtgctcgctccaaaagaaagcagcagaatgtggcacctagtgctaatgctgaatcggaagtggagactgaggttgattctaaggataagaagacaaagccggacgaatttcagtcccctcctagcgtttctgctgtgcctgctgatgataatttaggcttccagaaccatggcagtttgcagtacttgaatccagagtccaacaaaccagattctgtgttcccatctgatgcaagtttaagatctacaagaaatttcaatcatgtgcctgtttttgatgggctgctatcgaactcaacgagtgactatcttactggaaaaatggaagcacctgagaactacgacttataccagccagcaggcgacttcaacatggcaggttgacgtccaatgtaatttctgaagactgtgattagctgtaaagaattgctggtgtggttttgggcttgtgttgatgtgaaaagttgaaccaattgaagcatgaaacttatagtttatagtatatagataaaatgatcttttataatggtaggcggacattttacttgataattgaatataattatgagttaatattgatattgtgaagttggattttaaaaaaaatggtgaaccgtaagcgtcttccaccattggcttggctttggtatttggttaaaagagaaatggtaagaat

SEQ ID NO: 113772 - DNA, 981 bp, Glycine max
  Clone ID: PAT_MRT3847_73746C.1
atggtgaacgcgatggagtggcagaagcagcgttgttggcaaccaaacagaaacgcggaaatgatgtgcgtgaaagtgatgaccgacgaacagctcgagattctgcgcaaacagattgcggtttacgcaacaatctgcgaacaactcatcgagatgcacaaaaacatctctgcacaccaagatctcgcaggtattaggctggggaatatgtattgtgatccattgttggggtctggtggtctcaaaatagcttcaaggcagcggtggactccaactgctatgcagcttcagattctggagcgaatatttgatcaagggattgggactcccaccaaggaaaagatcaaggagatcactaatgagctcagccagcatggtcagatttctgagaccaatgtgtataattggttccagaacaggcgggctcgctccaaaagaaagcagcagaatgtggcgcctagtgctaatgctgaatcagaagtggagactgaggttgattctaaggataagaagacaaagccggacgaatttcaggcccctcctagcgtttctgctgggcctgctgataatttaggcttccagaaccatgatagtttgcagtacttgaatccagaatccaacaaaccagattctgtcttcccgtctgatgggaccagaaattttcatcatgtgcctgcttttgatgggctgctatcaaactcaaggagcaactatcttactggaaaactggaaacacctgagaactacgaattataccagccagcaggtgactacaacattgcaggttgacattcaatattattctgatgactgtgattagctgtaaagaattgctggtgtggttttgggcttgtgttgatgagaaaaattgaaccaattgaaacgtgaaacttatagtttgtagtatatagatacaatgatcttttatgtggtaggtggacattttacttgataatggaatataatcatgagttcatattg

SEQ ID NO: 113773 - DNA, 329 bp, Glycine max
  Clone ID: PAT_MRT3847_73747C.1
ttcaggcctgggacagtatatatagctctgactctgtgtgagcttgaggaacagactttccactcttactcaccgaatgctagaatggaatatcggcgctcaggcatctctttaaccattctcttgtctcttgctcttgaaggagagagccatgtccttgcatagtggggtgacgaagatcattgcaaagctgtttgaccgttctctcccattcccactgtactgcgagagcttctagtgcctctacctgaagagcgcgaaatcgaagaactccctagtcagattgaagatacactgcacccaaaaatattcttgtatagagaagacct

SEQ ID NO: 113774 - DNA, 212 bp, Glycine max
  unsure (1)..(212): unsure at all n locations
  Clone ID: PAT_MRT3847_73748C.1
cggttgtaagaccaccggaggggccattctttaatcttaaacacttggaaggaaaatatagttgcccacttcttccattatctcattttctattacatcggcatgatgaaaccttgtatattatactctaaaatttagaatcattcttaatttggtataattatactaaatattntactggtcgatatgggaaatgcactgatcacggatac

SEQ ID NO: 113775 - DNA, 235 bp, Glycine max
  Clone ID: PAT_MRT3847_73749C.1
ggggggggtggaaaccaattgtatcattgcgtgcatgattgaagagatgaaagaatctcgcgctgctggagtgtttgtaaaacatgaagatccccattctgatgagttggaggggcttctcaaacgccttggactcttaaaaagaggcaactttacttgataagaagaactgttgtatttatgcttaaaatactgttaagtgattttttgatgacaagcttgactttgcaagttg

SEQ ID NO: 113776 - DNA, 237 bp, Glycine max
  unsure (1)..(237): unsure at all n locations
  Clone ID: PAT_MRT3847_7374C.1
aggaaaggggcgnggaacacggnggagccaggggcananangcggaaaagagaagaaaaagcaacnnngggaagggaggcggcaggaaccagcccnggccgagggggcggaaacganncaagacangaagncagggacacacccaaagacancgggaggggggcaggcacaggggacagagacangggaggccgccggcacccaaccggagacaggagaaaagggggaggccgcagc

SEQ ID NO: 113777 - DNA, 383 bp, Glycine max
  unsure (1)..(383): unsure at all n locations
  Clone ID: PAT_MRT3847_73750C.1
tcggctcgagggtgnngagttctgagnttgggcaaatcaaaccttcatnggcatcttgagttgtccttatgtgacaaggtccgaaacacgtctacatgtcttttgatatatctcttcgcgaatctcttcaagattattgaaatgtgctaggtaatactccttatgcgcagcttgtttctgttccacagagctcactgacagatcttctgaaaatgtctgaatcctacgcatgatctggaattcgcgttttcttacgcttgttcgcttgtttaattcaataaacgaaattactcatgaccctttagcagagcatgctctgcctatctgaaaatatacacacctattttaattgttgtattgatgtgtgaagggtgtgttttttt

SEQ ID NO: 113778 - DNA, 1479 bp, Glycine max
  Clone ID: PAT_MRT3847_73751C.1
ccattaccttccttcactcttacgtctatcgctttcacctctctctctctctctctctctctctctctctctctcttcgattttgattttgggtttattttttcccccttttcaattttgttcatggtgttgagcgtgtcacggtaattggcgggaagtaaccgtcaattccgataaccctttggtgaaaagcttgaaacttgaggagtttgaagaaaagggggtttatcgtttcgtcgtggatgatggcgaacccatctggcaaccatcaagagcacacgcacgtggtgtcgtcttctgctccagagacttcaggtgcggctctcgcgatgaagcacaatcctggcatatccctcgattggaccgcagaagaacaagccattctcgaagatggactctccaagtatgcctcagaatccaacatagtacgctatgcaaagatagccctacagctacagcaaaaaacggttcgtgatgtagcactgcgagtcaggtggatgaataagaaagaaaatagcaagagaaggaaggatgatcataatttaactcggaaaagtaaagataaaaaggaaagggtttctgatcccgcagtaaagtcatctaactttgttgctcggtccaatgtctccccatatgctccaccaatgattgcaatggacaatgatgatggcatctcttatacagcaattggaggtcccaccggtgacctattagagcaaaatgcacaggccttgaatcaaatctccacaaatctttctgctttccaggtacaggagaacatcaatcttttctgccaaactagagataacatccttaaaattatgaacgagttgaatgactcgccagaggtgatgaagcaaatgccacctcttcctgtgaaggtgaatgaagagctagccaattccatactcccaagaacaaatcttccaccacaatcatgaattcatgataaacattcatacttaaccaggcttgcctcttgaatatttctgcctgcacctctgatcaggagaataactgccaaatgccaatcaagttgaccccaagatttacttttggaaaaaaagaaagaatgaataattgttgataatccacatgttgaattagtttctataattttattttattttatttttctaaagttggttttcccccttttgtttctcttgttggccaaacttagctgtactataggaattatttagtattcttggtattaattgagttaaatttaggacattaggttaataagttgtggtataacttcatttattttctcttgtttgcctaacatagttgtactatagggattatttagtattcttggtattaattgagttaaatttaggcaattaggtcaataagttgtggtataattttatttattgtctgttattttcgttgctacatttcattatgcatattttattagattcttgttaaaaaaaaaaaaaaaaaaactcgagactagttctctct

SEQ ID NO: 113779 - DNA, 639 bp, Glycine max
  unsure (1)..(639): unsure at all n locations
  Clone ID: PAT_MRT3847_73752C.1
catgagagagcaaccttgtcatggggaagactctgtaaaaaatgcctctcatacagacaaaacaggagaaccgagccacaattgtttgattcacaatgaagaccaacatattcttaaggattgccagggagtctctatcatagttgattctagaggtccctatcctgttgccacaaccactgatcaagaactagaaaagtccctgctcttgccatgtgaggccattgaaaatgtttcgtgcaatgacataatgaaaaaaattggagaacatcaacctcagtttgaccttcctgttaactctgcagaagagaacactgttgacttgaacttgggtgctgagaagtatccgcttcatttgaggatgagaactcttggtgccaaattggagtcaacaagcagtagttctgccattgctgaagatcaagtttctgaactagactttttaaactctagaaatacacagctgatatcagaaggaaaggctatagatggtgtttgctcaagtagtactcaacctcagttaatgatgtctgaagaaagaatgaatgttcagcatacaaaaactgatcaaccaaaactcatgccagtgatttctctttctttggttngtctntacctatggagcacacaactggatgc

SEQ ID NO: 113780 - DNA, 427 bp, Glycine max
  Clone ID: PAT_MRT3847_73753C.1
ctgagctacaacgtgttgcttcaggccttcatcatcaacaacatcatcatcatcatcatcatcccaatgaagctttctatgattcaagttcttcaactttgttctcatcatcgtccactacttcttctatggctgtgtctgatcaacagcagattggagatgacacgagtactgctcccaaaaggggagaatattatgactcttgcttttttagagggaatgattttcatgacaagaattgaacattatgttaagtgtaagtatgatgttttctgttcaaaacctactttttttctgtctatggttttcataattcaaataatacttcttaaacttcaggtaaactcacatttcttcacatcagaagtgatatgtttctgatattataagccatgagaagtagatctgtatacttgtgatgaaacaa

SEQ ID NO: 113781 - DNA, 277 bp, Glycine max
  Clone ID: PAT_MRT3847_73754C.1
tcattgcctgatatccttgtcgcgacactaggtctggcatcacggcaataccatggcacatgcaacaacaagtcacgtcccttcatgtatgatgacaaatgtgaacgatctactgctagtatcaatggcatctcttaaggcatgcgagggactcatcaaacaatggattcttaaaaacaatgctcgagatctggttgaatctggtattgacaacattgatggcgacaagattacactaaacacttggacgcattttgaatatacttgcgcatatgct

SEQ ID NO: 113782 - DNA, 354 bp, Glycine max
  Clone ID: PAT_MRT3847_73755C.1
acccaccacgccgacgattttttttgcggcttttttgctacccttgggggtctgccctctgagaatcttgagactttgagcatggtggaatttaccaatttggattaatggggtccgacatttgcattgcgaatggcacgcgccctcacgaatggtgaaagggggggtctatgctatctggaggattcgctcaactatgctgctagagacgcatggagtgtatcatgacaagtccaactttcattcgtactgtgttgatccaggatctcacccacgggtttatgatgaccccccttgtgcttaaacgatgggagcggatagagtgttaaccaaacaaatatttctattttgcac

SEQ ID NO: 113783 - DNA, 276 bp, Glycine max
  Clone ID: PAT_MRT3847_73756C.1
gagtgcagaatcagagacagatggatgaggagaatggctacagtgggagtatcagcattaacgtggagactacgatagcagagagatccgtgtggcacaggaagtgccctttagcggtcgatacgtcatgtgaggaccatccgcattctatcgttatcgcgctggtcgtccccaaccctcacggcatccttggcaaatcctcctctaaccctgctctcatgtccacgcccagagttctcgcgctctccattgttggtgacgacgtggcgtttcctg

SEQ ID NO: 113784 - DNA, 913 bp, Glycine max
  Clone ID: PAT_MRT3847_73757C.1
tagttctagatcgcgagcggcctacttttttttgatgaatttgattctatagcccccaagagagggcatgacaatactggagtaactgatcgtgttgttaatcaatttctgactgagttagatggtgttgagattttaactggtgtatttgtgtttgctgcaaccagtagaccagatttacttgatgcagcactgttgagacctggtaggttagatcgtcttctgttctgtgactttccgtctttgcatgagagattggaaattcttgcagtactttctagaaagttaccaatggccaatgatgttgatttggatacaatagctaatatgaccgagggattcagtggagctgatctccaagctcttctctcagatgcgcagcttgcagcggttcatgatgttctggacagtgtggatgcctctaggccagaaaaaacaccagttattactgatgctcttctgaagttcacagcatccaaggctagaccatctgtttcagaagaagagaagagaagactctccaatatatatcaccagttcctggattcaaaaagatcggttgctgcccagtcaagggatacaaaaggcaagagggcaactctagcttgacagggaagtaaattcagtgcagtttgttcatgtggtggaagctagtctttggtattcctttcttctgaagatgtcttctctgttcatttgcacctccttaatagtaaatttgtataggtatcgattgtagttcaactcacatcatttgttgtatttgataatgtaaattctcctagcaatattacgaataaaatatgaacaaaaaaatgttttcgcaagttatttttttctctgaaattttattttcggttatgtgaaattacagggcataacgggcagcaatgaatggtattttttgttgtat

SEQ ID NO: 113785 - DNA, 408 bp, Glycine max
  Clone ID: PAT_MRT3847_73758C.1
tttctttttttttcttgtgttgctggtttaaaccaaactgaaaattataaaatgggggggtttaaatgggtcacggcctcataattggacgtttacaatttccatgactaattaccagtgggacttgctagacaacaaggaaaaccccttgtccaatcaatcaacagtattaattgccctgaccccattcaaatcctagtattcatgaaccgatcaccccactgccttttaaaaactcccaaattatgcctaacctatgagaacaaaaggctatctacccccacgaaactttgggtcgaagctacaaccatttgaaacaattccaaactcaaggatgggatatccagcccgagcttcgtgacgtgctaatacaaactgaaacgctctaacaaattggctgtttatttt

SEQ ID NO: 113786 - DNA, 308 bp, Glycine max
  Clone ID: PAT_MRT3847_73759C.1
tatctttattttctcattcaacttttttttgccaaccaaatacaaattcatgggcgtgtgaatggggataattgatattatagcctcaattaggcattccaatcaataagaaacaagtcaagggattttaaatcataacagacattactgctatttgaccgtctcacaaaggataccctaatacgtatcatcgatttgacatgacctccagcatatttttattacaagttgctaaaatgaccataaaacttatgtaatcacaacttacataaacacattccatacattatttacttttaaaggaacca

SEQ ID NO: 113787 - DNA, 513 bp, Glycine max
  Clone ID: PAT_MRT3847_7375C.1
aagcatgaaaaatttcttacttattcttaaaaagcaaaacttgccaaatagatttcattcttcacacttggatgaaagacaacatatctggagtcatcaactgatggatcaaaatctcatggaaaggcaaagacagtggcaatttgaaattagagaactgcccaacaacttgttgcattgatggcctgaactttggtttgagacacaaacatgctaatgctattgttactgcaagcattatatcatgagtgtcttttcccaagttaggaagaggaagacgtgcatctaagatgtccttcaacaacatgttttgagcagttgagtttgataaagatgagattagctctccaggatgccttcccattaatgtttccaaagtcaccactccaaaactgtaaacatcacatttttccgtgacattcattgtataggcaagttctggggcaatgtagccatatgtgcctgctaccaaagtttgatttgaagaatcgggatcaaggagtctagctgtgc

SEQ ID NO: 113788 - DNA, 332 bp, Glycine max
  unsure (1)..(332): unsure at all n locations
  Clone ID: PAT_MRT3847_73760C.1
cccacgcgtccgcataaacagccagaggcactacgncaacgtccaaaacagggggnacaggaaaaaccctagctgcatccaacaaaacctcatttcatacctaaacattattctcctacatcatctctgacaccactcacactcttactatcacatcaactttcaaaatatttcggaggcacccaccaacaatctctctaataccctatgggctcttcatgccttctaaagcaacatatttcaatacaactggacctacagctgatcatgaaagaacttctcccaggaacatattgacgcaggatacatcagcctaataaaatcacctcaag

SEQ ID NO: 113789 - DNA, 254 bp, Glycine max
  Clone ID: PAT_MRT3847_73761C.1
caaaaaaaaaaagaaggaaaaagagacgccatgagaggtagaggcagagagcttcttggcctctcttttgctctaaagcacaaccctgtagcaaaatcagcatcaccatcctcttctttctgtcgaagtagcatcacattctcaacctcttcctcctccgtagcccctcccatcaaggaaccaaagacttcaacttcggcatccaagtcacaaagggactcgctgattttcgaagggttcaagcaaagaaaact

SEQ ID NO: 113790 - DNA, 1173 bp, Glycine max
  unsure (1)..(1173): unsure at all n locations
  Clone ID: PAT_MRT3847_73762C.1
nacggctgcgagaagacgacagaaggggaaggagaaaagagtgacactaatttcaaatggaaattgctctctcataacagaattcaagaggaggaagaacaagtatataaaaactatatctacatagttatatctctctcttgagatttcaaacgtagagatatggaatggaggaagtgctacttggatgtgatattggtgcccttgggatttctaacaagcattgggtaccatttctggctatggcacaaggttcgaactcagccacacacaaccatcattggcatcaatgctagtggccgtagaaattgggttaatggcatgatgaaggacaatgacaagaaaaacattctggctgttcaatcactaaggaacacaataatgggtgctactctaatggccacagcctccatcctactctgctcaggcttagcagcattgataagcagcacctacagtgtgaagaagccactcaatgatgcagtgtatggggcacatggggagttcatggtggccctcaaatatgtcacactcctcaccattttcctcttctcattcttctgctactctctctccataaggttcataaaccaagtgaacatcctaatcaacacccctcaggacccgatgtccctggtgaccccacaatacataaaggaaatcttggagagaggcttcattctcaacactgtgggaaacaggctcttctatgctggactacccctgttgctttggatctttggtcctgtgttggtgttcctgtgctccctgactatggtcccagtgctctacaatcttgactttgtgttcactagtgggaagggaaaggtggatgccaatgaaattaatagggattttgtatgaaataatgtaatgtaataattatggagtattaattattaattatatatatgtgggagtgacaattaaggtaaaaattttctcatttttataatatcaaaaatgtgcatgctgtaattacccgctgtgtgtgtagttttttcatagcttcttgtgttatagtttgctgggctgtgaataaaaagcatacatggtgcatagttttgattacctagctatcttattttcattcttgtttttagttttggcttgctaagagtatatataattcttatcactattattttttttctttccaagttatcatcacta

SEQ ID NO: 113791 - DNA, 187 bp, Glycine max
  Clone ID: PAT_MRT3847_73763C.1
cccacacgttcggcttggtgcacaactgaccaagttccatacggtggcgccatataactaggtggtgaacacgctctaagagaacccatactgccactactgcacaagggtatattcacttgcaatacatgaccctatttcgccatcctggggattacacaaaccctggttcttcatatatgaatcg

SEQ ID NO: 113792 - DNA, 473 bp, Glycine max
  Clone ID: PAT_MRT3847_73764C.1
ctttgattttatgtctgcagtggattcttgggtaccaattgttgtgcatcgcactcatcctgtaagaggaatgacctaaaaaggcgtgccacatgtaaatgttacaggaggtcagggacgtggtgggcccccaccattgatggtattagaggtggagtgacaattctgatcttaactctcatctgatatgatgactagcagacattatggaaaaggtgctagacaagatcgactgactatagatgtactcaaacgcaggtgctctggcatgtcttttgggcgttctgaatgaaaccgtgagttatagcgccactaaccgtatgcttacacgacctgtcgagaactggcagagtgttaaatgtccggttgatgagtgtactttcgcatatgagaagctagtatgtgatacttttagttacttaaataaagcgcattactatgtgcaatgagtgtgattgatattaagactttcc

SEQ ID NO: 113793 - DNA, 390 bp, Glycine max
  Clone ID: PAT_MRT3847_73765C.1
gctccagctgagcctaattccagtgagtccaaatctgacacatcatgaccacccattcctcctggtgatgggactctccattgacatatccggcgagggacgccatcaagacttccttatttctcatgaatgaatcttccataaatcaaccccctgctggtcgtggcccaagtactgcacctcatccccaacatgatttgcatccaccaaaccctggacccaaaaaaccctttttcttcaaaagacaggattgtgtttctccaacaccgtcaaatgattgtttgattccgtgcttataagtcgatgagggaaactggattctacggatcttgaaatgtgaacgagtttaactctatcattaatttaagcatctccagagacatactattt

SEQ ID NO: 113794 - DNA, 643 bp, Glycine max
  Clone ID: PAT_MRT3847_73766C.1
caagaagaagagagagagagagagtagtaactctcgcacactctcacaacaacgcatactatagcgaatgcgcgagcgagcgagcgagtttggtaagagttgtttatggcgattcgatcgaaggagatagtgcattaaaagcctccgtttggaattttagtctactatatataacttccgctgagctttgagactcagacacagcttgacaagtatttactgcatcgtcttttcgattcatcgggccacgtcgtttggggtgtggctgcaatcagggttcttagctgttccctgtgctctgagcataggtttattctttcctcgctgggtttctcattcaagctagcaacatattttttcccacaaagatggagtggccagcatgtacggatgagtacgagaagctcgtaattcgcatgagcacccccagggttgtcatagacaatgccgtgtgctccactgcgacaatagtcaaggttgatagcgccagaaagcatgggattcttatagatgctgtacaagttctctctgatcttaacctgtccattaagaatgctgacatttcttctgatggcaggtggagcatggatgtggtccatgtcacggatgaaaacggagacaagctcacagataaaagcgtttt

SEQ ID NO: 113795 - DNA, 302 bp, Glycine max
  Clone ID: PAT_MRT3847_73767C.1
gtgtgcaatgcaatcatattcctcacatctacaaggattatgtagacccaacccataagtagatgaatattccagttgagtctgaagcacatgcacccactccatccatcaacgagatggagccatcaatactgataaatgaatttcctgaagccgatgcctgtcaaagactcactgagtcaaggatatggtatgtccagaacctaaggtcatggggttttgaatatcataactaaccatatacaaatgtatacatatctgtctcgagcagttaagtatcactgtgatggatattgtggttc

SEQ ID NO: 113796 - DNA, 392 bp, Glycine max
  Clone ID: PAT_MRT3847_73768C.1
gaacctttgggctgatttatgtgcttgcatggtcgtgagaagatcatagaaggggacttaatatagttctattaatattatgtattagtattataataaacagcgaccgagaggaccgcctacttctaataatcaaacacctcagcgatacgacggaggaatacgacgataaagaaggggctacgagatattcctccgaagtcctcgacgacgaatccgggaccttaaacaaagaggacgaactatctgactccggcgaagacgggcctaagcctaatggcggagatacgcccctcctaacccgcgacggcccgccgcgggagtccgaacacgaagtcgtcactcatcacgactcccccgtagctccaatccccctctcaagccaccccccc

SEQ ID NO: 113797 - DNA, 234 bp, Glycine max
  Clone ID: PAT_MRT3847_73769C.1
ttctgatgttcttgcaaagcgagctcatgactttgaaaaacatgtcgctcatgaaagcctcaaggatcaaattcctgccggtgccaagttgaattgtacttacgttgataggcttgcaaagatcatgaaccttaaacatagcgttgttggtgatcttaaacttattactgacgggcagttgcattatggtaagcatattgctgaatctaatattacggcaggggaaaatcaatg

SEQ ID NO: 113798 - DNA, 485 bp, Glycine max
  Clone ID: PAT_MRT3847_7376C.1
gatataatatatttaaataatctaaatactcatgtatttcacggttcctaagtactggcaaaatatacaagataatccattagtttctcttaattctttttcccccttcattttgtgtccaactctttctctaataccctcgtgtcaacctcttcctcccaattttttatatcacgagtactcccataaatccgactccatatgaagaagcataacaaattaaccaaattcagaatgaaaaggagggcatagtagtaatcatagtgccctctattgatatttgatgctaaccaactagcttctcctcctctcttggtcccatctttcacaaccttgacaataaggcttcccaagacgtttcccatcccaataccaagggcacatagagaaacagcaatgcttgacattgtcttaggaaattgagagtaatagaactctatttgtccgatgatattcaaaccctcagctaaaccatacaagcagta

SEQ ID NO: 113799 - DNA, 1118 bp, Glycine max
  unsure (1)..(1118): unsure at all n locations
  Clone ID: PAT_MRT3847_73770C.1
ggcactttccagaggtccgttattttcccaatctcgacccacgcaccccgaaaaaaaatcgacaacaccatcaccgtcctcttcagccctccggcggcgtcacagttgtccgagaaaagaacccatagcaggagcgaatgctgcaactttgacttgatacaggttagcaaatatgagcgaagagtctcattctaaagtagaggctatggatctcttacgtcagttggaggatatcctcgaatccgatgctctaattgatgagctgggttttattcatccttcccaattttccttgctaaaggaagaatcggacatttcgtctaatttatctgacgaagctatccatcaatcagcagacagggtagtaatctctgaggaatcttccaaacaagacaacctatatttttggaacagagatcataaattgggaatttcaactcatgttcttctaccattatatagagctgctaaaccatgcgtttatgactacatttaaacaatacaggatgtgtgacaatcaatctgacaaagttggaatgtgcttacctgctttttcttcttcttgtgatcatcttgaaagtatacttatgagacacagcaagtctcttctgctgctaagctgtgattntatgacagcttggaattgcagaaagttaatagtgtccaagaagaagaagctctcaatgtttgtagatgaacttctcctgtcagaacttgtgctctcatattcacccaaaagtgaacaagcttggaatcataggcggtgggtgatcaaatcaatctctgcaaactgttcaaatttcaaagagattttgggaaaagaatctgagctggtggaaaaaatagctgagagttcaaaaatgaattatcgtgcgtggaatcatcgttgctggttaatctcatacatgactaacaaacaggttctatacgaattaaagaaatccataagttgggctgcactgcatgttgctgataattgttgttttcattatcgcagacgactattactgaaatttatggagaaccaaaattctgttgaagaaactatatcttgtggtcataatgctgatattgtccaagccttgaaggatgaacttgattggaatgaagcattgata

SEQ ID NO: 113800 - DNA, 330 bp, Glycine max
  Clone ID: PAT_MRT3847_73771C.1
ttttctaacgtatgtcattgatattaccgccgcttcttaatcacgggctgcttcttttgttctttgtctgtttgttttttctctcacctgaaaatctcttgctgcggtgataactgtcgttgcagcagcccctttttttctccaactgcttcccatgctgcaatatgtacccacacttgatctacacctagtcaaccaccaccgacaccttggtcattgtaatggcaccacctaatgctcaattccaaaagtctcaaatgggtgttccccctcgaaaccatggctgcaaatttttatcttacttcaccttcaacccctgaactttcaaat

SEQ ID NO: 113801 - DNA, 1211 bp, Glycine max
  Clone ID: PAT_MRT3847_73772C.1
ataagagtaatagtttccagttttgctgtgaaaatgttgcttctaccctgcaaatggggaatcaaatatttctgggacacacttcttgatgctgaccttgaaagtgatatcttgggttggcagtatatctcagcaggcttaccagatggccatgagcttgagcgcttgcacaatccggaggtttgtcatgttttccttcattcaaaggatttacagtttgcttggtatcactcagatgtgattattttatattccctagtttaattaatttaaatttctgtacatttttttaagtttatttaatcatcatatcgtgtataacatatcactacctgttatactatttgattttactgcagcaaaaaattcttgtttccttaccattcctctctcctcatgtgccattttttgagatctaaggagtttgattatgctaaacgtaatagtaacactgcataaaactagaagatattaattttgtgtagtgaagcaaaaactgacacaatctgagttaccttgatgccagttggaaaataagagacttactttttcatattttcttcaattcattttatacctggtgaaatttatctgttcatatttcttttaccagttttaaaaggaataattctccaacaaccaaagtatatctcgtttctgtctaacatggataatttgaagttctgtttcatgtattagtgtagggcatgccaatatatttgtgttttgatattttactttgcccacgcgtccgattgaatatccatggttctcttagttcttttatccattaaaaaactctagattaatatttctaagaagaactatagtagttgaaagatatcttttgcaaatatgcatatttaactgaggttgttataacttgttccttccctcaaaaaaaaaaaaaaaagaaagaaaaagaacctattagcctccttcattggatatattacatctataaggagtaaattctaccggttcagagaatagaaaaataatcaaaataaaagtcagcagtctcacatctctaattttggtgacagattcaaggggttaaatttgatccagaaggtgaatatgtgagacaatggctacctgagttggcaagaatgccaactgagtggatccatcatccttgggatgcaccgcttactgttcttagagcagcaggagttgagctgggtcaaaattattcaaagcccataatt

SEQ ID NO: 113802 - DNA, 264 bp, Glycine max
  Clone ID: PAT_MRT3847_73773C.1
ccctggatgctacctaacgatacacaactcgcctcgccaaacatcaccacgaagaagcaacaactgaagaagaagaagaagaagaagaagaagcacaacaacaacaacagcatgacgaagaagaagaagaagaggataataattacaaatcagacgatcctcctaccgaagacaaactcgaaatatgtgttcgaagaactcctggaaatacgcaaagaagcccaatgtccaattcgcctaggttttatcaagaaaacacgtact

SEQ ID NO: 113803 - DNA, 3184 bp, Glycine max
  Clone ID: PAT_MRT3847_73774C.1
gttgttctatcttcgtatcctttcggctctgttagtcatgcgtgtctgtctcccactatcttcagtgcacgtaccgtgtgtgcgtccacactcatctgagcatccgcccatcgtttctgccagacaccctttcacttctccaatatacgtacaatcatgtctcttctttggtctatagcgcatacgtagcattcgtgacctcattacagattgagttgtctaattatcttcagctaaacttcgatggggttgtgaatattaaaatatctagccggtgggtatttcacatctctggtatattatagtccgtgtttgagatttgtttttttaggctgaattcgacttactttcccgttagtttgttctcatcaaaacccacagtactgctgtggctctcgtggaatgcgtaaaggccattcaagcaaccaaagtagtgtttaaccatctgtatgatccagtttcacttgtccgtgatcacaacatcaaagaaaagctagtggaacaaggcatatctgttcaaagctacaatggagatctgttgtatgagccatgggaagtaaatagtgagagtggacgtgcttttactaccttcaatgctttttggaagaaatgcttgcacatgcaaatggatattgtttcagttgttcctccatggcaattaattccagctgaaggaaaaattgaggaatgttcattggaggaacttggtcttgaaaatgaatcagaaaaaccaagtaatgcattgctaggacgggcatggtcaccgggttggagaaatgctgacaaggctttaagagaatttgtggagcttcatctacttcactactccaagaaaaggctgaaggttggtggagagtccacctcactcttgtccccatatcttcattttggagaattaagtgcaaggaaagtttttcaagtgacttgtatgaagcaaatattatggacaaatgaaggaaacagtgctggtgaagagagtgcaaatcttttcctcagggccattggacttagggagtactcacgctatctttgtttcaactttcccttcacccatgagaaagcacttctgggacacttaaagttttttccttggaatcctgatgctgatatctttaagaattggagacaaggtaggactggctttcctttggttgatgcaggaatgagagaactttgggcaacaggctggatacacaacagaataagagtaatagtttccagttttgctgtgaaaatgttgcttctaccctggaaatggggaatgaaatatttctgggacacacttctggatgcagaccttgaaagtgatatcttgggttggcaatatatctcaggaggcttaccagatggccatgagcttgagcgcttggacaatcctgagattcaaggggctaaatttgatccagaaggtgaatatgtgaggcaatggctacctgagttggcaagaatgccaactgagtggatccatcatccttgggatgcaccacttactgtgcttcgagcagcaggagttgagctgggccagaattacccaaagccaatcattgatatagatttggccagagaaagactcactgaagctatattcaagatgtgggaatctgaagcagcagcaaaagctgcaggctctgaaccaagggatgaagttgttgtagacaactctaactctcttgaaaatttggacactcgaaaagttgtcgttctgggaaaggctccatgtgctactatttcagctaatgatcaaaaggtgccagcacttcaggattccaagaatgaaccgcctacgcggaagaggccaaaacatatggtagaggaggggcagaaccaggataactctcaaaatcataacaaagatactggcatgtcaagcattgaccaagacatttgctccacagctgattcttcatcatgtaagaaacagtgtgccagtacaagctcatattcattttcagttccacagcagtgctcctcatcttctaatctgaagtggccatggcaagatcagactgacatggagcagagttcaagcaaagatggagctatgtgaggttgatgttgttcttgttgacaaaaccagtagcagctgcattgttcatggaaggaaaatggtgccatatttaagttttgcagtttgtttatagcctatgctatcaatcagttgtgtaataggttatgaaatcctgcaagaggaacacggattacaacaatagtgagcattgtatattatgaacttgtgctgatgggctgttccatacacattctgacaatcccgtaattacaaaccatataaccaaatactctacacattatattactctaaaatctgtttcatttttatccaaagccaataattgatatagatttggccagagaaagactcactgaagctatattcaagatgtgggaatctgaagcagcagcaaaagctgcaggctctgaaccaagggatgaagttgttgtagacaactctaactctcttgaaaatttggacactcgaaaagttgtcgttctgggaaaggctccatgtgctactatttcagctaatgatcaaaaggtgccagcacttcaggattccaagaatgaaccgcctacgcggaagaggccaaaacatatggtagaggaggggcagaaccaggataactctcaaaatcataacaaagatactggcatgtcaagcattgaccaagacatttgctccacagctgattcttcatcatgtaagaagcagtgtgccagtacaagctcatattcattttcagttccacagcagtgctcctcatcttctaatctgaagtggccatggcaagatcagactgacatggagcagagttcaagcaaagatggagctatgtgaggttaatgttgttcttgttgataaaaccagtagcagctacattactcacggaaagaaaatggtgccatatttaaatactgcagtttgtttagcccatgctatcaatcagttgtgtaataggttatgaaatccaacaggaagaacacggattaaaacaatagtgaacattgtatattatgaacttgtgctgatgggctggtccatacacattctgacaagcccgtaattacaaactatataaaccaaatactctacacaatgtattactctgatatcacttgcattttatccttattactcgagctttttttgctgctcaattactaaaaa

SEQ ID NO: 113804 - DNA, 379 bp, Glycine max
  Clone ID: PAT_MRT3847_73775C.1
actagactattacatttttgaaccgttgagtgcataaaaatattgtcggtatgatggagagaaaccgtgcacgccctagtatatggtttaccatagatggaaaacaaaatagatgtcctcgccatgcgccttaaatggagacagaactcattagaagaccggtaaatatatgcatattgacactttcacaaagtaaatatcatggctgactttggagaacaaactctcctgagtacacctatttgcaccaatgactcaagctgatgtaccttatagagagaaatttgtgcatgaacagagaccagcgcattatcggcagtaggactatagatcgccaatagcaaccaggcatcaactcgaagaagcctgtgaaaccaca

SEQ ID NO: 113805 - DNA, 359 bp, Glycine max
  unsure (1)..(359): unsure at all n locations
  Clone ID: PAT_MRT3847_73776C.1
atcttctaaattttacattntaatttatacgggggataatggggggctatagatttttgcaaagggcaaaataatcatcaaaaaagcgagaacctgttatccgccggttaacacacatactataaaacgtgcgacatgatcctagctgggaagataatttcggccaaaaaaaacaacctatttttgttaaccaaccaacatgcagcccataggggtgtcccctgaaccaaaaaaaccatagcacaccccattggatgataggcaccccacaatataaaggctaagtcaaagagtgaacataaatgcaagcctgagactaaaactagatggggggaggggactcgcattagcacttacat

SEQ ID NO: 113806 - DNA, 335 bp, Glycine max
  Clone ID: PAT_MRT3847_73777C.1
gacgaccaaaactatgccattacaggcaagacctaaagtttgaagaagcacagcgcaccaaaacctaggtagagagaatcaactagtgtactacagtactagctagctcctctcaggtcctaacacaagatagagacaaaaaaaaaacgccacaaatcacaaaacacaaaaaaatcagttttttcttgaagatgccgaggcccggccctagaccttacgagtgcatgaggcgagcttggcacagcgagcggcaccaaccccatgagaggttccatcattcggcaaatttttagggtcgtcgcggaagctcactccgcgggtactaagagcaacaa

SEQ ID NO: 113807 - DNA, 591 bp, Glycine max
  unsure (1)..(591): unsure at all n locations
  Clone ID: PAT_MRT3847_73778C.1
cnctcccaactatcccttctttctttatagtctgcatcttctaacacccttttttttctctctcattcaagtgcacaaacatgaagttaagtcttcaccttggagctctcctctttttccttttcttcctagtttcctcatcaaaactatctgccagaccactcaccactgaacaagggagaaacagatcaaaactgaatgaggtctcaggggaggactttgttttggagttggaaggaggtgaatctttgaagctgctgggggtggagggctgcaaaagtggagatgaagaatgtttgcagagaagaatgactatagaagctcacctagactacatctacacccagcaccataagccttgaaatcagaaatcttgtcattttatactccaattagtaatatcttttcaatttagcttagataaatactattaagctaggatgtttcctattgtttttattttctctacaacacttggggctttgcaaaagccttgttgaagtggtattaagggtatcatctgtttgataaagcaactgatgaacatatatatatatataacggaagcttatgaattttattagccaattt

SEQ ID NO: 113808 - DNA, 332 bp, Glycine max
  Clone ID: PAT_MRT3847_73779C.1
cccacgcgtccgctgacaagctgaggtcattggtgcgaaaattgactacttcaaaatgacgtggtgcctatcagatactcatactaggctgtgaacatgacgacctcaggttataccgtcattgcgctttaatgatgatatgcctatagcatcactgtgaaagtgcatgacgtgcttcgagctataattgacttcttcggcaagtacctccgatgcgtccaagcctacatcaacgacctggctaacatcactctaacatgttctgacaatataatccaagctatggcattctgcgtccatgactgaaaacgagctctcgtctatcacatcat

SEQ ID NO: 113809 - DNA, 248 bp, Glycine max
  unsure (1)..(248): unsure at all n locations
  Clone ID: PAT_MRT3847_7377C.1
gtcctcttagtggaaggaaattgagggtgaaaaaggagagagcacccnattggaggacgcncgatnggcactanagtctncgcanttgctgagcctgacagacctctatggttcccaggcancacccctcntccatggnttgatggcantctanctggaganttcggctttgancctcttgnncttggatcnnacccggagagtctgagatggcatgttcnngcagngctagtntcactgcagatngg

SEQ ID NO: 113810 - DNA, 450 bp, Glycine max
  Clone ID: PAT_MRT3847_73780C.1
ttacctcaccaagaaatgcatgggactcaaatcaaaagagatatcgctttagaatcgcaagggcagattccaattctagaggccgtgtatcacatgcgagatgggcaaatattacagttaagttccaagatctatatggatatacagtggaagtcaatgcgtactatattaatgtgttgaatgaaatcagggtataggttaggcaacagtgacttgtctattgaacttttgaagctagcattggcgctaattactacttgcaaccctctgctcatgaactgatctccctcaaatcctgcatcaagctatcaacgcttgctaatgccatcacttctgaatacactgattaccacgaggaatcccgactgatactcgttccaagattggattctcattatcagtatctgccaagaataaacttaccgttactgatcactattacaatgattt

SEQ ID NO: 113811 - DNA, 419 bp, Glycine max
  Clone ID: PAT_MRT3847_73781C.1
agaagcgaaggcggaggcggaggagcggaggtaggagatctcgagcaagccggaggcagaggagatgaagacgttcgacccgtggccggtcttcttccgccgggagtggaagcgcaactggcccttcctcacgggtttcgccatcaccggattcatcatcacgaagatgacggccaacttcaccgaggaggatctcaagaactctaagttcgtccaggaacacaagaagaagcactgacgaaccaggtgaaggagttgtcagaaacgcatgtttggccagccagttctgttatgcttttgaatgaaaaatttagacccttctttctcgtttccttaatcgaaatgcttgcactctatgttccatttgtaatgtaataagaggcaaatggattgaaccaacaacaatcaacttctgattg

SEQ ID NO: 113812 - DNA, 185 bp, Glycine max
  Clone ID: PAT_MRT3847_73782C.1
ataaagtgcttattggcgtgagttttatatataaaaatatgcaataagactttattattagtatatgagtttaatcatcaaggactaacaagacaagtcttagcgcatattgcgatgtctaagacatcttctactgtgtgcacgaaaataaagttttttttttggggccatgctccctggggggg

SEQ ID NO: 113813 - DNA, 418 bp, Glycine max
  Clone ID: PAT_MRT3847_73783C.1
gaccgcgcaagtaccaccacacagtgtgcaaaccacacatcagctctccgctacaaagctggcatcgagcccctacggagcccgttgctaaccgccgcgttatgaagccggcgtcggagcgccctccatttactcattcgagaaaggtccatctgctttccacgtcctgggccgactcaccggcctcccagtcggcggcatactgctcctcctggcgggattgaccctggcaggaaccctcaccggactggcgattgccagaccgatctgtaggctcttcagcccgatgctggttccagctatggtcgccatcagcctgtccgagatcaggttccagacatacggggccttcaggctcacagcgctggcgttcttctcctggatcctgaactacatacgtgagacccagcagcctggg

SEQ ID NO: 113814 - DNA, 208 bp, Glycine max
  Clone ID: PAT_MRT3847_73784C.1
cggaattcttgaaggatatgcctccattggactttgtgggtctaatataacaccaatcggagcagcatatgatgagcatccttttgaagtgcggacatatagagccgtattgtctgaacaagatctatttgtaatccagcaggtttttcatgtttgtggtaacgctaacctcacacttacattctatgcttctggattaatggccaat

SEQ ID NO: 113815 - DNA, 1001 bp, Glycine max
  Clone ID: PAT_MRT3847_73785C.1
caatgctgatggaatcattgagtcttgttttactcctgggcgctactgcatggagatcagttgtggagcatacaaaaacgggtggagctttgacatggagggcctccctgcagatctcatgcgcaggggaatggcggtaccagacccaacacaaccaaatggtgtaaagctcctaattgaagactacccttatgcaacggatggacttctgatctggtctgcaattgagaactgggtccgcacctatgtgaaccactactaccgccatgcaagcctgatttgcaatgacaaagagctacaagcttggtactctgagtcaatcaatgtgggtcatgctgatcttaggcatcaaaggtgctggcccacattgaataacagcgaggatcttgtgtctatccttaccaccttgatttggacggtatccgcacaacatgcagctattaattttgggcagtacccttacggaggttatgtgccaaatcgtcctcccttaatgagaagattaatcccatttccagaggatgaggcagaatatgccaatttcttagcagatccccaaaagtatttcctaaatgcgttgcccagcgtgttacaggctacaaaatatatgtctatagttgacatactctctacccactcatctgacgaggagtatttgggagagcgccgacactcatccatttggtcaggtgacgcagacatcactgaggcattctgtagcttctccgcagagatcagacggatagagaaggagattgagagaaggaacctcgatccatcactcaggaaccgttgtggcgcaggggttttaccttacgagttacttgcacctacctctcgacccggcgttacatgtagagggattcctaatagtgtgtccacgtaaagtaatgctcaacctcaatagttgcaaataaatatgcccataaccaaaaggtgcgtaagattttaggttagcacacttgtgtaatcaaggcattagaccttaattcacagaagag

SEQ ID NO: 113816 - DNA, 404 bp, Glycine max
  Clone ID: PAT_MRT3847_73786C.1
gaccgcggtgccaatataattgggtacgacaaaacgatctgttaaaaacaattaccatttactaaaaccggaacttttaatgttaaaccagtccctgttccaaatccaacaacacgctggttgtgacctactatatcacgcagaactcacttgatcttcttctttggcctaaactggttactatgaccggactttttattgcggcagtatacagccctaggatgcaggcgggcatagcacttgccgcaaatgatcttgtcctggttgtatttgccagccaaagccctgtgggaaggcttaatgattccaccaccaagcctttagacgagatgaaaggttgattccatcttgaagttttaatctgcccaggttcttccatctttaagctggtttgcggcgaaaat

SEQ ID NO: 113817 - DNA, 1069 bp, Glycine max
  Clone ID: PAT_MRT3847_73787C.1
gacgacctttacagtgatggcctgcccttgcaagatgaaattttgaagaaaattccattgttacaagtgctcacaaagatacaagaatgcagccaggggcttcttaagtatgacactcccaagattatttctaaggacaagttttcctggctgcgagatgatgaattttcccggcaagcaatagcaggagtcaaccctgttaacattgaggggcttaaagttttcccactggtgagcaaactcgacccggaaacatatgaccaccaagattctgcactcaaaaaagagcatattctaggacaacttaatggcatgaccgtgcaacaggcaatagtggaaaataagctgtttatggtaaagtaacgcgatgtctatgttccatttcttgacgggatcaatgccctttatgggagaaaatcctatgctacccgcaccatatttttcttgataccgcttggcactctcaagcctattgctatagagcttagcctcggaccaagtttcggatgaaaacgtgtagttactcctcctgtggatgcaactacaaattggaagtggcagcttgccaaagctcatgtgtgtgccaatgatgctggggtgcaccaacttgttaaccattgtacctcttgaggttgtatcttatttatcctctatcatctgaaatcgtcaaggcaaatggggtaatgatggaaaaagcatggactgggacactggatcgtgtgcagacattttggggcctaagacgaaaatgttaaagggtcttttttttacaaaaattttaaagagacttagtacattatataaaatatcaatttttatatacatgtagagggattcctaatagtgtgtccacgtaaagtaatgctcaacctcaatagttgcaaataaatatgcccataaccaaaaggtgcgtaagattttaggttagaacacttgtgtaatcaaggcattagaccttaattctcagaagagaaaaaaaaaaaaaaacaaaacaaacaaattgcactgtgaatgtttttgtatcaataattctgaacttggatgtgataatctattgattcctatttca

SEQ ID NO: 113818 - DNA, 1971 bp, Glycine max
  unsure (1)..(1971): unsure at all n locations
  Clone ID: PAT_MRT3847_73788C.1
agcnnggagtgcgggtcgaggacgacctttacagtgatggcctgcccttgcaagatgaaattttgaagaaaattccattgttacaagtgctcacaaagatacaagaatgcagccaggggcttcttaagtatgacactcccaagattatttctaaggacaagttttcctggctgcgagatgatgaattttcccggcaagcaatagcaggagtcaaccctgttaacattgaggggcttaaagttttcccactggtgagcaaactcgacccggaaacatatgaccaccaagattctgcactcaaaaaagagcatattctaggacaacttaatggcatgaccgtgcaacaggcaatagtggaaaataagctgtttatgataaattaacgcgatgtctatgttccatttcttgacgagatcaatgcccttgatggtagaaaatcctatgctacccgcaccatatttttcttgacaccacttggcactctcaagcctattgctatagaacttagcctcggaccaagttccggatggaaacgtgtagttacccctcctgtggatgcaactacaaattggaagtggcagcttgccaaagctcatgtttgtgccaatgacgctggtgtgcaccaacttgttaaccattggtaagcaaacccggaagcaccatacatataaaatatttaacttcaaattacatgttgttggttaaattagccaatttttttgttcggtaaaggttgcgcacacatgcctgcatggaaccatttatattgtctgctcataggcaattaagtgcaatgcatcctgtttttaagctgttggatccacacatgaggtacacattagatatcaatgctttagcccgtcagaaactgatcaatgctgatggaatcattgagtcttgttttactcctgggcggtactgtatggagatcagttgtgctgcatacaaaaacttgtggcgctttgacatggagggcctccctgcagatcttatacgcaggtaaaagtagatgaaaatgataattctttctctttctctttctctctctcagttgaatgaattccattccatccctactggctggtgcaggggaatggcggtacctgacccaacacaaccaaatggtgtaaagctcctaattgaagactacccttatgcaacggatggacttctgatctggtctgcaattgaaaactgggtccgcacctatgtgaaccactactaccaccattcaaattcaagcctgatttgcaatgacaaagagctacaagcttggtactctgagtcaatcaatgtgggccatgccgatcttaggcatgaaaggtggtggcccacattgaataatagcgaggatcttgtgtctatccttaccaccttgatttggacggtatccgcacagcatgcagctattaattttgggcagtacccttacggaggttatgtgcccaatcgtcctccgttaatgagaagattaatcccagaagcagaagtcgagagtactagtactgaatatgccaatttcttagctgatccccaaaagtttttcctaaatgcgttgcccagcgtgttacaagctacgaaatatatggctattgttgacatcctctctacccactcatccgacgaggagtatttgggagagcggcgacactcatccatttggtcaggtgatgcagagatcattcaggcattctatagcttctccacagagatcagacggatagagaacgagattgagaaaaggaaccgtgatccaacactcaggaaccgttgtggcgcaggggttttaccttacgagttacttgcacctacctctcaacccggcgttacatgtagagggattcctaatagtgtgtccacgtaaagtaaactaaatgctcagcctcaatacttgtcagagtatactaagatttttctgtaatcaagccattagacattaattcacacactaattctgaacttggatctagt

SEQ ID NO: 113819 - DNA, 441 bp, Glycine max
  Clone ID: PAT_MRT3847_73789C.1
agccaatatcataaaaagtcttcactttctacgattattttataaaaaaaccatcttagaaaaaattatccttctaagacggttcttaactaaaaattatcttagaaagatacctttttaaaacgattcttagttaaaaaccatcttaaaatggtagattttttaaaatggtttttcagagaaccgtcttagaatatatattttaaaaaaatatatatttggaaattctaagacggttttttccaaaaaaaattgtcttaaaatatgtacattctaagaatgtttttatgtattttttttaaaaaaataaaatatattttaggattctaagatggtttaaggattctaagatatttcaagatcctaaaatatattttaggattctaagaaaacctacattttaagacgattttttaagaaaccatcttagaaatgattttt

SEQ ID NO: 113820 - DNA, 264 bp, Glycine max
  Clone ID: PAT_MRT3847_7378C.1
acccacatttttataggctatccatttaatcctatttaacaaacttaacacaaattggttaattcccttttgaattcccctactttttaatacccccccttaattcaaatttgaaaaattggccttcccaatttggtcttcaattcttttaagcttttaagctttaaaacttttggttaacatttttccaacctgtcccttattttttctattccaaaccccttttttattttttttaacttgttcccaaaaaaaaagaatttt

SEQ ID NO: 113821 - DNA, 335 bp, Glycine max
  unsure (1)..(335): unsure at all n locations
  Clone ID: PAT_MRT3847_73790C.1
taagcacgacgaggtctannncgngacctcgaggggcctaaggcaagcccaaaccctgtttgaacagaacttgactgtataggagcagtggttgcttttgagcaaaaaaaaaaaaaaaaaagtcgagggggggcccgnnancgatgtggacgtatatggtgtagtgttaatcgggctaactggaggtcggtctacatcacgatgactgggaaagccctnncgatacccaacttaatcacctgggctcaaatctcactgtcgcgagatggcggatttccgaaaaggtnngtaccgatccgcctattacgaacacacnngcatactgagagggaaac

SEQ ID NO: 113822 - DNA, 395 bp, Glycine max
  Clone ID: PAT_MRT3847_73791C.1
aaaagggggaaattttcttttaaaaaaaaaaaaaagggcccccttttgtagaaaaaggcaacccagggaacctacccccctcctaaaaagaagaacccttgggcagacagtttcaaccccggcgaccccctcaaaaaagaccccccccaggggaccatatcccatgttttggggaaaaaaaagagggggggaatggggggggggcccagaggggggcggctttgaaaaaggaacccccgctggggggccccaggcttggggaattccccgcggaaagggcccacaaaggggcccccaaagggggggggaaccccaaagggggggggggggaaaaatctccacagtgggggaaaaaagggcccgggggcctgcctgcccgggggggacctgggggg

SEQ ID NO: 113823 - DNA, 362 bp, Glycine max
  Clone ID: PAT_MRT3847_73792C.1
cacattgaaggcatgcctttgggaaatgggatcgccttttcttccttgtaagacacgacaaggcatccttgtggccaaggctcactctctcaggatgtggctaaaagactccccattttgcttggatctggagttaaaagatgctcctagtctccccgagttaaattcgatgcggcttatagaagggtgcttcataaggcgtggccttgttccagcattcaaggaaattactgagaaacttgagatagtgagtcccaagaaattttccaaattggctttattaccagatgatcagagaagtaaaaccattcaagcttataaggagggacggaaagagaaattggaaaaaagcaagaaagttg

SEQ ID NO: 113824 - DNA, 609 bp, Glycine max
  Clone ID: PAT_MRT3847_73793C.1
acgagcgaaaacatggatggaattgatttatattgtgcttttaatttctaaatataaatgtcttaatgctgaaaggattagagatcattttgttttgttggttgatatgctacatacttaatcttcctttgagcctgttactgagatctaaaggaggttaaaacaaacaactctgtggtcgaaccatgttaatatgatttagatggatgagcaaattatgtcatctaatatattggtacagtgtcgaatatgccacgatgaggatgaagagtcaaacatggacacaccctgttcttgttgtggcacattgaaggtaggattgccttgctaattgcttttgcaataatgttagtttgtaaaatttacttgcgtagcttaacaaagctattttttatatttgcttactaaaccatgatatttgtttaatcttttgatgtatttggcaatttattgaagcagtggattaatgtctgcggttattggtattcagtatctgcaggttaacttttacatatgttaggattgttttcaattatctgcactattggcacttttgctggctcgtattttgagctcattttttcttttgatcattgtagtatgcacata

SEQ ID NO: 113825 - DNA, 602 bp, Glycine max
  unsure (1)..(602): unsure at all n locations
  Clone ID: PAT_MRT3847_73794C.1
taagcacaatcagggaatatccttactgattgatatccataatattctacactatcggaagggcgcgatttggtggttccctgcatgccgcctactttgtacccatgcatgatgcatgatgccaaccatgatgtacgtacttccttaagcaagctggaggtgcatccttcctcttggaccttggggggcttacttcctggagacccactgtgtcattcgtacccctgtgtcatccttatcagagtatgttattaatattagaatccctatatattatggtcctcccaaagttgaggaagcctcaccctgtcactgggtatcagattctaatcaaccagcatgctcagaatttggatgttgaatctgattcatccaatgctgttagttctttcaacagcaaagatggtgttgctgcctgctacctcgttaacaggaagagagaaatatttaatgatggaatgttagtaatagactctcttgacacttttttttccccacacattatcctttattggttaaaattcatgcgaatctcttaacttgaaagtgagaccaaatgcatggaactcanatatttaataggatttcacatcaatttcact

SEQ ID NO: 113826 - DNA, 354 bp, Glycine max
  unsure (1)..(354): unsure at all n locations
  Clone ID: PAT_MRT3847_73795C.1
gatgcatggagaaaggtggcacctattgaagagaaacctgaaactccaatcagtttctgcaacgaacaggttccaaactgtatccattttttttttatacatctattttgttgctttaatcatagtgtctactaattttttgctctttggtgatttgttgcacatgtaatatatgcaaagttctctaagcaacataatttcttaatttcgtgtctttctttaatttgattctaactggagttaaagccttctaacatgccttgtgctcttagtcaagatcctttctatatattaatagcatgttttctttataaataaataaaaaacatctaacatgcatatgncttctttttc

SEQ ID NO: 113827 - DNA, 709 bp, Glycine max
  Clone ID: PAT_MRT3847_73796C.1
tgggacccgtgccacggaccggcccggacagacccacgcgtccgcacactcctactaatctatcaattatttctctctttctctttcatgcatattctcaaacacatgctgctcaccacctagctcgatctcaaacccaccgaaacccacaaacccaccaaaaaaaagctacaacccatttcaccaaattcaatctcctcccatcccatcaaaccaaaatccaatttttccatggccctggaaacctggctcatcaaggtcaaaacggcgctgtcgcacagcctcacgaagaaaccatcgttttcctcgtcgaaaccaaaacgcgtcgcagttttgtctttcgagatcgcgaacgtgatgtcgaagctcctccacctctggcagtccatctccgacgccaacgtcgtccgcctccgaaacgacgccgtctccctcgaaggcgtgcgcaagctcatctcgaacgacgagtcttttctccttagcctcgccgtggccgagttcgccgactcgctccgactcgtggccgactcggtctcccgactcagcaaaaactgccacgaccccactctccggtccttccatcgagtcttcaccgagttcgccaactcgggactcgacccgcacgcgtggaccctcacaacccccaaagacatcgaaaccaaacacagaaaattgcgacattacgggatcctaacgggaacgctccaca

SEQ ID NO: 113828 - DNA, 1228 bp, Glycine max
  Clone ID: PAT_MRT3847_73797C.1
cccacgccgtccgattgtcatcacgaaggcacgcagccctagttcaagttcacacacccttccatctctctatcgttgtcgttgcagcaaaagacgccacaaaacaaaaccgccaccacccatccttatccttcctgcctccgaatgcgtgatcactgatcgtcaccaacatgtatataacaacggtctcttcgctcctcagagcaaccaggcctaaactcttctttccctctccttctccttctagaaccttcgcttcccgcacttcttccttctccgccgctccttccctcctccgctgctccgttccgcgctggagccaccgcctccattccacctctccgctctctccccgtcctccgatcaccgccgtcgctcccgtcgtcgaacgcttccatcgccaaatcgctaccatggccaatgaaaatcctttcaaaggaaacttgaccagtctcccaaagcctggtggcggcgagtttggaaagttctacagtcttccttctctcaatgatccgagaattgacaggttaccatattccatcagaattctccttgaatctgccattcgtaattgtgacaattttcaagtcaaaaaagaagatgttgagaagattctcgactgggaaaataattctacgaagcaagttgaaattcctttcaagcccgctcgtgttctcttgcaggattttactggagtcccggctgttgttgacctggcctgcatgcgtgatgctatgaataagcttggcagcgattcaaataagatcaaccctctggttcctgtggatcttgtcattgatcattcagttcaagttgacgttacaaggtcagataatgcagtgcaggccaatatggagcttgaatttcagagaaacaaggagaggtttgcttttcttaaatgggggtcaactgcattccttaacatgcttgttgttcctcctggttcgggtatagtacatcaggtcaatcttgaatatcttggaagggttgtattcaacaatgagggcctactctatcctgacagtgtagttgggactgattcacatacaactatgatagatgggcttggtgttgctggatggggagttggaggtattgaagctgaggcagcaatgcttggtcagcctctgagcatggttttgcctgggggaaattttattgttgttgggttcaagttatctggaaaactacacaatggtggtacagcaacagatttagttctaactgt

SEQ ID NO: 113829 - DNA, 291 bp, Glycine max
  Clone ID: PAT_MRT3847_73798C.1
gttaaccaaccgtcacctgatagccgaagacagaccgattttccgagtcaacccaaggcacttcaaagtacggggaatagtattgtgcggggagcacatgttataaaggtttcaacccaaacctagtatatggagggagaacactatatggaagccccgtccgaggactctaacaaaaagggattttgatggacagccgcttccatgggagatctattccacagttccggactacctatagatgttaaatatgtaccactgctatgcaagtgaagggctatgtgtggaaaa

SEQ ID NO: 113830 - DNA, 757 bp, Glycine max
  unsure (1)..(757): unsure at all n locations
  Clone ID: PAT_MRT3847_73799C.1
ccacgcgtccgcttcaatttaggtgtgcctcgtttttcttttgtttttcagcttttgttatgtggcattccagaatccagaggtgtaggtatcatcatctactcaaatctcttgaagaatatctggtgaagcttttggtcgtgtttctgattgtggaatttggacaagagaatcatcattatcattatctcacgagagacacagaccaccctcccactgttcaaccctcctgtcctgttctacaaccgtcttcttgtcctgtttcttgggttctttctgaacttgtttgatcaaactatatcttatttgtctataacttctgtgctctacatgtattcataactgatatacatagccatatatagcttattttacacataggataattacatgcattgcttctgctggaatgaatttctctctatttttcatgttttgatttactctacacaaattaactctcaattttcactttcacttaatagaaaaccttctttttaattaaaataaaaaattaaacagcgttctaataattgatctgaaatcccctttgtttataataggaaaaccctgtgtttgtattcaaatctagcttaaaaaatcaaattatttctgtaatttattctgaattctatgtgtttatttcgttactcgggattcttttgcgttaaacattatatattcttaggagaacgagaccactttttattgagtttgtagaatattttattctgattgacattagctngctaaatgc

SEQ ID NO: 113831 - DNA, 374 bp, Glycine max
  Clone ID: PAT_MRT3847_7379C.1
gatgcattctttttttgttatttttttttcttttatgttttttttttttttttatggtagaaacatttctatttaccttattattttgtgatcgagggacgccctgacaagctttgagagggaatctccgaagatgtcctcgacgcttgcctggggcaggacccatacaggccttttgcctgcggggggggcaccaccacccccttggggaatgggggggggttatttcacgagcggggccaggggtgactactaaaaaatagtgtgtgacacccgcttgaacatcaggggggggtggaaagatgtgggactggatgccgaaaactgccctgtcctagggggaaaagagcatcagaggggggttttcgcggggg

SEQ ID NO: 113832 - DNA, 1302 bp, Glycine max
  Clone ID: PAT_MRT3847_737C.1
cggctcgagctctcttcctatccccttcatcgacatcacaacacccacccatccctcgtttcaaaaaaagggccgttattgttgttaccatccaaaaaatggccggtcttgttgtttcttcccaatgctttctcaaactcttgcttgtagtttcagtctttcatgtttcctttgctgctaggaggttgaatgagctggttcaggaccagtctcagttgctacattaccacaatggtcctcttctatacggcaaaatcgccgtcaacctcatctggtatggtaacttcaaaccatcccaaaaggctatcatcaccgatttcgttacctcactgtcatccccagcgtctcagagcagccaaccctctgttgccacgtggtggaaaaccacggagaagtactaccacctgagtcccaggaaggcttctctctccctctctctcggcgatcagattctcgacgagacatactcgctggggaagtcactaaccggcaagaacctcgtccagctggcttccaaaggcggacagaggaactccatcaacgttgttctgacatccgctgatgtggcggtcgaaggtttctgtatgagccgatgtgggacccacggctcttccgcttctcatctgaagaagaacagcaagagctacaagttcgcctacatctgggtgggaaactccgaaacccaatgcccggggcaatgcgcgtggccattccaccaacccatttatgggccccagagcccacccttggttgctcccaacaacgatgtgggacttgacggaatggtcataaacctcgccagcctccttgccggaaccgccaccaaccccttcggaaacggctacttccagggtcccgcggaggctccgctcgaagccgcgtcggcgtgccctggggtttatgggaaaggggcttaccctggttatgctggggacttgctggttgactctaccactggtgctagctacaatgtaaagggggctaatgggaggaagtaccttgttcctgctctgtatgatccttctacgtcgtcttgctcaacgcccgtgtgatcagaagggttattttggtgatgccgatcgttctgttccatgctgctactacgatgatgttagaaaccacggattagggaggtgtacaaagcttctaataaacatttttgtagaattatttcatttatttgtttgtttatactatcttctggatatgtacgcggattaaggatgttatgtagtagaagcaaatgttcttccctttgctttttaatattaaaaaatttattattattactcttcaccaaaa

SEQ ID NO: 113833 - DNA, 393 bp, Glycine max
  Clone ID: PAT_MRT3847_73800C.1
ggaattcggcacgaggggataatgaagagtactgttggcgtctgtttcttgtttttccttttattggaagccattcgctgtgaaggctgttggaaggaagagagagatgctcttttgggccttcattcccgctttgtgaatccttactacacctcggacggtccagattgttgtcaatggggtggagtcaagtgcaactcctccactgggagagtggcccaactctatatttctttgcccgaatatagaactctaaattactcggattttgttgtcttcaaagatttgaaatgcatcctcatctcttaagtctctgtatttaagagataatagcttcaatgcatcctcatttcacggtgaggctacctatatttgtcttttttattttaaaga

SEQ ID NO: 113834 - DNA, 274 bp, Glycine max
  unsure (1)..(274): unsure at all n locations
  Clone ID: PAT_MRT3847_73801C.1
gttactttcatttgtngtgcaatcttacaagttccaaactnctctattttgttattattngtnctncacttntcacacatatagntnnaacgnntnngatattatcctggcgtcnaaggtggtntcggnatnggttatancgntgatgtagnntgccatgaactgnaacngcactagtgttggaccacatgcnttcaaccaggaggaaggtcagattttcaggagtctanagccagaccacanaaatgcgaagaangccangaantggtaaaga

SEQ ID NO: 113835 - DNA, 394 bp, Glycine max
  Clone ID: PAT_MRT3847_73802C.1
aaaccagagcccaaagaaggagcagaaccagaggatgaggcacttaggctcctgcccttgatttctctagaaatgattactcgaagcaagatgatcttttatgattggaagtgactgtactcaaccaccacttttatcttcggggtgggtgcgatcccaggattttggaacatgtcccaccccgagggttattctttgggcttgggactaaacttattcattgttaatgagactcacttagctttgaacataggttctgcgtggaggagttctactcatgatggatctgactggcacgctctttctgagttgatgctggatattggctttcgggccaccattagggctgcatgtgttgtggttcttccgtggccaatagatgaatcttttgggc

SEQ ID NO: 113836 - DNA, 280 bp, Glycine max
  Clone ID: PAT_MRT3847_73803C.1
atggcgtcccgtaaggaaggtaccggctctactgccacctcttccagctccaccgccggcgcagagggaaaggcaaaggcaaaggcggctcgggagattcagccgtgaagcaagtgcagatagatggccttgtggtattaaagataatcaaacattatcaagaagaaggacaaggaactgaagttgttcaaggagtgcttttgggtctggttgtagaagatcggcttgaaattaccaactgctttcctttccctcagcacacagaggatgatgctgactt

SEQ ID NO: 113837 - DNA, 166 bp, Glycine max
  Clone ID: PAT_MRT3847_73804C.1
cgaccccgcgacccctcctttggctgggccggagccggcgagagacatcacacggcggggctgcagctctgcccggaaggacgggctcgcccaccaacaccgccctccacgctgatctcaatgtcctccctcatctcccaagaccaagcccctcctggcgcgcgcc

SEQ ID NO: 113838 - DNA, 1040 bp, Glycine max
  Clone ID: PAT_MRT3847_73805C.1
cgcgtccgtccacgcgtccgcaaagattcttgttttgcaccgtttcacaaaatgccacaaagaaaaggttgcagttctctgaatgagcctcgtcttgttgccaggaaattcttggcacgacctcagattgagggtgttgggactgttgttagaagaagcataggagggtttgagctcaagtattttgatcccttcattgtcttggatgaattctcagttactgctcctgctggttttcctgatcatccccatagaggctttgagacggtcacatacatgttgcagggagctataatgcatgaagattttgaaggacataaggggacaatagaagctggtgacttgcaatggatgactgcagggagagggattgttcactcagaaatgcctgcggctcaaggcacccaaaagggtctacaattgtggatcaacttggcttccaaatataaaatgattgaaccaaggtatcaagaagtgttgagtaaggacataccagaagctgaggatgatggtatcaaggttagagttatagctggggaagcactagggataaagtctccaatctacacaaggataccaaccatgttcttggacttttctctcaaacctggaggtcacttgcaacaacctataccaaattcttggaatgcttttgtctatatattggaaggagagggtatatttggaaacatgatatctcagccttcaaactctcaccatattcttcttcttggtcctggggatggcctagaggcatggaacaaatcttctaagctccttaggttcattttggttggagcagaacccttgggggaacctctagtgcaatttggaccctttgtcatgaattcacaagaagagattgatcaaaccattgatgattttgagaactttgccaacggatttgaaaaggcaagacattggacatctgaaagccaaattaattaatcaagacttcatttttcccttgttgttcctccttttagagcgaatttggaaaaaagtaattgaagaactaattaataaatatgaaatgacgt

SEQ ID NO: 113839 - DNA, 246 bp, Glycine max
  unsure (1)..(246): unsure at all n locations
  Clone ID: PAT_MRT3847_73806C.1
gagcgaagccagaccaccaggcccccnngcgcccnaagaggaagaaggccagggaggaccaacacggacagaaacgaaggagccccgagaaagaagaggaccaacccaccncccgcaccaagaagcaccacacacacccgggggaagaaagaaccgagaggaagnccnanaagacgcgccagaaggaacacgacgagaacgcgaagaagggcancaaacggcncaaacagaggaanccaccaaaag

SEQ ID NO: 113840 - DNA, 139 bp, Glycine max
  unsure (1)..(139): unsure at all n locations
  Clone ID: PAT_MRT3847_73807C.1
cngncanatncgcccagaganacgcagcgctcaggncctcccggctnggcnngnctccangnantcncgagaannccaaaacnacnntnttngnnnctccnattccaatggncgttcctctacncattgcgaagggctt

SEQ ID NO: 113841 - DNA, 406 bp, Glycine max
  Clone ID: PAT_MRT3847_73808C.1
tattaatttttatttttgattcatgttaaagatgggtttggcccaacggcccaaatgttaaacagcaaaaccctaagcacaagtatctgtgtttttactagaatccgtagccgccgcttctgtttctttgttctctccttctcttacagagcacacgccgcttgcaaaaccggtacgcacaaattcaacgctgcggttttcttgttccttcttcttcctcgatttttgtttgcatctgaatatatacatttttttgtctgatttatgctttcgttttacgaatcatgacgcaattacaatctaataccgttgtgttcattcgcagattcttgacgctactcacgacttttgacagaagatggcttcaagattctggactcaggtgtttactaaattctcaatttat

SEQ ID NO: 113842 - DNA, 335 bp, Glycine max
  Clone ID: PAT_MRT3847_73809C.1
ggttgtagatagcgaaccccatactagaggtggcttccgtacaaacgttccagtcttctctgctttaacaatcaagggaataataattattagagatcttccgaaaccatggctcacgccaatactatgatttttgttgaaggaataataggtaaccttgtctccttctgtcgctttatagcaccaataccaacattctatcgagttcagcagaagaataccacggaaggtttccaatcacttacttacgtggatgcactcttcactataatgcgctggatatggaatgcttacatacaaactggcgaaatagttagtatgaccataacacattc

SEQ ID NO: 113843 - DNA, 325 bp, Glycine max
  Clone ID: PAT_MRT3847_7380C.1
tcggaatctgggtattgtgttatagatattatgagggctcaaggtgaacctttgtaatagacaggctcaatggccactggaatatcacgcaccaggctgaggtaagccctgcgggttaacttctgatgtatggtggtctataagaataaaatatggcctatttattgatgaatgacattgatatgaacgataacagcccacagacggcatgaaatatacacagctcacatggtagtgacgagcactagggtgttcgtaatgattacatatactaagatgcctcggtgagcatatacatgcgtgggatggttgactagatatgaaa

SEQ ID NO: 113844 - DNA, 431 bp, Glycine max
  Clone ID: PAT_MRT3847_73810C.1
atgctagctttaaggttgactcgcgggggagcatgctcaaaatgcctattaaattctccggaacgaatgtcttgaggactcatacccgtccaacataagatcatggtacacttatttgccatgaaagagaactcattggaatggaaaccttacacattatatcgttccggagaatttaccaatacccattgtgctcagccattattgaatttgccccctttatacataatgcggctaggctcctcttgggttgggctgaagacatcaacctaagggaacacaccttattttccatcttaaaagaggggccctcaccagctttgccaggagttgttctgagacaaattcatgcaagggtggccgttttttacatgtgttcttatggctgatcattgtattgcccctccctacattttgttacctccacctat

SEQ ID NO: 113845 - DNA, 1177 bp, Glycine max
  unsure (1)..(1177): unsure at all n locations
  Clone ID: PAT_MRT3847_73811C.1
actcattcacagttgacaacaaaagtctctctctctctctctctctctctcggtgtgtctctatctcattcccgttgtagcaacggcttggcgacacgatgcatagacaatccttgggttctccttctcccaaagtccccaagctcatcaccgacgaagacgacgatgctcccaaacctcaccgtctcagtctcagcctctcctcgccgccgcctacgccgccgcacaagttcgtccacctcattcctctcctcactctcctctgcttcttcgtcctctacctcttctcccactctccctctccaccgcatgnnnnnntctcaattcggctctatactggatgtaaatttatatgtacatagtaccattagtttctgttatggtctcgctgccatgattttctaaatctctcacatcatgcttttcgtttcagacttcaatcatttcaccggattcaaccgctcgccatcacactgtctaggaaccgcaaccgcaatgcatttcagaattattttcttttttaatttttttttgtataagcatgttttttgatctgtttttctatgttagatttggaggagaagattggcggcgacattggcgatttttaagaagcgatgtttggcaatccgaagtttgcaacagattctgaaacctcgctctcactggaaactcgtcaatttttaagttcacatgtgctcctcgctccatatttcgttaataaaagactcgttctttttgcactcgcaatttgcttatatttttcgaatcgagaacaaattacacacacacatgtataataaaaaataagctggagaattctcaattttcttggttttttttcttattttataggttatttttgcttttgatttgttgttattctttaacttctgtcatgagcagctttttgtgattttggctccaactttatagtatattttaaaggttggagttatgcgagtgaccaaaagatgtttcaattggcagagggggaagaacaagtctgactttttagctttttttttgggtgcgttagtgtatatggtttacatgttggcaatggagaaagacggagcctctagtcttttatctttgcatttactactgcaattctaaagttctatacaatataagtaagactttttgntgtatgattgacattatcatggcctta

SEQ ID NO: 113846 - DNA, 126 bp, Glycine max
  Clone ID: PAT_MRT3847_73812C.1
ccatacacaacacagatgatgcaaacaccacactgcgaagcgagatgcgagtccagaggctaaccctagacctaaaccccacggcgttggtcgcggcgaatcagtcggagatggcaacgtgcgctc

SEQ ID NO: 113847 - DNA, 414 bp, Glycine max
  Clone ID: PAT_MRT3847_73813C.1
atgggttgaatttaactgtcatgattgtgtggaatttaactgtcaataaaaggagtgtaaaaatttacttatgaatttatttagtaaaaaagttcataaagttgagatttatggttactcttatggctgcaaaaatttagaaaaaatgtgtgtgtttgttataggagatgttcatgaaatactggtcgagttggaaggaatgggtggtggcggaaaggttcagctggaggtatgtttcttttattagaaaagaagaaacccaagaatacagatttataaaatggggaaaagttattgaccatttgaattttagttgacagcatgatgcctatgcattatatttcgtgtataatatagtggaaaaattatttctctgttgtgctttgttacaacttcatttgccaatatatctgg

SEQ ID NO: 113848 - DNA, 572 bp, Glycine max
  Clone ID: PAT_MRT3847_73814C.1
tcttcatctagtgttaatggtgagggttctactcctaaggaccccttgtataagatattagatgagttgagatcccttcagttgtagaaagaaaaacaagagagaaaagaaaaaggtaaaaaaagagtggaagaaataagtcaagatgaaagagagaaaataagagaggaagaaagaagaaaaattgaagaacttagcgactattatagagggccccatagttcacatactaaacatcactcccaaagaagagaaaaggatagaaggcctcaagaggttaacattagcctcccatatttccatggaaaagataatgttgaggcctacttagattggtaaatgaaggttgaacgactctttgtttgccatcatattagcgaagagagaaaagttccattggctacccttggctttcaagggtatgccctctattggtggacttcccttgttagggaacgaaggattcatggggatcctccagtagagtattggaatgatcttaagagtgcccttaggaagaggcacattccctcttactatgaaacgtgatgaactactgccagtgtaactcg

SEQ ID NO: 113849 - DNA, 1361 bp, Glycine max
  Clone ID: PAT_MRT3847_73815C.1
gatgtacgagagcttgtgagacatacttcaaagttccacttctctccctcttttattccttgaatttcgtgctccccccttctctctttcttttcctccattaaagcatcctcttcaagcttcttatccaaggcaattcttggtggtgaagctccttcttccttggcttattccctagtggatggtgcctcccctctcctcttctcctttgccttccgctgcatctctatggtgaaaaatcaccattgaaggacctcattgaagctcaaagatccagcttccatagaagctccacaagcaagcttccatcaattaaggaccattttgtaattggcaatttacttaccttcattgctttcaagtttttgtaacaaaaaggcctttcattagaagtgtgttgggagcctccaataggttaccaaacttccatttgtatgtaataattttaggcaatttttccttaggatagtgagtgttttgttgggaaccttaaatgtggtcatccaaatactcttaggattcgcctagtttacatttcttgccctttaatttcttgcttactttcatagcttatttcctttaacttccattgtcaaactgcctagatagctttccttttaccaattagtttttaccttatctttcacacctcttttagtgtttattttggctagtttcaaccatagtttcttttactttttgttttcaaaccccaagaagaaagaaccataacttaggaaccaacataagtcttcattcttcatctagtgttaatcgtgagggttctactcctaaggaacccttgtataagatattagatgagttgagatcccttaagttgtggaaagaaaaacaagagagaaaagaaaaaggtaaaaaaagagtggaagaaataagtcaagatgaaagagacaaaataagagagaaagaaagaagaaaaataatgaaagaaatgaaaagaaaaaaacatgcctcctatagtagtcatgactcttgcaagagtttaagtgaagaacttagtgattattatagagggttccatagttcacatactaaacatcactcccaaagaagagaaaaggatagaaggcctcaagaggttaacattagcctcccatatttccatgaaaaagataatgttgaggcctacttagattgggaaatgaaggttgaacaactctttgcttgccatcatattagcgaagagagaaaagttccattggctacccttagctttcaagggtatgctctctattggtggacttcccttgttagggaacgaaggattcatggggatcctccagtagagtattggaatgatcttaagagtacccttcccttctgtcgtcttctcgcagccg

SEQ ID NO: 113850 - DNA, 273 bp, Glycine max
  Clone ID: PAT_MRT3847_73816C.1
caggcatgagccactgcgcccggcctactctacacttttttcaaccctaagaattaccactacagtacatgtagtggagtgggaagagtgcctggaatcagaagaccctgttgaggctgaatttagctgtatgacctcatgcaagccatttaaactctgtgcctcagcgtcctcatttttaaaaggaggcttgatctctatgtttacttccagctctgattctgggattctaatccacaggacttgggtgttagggtggaactagaactgtgc

SEQ ID NO: 113851 - DNA, 419 bp, Glycine max
  Clone ID: PAT_MRT3847_73817C.1
aacaggaggaatatattccatatcgcgttttcttatctaaacattaattttaacacggccaaaactgcggtaatcggggcgcgaaaaaaccacttcagaaatcatcctcactagattaatagaccacttttccaaaaggcacagatttaacattcacttacaagctcaaacaccatttaaatactaattcatgtctcaaacgacaaagacaccaaccctttactccacaccaacattctaggcaccaaacctattatacaactgcatctcattataaaaacatatacctaaaccactttaattccatccaacttctatcctcttccacataacctcttactcaaatatttccatattatatgctcactcattctaataagaacactatcttctccttacacaagtcatgtctttcctat

SEQ ID NO: 113852 - DNA, 369 bp, Glycine max
  Clone ID: PAT_MRT3847_73818C.1
aattggatgatgaaaagaaaaatcctcttgaagtatggattggaagaatataattggggtggaagtggggaaaagtaaagaaagcgtgaagatcacctcaccatggtaggaggaaaggttgccaaaaccggaaaccaagcccttgggaaaagaaagcagagaaagcttaaagagaaagagatagagtatgaacaaaaagtcaaagctttgaggaaaagagaagttattaatccgagaaaaagttgggactgaaaaggaaataaaggagagaagaatgtacacatagtgagtgaaaatagactacatgaaaaagcgtgagataagaaagatgatcgactaaggactgagagagagtctgaatattgcctg

SEQ ID NO: 113853 - DNA, 1113 bp, Glycine max
  Clone ID: PAT_MRT3847_73819C.1
ggtatctctaaactaaccctctcgatcctccatttgtcttgcaaactttctgtcgcacaaataactctaaactaagcacttccatacacaaattttctctcccagaagaaatattttcatttcatttcgagtaaaagtaaaacacagttcctgatccatggcatctcgccgccgcatgttgttgaaggtcataatcctcggagacagcggggttggtaaaacatcactgatgaatcagtatgtgaatcgtaaatttagtaatcagtataaggcaaccatcggcgcagattttcttaccaaggaagttcaatttgaagataggttgttcacattgcagatttgggatactgctggtcaagagcggtttcagagtcttggcgtggctttctaccgtggtgcagattgctgtgtccttgtttatgatgtaaacgtcatgaaatcctttgacaaccttaaccactggcgagaagaatttcttattcaggctagtccatctgatcctgaaaactttccatttgttgtgttgggaaacaaaatagatgttgatggtggaaatagcagagttatttctgagaagaaagcaaaggcatggtgtgcttcaaagggaaacataccatactttgagacctcagcaaaagaaggatttaatgttgaagctgctttccagtgcatagcaaaaaatgcactcaagaatgaacctgaagaagaaatgtacctgcccgacacaattgatgttggtggtggtggacgacagcagagatctactggctgtgaatgttaaagtgcagagaattctatggactagctttagttgcttgttttttgccaaaatacaagcgatcctcatggattattagcctgcaagtactttattacctatgcaaaaccaaggacaaaattccaaattttattttgtatctatctagtggattagatgtccaacatgtttatttttcttctatttattcttctttatctttaatgtttgtgacaaatgttcctccatgtcaggaaatgtatgttgaaaattgttttgttcgattgagttatgacattgatgttcctagtttaactatggttttaaattagggtataaattaccccttctggttc

SEQ ID NO: 113854 - DNA, 1868 bp, Glycine max
  Clone ID: PAT_MRT3847_7381C.1
ttactttgttgtttctgatatattgtcttgaatcccacatccatatttcccacgaaaagcgcgaggcaaccgctagaacttccttaatcaagcaccacactctcagtccttctctggaccaagagctgggagaaaactatggattgtcatagtccaggacaaggtttgatgcctgctagttttaaggttaggacagttcctttggatggtgatgattctgcaacagaagaggttttggatcctgactttggagaggcagccattgggcgtgttgctccagttgattcaggattgtggtggattattttattacgagcatatggaaaatgctctggtgatctatcagttcaggagagagttgatgtgcaaacaggaattaagatgatattgaggttgtgtcttgctgatggctttgacatgttcccaaccttattagtaactgatggttcttgcatgatagatcggaggatgggaattcatgggcatcctttggagattcaggcactgttttattctgccttactttgtgcacgtgagatgcttactccagaggatggatcagctgatcttatacgggcactgaacaatcgtctggtagctctttcatttcatattagagaatactattggattgatttgaaaaaattaaatgagatttaccgttacaagacagaggagtactcatatgatgcagttaataagttcaacatatacccagaccagatttctccttggttagtggaatggatgccaaacaaaggaggctatttaattggcaacctacaaccagctcacatggatttccgatttttttcactgggaaacttgtggtctgtcgtaaacagtttggccactgaggaacaatcacatgccattttggatcttattgaggccaaatggtcagatttggtggcagagatgccattcaagatttgttatcctgctcttgatggtcaggagtggcagataatcacaggcagtgatcctaagaacacgccttggtcctaccataatgcaggctcctggccaacactgctctggcagctcaccgttgcatgcataaagatgaagagaacacatattgctgcaaaagctgttgagattgccgagagacgcatattaagagacaggtggccagaatattatgacacaaagagatctcgattcgtcggaaagcaatctcgactatatcagacttggtcaatcgcaggataccttgtggcgaagctgctgcttgcagacccaagtaaagcaaacacattgatcactgaagaggattctgagcttgtgaatgccttgataagtgccaaccctagaggaaagcgagggcgcaaaaatttgaggcagacttacattgtatgagtcttcatttgcaattcatttggttccttttggtcaaattcatttttcttcttattattagcagcatgttattctagctagatacgacagggatatgcaaaaatatatagtagtttgggttgattgtgatgaaacaaatactagtatatatataaatgtaattgtgaaaagtgatgacaatacttttggtacaagattgtaagtagcatacaaaaaattcatttcccaaatctctctatcactctataccccaacttctttttttttttggatatccccggcaaaacccaacccctggggggacccctggggggacccctgggggggccccgggtttaaaccccaaattttcgacccggtcctttgagagaaacaatttttctttatgggggcctaattaaaatttgggggcaaaatggtaaaaactgtttcctgggaaaaaattgtttttccccaaaatatcccccaaaaaaaaaaccccaattttaaaaggtgaaacctggggg

SEQ ID NO: 113855 - DNA, 325 bp, Glycine max
  Clone ID: PAT_MRT3847_73820C.1
cccacgcgtccgattatttccactcactgaatattcggtcgaagatgtccgccgccgaagaagctaacgttcccgccgtcgaaaagccggtggaggaggtgaaggcgccgaagcttgccaaggagaagaaacctaaggctccgaaggaaaagaagccgaaacaggccaaaactgcttctcatcctccatatctccagatgatcaaaaaaaaaaaaaaaaaaaaaaaaaaaaaaaaaaaaaaaaaaagaggaaaaaaaaaaaaaaaaaaagggggaaacaaaaaaaaaaaaagaaaaaaaggaaaaaaaaaataaaaaaacaaggg

SEQ ID NO: 113856 - DNA, 1218 bp, Glycine max
  Clone ID: PAT_MRT3847_73821C.1
gattccattacatatcatcctttaaaataatttcattggcttttatgataattttttgaagtctttcacaaatatttttaattacaccgaagaaaatagagaaatctgacatgtatctttaatctctagcattattaaattattacgacgatccaataaggtaaactcaagtggcggtgtgttgtggctgttggttggtttgttgagtatcagaatcggagcgaaaatggggcggggttggtggtggaaagtggcggtgttggcggtggtagtggcggtggtgtggagagggtggcaggtgggtggattggagaaggagtcagcgttcaattttgtcagagaatggtcggagaagttagggatttgggcgatccctctctacgtgtcgctccacaccgtctccatcgctctctgtttgccctctgcgatcttcttcgaaaccgccgctcctctcctcttcggtttcttaccttccgtcttctgcgtcttctccgccaaaatcctcgcagcgtcactctccttctccatcggcaggctggtattcaggagttcaagctcagcaatggagtgggcccaaagaaacagatactttcatttaatctctagaggagttgagcgagatggttggaaatttgttcttcttgcccgcttctcacctgtgccctcttatgttattaactataccttagcggctactgatgttaggttccttttggattttttttcttcctactgctattggatgtctccccatgatcttgcaaaatacatctattggaagccttgctggtgctgctgttgcttcagcctctggctctaagaaatctcaaatttggtcctacttttttcctgtagttggtattttgtctagtgtagttatttctttgagaattaaaaagtattcaacccaagtttcagtatctgaaatcccccccaagcaaaactaacactgatgattcgtgacacagcttatctggtagtgaagagacggggtaccttcgaaaaggtcaagagtaattttttgttgagttagtatgattaacattatacccatgttcctataaatgtttgttgttacttgatcatcgtttagtctggtagttgtacttcagttgagttatttaaactttggttggaatttttttgttcaattatatttgaaacctttctctagataaaaaaaaaaaaaaaaaaaaaaaaagcggccgctctagagga

SEQ ID NO: 113857 - DNA, 524 bp, Glycine max
  unsure (1)..(524): unsure at all n locations
  Clone ID: PAT_MRT3847_73822C.1
ggctcgagaaagagtacacatacttttgcatttagatgagcaaattgggaagtgaactttgtgacatattgatcagaaggaaaaatcttaaaataacgcaccacaacactagaaaaaatttcttgaattcgacctactggtcatgagttgtacacatacaaaggcatttagatatgcaaattgggaagtgtaatttgtaatcaaagcctatttcagactttgacctactggtcttgagttttattcttgcagctctcattcttctaatgaaagagaataattttagtatattatggagtaggctttgtgtgttgtatattttagactttgacctactggtcaggagttatattcttgttttgtcatagtttgtttgaaaattgatggttcattcatttgtaaactnttttccacttacatttcccatcttgattgggtattgtggttttgtcaatagcaaaattcagctattactgtgtaggttgaagagaaagaagaacaacctgaaattacagacagagtat

SEQ ID NO: 113858 - DNA, 182 bp, Glycine max
  Clone ID: PAT_MRT3847_73823C.1
tttttgagcaccaagaaacattcattttacaattattttatctaaaccaaaggcaatttttttggggataccctacggattgaaaggaaaaaaagatgggacagatcagatggttaacaaaagttcataggtgaaacaacaaattgttggccatgaaactctatttttaagcagaacatata

SEQ ID NO: 113859 - DNA, 364 bp, Glycine max
  Clone ID: PAT_MRT3847_73824C.1
gacttcaattggaatcagattatttcaatctcctagcgcagttccctagttctcccttcaatatgcagatcctcgtcaagaccctcatcggtaagaccatcacccttgaggtggaaagctctgacaccatcgacaacgtcaaggccaatcatccaggacaaggaaggaattcccccggatcagcaacgtcccatcttcgccgagagagcacctcgaggacggtcgtacccatctccgactacaagatccacaatgagtcaatccttcaccgtgtcctacgtcaccttggtggcaggcagatcttcgtcaagactctcactggcagtaccattaccctatacgtctagagctctgacaccattga

SEQ ID NO: 113860 - DNA, 354 bp, Glycine max
  Clone ID: PAT_MRT3847_73825C.1
ggctcgagcgcagagggtgctgcttcaacgactgatattatagatggcaccattgactgctctaagtagcttagcctgtagaaactctcatgctcatcatggaccaacaactgctacatatgagtctaacgcactacctacgggacttatgcctctgaagcagacttgtgctcaccgtggacttataatttgccacccgccggatgatctactaaacagacccccagtttggaccaatgcgttgcgcgctataaagaatggacctctgggctataatgcctgacctaaaagactaatcacgtggactctgactttcatgattataagcacggacgtggctccatggtgcaaaac

SEQ ID NO: 113861 - DNA, 760 bp, Glycine max
  Clone ID: PAT_MRT3847_73826C.1
ggaaaaaaaaaaaagaattttattaagggcggccgctcgggatggggtttggttctcagtgtacccaaaaacagaggcagaaggaggaagaagtagaagaagattagagagagtgagtgagtgagcgagggataattggcgagttagggtttcgaattgactcactgagtctttgcattgtgtcgccggttttttttttcgccggagaaaactcgtgctccgatctcctctgcttttgttttcgatagcatagctgtttgaaaggttcggttttcccggcgaggatagtgggattttccggggattccttggtgaattgagtttgggggaattcttgattttgacctaaagcaaaggtctttactcaaaagttttactggattttgtgtttttatttttattttctatttttttttttttttgcgttgagtagaccgagcatgagtgagtgtcattgtgtttgagatttggggttgatattttttggtaaataaaaaacaagataaaatttattcttttaagattctgataactatcttatcctttttttttaatatactcttgtgcttttctgggagtgtaaatgtcagaaattttttgctaacatttaattttgggaaatgggtcagtgaatctaggctaagttcttcaacttgctgaattgggtttgatatttgaaaaaaaacaaaaccttttgtaaattcactgaatctgtttcatccgtgtttgtgcttttttatctttcaaaaaaattgcgttt

SEQ ID NO: 113862 - DNA, 166 bp, Glycine max
  Clone ID: PAT_MRT3847_73827C.1
ggctaaagcaactgccttaaaatgcatactccggataagttactggcggatctgggtaactaataaacttcttataacaactagctacacttatttactcaactgttaaattattgaatgttcttgatactgagctcgaatttagaatgtataactcaccataata

SEQ ID NO: 113863 - DNA, 874 bp, Glycine max
  unsure (1)..(874): unsure at all n locations
  Clone ID: PAT_MRT3847_73828C.1
catgatgagtttgagatgaaatcaaagacagatttgaaggttctaataaagnaggtaaaatcccttagaaattctgagttaacggctgcgagaagacgacagaaggggatgaaggagaagttagatttggagagaatcctccagaaggaaaagcaaagaatggaaaattcacataatgcaaatacaaagttgctgcatgagtgtgcaatccttcagaagaggcttcgggagtgtagtgtaaatttccttgttgaagaggaagataaactaaatatcgacactttgccatctgatgctctggatttattagcaacatcagataatcggattggtctcttgcttgcagaggcacagctcttggcacaagatgtagaagatactgttgttgctgttgaagagacccgggatataaccacagacaatactgggaaaactcatgatgaattgagaaagatgctggcacatatgtttgttgacaatgccagtttaaggaaacaaatcaattctgttattcgttgtgctctaaatgcaaatatcaattccgaagaggacggtgaagaaatccatttgcaaaaaactgtcctaagcaagttcttagaaagatagcttgttcaatactacaccgtgtatctattattgagttacttctctgttaattatggtctataaatttttgcacttgtatggtttcactgccattcgttccgagccgatcttaaaaaaacaaaaatgcgtttattgttccgccaaaattgatatgaatagttcgagtcattgcggctactgtaccaatcaattgtaatcgaaaaatctaatacctgagtttgacacttccatcaatcaatatagcttttgtttttaaaataaaaaaagt

SEQ ID NO: 113864 - DNA, 198 bp, Glycine max
  Clone ID: PAT_MRT3847_73829C.1
acggagggaacgtgttagtgcattcaacgcgactcagtggaaactcgaatagcgtaaactggctaaactcgaatcgaatctaaccatgatcgtcaactccaccaaacacttcttataaagcaaagaccatatttcttatcagcgactctgtacaacccccatagatgtgaacgaaaggtattgtaggctgagctacaa

SEQ ID NO: 113865 - DNA, 296 bp, Glycine max
  unsure (1)..(296): unsure at all n locations
  Clone ID: PAT_MRT3847_7382C.1
gtagaangaaagagtaagtaagataggaattaagganaggngaantgnaggagtaanagntttnnatatagtgagtagtattagagattggngtaatnatggtnatagntgtttaatgtgtgaaattgttatnagatnanaattgganagaagataagannttnnnnnannngnngnnnnnttntngngannnngnnnnnnnngaaagggtnatnnnnttgangtntnnntnnngngntgnnnatanggnnnnnntnnnggnnannnaaggnnnnnnnnntnngagtnnnngatna

SEQ ID NO: 113866 - DNA, 524 bp, Glycine max
  unsure (1)..(524): unsure at all n locations
  Clone ID: PAT_MRT3847_73830C.1
ggctcgaggcttgatatgatgagggaaagattttcaaagcttctattgggggaagacatgtctggtggtgggaaaggtgtctgcactgcagttacaatatcaaattcaattaccaatctctacgcaactgcttttggacaaaatttaaagttggagcctctgaagcctgagaagaagggtatgtggagaagagaaatgaattgtcttctatctgtgtgtgattacatagtagaattttccccaactgcacaatatttagaagatggcacaattgtggagtggtgtctcttagatgatgacaagcaaaccaagatcagatatttacatcaacctcccagctttgcagaagcttgacacaatgctcatagaaatattggatagtttccaggatactgaattttggtatgcggagcaagggagcatatcagggaattcaactcggtcacggngaggctcatttcgaaggattgttcagaggaaagatgagaagtggtggctgccggttccttgtgttcacactgggg

SEQ ID NO: 113867 - DNA, 658 bp, Glycine max
  Clone ID: PAT_MRT3847_73831C.1
gagctcgcgggaatcgcggtgggagccactgtcatgctcaacatactcatagccggggcgagaagtggaaggtcggggaacccggttagaacattgggtccagcaatagctgcaaacaactacaagggcatatgggtctatctcatagctcccatacttggaactctatgtggggcaggtgcctacactgtggtcaagctgcctgaagaagaggcaacaaagacaccttcttctgctcctaatgggagcttcagaaggtgatgatatatatatgattaatcattttcatgcatccccagcaattcttcatcacatgatgcaccttagaaaaacatacctcgatcagaatcagccatatgggatatgagatatttgtgcatgcatgatgatatagatattgccggaagaagcaagcaaaattgagcactgtttggtgcatgcacgtacgtatactagctatattagatatcgatctgtgtacttcagatgcatcgatgtgtactgtaaaatatcccaggacgacaaaatgatcagtgatttttgtacatgcacgtaccatgcatgcatctgctgtagccgttgttgttttattaataaatataatatcagtagaaagaaatcgagctgcatgggatctttacctcccatcttgtcattt

SEQ ID NO: 113868 - DNA, 7884 bp, Glycine max
  Clone ID: PAT_MRT3847_73832C.1
atggcgacggcttcacaagctcgagctgttaagtctctcaacaagtcccctggaggacgccgttttgtctcattctcggatagagtagatgagattgatatcaatgtatatcgaagtcttgataaggtcaaagccgagccatccgagggttcttcttttttcagagactgccttatagaatggagggagttgaacactgctgaggatttcatttcattatatgaagaaattatgccttatacacaaacattgcccctggtgctgttgcacaaggaatctttaatatcaaagcttctttctaggttgcacataaaagcaaggctatcccttgaaccaattctcagtctattgccaagaattgttgattctttagtctctcttcttgagagtggtggtgatagggagccagatatcattgagcagatattcatgtcatggtcatacattatgatgtatctgcaaaaatatcttgtacgcaatccatcagaggtgctcaaggtcacgtcaaaattgaggtattatccaaaagaatatgtccaacaattcatggcagaagcaatgtcatttgttttgaggaatgccccagatgagcagctcaaaagaggaatccgaagagtaattgatgatgcagtgaagaagccatctctgtgtagagagtcaggtgttgaagcattggtttttaatattatgaaaggtcactcatccaggttccattcaaaagcagagcgagtgttacagttgttgactagtgaagcaatttatcctattggtgataaagctgaccaagattcaatgatcattctgaaaattgttaaatctgtcttcaagaaactatgcgagaagatggagtctaaggagttggatttggtatggaattgcatatataaggaagtaaatgaatgtcttaatactggaaatagcaggcacctacgacatattttatcagtgcttgtctcggctataaaggtgcaaaatgggcaaaaggtgtctgattataagcctatgctggaactagttctgctgctagtgcagacatttatcaaaccttgtggagttattgattcacaggaagatatatatttagttgttgataagattttgaaattaatgttggccattctcaaagggctctgtaattgcaatacctcaatgatatcagagtgtgctttcaagtgggctccgatttttgaatcacctccaatttttaaatcagcaagctctagtttgctgcgtttcattagagaactgctacaggagaatctttgtttacttcatttcagaagaaatgttataagtgcaatgaatgatttgatggagatttcagaggaagaggtcatacatttgttacgatctttctgtgagaaaatgcaattggataaacagaactcagattttgtagatggaacaagagtgttggcactgctgtggggagctgttagttgctatgctcatatgtgtattgttggtgccaatccgtccttgatggtggagcttgtggatgctgtagataattttctgactgtgaaatctgactgtattggagatatgtctaaaaaggcctgggaaagcattataggggctgcattaagttctttcaacagattgtacagcaacagtaaccatggagctgatgaaactggaaagtttttaagtcttgcaaaacgatataaatcatctccacaagtgttgtttgctgttgctggttatttggaattcaagcatggttctttgttggaagacgctgtgtatagaatttatcatccagagcttgaagaaaagactgcagatgcagtggcaacattttctgataatttacatcattcagacaaggagattcgcatttcaactcttaaaatactttgtcactataaacctttgggttgggaaaattcttcagtggatcagccagttgctaagaaaaggaaaactgaagtttctccaactctaaatgtcgaatgcacagaaaataatgctctgctgttgctcctttctattgaaacaactcctatttcaatttcttcaagcagaagcattcagctattcatttccaaaatacagatggaactatctgctggaaggattcctaatgtttatgtgcctcttgttttgaacggattgtttggcatcttgaataatcgatttagctacttatggaatcccgtattagaatgtattgctgtcttgattagcctacattttttacgtgtatgggatagccttgttgcttatctagaaaggtgccaaacaatttttgataccccttctaacttgcacgggagtgtcaatggtgcattgtttgatcagccagctggtttagttgattgtttcaaattgtttgtctatcatgcatctgatagcacaccatctgtaacaatattagcattattgctgcaagctttgcaaaaaattccaactgttattgaacctcgctctcggcaattcattcctttatttttgaagtttttgggatatcctgatcttgtaagtgtgggattgtttgattctcatgcttgtaaagggaaagagtggaaggccatcttaaaagaatggttaaatttgttgaagctgatgaaaaatcccaagtcattttactgtggccagtttcttaaggatgttctgcagcataggcttttagaagaaaatgatactgaaatacagatgagagttttggattgcctggaggaactgacaacatggagtttatcgagagaatctgaaataattgaagaatgccaccgggcttatcttgtgccattagttatccgtcttttgatgccgagagtaagaaagttgaaaggacttgcatctcgaaagaaagcaagcatttgtcatcggaaatctattcttagtttcatagctggacttgatgttgttgagctgcctcttttctttgcactactgataaagcccttgcaaatagtgaagaaaactgatgggcctgctaacttgttttggacttcagataaagtttctattgatgaatttcaagctgatgctttgttggaatattttactttggacaatatagcaaacctatcctggaaaaagaaatatggttttttgcatgtcattgaagacattattggggtttttgatgaattgcatatcaggccttttcttgatctactggtggggtgtgttgttcggttattggagagctgcacttcaagtctccatgcaaatttgaatgggcttccttcagatcagcacaattgtagcactagctcaaattctcttggggaggacagtgtgccaacaaaccaaacccagattaatggtactttgaaccagctgaaggatatgagatctctgtgcctgaaaattatttcccttgtactcaataagtacgaagatcatgaatttagttctgatttgtgggacagattcttttctgcagtaaaaccgctggttgataaatttaaacaagaggctgctagtagcgagaaaccaagttcactgttatcttgctttttggccatgagtgcaaacaataaacttgtagcactattatacaggaaagaaagtcttgtacctgatatattttccattatctctgtcaattcagcttctgaagctgttatatattgtgttctaaagtttgttgaaaacttattaagccttgacaatgagtttaatgatgaagacaattctgctcaaagagttttactttcaaatattaaagtactgatggacagcatgtgctgtttatttggaagtgataatgcaatcaagagaaagctgatcaaatctcctggtgagacagtaataagaattttagaatttttgcccaagtacatcagcgaggcagagttggcaaagcagtttgtggacatattgcttctgttcttggaaaataaaactcaaaattctgatgttagggttgaagctttgcaagtcattcaaaatattataccgatactaggacatggaagtaccgctaaaattctaagtgctgtttctcccttatatatttcggctgagttggatatgcgtttgagaatatgtgatcttcttgatgctcttgtagcttctgatgcatctttactctcagtggcaaaacttcttcgacagctgaatgcaacatctactttgggttggcttgatcatgatgccattttaaatgcttacggaatcattaatactgatttcttcagaagcgttcaagtggagcatgcattacttattttatcacattgtgtgcatgacatgtcatcagaagaaacaacttttatgtttagtgcatatagttcattgctgtcttttgttgatttttctgctcatatcctttgccaagaaggaaacagtgaagaacagttgtcagtgatgagaaacactgatagttgttggacaaaatcttgcatccagcgtacagcaaagaaatttctcttgaagcatatggcagatgcgatggacggatcactttcagttataaagggatggataaaattgttacatcaaatggtgttgaagcttccggaagtgtcaaacctcaaatcacttatggtcttgtgcaatgaggatggtgaagtgaatttttttgacaatataactgactcggtgatacgtaagagagtcaaggcattgtcttggtttcggaatgttatcagtgtgaacaagttttcagagttcatcactgagaaagtgttcatgcgactcttcttcaacatgttgtatgatgagaaagaaggaaaggcagaacatatgaaaaatgcatgcatagaaaccattgcttctgtatctggtcagatgggatggaagtcatactatgcattattgatcagatgtttttggggtgcatcccgtagtccagacaaacagaaactcttcatacgcctgatttgcagtattttggataaatttcacttttcagaagttcctcacaataaagaacctaaggaatctttgggtggagtttctgacatggatataactgatactgatgtgaacaaagagatacagacatgcctgtataaagttgtgcttccaaagatacagaagttactgaattctgattctgaaaaagtcaatgtaaatatcagtcttgctgcactgaagttacttaaattacttccaggagatgtgatggacttgtatcttccaacaattgttcatcgaatttcaaacttcttgaagagccatctagaaagcattcgtgatgaagccaggtcggcattggctacttgtttgaaagaacttggattggaatacttgcaatttattctcaaggttttgcaatctaccttgagacgaggatatgaacttcatgtcttaggatacacgcttaattttattttgtccaagtgtctttcaagtccagttgctggaaagatagattactgtttggaggatctgctttctgtgatagagaatgacattcttggagatgttgctgagcaaaaggaggtggaaaagatagcttcaaaaatgaaagaaacaaggaggaaaaaatcatttgaaagcttgaaattggtggcccaaaatgtaacattcaaaagctatgcactgaagctccttgcaccagtgactgctcatttgaagaagcacatcacaccaaatgtaaaaggaaaattggaaaatatgttgcaacatatagctactggtattgaaagcaacccctctgtagatcagactgatctatttatatttgtttatggcattattgaagatggattaaatgacgaaattggttggcacgagaataaattgttgaaattggaaggcaaagatagccgtattaatgccaaaagaatttctacaggccatgtagttgctaatggcttattgtgttcacaccttattacagtgtttggtctcagaatatttcataagcgaatgaagagtatgaaacaggatgtaaaagatgaaaatactttatccttattagacccttttgtcaagctattatgtgatggcttatgctctaagtatgaggatatcttatctacttcccttgggtgccttgctatactggtaaagttgcctttaccatcccttcaacaacatgctgagagagtaaaggctgctctgttggatattgctcatggttcggtgaactctatcagtcctttaatgcagtcttgcttgactttgctgactgtgcttttgaggaacactaaaatttctctcacctcagatcaaataagtttattaattcatcttcctatatttcttgatcttgaaaaaaatccatcgttggtggccctgtcacttctaaagggaattgtcagtcgcaagatggtggtacctgagatatatgatcttgttactacggttgctgaactgatggtgacaagtcaaatggaacccgttcgcaaaaaatgcagtaaaattctgttgcagtttctgcttgattatcgactttcagagaaacgcttgcaacaacatcttgatttcctgctctcaaatttgaggcaaattgattttagccgtgtggatgttttaatcctttacaggtatgaacattcaactggacgggaatctgttcttgaaatgattcatgctattattgtcaaatttccaagaagtgttttggatgaacaatcacatatattgtttgtccatttggtagcgtgcttagccaatgacaatgataatattgttcgttctatgagtggggctgctataaagaagctcattagttctgttagtcctaattcacttaaatctattcttgagtatgctctttcttggtatttgggtggcaagcagcaactatggggtgcagctgctcaggttctggggctgctgattgaagtaaaaaagaaaggatttcaggaacatataaattgtattttgcctgtgactaaacacatcttgcattctgccgtagatgcagttactaacaggcaagagggcttttctgctgaatctgccattccgctttggaaggaggcatactattctcttgttatgttagagaagatgattaatcagttccgtgatttatgctttgcaaagtatcttgaggatatatgggaagcaatatctgagatgctgttgcacccgcattcatggatacgcaacagatcagttcgccttgtagccctatactttgcacgtgcaacagatgttagcagagaaactaatggaagctccttaagaagttattttattatgagtccaagtagactatttttaatagccacttctctttgctgccaactaaaaatgccattcataaatgatgctgacagcagcctgatgacccagaatattgtctttgctatctgtggtgtgcattctttgatggggcaaaatgcatgtatagatccccctgcattctggtctactcttgagcaacaagaaaaggatcggtttcttaaagcttttgacttgcttgattcaagaaaaggaagaagcatgttcatgtcctcatctttctcttctatatatgaagataacaatcagctgaatgttgacaatgctcaacgtgcactagtctcattattgctccggaaaatggggaagattgccctccaaatggatgttattcagatgggaatagtcttcaacagttttgggaatattatggcgcagattagtcaggatgactgccaacactatgcacacgtgatcttgttgcctctatataaagtttgtgaaggatttgcgggaaaagttgttactgataatgtcaagaagttggcagaagacacctgtaaaaaactagagaatattttgggtactcagaactttgtgcaagtttacaaccttatcaggaagaaccttaaattgaaaagaaataagaggagacaagaagaaaagctcatggccgttatcaatccgatgcgaaatgccaaacggaagttaagaattactgccaagaatcgtgctaacaaaaagagaaagattacgacaataaaaatggggaggtggatgcgttga

SEQ ID NO: 113869 - DNA, 9212 bp, Glycine max
  Clone ID: PAT_MRT3847_73833C.1
atggcgacggcttcacaagctcgagctgttaagtctctcaacaagtcccctggaggacgccgttttgtctttaagtcattctcggatagagtagatgagattgatatcaatgtatatcgaagtcttgataaggtcaaagccgagccatccgagggttcttcttttttcagagactgccttatagaatggagggagttgaacactgctgaggatttcatttcattatatgaagaaattatgccttatacacaaacattgcccctggtgctgttgcacaaggaatctttaatatcaaagcttctttctaggttgcacataaaagcaaggctatcccttgaaccaattctcagtgttattatatttgtactgaatgttaacaaccagctgttgccaataaatctcaaggctttgttttacaggttaattgcagctttatctagggatctcctagaggaatttgttcctctattgccaagaattgttgattctttagtctctcttcttgagagtggtggtgatagggagccagatatcattgagcagatattcatgtcatggtcatacattatgatgtatctgcaaaaatatcttgtacgcaatccatcagaggtgctcaactttaacagactcaattattcttcatgcccattggctggaacatctaagaatgagaaaagggacgttccaccaagggttgttaaacactttacatggaacttgcaaaaaattatcccaaccaagttagctaggcttgaaggacaactgattgattacattgtttattttattctacaaccaggcactgaattaaaatctgatttttctaattttggagttgtttttcttgatattgattcctcaagggtcacgtcaaaattgaggtattatccaaaagaatatgtccaacaattcatggcagaagcaatgtcatttgttttgaggaatgccccagatgagcagctcaaaagaggaatccgaagagtaattgatgatgcagtgaagaagccatctctgtgtagagagtcaggtgttgaagcattggtttttaatattatgaaaggtcactcatccaggttccattcaaaagcagagcgagtgttacagttgttgactagtgaagcaatttatcctattggtgataaagctgaccaagattcaatgatcattctgaaaattgttaaatctgtcttcaagaaactatgcgagaagatggagtctaaggagttggatttggtatggaattgcatatataaggaagtaaatgaatgtcttaatactggaaatagcaggcacctacgacatattttatcagtgcttgtctcggctataaaggtgcaaaatgggcaaaaggtgtctgattataagcctatgctggaactagttctgctgctagtgcagacatttatcaaaccttgtggagttattgattcacaggaagatatatatttagttgttgataagattttgaaattaatgttggccattctcaaagggctctgtaattgcaatacctcaatgatatcagagtgtgctttcaagtgggctccgatttttgaatcacctccaatttttaaatcagcaagctctagtttgctgcgtttcattagagaactgctacaggagaatctttgtttacttcatttcagaagaaatgttataagtgcaatgaatgatttgatggagatttcagaggaagaggtcatacatttgttacgatctttctgtgagaaaatgcaattggataaacagaactcagattttgtagatggaacaagtgaagaagcaccactgactagaatttgcagtcgtttacaagagataatatgttgttggaagggaaaaataaatgatattgcacatgctgatgtattatgtcaaattgatgaaggagtgttggcactgctgtggggagctgttagttgctatgctcatatgtgtattgttggtgccaatccgtccttgatggtggagcttgtggatgctgtagataattttctgactgtgaaatctgactgtattggagatatgtctaaaaaggcctgggaaagcattataggggctgcattaagttctttcaacagattgtacagcaacagtaaccatggagctgatgaaactggaaagtttttaagtcttgcaaaacgatataaatcatctccacaagtgttgtttgctgttgctggttatttggaattcaagcatggttctttgttggaagacgctgtgtatagaatttatcatccagagcttgaagaaaagactgcagatgcagtggcaacattttctgataatttacatcattcagacaaggagattcgcatttcaactcttaaaatactttgtcactataaacctttgggttgggaaaattcttcagtggatcagccagttgctaagaaaaggaaaactgaagtttctccaactctaaatgtcgaatgcacagaaaataatgctctgctgttgctcctttctattgaaacaactcctatttcaatttcttcaagcagaagcattcagctattcatttccaaaatacagatggaactatctgctggaaggattcctaatgtttatgtgcctcttgttttgaacggattgtttggcatcttgaataatcgatttagctacttatggaatcccgtattagaatgtattgctgtcttgattagcctacattttttacgtgtatgggatagccttgttgcttatctagaaaggtgccaaacaatttttgataccccttctaacttgcacgggagtgtcaatggtgcattgtttgatcagccagctggtttagttgattgtttcaaattgtttgtctatcatgcatctgatagcacaccatctgtaacaatattagcattattgctgcaagctttgcaaaaaattccaactgttattgaacctcgctctcggcaattcattcctttatttttgaagtttttgggatatcctgatcttgtaagtgtgggattgtttgattctcatgcttgtaaagggaaagagtggaaggccatcttaaaagaatggttaaatttgttgaagctgatgaaaaatcccaagtcattttactgtggccagtttcttaaggatgttctgcagcataggcttttagaagaaaatgatactgaaatacagatgagagttttggattgcctgttaatctggaaggatgattatattttaccatatgttgaacatttaagaaacttgattagttcaaaaaatttaagggaggaactgacaacatggagtttatcgagagaatctgaaataattgaagaatgccaccgggcttatcttgtgccattagttatccgtcttttgatgccgagagtaagaaagttgaaaggacttgcatctcgaaagaaagcaagcatttgtcatcggaaatctattcttagtttcatagctggacttgatgttgttgagctgcctcttttctttgcactactgataaagcccttgcaaatagtgaagaaaactgatgggcctgctaacttgttttggacttcagataaagtttctattgatgaatttcaagctgatgctttgttggaatattttactttggacaatatagcaaacctatcctggaaaaagaaatatggttttttgcatgtcattgaagacattattggggtttttgatgaattgcatatcaggccttttcttgatctactggtggggtgtgttgttcggttattggagagctgcacttcaagtctccatgcaaatttgaatgggcttccttcagatcagcacaattgtagcactagctcaaattctcttggggaggacagtgtgccaacaaaccaaacccagattaatggtactttgaaccagctgaaggatatgagatctctgtgcctgaaaattatttcccttgtactcaataagtacgaagatcatgaatttagttctgatttgtgggacagattcttttctgcagtaaaaccgctggttgataaatttaaacaagaggctgctagtagcgagaaaccaagttcactgttatcttgctttttggccatgagtgcaaacaataaacttgtagcactattatacaggaaagaaagtcttgtacctgatatattttccattatctctgtcaattcagcttctgaagctgttatatattgtgttctaaagtttgttgaaaacttattaagccttgacaatgagtttaatgatgaagacaattctgctcaaagagttttactttcaaatattaaagtactgatggacagcatgtgctgtttatttggaagtgataatgcaatcaagagaaagctgatcaaatctcctggtgagacagtaataagaattttagaatttttgcccaagtacatcagcgaggcagagttggcaaagcagtttgtggacatattgcttctgttcttggaaaataaaactcaaaattctgatgttagggttgaagctttgcaagtcattcaaaatattataccgatactaggacatggaagtaccgctaaaattctaagtgctgtttctcccttatatatttcggctgagttggatatgcgtttgagaatatgtgatcttcttgatgctcttgtagcttctgatgcatctttactctcagtggcaaaacttcttcgacagctgaatgcaacatctactttgggttggcttgatcatgatgccattttaaatgcttacggaatcattaatactgatttcttcagaagcgttcaagtggagcatgcattacttattttatcacattgtgtgcatgacatgtcatcagaagaaacaacttttatgtttagtgcatatagttcattgctgtcttttgttgatttttctgctcatatcctttgccaagaaggaaacagtgaagaacagttgtcagtgatgagaaacactgatagttgttggacaaaatcttgcatccagcgtacagcaaagaaatttctcttgaagcatatggcagatgcgatggacggatcactttcagttataaagggatggataaaattgttacatcaaatggtgttgaagcttccggaagtgtcaaacctcaaatcacttatggtcttgtgcaatgaggatggtgaagtgaatttttttgacaatataactgactcggtgatacgtaagagagtcaaggcattgtcttggtttcggaatgttatcagtgtgaacaagttttcagagttcatcactgagaaagtgttcatgcgactcttcttcaacatgttgtatgatgagaaagaaggaaaggcagaacatatgaaaaatgcatgcatagaaaccattgcttctgtatctggtcagatgggatggaagtcatactatgcattattgatcagatgtttttggggtgcatcccgtagtccagacaaacagaaactcttcatacgcctgatttgcagtattttggataaatttcacttttcagaagttcctcacaataaagaacctaaggaatctttgggtggagtttctgacatggatataactgatactgatgtgaacaaagagatacagacatgcctgtataaagttgtgcttccaaagatacagaagttactgaattctgattctgaaaaagtcaatgtaaatatcagtcttgctgcactgaagttacttaaattacttccaggagatgtgatggacttgtatcttccaacaattgttcatcgaatttcaaacttcttgaagagccatctagaaagcattcgtgatgaagccaggtcggcattggctacttgtttgaaagaacttggattggaatacttgcaatttattctcaaggttttgcaatctaccttgagacgaggatatgaacttcatgtcttaggatacacgcttaattttattttgtccaagtgtctttcaagtccagttgctggaaagatagattactgtttggaggatctgctttctgtgatagagaatgacattcttggagatgttgctgagcaaaaggaggtggaaaagatagcttcaaaaatgaaagaaacaaggaggaaaaaatcatttgaaagcttgaaattggtggcccaaaatgtaacattcaaaagctatgcactgaagctccttgcaccagtgactgctcatttgaagaagcacatcacaccaaatgtaaaaggaaaattggaaaatatgttgcaacatatagctactggtattgaaagcaacccctctgtagatcagactgatctatttatatttgtttatggcattattgaagatggattaaatgacgaaattggttggcacgagaataaattgttgaaattggaaggcaaagatagccgtattaatgccaaaagaatttctacaggccatgtagttgctaatggcttattgtgttcacaccttattacagtgtttggtctcagaatatttcataagcgaatgaagagtatgaaacaggatgtaaaagatgaaaatactttatccttattagacccttttgtcaagctattatgtgatggcttatgctctaagtatgaggatatcttatctacttcccttgggtgccttgctatactggtaaagttgcctttaccatcccttcaacaacatgctgagagagtaaaggctgctctgttggatattgctcatggttcggtgaactctatcagtcctttaatgcagtcttgcttgactttgctgactgtgcttttgaggaacactaaaatttctctcacctcagatcaaataagtttattaattcatcttcctatatttcttgatcttgaaaaaaatccatcgttggtggccctgtcacttctaaagggaattgtcagtcgcaagatggtggtacctgagatatatgatcttgttactacggttgctgaactgatggtgacaagtcaaatggaacccgttcgcaaaaaatgcagtaaaattctgttgcagtttctgcttgattatcgactttcagagaaacgcttgcaacaacatcttgatttcctgctctcaaatttgaggcaaaatcattctagccgtgtggatgttttaattcttaacaggtatgaacattcaactggacgggaatctgttcttgaaatgattcatgctattattgtcaaatttccaagaagtgttttggatgaacaatcacatatattgtttgtccatttggtagcgtgcttagccaatgacaatgataatattgttcgttctatgagtggggctgctataaagaagctcattagttctgttagtcctaattcacttaaatctattcttgagtatgctctttcttggtatttgggtggcaagcagcaactatggggtgcagctgctcaggattgtcacaggaatctttctccacaaagtaagaaactggaggaaagacttgctttggttctggggctgctgattgaagtaaaaaagaaaggatttcaggaacatataaattgtattttgcctgtgactaaacacatcttgcattctgccgtagatgcagttactaacaggcaagagggcttttctgctgaatctgccattccgctttggaaggaggcatactattctcttgttatgttagagaagatgattaatcagttccgtgatttatgctttgcaaagtatcttgagacatttcaggatatatgggaagcaatatctgagatgctgttgcacccgcattcatggatacgcaacagatcagttcgccttgtagccctatactttgcacgtgcaacagatgttagcagagaaactaatggaagctccttaagaagttattttattatgagtccaagtagactatttttaatagccacttctctttgctgccaactaaaaatgccattcataaatgatgctgacagcagcctgatgacccagaatattgtctttgctatctgtggtgtgcattctttgatggggcaaaatgcatgtatagatccccctgcattctggtctactcttgagcaacaagaaaaggatcggtttcttaaagcttttgacttgcttgattcaagaaaaggaagaagcatgttcatgtcctcatctttctcttctatatatgaagataacaatcagctgaatgttgacaatgctcaacgtgcactagtctcattattgctccggaaaatggggaagattgccctccaaatggatgttattcagatgggaatagtcttcaacagttttgggaatattatggcgcagattagtcaggatgactgccaacactatgcacacgtgatcttgttgcctctatataaagtttgtgaaggatttgcgggaaaagttgttactgataatgtcaagaagttggcagaagacacctgtaaaaaactagagaatattttgggtactcagaactttgtgcaagtttacaaccttatcaggaagaaccttaaattgaaaagaaataagaggagacaagaagaaaagctcatggccgttatcaatccgatgcgaaatgccaaacggaagttaagaattactgccaagaatcgtgctaacaaaaagagaaagattacgacaataaaaatggggaggtggatgcgttgattgaaaggaggtgtgaggagaaatgtccatatctctgtacctctagtttggcactgtgagtgctcctgtattgaggttttcgtaaaatcactgatcttgccatgaaccaagatactcctggagataatctcgtttgctaaaaaattgagatgtgagatgccatcttatgaatgttccatctacgcagggttttcaggtataaatgaagccatgtcaatgtcacctggttgtttgaagaaaaatggtggctttgtggaattttcttcataattttcatgatagatggtaacaaacatatcttgtaaaagaaaaaaaaagtcaattcacagctatagcaggcagttgttggtcagcctactgtgcttgaactctccacttattttttagtgtacaatagtcagcacttcatacatactaccaactcaattggactctccacttatatatgcggcttgaagcatgaatgattcgcttaacgatacttatttatgaaaattgtttgtagcgtatatccaaatttttgctgtacagactagaggataaaaagaaatacagcattaggggagaatattcttttggatttttgttgttcgtttcttgttttgctttctacccaatgtcattcttggatcatgccatacaattccatatgagtctttctagtaatattacttacagttttctctccccccaataaaaaagagaag

SEQ ID NO: 113870 - DNA, 478 bp, Glycine max
  Clone ID: PAT_MRT3847_73834C.1
ggaaattcgggcaaaccccccccctccacgggaaggaaaaatttctttttcaaactaaaatccatcggttttaacaagttccagcaaaattggggtggaaaaacattttgcccaaaggggaaagggggaagggggggaaatctaatccccaaaaaaagggggggggaaaaaccatgattaaatcccccttaagacacaggcttgacatccgggacattatttaaaaggaaaggcccaagcttaccggccctaaaaaaaaaaaggaactttttggaaaccaaaaaccccccttttaaacccttgggaggaattttaaaggccttttggagggcccaaaatggcagggaaaaaaggctctccagggcactttaatttttaacgtccccattgaattctgataaacttgaaaaaagggccccctgaacttgcattacaagatcctcaacataaaccaaatcaaatctattgggcaaatttt

SEQ ID NO: 113871 - DNA, 1455 bp, Glycine max
  unsure (1)..(1455): unsure at all n locations
  Clone ID: PAT_MRT3847_73835C.1
gtttttcacattcgctgaggagcgaaataagggcgttttgggttgcgacggtgttgccaagggtggcggcggcggcgactttggcgacggtgtcataagttacgagagagaataaaaatatattttagcttataaaaaataatttgtttttaatacacgagtttcaaaattcctccaaaattcactttaaaaaaaatcccccaaaattaaccaaaataattttccgaacccaaaacgacacccagtcacaacccctaacgcaacgaagccaatttacataaatcaaaactcgtagtataaattcgattggtgtcattaaccccagtttcttcatctctgcatatgaataatcgtattgatttcaatctttgctgtatcgaacatctctgtacacttcattcccaaagccactcttttctctgctgtttcggcactgttttgagtaggtagatgaggaaaaaggattaaccaaatttgagtgggcatcaaagttggcatagcagaagtggaatcagctcttgtttcaagcaacaggaacatggatgcacaagccaagaaaaaagcattgtttcgtgctaaattgaatgcccaaaagaagaaaaagcgcatagaatctccccttgtaaggtataatgaatttgatctacctgtttgccgggtttgtgatgttgttctaaagtctgagtctttatgggatgcacaccaagtttctcgtaagcatcgtgaggcaataagtaatctgaaagctaatgcagctggattaactcagcataacattgcaaagcctgttgctgataccatgctaatcatgcgcaaagtgaacattctttggactcacaatccaaagcgccaagacctcagtcaagagtnccgatacagagatccagcaagtaaaagggattctgcctgaaggattttttgacaataaggaagctgatttgcgtgctcgtggcataaagcttgttaagccagatgtcaaagacgagtacaaggaatttgagaagttgattcaagaagacttgcaggaggtggatgaccggttggaagaagaagagattgatgcggccgaaatgatagaagaggaggaagttgtagagcaaaagatgcttagcgagaaagtgaaaatgttgaagaagaggagattggagctaaaagctgctaatgctgcaaagcgtagtaaatcatctgagattgtagccaaggagtctagacaagaagagtcatccagtgatgatgaaagtgaagagaattttgccgtggactggagagcacaacacttgtgacttgtaaatactttgctagttttttacttctatttctttaattacatgagtagaatataatatctacccaaatatataagatgttgtatgtacaattttattcttcatcctcttgtctgtgtttatcctttatttcttttctctttatccgaatttgcttagagctttggnc

SEQ ID NO: 113872 - DNA, 254 bp, Glycine max
  Clone ID: PAT_MRT3847_73836C.1
tcgggttgtttaaagtgggcttattcggaaaacacttggacgttggagcaaatgtttgcttcgttgatctgctctggagacaactggttcactgagacatcaatcttttatggcagtagatttggaacaactaggatgctttattatacaataccaactcatgttagaaaatttcaaccacataacattgggtggtatttgaatacctagctgatctacaatctcccatcaggcatcactgcggaaattaaatt

SEQ ID NO: 113873 - DNA, 2331 bp, Glycine max
  unsure (1)..(2331): unsure at all n locations
  Clone ID: PAT_MRT3847_73837C.1
ccaatttttacatgaatcagaactcgtagtataaattcgatgggtggcattagccccaatttcttcatctctgcatatgaataaatcgatttcaatctttgcagtatcgaacatctctgcacacttcattcccaaatcccactcgtttctctgttgtttctgcactgttttgaggaggttgaaggggaaaagtgggtatcaaagttggcatagcagaagtgcaatcagctctagtttcttctcttccaagcaacaggaacatggatgcacaagccaagaaaaaagcattgtttcgtgctaaattgaatgcccagaagaaggaaaaacgcatagaatctccccttgtaaggtataatgaatttgatcaacctgtttgccgggtttgtgatgttgttctaaagtctgagtctttatgggatgcacaccaagtttctcgtaagcatcgtgaggcaataagtaatctgaaagcgaatgcagctggattaactcagcataacaatgcaaagcctgttgctgattccagcttttccaaggctaaaccagaacattctttggactcacaattcaaaccgccagaagcttcacaactagtttctaaacctcaatcatcatcggtgcttccaccaggattttttgatgacagcgattcaggaaaaacaagatctgaacatttagtggactctgatttangtagaaaagctggggtttctgctaaaagtcaagtgtcaaactgataaaaaagtgattctgctcacagtcgtttcggggtagcattcttgcgcactcagttattctctctctctctctagagcgtcgtcgtttagttagggcagaaaaccccttttcggatcggtggagcgaagcctcgccggcgagacccccgaggctgttcaatcggcgatcgagcaacggcgaaaagcgacgaagatgaaggttttcgtgaagactctcaagggcacgcacttcgaaattgaagtgaacccttcggacacgctttctgaagtgaagaaaaatatagaaactgttcagggtgcagatgtctatcctgctgcacagcaaatgcttattcatcaaggaaaagttctaaaagatggtactactttggaggaaaataaagtagctgaaagtagttttattgtaattatgctatcaaagactaagagttcatctggtgaaggatctactacttcaactgcaccttcagctaagccaagtgcaactcctacttcaacttctgtgtctactgcacctcaagctcctgcttcaactggagcatcggctacacctgttactgccccaacagctgctcctgcacctgcacctgcaccagctgctccagctccagctcctgctcctatattttcaggctcttctgtgccagagtctgatatatatgggcaggcagcatccaatcttgttgctggaagtaacttggagggaacaattcagcaaatccttgacatgggtggaggaagctgggacagggatactgttgttcgcacccttcgtgctgcttataacaaccccgagagagctgttgaatatttgtattctggcataccagagcaagccgaagctccaccagttaccggagtgcctgcaagtgctcaaccttcaaatcctccagctgatactccacaggcagcacaaccagcatctgttccttctagtggacctaatgctaatcctttagacctctttccccagggccttcctaatgttgggtctggtgctgctggtgctggttccttagactttcttcgcaacagtcaacagttccaagccttacgcgctatggtacaggctaatccacaaatattgcagcctatgctacaagagcttggcaaacaaaatcctcatcttatgcgattgattcaagagcatcaagttgacttccttcgcctaattaatgaacctgttgaagggggtgagggaaatatactgggacagctggctggtgccatgccgcaagcagtgactgtcacccctgaggagcggcaagcaattgagcgtctcgaagcaatgggttttgatcgtgcaactgtattggaggtgtactttgcttgtaacaaaaatgaggagctggctgccaactaccttttagatcacatgcatgagtttgatgaataattagatctcctttacaatttgtcaaaatatttgttttatgtttccttttgaatggtctttgttatgtaatgaaggtaatatttgataatgacaagtctcgaatggacaaggaatattttaatcaccgcattgttgcacaaaaaaaaaaaaaaaaaaaaaaaaaaaaaaaaaaaaaagaataaaaagaaaaaaattataaat

SEQ ID NO: 113874 - DNA, 149 bp, Glycine max
  Clone ID: PAT_MRT3847_73838C.1
ggctcgagcccagccgcaagccaaaaccaaacgggcaatacgttacacagaccagagcacaagacaccacagcgcaggatccagaccgaggccacagcagagacgggcacgacccggccaacacggctcaacaacagcgaggaaggcac

SEQ ID NO: 113875 - DNA, 400 bp, Glycine max
  Clone ID: PAT_MRT3847_73839C.1
cgcatagtgcggccactcaaaaaacaatcacttcttagcttgatccttctcaggacgagatccaggtttgtaagtatttacgcctcttatttttgccatatcggacaagaaaaacagaagcattcacttgcaagtctttagataccttctccctgacctctggctctggaattgggacaagctctacttataatcttggaaaagttcactttcttttagaccgggtttacttaactgggacttcgcatatcgtgcaacatgacaaccgctataggcatgtacaaggacaacaacatagtaccggatttactagatccgtgtactgaagaactgacgaatgcactcatgccttctctgaaaggtgattatttatctggcgtttcttcttcttcttcacgcg

SEQ ID NO: 113876 - DNA, 138 bp, Glycine max
  Clone ID: PAT_MRT3847_7383C.1
ctcgaggacccttcgtgaggatcctcgtcggaaacctcgccgtcaagtcgtcggcatgatcaaagccgtcgtctttctccggcaaagtccacccttcgagttcccgcttcttctgcaagatcctaccgcagggacttg

SEQ ID NO: 113877 - DNA, 2901 bp, Glycine max
  Clone ID: PAT_MRT3847_73840C.1
gtttttcacattcgctgaggagcgaaaataagggcgttttgggttgcgacggtgttgccaagggtggcggcggcggcgactttggcgacggtgtcataagttacgagagagaataaaaatatattttagcttataaaaaataatttgtttttaatacacgagtttcaaaattcctccaaaattcactttaaaaaaaatcccccaaaattaaccaaaataattttccgaacccaaaacgacacccagtcacaacccctaacgcaacgaagccaatttacataaatcaaaactcgtagtataaattcgattggtgtcattaaccccagtttcttcatctctgcatatgaataatcgtattgatttcaatctttgctgtatcgaacatctctgtacacttcattcccaaagcccactcttttctctgttgtttcggcactgttttgagtaggtagatggggaaaaaggattaaccttttttgagtgggtatcaaagttggcatagcagaagtgcaatcagctctagtttcttctcttccaagcaacaggaacatggatgcacaagccaagaaaaaagcattggttcgtgctaaattgaatgcccaaaagaaggaaaagcgcattagaatctccccttgtaaagtataatgattgatcaagctgcaatggagagtagacagacaccagtcaagtctacccacgcgtccgtacggctgcgaaagacgacagaaggggaaataaaaacgtgattaggatcctcacagtcgtttcggggcattcttgtgcactcagttactctctctctctctggagcgtcgtcgtttcgttagggcacaaaaccccttttcggatcggtggagcaaggcctcgccggcgagattcccgaggctgttcaatcagcgatcgagcaccggcgaaaagcggcgaagatgaaggttttcgtgaagactctcaagggcacgcacttcgaaattgaagtgaacccttcggacacgctttctgaagtgaagaaaaatatagaaactgttcagggtgcagatgtctatcctgctgcacagcaaatgcttattcatcaaggaaaagttctaaaggatggtactactttggaggaaaataaagtagctgaaaatagttttattgtaattatgttatcaaagactaagagttcatctggtgaaggatctactacttcaactgctccttcagttaaggcaagtgcaactcctacttcaacctctgtgtctgctgcgcctcaagctcctgcttcaactggagcaacgcctacacctgttactgccccagctgctcctgcttctgctgcagctcctgctcctatatcttcaggctctgctgtgccagagtctgatatatatgggcaggcagcatctaatcttgttgctggaagtaacttggagggaaccattcagcaaatccttgacatgggtggaggaagctgggacagggatactgttgttcgtgctcttcgtgctgcttataacaaccctgagagagctgttgaatatttgtattccggcataccagagcaagctgaagctccacctgttacccgagagcctgcaagtgctcaacctgcaaatcctccagctgctgctccacaggcagcacaaccagcatctgttccttctagtggacctaatgccaatcctttagatctctttccccagggccttccaaatgttgggtctggtgctgctggtgctggctctttagactttcttcgcaacagtcaacagttccaagccttacgcgctatggtacaggctaatccacaaatattgcagcctatgctacaagagcttggcaaacaaaatcctcatcttatgcgattgattcaagagcatcaagttgacttccttcgcctaattaatgaacctgttgaagggggtgagggaaatatactgggacagctggctggtgccatgccgcaagcagtgacagtcacccctgaggagcggcaagcaattgagcgtctcgaagcaatgggttttgatcgtgcaactgtattggaggtgtactttgcttgtaacaaaaatgaggagctggctgccaactaccttttagatcacatgcatgagtttgatgaataattagatctcctttacaatttgtcaaaatatttgttttatgtttccttttgaatggtctttgttatgtaatgaggtaatatttgataatgacaagtctcgaatggacaaggaatattttaatcactgcattattgcacaggtattcatcattttcttctcttagaaattttatcaatattcttatacagggctgtttggcttgaatattgtttatcctttgcgtgctcgtggcataaagcttgtgaagccagatgtcaaagatgagtccaaggaatttgagaagttgattcaagaagacttgcgggaggtggacgaccggttggaagaagaagagattgatgcggccgaaatgatagaagaggaggaagttgtagagcaaaagatacttagcgagaaagtggaaatgttgaagaagaggagattggagctaaaagctgctaatgctgcaaagcgtagtaaatcatctgagattgtagccaaggagtctagacgagaagagccatccagtgatgatgaaagtgaagggaattttgccgtggactggagagcacaacacttgtgatttgtgaatactttgctaattttttacttctatttctttaattccattactggaatataatatctacccaaatatataagatgttgtatgtacaattttattcttcaccctactggtcggggttaaccctttatttcttttccccttaacccgaatttgctaaaagctttggccagccaaggtgtttttttttggtccttaatttggtggttgccaagactccttaccgaacct

SEQ ID NO: 113878 - DNA, 250 bp, Glycine max
  unsure (1)..(250): unsure at all n locations
  Clone ID: PAT_MRT3847_73841C.1
caagaagccagaggagtaccccccggcaggagcgcgagacaaaagcaccgaacacggacaagcagcaacgagacagccgggacacaaaaaacgagcacgggagngagcgaacagcgccaagagtagaaagacgggataaggtgccccagagaaagagggaaagggcatcgacaggacgggcagcgaagcgtcatgcaaggccgtcgtgccaggggccacagcagcataatataactacgcaagaggatgg

SEQ ID NO: 113879 - DNA, 300 bp, Glycine max
  unsure (1)..(300): unsure at all n locations
  Clone ID: PAT_MRT3847_73842C.1
catagcaaggaggcgtccatgtgctttgtgatgaggttgggatatccaaaggggcacccttgctgttgccagaatcaccgaggagtgaagacccaatatgctgccaaaggcaagttgaataccaaaaaataatcaaatcagacagcactgggtttcaaggacaaaacttgctgtggagaagaagatatatttgcaaacatactactaataaattatagtattaaattgttttggaattacgatttcttgtgaatgntcannataattaggnnttaatanannaattgagtgcattgtgtt

SEQ ID NO: 113880 - DNA, 3277 bp, Glycine max
  unsure (1)..(3277): unsure at all n locations
  Clone ID: PAT_MRT3847_73843C.1
ggaggaggccgccctgaagtggtggaggtggctataaccgcaacggtggaggtggtggatatggtggtggtggaggttatgcggctgcgagaagacgacagaagggggaacaacaagcaacaacttcaccattcccaaagcctgaaaggtttggactttgaagactctgttccctcttttatgcgggcatcaccaacaacacccttagcggttcttgcaacaaagtagcaatggcttcctgttacttcaatcctatccctactagttctcatctcattttggctgacttatctagacagttcaagattcccaagcttcttcacaggaaaaagaggtttgatggctcgcctagatcctcaaaaatcgctgcattttatggcttgacgacccctccttatgaacttgatgccttagagccttatatgagcaagaggacaattgatatgcactggggtgaatatcatcagaattttatagaaggtttgaacaaacagctggagaaggatgatatactgtatggttacactttggatgaactagtcaaagtgacatacaacaatgggaatcctctgcctgaattcaacaatgcagctgaggtttggaatcatgacttcttctgggaatccatgcaaccaggagggggtgatatgcccaaactaggtctccttcaacagattgaaaaggattttggatcatttacaaattttagggaaaagtttattggagctgctctctcattatttggatctggctgggtttggctagttttgaagagagaagagaaacgactggagatagtcaaaacttcaaatgccatttgcccacgcgtccgaaactacatttgcagcctttgtcggcacacttagatttttcactccaattccgattttcccaccaccgttctccgacattttccgggaaaattctgtccctttctcctcactcgctccaacagaccccctctttcgattctctttcgctttcttttcttttcttttcttttcttttttttttttggcggggggaaagctgttcccacgcgtccgtttttttgcaatgatcacacactttattttttctctaaaagccaaagcctaaaacgtttggactttaaagactctgttccatcttgtgagagagtttctagaaaaatttcgcgccccagaaaccctagaggaaccctgattcaatcgattcgctgttgccttcgaatttcgttccttggaagattagggagcaatggcaattgcagccccagggcatctgaacgtgaatgaatcacccatttggggatctagaagtgttgattgcttcgagaaattggagcaaattggcgagggcacatatggtcaggtttacatggctaaagagatcaaaactggtgaaattgttgctctgaagaaaatacgaatggacaatgagagagaggggtttcctataactgccatacgagaaatcaaaattctaaagaaactacaccatgaaaatgtgatcaagctgaaagaaattgtgacttctacaggtcctgagaaagatgaacaggggaagccagatggtaacaaatataaaggtggcatctatatggtctttgaatacatggaccatgatttaacaggtcttgctgaccgacctgggatgagatttacagttccccaaattaagtgttacatgagacagcttttgactgggcttcactattgtcatgtaaatcaagtacttcatcgtgatatcaaaggctcaaatcttcttatagacaatgaaggaaatcttaagcttgcagattttggactggcacgatcattttctaatgaccaaaatgcaaatcttactaatcgtgtcattacgttatggtacagaccacctgagttgctgctaggaacaacaaagtatgggccagctgtggatatgtggtctgttgggtgcatttttgctgagcttcttcaagggaagcctatatttcctggaaaagatgagccagaacaattaaataaaatatatgagctgtgtggagcaccaaatgaagtcaattggcctggggtttccaagataccttattataataaatttatgccaacaaggccgatgaaaagacgtttgagggaagttttcaggcattttgatcatcatgctctggaattgttggagaagatgttgacacttgatccggctcagagaattactgcgaaagatgcacttgatgctgagtatttctggacagatccattaccgtgcgatcccaagagtttacccaagtacgaatcatcacatgagtttcagacaaagaaaaagcgccaacaacaacggcaaaatgaagaaatggctaagcgtcagaaaattcagcacccacagcctcacactcgtcttccccccattcagcagcctggacaacatggccaaatgcggtcaggaccaaaccaaccagttcatggttctcaaccccaagttgcggcaggacctacacatcattatgggaagccccggggtccatctggtgggccaggaagatatcctcccaatgggaacccaggtggaggatacaatcacccaaatcgaggaggtcaaggtggtggtggttatggcagtggaccttatcctcctcaagggcggggggcaccttacgggtccaatagtatgcctggtggcggtcctcgtggcggtggtgccagcggctatgttggagctccaaattatccccaacaaggtggtccatatgggggctcagcggctggtcgtggctcgaacatgatgggtggaaaccgcaatcaacaacagtatggttggcagcagtaaatatacttatgatgatcagtattagtactacaatttggcaataccctgataaatttgagaaggattggactgtttatggatcaagttactgagaagaagaaatgagatatgacctctatggtttgtatactactgagatatttgttctcattacttgaagtgcttggaaacttttgtgatgtatgcatgcaccttaggtaatgtttggggctccttattacaagggcaccacaagagaagagtgaacccccgattttgtagttttttttcgttttcttcactatatacattaattcctgtgcagtatgtatgaatgatagcagcatacttcaaaatgggtaacaagctgctgcttactgagtatcttattgggaaaaagccttgtacaaaattttgttttctctaattttacactatagtatgataggcactttatgtatggntatggtaagtggtangggaaggaaataatgaatatgggtatgag

SEQ ID NO: 113881 - DNA, 133 bp, Glycine max
  Clone ID: PAT_MRT3847_73844C.1
gccacgcatgcgttcacaccttcaaggaacggactaccgttaggtccaagtatatctgggaaagggtcgtattacaatgattctaataccctatctgcaccattcatattaatatgagcataaaataaaaact

SEQ ID NO: 113882 - DNA, 781 bp, Glycine max
  unsure (1)..(781): unsure at all n locations
  Clone ID: PAT_MRT3847_73845C.1
gtcaaagtgacatacaacaatgggaatcctctgcctgaattcaacaatgcagctgaggtttggaatcatgacttcttctgggaatccatgcaaccaggagggggtgatatgcccaaactaggtctccttcaacagattgaaaaggattttggatcatttacaaattttagggaaaagtttataggagctgctctctcattatttggatctggctgggtttggctagttttgaagagagaagagaagagtgaacccccgattttgtagttttttttcgttttcttcactatatacattaattcctgtgcagtatgtatgaatgatagcagcatacttcaaaatgggtaacaagctgcggctcgagattctttccgggatactgccttgtacaaaattttgttttctctagttttacactatagtatgataggcactttatgtaaaaaaaaaaaaaaaaaaaaaaaaaaaaaaaaaaaaaaaaaaaaaaaaaaaaaaaaaaaaaaaaaaaaaaaaaaaaaaaaaaaaaaaaaaaaaaaannnnnnnccggggggggggggcccaggaactttagctataacgggaaaaataaaagggccggcgacccccggttgggtacctttttttaataaaggagaaaattgggccagggggaaccctggagacaaaatggatatgcgttaagattataaactggggagcaaaacccaaaaacaaagataaacagaattgccttgggtttgctggggggagggcaaaaaggaaacatactatttcaatgcc

SEQ ID NO: 113883 - DNA, 724 bp, Glycine max
  Clone ID: PAT_MRT3847_73846C.1
attcccggggtcgacccacgccgtccgaaacaaactacatttgcagccttcgtccgcacacttagatttttcactccaattccgattttcccaccaccgttctccgacattttccgggaaaattctgtccctttctcctcactcgctccaacagaccccctctttcgattctctttcggttctttcttttcttttcttttcttttctttttttttttttggcggggggcagaagaagagcctctagggttttgcgaggagtagtaatggctatggcagcccccgggcaactcaacgtgaacgagtcaccttcgtggggttccagaagcgtcgattgctttgagaagttggagcaaattggcgagggcacatatggtcaggtttatatggctagagagattaaaactggagaaattgttgctctgaagaaaatacgaatggacaatgagagagaagggtttcctataactgctatacgtgaaatcaaaattctgaagaaattgcaccatgaaaatgtaatcaacttgaaagaaattgtgacttctccaggccctgagaaagatgaacaagggaggccagatggtaacaaatataaaggtggcatctatatggtctttgaatacatggaccatgatttgacaggtcttgctgaccgacctgggatgagattcacagttccccaaattaagtgttacatgagacagcttctgactgggctacattac

SEQ ID NO: 113884 - DNA, 497 bp, Glycine max
  Clone ID: PAT_MRT3847_73847C.1
aattcccgggtcgacccacgcgtgcgagacgacagaaggggaagtttttgatggaaaagaacaccactaatgctcttcatggacaagtcactattgggaccctgattttgcaggactgtgctgttggattgctctttgcattgcttccagttctgggtggcacctcatgtgtttttcaaggagtgttatcaatgaccaagctgttggtgacattgattgcattcctctctgttctgtcaatattgtctcgcacttgccttccatggttgcttaaactgatgataagcctctcatcacagacaaatgaactctatcaattggcgtcagttgcattctgcttgctagtagcctggtgtagcgataagctgggactaagtctagaactaggttcctttgctgctggagtgatgattgcaaccactgatctggctcaacatacactagagcaaattgaacctattcgcaatctttttgctgctctttttctagccagcatt

SEQ ID NO: 113885 - DNA, 605 bp, Glycine max
  unsure (1)..(605): unsure at all n locations
  Clone ID: PAT_MRT3847_73848C.1
ctaaactagaactttcagtttaaagcaatcaaatatcagctattcgatcttgcgagagactttctagaaaaatttcgcgcgcgagaaaccctagaggaaccctgactcattcgattcgctgttgctttcgaatttcgttccttggaagattagggagcaatggcaattgcagccccagggcaactgaacgtgaatgaatcacccatttggggatccagaagtgttgattgcttcgagaaattggagcaaattggcgagggcacatatggtcaggtttacatggctaaagagatcaaaactggtgaaattgttgctctgaagaaaatacgaatggacaatgagagagaggggtttcctataactgctatacgagaaatcaaaattctaaagaaactacaccatgaaaatgtcatcaagctgaaagaaattgtgacttctcaaggtcctgagaaagatgaacaggggaagccagatggtaacaaatataaaggtggcatctatatggtctttgaatacatggaccatgatttaactggtcttgctgaccgacctgggatgagattcacagtttcccanattaagtgttacatgagacagcttttgac

SEQ ID NO: 113886 - DNA, 647 bp, Glycine max
  Clone ID: PAT_MRT3847_73849C.1
ccacgcgtccgcttatagttttgatcatcatgctctggaattgttggagaagatgttgacacttgatccggctcagagaattactgcgaaagatgcacttgatgctgagtatttctggacagatccattaccgtgcgatcccaagaggttagaccttccatgtacattagttatttattttgagaatgttactttgaaattatgtgatcttaataggaggattaaatgtctgtctcattgattcctttcctttttactttattgtttctactcaactaatccttttctggtcaatacctttcaacttcatactcttctgtatggcttagtttacccaagtacgaatcatcacatgagtttcagacaaagaaaaagcgccaacaacaacggcaaaatgaagaaatggctaagcgtcagaaaattcagcacccacagcctcacactcgtcttccccccattcagcagcctggacaacatggccaaatgcggtcaggaccaaaccaaccagttcatggttctcaaccccaagttgcggcaggacctacacatcattatgggaagccccggggtccattctggtgggccaggaagatatcctcccaatgggaacccaggtggaggatacaatcacccaaatcgaggaggtc

SEQ ID NO: 113887 - DNA, 509 bp, Glycine max
  Clone ID: PAT_MRT3847_7384C.1
gaactgaatgacgaggcagcggagaagctgtggagcaggtggaggccgacctgctgcaggaccaagagggctaccgctggaaggggcacgagcgcctggcagcccgctcagggcccgtgcgctttgagcctggctttcagcccttcgtgttggtgcagtgtcagcccccggctgtggtcacctccttggccctgcactctgagtggcggctcgtcgccttcggcaccagccatggctttggcctctttgaccaccagcagcggcggcaggtctttgttaagtgcacactgcaccccagtgaccagctggccttggagggcccactctcccgcgtcaagtccctcaagaagtccttgcgtcagtcattccgccggatgcgtcggagcccgggtgtccatgcggaagcggcacccagctggccccccaggagaggcacaggatggggagtgccaaagctgagcggccaggcctgcagaacatggagctggcgcctgtgcagcgcaagatcg

SEQ ID NO: 113888 - DNA, 503 bp, Glycine max
  Clone ID: PAT_MRT3847_73850C.1
cggcattcactgtactttatccctttctgtgagggaattatggtaattgatatcgaggttttgactcatggattctgatcgccccagaaaaccttccaaaaatttagttcactctcgcttcttccttttcggcttctattgctgggattgggagttcttaaccgctctcctcctttttagttgttccccttaatcttgttccttcatatttttatttttttttcttattagatcagattgaacaaaagggttgctctttattttttaatcttgggggaataatagaaatagaaataagaaaagattagtgaggttgaaatgttgcaacaacgatcggtgccggcaccgttcttgacgaagacgtatcagttggtggaggatccggggacggacgaggtaatatcgtggggtgaaagtgggaacacttttgtggtgtggaagcatgcggattttgcaaaggatttgcttccaaaatatttcaagcacaacaacttttccagctt

SEQ ID NO: 113889 - DNA, 460 bp, Glycine max
  Clone ID: PAT_MRT3847_73851C.1
gaaacttggggaggcctacgaggaagccgttgctcggtgtcctcatagaagcttgaactttaggttgctcgccgttgtcagaggttcgatactgtccaggagataggaattcttatgatttgatcccggctctgacaaacagcacctggactgtatgggaacttagatctctgcttgtaatcaattgctccttgcaagtatggctaatggtgcctggcaacccctgacactgcgtatccctcgcacggctactacttacggtctggttgacctatctctcaactgatcggattgccactggtgctctgcgaacagctttcaaaagacagcacaaatcctgagagggacccctacttcctaataatggccattcgggcacccttcatttttgtaccttggggaggccctgacacaatcactgactactccttaaaggatacatgagctatttctactacac

SEQ ID NO: 113890 - DNA, 547 bp, Glycine max
  Clone ID: PAT_MRT3847_73852C.1
cccaaaactttataaaaccaaaaaacattgaacagcttacaattgcaggcggaacaaagatacctggggcatattgggtttgagggagctagaaccacaaaaatgcaatctgaatcaatggcaaacccactctcttggatcttgggtccacaagttaacaagcttgggaattaagggaaaacgatcctggccaatcaaagatgtatccctatttgtttggtcctattagtaaaaactatagggggggccaaaaacatgtcaaaccctggttcacaacgaatcctagtttaagcagccgggaagttgacggtatcatatatcgcagttgcatggaccattaaatataatgagcatggttgctccttctataagcacgcatctgagtgggcaacagagcagttctctaccgatccaaagaataacttccattagccccataaacactgacgactacaatctgataaccaccatggcttccataaatgtaaccaaactgtaaatcatttgacccgaccatgccaattgaaaatgaatgtccacgtcaatg

SEQ ID NO: 113891 - DNA, 1001 bp, Glycine max
  Clone ID: PAT_MRT3847_73853C.1
cttttgtgatgtatgcatgcaccttaggtaattttggggctccttatacaagggcaccacaagagaagagtgaacccccgattttgtagttttttttcgttttcttcactataaacattaattcctgtgcagtatgtatgaatgatagcagcatacttcaaaatgggtaacaagctgctgcttactgagtatcttattgggatactgccttgtacaatattttgttttctttagttttacactgtagtatgatatgcactgtatgtatggttatggtagtggtagggaagtgaaattaatgaatatgggtacgagagattaaggaagaaaaaataaacaaattgcacaggcagaagtagggaggagtgtaacgtgtggatgtggtttaaggagagagaaaataacaggtggcaaggagagaggagagagggggttatatgatgggtgttataaccgaataggaggtatgaggaaattggtaagattgagtaaagaagctagttccctaacttgttatttgtttttctatttttcatcttgtaaggagccagtctccaaccgctaccctagttttatttctttaaattttcttaaatttcagcattgtaagttgtaactgaggtatcttgtatatagttaccttagttttaccgtttatattctggttgctaacaaaatattgaaacgcttaatgattacagttacaggggtggcaatggccatatggcatcttaggtggagttgataaaaggaatgagtagatttcactcatcatatgagtacattaatactgccccatgtgcttctttctggttgtcaaattttgcagtgtttaggattcaggacaacttgtaatttggggggatctactgaatttagaggaggcaaggatttcaatgtagaacgagagagaaaaaacaagtttgttcttggacttattacagtctcattgtatgaaagtgtgaatgtaattatttatgtggcaagaggctaccaaattt

SEQ ID NO: 113892 - DNA, 980 bp, Glycine max
  Clone ID: PAT_MRT3847_73854C.1
catagagaaagtggaatccccaatcttgtaacggaactttttttcttatcagttccatagctagctgtgtggagacgacaactgccacccattccaacatacagagaggctatttactaattactgttcctcgtgtgaacaaacatataaaccacctcggattttgcttcctctgctgtgttttaacgacaacgcgtttctttgcttatacactaagatttcaaacggcgattcgttttgcgactgtgtggtcgcgatctggttttgttttgattcatttgtacgttggactgtgaaacacacgccgaaatgtggtggatgatgggcgagactggaggcaattactgttgtaagaagagcgatgatttgtgcaccaatgtttgtggtcaggaatcaagtcaagtatcaggtatgtcacgaattcgctgcattctgcggggtttggatgtgaaaacctacatattcatgtttgctgttatcccaatgtgtgtctttggattctatatacatgggcagaagatctcctactttctgcggccactatgggaaaaagcacccaagcctttcaatgtcatccctcattactataacgaaaatgtcaccatggagaatctctgcaggcttcatggatggggagtccgggagtaccctcgacgtgtttatgatgctgtgttgtttagtaatgagctggaaatactaaccttgcgctggaaagaattgtacccttacataactgaatttgttgtccttgagtcaaattctaccttcactggattgcctaagcctctggttttcaatagcaatagggagcagttcaaatttgttgagccgcggttaacttatgggaccattggtgggagatttaagaaaggagaaaacccatttgttgaggaggcgtattagcgtgtagcatggaccatctcctcaagataggctggattactgatgatgacttattgattatgtctgatgtggatgag

SEQ ID NO: 113893 - DNA, 401 bp, Glycine max
  Clone ID: PAT_MRT3847_73855C.1
gtcaagttgacttgtctaagatattgaaccgccaagtttatgatttcgttcgagccacacaattatagtcattggtaggagaaattcattaatttgcgaccaaaaaactacaaaatatttaccagtgaaccatattcatttataactcactaataaataacaaactaaaaccttgccaaaaggctaaattttatcaagaacttcttttaatatcattacaattttttatttggcaccaaaaccatcttttcttataataaacatatcattttttattatattatttctttctcaaaaccaattacatatcactttaacttaacttttttattttttattatgacaactaaaccttactcacacatattatataattgatattttttcttttttaataaaat

SEQ ID NO: 113894 - DNA, 166 bp, Glycine max
  Clone ID: PAT_MRT3847_73856C.1
ctcgaatagcccaaaatcgcaacaacagcttctcgctcttgcgatttatttacgcatcgcttacatctcatgtttgatacaaagagaatggcgggcgcagccacaagccttattataaatacatcttcgttcatttcgtatattgaacgaactccattcttattat

SEQ ID NO: 113895 - DNA, 164 bp, Glycine max
  Clone ID: PAT_MRT3847_73857C.1
gaaaggattgtcacatgcttttccctgtactaacgtttcaacacgggatcagctggaagatgttaaaagggtgttaacatagtgtatatatcgatagaaaaaagaagaagaaggaagccttatagaaaggtaaaggtacggaggcgggaaataaataaagaaag

SEQ ID NO: 113896 - DNA, 399 bp, Glycine max
  unsure (1)..(399): unsure at all n locations
  Clone ID: PAT_MRT3847_73858C.1
ccgaaacaaaacacaaacacaagcacaaggacagtgatctctctttctatctttttgtctgtctctctgaacacgttgatggattccccctctcgcccctccgtcatcatcgtaggtgccggcatctccggtatcgcggcggcgaaggtgttggccgagaacggcatagaggacctggtgatcctggaggcttcggaccgcgtcggcggcaggatccgcaaggagagtttcggcggcgtgtcggtggagctcggtgccggatggatcgcangcgttgggggcccgcagcccaaccctgtttgggaacttggcgtccaattcggcctccgtacctgcttcttcgactacagcaatgcgcgctataacatctacgatcgcagtgggaacatcataccgagt

SEQ ID NO: 113897 - DNA, 473 bp, Glycine max
  Clone ID: PAT_MRT3847_73859C.1
aaaaaaaaaaaaaataaaaataaaaaaaaaaaaaaaaaaaaaaaaaaaaaaaaaaaaaaaaaaaaaaaaaaaaaaaaaaaaaaaaaaaaaaaaaaaaaaaaaataaaaaaaaggggggggcccttttagagaatccaattttactaccccgtctttgaaaaaaaataatttttttataggttcccttaaattaaattaattggccgtttttttacaacgttataattggaaaaaccctgtgtttccccaatttaatccctttggaaaaaatccctttttccccgctttgattaataccaaaaaggcccaaaccaatggcctttccaaaaattttgccaccttaattgggaattggaacccccctttttgcgctccattaaccgcggggttattggtttttaccccaaaggtaaccattaactttgcaatttccttaacccccgttcttttttttttttccctttctttttaaa

SEQ ID NO: 113898 - DNA, 212 bp, Glycine max
  Clone ID: PAT_MRT3847_7385C.1
ttcctcgtgtccgacggctgcaaaaaaacgacagggggggttttaaatgaaggagggtatagaacaccaccattaaaaatgcagatcttcttgaaaactctgacagggaagactataaccctctaggtcgagagcagctacaccatccacaatgtcaaggccaagattcaagacaaggaatgcataccttcggatcagcagcgtctgatatt

SEQ ID NO: 113899 - DNA, 619 bp, Glycine max
  Clone ID: PAT_MRT3847_73860C.1
ctccccttccaaacacaaacacaaacacaaacacaaacacatcgcaactcaagaaatgaaactagcttggtcaccagagagagcatccaaagcatacatcgacacagtccaatcttgccaggttttccgcgaatccggagtggcggagtttatttcggccatggcggcggggtggaactcgcagctcatagtggagacgtggtcgcagggaggacttattgccaccagcgtgggattagccctggcgaggtctcacacgtgcggaagacacgtgtgcgtagttcccgacgagcgggcgaggtcggagtacgcggagagaatgggcgaggcgggcgtgacggcggagatcgtggtgggggaaccggaggaggtgatggagggtttggtcggcgtggacttcttggtggttgattctcgaaggaaggattttacgcgtgtgctgaggctcgcaaagttgagtaataaaggtgctgtcttgctctgcaagaacgctaattcaaactccaagggttttatatggcggagcctcgtggcgaaaggttcttcgcggcgtcttgttcgttcggcgtttcttcctgtggggaagggacttgacatggcacacgtgtctgcctctgga

SEQ ID NO: 113900 - DNA, 323 bp, Glycine max
  Clone ID: PAT_MRT3847_73861C.1
attccgggtcgagccaacgctcatacagatgccataagacgactgatggagctgcctatgccattttatttcgctatacctacaggcttctacggttcgcagcttggctctcatacaatggccctgttccttatctacaaatccaattcttgctacaccctagcctacgttcactggctcgacaaaatcacacagaacaccgaaccgactcagaactccatcccagacctaaacaggctcctactagcaactaaacttacttgcttcaaacctattacttccgctctacatgctctcatacaatgcaccaccacctctgaaag

SEQ ID NO: 113901 - DNA, 296 bp, Glycine max
  unsure (1)..(296): unsure at all n locations
  Clone ID: PAT_MRT3847_73862C.1
attaaatataagcggaatctgagtaatattcanatgnnccggcttattttacnacggcananacaaattctggactaaacacgacctccaaccttgctttgncagaagaaganaagatgnnagtnattanaaatagangcnttcntgctgatgttcttgcaaatcgagctcatnaatttnaagaacatgttgctcatganagcctcaagcgatcaanttcctgctgttgacaagntgtnttctactanggttaataagttgnaanaattatggaccttagacnnantgttttggtg

SEQ ID NO: 113902 - DNA, 443 bp, Glycine max
  Clone ID: PAT_MRT3847_73863C.1
ctccgcccccactgtaactagctgaaggttgggggggggtggggggggggccacagactttcttttacaagatcagtggagtatgaagaacacatatctcgcgcggaaggaccatggcatgccgataatctcgaccaaggtaaggttggaccgtgaggaagaacatcacacgactcgtggagctgctacttactgggcccgttggtgagggagttgctgaaccttggggatgttgcctgtgacaggaccaaggagtcaattgacttgaccgagaaggatgaactgtgcaagatgatccatctgatcgatacctacaagttgaacaggcaatttatatggatttcatctcataggaaccgagggaggaacggacagtctgtccgtgtgagctgcgacaccaagggaggcctcgtatagtggcctttatacgctgtttttgcttt

SEQ ID NO: 113903 - DNA, 507 bp, Glycine max
  unsure (1)..(507): unsure at all n locations
  Clone ID: PAT_MRT3847_73864C.1
cggaatcggcagggtcggcccacgcgaccttttgattcggggcatggctcgttgacgaccgctggttatagacactcaggacgggacgatgcaaagttaacgtggaacgatgtgagagccaatcatgtctatgaaggctgagggttaagggggttgctctgataagtaagacacttcatgggtggggtcgctctngggaggatcactaatgagcgcgttgagggtactaaaatacgtactatttgaaggggttaaagagatatggcttatcctagacggcactggagcatatggtcgcgacatcggagaaaatattgcaacgttattgaatgcctctgtggcagagctaccagctgatgcacgcacaatgttgcgcattggaatgacttatgcaccgtagatactggaacacttgatggagattgctgagattgcgcgccattcatgtgtcgactctgttctgcatgtaccggatcaatctggaagtgataccattttgagtgcaat

SEQ ID NO: 113904 - DNA, 427 bp, Glycine max
  Clone ID: PAT_MRT3847_73865C.1
acccacgcatccgaaaaaaaaaaaaaaaaaaaaaaaaaaaaaaaaaaaaataaaaaaaaaaaaaaagggaagaaaaacaaaaaagttaaaaacttaaataagggtggatgcatacgtcggatctctgctatatttgtcatttaagttcaattcatatggctgtcgttttataacagtcgttactgggaaaagcctgtcgttttccaacttcgtcgctttgaatctcttgcccttttcaccatctggcgttttaccgattatgcccttttcgatcgctgttcccatcagttgcacgccttgaatgttaactggtacgcgccttttaccggctcattaggcgcggcgggtgtgctggttactcgcaccttaaccgctgcagttgtgagggtccttccgctcgttcctttcactttcgtcacttcctttc

SEQ ID NO: 113905 - DNA, 250 bp, Glycine max
  Clone ID: PAT_MRT3847_73866C.1
cttcagtgcaagagcttcaagctcctttggatcaatttacaagcccattcacagctctctataccaaaactggtctttccgcacaatggcaaccgttgccgaccccaagcatgctctcgagacctcaggagagactgagccagtctggattcactctgacccacgctcacgacgcccgcaattccccacgcttaaccatctcctcaagatcgatatctgcgtgatcggcagtggtatttctggtatccag

SEQ ID NO: 113906 - DNA, 355 bp, Glycine max
  Clone ID: PAT_MRT3847_73867C.1
tttttttttttttttttttttttttttttttttttttttttttttttttttttttttgggaacctggaaagaaacccccaagtttttttggccgggtacaaaaactataccccactttttccaaacatcctcctagggaaaagccagaaaagggaaaaaaaaaaaaaaaaaaaaaaaaaaccccacctttttttccaaaacataaaaaatgggcgggattttaagggtgatcaacccttgggaaaccccctaaccctcccctgaatcggttgattgggggaaggaaggggcttttcccccaaccaaaaaccaaggggggtgggggggcggttgggcattcccaccaatcggggcc

SEQ ID NO: 113907 - DNA, 313 bp, Glycine max
  Clone ID: PAT_MRT3847_73868C.1
atttttaaaaaaactaacacaaatgggcaggtttaatgaaatcatctcacacaatcaacctaatctcacaactaaaaaattataccgtaatactctcaaattcccaacctcatcttctaaaaataaaaaatcaaatacgatcatatattaatcacaatccattataatcttattcaacctaacctaaagccaatctataatataactgaattcctaaagcaaatccacctccacattctcaaaataaaaagatccaaaaatattcatataataatagaaactatttctcatattataatacctatcctacaac

SEQ ID NO: 113908 - DNA, 448 bp, Glycine max
  Clone ID: PAT_MRT3847_73869C.1
aatggaagacctacccagccttaaaaccataaaactttggtttatgaaccaaaaaagggacaatccttacagggtacaacataaataacagctccttaagggttcctaaaaaaaacaaaacccggggtttaggatccccattttattttttcacagcttttttaaaaatccggggaaaaacactccttgggacaaacaggtttaatttcccccaaaaacattagtctcactttcactcacatttatttttttaggaaaagaccccccaaataaaaagctttactccaaaaaagccacttttacaattttccccagtttcatacaaaccccctttgggtacaacttatagcaaggacgggccaaaaacctggggcataagggtgcccaaaatcaaaggaattcaaagggcttgaaaagcttcacatgggcaaacttaactcctttgggg

SEQ ID NO: 113909 - DNA, 1201 bp, Glycine max
  Clone ID: PAT_MRT3847_7386C.1
tactcgagccgaatcggctcgagtacggctgcgagaaacgacagaaggggagattaagattgggaatgggagtgggagaaagataaatgtggcatattcatgtcttcccctcaccattctttctttggagtcaaggactggggggttaggtttgtacttaattacgcttcttaatttcttctttatcgatcacccatgatctacctggctagctagctagggttgcttctgctgcattctcgaccgccaatcaaggattcttctgcgcttccatcttaacaagaaaatggtgagaaggaagataccgatcaagaagatcgacaacgtaactgcgaggcaggtgacattctcaaagaggaagagtggtcttttcaagaaggcacgcgagctctctcttctctgtgattctgagatagcactcatagtcttttcacctggtggcaagctcttcgactatgctagttcaagtatgcagaaggtaattgaaaggcatattttatggtcagagctgaaccttgaaaaattagaccaatcatgtcctacggagcagcttagatgtaattatgctgatttaaacaaggaatttggagacaggattcgtgaaatgagacaactgaatggagaagaactgcaaggattggccctaagggagcttcagaaattagaagaacgactggtctcatccttgaaccgagtttataaagcgaaggttgaaaattttacaagagagatcgatattcttaagcaaaagggaaacaaactcatggaagataacaggctgatgaagcagaggataaaaccgaggaatgaaatatgttcggtccagagacacgagcatgaacaaggccggtcctttgacacctccctcacgttggggctatcttttcctgctggctcaaagtacagagtttctgagcaatgaggggaccatgatactgcgttttagttagtgtgaaaaggaagagtgaatcaccaaggataaaatggttcacgtatatatatggtgggtcatctctaagtttagaacaatgacattctacgattgccccaactgaatatttattttctagtaattcgtgtttgttaattagtagaaccttcttaatggatatggtttaggtatgatattatctccatatttgtgaggaaaatgattttagttttccttcggaaaaaaaaaaaaaaaaaaaaaaacgaccaa

SEQ ID NO: 113910 - DNA, 1201 bp, Glycine max
  Clone ID: PAT_MRT3847_73870C.1
gttattatcaccttcaactgccaactgcaaaaatctatcttctttcgggatcacttgaccgagagtaagagactaatccctcgagatactgatactgaaacctatcgttcttcacatcataaccatgccgttccagcaacggtgcatcaagcagcagagcctccaatgctaacactgggcgccaccctgtgtaccgtaagttactcaccttcaccttcaccttcaactgccaactgcaaacatctaactactttcaggttcacttagccgagaatcagagactaatcactagagataccgagacctacttttcctcacatcaccaccaacatgcgttccagcaacggtacatcaagcagcagggcctccaacggtaacacagggcgccaccctgtttaccgtggagtgaggcgtaggagtagtggtaaatgggtttctgaaatccgtgagcccaaaaaacctaacaggatttggttagggacatttgccacccctgaaatggctgctattgcctatgacgtggcagcgcttgctcttaagggtaaggatgctgagctcaacttccctaactcggcttcctccctccctatccctgcatcatctgcagctcacgacattcagatggctgcagcactagctgcaaccgctgtcggagcagcgaatgatgcactggaaggaagccaaggaggaaatgtttcggtttcattggcggaagagttttcagggggaaacttaaatcactttgtggatgaggacttgatctttgacatgccgaatattctggtcaatatggctgaaggaatgctactcagccctcctcgttttgataattttgctgctaccgactatgaatacatggatgaagatcctaacctctgggggttccctaattactagttactacccatgggataattaaaagactttttatattactaatgcaaaaatcttaagaaggaaaggtaagtaagctgtaataataaattatgggagaactcttacatccagactttgcttagacaccaggaaagggtatggtgtgtgtgtggaaagtgtatctttctttccatatgttttttttccacctagtgtacagtggtaccttctagctatagtgaggtttgctgctgttgcacctcaaactcaaatatgtatgtaatgtttatataatgtgttaattaaataatcttttttggtcatt

SEQ ID NO: 113911 - DNA, 493 bp, Glycine max
  Clone ID: PAT_MRT3847_73871C.1
gctgtcgatctatcgctaggaatgtgccaggtgcctgtcacggggttttggtgtgtgtgtgtgtgtgtgtggttaattggggtgtgcgggtggtgaaaacgtgtactgtactagaatagaatttggtggtagtggtggtggagcgcaggcatggcgcgttattatccgcatttagggtgcgagtggtgccgcaaaactgaaggccggtatgtgaagaccgcgatacgctgaaacccgaaatgggcaaattgactggttgacggcaagtagtacaactggagaacgtcaagttagagtgagtgccatcgggacatgtgtgggcagggtttgcccaaagcagcagcagctggcaacagagcccaggagcgcttcagggctagagcagggtgctgttttggcgacaacccagaggattcgttcctaaatgcacttacaccgcagacggcaccagcagtagacccagcagcaaagtcagcgacagcactgtcacaac

SEQ ID NO: 113912 - DNA, 998 bp, Glycine max
  Clone ID: PAT_MRT3847_73872C.1
ctcaccttcaccttcaactgccaactgcaaatatctatcttctttcgggttcacttgaccgagagtaagagactaatccctcgagatactgatactgaaacctatcgttcttcacatcataaccatgcgttccagcaacggtgcatcaagcagcagagcctccaatgctaacacagggcgccaccctgtgtaccgtggagtgaggcgtaggagtagtggcaaatgggtttctgaaatccgtgaacccaaaaaacctaacaggatttggttagggacatttgccacccctgaaatggctgctattgcctatgacgtggcagcgcttgctcttaagggtaaggatgctgaactcaacttccctaactcggcttcctccctccccgtccccacatcatctgctgctcgcgacattcagatggctgcggctagcgccgcagccgctgtcggagctgcgaatgatgcacttgaaggaagccgaggagggaatgcttcggtttcattgacggaagagttttcagggggaaatttgaaccactttgtggatgaggacttgatctttgacatgccgaatattctggtcaatatggctgaaggaatgctactgagtcctcctcgttttgataattttgctgctaccgactatgaatacatggatgaagatcctaacctctgggggttccctaattactagttactacccatgggatgataaaaaaaaactttttatattactaatgcaaaaatcttaataaggaaaggtaagtaagttgtagtaataaattatgggagaactcttacatccagactttgcttagacaccaggaaaggtatagtgtgtgtgtggaaagtgcatctttcttttcatttggttttttttcaccttgtgtacagtactaccttctagctatagtgaggtttgctgctgtatgttgcacctcaaatatgtatgtaatgtctatataagttgttaattttaaataatctttttttggttgttt

SEQ ID NO: 113913 - DNA, 724 bp, Glycine max
  Clone ID: PAT_MRT3847_73873C.1
agcagaccgaaacccagctgcgaatgacggttgcttcaggggacccaaccactaacatttgagctgaaggagttcatcaaggaccaattagtcagcattcccaccgcagcaacccatgtaccaacacaaccagctccaacatttccaccagtggcccaaccaggcagtgctcccacagcattgacggatcctggggcaatgctggctgctcttttatgacaatgtagaggtgttcattaattattacacatttgtaaacctgattatctatacagcctaacccatgttcctctcaagctagcgagggtgaggtggatagacaaaatcatgatgcaagggctggcggaattatgagtgagcagctgagtgtttgagcagggatttctgggttggtgggcatttttgagattctttctgcacaaagtgattgtcctttaaacgagattttatacattagttgggcgagggttttcagttttctcatatttttccccttcccagtttcactttactgaattgtttgtggtgcacctgatagcatgtaagatatttgcctttgatagaaacaattgtaagtttgaaattgttattttgacattatatacaataatagcttgtggagtaaggacatacgcatttttgctatcaaatgctttctagggttcaaacttcaaagtcaagttattgactttattgtctatgaaaaaagtttagttaatgtcta

SEQ ID NO: 113914 - DNA, 1591 bp, Glycine max
  Clone ID: PAT_MRT3847_73874C.1
ccacgcgtccgctgaaagatttcatgctttgtgcgtgaaggatagtggtgttctatatgaggatccttatattcagattggcattaaagcagaatggagagctcatcaagggcatcttgttcttttcttgggaaacaagaatacttctcctcttgtctctgttcaagctttaatattgcctcccacgcatttgaagatggagctctctctagtaccagaaactatacctccccgggcacaagtgcaatgcccacttgaggtcattaatctccacccaagcagggatgttgccgttcttgacttctcctacaagtttggtaacgatatggtcaatgtcaagcttcgcctacctgctgtcctaaataaatttcttcagcctataactatatctgctgaagagtttttccctcaatggagatcacttcctggaccacctttgaaacttcaagaagtggtcagaggtgttagaccccttccactgctcgaaatggcaaacttattcaatagttaccatttgacagtttgcccagggcttgatcccaatcctaacaatcttgttgtgagtacaacattttattcagaaagtacaagggcaatgctttgtttagtaagaattgaaacagatccagcagacagaacccagctgcgaatgacggttgcttcaggggacccaacactaacatttgagatgaaggagttcatcaaggaccaattagtcagcattcccgccatagcaacccgtgtaccaacacaaccagctccgacatctccaccactggcccaaccaggcagtgctcctgcagcattgacggatcctggggcaatgctggctgctcttttatgacaatatagaggtgttcattaattattacacatttgtaaacctgatctacacagcctaacccatgtctccctcaaagctagtgaggtgaatagacaaaatcatgatgcaagggctggcggaattaagagtgagcttgtttaccagctgagtgtttgagcagggatttctgggttggtgggcatttttgagattctttctgcacaaagtgattgtcctttaagcaagattttatatcagttgggcgagggttttcagttttctcatatttttccccttcccagtttcactggattgtttgtggtgcacctgatagcatgtaagatattgcctttgatagaaacaattgtaagtttgaaattgatactttgacgttacatacaataatagcttgtggagtaaggacatacgcatttttgctatcaaatgctatctagggttcaaacttcaaagtcaagttattgacttattatctatgaaaaaagttaagttattgtatatggatatgattaaattggactagaatacttggttattaaatatgtataagacgggtgcgacatgtggagcttgctaaagcaaatttattgaaacttctgtatgccacaaaattaaaaacaagacatttgcgaatgtttaattatatatttttataatctcaattctttcaattaagtcaaatttctttcaccaaaaatcttaattttacttttatttaaatagttaacaattgagaagtaaataagtttt

SEQ ID NO: 113915 - DNA, 385 bp, Glycine max
  Clone ID: PAT_MRT3847_73875C.1
ggtttttatatttttttattttttgtctctttttttacttgatgtggtctactttgtttggcaaaaaaagaaaacttcttgatatacgttattaggggtcttgaacggatcaatgtgataaacgggcctagcccatatgtgcgttccccccttgtaaaagggggggggattcgatttctccgcccacgttaaaatataaactggggaagggccccccaaataaggccttttaagtttgacccccctttgggaaaaagggtgcaaacttggggggtttgaaaaaacaaccccccggggggcctatttcacagtttcggatccccccctggacaaattggactccttctattggggccctaaaatgtactccaatggccatggtttt

SEQ ID NO: 113916 - DNA, 316 bp, Glycine max
  Clone ID: PAT_MRT3847_73876C.1
aaaatggaagcaaattttattttttctaaattgtaaacaactactgagcaatccatggaacgggagaaaaattaaccaactcacacatcttagacaccacaaataccaacagttgaaaggaattctttgaacatgcgttctataaacccttacattaaaagtttacatattaccaccgtgtatataaaattccattacactagctgatttcttgaacatactaaattcactaagaaagctaaggacaataacatatagagctgtctatgttcaaaagctaggatagacattccatatgcgcaaggtgctcaaccac

SEQ ID NO: 113917 - DNA, 525 bp, Glycine max
  unsure (1)..(525): unsure at all n locations
  Clone ID: PAT_MRT3847_73877C.1
gaattcgggactcgctttgcattgatggccaaggaagaacgttgtggtggaacagcgagttggtggccggtggcatctaagtttggtcacgaccacagattctgacttttgagggtgcatttggcaattaggcgtggagaagatggtgactgtacgaacttgcaaattgaaatggttttgttttgttataaagatttgcggcttaatgctaatggtagtgccagtgagtcgatctgggacctgcaaaaggagacgacgaggaatttgaagccaaagcaaagtttgatacgcagctttccaatctatctcagatctaacaggataagtatgatgaccagttcagtttatattattttgaactcactacatatatagatgcaatgtgtgttcggttttggtttgatgataagttcttatacattgaagtgtaatacgctatccttttcatttggtgcaagtagggtaaaattgcgttaagttacattctacaatacatgcaaacagcttanngnntgnnagtnnntt

SEQ ID NO: 113918 - DNA, 496 bp, Glycine max
  Clone ID: PAT_MRT3847_73878C.1
ggccgccctttttttttttttttttttttttttttttttttttttttttctataacaccaaggaagggataaattcaagggaactagcaagactattggtttataaatttcacaaacttcgtttttgcacctcaatgaagccaaggttctttacatgggtgtttctcacccatataaagaaggggggaaaaaaaagattaaaagagaaaggggcaaaacagaattgggggaaaaaaaatactatctggctatctggtcccatcgttttttcctaaaatggcccattaaggggagcaacactctctttttgtattcccagatgcatccccaacattgatggggggaccttgaccaggaagtgtggtaccaacagctgtttcctgagccgcaagggcctttttgctaacaatatgataaatctctgacaaagggtgtggaaagccttctcaagggtggttgctttcagggcagatgtatcaagaaacgagagaccttt

SEQ ID NO: 113919 - DNA, 369 bp, Glycine max
  Clone ID: PAT_MRT3847_73879C.1
cgagctccatactcactggccgcccttcgcccttttttttcttggattttcacgttccaagttctcaatctgaattttggaggggacagggatatttacaaattgctccatcaaccgcttcccagagctggtactgaaagcaataatctccgctagcttattgacttgttcaaccacattatcctcctgttcaaaccctgttatcccacccagtgacaattttgtggtacttatcaaaacaccaacttgcgtagatttactaacaggtctgctagctggggttaactccttcttcaattcactcgttgatcttttatgcgtgccatcaaaaaacagaagtgttgtcactcgcaaagaacgggccctgac

SEQ ID NO: 113920 - DNA, 882 bp, Glycine max
  Clone ID: PAT_MRT3847_7387C.1
tggaatcaaaggactgggggttgctttcgcttctgcattctcgatcgccaaggaatcttctgccttccatcgtaacaagaaaatggtgagaaggaagataccgatcaagaagatcgacgacgtaactgcgaggcaggtgacattctcaaagaggaagagtggtcttttcaagaaggcacgtgagctctctcttctctgtgatgctgagatagcactcatagtcttttcacctggtggcaagctcttcgactatggtagttcaagtatgcagaaggtaattgaaaggcatattttacggtcagagcttaaccttgaaaaattagaccagtcgtgtcctacggagcaggtgagatgtaattatgctgatttgaacaaggaatttgcagacaggactcgtgaaatgagacaactgaatggagaagaactgcaaggattgaccctaagggaacttcagaaattagaagaacgacttgactcatccttgaaccgtgtttataaagcgaaggttgaaaattttataaaagagatcggtattcttaaggaaaagggaaaaaaactcatggaagataacatgctgataaaacagatgataaaattaccgaggaatgaaatatgttcggtccagagacatgagcatgaacaaggccagctctttgacacctccctcacgttggggctaccttttcctgctggctcaaagtagagtttctgagcaatgaggggaccatgatgctgcgttttaattagtgtgaaaactgaaaaggaagagtgaatcaccaaggataaaatggttcacgtatgttcaagtataatagattctagtaattcatgtttgttattagtgggaccgtaatggatatggtttagctatgatattatttc

SEQ ID NO: 113921 - DNA, 442 bp, Glycine max
  Clone ID: PAT_MRT3847_73880C.1
gtctgccctttttttttttttttttttttttttttttttttttttttttttataacatcaaggaagagataaattcaaaggaactagcaagactattgttttataaatttcacagacttcgtttttgcaactcaatgaaggaaatgtactctacatgggtctttttcacccatataaagaaagggggaaaaaaaagatgaaaagagaagggggcaaaacagaattgggggaaaaaaaatactatttggctatttgctaccatcggtttttcctaaaatgtcgcattaaggggagcagcagcctttctttgtattcccagatgcatccccaacattgatgggggtaccttgaccaggaagtgtggtaccaacagctgtttcctgagccgcaagtgcctttttgctaacaatatgataaatcttctgcaaaatggtttggaatg

SEQ ID NO: 113922 - DNA, 395 bp, Glycine max
  Clone ID: PAT_MRT3847_73881C.1
tttttcgttgtgtttgggtctaaccctgtagggtaaatgaaatctacctctaaaaacaaactcaattctacctcaaagctgtgcaccccattaatatccttcttctgtcattatataaggcgacatgcacgacctattttctgttcaaaactggctgccccgtggtacaatacgactactatgtcacaaaagcccttattcagatttttgctgggatggtatatgtgcctataaaaccaattccaactatatcttaaaacttctataccccaagttccatgtttcttacctgaagcccttggattttaatgcaacagccatgacccattaatgattggcactacacaagttgtgatcattgcatagccagtggcacacatgaacggtaatttgga

SEQ ID NO: 113923 - DNA, 847 bp, Glycine max
  Clone ID: PAT_MRT3847_73882C.1
aattcggctcgagctcgagccgaatcggctcgagggctgcgagaagacgacagaaggggatcaccagaaattgtaagaagatggtagaacgttgtacgagtccgattgtgttgctctgtctcttctcattttctgcacttactctagctttttcgccatgccccctcactgggttaccgctggtgagaaatatcagtgagattcctcaggataactacggtagggctggtctctctcacatgactgttgtaggtccattgttgcatggaatgaaagaggttgaagtatggcttcaaacattttcaccaggaacacacaccccaattcatagacattcctgtgaagaagttttcattgttctcaaagggagtggcactctttatcttgcatcagattcacatggaagataccctggaaagccacaggagcacttcatctttccaaatagcacatttcatattcctgttaatgatgctcatcagctttggaacaccaatgagcacgaggacttacaggtgcttgtcataatatctcgtcctccagttaaagtgtttgtatacgaggactggtccgtgcctcacactgcagcgaaagtgaaattcccctactactgggatgagcaatgttatcaagaacctccaaaagatgaattatgatttatagtcatggtttacacattttattactgagattttctatcactgtaaagtattttcttaactgaaagtcaaagctatcaagacagtgccgattaaaaaaaaaaagaagctatcaagacagatttatattgattagtcttatatcactgcttcattcataaagacttgaatgtgtttaccttctgtag

SEQ ID NO: 113924 - DNA, 233 bp, Glycine max
  Clone ID: PAT_MRT3847_73883C.1
gagcgagtgtagggagagttactccaggctacggattttaccgagctttaccaggcgtactagctatgtcactggtacccacttctcctaatcgacactgtgccctgctgtcctgagccaccctcttcccctgtcaccgccgtgttcacgaccgacacagctgcatgcacaaacttccaaggtctaactcttcacgttcatccatataggagttgccatagaatgagctactg

SEQ ID NO: 113925 - DNA, 175 bp, Glycine max
  Clone ID: PAT_MRT3847_73884C.1
tccattcgaccgagggaaagcacatacctgaatctaatataagcgcaggggaaaaccatgaagaccaaacaccccaaatggcacaggaggaaaccctgccctctagcgcaagagacaacagaaccgcaacggcgagcaaaaacagcaagcaccaagcaaccgcaacgcaagacgc

SEQ ID NO: 113926 - DNA, 694 bp, Glycine max
  Clone ID: PAT_MRT3847_73885C.1
aagaaaaagaggcgcaagatgagtggtagggtttctgggaaggtgaagtggttcaatgatcagaaggggtttggattcataagccctgacgatggcagcgacgatctcttcgttcaccaatctcagatcaaatctgacggtttccgaagcctcgccgaaggagagtccgttgagttcgccattgaatctgaatctgacggacgcgcgaaggctgttgatgtcactggccccgacggcgccagcgtccagggaaccagacgaggcggtgatggtggccgaagctatggcgggggacgaggaggtggtggaggtggctacggtggaggcggtggctacggtggtggtggtggctacggtggaggcggtggttacggtggtggtggaagaggcggcggcggaggaagctgctacagctgtggagagtctgggcattttgccagagattgcccatcaagtgctcgttgaatttactgttagggttgtttatgttttgcggattgttttaagtttttactttaatatgtcttagggattttaatggtttctgtccaaactatgggttcttatgagtagatgtgtgggatttttcttttttggttatttaaatgaagggtttctgtgttatcgttacaatctgcaaactaaaatctgtttgaacttacattttgctataatgaatcgtatgattgctatc

SEQ ID NO: 113927 - DNA, 327 bp, Glycine max
  Clone ID: PAT_MRT3847_73886C.1
atggctaaaattgtagatgctgctgcgccattgtctattcatgtacatcccgacgattcttatgcatatgaacacgaagaaggtcaatatggaaaatctgaatgttggtacatcattgaagctgatgaaggtgcaaagattactataggtacgtatgcgaaatctcgtgatgaatttgaagagcaattggagcaagatggacaaggtaaacttattgtagatggtgatatatatgaaatatctaaaggttcaaactttgtgttaacttccgaagatttagatagtgttttcgaaggagattttaaactaatcattagttacatttaa

SEQ ID NO: 113928 - DNA, 250 bp, Glycine max
  Clone ID: PAT_MRT3847_73887C.1
cgacggtggcgggaggtacgttggtggtggaggctgcggcgtcggcggatgaagctgctacagctgtggagagtctgggcattttgccagagattgcccatcaagtgctcgttgaatttactgttagggttgtttatgttttgcggattgttttaagtttttactttaatatgtcttagggattttaatggtttctgtccaaactatgggttcttatgagtagatgtgtggatttatccttgtttgtctc

SEQ ID NO: 113929 - DNA, 434 bp, Glycine max
  Clone ID: PAT_MRT3847_73888C.1
gtaagcaagcataaccatatcggcgcctgatctattcgctcgagtcctgcatcaagatggagtgtcacatgcagcactcactggctgacatacttataggtcagactgcatccagaggtcttgtgacctagatcagagtgactcggttggaggatcagaacgggtacattatgagggacgtgaaaggacctgatatagaaggagacatgatgaccctactctagtctgaaacggaaccaagaagagagcgctagacggtctctgtaccttggcttgactgcaacattaaacaatgtcaatatttaacattagatatttattggaattagtctgtgctagacgcgttatagtaacatatataattgatctggatctactgtcattcgacttacagactgaatgctgtatgttgaaacatcaagattgaggtatgc

SEQ ID NO: 113930 - DNA, 921 bp, Glycine max
  Clone ID: PAT_MRT3847_73889C.1
cctcgtgccgaattcggctcgaggagaacaagaaaaagaggcgcaagatgagtggtagggtttctgggaaggtgaagtggttcaatgatcagaaggggtttggattcataagccctgacgatggcagcgacgatctcttcgttcaccaatctcagatcaaatctgacggtttccgaagcctcgccgaaggagagtccgttgagttcgccattgaatctgaatctgacggacgcgcgaaggctgttgatgtcactggccccgacggcgccagcgtccagggaaccagacgaggcggtgatggtggccgaagctatggcgggggacgaggaggtggtggaggtggctacggtggaggcggtggctacggtggtggtggtggctacggtggaggcggtggttacggtggtggtggaagaggcggtggaggcggtgcttgctacaactgtggtgaatcgggacatctggctagggattgcagtggaggcggtggtggggacaggtacggaggaggtggtggtggtggcagatatggaggccggcggtggcgggaggtacggtggtggtggaggcggcggcggcggcggcggaggaagctgctacagctgtggagagtctgggcattttgccagagattgcccatcaagtgctcgttgaatttactgttagggttgtttatgttttgcggattgttttaagttttcactttaatatgtcttagggattttaatggtttctgtccaaactatgggttcttatgagtagatgtgtgggatttttcttttttggttatttaaatgaagggtttctgtgttatcgttacaatctgcaaactaaaatctgtttgaacttacattttgctataatgaatcgtatgattgttatcaattattgttgtgatttgctatgaagattgaattgtat

SEQ ID NO: 113931 - DNA, 664 bp, Glycine max
  Clone ID: PAT_MRT3847_7388C.1
gtactaactcggaatcggtcgagtatctatccgaggtcgtcggatctagaacctcggatcacctccatataattcacaaactgacacaggagatgaatgatcccaaactataagctaataatgttagaaggttgatggctactgaggtatttatacggttttctctgagaaaaaattcaatgttttgctactgtacggttaattagataattaagaaggatataggtgttcacctattctatagctggaggcagtctttactcgtgtgtataaattggtactgcataagaatttacagttacaccactcaataattctttaaagaacttgttttttggggtaacccatttattgcttctttctgcattcaaaattttgaggaaaagttactacacgatttaattgttggcattttcttttatttgaaaagtatattgtaaattaatttttgtaatgtttcattggagtaaaaaatatattgtattaatttttttagcatgatatgcatgtggcaaactatcaattcaactgtggattttaaatattttttggagaaaattttagaatattaggacttggtgttttaggagtcttgtgatgttaatttgatcgtgattttagtgggcttgtactaagttgtcccatacacttgtgcttggattgg

SEQ ID NO: 113932 - DNA, 979 bp, Glycine max
  unsure (1)..(979): unsure at all n locations
  Clone ID: PAT_MRT3847_73890C.1
cccacgcgtccgaagggtttgtaagagaaagaaaaaagaggcgcaagatgagtggtagggtttctgggaaggtgaagtggttcaacgatcagaaggggtttggattcataacccctgacgatggcagcgaggaactcttcgttcaccaatctcagatcaaatctgacggtttccgaagcctagctgaaggagagtccgttgagttcgctattgaatctgaatctgacggacgcgccaaggctgttgatgtcactggccccgacggcgccagcgtccagggaaccagacgcggcggtgatggtggccgaagctatggcgggggacgaggaggtggtggaggtggatatggcggtggcggcggctacggtggtggcggtggatatggtggaggcggtggctacggtggtggtgggcgaggcggtggtggcggggcttgctacaactgcggtgaatcgggacatctggctagggactgcagccaaggaggcggtggagacaggtacggcggaggcggtggtggtggtggcaggtatggaggcggcggtggcgggaggtacggtggtggtggaggaggtggtggcggcggaggaagctgctacagctgtggagagtctgggcatttcgccagagattgcccatcaagtgctcgttgaaattactgttatggtggtttatgttatgcggattgttttaagtttttactttaacatgttgtagggattttaatggtttctgtcaaagctgtggcttcttataagtagatgcgtgagatttttcttttttttggttatttaaatgaaagtttctgtgttatcgttacaatctgcaaacaaaatctgtttggacctacattttgctataatgaattggatgattgttatcaaaaaaaaaaaaaaaaaaaaaaaaaaaaaaaaaaaaaaaaaaaaaaaaaaaaaaaaaaaaaaaaaaaaaaaaaaaaaaaaaannnnnnnaanaaaaa

SEQ ID NO: 113933 - DNA, 297 bp, Glycine max
  Clone ID: PAT_MRT3847_73891C.1
cccattcgtccgaattaatgcactggcactcattagtttctatcctcaatatgtttaatgtgaattgtgagtttactagaatgatgtgtttctctcctatcgtttttggaaagtatgtgctagacatttggagtgaaagaataacggatcaaaatctcagacttagctaagaattcgaattagtgatccacctacaatgtcattgtgactatttgtaaggttctaaactgtcaaataatatgtatattggtgtttgagcaaaaaaaacacaaatgaaggaaccaatctggcgaaggg

SEQ ID NO: 113934 - DNA, 481 bp, Glycine max
  unsure (1)..(481): unsure at all n locations
  Clone ID: PAT_MRT3847_73892C.1
tactcggtctcggaattctccgggtgcgactccacgtcgtctcgtcccacgtcgtctcgtcagtaaagtaaaagtaccattcaaagtgttcactttcagctcttatctcgtgtttgagggnntttcggttttgtgactccaacgtctttgatctgtatcgaaatctcttaanngtttcggatcccaggtctgagcnnaatctgnngttggtagaatctctttggnntcttagagtagtcaagttttactgtctgaattagtacgatcanaattcctatctgccttcgatcctttttgcntgatgcataatgtctgatgacttcgggtgtctgggtcaaaaggaagtatgtgcatattcgcgtaccagcagcgaaatggaaaggaaatagcctgacatactcgttcagggattgaaaaaagtaattcagctataacatagatacttaaaagatgttaagaaagagttctgttgcaatggaac

SEQ ID NO: 113935 - DNA, 255 bp, Glycine max
  Clone ID: PAT_MRT3847_73893C.1
gaaactaaagaagatggtaacgaaaaacaaaagggaaaagagaaaaggaggtttatttgtttttccacttcattcgagggtcacaggagcaccatattcctatgtttggatgtccatggcacaagaacatgggtggcgtgttttgcttgatgtgtgtgggctcaaacctaaggaaatgggcaccttgggtatgtcactttttaagcctgatttcatggtttgctcgttctacaaggtttttggagaaaacccttc

SEQ ID NO: 113936 - DNA, 401 bp, Glycine max
  Clone ID: PAT_MRT3847_73894C.1
gcaatgttacggggtcaactacaattagaatgagtcatccttcagtctcattccgattggcactattcctctcattttctcttacggcatcatcgtccttgcctcccttaccggttttttcgaagcgttacgctccatcatcttcacttatccccaaagccactccctctgacttattgtctctgttgggttccaaacctcagtcctcagccgtgaatcccgaggtagcgcgcgacctcaagtcatgcttcaaattcctcgtccctttctctcccgtgcatcctcgtcaccggaagttgggcttgggccggcccaaactcacaagcccaactcggagagacaagaacaagcttatttggtggccgccggagcccgttttggagctagcccgtctcgccgtc

SEQ ID NO: 113937 - DNA, 431 bp, Glycine max
  Clone ID: PAT_MRT3847_73895C.1
atggtgtgtcgatcacatgaaccccttacccgaatccccctcacaattacttcgacattgtgcttaacactaacttatccctatgtgggtcctataactatgtaaagtcctaacgaccgataagttctccaattcctgctttgtctacatttatcacaaaacacttcctttattcttgctgtaggacttcttgcttttcaaccctggttcatatccaattgattgctttttcgttcatgactctctggcttccattatcatcatcgaactgctctttaacttcttcaaaaaaaatcttgggggtgtggatctcaacagctgggtccctctgttctccccctggatatttgcccttccttttcaaagctctctcctcctgtgtgccctcgcctttgggctctctcttcggctttaaacttcctttgctttta

SEQ ID NO: 113938 - DNA, 101 bp, Glycine max
  Clone ID: PAT_MRT3847_73896C.1
ccgaaactaaagactgtgcggttgcacggtaataaacgttggattaagtgtgtcatcagctccgagccggtccaatgttctgtatgaatgtctggacacca

SEQ ID NO: 113939 - DNA, 282 bp, Glycine max
  Clone ID: PAT_MRT3847_73897C.1
ggctcgaggagatggctttgcacacactcggtggaattcatattcgtattaacactggtggagaggccgtgggaaagctctttggtgatgatgatgagcgtgacactgcaagcgacaacgattacattggtggaggtgttggcatgtacgctgccatgaccacttgaagctttggagctgatgcactgctcggtgacctcattgacagtctaacccgttgtgagatgcagctgtagagcctgcgccaacagctcggtcgacgtctgcgccatgggcactacc

SEQ ID NO: 113940 - DNA, 235 bp, Glycine max
  Clone ID: PAT_MRT3847_73898C.1
ctctttcacattttaatcacagacagacaagaatgattgcttctgggtgtgggaaattttagcacccatctaataataatccccaaaatcatcgcatcgaaggcatcagcttctaaggacgatactttagcatctgggatcgctcaagaggggtttagtgaggtaaaaagggtatcagctgacgtcatggccaaactgtacgtcaaggctgtgtcacaggtggatctgaacaagg

SEQ ID NO: 113941 - DNA, 262 bp, Glycine max
  Clone ID: PAT_MRT3847_73899C.1
gttcatattggtggctaaacataagtttaatatcgtagagtggcaagtctgcagcagtctatgcttgtgctgaagagcaaaggtttgagattttagagcttaatgcatcagattgtagaaatggaactgctgtcaggaattattttggagatactcttggttcacttgggtttaaaagggcatcagaaatcacttcaagttcacagaagaaaactacaaagttgtccccggcttcggctttgcaaagtggtaaagctgctga

SEQ ID NO: 113942 - DNA, 186 bp, Glycine max
  Clone ID: PAT_MRT3847_7389C.1
ccagctcactaggctactgccgccctttcctcctttttttaaaactaaattgctagagacgcataagaaaaggaaaagaaatgcattaatgtacacatatacagtattgacacacgaggggatttgcctccaaaaaggtcttccaaatgggaggcaaagacgatgatcattaacttacactaccca

SEQ ID NO: 113943 - DNA, 1596 bp, Glycine max
  Clone ID: PAT_MRT3847_738C.1
cggctaccctcatttcttatccattgccagggtcaatttcgacctcacgtatccctcgtttcaaaaaaagggccgttattgttgttaccatccaaaaaatggccggtcttgttgtttcttcccaatgctttctcaaactcttgcttgtagtttcagtctttcatgtttcctttgctgctaggaggttgaatgagctggttcaggaccagtctcagttgctacatcccacgcgtccgcccacgcgatcgcaaaaattacaacaccaatctcacccatttcaaaaaaaggccgttagtgttactattcgtaaaatggccactcttgttctttaccaattctttctcaaactcttgctcctaatttcagtctttcagctttcctttgctgctaggagactcaaccagctggttcaggaccagtcacagttactccattaccacaacggtcctcttctatacggcaaaatcgccgtgaacctaatctggtatggtcacttcaaaccatcccaaaaggccatcatcaccgatttcgttacctcactgtcatccccatcgtctcagagcagccagccatctgttgccacgtggtggaaaaccacggagaagtactaccacctgagtcccaagaacaagaaggctgcttcttctctttctctatcactgggcgatcagtttctcgacgagggtttctcgctggggaagtcactaaccagcaagaacctcgtcgagctggcatccaaagggggacagaggaacgccatcaacgttgttctgacatccgctgacgtggcagtcgaaggtttctgtatgagccgatgtgggacccacggctcctcctcttctgcatctcacgtgaagaagaacaacaacggcaagaactacaagttcgcttacatctgggtcggaaactccgaaacccaatgcccggggcaatgcgcttggccattccaccaacccatttatgggccccagagcccacccttggttgctcccaacaacgatgtgggacttgacggaatggtcataaacctcgctagcctccttgccggaaccgccaccaacccattcggaaacggttacttccagggtcccgcggaggctccgctcgaagctgcgtcggcttgccctggggtttatgggaaaggggcttaccctggttatgctgggaacttgctggttgactctgccactggtgctagctacaatgtggagggggataatgggaggaagtaccttgttcctgctctgtatgatccttctacatcgtcttgctcaacgcccgtctgagaaggaggattattatggtgatgccgatcgttcagttctcactgctgctgctagcctgctactacgatgatgttagaaaccacggattagggagtgtacaaaacttctaataacccattttgtaggattatttcattgatttgtttgtttatatcatctggatatgtacgcggattaaggatcttatgtaagtagaagcaactgttcttccgtttgcttttaaataatattgaaatattactcttcgctaaaaaaaaaaaaaaaaaagaaaaaaaaagcaaaaaaaaaagggggggcccccccttttttt

SEQ ID NO: 113944 - DNA, 279 bp, Glycine max
  Clone ID: PAT_MRT3847_73900C.1
aaggaagaatgtgcattgtaagcagcgtcatttctgcttatcctattcgagcttccactccaattgttacctctccactttccattcctcgcaatgttatcaacgctcatcaagccattgccaacccctttgtgccagaggttgtaaagcagtggatgccttgcattcagagttccgggctgtggataatttggttgcgtgcaataccacccgtgtccttaaagctttccagaatgctcgagttggatctcatcactttggtggttccactggtatggt

SEQ ID NO: 113945 - DNA, 1782 bp, Glycine max
  Clone ID: PAT_MRT3847_73901C.1
cacatggtttaaccctaccccaaaaacaacaaacaaatagttacatcaatttggattgtgaaatgttacgtacccagttgtttgtgtaaaacaagtgaggaaagagaccctagtttgccagttcaactaaggtgttttcttttttcttttttttaattttccccacaaaaccatatagccatcggtcgtagatcccacgaaccccatcatcacaccactctctgcagttttcgcaaccaaaccttcttttttgtttttattcctctgcttattggattcaacgaagttgttgtgattaaggagaacataactttttgaatcacacagagagagagagagaagagacccagtactttctgcatccaaaccaatcactactgcggataactggtaagttcataaaggggagattcttcagtgatcatctatctgatttggtccagctaaggaatcattcagaggccaagttgattaagtactagagagatcatattttggagtagtaaaagttaatcataagcatgggatctttcaagggtcatgctttgccagggactttgtttcttctagttggggtgtggcacgtatggggctctgtggtgagatatgttcgcaatccaatggcgtttcaagtcagagtttggaatcctgtgccagggtttgatgggaggctgaagcacctggagctatatgttattgcaattggtgctttcgttgacatgtgcatcgagcttttgtattcaccacacctcaagatttttgttggtggagtccttaaccccgctcacatgaatgactttgagcactctggaatgcttcttatgtttttcatctttggtgttgttgccctactttcccaaaagaccagatttcttcccttgccagaaggtgctctttgtttgcttgctgcctcagcattcactgcagagtaccttcttttctacttccattcaacaacacacaagggccttgagggctattaccacaccctccttgtcttcgtggttggactgtgcattttatcttcaattgctggtgcccttttgccaacaagctttccagtggatttatgcaatggcattgctagcactgcaaggcttatggttctatcagactgcgtttgttctctatggccctatgatgccaagtggttgtaagcttagggaaaacagtgtcatgtgtcattctattgatagcgaggttcggggcgaattgcttgctaacattcagctctttgttgctgtccttgtggtccttgtgggaactgtggcatcatatggctttgctgcttcaagatatgggaattctgaagttcatgaacttgcatgcaattcaggctgaattagatcaagactaaagtagtgttgctattttttgtggtggtagttgaaatgtgttggcagcatagagtttcttatagaacatgtttgttgtatattgaagtgcaaaggatcatgcatgtatgatcactgaaaattgaaaattaacaccccctcctccctcaaaaggaattatacatttttgacttttaggaatcggatgtcaaaggagcaacaaattattttccttggtgtatgattacaaaatgtggcaggggagttcacttggatcatattttcattggttatcactctttctttgtaatgatgcattcactaaacactcatattgcaaattaccaggaccattatttcagacaacataaaaaaaaaaaaaaaaaaaaaaaaaaaatataaaatataaataaaaatttatataatataaataaaaactttttaaaat

SEQ ID NO: 113946 - DNA, 285 bp, Glycine max
  Clone ID: PAT_MRT3847_73902C.1
ttccgaatacctggatggagtaaatgggtgatcatgaagggctgtggcttaagttggtgagagagcctacatcatagtttgtggtagtggggacttgcgtatgagcagcccccttcaatggtagttcaaattaggttccttctttgaactttgtgaagtcatgttttgtgtatttatcttatttatcttatttgcctgttacaagtatgttcttgttgttatcggtcttcgtaaactgtcttattttaatattgttacataagtttcaatcataaatagtgttcc

SEQ ID NO: 113947 - DNA, 369 bp, Glycine max
  Clone ID: PAT_MRT3847_73903C.1
ccagcgggaataggacaactttccaatttgtaaaaaacaaaagtccggaaactgggtccttaaatttaaaccaagaaggagaaaagcgaatcctagggggataatggagtagtgtttttaccaaaagtagctgaccggaacgtggtccaaccataaatgaaacttgtgttcccaaaaattatagggggatccatgccttgtccaaccatcatgagggtccactttttttttttgatctcaacgttctcatagtaaacccctgtttttatatgttttacatacctttgcatgctggaattaggcgcagccagacccgtgttcatcaccttgggggggtttcccgccccgatgggcgccaccacagggtaa

SEQ ID NO: 113948 - DNA, 256 bp, Glycine max
  Clone ID: PAT_MRT3847_73904C.1
agatgaacaaattctctctcaccctcctcgtcgaccaagccatggaaagcgtgaacatgacgaggacgatgacgaagatgaagataaacctcgtcctagtcgaccaattctaggtaagcgtgaacaagaccaggaccaggacgatgacgaagatgaagatgaagatcaacctcgtaagagccgtgactggagatcgaattagacacaacccataagacctagacaagatgcactacgtgaaagaggatgcgagaca

SEQ ID NO: 113949 - DNA, 329 bp, Glycine max
  Clone ID: PAT_MRT3847_73905C.1
tcgcccacgcgttcgggcgaatcagcacttcgtcatcgattccaatacggggccggtttcctttggcatcaagcgcaacgcataacaatcggcaggggcaccattttcctttgggttccaagaattaatggggacttgtgcggtggttggaggaatcaagaaacgcaccggttcggtccccggattccgggggcattccatatatcgacacgggagcacgctagtgggtgggggacacgaagggggttttatcaaacccccttctctctcaggcttggctgatggcacgtgtcttcccgatcctgactcttacgtttctgtgctcttgg

SEQ ID NO: 113950 - DNA, 631 bp, Glycine max
  Clone ID: PAT_MRT3847_73906C.1
gggaaaaaaaaaaacaaacccccgttaacaggagggggggggggtttaaaaaaaaaaaaaaggtacccccccccccctggtggcccagggttgcccaaccccccgaattactaaaatgggtttgagggaccccttggaaaaacaaaaagcaaaatcccaaaccattttttttcggggaagaggcgaaccccaattctctttaacaaaaaaattgggggggccccaaaaaaaaccgattcccccccccccttaaaaggaacaaaccttggggccccaaacaaggaggctctttgaggccccataaaaaagcttggagatacccttggagggccccaaagagccccttaagggggcctgggctttaaccaaaaggggttccggagcctttttaaaattttccttttttccaccccaaccccaaagggggccctgttaaaacgcccctccaaaggaaaaaaaagggggcccggggttttttccattgccccgggaaaagggccttgggggtaaagggggcctcctttcttattttgcccccccaaaaaaaaaaaaccttttgccggaaaccttggccccgggcccgggttttttttaaagggggcttaaaaagagggggccccccaaccccccc

SEQ ID NO: 113951 - DNA, 413 bp, Glycine max
  Clone ID: PAT_MRT3847_73907C.1
gcagtatgcatccatctgcatttgcacaattggagcaggcgttgaagatcacatttaatttgagcaggcattgaagatgggggtgctatgtgcaggctcgggttttgtgttcatacattgatacttcttatagggtcatggttttcctcccgttataatcatttgtctatgcctgttggcagcgtgaaactctgtaaataggatgctgctcctttattataatatataaaggggcagtattgagtctataatgttcatcatttactctactgagaatgacaggaaatgggagaaaggtttatagaatgctttttggctcacattgtgtacattagcttatattcccagtatttcataacttgttcattctacttctggtttgtgcgaaaaataaatttttattatttttgaca

SEQ ID NO: 113952 - DNA, 755 bp, Glycine max
  Clone ID: PAT_MRT3847_73908C.1
gtgtttgcactagtgtaattctgggcagaaatgatgacttgtccgaggaagagtccagtggtgacatgagctccagcacgtctcctgatgagggcaccattcctagtaaagaattcagaaaaagacagatcaaattttcagaccgtatcaatcagctgtctcttgaggacagtgtgagaaaatctacaaaaatgtgcttctattcatggagaatcatttgatgctgcaatgagcagtatgcatccatctgcatttgcacaattggagcaggcgttgaagatcacatttaatttgagcaggcgttgaggatggtggtgctatgtgcaggctcagtttttgtgttcatacattgatacttcttatagggatgatattgaagttttattacttggactggtggtttatgactcacttgtttaaaattgtttccaggtcatggttttcctcccattataatcatttgtctatgcctgttggcagcgcgaaactctgtacataggatgctgttcctttattatcatatataaaggggcagtattgagtccataatgttcatcatttactctactgagaatgacaggaaatgtgagaaatgtttatagatgctattttgggcacattgggatgtgtagtgcaaattttaccaaaagttctttgaatgcaggtttcacccttgggaatacacatactttttcgtacattcctcaaactacgttgtactgcgttaaatcaaatgataagttgattctaatgat

SEQ ID NO: 113953 - DNA, 391 bp, Glycine max
  Clone ID: PAT_MRT3847_73909C.1
ttcaggcgattttacggtcgatttgaattacgtcgaatcgacctactatactgattaggctcaatttatagggcaaacaaaaccctaactccacatcacaaccatgacgaccaaacaagatgtaaacgctaaacctataaaaaaacccaagaccgataagataaattaccacgaaatacatatgactaacattcagaagaaatagaaataagagaagacactaaagaaattgaaatccaatactcatcaaaaggtaatcattttaatccacacgactaaagacaaaattaaataaatgactctctctttatcatgataatattcatacaataatgagccctctaattacaagttataccatcataacttccactaataattatgcctacaa

SEQ ID NO: 113954 - DNA, 436 bp, Glycine max
  Clone ID: PAT_MRT3847_7390C.1
tcttctctacgaaccctccactttttttagccaatgttacacacttttccttcatatattgtatgaagaggcgcaaactggttgaacacaagcagagctaaaaatgaacccctgctattcatactgcagtgatgccaatcattaagatacgagtcaagtgctatttgttggaactggaacctgacgcaaaacatgtcccaagcagcggctcaaaggtttgggcctccattgagtcctaccccccacaatctcagaaccatcatcaagggagaaacaagtgcttgcactcaaaaaatacagcatgtgccggagtttctacataagcaccagagagatcagagagggcatacatgtcactgttcctgccacacttggtgctgtactcaaatgtcatggcgcacagctcatggctctgcaaggtggctgcggagcactc

SEQ ID NO: 113955 - DNA, 636 bp, Glycine max
  Clone ID: PAT_MRT3847_73910C.1
aaaaaaatctcatggataaattgatgagtcaaagaaacattaaaatttgtatctaaatatccaactctataaagatgcttggtttgaacgggacaagcctttgactaattggatcctctttttgactaaaactaccaattcccagcaaaaaccaaccccaccaccagtcttgcacaaaatactaacaatattcaatgaaactgtgaaagaattactagaacgaataataatttgatgaatgaaagttctaaaactaatttaatactaacaatatccaaggatgaatgatgaatgatgagtgatccaaaacactatgatgatgttgatttttaagaagaatttggtgactctgatttgtaagtacttgtccacggtaactgacacattccaggtgcaattgggtccctttggtatggtgacaagatctgcagcaccaaattgcacaaactgtgatgacccttgtggatgtgcctttaccttccctttcagcaaatagcatgtctcttcagcatcaaacttcaattggtacttccctggagaacaaccccattttggccaatacttgatgttcaattcggctaggcgtgactctggaggattgctttcaatggtgattctaagatttgaactcgagcc

SEQ ID NO: 113956 - DNA, 1754 bp, Glycine max
  unsure (1)..(1754): unsure at all n locations
  Clone ID: PAT_MRT3847_73911C.1
ggctcgagttcaaatcttagaatcaccattgaatgcaatccttctgagtcacgcctagccgaattgaacatcaagtattggccaaaatggggttgttctccagggaagtaccaattgaagtttgatgctgaagagacatgctatttgctgaaagggaaggtcaaggcatatccaaaagggtcatcacagtttgtggagtttggtgctggagatcttgtgaccataccaaagggactcaattgcacttgggatgtgtcagtggccgtggacaagttactacaaattcgagtcaccaaattcttcttaagaatcaacatcatcctagtgttttggatcactcatcattcatgattcattcttggatattgttagtattaaattagttttagaactttcattcatcaaattattattcgttctagggattctttcacagttttattggatattgtagtaatttgtggaagactggtggcggcctgctggttttagcgaagagcctcaacccgatcccatcccgaactcggccgttaaactcttcagcgccaatggtactatggcttaagccctgggagagtaggtcgctgccaggcctgctaaatcctttatcctctccacgctcccaaagtccaagcaaatgtcccgtcaagctcccggcgtcgtcaaaacgcgcctgaggggcgtcgttttcgacatggacggcaccctgaccgtcccggtgatcgattttccggcgatgtacagggcggtgctgggcgacgaggagtacctgaggctcaaagcggaaaacccttccggcatcgacattttgggccacatcgacggctggccacctcacaaacagcgcaaggcattcgacgccattgctgaggtcgagcgtcagggtctcgagcgccttcaaatcatgcctggttgtactgagctttgtgcgatgctcgattctaagaaaataaggaggggtttgatcactcggaacacgaagtcagcagttgatttgttccatgaaaggtttgggattacattttctccagcattaagcagggaatttcgtccttataaacccgatccaggtccactactgcatatttgttctctttgggaagttcaaccaaatgaagttataatgattggagatagccttaaagatgatgtgccttgtggaaggcaagcaggagcctttacatgcttgcttgatcaaacaggagtatatgattctcccgagtatgctgatgttgaatttaaaccagatttcaaggtgacttcccttgatgaagttcactcagttctgaaggaaaattttgatttgtcaccatgatgtcaaggattgttaacgtgaaccattattttgtggtttatgcttgagatatggaggaggcatatatgttaggagtagttttattccttcacgaaacaaaatatcattaaaactttaggttgaaggatttactaggtggcatattaataatgatgctgtaacttgtcttatatgggcatgaatgccatccaaaattactgttctaaaatttgatgtcggtagcaagatacattggattgtgctgtacatgttgcctctctttcttggacttgcgagttctggatgttacttcagttttttggactcgtgggttttggcacgatgttatgtctggttttgtgcatattaagacttcccagacagagttcagttacaagtatatatgtgagggaaacttagccttacaaagtgtaattgtttctccnnnnncannnntcca

SEQ ID NO: 113957 - DNA, 169 bp, Glycine max
  Clone ID: PAT_MRT3847_73912C.1
cacttgtacacatggcctgggaccaaaatctatgcgggaacccccatgctctagctcgtgtttccgacaccacatccacaaaattttcctaacctgtgaatacattggtgcctaagttttgcagggttttgggaaaccggaaggaaaaaggaaccaggcaaatttccta

SEQ ID NO: 113958 - DNA, 797 bp, Glycine max
  Clone ID: PAT_MRT3847_73913C.1
ccacgcgtccgacaagtccaaatccctcacgcaatacataagatacacagaaaacaaaagagtctctttcaagtttgatgttgtgttataattacttttgttgatatgatggcttcagttgtacgagcgacatgaatgagtacttatctctcttctctcgctagctgtttataaccaaagaagagtgccgtttgtgagtagtggaaatgaagaagcagtgttgtgaagagtcagagacaaatgctggatcctgggaatgttggtttgacgatgcatgcatcgttgacatggattacttcgtgaagaccctttcgagcatcaaacagaaaggtgttcgtgcagacttgattggttccatcatcacacattatgcctccatctgacctctctcctctgccgaaaatggtgtcaccactcacttccaaccccgaaagcgacacgaattcatggatgaagaagagtttctttgtggagaccttttgtgagtgttctgcctcctgagaaggagtctgtcccatgcaacttcctccttcgccttctcagaaccgccatcatggttagggttgatgccacttatagagttgagcttgagaaccgcatttcgtggcagctagaccaagcttctctcaaagagctcatgataccctccttcagccacacttgtgggactctcttggatgttgagtttggaccgtgatggtgctgctttgcttaaggtggccaagttggttgattgctacctcgatgaggccgctgtggatgccaatttgaccttgtctgagttcattacacttgct

SEQ ID NO: 113959 - DNA, 1501 bp, Glycine max
  Clone ID: PAT_MRT3847_73914C.1
ggcgacatgaatgagtacttatctctcttctctcgctagctgtttataaccaagacactaactaggtaacatagaattgagaagtaatggaaatgaagaagccgtgttgtgaagagtcagagacaattgttggatcctgggaatgttggttcgacgatgcatgcatcgttgacatggattactttgtgaagaccctttcaagcatcaaacagaaaggtgttcgtgcagacttgattggttccatcatcactcattatgcctccatatggctccctgacctctcttcctctgctgaaaatggtgtcaccactcacttccaatcccccgaaagcgtcacaaattcatggatgaagaagaggttctttgtggaaaccttggtgagtgttctgcctcctgagaaggattctgtcccatgcaacttcctccttcgccttctcagaaccgccaacatggttcgtgttgacgccacttatagaggtgagcttgagaaccggatttcgtggcagctagaccaagcttctctcaaagagctcatgataccctccttcagccacacgtgtgggacactcttggatgttgagctagtcctcaggttggttaagaggtttatgagtttggaccgtgatggtgctgctttggttaaggtggccaagttggttgattgctacctcgctgaggctgctgtggatgccaatttgaccttgtctgagttcattgcacttgctggagctcttccaagtcattcaagagccacggatgatggcttgtaccgagccattgacacgtatctaaaagcacatccagatgtgtcaaagcaagaaaggaagggcctgtgtaggctgcttgatagccggaaactcacaacggaggcctcacttcatgcagctcagaatgaacggttgcctgtgagagctgtgattcaggtgctcttctccgaacaaaccaaactcaaccgccacatagattggagtggctccttcagtagcttgaggagccccaatggaggccttgacccaccaggacgatgcctttcaaagcgtgaaacaaatgctcagcaaatggagataaggaagctgaaggaagatgtttacaggctgcaaagccagttcaatgccatgcaagggcagatggagagaatggcggcgaagaagaagggcttattcaaatggaggaagtttggaatgcctacgtttagcagaaatgtaggagaggtggagaaaattgaagaacaagaggaagaggaggaggctgaaagggaagttggatttggaagacaaacacctatggacatgaaaaccagtctggtcaaaaggactccccacaagtggaggaaatccatgtcctgaaacagaaactataaccgatataatttgtgttattttgttatattatacaagttcgtttttttggagttagactcgagaaataatgtaagatataactctgtcgtatttggaataaattcaataaagatgtgcgtataccatcatagttctaaaaa

SEQ ID NO: 113960 - DNA, 325 bp, Glycine max
  Clone ID: PAT_MRT3847_73915C.1
cccaaaagagggccaaattaatttcctccaacaaaaagctcctcaaaagtcaaatcccttggtaaaagctggaaaatgaaaggaaaacgggcgtcctcttagagggatcatcccggcgttgggaaaattttcttaacccttgggaaacaaagggtaaaaaaaaaaaacttttgctcaaggaaaatacctagccctttgaacagatttttggtggaacccactttttttgtaaaaccccttgttttcgaccctgaaaacaaaaatccccttggggctccccattgaacccccctccccccgggggaacttggagattttttttccc

SEQ ID NO: 113961 - DNA, 614 bp, Glycine max
  unsure (1)..(614): unsure at all n locations
  Clone ID: PAT_MRT3847_73916C.1
ccacgcgtccgctctatgcagaggaacgtaagcaacgctggaatcgcactgaatcgccattagtacgttgcgcgatggagaggagcaacagcaagaaggttctgaagtcgaggcttttgaacgagaacgttcctccattgcagatcgattcggaggaaagaagaggacgctatctccaaccaaccgctatgagtccacggtttcaaccgttcgccgagaacgtcgacgccggctcgccgctcacgcgctatctcttcgccggatctccgctctctggcaagttcgccgccgccagcgaggcctttgtttctccgaagtttggcgccaggaccgcgaaagcgcttcagtactgcggcaccagttcgggaggaagcagtagcttcggttctcgcggtaggttgacgccttcgccgctttcgtcactcgaaaacatggagttcgcgccgctcctgtcgcctccggtgtaccgaacgccgtctacggnggacgatgacgtcatcgtgatggatgctattctcgtgaggccagtgtccggcggaaagagcggaaggtcttcctcttccttcggccgcggctctttctcatcgtcgtcgtcgacggggaagaacgtgttc

SEQ ID NO: 113962 - DNA, 552 bp, Glycine max
  Clone ID: PAT_MRT3847_73917C.1
ctcgagccgattcggctcgagcttaagggaaaatcatacacgtaaaggagggtgtttaccgtggaacttgaggcaaaaggtagctattgatgttgcaagaggatatactcttggatgagaattacaaggctcttgttgctgattttggtctctcaacgcttgttggaaaggatgtgagtcaggttatgacaacaatgagagggacaagagggtacttggctcctgagtggcttttggaaagaggggtgtcagaaaaaactgatgtttacagctatgggatggttctgttggagatcattggagggagaaggaatgtgtcgagggtagaggatccgagggacaggaccaagaaaaagtgggagttttttcccaagattgtgaatgagaaagtgagggaagggaaattcatggagattgtggatcgtaggttggtggaacgtgcgagtgttgttcaggagagcgaggttactaggttggtgtatattgcattgaggtgcataccagagaagccatgggtgaggcctaacatggcacatgtggttgacatgcttg

SEQ ID NO: 113963 - DNA, 683 bp, Glycine max
  unsure (1)..(683): unsure at all n locations
  Clone ID: PAT_MRT3847_73918C.1
cggtccgnattcccgggtcgacccacgcgtccgctcatatggaggcaactttgtgttacagggcacctcctcttcttttgtggaaaaaacagctttcaacagcctttgacatgtggtctttaggttatataacggctgagctattgcctaaggagtcagtatttaatgggaaaacacctcctgatcaactggacgagactcttcggattcttgactacaccatatgaaacaatttggcctgtgttctacaaaatacctgcaggcaaagataatctttatgaaacatccaccacaatgctcctgccataaaaagttcccacgccacataatacactggaactcttgttgtttctgattctcgattacgatgctggtgaacaagcttctaacttatgaccctgtaaagcagaacactgccgaagctgctctaaatcatcagcgggttcgtcaactttctattcccataagtaatagaattaactgcctacactttctctgctagaacaatgcttcgaggactaggctgtgtgcgaacaaatatacaacagtgcggatcctttagaggagcatggtccctaaggagttgctgcacggatgaatcaggcactgcaggcattaatggctaaaaatggggcttactaaagctgtctcaactctaaatactcattataacacactgtggt

SEQ ID NO: 113964 - DNA, 391 bp, Glycine max
  Clone ID: PAT_MRT3847_73919C.1
aaggctagaggaatcctttataataagaaaaagaagaaggggattgttatcaggcccaacggagacacttcctcttcaggcttgcctatgcagtaataataattaaagaggagcatgtggtaaatttttcttgcgtagaacaactgttttaatctgtggatttgcttgctgctgtttttgacatggaaatttaattataaggatgattattctatttgaagctttgacaattgggtgctatagtttttggacaattatatactctgtagtattgaatgtttgctggttgaattttcagcgctgagaaatgaaaattcatcagtcatatcccatcagcacacagtactacatatttgaagcatatataataagttcttttgcatttcattct

SEQ ID NO: 113965 - DNA, 631 bp, Glycine max
  Clone ID: PAT_MRT3847_7391C.1
aagcttccaaaacattgtggatcctgtaattaagaatacaatggaccccaagcgtacatagtaggttgctgctgtagccgtgctatgtgtgcaaccagaaccaagttaccgtcctctgattgccgatgttctccactcattgatccctcttgtgccagtagagcttggaggaacactcaaagtttcacaactgccacagcaagtctgacccgctgacccacctgaggattctagtcaatgatcagtttgagacaacatcacatatcgatgatccatcaatgacatgttttgtgatgctctacccatctggtgaggctttagtaaggcttgaaattactgaaagatccataacaactacactgattctgtaataaacacatgcagcccgggagtgtgacttagaaacagagaaattgaggaaagagtaggcttgaatggtggagaagagcattggattgttaatgataaatgggaggaaattgatttcacttttgtgaaaatttgtgtatagagtggtgatattgcggaacagtgaactgttcagagaggatcccattgtctttcattcccacttttggcatgtgaaattcagtaaaccagactactaataattcgtacataaatttctgag

SEQ ID NO: 113966 - DNA, 2364 bp, Glycine max
  Clone ID: PAT_MRT3847_73920C.1
ccacgcgtccggcaaaataccaaaaaaaaccccttttggataaaaaaacctggatttggatcaatccactgacactaactgcattacacaacggtataggtcagtaacagataaatgagattatctttttttggtagagaatcaattaaattattttaaaaatgatttaattgattattagaaaccctaattatttgaaaagatcctaagatattctatgcaaaagcgaaaagaagaataaaaattagggcgaagcgggtcataggtgtgaagtgaaagagagattctgcgtgcaggaagagcgaagcgagtgagtgtggcaatggcggaggagcaaggtgaattcaggatttacaattccatgactcagcagaaagagatcttcaaaaccaaagtccccggcaaggtttccatgtacgtttgcggagtcactgcctacgacttcagccatctcggtcacgctcgcgctgcggtttctttcgatatcctcttcaggtaccttaagcacttgggctatgagattacatatgtgcggaatttcactgatgttgatgacaagataattaagcgagcaaatgagaccggggaggatccattgatgttgagcaaccgtttttgtgatgaatataatgctgatatggctgatctccagtgcgagacaccatctagggaacctcgtgtttctgaacaccttaacgagataaaggacatgataacccagattatcaacaatggctatgcatacgaagttgatggtgatgttttttatgctgttgataaatgcccaaattatggcatgctatctggacaaagactagaacataatagagctggagaacgagtagctgtggactcaagaaagcgtcacccagctgattttgcattgtggaaggctgctaaaccaggtgagcctagctgggacagcccttggggtcctggaagacctgggtggcacattgagtgcagtgcaatgagtgcttgttatttaactcataaatttgatatccatggtggtggaattgatttaatctttcctcatcatgaaaatgagattgcacagagctgggctgcagaccatgatagccatgtcagttattggatgcataatgggcatgtcactaataacaatgaaaagatgtcaaaatccttaggcaactttttcactattcgccagatcactgagcgttaccattcacttgctttgaggcactttttgatcagtgcccattacagatctccactaaattactcaatttcacagctggagaactcgtcagatgctatttactatatatttcagactcttcaagattgtaaagatgctgtatcaccattacttcaaggggaaactgagaagaatgaaaaggtacctcaaattaatgaggctgccaaggaatgtattaagaagttgaatgttgagtttcaaacaaaaatgtcagatgacttgcagacaccagtgatactaactggtgctctccaagaggccttgaaatttgtgaacacttctttgaagatgttgaagaagaaaatgcagaaaagagcacagttgcaattgattcaatccttattggaggttgagaaagaagttggaaaagttttggacgtcctaggattattgtcctctaaatcttatgccgaggttctgcatcagttaaaagataaggcattgaacagagcaggtctgacagaagatgaagtgctacatctgatagaagaacgaactcaagctaggattaataaggatttcgccaaaagtgataagatgagggctgatttggctaccaagggcattgcccttatggatgtgggcaacgaaataatttggagaccatgcatcccgagtgaaccacttgttgcagaagttgttcatagagaccagagggcacctacagttgaagaaaagcagtcctcatcttcagtgaatcaaaaagtggatgagatacctggtggtcgagaagggaatgacctacatacaacaacatgaaggtagagtcaatgtccctccttagctatgattaatacagaaaatgttataatttatcaatactgcacaacgcttgaagattgtatatcagttgaaagatatgtatgaccatacctaggtgtctaggacgcgaatcatttttacacatttctcatgttgggtcttttatggtcctgtctctggattagtttaactgatttgacaattgcatgaacgtgcccctaacggagattttgtttttttgatactcagattgggtatttagctctttgtattacagaaagccggaatattttttcaagaatctagagtttgattctctcctcatgttgggtcttttacggtccggtctctggagtctggattagtttaaccgattt

SEQ ID NO: 113967 - DNA, 318 bp, Glycine max
  unsure (1)..(318): unsure at all n locations
  Clone ID: PAT_MRT3847_73921C.1
gtctgcangcncgcgtgncgtnagctcnggnagtcggctcgngngnagaacaganaanngancanntnnnnnnanntgaaagnngcaactaatctgctgtcttttgttgatgcctggcntcncgctgnaacaaagcgtgnaaagnngnnccctgtccaananacttctgtngccngttctcctttcgtgncanctagacacatggcatactanngatngggggngagnacagatgnctnatgnnaannagttgggtggcaaanacaangaantcangctttcatgcttggcnaggttgtgttgctgagagnncnanat

SEQ ID NO: 113968 - DNA, 453 bp, Glycine max
  unsure (1)..(453): unsure at all n locations
  Clone ID: PAT_MRT3847_73922C.1
tatgtggatcgaactgtccaaggtcctgtcacgcacaaatgatgcgtaccgccttaaagttaagttgcacaacgtgagtttgggaatgcggtggaaaacgcgttaaccctggactaaggggaatacggctgaaactgccgctatgccgtgtggataaatgccctatgccgggccggcagctggtaacagtacagccagtagccgtgctattcgtcntaagaggtgtttggcgggaccaccccgctgtacagccgccgcaatggaccaggggagaggcggtggtgcagagcaactcgaaacataggtctacgtagagctaggggtgtgccgctgcggcgacgctgctactaccgttcggccacacgctggcaactcagaggtcctgcccatacactgtgctacgcggatatggatcggctcgaaacgctagggccccacgggtggccaacaaag

SEQ ID NO: 113969 - DNA, 732 bp, Glycine max
  Clone ID: PAT_MRT3847_73923C.1
ataaaggacaattccattgtgatgaatgcggcatttgcagggttggtggtcgtgataagttctttcactgtaagaaatgttgtgcttgctattcagtgagtgtgcaaaacaatcactcatgtgtagagaactcaatgaagagtttctgccctatctgtttggagtaccaatttgattcaataaaagccccccccattttgaagtgtggacccccaatgcatatggagtgctatcgagagatggcaactcaaaatcagtatcgctgtcctatatgcttgaagacaatagtcaatgatatgaactgggaatatttagatcgagaggtgtgtggaactattattaaattttgttttgaaatattttttgttggtctatgtatgaccatgttttatgtctttgaactctaaagtaatattccacatgactttcttggagacaaggaaaattcatggggataaaacaactaggaaatgagccttggaagacattttgtatcaaatttttgctatgattgtaatggttggatggttgttgtcatatataaataaaatgcaactagcatggtgagttgcatatttgctttgaggcaaaaaaaaaaaattctctctgtacataggaaaacatgaggtaattgtagtaattgtctattgtgagggatgctttggcaccgtagcttattacaaaaaatcactttttgcttaagcggatggtcctggagaaatctgttgtcac

SEQ ID NO: 113970 - DNA, 283 bp, Glycine max
  Clone ID: PAT_MRT3847_73924C.1
caggggcacaagtttgttgagataactagaatcattaagataaacctgaatgtgcttgttctgtttgttgctccagttttggtgacatatgtatgctacggctcagactaccatccgttccctctccatatcactactgggtttggtgggcattacagcactcacgtggcatgtgtcatttcgaggcttggcgtgctccattcaacgtcctcgcctggctgcccgttcttgcaccctccgcacagtacttcactcactacgttctacgataccaatatctcat

SEQ ID NO: 113971 - DNA, 292 bp, Glycine max
  Clone ID: PAT_MRT3847_73925C.1
tttttggttgtttttttttattctatattttgggggggttcttttcatcttgcattccggctctgtattgttctcacatgcccaatttaagcaaacccctagcaaagatcgacaacgatcgacctgacatagacaagaactcgctaggacctattgcacattgggtatctcccaaaggcgcacacggcgaggatattcaccgtgggcacacacccaccccatgttgggtctgaacccaacgaaagaatcaaacctccctcgctaaccccaaatgcccctggcgcacatgaag

SEQ ID NO: 113972 - DNA, 377 bp, Glycine max
  Clone ID: PAT_MRT3847_73926C.1
gtttttcttggcttcattgctacatcatcacagggggagtcatatagtgacaatgggggtctttgtagtcatacttaaaccacatcagcacaataacttgtacccgatatctagactgcccccattgtcgtttgtacggttcctggtatgttcacgcacgcgctttatgacggtatacaaagggtgctatatcatgagtggcataatttactacatagacggaccatatcagacatgccatacatgacagttgtgactgtctttggacatctctcattgaaaaagctagactgagagccacaggttatataatatcgatgggatacttgacacagatgttacacggaattgctgcatccatctaatcagagaacggt

SEQ ID NO: 113973 - DNA, 1457 bp, Glycine max
  Clone ID: PAT_MRT3847_73927C.1
tacggctgcaaaaaaagaacagaagggggtaccgtacgtacatggcctacgtcgatacggcagcgttttgaggtattctgcaattgttaccgaactcattccccttttttccgtcgttcttctcaatttgtctgagaaattcgtgaaggaacctcactctgttgctgcattcccccatggcttctgcttcagattttgcgttagcggtttcttctgaactcgagtcagttttgaggctgaagactgttaactactttgttacgaggaggccatggctcgatctttatggagttaacgtgagacctgttgcgcctgttgggagtgcaagtaggaggccttacgtggatcctgcacttatacatcgttccttacctgatgagctgctttttgaggtttttgctcgaatgactccatatgatttggggaaggcatcttgtgtttgtcgaaaatggaagtacacaattcgtaaccctgtattttggcgcaatgcatgcttgaaggcttggcagctatctggaattgttgaaaactataggatacttcaatcaaaatatgatgggtcttggcggaaaatgtggctgtcacgaccaaggttacggactgatggtctttatgtgagtagaaatacctacattcgagctggagttgctgagtggaaaatcactaatcctgtacatgtggtctgctatttccgatacttgagattttttccatctgggcgattcctttacaagaattcatctcagaagatcaaggatgtggcaaagtgcatgaatttccgttcatctaaagcagactgtgtttttggtggccactacacattgtcagatgacaaggttgaagctgcagtcttgtatccaggcatgcgacccactgttttgaggatacgtttaaggttaaggggaacaacaacaggggctaacaatcggatggatttgatctcacttgtcactagtggtgtaaacagtagtgaggcaagtgcacccgaggaggacattcttggagttgttgaaggatggcaggatgatgaaacacacaacccagatgtaccagctgtctcacataagaggggcatgactccctttgtctttgttccatttgaagaggtggagacatctgttctgaatcttccggtggagaagatggattattttgtacctggttgaattattatgatgcctcagaatagaattggtccattgtaaataatccataacttaaggtcgtagtcgtagaatttgtaaatttatttatttgtatgtttatgtgtaagtatggcgtgatgagattgatttggttcgagttgcggaattatccctttattctgctttatgcatctggataacgggaataatcgtaatttttgttttgcaaatcatggattcgtttgttgaggacatgtagtaataaaactatataagaattgtgtaagaaaaaaataacgtctttatatacga

SEQ ID NO: 113974 - DNA, 267 bp, Glycine max
  Clone ID: PAT_MRT3847_73928C.1
gtaacactgaaggggtgagtgtgtttgtggtgtctgacttgcacactaactatgctgagaatttgaagaggggggagtgcttgcctaatgtgaagcacaaacaatgatgtgcttattcgtgcaagagacgtggctgatacatgatccatgtatgttgagacaatgtctctgttgaaagaattgcttgagcatgtgatgtattttactaggaaccatatccttctgtgccgcctttaggtgcactattatgtttattcatatgctaaa

SEQ ID NO: 113975 - DNA, 199 bp, Glycine max
  Clone ID: PAT_MRT3847_73929C.1
tgaacctcaacccgaggtccatccttcaccttagtaaaccacctaatcctcgagccttgaattggcccaaatgtgtggcggccactttatgattcttccaagggggtggctcaaaaattaccattggcacccctccgttttttcagccaattacctaaggaaccaggggtggaggtggttaatggttggggtagccagc

SEQ ID NO: 113976 - DNA, 2094 bp, Glycine max
  unsure (1)..(2094): unsure at all n locations
  Clone ID: PAT_MRT3847_7392C.1
ccacgcgtccgttcactttctctcactcagtggctaacaaaacctcattgagagtgtgagtgtgtttttttgtgcgtgcgtcagtgagttagtgtgtgttccttttcaggcacaagcctttccttcacacatctatttttttatatctttatcttcatgttttcttagaaagaaacaatgaaaacgaagcttcttcttatgcttctcatgctcctccttattctccacaaacccacttggattcttgcctctgcataccctcttgctccctctcctcaagttccaccattttctccatttcccacttcaatgtctgcttcctctccaggaattgtgatgggggctgaacagcaacacatggattcacacaagaaaatggtaattgctgttgctgttgccagcacttcacttggtgcagtcattttgtgtgtgttgtgcatctggatttactacacaaagtacccttcaaaatccaaagggaaaaacgttcaaagatcagatgctgagaaagggctagcttcatcaccatttttgagtaaattcagctctataaagctggttggtaagaaagggtgtgttccaataattgactataagcaaatagaaaaaaccaccggaaatttcgaggaaattaacatcttgggtgagggaggtttcggatgcgtttacaaggctcatttggatgataatttggatgttgctgttaaaaaattgcactgtgaaaatcaatatgctgagcaagaatttgagaacgaggtggatttgttaagtaaaattcaacatccaaatgtaatttctctgctgggttgtagcagtaatgatgatacaaggattattgtctatgaattgatgcataatggatcattggaaactcaattacatggaccttctcatggctcagcattgacttggcatttgaggatcaaaattgctcttgacacagcaaggggattaaaatatctacatgagcactgttaccctccggtgatccatagagatctgaaatcttctaatattcttttagatacaaagttcaatgccaagctttctgattttgcgcttgccataaccaatgggtcccagaacaagaacaacctcaagctttcaggaacgttgggttacgttgccccggagtatcttttagatggtaaattgactgataaaagtgatgtatatgcttttggagttgtgcttctggagcttctattgggaaagaagcctgtggaaaaactagcacaagctcaatgccaatctattgtcacattggccatgccacagctcacagacagatctaagcttccaaacattgtggatcctgtaattaagaatacaatggaccccaagcacttataccaggttgctgctgtggctgtgctatgtgtgcaaccagagccaagttaccgtccactgattgcagatgttcttcactcactgatccctcttgtgccagtagagcttggaggaacactcaaagtttcacaactgccaaaacaagtcttacctgctgacccacctgaggattctagtcaatgatcagtttgagacaacataaatgacatgttttgtgatgctctacccaactagtgaggcttgaaattacagaaagatccttaacaactacactgattctgtaataaatgcttgcagcccgggagtgttaagttagaaacagagaaattgagaaaaaagtaggcctaaatggtgtagaagagcattggattgttaatgataaatgggaggaaattgatttcacttgtgtgaaaatgtgtgtatagagtggtgatattgcggaacattgaaactgttcagagaggatctcattgtctttcattcccacttttggcatatgaaattcagcaaaccagacaacaaataattcgtacataatgtgacttagaaacagagaaattgaggaaagagtaggcttgaatggtggagaagagcattggattgttaatgataaatgggaggaaattgatttcacttttgtgaaaatttgtgtatagagtggtgatattgncccaacagtgaactgttcagagaggatcccattgtctttcattcccacttttggcatgtgaaattcagtaaacc

SEQ ID NO: 113977 - DNA, 445 bp, Glycine max
  Clone ID: PAT_MRT3847_73930C.1
gccacgcgttcggccaaatgctgttctttcaatgtggagatattttgatggagagctcgccttggaagaaactacgatcacttctccctacattaaatgtgcagactctatcttcatcgcatttggaaattagggtgacgacaccattaatcatgaggcttttctccacaagctggtgcagactggagagattcacgtaaaaggggtgttgaaattttcacaagaggaatcacttacaggttggacaactcaggtgctgtctgcatcaactctgaaggctgatgggtggccatatccagatgctatggagcatgatagctcagtgactacaataccaggggattgagtccttggggttaaagaggggaccgtacacaacatgtgtgcatataggctcaatcctggggtattaagatataggcttttgggcaccattccttagatc

SEQ ID NO: 113978 - DNA, 511 bp, Glycine max
  Clone ID: PAT_MRT3847_73931C.1
attctcaatttcgcgatccattctctgttcaattccgctcctcccgtgctctcctacccctgggtgtttctcgggttcgtcgctcccgccctcgcggtccttcaagggctttggtttctcactcttcgcttggtttcactctgactgaactgaaggaaaagggggcattggatgctgaagagcagattcggaaggctcatgtaacttaagtaggttagttggatcttaataggcttgctcactttcttggcggcactgtttcttatatttttgggggtgggatattcgaggttatacaagattgttccagtctgataagccaataacaaaaggccaagcagctatggctctagctgctggagatgtattggagatgcttctgaaatattctatctgcaggccttgaggtccattcctcctgcagttcttccccgtcttggtgtttgtcgtctcgccttgcttctatcctgctttaatgggagagtgggaaaaatagtgatgactgctactg

SEQ ID NO: 113979 - DNA, 373 bp, Glycine max
  Clone ID: PAT_MRT3847_73932C.1
cacatatttatttaatatggcaagaccctgcagaaactgaggagatatggaatttctggaatcctatcctatggacttttgaacactgcatactgtctcacaacgtttctttttgtgtggtatgtcaacaaatgtgcctcttagttagcttgcagttttgcttttctttttcttagagatctagtttgtataagaaattgtaagtctgtattgagttccccacttcttcctacttatctaccttctcttggcaagggtggttacttggagttagtcttcctcatgcctactattttttaggataccttattcacaatctctggatccttctaattattttgagggtactgtaactaagaatacactttatttt

SEQ ID NO: 113980 - DNA, 182 bp, Glycine max
  Clone ID: PAT_MRT3847_73933C.1
attccaattccaaggaggggaccaattaccaaccaaaattaaaaggttaaagccccctaaggggagtctttcaaaagcttttccagaatggcctcgtgggaatagttcaactggccaccagctttggaatcccaagttaaaaaaaaaaaaaacaattatcttggtaagggtaaaagggtttt

SEQ ID NO: 113981 - DNA, 1620 bp, Glycine max
  Clone ID: PAT_MRT3847_73934C.1
gcttcaagccacagagaaacagaaactcaactaaatatccgccaaatgcaatatgtaatggcaatgctgcaagcaacacaagatctacccgagggtgcaccgaatctccccgtgatacaaagcatgactattatacgtgtcagtggagtgagaatgcaatagtagcagcgtagcactcttggttgttagagtgggctccacaagatcaacgatatttttatttattttattttcatttttccatcacggtgaattcgttagaaaaagtgaaaaaccatgtcaaattaaaaaccgacacgtggggatgggtcgtaacgatttcagtgtcacgagactatcattttcttttttctcatctatacccccgcaccaccaatccaaatcccacagggttggtagatggaggcactagtggaagtgtgtgaacccgcagaggttcgaattgagttcgcactgaactgcaaatgtcgagccacggttcggattcggtctctaacccaaaccacaccagttgccttcaagatccaaacctcatcaccaaacaaattcctagtcaacccgcccagtggactcattcaacctctatcctccgccaccttccaagtcattctaaagccacagtcccacctccctcactcctaccctcgctccccctcggatcgtttcctagtcaaaacagccgagttctgtgctaactcgtcctgctcaactcaccccgagtcaatcaactcgtggttcgcctagcgcccctacgggttcaagactctggacatcaaactgaaggtggcattcgttggccccatcctcctcaacgacgccgtcacgcgcggagatttagacgcggttaggaacttgattaaacgacagcgttccatgctcgccgagttgtcacccacccaagccgagacgctcctcggagccgccaccaagctgctcaacccggacgacatggttcacctcctcctcgaagccggcttgagaataatccccaatcccaataatgcccctgatcaagtacacgtggcagatacaaatacaaacataaatgagggagaagaaatatttgaggcttcgaggaacggacacgtggcggaagtggaatcgctgttacggagatgtggtgggagtgtgaagtaccgtgaccagtatggtctgacggcggttcacgcggcggcttttaaagggcacaaggatgtgttgatggtgcttagtgaattatcggatttggatttggaatgtgaagaccgggaaggtcacgtgccgcttcacatggctgtggagagtggcgatgtagggaccgtgaaagtgttggttgagaagggagtgaaccttaatgctgtgaataagaggggtgctacccctttgtacatggctaaaatttgggggtatgatgatatatgtcaactgcttgttagcaggggtgccttgtattctctaacttcgacttcgggttgaaaatgtatctgtaatgaaatcttagattgtttaacaagttcagcataatgatgctgcccaatgttgttacttgttattgggacttgggagtttcccatgaataagtttctacttaaattactatttgatagaggtagtaaaaatgtgtaagggtcttcttaaaaa

SEQ ID NO: 113982 - DNA, 406 bp, Glycine max
  Clone ID: PAT_MRT3847_73935C.1
attaatatgccactcccatgatgcccctagatgaagaaattctttctaaggctgcacaagacatggttgaggaatggtttgatcgtgttgatgaggaggatttctttgaggaagtttttttaattgcagctcttaatggtgttgagggtttggactatatggcaagaattcctattgccacatctagtgtgctatcctgatgtgctactacgcaaaaatggtagaaaaaggcataaggagatctgtttctttggatggtgaacagatgacattgattccaggaaccagtgttgactaggactacaacatgctaataagggaacttgggaaaaacgttcctacattgatcgtgattgaacgtcccaaggatgaaaaactccctattgccaaaaattgtgacatacct

SEQ ID NO: 113983 - DNA, 349 bp, Glycine max
  Clone ID: PAT_MRT3847_73936C.1
ggacaagcctaggggggggtgaattggtttgttattgttgttctcggtgggttgcaggggttaaaatccatgcaaccccttttgttgacttaatgaagatcagatgagttggtattatatttaacccaaaaaaaaaaaaacccccgttgtttttttgagaaaaaatttacacagaaatgcccacccctttttttttttacccccctttttgttacttaccttttaccccccctttttaataggacagacaccctagtgcccggggacattccccttttgcgtggccattcaagtcagcaaatcgaccttggtgaccacgggggggggctttggcttttcattggccttt

SEQ ID NO: 113984 - DNA, 279 bp, Glycine max
  Clone ID: PAT_MRT3847_73937C.1
cccacgcgtcctctcatgacgataataatctaaactctcactttattcaaccacccattacctaaaagctaagtttatatccactaacccatcccccatacatttcaaaagtgaatacattccccaactatgacccatccaattcacccaacctcactacattcattttttacaattctcttatcactcacattcttatatacctctaaactccaatatcaaatctatcacacctaatgattcatgtcaatcctataacaactatttacacccctccaa

SEQ ID NO: 113985 - DNA, 315 bp, Glycine max
  Clone ID: PAT_MRT3847_73938C.1
ttccacgtgtgcgcttcactctcctgagacgctaggtttacagtcattatcatagtccgggaaagctgaaacccctccatggtggctgaagttcattcaatagtcacccaagtgagtccaataatgactaaggctatcgaagctagtaggcatggacgaaagatacactgtttgcccgactccgatcgctgtgggaacatgagatccacgctcacaacatgacgactacgacttaaaatcaagaattacacgtttcctgaattgagtactcggcagatcacgatctgctcattcagtgcttctactgcgtttttt

SEQ ID NO: 113986 - DNA, 433 bp, Glycine max
  Clone ID: PAT_MRT3847_73939C.1
cgaataaggctcctatacagacaagaatcctccgtcaagtggccgtggatttgtatcatacctggtcgtgacacctgatcagaggcatttatctggttttttggtgggtgattcagaaccctaaggtggaagagaaaataatacatgagagtggcacagtcctcatggagtcacgtggcaatgatgacatagcaaagttagtttgatagatgcatttggcctttgaggaagtcgacagcatgggtcatctcaaggcttcatagtcggagacactattgttgtacccttcagtgccggatgaatcaaatcatgtgacgatcgaccacctgctgctctacagaacatacgtaccggcaggatggtcggacatatatcacatatattacgccgggaggggtgacgccacatcgagggaggagtgcatggagtttat

SEQ ID NO: 113987 - DNA, 552 bp, Glycine max
  Clone ID: PAT_MRT3847_7393C.1
gcccccgcgccaagccgtctggagggcgcgccggaccgttcgttctcacgcgtccgcccacgcgtccgtacggcttcgtgtcgactacaaaagggggggataagacttctcattttctctatatccatcctctcaccattattgcctcaatttcatactttctttcatgatcacagtttagggactgcaaattctctgcttctctacacatggagccggtgtcgcgtgctaatttcttttcattccaaagattttggctaccgtttcagggacagggagggatgaggcagcaagttgatccctcggctcacacaatcaagtcccatggagcatcacttgcaagaaaacacgctcgtgattggcttatattgctgcttctcatagtgatagagattgtcctttttgtcattcatccatttaaacgctttgtgggaagggacatgatggaggaccttagatatcctatgaaagaaaacacggtgcctgtatgggctgtcctttatatgcggttctgttgccaatggccgttttccttctcttctatatgcgcag

SEQ ID NO: 113988 - DNA, 1338 bp, Glycine max
  unsure (1)..(1338): unsure at all n locations
  Clone ID: PAT_MRT3847_73940C.1
cgagccttcattctctctctgtatatctctatatatacatgtggttgtagttgtagttgtacggctgcgagaagacgacagaagggggttgcgtgtgtgcgtgacaaaagcaaaaggaaagaatatcaacaaggtaaagtagattccttactagacatggcgttgaaggacacattctacatatctcatggatcaccaactttgtccatagatgaatccattcaggccaggaagttccttcagtcatggaagaaggacgtgtttcctcaaagaccctcttcaattcttgtcatctctggtcattgggaaaccgcagttcccacggtcaacgtcgttgactccatcaacgacaccatctacgatttctatggcttccccaaacaaatgtaccagcttaaatatcctgcacctggagctccacaattggcaaggagggtgaaggaactactcaagaaatctggtttcagccatgttgatgaagatacaaagcgaggacttgaccatggtgcttgggttcctctctttttgatgtatccagaagctgacatccctgtttgtcagatatctattcaatctcagcaagatggaacttatcattataacttaggaaaggcattggcccctcttaaagatgaaggtgtattgatcatgggttctgggagtgctgttcacaacttgagagcacttgagcctcactccactgttgctccctgggctctagagtttgataattggttgaaagatgctcttcttgaaggaagatatgaagatgtaaatcattatgagcagaaagcaccacatgcaaaaaaggctcatccctggccggatcacttttatccgctgcacgttgctattggtgctgctggtgaagatgcaaaggccaaacttatccacagcagtattgaattgggcagtctctcttatgcctcttaccagtttacatcagccgctagctgaatttcttaatacagaatagcttctgttcagttgcataccctggctcaaaacacagttattcaatatttatgaagatgtttggcttgctagtttaggcttatgtttctgtggtatattgcgaagaattgacttgtaataaattaattgctgttaataaatgaagtttattttgaggaaaaaaatataaaagaaacccaaaaaaattaaaaaaaaaaaaaaaaaaaaaaaaaaaaaaaaaaaaaaaaaaaaanaaatacataaaaaaaannnaaaaaaaaaatataaaaaaaaataaaaanaanaaaaaaagggggggcgtgtttaaaggatcaaggtttccgtccccggggttggaaagtttttttttttttaaggggaacc

SEQ ID NO: 113989 - DNA, 199 bp, Glycine max
  unsure (1)..(199): unsure at all n locations
  Clone ID: PAT_MRT3847_73941C.1
gcgcgcgggngaattccaactgagcgccaccacaggaccggagttgacccggtaataacgctgtgaaaacaggacaggccttcacaatcaaagggcgtcgcttgggaatgtataccatctctaccctagttgcataattgacagtttttaaactggaaaaagaaagcatagttttttattccatttcctcaccagtcta

SEQ ID NO: 113990 - DNA, 1179 bp, Glycine max
  Clone ID: PAT_MRT3847_73942C.1
agcaaaaggaaagaatatcaacaaggtaaagtagattccttactagacatggcgttgaaggacacattctacatatctcatggatcaccaactttgtccatagatgaatccattcaggccaggaagttccttcagtcatggaagaaggacgtgtttcctcaaagaccctcttcaattcttgtcatctctggtcattgggaaaccgcagttcccacggtcaacgtcgttgactccatcaacgacaccatctacgatttctatggcttccccaaacaaatcttaaatatcctgcacctggagctccacaattggcaaggagggtgaaggaactactcaagaaatctggtttcagccatgttgatgaagatacaaagcgaggacttgaccatggtgcttgggttcctctctttttgatgtatccagaagctgacatccctgtttgtcagatatctattcaatctcagcaagatggaacttatcattataacttaggaaaggcattggcccctcttaaagatgaaggtgtattgatcatgggttctgggagtgctgttcacaacttgagagcacttgagcctcactccactgttgctccctgggctctagagtttgataattggttgaaagatgctcttcttgaaggaaggtacacttttttctgtcttgatgttcaaatctgctaaatgtgtagttgaccttgctacggatgttaagtgcatggatctaattaccaagaagctaatcattgaatgttatagagtttggctattcatggattggttgttaaagctttcaattgcttttgtagatatgaagatgtaaatcattatgagcagaaagcaccacatgcaaaaaaggctcatccctggccggatcacttttatccgctgcacgttgctattggtgctgctggtgaagatgcaaaggccaaacttatccacagcagtattgaattgggcagtctctcttatgcctcttaccagtttacatcagccgctagctgaatttcttaatacaaaaaagcttctgttcagttgcataccctggctcaaaacacagttattcaatatttatgaagatgtttggcttgctagtttaggcttatgtttctgtggtatattgcgaagaattgacttgtaataaattaattgctgttaataaatgaagtttattttgagg

SEQ ID NO: 113991 - DNA, 381 bp, Glycine max
  Clone ID: PAT_MRT3847_73943C.1
caagaagctggttgctttgtgggaggtaattgtcggtgtagacggagagatcaacctttggcggacgatcgatgggctctactgtgtgcgcatgtgctgagcctgacagacctctatggattccaagctgcacctgtcctacatgggttgatggctcgtctacctggtgacttctgcttcaaccctcttggtatctgatctgtcccgtaaagtttgaaatggaatgttcaagcttagctaacgcactgtacatgggaaatgttaagtgctgctggcatttgcatctcaaaattactaacagagactgacgtcttgaacactcctttatggcactcaggctaagagctgatatactgtacagacactactaccatgtatata

SEQ ID NO: 113992 - DNA, 437 bp, Glycine max
  Clone ID: PAT_MRT3847_73944C.1
actgaacacacacatagaaacccaacaataggaatgtacaagatgattctaaccctggtgtggagtattaatttatctatgctatacctttaccacacgttcgtggtggatttgtccgtatcatactacacacgcccgaatggccctgcagggtacttatgcatgagcccaagaaaggtcacggaggacgacttattctactccggccttggcaccgtcggcaacacctcaaacataatcaaacccgcggggacccctgcgatcgacactcaatttcgccgcgtcaacgggctgggaatctccattgcacgcctagacctagcatacgctggagtcatacctcttcacacgcaccctggtgccttatagctgctggtggttgggcacggaacaatctgcaccgactttcttgcttgggacaacactgcataccttaa

SEQ ID NO: 113993 - DNA, 431 bp, Glycine max
  Clone ID: PAT_MRT3847_73945C.1
ccgacgcgtacgctgcagtatattcgatcatatacttgttcaaataattgggtttccaggtacaataccccaaatccagatgctcatgctcatgaccatactcacggtccctataacacttacttgaagacaatttagagtcgaccttacagtctacttacacctatgcaaacacactcgatcctgaattctccttagagatgaccttacctagctacaatactggtaacaatcatactctcgggcatcagaactatcttcattctttctttgcacctgactttgcaggggataagcgaggttttagcgaaattatatgcgtaagtatgtgctaaagagctaggtcatcatagacttcatctcacacactctcctttatactacctattatattctagatttaacgctggataactcgtgattaacggagt

SEQ ID NO: 113994 - DNA, 699 bp, Glycine max
  Clone ID: PAT_MRT3847_73946C.1
cgcctcatcgggaagattccggcgtcgctggggaagccggacatgaagattgtggacttgtcccggaacatgctggagggtgatgcgtcggtgttgtttgggtcggagaaacacacagagaggatatatctggcaaacaacttgtttgcttttgatttgggaaaagtaaggttgtcgaagaccttggggttgttggatgttggccataatcttatatatgggacgcttcctaagggacttacgtcgcttaaggatctgtattatttggatgtgagctacaataatctctgtggtgagattccacggggtggtaaattgcaagaatttgatgcgtctttgtatgctaataacaagtgcttgtgtggctcccctcttcctagctgcaaacggttctagagttcaaccaaacatagctcatttgcgcttaattaccacaaagagtatactacatacgaataagagaaactcttgtgtgttttcatggtgttaagtttctttgctgagaatttaacgtgccacgtaattgtatatgtgacactatgtaattgtattgcatttttaatttcagtgatgctatatggtgcgatgtcgggtttggagttgtgaaacgcacgaattgaagctggcttgttattacttcataataaaagctgacatgtctacggtaaaaaaaaaaaaaaaaaaccgagactagttctc

SEQ ID NO: 113995 - DNA, 440 bp, Glycine max
  Clone ID: PAT_MRT3847_73947C.1
gctactcgtacgcccacgcgtccgcccacgcgtgcggtagctctttctactcaaaacacaacaaaacatcaagttttgcatgagtgcgcggagatcaatgtttgtcgctgaggtggatcgtctgataaaaggcaatgttagtgagggattggatttatgggacactggcgtcactagggctgtggcggaaggaggccaagagctgactcgtgggcctcgactacggtggcaaaaccaccttgcttcacatgctcaaagatgagggtcctctgcaatctctttccccttactgttgggaccccaattgaggaatagcgtattttcttttggattcgttaatggtgggggatctgcccttattagcttcccatattgcgacgctgggtataatttattctgagaacatgatccggttagacggaaaaaatggggaaaaatag

SEQ ID NO: 113996 - DNA, 222 bp, Glycine max
  Clone ID: PAT_MRT3847_73948C.1
agcatattcagttaggatcgaagatgttcttagtgctggacaactatttgtggttggctagttgtataatcgggccccaagtagcattagggcttattttattgtaaagtggatactgaattgaaagttaatcttagaaaaggttgcatatcctaatgagatggtatccatagatgttttcattgttgccactccataattagaggaaagaggtgttttatc

SEQ ID NO: 113997 - DNA, 190 bp, Glycine max
  Clone ID: PAT_MRT3847_73949C.1
gaaaaggttgttttgatgaggtgctgagagatgttcatctgcaccacatggatgggtataaactccatgaacatgttgccctggaagtgcaccttgatgaagatatgatggctgacgatggtgcatagagagcctagagactaagggtgccagacgtgaggcttgagatacttgtgctgaagcggtgcag

SEQ ID NO: 113998 - DNA, 160 bp, Glycine max
  Clone ID: PAT_MRT3847_7394C.1
cacaaccaaccttatcaataataatataattttcactactgttcccagtacctcttccccgacaagaacttcttctatctctatcaatttcaattcctccacctccaaagctcccacaaaaactccaatcgcattctccccatcttctgcaaatactttc

SEQ ID NO: 113999 - DNA, 262 bp, Glycine max
  Clone ID: PAT_MRT3847_73950C.1
gtaatcacagtaggaggggcatgtggtggattgctttatctattacaatttggcagcataggaactctctcctgtttcaaggcactccttttgaaccgcaaaaagttttggaggatgctttattcttagtttggtcttggataaaagttggagacaaaggtttcaatacatcatttaaccactggtctaccaatcttgtggaggctcttggttaaatggtatctgtattggtgtcctttgtggtgggctatgttggggatgt

SEQ ID NO: 114000 - DNA, 404 bp, Glycine max
  Clone ID: PAT_MRT3847_73951C.1
gcgcacgcacgcaagcctaagactcgcgggattcgagctcgaggtataatcccatacccattaacaaacgttgattgcccagaatcaaagccagacaggagaggtaactaccgtgacggctaagacatgtatttctccaaaaactgggattagctcattgctttttgactcctcctttgtcacggaaaaaaccatgtacaagcgtttgccatcaagctgcgaatttacgtatatgccctgggccctaccaacactgtctagaacggggagttctgcctttgaaactacctcggctacgactgccacggtgccaaagtgcaggatgttggatgcgggtccactctttactagcaccgtatcggccaacgagatgtatccattgaaatttgctcacctaataacac

SEQ ID NO: 114001 - DNA, 364 bp, Glycine max
  Clone ID: PAT_MRT3847_73952C.1
ttttgcatgttagagtgggtgttaacctttggataagacagaagttatgtatgttatttaaagccatgattctaccaaagtcagaaccttaaagcaataaatgtggcattctcctttattccaagaaaaactagtttttttacagaagaggggggtggggttattggaagtaacagtccatattaaataaggtatacaaagagagataaaaggatattgagagtcaaatttagcacgaagagcaagtttcttgagcctccgctcctcagcttctaaatcatctcccttgtgagttgttgcagcaaaagcagcatctgtccgatgattctcatgcttttctcctgtttccaaatcttcaaagtca

SEQ ID NO: 114002 - DNA, 143 bp, Glycine max
  Clone ID: PAT_MRT3847_73953C.1
cttatatttctctttcaactcaacacactaacttttctctgcttctgattcactgacacgttgctatttaggaaccacgattcgtttccatttgcatttgcatgccatgatgtagaacttattgttccactagtgttaagaag

SEQ ID NO: 114003 - DNA, 158 bp, Glycine max
  Clone ID: PAT_MRT3847_73954C.1
ggatgattataacaggttcaagagaaacaaatcagggaagaactatgtctaaacttggtgttcattgtaattgctaacaacttgttgatagcaagaacaaatcaattctgattaactttaatgattctttgaaaaggaaattatgatcctgttgtgtc

SEQ ID NO: 114004 - DNA, 268 bp, Glycine max
  Clone ID: PAT_MRT3847_73955C.1
gaagatgatccacgttcttttcctatttgctattgtatcgttcactttctatgcttatgttaatgattcctgtgacgcacacctaaaaggtccagatagcctttaatgttattagtgcaagtcacctaacacagtcacagcggatgactatgtgttctctggcttcgcagctggaaacaccacaaaccctctcaatgttgcattaaccctcttatttgctactgatcttcccagcgtcaatggtcatggtgtttttagggaacggcta

SEQ ID NO: 114005 - DNA, 817 bp, Glycine max
  unsure (1)..(817): unsure at all n locations
  Clone ID: PAT_MRT3847_73956C.1
attcccggngtcgacccacgcgtccgcaaagtttgtctctaaggtacttaccccttctcgatatactccaaatgtaatttccagtaggcttggagcgtaaaatagaattttgcatagattgcaagctttcaataattcttgatagagcaagtgaagacctggagatcatcagatcagaaagaaagaggaacatagaaattttggattctttgttgaaggaagtatcttcccaaatttttcaggcagggggaattgatagaccattaatagttaagcgtcgatctagaatgtgtgtgggaattagggcttcacatagatatttgcttccagatggtgtagttctgaatgttagcagctctggggcaacttactttatggaacccaaagatgcaatagatctgaacaacttggaagttaggctttcaagctctgagaaggccgaggaaagtgtaattttgagtatgcttgcatctgaaatagcaaattcagaatcagatataaatcatttattggataaaattcttaaggttgatcttgcttttgcaagagctgcatatgctcaatggatgaatggggtatgtcccattttcagcttaggtaattttgaaggccgtgattccgttgaagatgatgatgataccttggtcacacaagaggatgacgatttaacagtaaacattgttggtatacgacatccattactcctggagtcctctctagagaacatttcagacaatcttacactaagatctggaattgctcctgagtttggtattggaatggaacaatggcttctaatatacgccacaggcatatc

SEQ ID NO: 114006 - DNA, 652 bp, Glycine max
  unsure (1)..(652): unsure at all n locations
  Clone ID: PAT_MRT3847_73957C.1
cnanctgatttttttttttttcggggttttaagaaaacccccatccnaaacaggacacgtccgaagggcaggaactagagagagcgcaccccacacacgacacaaggcgaggcggggctgagttcatctnatnccacaaaaaaagcaaaaagggcaaagcccccgtaaaaaaaacggggggggggaccaaaaaaagccgggcccacaaaaaaaaaaaacatacgccacccatcttcaggccaagaaaaaaaaggatccccccccaaaaaaaccaaaaagggggggcccggcggaaaaaatgcgcccgaaagaacaaaaagccccaccgggggaaaaaaaaaaaacccaccccgacggggaaagaacccgaacggcaaaaagcttagctcccacccggggcccacaaagaaacggagcgggaaccccccggggggggaaaaaaaggtacccacccaaaaaaggggggggcccccaacccctcgtcaacgagaagagagaaacccccccccccgggggggagagggggccccccccccgctgggagggcacggcaaaaaaagaggaatgggagggaaaaaaacacgccccccacccccgggttggcacaaaaaaaaagaagttcccacacaaaagaaaaaaaagaggggggggg

SEQ ID NO: 114007 - DNA, 732 bp, Glycine max
  Clone ID: PAT_MRT3847_73958C.1
cccgcgtccgtttaaattttatttggtgtctttattgtctggataaggatttagtgtgtgatttttgctctgtagtcttctcaacatataagaattaaggatttaactattgaatttagtgttattaattcttttctcaagtctccttcaatcttctaaactccttgctccatattaactggctcatttatctattacaattcttttgtattatggggtataagtgtactgatttgttggtgggaatccatgagatggaatcagatggttggccccattgcaccttctccagcatctcattttgcccaattttgtgagggttttgttgcagggcaaaaccaatcccatcgatatggatggtgggtagcattgactagctccgtatggcagcataggaaccaattggtattcgagggcaatcactttcaaccttctaaagtgatggatgatgctttattcctcatatggtcttggttaaagaccagagagaaaaactttagtatttctttcaatcaatggtcttctaaccttgtggaatattttagttaatatgggctgggtatttttatcctatgtagtgggctgggtatatttatcctatgtagtgggattaatgttgggtatttgtttatgttgaaaggcgacacactaagtgtcttgtattcatgtatacttcaacagtacccctggtactgctatgattcatatcaataatatatatttttgccttcc

SEQ ID NO: 114008 - DNA, 1177 bp, Glycine max
  Clone ID: PAT_MRT3847_73959C.1
ctcgagccgctgcgagaagacgacagaagggaatgctggagttctcaacgagctgttagtggaagctctatttcctaactgtgcacatgcattttatgattataacttatgaattccgcagcttaaaatttttaccctctcagtaactaaattgtttctacaggaagacatccgtggttttcctaggaatagaaccgtgttgagtggagatgtggatttagtagttgaatcaattgaagctccttgtcggaacaaagaatatggttgcaatgaaactgtggattgcatgactagcaatgaccatgaagtgacatgcatctattctccatgtgtctgtccatttcaagactgtaactatgttgggccatttgaacagttggcattgcatttcagcagtaaacactgggattccggaagacaattcaaatataatcatccattggctatctctttacagatggatgaacaattccttgttctccaggcagaagaagatggggttctttttctcctcaacaagggcacagaaactaatgggaatacagtgatgataacctgtattggtccaaattcatcaaaagaaggatttatttatgagattgtttcatgtagggggagaagttctctcagattaaagtctgtagctgagaattttcctggtcgaatggaggatttccccccagtagattttcttttgattcctttcaattttcttgtgtcttttagggagctcaatgtagatatttgtatatggaattctactgagcataatgtagattgctcttgatttgttacctagattatagataatttatttagtgagaatgatgtcaattggcatttatttataagatttttctgctattccattatgtcaattgacaaattctgttagacgtaaaaattactcgttaattttcatctaataatttttttaaggaattgatctacaaaatatattctagcgaataattttagatgtacgaattttataaacaaaaataattgttagatatggtactgagattgcgttcgcttgaaacaactatatgcacgtttattaaaaattaaaaaataattaatgttggtccttgcttgatatgaagtgtttcactgaaagctagacaataaacatcatcaaggatcaaactttggatagtaataaggttgacttagt

SEQ ID NO: 114009 - DNA, 161 bp, Glycine max
  Clone ID: PAT_MRT3847_7395C.1
agagaaagctatggtcgagtctagattcagggaacgtctcctccactccaggtgggttttgaaaaagaagtgggtgtttgggaggctggatgattttagcaagaagcaacttccacataatgtgacgtggggcttgagcttgagaggggccatggaacaca

SEQ ID NO: 114010 - DNA, 485 bp, Glycine max
  Clone ID: PAT_MRT3847_73960C.1
gcacgagcaaaattgttaagttaattataaattaattaaaaaccattactttgttttagaaagtctaaacacgccttcacaaatagactcaaacgaaattttttgtgtagttgagcttcatgaagacccttaaaatgccttctgatactataaatttaaacatttatacatttagaataaatctcatataaaactcctctgagtctccttgaataacaacatttgttttaattaaatgtgcagaatcaaataccaacaacatatgacttttagaaaaaatacctttgcacatttcatgtttgataaaaagtccaaccaaaaagtgcagcatcagcaaattctttcaaacacccttaattcccggcaactacaaaaaagcataaacccacctcacctccataatcatataattgaggaaaagggggtttgccttttcttttccatatgtgatactaagaagtatgatacatgtgctctctacaaaa

SEQ ID NO: 114011 - DNA, 476 bp, Glycine max
  Clone ID: PAT_MRT3847_73961C.1
tttgaatttttaaatagttttttatttaattaaaaagtagtatatatttattattatttacatttacaactcacataaaaatatattatattctgaaaaatataaaatggacttaaatattaccatcataaattttgaatgtatcaaatttagcatcgtttgttgtaatactcaggttgcaaatttttacatttacattaagaagtctttacattttagcatattactttgaaactggaacctcttttcaagcgatccattacctatttgacaaaaaacgattcggatttgggggaccaagccgcatcatttggacagcaacatgagtttgcagatataatttggtacccaaatcaacacaaggctgtatatcgtgttgatgatcgtgtccccatgtatacatcaaggaatggtgtctatgatttcatccctttcagttccactccttcacttgaattaacactcatcaaaaccac

SEQ ID NO: 114012 - DNA, 190 bp, Glycine max
  Clone ID: PAT_MRT3847_73962C.1
cccagagtcaaccaagcaaacatttaaccaatggctccgaggttccaaaattcggatccgggtgcattggccgtagggtagcgaacaaaaaccccttacaagaacagcatgacatatatgttatcaaacacgcatacaggaagggaatcacatgctttgatactgcggatgtttatggagccaatgctaa

SEQ ID NO: 114013 - DNA, 271 bp, Glycine max
  Clone ID: PAT_MRT3847_73963C.1
ggtacaagatatttttttttggaccaaaattctgataaaatgggcatggcatgaaaaggggtacaatgcattaccaaaaaataaattgggagcataaggagaacaggaaaataaaaaacaggttaagctttggtgatacgacattagacctatgaatgatagatttgtagaaatgaaacacgcagattattgatgcatacctaacaagacatccattgaagggagggataaacgtaacaacacatgaaaacgtgaggctgattagacttga

SEQ ID NO: 114014 - DNA, 773 bp, Glycine max
  unsure (1)..(773): unsure at all n locations
  Clone ID: PAT_MRT3847_73964C.1
aattcggctcgaggaaaaaatgaaatttccccaaatctgaatgggaacatttgccctaacccatttccctctattcggatcctccagttacgacgaccacggttcccggatcctgcgctcatcggttctccggggaagcgtatgatggattgcggtgttggatccatcgtgtgggtgcgtcggagaaacgggtcgtggtggccgggtcaaatcctcggccccgacgacctctccgcctctcacctcacctcgccccgatccggaacccccgtcaagctcctcggcagagaagacgccagcgtggattggtacaatttggagaaatccaagcgtgtgaaggcattccggtgtggcgagtttgatgattgtattgaaaaggctgaaaccgctcagggagggccgttgaagaaacgagagaagtatgcgcgccgagaagacgccattctccatgctcttgagcttgagaaacagatttcgaagaagccagggaaatcaagtgctagttcattgaatgctgttaaaaaggttgcggttgcggttgcatcgccgcccgaaacactgggaaatgataatgaaaaccatgcaaatttgaatgtgtattgtgaaaatgagactggtggaggttcctttccttccgaggttgccaaggatggcaatcaactgcatgtggaagtagattattctgaaacgactcctcggatgagagacttgcaggattntgggctcagaatcgccctgcgaaaagatctttcatcttctggtgatcctacttt

SEQ ID NO: 114015 - DNA, 230 bp, Glycine max
  Clone ID: PAT_MRT3847_73965C.1
ttcgctcgggggggcttgggatgcccggtggtccttacttatttggcggtgatctggttggaggcttggagaaaaaacctgcttctgggacgtattaaaacctaatattttatctgggggcctgtggatctgggggtatctttggagggcttctttccggagatttcaatatttatgccaccccagctttcaatgccgaagaaaggaggtgggggacatattggccttgg

SEQ ID NO: 114016 - DNA, 255 bp, Glycine max
  Clone ID: PAT_MRT3847_73966C.1
gcggagacatcagaagacctgcttgaatggaagacagctcttgataaagccctcacacaggcaccaagtgctgcccttgttatgggacacaatgggatttttcggagtgatgcaagtgcttctatcgaagggtctttccatcaatggagggacaagcgtccaattaagtctctggttgttggaagaccaattctgctagcactagaagatattgatggaggccatctttccttgaaaaagctcttcggtttctag

SEQ ID NO: 114017 - DNA, 336 bp, Glycine max
  Clone ID: PAT_MRT3847_73967C.1
ggggggaaaaaggcccccataccgggatgggttttgataagggggccaaacaaaaacaaaaccaaaacccccgggggggggggaatttttgggtttttgttgaataataactaaaacataaaattcaatttaaaactggggttttaaacaaaacaggggaaggccccccccatttattatgttgggaatttttaatgaaaagccttcctttaaaccaaaaaaaaacccaagcgtttgatcatggttttaacaaaataagtttcaggcttaaaaagctggaaagcttgctcctcatcgccagcataaaaaagttgaagttcaccttgccagccattt

SEQ ID NO: 114018 - DNA, 617 bp, Glycine max
  Clone ID: PAT_MRT3847_73968C.1
atctcccaccttagagtgctctctcttctctggcgggtgggcacttaatgtactctcttctatctttatcgaatgtggatgaggacgaggatcacctccgtcttgagaacgttggacgtggcgactcaccccgatacactaacactggctgcctgagtgaccatctcgaacgtattcaccggcgtgtccgtgacaggctcgagaataaactagctgaaattcaccaacgacctttctggcatgcctgcctgcttgatctacttctcgcatgagcgaggaagacgaatcacctctgatatggcttctgtgggagcctgcatctccgaagtattattgaacccctactgatgcttctgcacctacgtatgtcattacgtatacgatctactcgcgacatccctctactgactgtgctggctctaccattgcttcgaccacctgcctgctcctgagctggcatttcccctcaagtacagactcattcacatgctccgcttgcattcacccttgctgtgacatagatgattggcatgctgatgaacatggatgctacgacctccaactatgccactgccagtgatgacgaaattgcgaaggaaggatctttctacctgatc

SEQ ID NO: 114019 - DNA, 1370 bp, Glycine max
  Clone ID: PAT_MRT3847_73969C.1
tccacgcgtccgcttcaccctctcacaataaaatcattgcaatagagaagtcccttaaataaatctgaatttccctgctttgcttcaccaccccccttgcttgcgtgggtagaaatgcaagaagcagggctgggaatgggaatgggaatgatgagcggagaagtatccgccgccggggaccaccaccgtcaagtgaaggcggagatagccaaccacccactctatgaacagcttctatctgcacacgtgtcatgcctccgcgtcgccacacctatcgatcagttgccgctcatcgacggacagttatcgcagtcccaccatctcctccgctcttatgcctcacaccattcccattccctctcgccccatgaccgacaagaacttgacaacttcatggcacaatatttgattgtgttatgtacgttcaaagagcagcttcagcaacatgtgagggtgcatgccgtggaggctgtgatggcctgccgtgatattgaaagtaccttgcaagctctgacaggagtcagtttgggagaaggaacaggtgcaacaatgtcagatgatgaagatgatttgcagatggatggctctttagatcagtctagcgctgacgggcatgacatgatgggatttggtccattgcttcctacagaatctgaaaggtccctgatggaaagagttcgtcaggagcttaagattgagctcaagcagggttttaagtcaagaattgaagatgttagggaggaaatattaaggaagcggagagctgggaaattaccaggtgacacaacatcggttttaaaggcctggtggcagcaacatgctaagtggccctacccaactgaagatgacaaggcaaaacttgtggaggagacagggttgcagctgaagcaaatcaataattggttcatcaatcaaaggaaacgcaactggcacagcaactctcaatcggttaactctctgaagtccaagcgcaagagagagtatgcccactaaggattccagtctggtgcagaagataacaggtgatgcactacaacataagatggcttacaatagtgatggttgtaaattcttggaatacataacggatacaaactattcttgttgtgcacggtcgcctccatttctttcaagtgtttttttatttgtaaatttgtttgctatgatttgactggctgaagaagtatttttagcagctgaaagcctgaaagtgtttcctatacttgatatgtttgcatgtactattatgtatattttgtgttgtactttatatcagttaaatttacaagtactaacatctccatcctttggaggagataactgtaatttgtaaggatgcaaaaaggaatttaaggacgaattggctaatg

SEQ ID NO: 114020 - DNA, 505 bp, Glycine max
  unsure (1)..(505): unsure at all n locations
  Clone ID: PAT_MRT3847_7396C.1
ggctcgagattgacattcatccattcccattatcttgtccaaccaacatggaacaaccaccggacaccaccaccaatctcttcgaccacctctcgaaggagctcctctacaccatcctggaccacctcaacgacgatcctttcgccagaaagtccctctcccaatcctgtaagtccttccacgcgctcgaagccacgcaccgcaccagcctcaagccgcgtcgcctcgagttcctcctcccgaaaaccctccaccgctaccgttccatctcgcacctcgacctcacgctctgtccctgcgtcgacgacgccactctcaaatcactctccctcgcttggcactcctcccttcgatccattgacctctccaagtcgaggctgttctcgcacgtggggctgtcggctctggccgtgaactgcacgtgcctcgttgagattgacttgtctaataggcctgacctcactgacttggccgncaggcaatcgcggaggctgtgaacttggag

SEQ ID NO: 114021 - DNA, 717 bp, Glycine max
  Clone ID: PAT_MRT3847_73970C.1
ccacgcgtccggaatttgcctgctctttgcttccgaacaccccttgcgtgagtgggaatgcaagaagcagggttgggaatgggaatggtgagcggagaagtgtccgccgccggcgaccaccatcaccaccaccgtcaagtgaaggcggagatagccacccatccactctatgaacagcttctgtctgcacacgtgtcatgcctccgcgtggccacacccatcgatcagttgccactcatcgacggtcagttatcgcagtcccaccatctcctccgctcttatgcctcacaccattcccattccctctcgccccatgaccgacaagaacttgacaacttcatggcacagtatttgattgtgttgtgtacatttaaagagcagcttcagcaacatgtgagggtgcatgccgtggaggctgtgatggcctgccgtgatattgaaagtaccttgcaagctctgacaggagtcagtttgggagaaggaacaggtgcaacaatgtcagatgatgaagatgatttgcagatggatggctctttagaccagtctagcgctgagggacatgacttaatgggatttggtccattgcttcctacagaatctgaaaggtccctgatggaaagagttcgtcaggagcttaagattgagctcaagcagggttttaagtctagaattggaaggatgtgggagggaatatttagaaaacggagagctgggaaa

SEQ ID NO: 114022 - DNA, 462 bp, Glycine max
  Clone ID: PAT_MRT3847_73972C.1
tccacctacctacgcaccgagcctaagatggcagaacccaagtacttgaccggcgataagcccgcgatcgaggaatttctcagcaagttcgatacttttctctttgactgcgatggcgtactatggtccggcgatcacctctatgaccgtgttccggagacactagagatgttgaggagcaagggcaaacaactcgtcttcgtcaccaacaacagcaccaagagtcgcgccgactacaagcagaaatttgacaagctcggcatcccggcgcaagtggacgaggtcttcggttccgcctacagcgctgctgtctacatatcgcgcattcttaagttgcccgaaggcaagaacaaggtctatgtcctcggtgagactggaatcgagcaggaattgcaggccgaaaatgtgccctacattggcggcactgatcccagccttcgccgcgacatggaaccggcggac

SEQ ID NO: 114023 - DNA, 215 bp, Glycine max
  unsure (1)..(215): unsure at all n locations
  Clone ID: PAT_MRT3847_73973C.1
gaaataactacaagccaagagagggaaaaaaaaaccatatactagaatgtataccccaacttcaataatatacaacaaatacatctccaacttgatttgtctctccaggatgctatagaaactgcaagggaattgcaagctgcattatataaaatatcattagcaaaagtggcatcnaaaaaaaaaaaaaaaaataatattaaaaaaaaaaaaaa

SEQ ID NO: 114024 - DNA, 193 bp, Glycine max
  unsure (1)..(193): unsure at all n locations
  Clone ID: PAT_MRT3847_73974C.1
gctcgagacgcgagagatcanncaacgaaaagcaataagcaaggccacccttaccattgtacttcaaacacccacgacgccatggctgtaagaatataactggaggtggggctacccactgtatacttcctagcggagatgaatccatgcattaccaatatcgtatttctttcaaatctaacactcatcatct

SEQ ID NO: 114025 - DNA, 425 bp, Glycine max
  unsure (1)..(425): unsure at all n locations
  Clone ID: PAT_MRT3847_73975C.1
gacgaattattttttctttcctattccttggtttttcctctaccaaaatgactattaagctcacttgacactaatttgaaatcagagaggcatgataagttaataacagttctgcacacacttggaagagtttatgcctatcaaattctcaaaactgattcaaaacacacagtgcatgtaatcatgactcatgcacaacctttttgtaggtgaaggggntatatatatatatatatatatatatatatatatatatatatatatatatatatatatatatatatatatncctctgggcgatgcaactaggcggggctgctgatttttcttgtttcgttttgatcaaatcaaaagcatttcaagtttcaacgggcaaacttggcaacactctaaatatattatacttatttgcttaaacactgaca

SEQ ID NO: 114026 - DNA, 247 bp, Glycine max
  Clone ID: PAT_MRT3847_73976C.1
attgagttacagccatgtgggcgacaatgatggtatgattacctgaaaccgtcaagctttgcggtctactgaaattgccaaaagctacggcagggacgatatcggcagcagcagctgcatgatgtatcaacacttgaaacacacagaccatgccaccaccattacctacggtcattaagtagcacacagtaagactgacatggatgatgacactattgagatactcatgtgagaaaagaacacaatg

SEQ ID NO: 114027 - DNA, 295 bp, Glycine max
  Clone ID: PAT_MRT3847_73977C.1
acagaaaacggggagggaggttaatttcaactaacaaggttaaaggatcataaaccctagactatagaatttgattattactggtcaggggataggacatacgttagggggtggagcaggaaacccaaatctcttgtttaaacagcacaccgctcaaaattaaatttatttaagcggagggcgatggacataaaccttaagccgaaagccaaaaggcctttcgctgtttcttggtgaaacaaaaagaagcaggattcaataatttggcagatgtcaggtttcttgttcagacttc

SEQ ID NO: 114028 - DNA, 513 bp, Glycine max
  Clone ID: PAT_MRT3847_73978C.1
cttattccctcccaaacattaatctctttcgatttttctcctaaagctgcttcctttcgctttttttctctactgggtacgcctccacctctccctttcttttccctctttttggctcaattctcgttcttccgttctgatctcaaacacctaactttatgtttctccaattgttttcaccagtcacgtgctcaatctgttagatcagtgttcactgtttgctgatttttaatttttttctctgattggtgtttgtttggttgcacaaattcactcttttttcaccagggggtgtttttttttttctgtgtcgtataaatttgaaggattagaagatcctcttttgatcttcggttttgaacggtgtttttgggggggtgtgattagttctcttctgatgttttatttccaatcactatttcaaatatcacctgctaattatctatcatctagaccccctttctcctactcaattcccatgtttttctccccttgaggtgttcttatatgctg

SEQ ID NO: 114029 - DNA, 604 bp, Glycine max
  Clone ID: PAT_MRT3847_73979C.1
cagggaaaaaggaaaatggggctattttttggggtctgcatgggcaaataaatgcttggtaaaattatgatacttgttcttttcttagcccacttaaaccaatcagtggcccaaaaagaaaaaacccaaaacccattacaatccgattggggaagataatatactttgataactgggaatgatgaggggtattcccaaagttatttttgaacatgtatgggactgaaaactcctttattgtggtgtaagtcacaaaaaagctgaccaaacagggtggaactttaacgaaatcttccaaggggcttaaaagggtcttccctaacatttttgttccagggttttaccaccttacgaacaaggtggttgaactgtaacaccttgtgctattatgggcccttaatttgttaaaaaagccccttgttgaaattccccatgtggttggggtcgaaaaaaaatgaattttccccttggttggggggtaacaatgggatccttttggtttttcaattggggcaaattcttttttttggacaccttaaaaaggtgccaccccaggacctattggaattccttaaactttaagcttttcaggtttaaaccccat

SEQ ID NO: 114030 - DNA, 259 bp, Glycine max
  unsure (1)..(259): unsure at all n locations
  Clone ID: PAT_MRT3847_7397C.1
caaagttatctatactggaaagcaagtagagtggaacagcccaataaataatacgcagaagagtgaaaacaaaacatctcagttcgaggccatccaatccattgttcctgcaagaatatacttggcattaaaaggtgatgtattcaatgaatatctatcttnattacgccaaatttccagggcagaagctttccgcagttcacaaggagttgagaagaagagaagaggaagggtacgtggntttcaccattacttgaac

SEQ ID NO: 114031 - DNA, 351 bp, Glycine max
  Clone ID: PAT_MRT3847_73980C.1
gaaacatgctgcaccacgtcaagggtatatcattgaacaattttggttgggttgtggtttccagaacttggaagatgcgcagacaatttgtgcttacccttttcctatactgtagggcacctacattttgggggcctgatcgaatttgacaaaatgatatgtagaataattattatttacataagctatatttatatatatgtacatgtagtgtgcgcgctatactttacgtatgttcttagtgagtgggttgggttcatgttttcatactaatgcacgctgagacagtgtgtgatatcggaatctcagttgattcctattttctttaatgttatcttttattgattcttg

SEQ ID NO: 114032 - DNA, 241 bp, Glycine max
  Clone ID: PAT_MRT3847_73981C.1
atgagtttgagtttgagtttgagtttcagtctgagtgtgtgtgtatgagagagagagagagagagagagagagagacgcacaagcacatatactataagaatatcacacattacagtattctgagtatctctctgctgcgcagttatgaccgagaatacataggtgagatttctacagtagtgtagctgggtgcagttctcatggctgtctagcagacactcatcttccgagccataagtg

SEQ ID NO: 114033 - DNA, 527 bp, Glycine max
  Clone ID: PAT_MRT3847_73982C.1
cggacgcgtgggtttagatgagggcacaggcgcttaatggctgctcaagcgaccattattctctctgtttcttgctggctccttgccagtagatccttcggcccacgaagctttgctattaacatatgaatcagagaaagaggggcaccctggcttgctctgagtccagatgctgcttgctatcctacgggcatgctcgcagcatgaccctagaagcaatgttagatgataaacctgaaccatgaccaacgaggcgttggtcttcggtgagcatgacaatcatggactgcgtgaactacggcaatatgtgattgccagaggacggcacattggttttttcttgcacgatgttggaaaaaacgctgacttgcggtgatgttcttgaaaacaactgtgcaacttaggcctgtaatggctcaaggtgtaaacggacaactaataagaagttttaggcaattgctgctggtgaccaaggtaatatggatttacctgcctatgaatggactcccaagctgatgccctggggc

SEQ ID NO: 114034 - DNA, 267 bp, Glycine max
  unsure (1)..(267): unsure at all n locations
  Clone ID: PAT_MRT3847_73983C.1
ttggttggttagcagttgaatctnctggnttctggtgttgtgatctcttctgaggtggttgttgtggnatggcgtacangagaaggcnangtatatcnaagtcttccnncttcanggaagaatttcangntccatnattngnagatcggcaatgcttctccttcaanctnctcatcttcttcaacaccaccaccatcatctctcgctgctcaagccatcaaagnngntgcttctcgtcgtnnaccttctctntccgtggcttgtgnc

SEQ ID NO: 114035 - DNA, 323 bp, Glycine max
  Clone ID: PAT_MRT3847_73984C.1
acgcacgcgtacgcccacgcttccattcacaaccccctttttttttatacatgaccacaaccctttgggatcggtatttacacgacagcgtcctatactcattactcttactctttcacagaattactatctccgaatctttatgttgaaccatctcaagaaagacaaccaacccatgatcttggaaacatcaaacacacctagcgtagtcaaaatatttcattataatttctcaatgaaagatcatcaacaacaacattcactatctataccccacaataagatcatttcaatgaggaaattatcacccccacccatataac

SEQ ID NO: 114036 - DNA, 444 bp, Glycine max
  Clone ID: PAT_MRT3847_73985C.1
cggaagaaacttgaaaagaaactcaaacatgaaaatcacacatcaaaacaatagatctgcatcacattgaatagtttggatggtgaggcctttgaggtggaggaggcggtgtcagtgaagtcacagacgatcaagcacatggtcaaagacaaattcccgacaacgaaattcctctccccaatgttaccaacaagattctagggaaggttatcgagtattgtaagaagcacattgaggccaattgcgctgatgaaaagcccaatgaggatgaactcaggcttgggacgttgatttcatcaaggttgatcaggccactcttttcgatctcattctggggagtgtttttccttcaatggttcttttatttttttggtattttatggggtttttttatggtttgggggtttaggattcggggttagggtttttatgattggaggtttc

SEQ ID NO: 114037 - DNA, 465 bp, Glycine max
  Clone ID: PAT_MRT3847_73986C.1
cccagggagggaatgtgtttttcccacccgtgatctcttcccttttttataaaaggggttctcaaattcccttttttttctcactaacccccacaaaaaggggtttattataaaagcgctgaaaaacccctctctctctctctctattacacagagaaaccctcataatactcataataataaaaatttaatactcctccctcgacccgttttaaaaacgcccccactatatctctgtgtgcgcaaaaaaaataaatatttttcacacaagagggccccctcatattatcctcagcgctaaaagagggagagttttgacaacagtgcggactctccaattttggacaccgatctaaaaaggtttccggggccccggatatggtttcccggccccccccccagagaaaattcctgagcgggggcggggggggaaaaaaaaacccccacaaaaagaccaccggaaaa

SEQ ID NO: 114038 - DNA, 163 bp, Glycine max
  Clone ID: PAT_MRT3847_73987C.1
agttgtgaggcctgactacacaagctcggcgcagattggagaaattcaggtcggagatggatcgccacttccacaagaggaattgcacacagcttggtcaactcaagtgcgtcatgcaacaactctgttcgctgatgggtgaccatattcgtatgctatggtg

SEQ ID NO: 114039 - DNA, 172 bp, Glycine max
  Clone ID: PAT_MRT3847_73988C.1
agcggcccgacttgaccatacttaagttgtgagtgcaatgaatcgtaaacatagctacaacaaaaagactcgaaaagccagttatcagaagagaaattttaagacattgcttgactgacttagaccaggatttctaaaaaaaaacaacctaaaaaattgaatggggcgggcc

SEQ ID NO: 114040 - DNA, 335 bp, Glycine max
  Clone ID: PAT_MRT3847_73989C.1
gcaggtgaaagactggatctagtgcgagagcttgatgctcgtactgtacacatttatcgagtgacactaatgaataatgacattacggttgatcgttagtactgactagaatgaccattgtattgcgctgtaaagatacgcttattggatagcaacgactacctgatattgaggctgcatagatcatatgagacctcatatacgatacatgttgcagtagaacaggtcgaatttgctactgcatttctgttagtaacagctagatacccggtaacttagactgtgacaagagatccttagttaccgatcgctagagccacagatactactacatt

SEQ ID NO: 114041 - DNA, 290 bp, Glycine max
  Clone ID: PAT_MRT3847_7398C.1
cttaatagtaatttctaaattaacgagcatggctccaatagttcaaacttagatttccaggaacaaatcaacatgaggacatacaaaagtgtaggacggaagcaataatcctgatttacatgtcaccgaattagctcacaactaagaaaggcagtacggtcctagagctgaagaattgcattgaataggccaggcatgcataaaacgcaatagatgctgtcctgactgactttctcagttccgcgaatagtccatgctagccaacctagctactatcgtacggaccaggc

SEQ ID NO: 114042 - DNA, 339 bp, Glycine max
  Clone ID: PAT_MRT3847_73990C.1
tccggaaataaagaaaatatactcgcatagatagaaagaatagaaatccaagtaaaatctttgtagaatggctttttgcttctatcagctttttttcttgggaattttatttgttgctttggctctgtcttcaggactaacgacgggactgagcgaaatttcaagctatcgatgcttagggcttgggctatgcaataaatttgaagaatgccaaagcgcttgtattaatgtgggtttgcatgccgtctactgtgaaaaaggtgtttgttgttgtaagtgatcaagttaaattgtacccatgcttattttataaaaatacaataaattgggtgtttgagc

SEQ ID NO: 114043 - DNA, 395 bp, Glycine max
  unsure (1)..(395): unsure at all n locations
  Clone ID: PAT_MRT3847_73991C.1
aggctgataaaggctctctctacgtcgcgggggaggaggagggggccctacnagactgtccctgancatattcannatggtttcctctttcattnaatgccgtcgccccccatgttgcatgggaccggttgggggagtggnnggtgtnnnnnnnnancncntnnnnntgnncntnnnnnagtgtggggnntnncnngggngnntgtgnnnngnngannccgtgttgggngtttgtgctgnggagagggntggtgttgcttgggttcctngggggtggtgggcnnnggctggctttttcttcttggcgggttcccgtttttgnggtttcgcnngcctgnnttgcctgngaaaccgggctcaggaatgaagggaccgatttcgtgaagagggaaatg

SEQ ID NO: 114044 - DNA, 278 bp, Glycine max
  unsure (1)..(278): unsure at all n locations
  Clone ID: PAT_MRT3847_73992C.1
gagttaaaatataccagtcgctgaaatcagcataggactgctgacacgggagccataatatgtaaattgctcagggggaatatactaatatctaggacaaaggaaaaaatgtcttctttgatacttcctaaaaaagaattgaaattttgtatgatgcgctgcctaaattagcaatgctacactactcctttatttatcttctattatttctttcctatccagngaacttacacctagttctctgctgttatacaaagggatcattacagccgttttta

SEQ ID NO: 114045 - DNA, 425 bp, Glycine max
  unsure (1)..(425): unsure at all n locations
  Clone ID: PAT_MRT3847_73993C.1
gtacttcgtaaattctggttatttgttttatactttttttcatagaggcattatatcaattgcacatgatgtgaatatggtagcatattctattttttaggggaagtttttatttttatttattggttggaactacttacgtcagtaaacgattgaaactatatcttatattctaaaaaagtcaaggcatttcaaattgtttgttcagagacaaaatcaaggaaaaaccttctgaattctttccatattggaccttgacctattggttgtcccaaatcgcaatttctttataaacaattatatgttcttttgaacatatttggcaaaaagggatggaattttatcctcgcaaaaaaaaccaagggggaagttgcgaaacggcggggcctcttcgccccaaccccgcttggnccgggggnccgcnc

SEQ ID NO: 114046 - DNA, 203 bp, Glycine max
  unsure (1)..(203): unsure at all n locations
  Clone ID: PAT_MRT3847_73994C.1
gtcncangcacgcgtacgtaagctcnnaattcggctcgatccacaccnctcanaccnanncnnanngnaccncnnnncgnnnncnnctnagaanngcaatntccanaancagngcangcgantcagcctgaancgacagccncgcngnnagcaancggacnnccggattaccgccangncttgcncgcgggcntcanacactg

SEQ ID NO: 114047 - DNA, 273 bp, Glycine max
  Clone ID: PAT_MRT3847_73995C.1
ctcttcttctctcgcggctaggcttttagctcagcttcttctagatttaaggaagattgggcaggaaaaggttcacatcagcattgcggtcattggccatgtcaactctgggaaatccactaccactggtcacctgattacaagcttggacgcattgacacgcgagttattgcgaggttcgagaaggaagctgcttagatgaacaagaagtccaccaagtattcctgggtgctggacaaactcaaggctgctcgctaaagaggaaccaccatt

SEQ ID NO: 114048 - DNA, 790 bp, Glycine max
  Clone ID: PAT_MRT3847_73996C.1
cctgcccattattcctttgtctacccacgcgtcagacggttgcaaaaagacaacaaagggggccgggaaaaagcaatctcaacttccaagttaggtcactcttccagatggcgcgtacaaagcaaactgctcgcaagtccaccggcggcaaggctccccggaagcagctggcgacgaaggccgctcggaagtctgctccggcgaccggcggagtgaagaagccgcacaggttcaggcctggaacagtggccctgagggagatcagaaagtaccagaagagcacggagcttctgatccgaaagcttccgtttcagcgtttggttcgtgaaatcgctcaggatttcaaaacggatctgaggtttcagagcagtgctgtttcggcgctccaggaagctgctgaggcttacttggtgggactctttgaagacaccaatctctgtgccattcacgctaagagggttactattatgcctaaggatattcaactcgccagaagaattagaggggaaagggcttaattttgtgatcccttttggttttagggtttacatgtttttatttagccctttctggtttccgtctctgaatctttcaaggtttagatttattgtaatgatgccattctgattgaagtattgaaattatgcgtattctcttcaagtgaatgtaaacgatttgtatggtctttgtggttgacttgttgactgttggctcagttgattatgcaaattgggtggtgttgtccaaaaaaaaaaaaaaaaaaaagaaagaaagccgccgctctagagga

SEQ ID NO: 114049 - DNA, 723 bp, Glycine max
  Clone ID: PAT_MRT3847_73997C.1
aaaagagaccagaaaaatattggttatagaactttccagaaattattttcgtatgagaaagaaaaaaaagaaagacttcaggttgtagagaaattgaatgaccccatggtaactatcttaatcccttacacggaacccttttatttccagggttgtagtaccagagccaacaatttccagggcttggatgaattccaatattcaaagcaaagttactgtgcatttggaattgaatggacattacggcaagaccaattctatggatttttacttggtcttgactcttgagctaacagcatttccatttttgacagaacttagtccacctgttagattgcagtctgttgaagcttctccgtgggatgattcgatagggaatgtccaagaatgaggggtaaggcgtaagaactaagaactcatgccttgcttgttccaaaagaaaatcaaccaatgatattaccgatatagttgctgatgatttcaccatagaccaaatcacaacagaaatgcattggatacgggtggattaaatgtaaacttgaagacaaaggtgcagtgcaacagtataatatactgtgaagtctgaagtgaatggatattgattaaaatcagttccggaactcattgctaaaagcagctatacaccttatgcttttctcatcacgggtcatgtacagacattttggagtctaaggcgaaaatgttaaaggggtctttttttac

SEQ ID NO: 114050 - DNA, 992 bp, Glycine max
  Clone ID: PAT_MRT3847_73998C.1
ttttctttcttcattttaagccttctttttgctccctatttcacattgttaagaaccctccactagtttttttctagggttaaggaaattaacctaatagctcttagcacattgccttgttcttgcactaggaagaacatgaaggagagtggtagaaaacaaggtaccatgtcgccatgtgcggcgtgcaagcttcttcgaaggagatgcacgcgagattgcgtgtttgctccttattttcctgctgatgaaccccagaagtttggtagtgttcacaaggttttcggggctagcaatgtaaacaaaatgttacaggaattacctgagcaccaaagaagtgatgcagttagttcaatggtatatgaagccaatgcaagggtgagggaccctgtgtatggatgtgtgggagccatatcctctcttcaacaacaagttgatgtgctccaaacccaattggcactagcacaagcagaggttgtgcacatgagaatgcgccaattctcaccaccatcagaacaacaacaaccctcagtgcttcctgaagcctccaattcatcatcagagaacttgtaccactcaagcagactcttgtcttcacaaaccaagtccgtttttggcatggacatggtcgttgatcaggccaacatggggcaatccttgtggtcatactagcttaattaattaggttatggcatgcatgcatgcatgcccttcactttatttatttttcttatcattattattactatcacgggcttgctttattgtctgcctcattagtaccttttttttctgctttgtatcccctttaccctagcctgttctcatgactgaaaggacatccatctctctctgcattaccaagagatgatgatgatgattagttagccttagtgtgtaaacgtataaacttgtaattatgagtaatcatatcatttgtattaagttgactatatacttttttactgcatcttagcttcacttcctgtctg

SEQ ID NO: 114051 - DNA, 460 bp, Glycine max
  Clone ID: PAT_MRT3847_73999C.1
actctataaagtgctttaaacatattggaagaggacacattgcttctcaatatcccaccaagacttgtgtgtgcattttttcaatttgatcatttgagaaattacacttcaatgttcagacctcatttgaggcataaattttgtgccctttctctccctctccctccactcatcttctcttaccttcaagctcttatccatggcttcctatggtggtgagcttgctcttgactcatcttctccttgaagcggcatctccaatcaccttcctccttctccattccgctaccattaaacttcaagaagcaaaggactccattgatgaagaagatccaagtcctacaagctccacatggagctaaatcagggtgcttccgtagatatggtttccctcactatgggttcagtgaaaatgactttagagaaaggattaaatagtgtaagattatcatgaatgaag

SEQ ID NO: 114052 - DNA, 597 bp, Glycine max
  Clone ID: PAT_MRT3847_7399C.1
cccacgcgtccgcccacgcgtccagccacgcgtccgcccacgcgtccgtacggctgcgagaagacgacagaagggggcaacaagaatttatcatttatacaaaactttgagataggttgcaaaggcttagagaagagttatggctaaaagtgagatgaaattcattggagtagtgattctgatgatgattatagtgggctctacacaagctgataacaacagccctgacttgactgggtgtgaagttaaatgtggtttcaaatgcatagcatatttctatagtaaaaaaaaatttgacgaatgttgtctcccttgtattcgaaaatgtcatcatgaaatgtccattgatgttgtctatgattgcattactggttgccgcttaaccaagtccattgatgacaacattgatgctcgtgttcttaccgttcatgcaatggattcttgtgtgcaagagtgcaagaacaagtaagagtttgttgcaaaaatgctcagaaaaaaatattagttggagaaataatatgtatccatgtttgtaataaataattcttaataaatatgtaatatctcatctttattttccgtaacaaaaaaaaaaaa

SEQ ID NO: 114053 - DNA, 652 bp, Glycine max
  unsure (1)..(652): unsure at all n locations
  Clone ID: PAT_MRT3847_739C.1
cccgcgtccgcggacgcgtgggctgtgccaaagtttggaaaaatctgagaactgtgactgagccattagccatagctgcgtagttagttagtgttttcacaaccttgtttcactactcacatgacattaaaaccaaacttgtgagtaaccccaatttttttttttgtttctttctggagaaaggttatatttttgtgctttgagagcacccttttggagtgttgtcataaaaaataacaactttgttctttgttgttgtgttgggtgttggaatttggttttggcgttttttgatagcgtggcttggttttgtttgttgctgccgtgtggtggtgatctgngaagtttgtgatgccagaaaaggtagagagccatagggctctttggtcttcttctattaattggcgttttgggttgctcactgctcttgttttgggtggcatggttgtggtttggagcgttgatggcttcactgttagggatgttattgaagcttggagctggaggtatcgacaagaatcgttttctctaaagtctcattctcctaatttcccttttttccttcatcaaaatctcactttttagtaattatagctccccatctattccacttaggttggatcaaaaccaaaccaatgcttctacccttttt

SEQ ID NO: 114054 - DNA, 338 bp, Glycine max
  unsure (1)..(338): unsure at all n locations
  Clone ID: PAT_MRT3847_73C.1
angnagcgcangcagcgtacgtnagctcggaattcggctcgagnagatagataaataatgcaccccccccctagaaacgtataagaagttttatcctcgtacggctcgaganaataaaaaattataatgtatgtagaaaattatgatgtcagatagntgcaataaaatcatgcaaatcaattaaactatgacttaagtatttntnctttcgtatttgctttttgaaaaaaaactcctcatattttataactccataactcaaattgggtttttcatccantaactaaaacgggcaccgaaggctttagtgnnatttcatttantgggtgggctccnnc

SEQ ID NO: 114055 - DNA, 424 bp, Glycine max
  Clone ID: PAT_MRT3847_74000C.1
tggcagaggtgctgtgcgattctatccaaaaggtccttcatcatgtgtagagaagtaaggtccattatacaattttttgcatgttttacctatatcatattcatatttctaagcttttgatctttcttggacaacttttatctaccaatgttgcttatatgggtatttgcagagtttcatactttgataccatgcttcaaatttttgaaaaaatttgggctcatctatattgattgtaattctcacaaaaaggtatttgacaaactagctgcatgttcttaatgggtcaactagttgcctattcctatcaatccagtgcacagctaggtggtgcatcacatgtatgcatcctatgtaatatatgttcttattggtccaatttacatttttctccacgcttttaatttctaacagccaattagga

SEQ ID NO: 114056 - DNA, 403 bp, Glycine max
  Clone ID: PAT_MRT3847_74001C.1
gacccaagcgtccgcccacgcgtccggatggtgatattgaaaagaagtcgagagctattgacgaagagaaggcgaaagaggaagaggacgcggatgccgaaatgcagctcaacatcaaccaagagtctgatgagttcagattgcctaccaaagaggagcttgatgaggaggctctccgcccacctgatctttccaatctccagaggagaaccaaagagattgttcgtgttctttcaaattttaaagctttgaggcaagatgggtcaacgagaaaagagtatgttgaacagcttaagaaagatttatgtactctactctagagtttctattatctagtttcaatcttgtcttgtaaaagaaaaaaatgaagaaaaaagaataaattaaatgggaaataataagg

SEQ ID NO: 114057 - DNA, 272 bp, Glycine max
  Clone ID: PAT_MRT3847_74002C.1
tgagaaaagccaaagcatgctactactaaatatgtttctaaagagacatacaaaatccttttctctcctttggcttcgattattgctaatcttgctgagcattgcttcagttaatggaaatgagcagaagaacttttacattgtttttttgggagctcatacagagagcagaggcaatgcacttgacacttatttaaatgttctatctgctgtgaaggagagcttccttgaagcaaaggaatccatggtatatagttacacaaagaccttaa

SEQ ID NO: 114058 - DNA, 356 bp, Glycine max
  Clone ID: PAT_MRT3847_74003C.1
gaggaagctcaatctttttttaaattaaattcatcaatttttacctgttccaccaaaatttggtttgaaatccttttaccccaaaagggaaaaaaggaagggtgggaaatctattccttgaaaaaggggggggggaaaaaaaaaaattcattcccccttataacacaggcttgactttcgggacattatcaaaaatgaagggtccaagcttaccggtcctgaataaagggaggaactttttggataccattaacccccctttttaagccttgggaggtattttcaatgccttctggagggccctaaattgcgggtcaataaggctttccagggcactttcattttttacgttccca

SEQ ID NO: 114059 - DNA, 279 bp, Glycine max
  Clone ID: PAT_MRT3847_74004C.1
gaaagaggggtgatcatgaaggccactggtgttaggcacacttgggatgcttggtatatggcaggtacacatcggtgtagcgctgagtacagctggagttttccttggattcgaggggactttctattgatcaggcctatggagagccactggtcgaaaaaggattatatcggtcttcgactgcaaagggttatttataaagggaggatttgataataaggagtagctcctgtatgaaaccgaagttaagcaaaagctgtcaatggaatagatgcgggc

SEQ ID NO: 114060 - DNA, 277 bp, Glycine max
  unsure (1)..(277): unsure at all n locations
  Clone ID: PAT_MRT3847_74005C.1
ctagtttcttacaaggntctactctactgcttcaccttntgntctagaaaattcagtggtgatacatggcttcngctactctcnctgtagcnaaaccancccttcaggcaaatgggaaaggcttctctgaattctntggcctccgcaggtcatcangctccttnccttntcnagnaaatcttcanaggatttccagtctgtcattgccttcgatanctaggncagttncgaccantggagtaganaggaggggtttgacagngngaanncnggggnt

SEQ ID NO: 114061 - DNA, 489 bp, Glycine max
  Clone ID: PAT_MRT3847_74006C.1
ttaaaataacacacacttgccacatgattgcgacaattaaaagaggtgtggaaattttcaaagatgcagagcatactcaacaggagggtcatgcctaatttcctttattgaattaaacaaacgaccaagctaaagaaaacacatttttcagatcatgcagaggatcccgcattctcagaagatctggcagtcgcctgtggaacagaaaaagctggcataatagtatgaccagcactttcaatatcttgagagattcccaagagactatcaaggactgtagactgtttgggattgtcaatgaggaaactcagatgacctgaactttgatgtgcccactgagaactccacatttcagaaccattattaggaccacatacctctattgggaagatcaattgccaccaatgtggttctgattgtgtccacttacatgcatcaaaatgctctgtactgttgctgtttgataaaaacacttgccccaatgaagcc

SEQ ID NO: 114062 - DNA, 1021 bp, Glycine max
  Clone ID: PAT_MRT3847_74007C.1
gtaccgcccctgcaggctaccccggtcccccggaattcccggggtcgacccacgccgtccgaagattgtatgatcgactcatctatgacgccaaaagaagatcgatcatggcttctatatcctgtctatcctctttctccctctccaatttctctgcacctcttcccatttccatttgttcttcatcttccaccttcctaacttcccaaataccatgcaaacccaccaaacgtagcaaaccaaaacgccaccacgtttcgaaagtgacatgcaacagtaaccaaaacaccccaacaccaaacccagaagaagaaagaccatcatacaacattctaggaaaatatagaagggatgttctccttggcattgggggcctttacggtgcatctgctcttagcaacaccaaccctttagccatggctgcagctcctattcttcaacctgacctagaacattgttgtataactgatgatgtaccacctaaaggggtcatcgaggcacaagtctattgttgcccaccaagatcttcttcccctcctatagatttcaagttgcctaaaggaacaccccttagggttagaccacctgctcaattcgtcactgatgagtacctagaaaagtataagttagcccttaagcgcatgagagagcttccatctgatgatcctcgaagtttcaagcaacaagctgatatccattgtgcttactgtgatggtggctataaacaattagggttcccaactgagctagacttcaaagttcacttttcttggctgttcttccctttccaccgttggtacctctatttctatgagagaatcttggggagcttgattgatgacccaaccttcgctcttccatattggaactgggacaaccctgatggcggcatggtaatccctctcatttacagagatgaagactcccctctttatgaccctcgcaggaatccagacatcacacctgatactctcgtagacctaaactatggcagtggccagggcccaaggttcaagtttcc

SEQ ID NO: 114063 - DNA, 596 bp, Glycine max
  Clone ID: PAT_MRT3847_74008C.1
gaagaatacttataaatatacgtagaagaatggaacttatatctttttaggatgagtttatttttattttacccattgaaccaacttttatgggcttctcttttattttgatctttttcaggtttcccaattttctatcaccaacaacaaattgcatctcttttgaacacccaactttattgaaatagttacagtttttcaaaaatagttttgcaaaattagagaaaaacactaatatataaatatgattttagtttttgcacaggtaattcaacatttgatgagtcatgcactagaattagtttttttctacgaaagataagcataagctgatttattacaaggatcgttaatgcataataagtgagaaatttgaatataaaataaaattaaaaagagaaaaagtctgtataattgattccttctttttgagtaaacccttattaacgagtcttgtcttgtatctcttaatgttgtttaatgagtcttttttttatcttaaagatctgtttatagccaatggtctttgccccattaggtaactctacaagattccaaactttgttactctacataaaattcatctcattcttcag

SEQ ID NO: 114064 - DNA, 2110 bp, Glycine max
  unsure (1)..(2110): unsure at all n locations
  Clone ID: PAT_MRT3847_74009C.1
agaagatcgatcatggcttatatctcctctctatcatctttctccctctccaatttctctgcacctcttcccatttccatctgttcctcatcttccgccttcctaacttcccaaataccatgcaaacccaccaaacgtagcaaaccaaaaggccatcatgtttccaaagtgtcatgcaacagtaaccaaaacaccccaacaccaaacccagaagaagaaaaaccatcgtcatacaacattctaggaaaacatcggagggatgttctccttggcattggaggcctttacggtgcttctgctcttagcaacaccaaccctttagccatggctgcagctcctattctcgagcctgacctagaacattgttgtataactgatgatgtaccacctaaaggggtcatcgaggcacaagtctattgttgcccaccaaaatcttcttcccctcctatagatttcaagttgcctaaaggaacacccctcagggttagaccacctgctcaatttgtgaccgatgagtacctagaaaagtataagttagcccttaagcgcatgagagagcttccatctgatgatcctcgaagtttcaagcaacaagctgatatccattgtgcttattgtgatggtgggntataagcaattagggttcccagttgagctagacttcaaagtccacttttcatggatatttttccctttccaccgttggtacctctatttctatgagcgaatcttgggtagcttgattgatgacccaacctttgcacttccgtattggaactgggacaatcctgatggtggcatggtattgccttccattttcgcagatgaagactcccctctatatgaccctcgcaggaatccagacatcacaccaactactctcgtagacctaaactatggcagtggaaaggaaccaagcgtagaacaaaacctcggtgtaatgtatacgagtgttgtctctggtgcgaaacgcgcatcgctcttccatggaaaaccatttcttgctggaaagcagcctgagctaggtggagggaccgtagagcttggtcctcatactgctgtccaccgttggaccggtgatccaagacaacctaacaaagaggacatggggaggttctattctgctggaagagaccccgctttctattctcaccatgccaacgtggatcgtatgtggaatatatggaaaacaataccaagtggaaaaagaagggatttcaaaaaccgtgattggttggaaacctcctttttcttctacgatgagaacaagaaccttgtgagtgtgaaggtgaaagattcccttgactcgaaaaagatggggtatgtttaccaagatgttgacattccatggctcgagaaaaggactaaacccaaaagaactagaaaagctaagcaggtggcgttcacacaacagtttggcggcattggtgcagcaatggctgctgagactgggccaagttccaagtttcctctcactttattggactcaaaggtaaccctactagttaaaaggccaaagcagttgaggagcaagagggacaaggaggaagacgaagaagtgttggtgattgatgggattgagtttgatggggatgatgatgtcaagtttgatgtgtatattactgatgaagatgtcgaggagattggaccagagaacacggagtttgctggaagcttttcgactctgggtcattcccattcaaacatgaacatggacaagaagatcaaaactagcttgacactgggaataacagatttgttagaggacttggatgccgaaaatgatgatagtattttggtgacattggtaccacgatctgagaatgtaagcatcacaattcagaacataaagatagagtttgagaaggaggagtgaaaatatgtcactggcaaattactacttaattattgcatgcttggctaggtgtttccaacatgcaaatgagtttaaattcatatcaccatgtttagcaatttaagagaaaaataaataaatcacgtttccattactcaatggcaaaagtaatatttgttgttttattgccaaagaacatttttattgtatgtttcgtttgttgttggcatagtaattaacaaatggtttgatcca

SEQ ID NO: 114065 - DNA, 391 bp, Glycine max
  Clone ID: PAT_MRT3847_7400C.1
tttttttttttttttttggtgtttttttttggtttttttttttataaaaaaaaggcccaatttttgatttttttgaacaacttggggggataaaaagggcccacgttaaaaaaaaaaaaaaggcgtttaaatagtagttactttgttcctggcaagaacccactattcaaatgatgggtggaacgatgttttattttacacttactgttattgccaccggagaccctttgtgaattaatatgtgaacaacggcaactagggacattggggtcttctctggacttaaaattgggttgggatggccgcctttgaagaagctccggcccggggggcgaaaaacgccccaacttttaacacccgtgtacccgcaaaattttctgccaaggggtgc

SEQ ID NO: 114066 - DNA, 317 bp, Glycine max
  unsure (1)..(317): unsure at all n locations
  Clone ID: PAT_MRT3847_74010C.1
aatcgcacgcacgcntacgnaagctcggaatncggctcgagnccaaacgnaganaaaanccacanccanccncacaacnccacacnnncccacnacnnannnnnnnaccngacgcnccnncanncgacaccnanacaacagccaccncanacggnnccacannncncncnacaccgacaacnacagcnnacacangacngcanngcacaaaaaaaanaaaaaaaaaacnnacgaaccnngaccncccccnnnancgnannacccnnccncnnncanacnaagnaagnccnannccangncnccancnnnnccnanng

SEQ ID NO: 114067 - DNA, 335 bp, Glycine max
  Clone ID: PAT_MRT3847_74011C.1
gggaaaaaaaaaccttttatttctttagggaaaatatccaatcccccatacccaaagcgggggggttccaaaccaacgaacccccagactaatagccctcgaattaccacccaaatcccccccctttttttttcgctcataaatataaaggcccggggggaaaaaaagaaaaagacccacccctcactactatggccccataccccttataaaatatataggggacccacccgggggaaataattaaaacactggcactgttggtgctggtgacaaggccaaggtaatgccttttctttcccttctttttttttttcttcccgccccgggggggg

SEQ ID NO: 114068 - DNA, 316 bp, Glycine max
  Clone ID: PAT_MRT3847_74012C.1
tttgcgtacgtccacgcgtccgaccacgcgtccggtttcttgtaaaccctatggccgacgaagccaaagacaaaggcagtgcagccttctacttcggggactatgctgtcgacatccatgactattgcgatgccagcgccctggatccctacaaccaggatctctattccaaccgatccgccgcatacgccttcctcaaaaactacgcttatgcattagtggctgccaaaaagacagcagaactggagcccgactggtccaagggtcacagccagattggcgccgcacataatgggctttgccaatacgaggaagc

SEQ ID NO: 114069 - DNA, 328 bp, Glycine max
  Clone ID: PAT_MRT3847_74013C.1
ggacttcacatttagattcaacgagtggggattgcgggctccaccacctactgttcaaactatgtacaccatcttcaatctatgtacaatatccattgggttgggcgagatattctagccaaaagtagagttgagaacaccaaacttaatgttcgagtacacaacagtcgcatcaggactcttgctctccacatcagccggaacacccgacgtgacctcgcactctccacgaccgctaccaagatcagtctcagggttcttgtcggtagggtaagtagagtcgagccagagcatgttggagtagtgggcatcccacagcgacataaca

SEQ ID NO: 114070 - DNA, 236 bp, Glycine max
  unsure (1)..(236): unsure at all n locations
  Clone ID: PAT_MRT3847_74014C.1
gctaagcacactatggcttgcatcgataacacggccaccacctctactgacgaagcaggcggagngccatcatcacccgncgngcancccggcatcctncnagnccgctcgntannnncctgcacggcgcncngctngcctncgtagngagcncgtnttcccnactcnacgctctctcagcgcgcgagcctctctgggagnacatttgccatccacgtggccctccacgagctcgc

SEQ ID NO: 114071 - DNA, 141 bp, Glycine max
  unsure (1)..(141): unsure at all n locations
  Clone ID: PAT_MRT3847_74015C.1
ttacatgcacgcgtacgnaanctcnnnttcggctcnaagttctagatcgcnatcngcngccgacntagtgagatcgtngacccggganttntattccgcgatcggtcacctgacanagcgtacccagctttaccctatagt

SEQ ID NO: 114072 - DNA, 501 bp, Glycine max
  Clone ID: PAT_MRT3847_74016C.1
aataagaaatggaggcccttttaccaataaatttatcaatggggggaaaaaaaaaccattggtttgtggggaacaggatgggaggcttaaaaaaaaaaggtaattggaaaaagggcagggaaccccccacatttttaaaacacaaacaacccttcctattatgtcttggcttttaaggaaacaacatttcatggacaaaaatccccctaaactttttcatattgggggcccctaacccacaaaacatttaactcataaagggcaatttttttcaaatgggattataaaatccccaggtttttttttaaccaaaaacacaaaatcttaaaataaaaatccctcccagctccaaaaataggagcccacccctaaagccaatccctggaaaataggaggccttttatcaaattcccaaaagtcagctagcttttacttggcggtgggaccttcccatgctggagttcctactacgggaaatttagatgggggcccttgaatccg

SEQ ID NO: 114073 - DNA, 222 bp, Glycine max
  unsure (1)..(222): unsure at all n locations
  Clone ID: PAT_MRT3847_74017C.1
agccttggtttttttttttcgacaaaacgaattcgtttcttcttatttcacaaattcacacaccggcaattcatttgttgtactaggaaagaaaaaccattgcataatactggtaatagtaatttagagaaacaagcaaaacacttttactaaagcgccctccgtgaaanggttatncaccaaagctatggaaatgaaactggctgtccaagaagcaagggg

SEQ ID NO: 114074 - DNA, 413 bp, Glycine max
  unsure (1)..(413): unsure at all n locations
  Clone ID: PAT_MRT3847_74018C.1
actgtatgagatcactgtatgacgtcctccttctttgggggggggggggggaaactgggaaggaatgagccccagggaaaaatgacggctaagcgaatagcaaggcaaaacatactaaatgaaaagactattgaaaagcaaacataaataatggtagtaaggtgaataaactaaatgtaataaaacgaggatggaagggacgtaaatacatggaaatttagcgtagtcgtccatgtggtangccggtggttggtggggttgttgttggcctgcgtagttctgcgagtattacacgtactactacactactaatcgcctaatcgtaaagggatggcccgttggtacagatgttggcattggcgtgcttgttccaaacaagaagtgcgtgtaattccaatagtaacaataggtgg

SEQ ID NO: 114075 - DNA, 1046 bp, Glycine max
  Clone ID: PAT_MRT3847_74019C.1
aaataaataactgctgtcattacagacttgaaacctcgattctgtgtatgacataatccagtgctaacatgaaacctgctcaccaatcacagagataaagggaccacagtgtcagcgttttacataataaaccttcagtgtctgggatctcggactcaactggccagagctggaacccttgcctccctgcccttgatcgagtttaaaggagaagtttggaagacaaaacaaaataaaataaagtggtaacacgtgttagaaaccaagatcctcctgggtcaggagagcacaggacctcaaattcctttgtagttattatacaagtagcacacaataccctttccgtagcagtgtaagggctactcaggcagggtcctagaaaatcaatccaaggcttcctaaaaccttcttcagaacagacagcgtgagagtacacgcctgcgcatgtaaaagtggatccaggttggcctggaacttgccatccttctgtcttagtctctgagtgctgggactagaggcttgtgccgctgttcccagtaaaaagatcaaggtttaccattgagtctaaagtcaataaggaagtttcagtatcttataactaccttgatatctataaactctaacatctgcttaattttccgagcctactttcttcctctgtgaatggcaacacaattgcttgaagtagctctgagactacagcgctcctgaagactggcatacgcggctccccaggtagtctggctaccccacaagcaggcagcaaggcctccatgagacaggcctgcctgttattcttgcccctgttggctaaagctcgaggcagggtgctgttctctttccctagggttctcaattatagcaattcaagttagggctttgttatcagaagctggaggtggggctttttagtcaaaccgcagagcagcatcttcctctgaggccagggcagctgttacaggaagtacaaacaggtaaacctagctctgtgtcccagaagggaagggcacctgtccaagctgccctggccgcagagcagctcttcc

SEQ ID NO: 114076 - DNA, 354 bp, Glycine max
  Clone ID: PAT_MRT3847_7401C.1
gtctttgtttgtgtcttctctttgtttctttgttttttgctgtgattgattattgtttttggtacggtggccttttccagggggaaaaagcctttctttggaaccgggggggattaaacaagccccggttttgaataatgaccttttagccagggctcccccacccttagagtacagcacgccttcgcaggacatgcattttgggcctgaacagaatggtcgcgaacttgattatgttacaaacaaaggccaaacacaagttagcggccctttaatggcaacaactactttatatccctcggtgatgccacccgggggggcaacatactttgccctgaatcagggcctgggaga

SEQ ID NO: 114077 - DNA, 538 bp, Glycine max
  Clone ID: PAT_MRT3847_74020C.1
cttttgctttgaaagggaggatatattcgcctaatgatattaatatttcgaatgttgttgacgtagcaagccaagttgccggttgtggatatgaatatggcacaggatggggcaaacaggtcttaaaaataaatattttagagagtttttagatcaataataattcctttaaaaatatgcaactaaacatgcatttttctttcactatttaacttttggaattagttttcactatatatgtttatacaactacatataataaagaaaggagtaaattacatcaatatacctttaacttttatcaaattacacataattccaccattttaaattttcttatactaaatttcctttaattttgaaaatattatattaacactctcttatatgtttgaaaatattacactgatattctcaattccctcttaaatcttacattaatatcccctataaagagatgtgaatgtaatgattaaaaaacatgaaataattatgtaattacaccaaatttgaagaaataatattgtaatttactcca

SEQ ID NO: 114078 - DNA, 495 bp, Glycine max
  Clone ID: PAT_MRT3847_74021C.1
ggaaaaaccaaggacccccctgattttattggcagaggaaaaggacaaggggagcttttttttttataaagcaggcggaggttcaaagccttagcattaacattaacattagcattagcattagcattagcatcctttttccttgatagacaacaaaaacaatccccctaaataggggttcgggaattcaagacagcaggacttcaaacccccaaaacagatttattttctaaagcaacactcactggacaaaagacactaaaccccctggaggcaattttgctttccaccatggaggaacaaaccccccattgcttcggaaaccttggaaaaaatccaggcatggtcccctggggctaaaagtttcgctttcaccatttccactctccgagcacctaaaaaacacctcatcaacagagcataaagccccattctaaaatatacccgaaaggaattttatttcagcttccccagcattcattttcaaaaccacaa

SEQ ID NO: 114079 - DNA, 345 bp, Glycine max
  Clone ID: PAT_MRT3847_74022C.1
ttttttttttttttttttttttttttttttttttttttttttttttggggaatttgcaagatttaaaaaaattctctctatttttcaatgggtcgcggttaaaaaattataaccttacttgattatacctttttttatttcaaaaacccctttttaatctttctaagacctttttaccgtcccctgccggggatttcatattttcttccccaaatcaagccagaagtttcccttaaccttggccttttttaaaaaaaaattccaccctggggttttggaaagcatttttccccccccccacgtttgaactttgaacaaactctttgaaaggaactttttcacccc

SEQ ID NO: 114080 - DNA, 594 bp, Glycine max
  Clone ID: PAT_MRT3847_74023C.1
gatttattttttttttttgttttttttttttgatttgtgtttatttgtatctttttaggtttttgttttattattaccgaggattgcagaggaaccttttttattcatgcccaaccgaaggcaagaaaggggggtaacccttgaaaccttcaacgcggcaatggacgaattataaatatataaagggcaaacaaaaacacaaaaaagcggtacacccaaaaaaaagatttccgccaaaacacctggaaaaacaaacgggtaaaaggggtccccctcataacacaagccaaaaaggacggtgttcaccccggggaaaaggtttatcctaaaaaaccaaagaacggggggccctttttgccccaacggggaagggacagcgcccaaacccagggaaacctttaccgaagggcaaaaaagaaccacgggaccccaccccccctcattattaggagaattggtacaaaaaaagaaacaccattgtcgccccaccaaaagggggggggaggaaaacccccgtaatataaaaggggttcctcccagggaaaaaatttttcggttaagcccccgtcggggaccgggggaggaaaaagaaaa

SEQ ID NO: 114081 - DNA, 541 bp, Glycine max
  Clone ID: PAT_MRT3847_74024C.1
tcgaggacaggtcgtggatcttcatcactacaaaaacaatcctatacacaaatggttatttatattaacaattcatttaccacttcaaatattatctgtttcgtttctctactatagccaaaggccatttaacccattctttaaccttatatttccacccattttttacattattttttttctaatttcacttctaatttttttcttctattttctataatctttttatttcttttcctaaattattttctttttatcctctatttattttatatctttatcatttttttttctattatttttacaatctttttttattttttttatacttatttttctattttatttacatattttctcaattttttctctttatttttcctactttttttatcatattatttttcttcttttcttcattttcttttcacttttttattaaatatttttttcttcttttttaatacattttctttattttttcttcatatttttttattatttaatctaatattttattcttcttttttatatatttttt

SEQ ID NO: 114082 - DNA, 496 bp, Glycine max
  Clone ID: PAT_MRT3847_74025C.1
ggcccccctttcccccccttttaaaagaggggggccctcaaaaaggggcggaagcattctgttttgaaggggacccaccttaccggggggaaaatggcgttaattggggggttcccccccggggccataaaaacccccccctccccattcccgggcaaaaccttaatttccccccttgggatcttcctaattaaaaccccccccccaccccccccgcgggggtcatccgggggggggggggtcccccaggatttttgggccccgccgaacctttttccttccgggattggaggggcggccccacccgaattggaaaaccaacggccacggaataaggggccctaatcatcggcggcttcgggggaaaagccgggttcttcggggttttgtaacggggggcgggctttttttctcgttaaaacccccttttggggggggggccccccttctcgggggcggaaatagggccccccggggtcatttgaggcgggggggg

SEQ ID NO: 114083 - DNA, 650 bp, Glycine max
  unsure (1)..(650): unsure at all n locations
  Clone ID: PAT_MRT3847_74026C.1
cccgcgtccgctcaagcagctgcagattgttcctataaggctggaggcgacctagtcaaggactatggcgagatgaagaaacttctagctaggccaggggccatctggattggcaagaaagttaaaccgaggtgtctccggtcaatagacttgtatccagtggtacatgcatggagctcatggatgcatcacactgtgctaccttgtgccaacgagtctaatgtaactgtagtgcgtagtcaattcctgattgctaccatcttgaatgagcctttggacatcggtcggatcatctctagtgacatccatcaagttgcccaaaccaacaagcctaaagccacactatctcatccttctttgatatgcttcttatgtgagcgagcaggtgtaggaatcccttgggatgagcctactgcgacaattcctcgccccatcaccgccgcatggatagattctcggcttgatgggccaatgggagcaccaccacagccacaggagcaacagccacagccacagccacaacaggagcaggagcagcatgctcaggaggaccagccaccggcaccctcttcccttgatcagtgtctgatgctgctcgtgcagacacagacacaacttagccaagacattcatcggctagntacagaggc

SEQ ID NO: 114084 - DNA, 654 bp, Glycine max
  unsure (1)..(654): unsure at all n locations
  Clone ID: PAT_MRT3847_74027C.1
ctttaattatgcaggtgcgcttcctatcttctttatttttaatacgtggtatgttcgtgcaccagtgcatatcttatgacaaattgtgatacttactttcatataatttgattagtttaaaatatactatattttttaattttaaatatagttatactatatttaataccttagtgctatatatattgaagtattgaagttcctttgcaaccttgccttttccatcactgtgcgtcatgcatggataactcaccttattttatgttttcaattttatctgtctctgatattatggctgactggctgtagtttatagattcaattgttcagagacactgagctgtgttttaggttgtagattcaatggttgtggagagggcacgtggtgagtcccaaagcacctcgggatctcttcagtctttatgttggggttcttcggcctttggtggaattgtgagctcctacttcagtggatctttgctggatgcatatggagtaaggtttgttttttggtgtcacatcattgcttncattgataacatctgtagttgctgttcttgtaaaagacaacctatgtttggtacaacaagagggctaaatattctttttgctgggccaggatttttgggaaagttcaaaacagcgcattattca

SEQ ID NO: 114085 - DNA, 174 bp, Glycine max
  Clone ID: PAT_MRT3847_74028C.1
aaatgccatcatttcctattttcctgtgcgaattgtataaaaatgtgcaatgctgctgtggttatttggacttcaatttcaatctatgaataaacaagttgacattttgtaatttactctacaggatcatctggcattgatgatggagcttcttgggatgatgcctcgcaaggg

SEQ ID NO: 114086 - DNA, 562 bp, Glycine max
  Clone ID: PAT_MRT3847_74029C.1
aattcggctcgagggctgacctgaacaaacctccagaaatgatctctggcaacatgacaggaggtttatcatctctgttcctacaaaatgttgaattttttcttggcatatggtctgttgcttattatgtctcttgtttgttgttaatgctgcagcaatgtgtgtctattcagcattgttcatgagatttgcatggatggttcagccacgcaactatctactttttgcttgccatgcctcaaatgagactgttcaactctatcatttttcccgatgggcaaaggcacaggggtaagcagcttgcatgcaagtaaacttaactgctatgattttaaccagttctatttgatgttactctccgtggtgttaatgtttcatatgttataaaggctattttaacttgtatgattatgatatgatacttttataatgaattgctcttttgtctatgaattgtttgttttacatgcttccacctttatttataattgactatcatcctgggctcccttcggatctgacatttgaaaaggcttcttcaagttacaagccccactatgaa

SEQ ID NO: 114087 - DNA, 216 bp, Glycine max
  Clone ID: PAT_MRT3847_7402C.1
ctacgcggacgcctgaattggcaaagacgcggtacacgattatcgcccaacacatcaagggggggttaccaaggcatgagagcacgtataaccgctttactcgtcactattgccaacgggcatgcgagctatggtgaaatgacaaagtgcaaggctggacagggggcggttcttcttaatattctttcaaaatactgtgatgcattctcctccatg

SEQ ID NO: 114088 - DNA, 460 bp, Glycine max
  Clone ID: PAT_MRT3847_74030C.1
aaccccccaaaatattattattatatcacaatccaaattactgcaatgatttatggggggcataatggaaaagtttgatggaaaaaaaagggggaactgttattggcctttggtttttttatcccactcccacatcctagttacaagggtcatcatatgaaaaccgaaagggaaaaaaaagggggggggggggggattattactggaatcctaaagcaacttggaaatacacgagtttacattggcacgaaaattttgacaaactaaactgtttaggcctttcaaggggaagcttttccatttttacaaaaacaaagggaacttcatcattcaactctgccattttgaggtgattaaaaacccttttggcataaacagggaaggcaaaagggggaactattgcaataaagaaaaaaataatggtgtataccatttccacaggaggcaaggggggcttccc

SEQ ID NO: 114089 - DNA, 743 bp, Glycine max
  Clone ID: PAT_MRT3847_74031C.1
ggctcgaggtttttgtgttgttcggtggtagtttttcagctaattgtgttaatatttaattttataatttaattttaaaattacgtaattttcaaaggacaacacacgaacaatcgaaaaacgcacaaaggtggagcctaaacctgtccatcccctcttaatcctatttattgcctctgcagacccaaaattcgggaacggtaaagaacgatgcctccattgacttcttggctggtgctgcccattctcgtgttgttggcggctccggcaacaacccctccagcacgtgcctcaccggtcgcgtcgtccttcgacggtcaacgggagtttgactatttcaagttagcgttgcaatggcccggcacttactgcaaacgcacccgcagttgctgccccaccaatggttgctgcagaggctccaattctccagcagtattcaccatacatggactctggcctgactataatgatggaagctggccgtcctgttgctctggatctagttttgatccaaaagagatatcaacattgactaatgctttagagcaatattggccatcattgagctgtagcaagccatcattatgccatggtgggaaaggaacattttgggctcatgagtgggagaaacatggcacatgctcttatcctgtgttttcgaaatgaatatgattattttctgacagttctgaatgtctatctcaaatataatattacgagcgttctaaatgatgctggatatg

SEQ ID NO: 114090 - DNA, 488 bp, Glycine max
  Clone ID: PAT_MRT3847_74032C.1
tactacgcatgcgcctcccttgtaaatgcattgacagcgaccaatttatgtttttttctacagtacaaaataatctgggatcttcggcatttctaaaccctaatctgttactaaacacgagattacataagactttaatttctttaatacacataacaaacgcactctaacgaaactctacaatctcaggccactgacatttcatcgtatacctaaaatagcaagaacccctattaacgtattcacattcacagggattggttcagaaatctgatagactagtacaagtaaatgcacgatgaagacgcatgtttgtaagacgggtttaaaagaacctgctctgctcatgaacggatttcatggggccaacactgatctagatcaacacccagatggtcaacatcatactgcaaatgggaaaccataccgtacatcgagaccacatcaccatgaaccaaacacgaatcccatagagaaagggaattgca

SEQ ID NO: 114091 - DNA, 135 bp, Glycine max
  Clone ID: PAT_MRT3847_74033C.1
ggaagatgtggagaacttaccgaagtcacagctcactagggagaagaaacttagaaggaaaaatagattaggcttttcgcataataagtttaaattacttatgcacctcaagctgtggaggagttagacaagaaa

SEQ ID NO: 114092 - DNA, 237 bp, Glycine max
  Clone ID: PAT_MRT3847_74034C.1
atccaagtattccttgggatagacttagcattagtcgggagaagttagacaactagactagagcagtacagaactataaaatatcctattcagggaacggcaaaaaaggatgcacaccaccatagaagagggagatatgattctggcaaacactcactggaaataacatacttatttcaatgagaactggttgggcacatcaagctgatgtatatttgttcagtactcattatcact

SEQ ID NO: 114093 - DNA, 480 bp, Glycine max
  Clone ID: PAT_MRT3847_74035C.1
agcgtgccaacaaaaattatatattttacccaatcatatggttaatagaaatgccatacgcatcttgaaggttcatcgactagacaataccatcagcatcttctgaactgcctcctgaaggggaatgaaaaatgttcaacgcaaccaaaatctggaataagcttaaaggatatatcacattccatgtgttactaataaacttagtatcagctaagtacaagaaaattccaactgggtccctcggtgccatgcagtatatctgtgtattctggggttaaaccagtcaaagttgaacactatagaggttattcatcttacgttattgacagcttcaacaatcagaaacacggattaattttttgttttaaccccaagcatcctatctcaaaagcagcctgttaatcaatttgatatccgcatctgaaatctctcatattctcaacccttctgcgcacaatgtgcttcaggtatggtgcacac

SEQ ID NO: 114094 - DNA, 266 bp, Glycine max
  Clone ID: PAT_MRT3847_74036C.1
gggggtggcaaccacgccccgtgaaattatgtaaacgtgtgtcgggatttcttttatttatttttctctgatgtttgggtggacctgttgaaattatgtatacattcttcaagggtttactgagatccattcggggcttactgtcgaataatccagccagcgctatagattcagattcatctttgatatttgggttcagtctttaacttttatgttatagatttgtttctagtggattgaaatgactatagttttttatgacttac

SEQ ID NO: 114095 - DNA, 610 bp, Glycine max
  unsure (1)..(610): unsure at all n locations
  Clone ID: PAT_MRT3847_74037C.1
ccacgcgtccgctgatataaagtggggccaaatcaaggggggatctgagaggagaggggcggcgatggcttttgcagttacccccaagataataacgggggcattcgataagcaaaaccaaagggggagtgtcnaaggattgtgtgggaaaaggggtcggggaagggggaagcgaactcaaaatcattcaggggaggggggggttgagcgaancancancgatggaaaaaaaggggcggaggaggaggcgtgtcaaattcgaactacggggggccggtggacaacatggggaactcatcctgcgtaacacgtgctttagccgagatactcaggggcctcaataaaagaatgcgggggactatcggcaaacatgatcggttcatcccctgggatcatgccaacagggtgctcancttctacgccccagggtggtgtggggagatacgtgatggcattttctccgacaatggctccggaactgtgggataccgggttactggacggggatctgatggggaggcanccagccttttcctttcttacttttcttctaggatttcaaatttctatcaccctttaattgggtcttcttgattcttcgatttctaac

SEQ ID NO: 114096 - DNA, 658 bp, Glycine max
  unsure (1)..(658): unsure at all n locations
  Clone ID: PAT_MRT3847_74038C.1
attttctcttttatatcggcgacgctttcattccatgtctccactctcttcatctatgaatttggaaccctttttttcattcttcttcttctctttcctattccattcagtttgatgttcccttcccccaattccctcgccaagggactcaattctcttcccaaccctctcatttcccaatcctctcactccgccatttcgtcgaacatgtggcggcacgccgccaaacacgtctgccgcggtattattcgccaaaacttccaccctccaaggcttctcgctctctcccacggctccgttttctcccccaaaagggaggttttgctgtccagcgtggcaaaactaaactgtattgcccgtggcgatttccagtttcagtttggcgccaaagggtattccggtgttgccgaggcggtttcttccactgatgtggaggaagatggtggtactgctgttgatgaaattcagcaacttttatggcaggagatgaatgacgaagtggagagtcaactgggggaggaagagggtgccccaattgatgaaattcagcaactgttattgcaggagatgaatggagaagagaagaatgattnggtgggaggagaggctgccccagttgatggaattcaagagctattgcaggggatgaagaaagaga

SEQ ID NO: 114097 - DNA, 385 bp, Glycine max
  unsure (1)..(385): unsure at all n locations
  Clone ID: PAT_MRT3847_74039C.1
tcatcgctaactcgttcatatcaaatatagttttancctttttgctaaaaccctctagatagtatatttttaataataacaaaccataccccaaatcacatttttaccattttattccttatcccaacatcattatttactatctttctattaataataatgtcgttaattaatttcctttctatatccatcttatttactttaaacaatgaaaacttttctaaatattccctacaatcttctcctatttctttcaacaagtacatttcctaattttcttgaaataattcttttcacttttaaatcatatttcacccattccatatttctaatatcaacaaaattcttttatattattttaataatattttttttacttttaatt

SEQ ID NO: 114098 - DNA, 148 bp, Glycine max
  Clone ID: PAT_MRT3847_7403C.1
gcccggcccacgcccccggttacgtgttatgagcccacctaaacggagcggacgtcactagccccacacccacaaggtaaatgtgagtaaatctgtgacacggattcgcatctgacttggacgcgaggtgaacgatatactcaagcct

SEQ ID NO: 114099 - DNA, 366 bp, Glycine max
  Clone ID: PAT_MRT3847_74040C.1
aaagtaaaacgccttaaatcttatatcgtgggatgaattgaacatttaagagtggaaaagtgcataaaaatgattggtttacctccttggagccttgtcagtggagccttaactcaccgtgagcaaggtgttaccaaatggggtactgggatgttgtgctaagtcatcaactggcccttctacagttgcatatgcttggatgtaaaaaccaagctttgtagccatagctagactaccattcttgatttgctacacgttgataaatgcagctgggactgcatccttcgctagacccacacggttgaacgtaccaccccgatgaagatcgtctctcatgaacaggccattaataattttgatgtactc

SEQ ID NO: 114100 - DNA, 117 bp, Glycine max
  Clone ID: PAT_MRT3847_74041C.1
gaacagccatagatacctagccaaatggtgactctataaactacgagagtactggttcctgcgcttcagattgtgctgggcttcatattgactgtgacaactgatgttgcaaatctt

SEQ ID NO: 114101 - DNA, 213 bp, Glycine max
  Clone ID: PAT_MRT3847_74042C.1
aggaaatataatacatttgatttatacacgtgcaacagagaatgttagcttacaattgacagaatggactctgtttttttgagttcttgacaaataaaatactttaacctatttatcatctcagcaatcaccaattgaaattgattattttgaggaatgggtgaatattgtgtgagaagaaggcaaatgttatgttggtgcaaactcacataa

SEQ ID NO: 114102 - DNA, 787 bp, Glycine max
  unsure (1)..(787): unsure at all n locations
  Clone ID: PAT_MRT3847_74043C.1
ccacgcgtccgaaattttgtttttaagatattttttttggctaatgcctcaaaattatcattttttttttcatacaatgatatgtacaaggtaaaatacccactaccaattttgatgtgtcggccatgtaacaatattttatacggacatgtcataattgaacaaatagtttggtagaaaatcactatgaggacaatgatgcatctaaaactccctaaaacatggaatgaaaatgtaacgagttaagagttcaaacttaattaagccaactcaaaattagccaagcatgcatggctcaagtgatgatttttctctgtctctctatccctccccaatttttcattatgacatagattaatagaagtatgcagtaatttagaattaaggctacgatatagtactctgatgagaaagaagtggaagaactcatctgttttattttctaacctaaatttcttcaagttaacatgttatgtgttgtaggaggctagaagcagcttagtaattttctgatcgttcaaagttgggtatgtatgctttttgattttgggaaattaaatataaatttggaatgtagagttttagggattgctgattgttgccttaaccagtgtttctaggatcactgacctttttcaaatctatgttttgttccacatgagtggaattgtacctgngtgcggctttcatggcttgtgttatgtaagaacttctaaggtgaagaaagtagaatgtcatctttaatttcagagcagctaagctanatgncatcatttttttaatacct

SEQ ID NO: 114103 - DNA, 303 bp, Glycine max
  Clone ID: PAT_MRT3847_74044C.1
acgcgtgcgcccacgcgtccgattttttttcgcaatggtgtggctgaatttattcttgtggtggagcagggcggggtggctgccggcgggcgccgccctcctccccgggccgcccaccgggttctcggtgtccggcgtggcgtggcgagacgacgacgtcaacggggcactggaccagtccgagaccctgctgagcggggtccgggtgtacctgcgccgctgcggtgacccgatgcccattacccccgtgcagaccaccgacatgtccggcacgttccggttcaccggcgtgacggcggacac

SEQ ID NO: 114104 - DNA, 339 bp, Glycine max
  unsure (1)..(339): unsure at all n locations
  Clone ID: PAT_MRT3847_74045C.1
nncccgccngnnncagcncccccnncncngncnccncncacacacnnncgccccgnccngcncnctcnccnngcncngccccacncacccncngncnngcaccccncancgccncngcgcggcggcccnccacggnccnccncccggctcacacngncaccgggcnnccnncngcnnnccncncccccagncngcncgncgcncacaccngggcggccanccgngcggcaccacncagngcncnggcccngccacancnnccggncgcncnggcccnccngncnancnccacccgccgncgngncncgcnccaggtccngggncgggncnagctcgncc

SEQ ID NO: 114105 - DNA, 814 bp, Glycine max
  unsure (1)..(814): unsure at all n locations
  Clone ID: PAT_MRT3847_74046C.1
tggnaatgatcgattctaggttcgcgggccggcctaatgaaccggttcgctgagctgatttttttttttttttttttttttagacaaaaactaaagattaatcttttttgaattattaagatccattttaagggagataggattccatgtatttctatttacacccatttgaaatcgaacaccctaataatacaataatttaggtatatctatggcccaacgattttttccaaatagtaccattattctttgtaagtgtaataataactccatagcacatcagccttatcattttctctagtccatgacacagaagttatccattttctcctctttgactccaaagctcaagagacaaccatttctaaaaaaatttctctctattaaagttttctctcttgctacttctagaagagttcacatcaaaagcaccgcatgctggatgtgactttttgttggtaacctcataaggtgtcacaaatccaatattttccacggctccaactgtgttgaatagccttcttttgttcacctcctcaaccagtgatctgtgtagtagctggctccttgtatcaatcaatgacttgttccttgttagtctacgattgtccatcatcctcttgtttttgctagtagaaggtgcttgtggtcctgccaaaactttgcactggttcaaagtgatggggtcttcattaggggaaaatcttgtgcacatgtgactctttatgatgagatgtttatcttttcttgtagaagccttatggttttcctcctgctcatccacnnnnncaaagtttgagttggaatatgtccc

SEQ ID NO: 114106 - DNA, 369 bp, Glycine max
  Clone ID: PAT_MRT3847_74047C.1
gattcgggtttttctttttattttcattttttgttttttgtataagaacagaaaaaacaaaccgttttctggtgcgtgtattttcctgaaagccaatatttttatccaactttgtgtagctacctttttaaaattacttcccacaagtcacaccttctttccgtatttgaaagaccaaaacttgaaaacccacactagttccaccatttttttaaactatgttccagatgaaagcctttaattgcctaaattaatatccagaacggagaaaccgctgtcgttgtctatcctggagggccccatcaatttcctggggggtagtttggaggcctcaaaaggcttatgcccggattctcttggggttagaac

SEQ ID NO: 114107 - DNA, 392 bp, Glycine max
  Clone ID: PAT_MRT3847_74048C.1
ataaaagaagttcgagccttcttcatacattattgagcaaagaaattaggaaaagaatattcggatttatgcttacaatcaggcctaaaatctcggtctttaccgagccgcctgctggattcagacaacagggctttaggatttacaatataatactaactttcaaatactaattcgaacgcagagataatataccagccttaatttaaaatgagactcggactccggaaccaacatctccctgtctgtattcccataccatagaaagacattcactatgccgtgagcacttggtaactggcgtgaaaccctacgtctcaccaggaggttcattaataaacttgatacctactccgggccttgcatgggaaccaatctatgttgacccttag

SEQ ID NO: 114108 - DNA, 410 bp, Glycine max
  Clone ID: PAT_MRT3847_74049C.1
cacgagactgtactcagttcgcttcattgtacctttttatcgattggagatcttatccattgtcagaggcccttgttctaggctatgctgtagatgtatgcgtacgaaggaagcatatctcctttattttaaagaaataaaaagttgtgctagatactgaagttatgacagctatctgcaacttttcttagacgtttgtctgataataaaatataattttaatcaatttattttgtttaatatgtaatttttctcttttattttaattttttattttaaaaattttgtaattttggttcaattttctattttatttatatttaatttcttttattttgattcaatttaaggtgtcactaagaaatgatttgattaattaaaatataagaaataaaagaaataaataggta

SEQ ID NO: 114109 - DNA, 656 bp, Glycine max
  unsure (1)..(656): unsure at all n locations
  Clone ID: PAT_MRT3847_7404C.1
acgcgggttttctcttccctctttctttctctaaatagaagggtagagatggaagacctgattcgggttcgttaccacgaggtgggtttatttatattatgtgcgcgcgcgcgcgtccatgtgttcctttcattctttcttatgttactcattttgatggttaatattctttatgccgatcaagtttgtcccttcaagactctaactttgcaagatgacacaagaaagtgtacatttttatctcagtaaatggcttctgcttctttatccatttcccttctctatctcctttttttttgtttattgattcttccgagatgaattgtgggtggaaggatcaaaccagcgagactctttgcaagaacacaagaaggtttacattttttatctcagtaaatcgcttcggcttctttatccattaaattaaaggaaaacttacattgggaaaaaatgtgtctttattataatttgaaaacaacagtcactttactcacttagtactttatccaagttttatacaaaattagttaaatgcataggctttaatgtttttcangtctaaggttggtaaaattttccgccgtagaaaaatactntcgcgggtgttatattctggatgcgtnataatttcctttgcccttgnttttctctttctt

SEQ ID NO: 114110 - DNA, 300 bp, Glycine max
  Clone ID: PAT_MRT3847_74050C.1
tccacctctacccagctcgtcctcccacacttccacccactcatccactaacacgtttacattactcaaccacctagccataaaaaaccgtaacgtttacaaacaacaactactgctggcatccaacccacttactcttacaaacttatttacacaccatcaacaacaacatcttcaacattttctaccatcactcattcaactatccattattaacccttcctcctacctacaacaacaacaactactatcatctaccccactcattcttaccaattcacctacataccatccacaaca

SEQ ID NO: 114111 - DNA, 239 bp, Glycine max
  Clone ID: PAT_MRT3847_74051C.1
ggcggttttgcgtgggaaaatgatcgtgtaggggagctcgtgatctgcggatgtggcgatccggccgttattatagtctggccgaattgctccaggcatcggcggagacattggcggatgggtatagtgcgaactacgtataaggcagtgatcgaatcggggttcatagttactgtcaagaggttgaaagatgctaggtatcctgccttggaagagttcagggctcacattcaagtcct

SEQ ID NO: 114112 - DNA, 527 bp, Glycine max
  Clone ID: PAT_MRT3847_74052C.1
ggctcgaggagaaaagagccaaagaaaattgcagtactccaggtgcactctgtgttctacctctgtatgccatgcttcctgcagcagctcaacttcgtgtatttgaagaagtcggggatggagagcgccttgttgttgttgccacaaatgttgctgaaacatctttaacaatcccagggataaagtatgtggttgatactgggagagaaaaggtgaagaattatgatccctctaatggcatggagacatatgaagtacaatggataagtaaggcatctgccgcacagcgtgcaggcagatctggaagaactggacctggacactgttaccgtctctattcttctgcagcctttagtaatgaatttcctgagcactctcctgccgaagttgagaaagtacctgttcatggtgttgtccttctcttgaaatccatgcatattaaaaaggttgcaaacttcccatttcctacttctcttaaagattcttctctgcttgaggctgagaattgctttgaagctcttgaagca

SEQ ID NO: 114113 - DNA, 329 bp, Glycine max
  Clone ID: PAT_MRT3847_74053C.1
aggaaaagagggggatagtggggtatgtggatgatgagtattggagtgaaagaaggggtggtgtagctaccaaggaaagtgatgtttatgggttaggggtggttttgttggagcttttaagtgggaaagggtgtgagggagggttgttggtgaagtgggctttgcctttgataagagaaaccagactcagtgtttttttttatccaacgacggcaataccacccgacatgaactctttggccacattaacccaagcagggtccgcttgtgtcgccaatccacggaaacgaacgacccccgtgggtcaagaggcacccgttatgaacaac

SEQ ID NO: 114114 - DNA, 206 bp, Glycine max
  unsure (1)..(206): unsure at all n locations
  Clone ID: PAT_MRT3847_74054C.1
annnnnntnnnttntnngnnnntnnttgggggcagcataagggggcccaggaaactatacctattcccaatcaaagcaagaaaacaccgagcccaattccaacgggagattaaaaaaatgtctgaccacgctgggcccaggaaaaccgtcaatgctaacgtttgccaaatacgaaaatattcccacagagagaatgcaggcagaaa

SEQ ID NO: 114115 - DNA, 285 bp, Glycine max
  unsure (1)..(285): unsure at all n locations
  Clone ID: PAT_MRT3847_74055C.1
cacacatcttctcancccagatggggaacctatagccnngcnanatntngntaanacnaaagtccaaattgatcaactantggcttnnannggggttnctnactggaatgtggatgaggggttccttacaggancagaaatgantcaaagacagcngtattaccnaaanccatccnccaccttgggtgncanctcncaantgccgagnacctagagcatactgcatagcctgcaggcagctcaacaggntggaggctgnccnntccangcacctaccccagttgg

SEQ ID NO: 114116 - DNA, 278 bp, Glycine max
  Clone ID: PAT_MRT3847_74056C.1
gcggggggcgggatttgcgtgtggcttacatttatgatcagctctgtcaaggccaacactattagggggcaacacgtggctgtggagcatagcaaaggatatcctgcttattctagggccatgtcttatagcagcggagccgcttcatttgaccatgtcttgacgcataaagacacgtagctctccaacaaggctgatatagggaacgggggtaatcttctggcctagcttggcaaacttatgttcaattatctttacttggagcctcgagccaccaa

SEQ ID NO: 114117 - DNA, 476 bp, Glycine max
  Clone ID: PAT_MRT3847_74057C.1
gaggaaacccaattttttattatctaagaaatatactggcagctgatccccatttttctgatagacaggattatgtacatttcccaaaatgcagttaaacgctatggaactgcggatgggctctgataattgcattgcatgcaggaaccctcattgtcaagggacaaagttagagtaatacgcccaagcgttgctggaaactggatcagatgctggtgcgcaagggttctgactagggaccttgcaagttacagtatcctcaacaacctgtccaaacatgttgaacatagccacccaaccttgcttgaattccttaactttcattttagagtttgtttaactggaatcacccagacgactagggtcacttaccacaccagggtggattgaggaaaggccttcccgagtaggctgtctaacaactatgtaccctacacttatctagttgtacaaaacctgagcagcccatatagcct

SEQ ID NO: 114118 - DNA, 261 bp, Glycine max
  unsure (1)..(261): unsure at all n locations
  Clone ID: PAT_MRT3847_74058C.1
gccacagagagaganagatangaagtaaggacngtagtaggcagtgtatttgcntgtgttgtgtngggcgttaaggatggngttgnattgcaagagcaannacatcctccttttagttttgttanccatagcnatagaaccgggatggtcatcngaggagganagcagcatcatatcacgattccagcantncctgaaaatcaacantgcccaaccnacnccgcgttaccacgaagccgccgatttcctganatcccaagg

SEQ ID NO: 114119 - DNA, 436 bp, Glycine max
  Clone ID: PAT_MRT3847_74059C.1
tttttgctaataaagtcatagctcaattaattaagaaatttaaacaatcaatcaataatgaaaattaattaggaaatgttacagttatcaacaccatggatccataatgaagctatcccagaaaaacaattgggagacatgcatgtgatataatcaatcaacgtttcggttgatttgatcgttgaagatctgtctgatcacattaattacatgaactcattcacatctaaaatatctgggatttcaaatttcaacatgttactactgtcatagctttgatctctctcgtcttctgtgttgctcccattgattatcgtggagttcgaattcagcggtgtagggcttgacgaaggtgtcgatagaactgaagcgaacctgaagttctgattgctgttattggaatgaaaatttgaaggctcggacaatggatcataca

SEQ ID NO: 114120 - DNA, 1792 bp, Glycine max
  unsure (1)..(1792): unsure at all n locations
  Clone ID: PAT_MRT3847_7405C.1
ggctcgagctcgagccgttgaaatttctctctctttattctgaatgggactcacagcactgaaggcagagaatctgaagccagtaatcctcctcaaagctggtgttcccttggctgcatcttttgctggtttgatctatgcatggattgttgcaaggaaaaacttgtctaccaaagttttttcttcaccagaaaaagagtgtgtttctccaaaaatcacttgtcatcaaggaacaaaacatgaagaaagctttcttcacaatctttcttcttttgaagatgaagaatcatcattttctcccatgaatagcagtgttctttctgggagcttggtgatccatgaatacaacaacccttgtttggaacaagagatcactagcctaagaagccaaattgaaggacttcaaatgagggaattggccttgcgtttgcagtttgagctgtattgtgaaatgaaggaacaagaatctttgcttctagatgtcaaaaacatgttgtctttggagaatgatcgcgctgagttcttgagtaaagagatttcgtcgatagagaccgagactaagaggttggggagttttgtagtccaatacatgagtgttgttgaagagcatcaatattggaaatcacagaatagggtgcttcaaaggagggttcaaaggctacttagggactcaaaggccaaatctcgtttgataaagtgtcaggctttgaagatcaaagagaaagaagcagtgatattgagaaaccatgatgccttgcaaacaagggtcagtgtcattaacaagttaaagggtgaaatcatagagctgcaaaggattttggaccaattggaggatgagaagaatgaggtcgccaagaagcttgaaaccgcagaagggtatgtgtctaagtcagacaaggaaaagatacatagaaaacctttgaaatattatttggaggttgaatcaagagatgtgagtaaggaagactacaacaaggttctcaatgaattggaggaggtcaagaaggaacgcgtaactgaagttgaagagctgattcatttgaggagggtcaatgcttgcttaagggaagagctaatgaggcactatgaagaacaacatgagcaagatagagaccatgtagaggtgtatgagtcagagcatgaattgcatcattcccttttggagcatcgcaatggttctgctcatggtgatcatgcttcttccaaaaggagaaagttgcttaagaggctcaagaggtgggttgaaggaagtgaaaaggtaagagtgaagcctgaaattaagtgccttgatatgcattctggttcctatggatcaaagaaaccacaagttcctccaagtgcaaggttctgctctagtgcttgaatccaaatagcattgcaactcttccctatgaaaaaaagtcaaaagataattagactaagtcatgatcatgatagaacaaaacttagataaagtttttaaagtctttttatgttgtttttcaatcagaagtgaagtttcatcttatgaaaatataactctgattgaaaaacaacacaaaacactccttaagaactggatctaagttttggccatcacaatatagctattgatactagacaataaagaaacttggatgttggtatagaagcagtgaactgcgtttgttgcaaaataaatgatgatgccatttcgtaatagtttgtgcattgttgtaaggcatgggggctggattaaagaatgagtcgttgtctttaaaaaaaaaaaaaaaaaaaaaacgacagggtgtatcgctggtctatgncattaatc

SEQ ID NO: 114121 - DNA, 411 bp, Glycine max
  unsure (1)..(411): unsure at all n locations
  Clone ID: PAT_MRT3847_74060C.1
naaagatnagncaancagagtactgtngcggngnataacaggtaatagcctactgtgngattgtgtggtacgngggnaaanttnacttgtgtcgcnacactnctgtgctcagcgcacagctttcnaaaagaancgacncngtgtactcannantgcccgacttccctccaggatccagatgattacccnatgccagttctctcctccagatacgggttnactngtctatatctggctgangnttncagnacttgcttcantctggnngacgacagcagganttggtagggntgttgtcattcnagnnggggcatgcggtnacccnnannttncaatttnnacgaggnaggtgccnngagcangtgttccttccnatcatccnntggcgacaaggaacgagggtngatcncn

SEQ ID NO: 114122 - DNA, 490 bp, Glycine max
  unsure (1)..(490): unsure at all n locations
  Clone ID: PAT_MRT3847_74061C.1
gcgaggggagtgtcaagccagattcatgggaagaatatgtcacgaagacgatgaggatgagaagagaagcagagatgtgagcatgtgatggggnaaattgatatgacatggtgaaatattattatgtcatgtgtgggtggcatggtacactcattctcatatttatttatgagacacactcactgtatataaagagaaccaatgcaccccaattctcattccccctcacttttgggttcaaagtgattgctgactccttatttcctagttccgtctttcctttgcacaacacagcatacacctttcgcctatagctactctctcttccttcaattcaattcctcaactctctagctcttatggaaactcaacaccaacaacccaccatcaagtctaggttcagacgcatctgtgtctactgtggtagcagccctggcaaaaaccctagctatcagctcgctgctattcagctcggaaaacaactggtgga

SEQ ID NO: 114123 - DNA, 1159 bp, Glycine max
  Clone ID: PAT_MRT3847_74062C.1
acggctgcgagaagacgacagaaggggggatcgagagtggcccagctcgcaagcaagtagaccacactgagctgtttaagtacaagcaaatggctgaaaagctgaaacaagatgagaaggaaacaaagaaattacaggatagcttgcaaatcatgcaactcaggcttgctgcaagagaacatcattgtagaacccttcaggaaaaggtccgggaacttgagaaccagattgcagaagaaaggaaaaccagactaaagcaagaaagtagatctcttgcagctgttacagttcaaccttcatcagcagcagctcataaaaccatgacagacaagaagcctccactgaatccttcaaaactgagaatgccactgggaagaataaccaattcattgcctccacggtctcctctaagatcaaagagttacactgccttcatgagtggaaaggaaaactctgtcagaaggaactcagtggtgacgagtgctgtaaggccagcttcatcatcaacaacagcacagttccttcaggcaaggaggcgggtgtccgttgctgtgagaccgcctgcaccatcaacaacgcaggtccttcagccaagaaggagggtctccattgccacactaccttctcacacaatttctgacattactactccactccgtacctcagcattacgtgttaccggtggaagcagccaacaatcacggataagaagccaaaggaaagatcggtattcaagtttgttcgccccattgccagagttgagaacatcagttgagacaactccaatgactgtaaggaggagcagcaagtttatgatgagcagtccagtaagggcagattccagggagggatccgctaggcatccaactcttcttgcacttcaacgcaagcctgtagtctggagtcctcttagaggtttgaaaagtaacagaaagtcatcactgttgccatatcgcccaacctaaatgcaataatttcccatactatgtgacaaacagtggagttttccaactaatgccaaacgtgtataaattagtattatgtttggtttatgaatcaacttagattcaattaattttttctcaaacatttaatacaaataaaacagatgtgtttgttaccccacccccgttgtgatctcgcttttaaaggccaaaaa

SEQ ID NO: 114124 - DNA, 604 bp, Glycine max
  Clone ID: PAT_MRT3847_74063C.1
ccacgcgtccgcgaaaactggtgcttccagaagttgcttcttgatatctgtcgcataccctatccatgtgggggtgcagagatctatcgttccctcataaaagttcttaaattttacaatattgaaaacagaatcctgtcctgtacccatgataatagtacaagtgccatgcatgcctgccatactctgaaagaggacttggatggtcagaaaatagggccgttctgttatattccctgtgctgctcgaactttgaatgcgataatagatgatgggttgagatccgcaaaacaagtcatttctaagatacgggagtttgcaatagagttaaacgcctcaccagtgatctctgaggattttattcaattatccacagcttatcaagaaggtatttggaaatttcctcttgatgtttcagcaaggtggagtggaaactaccaaatgcttgatcttgttcgcaaggcaggtaaatcagtggatgctgttattcgtaaatacgaggaagtgttaggcagtaggatgctgttggggatcttctgaccaaaggggcagttagcatcatgcatcaatatcttgaaccatttacaaaaccacaacaacatct

SEQ ID NO: 114125 - DNA, 283 bp, Glycine max
  unsure (1)..(283): unsure at all n locations
  Clone ID: PAT_MRT3847_74064C.1
acttcagactgggggagaaagaaangannaggagtagccatacagagggagagaaggcacctgcaaatttgacaaaacgaaagttgcggggacgggagataatgagagagaggtttttcttgatgaagaagaaagggctgcaaaaatagtaaagaatggcccccttgaaaacgcgaggaattttttttttatgaagagatagggaggaggaggaggaggtttagatatctgagggaagaataaggagaatggggaacatctaagtgactatggagaaggggca

SEQ ID NO: 114126 - DNA, 420 bp, Glycine max
  Clone ID: PAT_MRT3847_74065C.1
atcgccagcaggcaaaccctgtcaggcgaaatgactatgagcaccctagatcacatacgtatgaatgaaatcactatcaatgccgtgactgtagttcaaggcatggatatcactcatcatgaaataatcacaacgctaggtccaatacttcacctggattataccacagccaaagcttcacaacctacagctcattagatttgaacttcacgaaacagctagagtcagcacaggcatcattatcagtgttcagccaatcaacattatgtgctagatagaagaggatacatgcatcaacttccaccacctgactacagctgcagatcaatccactctggtcacggaatatcctatcctacgaattgaaaactgtagtaccatatattggacttgcatgcatcctattaactctagtcgaga

SEQ ID NO: 114127 - DNA, 484 bp, Glycine max
  unsure (1)..(484): unsure at all n locations
  Clone ID: PAT_MRT3847_74066C.1
tgggccaaaactgtccatatatttttgttatatattgttaattagatgccctttgttnggtgtgggggagaacaactcacacgtctttatttttaaaaaagcttgccttaaaaagggtcataaattttacacatttttttcttccgaaaggaactcttttggaaaggaaataatgcattcccaagggcccccattttttgatttgaatccccgaaggcgcttggggtaaaaggcttttttaaccttggccgaaccccccctttcattattggattgggggggttaaaagggggggggtttaacaggtttttcctttccactacggcaaaattggctggtaaacctccctcccccaatgtaaaagcccccccccggaactttgaggacccccccaaacacttgggttgggggaaaaacctctaatttcaccccttgaattccgggggggggcccggcaactcccgttttttttttatttggcccc

SEQ ID NO: 114128 - DNA, 1172 bp, Glycine max
  Clone ID: PAT_MRT3847_74067C.1
cacacgttcattttcatttcaccttataaggttactagttattgtgaccaaccaccccatgcctaattaagccccactttactctttctatttcttccttttcttttcatcttggttcactctcacacctacaaattaataataatacaaacacatatgggcaagttgtggaccttgatcatccagcttcattctattgctgggccggttgtgacgttattgtaccctttatatgcatcggtggtagcaatagagagtcagtccaagttggatgacgagcagtggctagcttattggatcatctattcgttcctcacccttgcggaaatggttcttcaacctatattagagtggataccaatttggtacgatgtgaaactattgacggtggcatggctggtgttgccacagttcgcaggagctgcgtacttatatgaaaggttcgtgagagagcatataaggaaatatataacggagagacagtatctctatggcaaccaccagcaacaaagcaaaaagtctcccaataacggtggcaaggccaagaaattcgtcgaattcgtcacgcccaagaaaggggatcaggaggcatattgaattggcaattggacggtgctgagcagtgtattttgagttttttaactgaggatcttccaattgatcatgaagcatctattttctctcatacacacgggcttagggtaggggaaaaatggagaaagggatttgggtcgcggctcaagaatcgaatactttataggatcatgggccaaagaaatttcaagttgggttatttgggctcagttgcaaaataaaaatttgctagttgaatccacgaggtcttcttaatgaaaattgtgtcataccaaaaaaaattctgataaaaatttgtggttgtgatttggcatgatgttgctggaacagggggatcaggaggtgtattgagttggcaattggacggtgccgagaagtgtagagttttttaactgaggatcttcgtattggtctttgaatcaactttccttttaatttggttaactgtgttttatttatgttttacgtatatatatatgtgtatgtggatctctttcgtgatcacctccttaattgttgtatcatattataatctcgtgttgtatgtaaaaaaaaaaaaaaaaaaaaaaaaaaaaggg

SEQ ID NO: 114129 - DNA, 771 bp, Glycine max
  Clone ID: PAT_MRT3847_74068C.1
ctcacttcacacgttcatgctcatttcacctttgttatttactgaggcccaaccaccccaacctaattgagcaccccttgactactctttccatcacctgctctctttctatttcttcctttgcttttcatcttagttcactctcaacgtacaaacaatataataataatacaaacacatatgggcaaggtgaggaccttgatcatccagcggcattctattgctgggccggctgtgacgttattgtacccttggtatgcatggggggtagcaatagagtcagtccaagttggatgacgagcagtggctagcttattggatcatctattcgttcctcacccttacggaaatggttcttcaacctatcttagagtggataccaatttggtacgatgtgaaactattgacggtggcatggctggtgttaccccagttcgcaggagctgcgtacttgtatgaaaggttcgtgagagagcatataaggaaatacataacggagaaggagtatctctatgtcaaccaccagcaacaaagcaaaaagtctcccaataacgggggcaaggccaagaagttcgttgaattcgtcacacccaagaaaggggatcaggaggtgtattgagttggcaattggacggtgccgagaagtgtagagttttttaactgaggatcttcgtattggtctttgaatcaactttccttttaatttggtaactgggtttatttatgtttacgtatatatatatgtgtatgggatctctttctgatcacctc

SEQ ID NO: 114130 - DNA, 569 bp, Glycine max
  Clone ID: PAT_MRT3847_74069C.1
ctcgagccgattcggctcgagcggctcgagcaaccgcatcgccaatggcgacacttctccaatcctttgctccaaacccatttcagaattcctcactagttctgggacatcaggaggtgagaggaagctgatgccaacaattgaagaagagctagggagaaggagtttgctctacagcctcttgatgccagtgatgtcccagttcgtccccggtttagaaaagggcaaaggaatgtacctaatgttcataaaatccgaggccaaaacgcccggtggaatcgtggcgcgtccagttctcaccagctactacaaaagctcctacttcaaagacagaccttatgatccctacaccaactacaccagcccaaacgagactgtcctctgcccggactcttaccagagcatgtactcccagctcctctgtggcctctgccaacacaaggaggtcctccgcgtcggcgccgtcttcgcctccggcttcatcagggccatccgcttccttgagaagcactggccccttctttgccacgacattcgaaccggcaccattaacaacacaatcacggacc

SEQ ID NO: 114131 - DNA, 101 bp, Glycine max
  Clone ID: PAT_MRT3847_7406C.1
aacattcacacgttcgaattgcaattcggagatcgtgacacggaccctacaccaccatggactccgtcgacaaattctgggctcatcgactcgctcttctc

SEQ ID NO: 114132 - DNA, 365 bp, Glycine max
  Clone ID: PAT_MRT3847_74070C.1
gaggatataagctctttaaaagatcagcttaaagcacatcctcttgtaggagatcccaatagggttctgcttctaacatgtcatggttcaatggcaacttcagaacagaaactcatatttgagaaaccacctccaaatataaggaaagtgatacttgctacaaatatggctgaggcaagtattacaatcaatgacatagtttttgtggttgattgtggaaaagcaaaagagaccacttatgatgctttaaataacacgccatgtcttctaccttcttggatatcacaagcatctgcacgtcagagaagaggtagggctggtcgtgtgcagccaggagaatgttaccacctttaccccaaatgtgt

SEQ ID NO: 114133 - DNA, 362 bp, Glycine max
  Clone ID: PAT_MRT3847_74071C.1
aaggctgcttagcctcaacttcctccatctatctcttcggcaccacaggcgtcacgacccgtatactagcgaccttaactgccttaactgcgcctgcacccaactccatgccgcattcgcgccatcaccctcacccagacgacctcagagactcgacgcgacagggacgatgattgcgaaaacagcggcatggacctcggcctagggaccagctccactgatgcctacgtcgtcgtcaagcttggcgccctaatcacctgcggccaactctacgacatcgtcggcgagcacaactgcaaacgcacggaggagcatgcccgttcccttagcatgcccctttccgcactcgacgacaacccccg

SEQ ID NO: 114134 - DNA, 374 bp, Glycine max
  Clone ID: PAT_MRT3847_74072C.1
tggttggaatttggctgtttagtgctgcaggtcggaagatgaagagggctggtcgtgagagatgatgagggctggtcgtgagagagatgatagagggcatggtcgtgagaagatgatagaaggggcttggatcatcacgtgaactaaagcagaagaacgactaggaataataaaagaacaaattaaaaaacaagtcccgcaagaaccataaagacaatatattcgccacgacaaaaactgccgtccccttcgagacaaaaactaaagtcccagctccgcttgggtccccacgtgaaataaagcagcagaaggacgaggaatatttaaataacaaattaaaaaaaaccaagtcccgaaagaatcataaagaaaat

SEQ ID NO: 114135 - DNA, 481 bp, Glycine max
  Clone ID: PAT_MRT3847_74073C.1
ccaccatcaagtagagatttttatatatatatatatatatggaaatggaaacaaaatagataaacaagaaagtgggaaagtgaactcttagaattacatgaacctggttttcctttctaaattgcgaacgagggagaccatcatcatagccaataacccaatgaagaaatagaaggaaagaagggggtgggaacttggaatgatagccacaagttttattggccggttacaaaaactataccacactttctccaaacatcctcctaggagaaagcaagaaaagggaaaaggaaaaaaaaaaaaaaaaaaaacccaagctttctatccaagacataaaaaataggcagggttctaagggggatcaacacttgggaaatcccctaacactacatacaaactcaacatgggctacttgttcaaattggaatcttcaagtgttggggcggccagcttatccaaaaaccacaccaacttccccatg

SEQ ID NO: 114136 - DNA, 229 bp, Glycine max
  Clone ID: PAT_MRT3847_74074C.1
tttattttttttttttttttttttttttgattcactttttgtgttgggggcgaatgagttctagtatagtaaaccgttcgctaaatttatggacccttccgaataaaatcaacaaattgtttatttgattattaaagaaaaatttgggagggccgttctaggtatatacgaaagtgttggtttgtgactaataacaaaaattgttactctggaatttccggtttagcta

SEQ ID NO: 114137 - DNA, 389 bp, Glycine max
  Clone ID: PAT_MRT3847_74075C.1
atctagttaacgagaccaacagcagtgtgaagactaggcggatgtatagcagataccgctggtgtcaatagtaatctgacagtttatggaaagggttttgcaggacaatgaactggttagatcacatcacctggtacaactacttcataaaactgcttatcaccatcaaccgagagcttcagaagctgtggaaattcaccaggctgaactggcaatgcaactatattgtgaaagctattgcaacgtaggcaaacttcagtatctatttattcatgcacctcgaagagcgtgatgctacttataacgacgttggagtgatgagatatccaaaatcacggatatttgtgaggacagtgagctactccttacgcattatgaactatacaaac

SEQ ID NO: 114138 - DNA, 445 bp, Glycine max
  unsure (1)..(445): unsure at all n locations
  Clone ID: PAT_MRT3847_74076C.1
tggtgcggatgggttgcgtctcatctaatcttatcttcaatcttacaccacttcagatcacacaccatggatttccttccacaaccaacactggtagggatggttataactatggggcttctctacaccatatggaggaaaaaaggcagtcctatcaacaaaatcaagggtctacaaccccctgaaccctcattggcctaaccttggatgggtcacctccacttgctaggagcaaaaacaccccttgctagaatctttgcttctctggctgataagtatggccccatcttccanatccatttaggagcataccctgcgcttgtgatttgcaaccaagaggctataaaagagtgcttcactactaatgacaaagtcttggcctcacgcccaaagtcaagtcatggtgtgcaccttagttacaattttgcagggtttggatttgccc

SEQ ID NO: 114139 - DNA, 370 bp, Glycine max
  Clone ID: PAT_MRT3847_74077C.1
gattgtggaaatcgtgaagatacaaatgcaggaactgagcatacatgccaaatgtagttcagggaataccatttcttctaaaaataaaccttacaacttgagaagcgcgtaccgcatctattccaacaagctgggcgagttgcttgagattaccccagagagagaaccctgagcttgaggactaggatgtcttgctcagagggaggggatataaacaaaggaagcagttagtgtggcacactttaaggcgaaagccataatgggactagtgatgaaggaaggagaggcgaacatagaactaggtggcatgaaagaacaacgagcagggcggagacgaggagagcgaccgtgggaagtgcggagatgtaag

SEQ ID NO: 114140 - DNA, 701 bp, Glycine max
  unsure (1)..(701): unsure at all n locations
  Clone ID: PAT_MRT3847_74078C.1
cggacgcgtgggggtttctcttcttgtttcatttatttttcttttttcttttctcttgttggctcgtgttctaaggtgaccttggaactggtttaattcaaagacacttattccatttgacattagaggccgtgttcgaatacttcatcctccagttatgacttgtttcccattctcatttggtaagaaagtgcgctttgtggcaacacatgatccagatattgatgaagtactctcaggcattcaaaatgtaagaatctatacctacaaagaactaaaagttgcctctgacaatttcagtccggccaataaaattgggcagggtggatttggttcagtttataagggactgctaaaagatgggaaagtagctgccataaaagtactttcagcagaatcaagtcaaggggtaaaggaatttatgacagagattaatgtaatctcagaaatagagcatgaaaatttggttaagctatatggttgttgtgtggaagggaatcagcgaatcttggtctacaattatgttgagaacaatagccttgcacaaacccttctaggttcaggtcacagtaatatcatttttgattggaaaacacgatctaggatttgcattgngattgcacgtgggcttgcttatcttcatgaagaagtataccacatattgttcacagagatataaaagcaagcaatattcttcttga

SEQ ID NO: 114141 - DNA, 359 bp, Glycine max
  Clone ID: PAT_MRT3847_74079C.1
ccaaattcgcccagtttgaatcgtgaaatgttaaaccatcgacacggacgtgacactggagcccgggggaggctgttcagtggagtaccatgagcgggaacagggctgggggatgggtcgatccaaacacgtggtctgatgcgtacaaggctactcgacttcatcgacaaaagatcttaaggcgaaaccacatcggtcgctcgcggctaccgcgacgggcggtctctccgtcatgcatcagtgctaactatactcgcctacgataccgtcccgtaggagactgcgttagctcgcggataggctagtttgcacccacgcatgaacgtctttggagtggactctgtgctggattaatgaat

SEQ ID NO: 114142 - DNA, 413 bp, Glycine max
  Clone ID: PAT_MRT3847_7407C.1
ggctcgaggggctagaaaccaatatgtgtcccgcgcatgactttgaccgtgcccctgcatctcggtggctttttctggacctacagagactaacctcatgctcacacgacgttgtgtgatcctatcgacataccctcacatcaggcacatctatggtccagaccacttcgatctattcaaggatttccctgatccatgacaaaatcgatcgtattttacgtgcgttccttgccatagggttagatggtatggtggcctgtggggatgggaactggggtcgtgtcagattgattattgaggcaatgatcacatatatcaagtgttcgctttattttgccgagaggaagacatggttatctgagtgtcaggcaagttccacacctgcacgagcttatttcgctcctttctaatgg

SEQ ID NO: 114143 - DNA, 618 bp, Glycine max
  Clone ID: PAT_MRT3847_74080C.1
aattcggctcgagaacccaacttatctctctcgccctttcttttctcatcttttagtaaaagggttatctcctagtttcatttttctcttgtttccaccatttttctaaggtgacctcgcgtccggtttaattcaaagacacttattccatttgacattagaggccgtgttcgaatacttcatcctccagttatgacttgtttcccattctcatttggtaagaaagtgcgctttgtggcaacacatgatccagatattgatgaagtactctcaggcattcaaaatgtaagaatctatacctacaaagaactaaaagttgcctctgacaatttcagtccggccaataaaattgggcagggtggatttggttcagtttataagtgaaaccttaacaatattatggtggatgatcagggactgctaaaagatgggaaagtagctgccataaaagtactttcagcagaatcaagtcaaggggtaaaggaatttatgacagagattaatgtaatctcagaaatagagcatgaaaatttggttaagctatatggttgttgtgtggaagggaatcagcgaatcttgtgctacaattatgttgagaacaatagccttgcacaaacc

SEQ ID NO: 114144 - DNA, 380 bp, Glycine max
  Clone ID: PAT_MRT3847_74081C.1
cccccccgatggcggggaaaaaaaaggaggggggtttttttttatccttttccccagacaattccaccattatttttgccatccaaaaatttttttttggacaaacccattgggggggatatcctttttttttttcccaaacccattttttagggccgacccacccaggggccaatttggggtaatagcattttaacctaccacccagagggcccttcctttttggcaaaaaaacgggcctaggttttttttgaagggggttattacttgcccgggtgaataataaacacaattttggccaatgccagaaaaacctcaaatttttgctttagcccaaacctctttttgttaaaccatttttttttttggaaaatttttaa

SEQ ID NO: 114145 - DNA, 479 bp, Glycine max
  unsure (1)..(479): unsure at all n locations
  Clone ID: PAT_MRT3847_74082C.1
gcaaaagtacaacccgagcaaaagcccaatacctacgtagctctcagccaagcaagaagccaacaaccaagaatccaacacgcagccttcagccaagcaagaagtgttgtgcaacaagtgtcgcacagtaaaacacagtgtcagagcagacaatgactgggcagagaggatgagagcccaataatgattaggtctatgactagtttcaataagtaattgtgctttatgttctcatcattatatcaagaaatgagagctgtaatatccatcgacctaataaaagcaagttccaactttcttaaaacaaccaatattttgaagacaactcagggatcttggtgaaatcggggaatgttgctcgaaaaagagagctggaaaacacatcagccttagaaggttcaaagcaagttcttactttcttaaaaccaagattttgaagctntagaatcaattgtggagactccatagggggattgaga

SEQ ID NO: 114146 - DNA, 691 bp, Glycine max
  Clone ID: PAT_MRT3847_74083C.1
ttatgaaaataggaaaagcaatactatatccataatttgatttgatatatgatgatccctatcctatctttgaatatgattagagatcagccaatcaaaaaaccccaggcatgtcccacgtaccagacacacaccatcatcgtctgcacccgatcatgcccccatcgtattcattcaccattattcctgccacgacgccgtttcatcaatcttcccacaccaaacgcagcaagaaagcctccacggccacgcacacacacgctttcatttcaaattgagtttaagcaccgacacttttgcaccctattcctatgtttgtgccttctccatttcattccccaaacgacgacacgtgtacctaataataataatcttcacggttttgcggattccctatgcacccagcggtgatggaaaaaatcctccccgtcatgagccaacacacctgacataaaaaacactgctatttccagctggcacttaatcgcaacccgagggtgcagtaacggtccccaactccagctgtatccaacattacaacacccacccggcgcaccatctgctatcttgagccggagcacgtaaacagatataacaaaaataaaattgatactaccaaaaccaaatgctataaaaaatggaggatgtaagaaggtgaaaatgattttttttctttctgagcgataaatat

SEQ ID NO: 114147 - DNA, 235 bp, Glycine max
  unsure (1)..(235): unsure at all n locations
  Clone ID: PAT_MRT3847_74084C.1
gatcaactcggatttcanggacctaagtgtagctgctaatgnactcgccggtcatgccgtcaggcttggtggcatgggctttggagcctcttttttcggatggttggctngcgttgctgctatttatctgttgattttggagggtacaaactggagaacagaggttctcacgncagtagtcgttccatgcgttgtggtggnctgggcttcattaatttgtcgactgcttcggggg

SEQ ID NO: 114148 - DNA, 298 bp, Glycine max
  Clone ID: PAT_MRT3847_74085C.1
gatgtcaaattcctctacgctctcttgttcaagggctgtgcaaggatcctcccagagggacgccttgacaacttgtgcaacccacaactgatccaggcgcagagcatacttgcgagctgggctgttcaagttgtgctcatcgtgtctgttaattgtcatcgaattgatcgacgaccacttggtgatagacgtcaccccctctaccctggaggggcctttgaatcaccaggtacagctgatgaatctagatcattctctgaattctacgtcactgaggtcaagaacggtcccttggcta

SEQ ID NO: 114149 - DNA, 1762 bp, Glycine max
  Clone ID: PAT_MRT3847_74086C.1
ggctcgacagcaatcattatgttcattcgttatttcaacaacatttcaggttgccacgtctatgcccaaaaaatttcccaattttccatccaattctgcataaaccctagattcacgcaagcaaaactttcttttttctttgcctccggaattggagcaccgccatatccggtcgcgtgtttcctcgttcggggacattgatgattctgcttgttccgccactggctgctgttgtcgtgttccgcttctgggatcaccgcccagtgcctaaaggaacaatcttttggcgctaaattgtggtggggttcctctatttttttctttttttctccaatatgtatagatctggagcaggcatggcttggaacgtgtttaggttctgcactgccctgagaggattaggctcgatcatgatactaatggttcttggggttgtgggtgttacctattacgctgttgtgttgactaattttggacctgccttgtttcttggaggccttgatactcttatctccttcgtggtgttgatcttgtttcattgtttgttggttatgttattttggtgttactttgcttttgtgtttatggatccggggactgtgcctcctaactggaagcctgctgctgatgaggagagaggagaggttgatccgttgaatggggtagaattaagtaatctgcagtctgatcctgcaaatcaacggttcagtgtcggtcggaagtgcactctcccctggcccctccatgtctgctgtgctctggttgtggacgttgtgtactgaagatggaccaccattgtgtctgggtagttaactgtgttggggcattaaattacaagtatttcctccttttcttggtctacactttccttgagaccactcttgtgactatatcattactgccacatttcaaaacatacttttctgacggagaaattcctggaacacctggcactcttgccacaacttttcttacttttgttttgaatctggccttttccttgagtgtcttgggatttcttgtcttgcacatgtcattggtagcttctaatacaaccactattgaggcatatgaaaagaaaactacttcaaaatggcattatgaccttggtcgtagaaaaaattttgaacaggtttttgggatggacaagggatactggttcatccctgcttattcagaagaagatatacgaaggatgcctgtacttcagggccttgagtatccatcaacaccagacttcaatgcccaagagttttgagagctagcattgccatatcaggagaaactgcttttatcttttgcaacagaaaacatggagcatccaaagcctctcgttttggtctctaagagaatctgtagcattgaagtatttaagatccgggtggcaatttgtttgcataggcacttggcatgattaatgtttttttttctttcttgatgagacgtgtgcttgtgccaagtttgaatggtgagcaatttggtttaaggatttgactagttaattaatgtgttcaaattcctgatatgttatctcactcaggattaggaactatacatggattttcttctgttcaattttttacccttcattggaactatacatcagtatatatactgatgttgcttggaatgattgttgattgaaattttacaatcaactgttccttgcatagatgatgttcaaatgtaatacgttcctgtaaatatatgcaattcacatgtcatttaccactttgaaaaaaaaaaaaaaactcgttctttt

SEQ ID NO: 114150 - DNA, 805 bp, Glycine max
  Clone ID: PAT_MRT3847_74087C.1
gattggttgatggatctacttcatcttttccagaaacctgaagaccagttttgttattcttgggttgatgcgtgctcttatagttctcaggaaaccagcttcaggtgatgagatataattgacattaactgttctagaaacagaaagtacaaagtttttcatactcaaattgtgttgttcatagaatgcgtcatgctgaatattcaaccacaatcctggcggggcttcatttttaaccaagtcattcacagtaagtatttgaaataaattgttatcaaacttgtccgaccgggtgaaatctccctgaaccaagaagaccttggaatacagctcctcaaaggtgaaatccacagcaaaataggcactggtttgtacaccattaactgaataagtcttacttctattttgaaaaacattatcaatgttagtagcattttcaagcttgatgtttgggatgcagatcccctccccgtctatggttaattgcacatcacaccatacaatgagatttttcaaactggttactgctgctaaattataggcaaattcactggaatcaggaaatatccctgaaaacccaccacgtgctatgaccaatggtggacttccggtaagagtgttccaagtggttctgttagatccttgtgcagagaccagaaccagcactgaatgaaaaagaagatgaagcagagagaacgcgcgggggacagcgcgtggcttccacattccggcgaagtttcggttttccggtaaaaaaaaacagagtgttgcggacgcgtgggtcgaccgggattccggaccggaa

SEQ ID NO: 114151 - DNA, 482 bp, Glycine max
  Clone ID: PAT_MRT3847_74088C.1
cctaaccctaggccaagatttacctgatggaaaccttggtgccttgcagaagaagggtaatgttgccaaagacaaattctccaaggtgctatggtatgccataacaaattacaggacatgggtttttgccctcctatatgggtactcgatgggagttgaattaaccactgacaatgtcattgctgagtatttctatgacaggtttaatctcaagctacacactgctggaatcattgctgcttcatttggaatggcaaatctcctagctcgtccctttggtggatacacttctgatgttgcagccaggttgtttggcatgaggggcaggctttggaacctgtggatcctccaaaccctaggaggcgttttctgcatatggcttgggcgtgccaattcccttcccattgcagtcttggccatgatcctcttcttcattggtgctcaagctgcatgcggtgcaacttttggcatcattcccttta

SEQ ID NO: 114152 - DNA, 545 bp, Glycine max
  Clone ID: PAT_MRT3847_74089C.1
ggtcgactctagagcaacaatacttttgtttatagtgaaatctggaaccaattctaacactagtatgaaagctccaattcttggagctatggggaaatctttgtgctgtgcaagaaatgaggagggttcatgatgtagcatcctgaatggagggattaacagaaaattcaaaactttggagaactttgtagcacaaatcaaaggtcagaaaaccaagattcgcacctgaggatgtggaaaagagatgttagagcacataatggcttccccaaacaggggtcccaaaacatctgcaggacattctgaggacaatgcatagcatgatacagatggggaaagaaggataacccaagaagtgatgagtggaggggtcaataaagatcactggcaagaaagattggagcttccagtctttgttagggaagatgatatgggtggatcaacagggttgagcatagtttcaggatacacaggatagaagatgatgagaagttccaagtggcataagtgaataatggaagcaaaaggcactgaattggtgacag

SEQ ID NO: 114153 - DNA, 592 bp, Glycine max
  Clone ID: PAT_MRT3847_7408C.1
caaaaatgataattattaaaaaaattagcacaacacaaaaccaatctgaaatactgatcactgaatacaccctattaagaattcttgacgaatatgtggttgcctagaataacccaataaaatataaatcactaaattaattgtacaaaactcgtaaaggatcagatgaacaatcacagtaattccctttatcctgcatcataacgctggagactatgtaagtctatgttaggagcacatagtatcaataattagagccttaaattaggagccaagagaattcgtcgtttaagctatccattgagtcaccaatatgcacagaacgtctgtatgcaaactaagcatcgtgcttctgttcctccaacataagcaaaagttcatcctggtgtacaatctttgccttttttcctttctccaagaccaaaactccttctgctaccctttcatcttcaacttgaagctcaggcattaagtttctgtctaccgtagttgagttacataagtccaccgaactgcacttctgaaatgtgaagttcggactcaagcagcttcgaatgaaagtgtctgaggtctctgcatatacatagttagc

SEQ ID NO: 114154 - DNA, 496 bp, Glycine max
  Clone ID: PAT_MRT3847_74090C.1
tgttttttagtggacaaaactggagattggatcagacttattcaaaactctccagttagttactcgctgagagaagctgctcggaagaaaggctgcttaatggataagattgagaggtctgggaacgcagccaccaaaaggagtgattgggcctcattggtacaagtgtttttaacaaacagcaccagcacagagcattttgacgcatgtgagtggacaaaatcggccccacattcctgggaattgatcttaccaatagaggtatgcggccctaataatggttatgacacgtggagttactaagtgggcaaaacaaacttcatggcatttgagatctcttattgacaatcccaaacagtcttacagattttgatattctcttgggactttctcaagacactgaaattggtgccaatactcttatgccagctttgtctgatccacaggctactgccagatcttctgaaagtgcggaatcctctgcctgatctggaat

SEQ ID NO: 114155 - DNA, 202 bp, Glycine max
  unsure (1)..(202): unsure at all n locations
  Clone ID: PAT_MRT3847_74091C.1
aaaaaacaacaaaagggggacacgggaggcctttttaacaagagggggcgccaacaacccacacgagccgcaagccacaccgcaagaaacagcgccacaaccanggcaaaacaaacaaagaaggccccaggngaagcaaccaaaaccgccncacagcacaaagaaaacgggcaagggaaagagacccgcaaaaggcgggaac

SEQ ID NO: 114156 - DNA, 287 bp, Glycine max
  Clone ID: PAT_MRT3847_74092C.1
ggaattcggatcgagcagcaggtgagtgagttagtgagcaatagttgtgagcgatgagaatggctcccaagggttgtaatcttccgtgctgtgttctgcgtctcagcactgtcactgagtcgttgtcttgcggaggatcatggactcattatgatacttctacgctgaatcatgccctcaggtcgtagacatcatcatataacaggtcaagctgctctacaagcggcacaagaacagtgctttcgcctgggtcagaaacatcttccaggtgtgtgctgtgcagagtt

SEQ ID NO: 114157 - DNA, 227 bp, Glycine max
  Clone ID: PAT_MRT3847_74093C.1
ttttttttttgattttttttgtgtcagaatttattgttggggtaccggtaaacgttggagttcctttaaggttttagtttttaagaaaccttttcggattgcaaggactgcgggcgaatgacaaccaatttggggaaaggttgccaatttggaaagaaactacccatggtgaaggaaaaagaaactttaaaaccacaacgtatctgttattgcacgagggattgtct

SEQ ID NO: 114158 - DNA, 637 bp, Glycine max
  Clone ID: PAT_MRT3847_74094C.1
ctattgtagaaaaaaatggttgaagaatgtttagagaagaccactaaaagcactaatcataagagcagattagatggagggtagcccaattgctagaagtagagggagatcaacaaaaattgttagtgaaaccatcaagaaggatttggaggtctagacatgattttcaatagaacattatggcattgtttgatctatgtagtgtagcctactccacctaggcacctagtgggaaaagacttggtcattgttgcaaaatatcttaaaaatagacatgtgctttctcttccatcgaacaatagtatctctatttaacaaagaactaaactcatttgtgggcataaatgaaaaatgttagacatggtgtttggctatatgattagcaaggattggcatggacacaccttgggagtggcatgatgataagaaccttaggagaaccacaccacaaaagctacccattttagttggggagctcataccttataaaccccacattaaaatcctaaatcccttacttttgcatttggatccctaacacatggatctctttaaacatatttttcctggggaccatctaattaaaataccttggtggtcaccgcattttaaaaaaaaaattggaccaagggcaaaa

SEQ ID NO: 114159 - DNA, 398 bp, Glycine max
  Clone ID: PAT_MRT3847_74095C.1
ctcgagccaaatcgcctcgagctttaactaatgcaatggcggatgcatcgtaccctgcatctatctaggagactagaataactgcgacaggtcgtggtttagcgcatactcgcgcggtatataatggctggaggtcggatccatatgatggcactgttcgatatggtgatgataacaaataatcatatatgagcagctgcaggtgttgcttacgctcttaacgctcatgacctgtctctctagcaaacacaatctccaacaggctgaggagaccacgactatcgaggaagtgatagaagtgacacattattgatctcaaacaaagactccgttgactctaatattgtatgacactatggacgtgcctctaccaaatggggatgtagacatatctatgc

SEQ ID NO: 114160 - DNA, 510 bp, Glycine max
  Clone ID: PAT_MRT3847_74096C.1
cttgacactatttcttggtttagttcttacatgaaaaaactttacactttggtccctactttaataagtatttacaaattagttcccaccatttgtcagcgtcataatagtgttgtgctgggctatttacaactgctatgtgactttcaccactatttttatgtggcaaattgagcagctattttgtttttcagctcttcatatactcaatggtatgatgctaaaaggagtactgcataattttctgaaatttactaaattgtaccagggtttgagtttaacatatgttaattcttgttatcttctctctcactattttggacttaaaatccatcacaatcccagttgttgaaattgtgtttataggttccgttttacttggtatggggatagatcatagataatttcttgaatggttcctatgcaactaccggaaccgttgtaaacttgtaaggcagtgttttgtcttattatcttgtgttgttagtagatgtattcagtatgatgaca

SEQ ID NO: 114161 - DNA, 252 bp, Glycine max
  Clone ID: PAT_MRT3847_74097C.1
gctcctttgaaagatttttttttctatggaaaaaggaaagactgtgagtaaatatgtacaagatggaactgtagatctcaaaggaaaacctgttctcaaatctaaaagaggtggttggaaagcatctctttgcttcttgtgtatgaggtattcgaaagaatgacttattatgggatatcatcaaacttggtcctgtatctaacaaggaagcttcaccaaggcactgtcactgcttccaacaatgtaaacaat

SEQ ID NO: 114162 - DNA, 383 bp, Glycine max
  Clone ID: PAT_MRT3847_74098C.1
cttacacttcttccagtcctcaacagcaacaagaagtagatgcggttcaattctctgatgacaaacactttgccctacatggaaagatcttgctgctagtttttctcactgccttctttcttctctttgtgttcgtcctcatgattccatggctgaagagacgtgcatggggttctcacgattcaggaacagatgaagattccattgaggtccagaataacagtaccccttcatacaactggttcagaggaagaatgaaagaagatgccaacaccatgcaacatcagtagaaaaatcaattgtctccttttattatggtacgaatacatattctgcttatttttgatcatgagatttattcttgaatttccatgcgaatatta

SEQ ID NO: 114163 - DNA, 149 bp, Glycine max
  Clone ID: PAT_MRT3847_74099C.1
gggagtagaagtacaagcttcacttcactctgatcagttcgtcattgtggcatcgataattcgtctctatagctgttaccaccgttctctctcctctttgcgcattggaatagcaactcttagtctccaatgtccaagatgctggcagt

SEQ ID NO: 114164 - DNA, 409 bp, Glycine max
  Clone ID: PAT_MRT3847_7409C.1
ccggcccggacttactgggcggacccacccacgcgtgcgtttaccatggctgtgtatgtgtatgcacacatggagcacgactgccacctatagacacttgagggcgtggactatgaaactttatgataaggaagccttgtggatgggatggctatgtaggcatgctaatgtctgaggactatattctttgtacatgctagacgagaatgaatgcgctaatccaccatgtctgccaaagatgtgatactatgcttgacactattgaacctaatggacgatacagccaatgaacttaatgcttaaagtgctgtgcaggaggggttagaaagaaggttgaattggctaccaagtttggaatctggtgtcctgcacggaaaaggatgcaaccttgcgatcccgtgcacgcgag

SEQ ID NO: 114165 - DNA, 905 bp, Glycine max
  Clone ID: PAT_MRT3847_740C.1
gggggcgagcacatcctctctctcttcataacatttccaatccatccaacatattcttcagttagctcccccaacctatacacttcaccaccacaccacaaccctaccctctctctctgtcatggtcattggaggagccttccctcgtttcgacccaatcaccaaatgtagcacccaagaccgctccaaccagaccatcgcctcggacctcgatggcaccctccttgtctcccggagtgccttcccctactacttcctcgtcgccctcgaagccggcagcgtcttccgagccctccttctcttaaccttcgtccccttcgtctacttcacgtacttcgtcctctccgaaaccctagccatcaaaaccctaatcttcataaccttcgcggggcttaaactaaaagacgtcgagctcgtgtcccgctccgtgctgccgaggttctacgccgaggacgtgcaccccaccacgtggcgcgtgttcaacgcgttcggggggaggcggtgcattgtcacggcgagcccccgggtgatggtggagccgttcgcgaagacgtttctcggcgcggatacggtgctcgggacaaagctggtggtgacggcgtcggggagggttacggggctcgctaaggagcctggtgtgcttgttggtgttcacaaaaaggaggtgatattgaaggagtttggaaccaacttgcctgatttgggacttggagacagtgtaacggacatgaacttcttgtcaatttgcaaggttggtataacagtaatatattatgcatatactccccccaatcatttcataatcaatttttatatttctatttgactgagatccctacatgaacacacggagttatttggagtatataataatttttctctctacctctcccggagagaacgtg

SEQ ID NO: 114166 - DNA, 283 bp, Glycine max
  unsure (1)..(283): unsure at all n locations
  Clone ID: PAT_MRT3847_74100C.1
aganaacgaacgagtttaagcaaatatcacttgcagtactaatggcttcaatgaataaccaaaaagaaattgagctctttgagggccaatctcttttgtacatgcagttatatggcaacctaagaactatgtgtcttgagtgggttgttcaacttggtattccagacataatacacacncatggaaaacccattactctttctgagttggtctcaactctccaaattccaccacctaaggctggnnttgtgcagcggttcatgcgttttttggtatcaatgga

SEQ ID NO: 114167 - DNA, 382 bp, Glycine max
  Clone ID: PAT_MRT3847_74101C.1
aaacaatatccccaactattgttccaaaaaagggaaaatattaagtggggaacgggaacaggggaccaaaaagttttggaaaaaaaattaacccccttgaaaagacacccgttctcaaagagtttaaaattttgataaacctgttgctttttgggcaaatgtcattttcacccccccaagtatttcccctttttttgcctgggaagaaaaatgggaagtttctttggccatcccaattggggcatttgactcacttttttttcgggggtttgaaagtttgggaattttttaaaaagcttttcctttttaatccgtttaaaggcgtgcctaaacaaagggtttttaaccaattgggggttttttttcctttgaaaattttttt

SEQ ID NO: 114168 - DNA, 1798 bp, Glycine max
  Clone ID: PAT_MRT3847_74102C.1
ctgcagccttagagccaaaagaaggtggtgcttatctggaactcctattcaaaatactattgatgatttgtatagctactttaggttcctaaagtatgatccttatgctgtatacaaatcattctacaatacaataaaagttccaatatccaaaagtactattcaaggttacaagaaacttcaagcagttttaagggccataatgctacgtcgtacaaaaggaactttgcttgatgggaagccaataatcaatttgcctcccaagacaattgagctaagtaaggtggatttttcgattgaggagcgagcattctacaccaaattggaatcagactcgcgtcttcaatttaaggcatatgctgctgctgggacagtgagccaaaactatgctaatattcttttaatcgcttttacgtctccgacaggcttgtgaccacccgcttcttgttaaagattttgattctgatcctgttgggaaagattctgttgaaatggcaaaaaatcttccaagggatatgctgattaatctttttaattgtttggaagcaacatttgccatatgtcttgtttgcaatgatcctcctgaagagcctgttattacgatgtgtggccatgtcttctgttatcaatgtgtatcagaatatttgactggtgatgataacatgtacccttcagttaattgtaaagaactaattggcgacgatcttgttttctccaaagctactttgagaagttgcatctctgatgatggtggcagtcttagttcagcaaattcacatctttgtgattattcactagtgcagcagcgtgactacacttcatctaaaatcaaagctgttcttgaggttctgcagtcaaattgtaaattgaagatttctagttctgacttactgaactcctctggaggttgtagagattcaccgtcttcggataatttatatgttgaagactgtgattcagatgttagggttacaaaacacacaataaagtattcagagtccacaactgaaggaccaataaaggctatagttttttcccagtggactagcatgttggacttagttgagacatcattgagacaatttagtatacagtaccggagacttgatggtaggatgactctgggtgcgagggacaaagctgttaaggatttcaatactgaacctgagattgctgttatgctgatgtcactaaaagcaggaaaccttggtttgaatatggttgctgcatgtcatgttatacttttggatctttggtggaatccaacaactgaagatcaagctattgatcgagctcacagaattgggcaaactcgtcctgttactgtgacacggatcactataaaagatacagttgaagataggatactggctcttcaggaagataagagaaaaatggttgcatctgcttttggggaagaccatgctggcggtactggaactcgcctcacagtagatgatctgaagtatcttttcatggtctagactctagaccactccttgcttgttctccccatttgaagttttgggcggtttggcatggagttaggagttaggacttaggatggttcttaaggagggtatggctgttttttcagtgcctgctgacatcggttgcacaagttggcaggcgaggccaggcttgcttgatccaagtcgtaacttgatctgttttgaagtccacaagggcatttttgtcctccaaactgctatatagctgaaggctgtgtctgtaaatatactaattaaattatatggtttatgaaaatatgtccttgcgcaactgccctttctgttgt

SEQ ID NO: 114169 - DNA, 428 bp, Glycine max
  Clone ID: PAT_MRT3847_74103C.1
gtttagttgttaggttgttattttttttttttttgtgttagtgagtaggacttgaaaccacatctccctcttccttttccagtcaaccttataatttctccctgaatttttttattcgcaagtgttgatattcttttgtttccaattacaatttcagtaactgttggaaaaccaggtattgtaaataatgaaactaaaattattgtgctataattttttttcattctttcgtcacatgaaaattagtgcagctcctgaaattttaatgaatcaagtttgctacattagctagcaaattagcaatgatcatgggcatgcataaagagatgggaagtctggaaaaaaaattcaaaagagtttttgattccttcaagttattctttgacttttttgatagtactatgccaaatatgtaatcttgaaaatga

SEQ ID NO: 114170 - DNA, 367 bp, Glycine max
  Clone ID: PAT_MRT3847_74104C.1
ttccaggaaggtttcccgtcatcactgtatgacgtcctccttctttggggggggggggggggaccaccaaatgaaaagagagagataggcacccgtgtgaaaaatgtatggtttaccgtagtaagataggcaagtaacggctaaacaaacgatctcgcgatggtttgcagcagttacggctaagcatatagagggagtgatagatcggatacaaactgtgcgaattggaacgtgtaaatggtggattgatgatgagagtacaaccggatcaagtacttaggaagaggaataggaggttaacccaaacccgagggttggtttgagtaagccgcctaggcaaagggaatggggtaaaagagtagggtgg

SEQ ID NO: 114171 - DNA, 647 bp, Glycine max
  Clone ID: PAT_MRT3847_74105C.1
ccggggctcgaggttcatctttcagtttctcctcctccttcctcctactctccgttgcttttcaaaattccccttcccccaaacggcgtcgtctctaacaagagctttctcacaaagcacctccatgtccataaaccttcactctcacgccttctccggcaaccctctgctctccaaattcccactccccggcaaccccctttcgccctctgcagctctcgaagctctcaacgcgcgaattagcctaaacaacactcactcttctccctccccgagcttcaaggtgctgcctttcagaaatgggaggcccttggcttcttcatcggccggttccggcgactcgccgccgatttgggatctgggttggctcggcttggacgatctcaggggtattttcgagaattcaggtgcccagttgagcgtggacttattggtgtatctgaattcgagttcagaggacgacgccgtttactgggcaatcgatgtttctgataaagtacctgaattgggtagcaacaacgagaggttgtgttttgtggatcttcgaacgctcatggtggctaccgactggtaggatttgcatgtaatgggaaacttggctattgctggtcatgctaaagcactgttggaatggcataatatttcac

SEQ ID NO: 114172 - DNA, 158 bp, Glycine max
  unsure (1)..(158): unsure at all n locations
  Clone ID: PAT_MRT3847_74106C.1
ancgtcgcatgcacgcgtacgtaagctcggaattcggctcgagggatgagtgctcttggggtagtcggtttggccctggaacctgacgtgcctatgacttgcgtttacttcaaggaantccgcgcaggnanaggnatnccctgaaatttgagactttc

SEQ ID NO: 114173 - DNA, 229 bp, Glycine max
  Clone ID: PAT_MRT3847_74107C.1
ggcatgagagggatattggatttatatagcgacgttctataattcttaacactctttcagggcaaccaaaagttgtttaagggtttaatagaaaacttacccctcctcgttgcttttaagatcaacgacgcgtattatctttaacaattgttgtttacaagcagcactagttttaagaaacagctttttctcattggtggagcatgtaggctcccaaaaagagggggtt

SEQ ID NO: 114174 - DNA, 323 bp, Glycine max
  unsure (1)..(323): unsure at all n locations
  Clone ID: PAT_MRT3847_74108C.1
ttacatgcacgcgtacgtnagctcggaattcggctcgagctttggacatttctggcagctttttaatgcgctgacattgtataacttggcccgggaccctgagtgcaaggagtggcaggtgctcatgtgcggcctccccttcctcctcctcttcctcggcaattttttcaccaccctccgagtggtgcatcagaagttccacagccagcaacacgggagcaagaaggattaagctagatctgataccagccccaaaggggttctgacctgtgtgccaggtggggcggcaggttggggatccccttgtgtgtagggggttcccn

SEQ ID NO: 114175 - DNA, 479 bp, Glycine max
  Clone ID: PAT_MRT3847_74109C.1
ccccaaataaaaggcattggggggtttttaacaaaagttaataggggacaataccaaccttggacaaaggaaaaaaaaaaagaaccatttttttaaacaagggaaaaacccggggccaaccaccccaaaaaaaaaagggaaaattattccaagggaaaaacccccctttaaaaccaaaaaaaaccaattttaaaaaggtccccaaagggttcaaccccagcccccttttaaggggaaagggctttaagggccggtttggaaacttgggggggattggcacatgggaccaggccccagtaaacattaaaaaaaaggggggggggtttaattcccggggccccacgttaataggcaggggaatttgggggctttttaaaaaaaaaaccccggacaaagccccgggaaaaaaagttaacaggggggaattcgggaaattaaaggggcggcccaacaacataaaaaaggggggccgggttggc

SEQ ID NO: 114176 - DNA, 845 bp, Glycine max
  unsure (1)..(845): unsure at all n locations
  Clone ID: PAT_MRT3847_7410C.1
gctgtctcccagaagtcattcttcgttgcatgcaagtaagtgaacagatagtggtgacacatattaacctcttgtgggtggttgtcttaaatcgtcaactaatggtgaatgtttccatatcttcaagggacagtttttgcattgacgttgttcctcgttgcttagcaatagcgggcgttggactcgaaacacatgatcgcaaggacggtggtattcttggcaccatcttggctgctggttttaaaggtgagcttcctcggtttcaagctggagttacaatggaaatgagtcctgtttggatgcatggtattctgacagagatggtaccttagagtgcccggcaacatacattgtgaaaggactttgtcgtaggtgctgtctcccagaagtcattcttcgttgcatgcaagtttctgtttctcttatgggatcgggagtcctgcctgattgtcatgatactttgatagaactggttggcagtcctgaaaccgactttcttcacttgtttagtcaacagcaattacaggagtttttattgtttgagagggaatactcaatctgcaaaatggagattacagaggagtgattattgccccttgagctgagcttggttcggtgttcttctggagctttaaattttgaaaggatgtaatgccttataaacgctaacattttcgtctttatagttgttactttgcttttagaagaaagagcaaggatgcttattgcacaaagtggccggagagtctggtgcaactgtatgcttacggtgtaaccataatttcacacaggttcaagactcgcgcattcccctattcaaaaaaatattgcagagtgnnttggaa

SEQ ID NO: 114177 - DNA, 1072 bp, Glycine max
  unsure (1)..(1072): unsure at all n locations
  Clone ID: PAT_MRT3847_74110C.1
nnnnnnnnnnnnnnnnnnnnnnnnnnnnnnnnnnnnnnnnnnnnnnnnnnnnnnnnnnnnnnnnnnnnnnnnnnnnnnnnnnnnnnnnnnnnnnnnnnnnnnnnnnnnnnnnnnnnnnnnnnnnnnnnnnnnnnnnnnnnnnnnnnnnnnnnnnnnnnnnnnnnnnnnnnnnnnnnnnnnnnnnnnnnnactatcacaacgcccccggcctccaccccccggcgcaccgccccccccaaacagccaaccccaaaacacccacccacagccgcgaccaccgcacaccaagcatctgcaccaccaccaccaacgggaccccattcgagctcggtacccggggatcctctagagtcgacctgcaggagtgcatggacatcccaagatcaccaggcagcaacgtaatcaggcttgtggtgcatgatatactgcccattctcggaagctcttgtgagagctcaggagattggaaaggttgtatatagtttggcttgtattattcaattattgagattcttgtagttataagtaatagctttttttttgtgataaaataatagctttttatcaaaaaaagagaagaaaaaaagtttcttacatgcgcaaattgcaagaaacatattattggatttaaagtccaagttttataattactatcatccaacattatactatgttgtttatgacgtttaaaaaagtagagatggtgttaaaggaatattattttgccgccagaatgtacaatttagcatcaatttttaacaaattgagaacataatgtttctaactgtgaaattttttcgacaacagtatgagatttgcaagtcaactcatttggactactttaacattgcgttaccgttcttttttaaaagagtgtagtttgtattcatgaaaattttttatagtttgccaataaaaatatcataagttcataaaaaatattcactttcaagatanatattataaaatttaaccaaattatcatacataattccagattcgataacaaaattccaattagataaaattatcatacataacaaatttgcagttagctgaatgccatcatgat

SEQ ID NO: 114178 - DNA, 942 bp, Glycine max
  Clone ID: PAT_MRT3847_74111C.1
cgttcacgtctttgcttatgtgcccaaattccgaatctgaattcgactcccgaaaaagtaacgataacaacggttacggaaccgaggcaggggatcttctctggaattataaccccgcgtatcagcctcctcaggtgtgggattttcagttacaaaaatcaagagattgccatgaaccaagagttgtaacatttgatggtctagaagttccaaaattatttcaggatgagcacaatatgaagtactcaacaattggtgatgacattgatattctatcaagaaataatcaatcggatcagtcatcatcaagccatgcaaagaagaaagaagagaacaacaaaaaagctaaaggtgggttatcatcagagtccaaactgtttgaatccataccgtacaatggcaccaacaatgtcgtagtcatggagcatcttgttggtgggaatgaaaatgttggcaccttaacagccagggttagtttggaagagttggctaagaatagaggggatgccatgttgcgttacaaggagaagaagaaaactcgaaggtacgataagcacattcgctatgaatcaaggaaggccagggctgatactagaaaaagggtgagagggagatttgtgaaggcaagtgatgttcaagcgtgatgatgagtgccttttcagaaatctcatccgagttcaatgctcgtgtgtgtgtacataagttacactataagagaaatatggatatattatagttttcatgaactccctgagcattgattgatttgaatcttttttggtagttgatttatttgaatttttgtttgttacattatatgggaagaggtttttttgtgtgagattctctcataagagggtgatatataagagagacactgacaataaattggtgagtttgtgttagaaatagtggagtaatggtaaaagtctcttgtgtctc

SEQ ID NO: 114179 - DNA, 371 bp, Glycine max
  Clone ID: PAT_MRT3847_74112C.1
gtctcttgattgttttttttttttttggtctggttttgttttcttttttggaaaaatggggaaaatccccagggtccaatgttcccccgttatatataaacttgcgggcaacgggatggggcactttttaaagaccagaatttctgttcggtggcaaggaattaaccttaagaaggcttttggaaaaaaaaaaatgttgcccggaaggttggggggaacccccccccccccttcttgggggggaacccccccctggagtgttgggagacgttttcccctttgtaaggacctgggaactttatgagacttgggaagggggcttttttatctaaaaacccgcgggggggggaggaccagcctcttcccccttg

SEQ ID NO: 114180 - DNA, 322 bp, Glycine max
  Clone ID: PAT_MRT3847_74113C.1
ctctcgtctccttctgagtccaaactctgctttcttccccacttcaatccctgtgtcctcagggtcgaccggaatactctctcgactacctctctctcctacgtcaaagcccgctactacggctgtcgctgcggacctagccgctcgcccaacgactcccgcttccgcaagtcctacgattccgacgacgacgataaagcttttcgacactcaccagatctcaggtcagataccgggaggctgatcgatcatagccagaacttggtcggagtagtgtcaacagatgacgccatacaaatagctgaatatgtctaacttgact

SEQ ID NO: 114181 - DNA, 267 bp, Glycine max
  Clone ID: PAT_MRT3847_74114C.1
ggaagagcgggctccacccacgcgtccacggacccgaggtttttagtctatttcagagaggacacacacacactctagggtctcggggtgtctgttacaacggtgctcccccaccgaagcaagggaagcaagccgacgaaaaagtcgtggaacatgtacagacacccaacaactaccagaatctcaagggatgcaaagaccgacaaaccgactcctgagggaatccgaaggtacaaactgtcgctacactccttcacaatggaacat

SEQ ID NO: 114182 - DNA, 546 bp, Glycine max
  Clone ID: PAT_MRT3847_74115C.1
cacgcgtccgctcctctactcgagctgaagcagggatgaggaagttaagtctaggctccttttcaatggcaaactctaatctcgtcatcatcctctacttctccttcttcaccttcggtagtcattaatcaacctccaaaattagcttcaccaacccaaaaacctaattataattaactcactttgcagctgaagcagaggcactacattcccagcttaagcagcaaatccaagaccaagagaagcttccattcgtgggcgtcaacatcggcaccgacgtctccaaccttccatctgcctcggaccttgtcgcgttccttcaactgcagaagataacacacgttcgcatctacgatgcaaactcagacatcctgaaaactttgtcggggaccaagattcgcgtcatcatcagcgtgcccaacaaccagctcctggcgattggttcctccaactccaccgcggactcctgaatcgatcgtaatgtcggcgcttactaccccgaaaccctcatcagcggaatctgcggcggggacgaggttctgacca

SEQ ID NO: 114183 - DNA, 304 bp, Glycine max
  Clone ID: PAT_MRT3847_74116C.1
gacaccaggcaagatatatggtgagcatcaccgtgctatcatggcccccctctgacagatgtggactgtgtcaactgagccagtttctccgtctgatcatgggtgatcctactcgtgctactgcgtggatacaccgaacatgccagacgatcaagatatgctcaatgaaaaggatacgctacatgtgcaggtgatatattgagcaaagagtcatcttcaggtgagtcaaatggatcttcttgacattgacttcattgcgcgactcatacatggttattacggcctaatccaacttgcatgtact

SEQ ID NO: 114184 - DNA, 776 bp, Glycine max
  Clone ID: PAT_MRT3847_74117C.1
aggtcgggtttgattttggattatatctgctgcaattctttttagggtttgattaaattatcccgatgttagatcttaaggcttaatacttaaattctctgatggcaagcaccagttgtgaaacatgattgaggacttgaatgtaattgataatagtccgatagaaattagcaattgggccacgagattgaattttttttttcatttttaatttatatcaaatatgatttaaaacaatgccagttacatttttttaagtctgatggtaagcaccagttgtgaaatatgatcgagtacttaatatgtccaccaacaaaaacttgatacaaattagccattggggcacggtattgcattagttttttttttttataaatattttgaaataaacatcaatttagtttttcaccaattaatagtttctgattctagtagataataccttggcacggcaatgttgagcattacaaatacattagagactagaagcggaattctgaaataaccagattggaggtttcaaccgagtgactcatccatgcttagggtttgaattacctatatgtcttgaatttattttcgtgggtcatctgaaatgaccagattagtatagattccttagaaatttagaataattgattttcagtaggtcacatggtaaatgatgttttcttttgggaaagaagaaaataattgaagacaaagcctgttattttcttgattaatcaaccattctgttgatccacaatgaaatttttcttttgttatattccccg

SEQ ID NO: 114185 - DNA, 404 bp, Glycine max
  Clone ID: PAT_MRT3847_74118C.1
gccgggttgagaggagcgtggccttctcctctccccgccatggcgtgtgctcgtccactgatatcagtgtactccgaaaagggggagtcctctggcaaaaatgtcactttgcctgctgtgttcaaggctcccattcgacccgatattgttaactttgttcacaccaacttgcgcaaaaacaacagacagccctatgctgtcagtgaattagcaggtcatcaaaccagtgctgagtcttggggtaccggcagagctgtggctcgaattcccagggttcgaggtggcgggactcaccgttccggtcagggcgcttttggaaacatgtgtcgtgggggccgcatgtttgcgccaactaagacctggcgacgttggcaccgcagagtgaatacgacgcagaagcgata

SEQ ID NO: 114186 - DNA, 350 bp, Glycine max
  unsure (1)..(350): unsure at all n locations
  Clone ID: PAT_MRT3847_74119C.1
naantcngactcntgtatgnngccacnagngntngnngnnaagnnccgncnnngacagcntnnncnnnnnccnnnnnantgncagnngatnncnacntnacgagcnnngnatnaaggggggnngtnntgaaggnnntanaanncttctaantgntncnngngtccntcgcgcaatcnagatnnggnnnnnangangtnagnngctagtnnagnagtgnttnanngacnnaccngnnntgngnctanatactnnnttgtgngnnggnnnggnatctncgncntgngngnnnctantgnnatanaggnancgcntgtgntgtttgtagngtntatnnncnnnctngnnnact

SEQ ID NO: 114187 - DNA, 292 bp, Glycine max
  unsure (1)..(292): unsure at all n locations
  Clone ID: PAT_MRT3847_7411C.1
tgacccaatgacatagttcattgtaaaccaacannaanaatnnccgggaacgaccccgctcactactccgcggccgacctttttttttttttttgaacgaaggtttttacattccttgatgttcatggctcaacggggacttaatgcttcttatctaaatctatttagtcggaatctcaaactgcattcacactctccaaacgatatgcaaaccaccgttcacagtaatttaacactgtacacacataaaacacgacaagcctcgtgagctgcacaattataaatcaccata

SEQ ID NO: 114188 - DNA, 394 bp, Glycine max
  Clone ID: PAT_MRT3847_74120C.1
ggctcgagcttgactcatgctggttcttgggccgcgtctaggcctgataggttgggacaacacgaagatggctcaacaccatccgcagggtgattgcttggttctggacgacttccaaggtgctactccgcgtgcgctggtagcacctgaagcacctgatgcagcactctggtttgcggcgattatagacagctgcaggtccttgtccgacatgggaatccgtttgcgtcactggcactagatgctggttggaacaaggcatcaggaagatatgtccgctcagctagactttcagattgggtgtatactactgagaacttagagctgccactgtacccatgctgtgcattctgctatgctgcactgtacatatgccagggggtaaactaatccg

SEQ ID NO: 114189 - DNA, 404 bp, Glycine max
  Clone ID: PAT_MRT3847_74121C.1
aacggtttgaggagtacgtaaagattgggagagataagaagtccatccagttcgagctagatgataagatattggagttgatgcaaagaaggctttccctttccgcacctatcacttctatgcagaacctagagcagccaaagctaaattgggatggcaatcaaccacaaacctccctgaagacctaaaagaacggcttgaggagtacgtaaagattggagagataagaagtccatccagttcgagctagatgataagatattggaggcgttgaaaggtccggtgactgtgtgatcccattatatccaaaatgtgtaaaaacaattcagacaagactgtaagattttttttgtcgctcaatttaaatgatgtgcaatgaagaaagtacttctctccttattcat

SEQ ID NO: 114190 - DNA, 794 bp, Glycine max
  Clone ID: PAT_MRT3847_74122C.1
cccgggtcgacccacgcgtccggatagagagaggtgaaaagaaatgttgcatcaaaaatcaaatcatgtgtgtggctctcacactctacccacctgggacctggcaggccggtgctatgaaagttacaaagttcttttctcttttcttctctctggtgtgtaactgtgtctggtgatggtggtggagaggaaccccatttgctgctcctacatcaaagtgcagatatttatttggaccctcttttgtatttaatggtttctgtttttgtgataatgggagaggaagcacaggaaaggcacttcagatcagaggtatccttttttcttttaaaattctttcctgaggtgaaggggtcaggtacattttggatttgaaacagtgaccaacagtgagttgaatgaatctggttccaactggaccagtcttttggtacagttacaaaaaccactgtcatgggtttgatcttcagaccctaagcctctctccaagcattaaagacatctatttcagctaagaaatcaaaatgtacggttgtacttaaatcggttcatctttttcatttgggggggttgaatgttgaagttttcaactttgcatatccaactttagatatcctccggagactggaatgattctccctctctgccactcagcttctgtcactgactgttagaaatatctgttttcggtttcccttttcttgatgcctgtttcagcgcaagttcccatagtcaagtccatttgtttttagttataaggtttgaagacaaacatgtaaaatattaggagttgg

SEQ ID NO: 114191 - DNA, 536 bp, Glycine max
  Clone ID: PAT_MRT3847_74123C.1
aaaaaaaaaggaaaggaaggaacttgaaagtttttaattactaaggaaggaaattaaattaacccccatccacaaaataaacaaaggagtaaaaaacagtaattaacatcatagtactaaggggtaaaaaaaaccaagttaaagccctcgaagggtttttttttttggctttttttttttttgctccttgggcttttttaagttctaaacctttgacagcaagcagggaaggtatagcaaataagttagggggggaatttttataatgggcattttttaaaaaaccccttgggttactttttttaaaaaaaggtttaccgttaaaagctttcatgggactcgaaaaagcccaaccccaatttctacttttgttataaaaaagggccacaggcgttgatttcccattcacaggagcagtttttttaggaaaaaaaaaaacccattccgaggaaaaaaacgaggcccaaaaaaacgaagtcttcatgaacccactaaacaagcctccgcaccggaccctttttttaatgaaagggggg

SEQ ID NO: 114192 - DNA, 1255 bp, Glycine max
  unsure (1)..(1255): unsure at all n locations
  Clone ID: PAT_MRT3847_74124C.1
gatacacacgcccccatacaccgtttctttcacttcacaaaaatgaaaaacatgaaattgtgttcggtgatgctatgcttatcactagcgttccttcttggggccacagcagaacaatgtggcacacaagctggtggagcgttatgcccaaatagattatgttgcagcaaatttgggtggtgtggtgacacagattcctactgtggagaaggttgccagagccaatgcaaatctgcaacaccctcaacaccaactccaacaacacctagtagtggtggagatattagcagactcattagctcttctctctttgatcaaatgcttaaataccgaaacgatggccgctgttctggccatggattctacagatatgatgctttcattgccgctgctggctctttcaatggctttggcacaaccggtgatgacaacactcgcaagaaggagattgctgctttcttggctcaaacttctcatgaaaccacaggtgggtgggcaagtgcaccagatggtccatatgcgtgggggtattgttttatcaacgaacaaaaccaggcaacttattgtgatggtgggaattggccatgtgctgctggtaaaaaatattatggccgaggaccaatccaacttacacacaactacaattacgggcaagctggcaaagcacttggtctggatttgataaacaatccggatcttgtagccacagacgcaaccgtgtcattcaagacagccctatggttttggatgactgcacagggaaacaagccatcaagccatgatgtgatcactggaagatggactccatctagtgctgacagctcagcgggtcgggctcctggctacggtgtcatcaccaacataatcaacggtggcctcgaatgcggccacggccaggataatcgggtccaagatcggatcggcttctaccgaaggtactgccagatgatgggaataagccccggagacaacttggattgtaacaatcaaaggccatttgcttaagcaaattgctcacatatatcatccatatagagaataaatagtatgtaataaaggatctaccatgatcttacatgtactgggaaacttgtttctaaagaagttccccttatcttgattaaataagaaactttaatattttaccaccttttaaaaaaaaaaaaaaaaaaaaaaaaaaaaaaaaaaaaaaaaaaaaaaaaaaaaaaaaaaaaaaaaaaaaaaaaaaaaaaaaaaaaaaaaaaaaaanaanggg

SEQ ID NO: 114193 - DNA, 278 bp, Glycine max
  unsure (1)..(278): unsure at all n locations
  Clone ID: PAT_MRT3847_74125C.1
ccgacttcattccagcnggtcccgccgnacnaggcgcatcgcgngaccnccgacatcctgtggncgaatttgangaagcggttctcgaagtacgctgctggacgangattncgatgcaggnttcaganaattcgaggatgactcgnaaatcgaggatgtcgatgatgnnnnnnnnnnnnnnnnnnnnnnnttgaagangaagaagccctttggnttctctcgctccaacaacaaggctgctcgctaagcctctctctcgtggagcaacaactgtgnat

SEQ ID NO: 114194 - DNA, 1489 bp, Glycine max
  Clone ID: PAT_MRT3847_74126C.1
tggtcgcgtggggcaaagttcccttcttttggggcagagttaattcatcaattaggagttgggtgagagaatggaagcctcagagcagaacaattcaaaggtagcgtagattgatcctttgcagtcatgggagttccacgtcaaccaagcctataatcagaatactcctgttgttgatcacttcactgcttcatggtgcatgccatcggtggctatgactcctgtttttgaagaactggcttcaagctatccggaagttctgcttctcactgttgatgttgatgaagtcaagctactcaacaaagaactatgtcgatacatagatattctgccgatcaacatgacgagttatccattccggtaatgactatgaagggctagatgagaaatgctgttcggacttcccatacaacatagaaatcaggcccccagaagatgaatcacatcttgtcagctggaagtctcaattggaagaggatttgaagatgatacaagttcaggataacaaaaaccatatcatggaagtgcttgcagccaatgatcttgattgtgatgacctggattccatttgtgtctcagacacaatggttctcagtaactatatagaagagattattgtgtcagcaatttcgtatcatttgatgaaaaacaaagacactgaatacagaaatgggaagctcgttatttcttccaatagtttgtcccatgcattgaatatattccacaaggggaaatccagtagaagagatacatcaaaattggaagatcaagctgtaaaatctgagaagcaaatagaggagggaactgctatgaaaccagaagcaaagtctgaaaatgccgctcctgtaaaaaaggctgaagcagaaacattaagttcagtgggaaagacagatggtgaaaaatcagttcctgcacccaaagccgctgaagttcctcctgataatgagtttgagaagcgaataaggcccgaggtaatactagcaaatgagattgatgtcacattctctgatattggtgccttagatgagaccaaagaatcccttcaagaactagtaatgcttcctcttagaaggccagaccttttcactggaggccttctaaagccttgtagaggaatattgctgtttggacctcctggaactgggaagacaatgctggcaaaggccattgcaaaggaggccggagcaagtttcatcaatgtgtccatgtctaccatcacttctaagtggtttggtgaagatgagaagaatgttcgcgctttattcacacttgcagccaaggtctccccaactataatattcgtggatgaggttgatagcatgcttgggcaacggaccagagttggggaacatgaagccatgagggaaaataaagaatgaatttatgacccattgggatggacttttgacaaagcaaggggagcggatccttgttcttgctgcaaccaataggcctttcgacttggatgaagctattattaagcgatttg

SEQ ID NO: 114195 - DNA, 464 bp, Glycine max
  Clone ID: PAT_MRT3847_74127C.1
aatttccgggtcgacccacgcgtccgggtttcttgcaaaaaagtcctagctaaagcgcttcctggtgctccaaatgagattttactggttctcgatggaacgactggcttgaacatgttacagcaagcaagggagttcaatgatgttgtaggagtcactggattcatcctgacaaagctcgatggcactgcgcgcggtggctgtgtggttagcgttgtggatgagcttggcatcccggtgaagttcattggggttggtgaagggatggaagacctgcaaccttttgacgccgaggcatttgttgaagccatcttcccatgattttgggttttggagagataattcatgcttctactgtaaagctttggactctgccgttgctttggctcgttgtgcgagtttttttttttggttggaactacgatagtggtaggaaagcacatgccccgtgtcaagatgaactg

SEQ ID NO: 114196 - DNA, 459 bp, Glycine max
  unsure (1)..(459): unsure at all n locations
  Clone ID: PAT_MRT3847_74128C.1
tacttagtccggaattcctcnaccaaggtatggggggatttggaagaaccaaccgttgtgaagttcaacaacggcttcttctaaaaagcaaacgctgaagggcacaaaattatttgttgtgaaagaggacggaagcagcattaaatgcggatgaacaagaacactctttggaaagagaatcgggccgagtccgcagagacgccgccaaaacgcaatcggcggggcaaacgcttcggggaattgcggaatggtcgggcgaagcggcgattgaacgagacgaagttaaaatatggcccaaattagtgccggtcacaagcaaatgcgaaccgagtccaattctttggccgcccgtgccaacgacaaaacggtcacagacagtgcctaaggaagaaggaaagaaacgcatctcangaggaaacgacgacgaactttaaacgaacggagagagttgaaaggaga

SEQ ID NO: 114197 - DNA, 310 bp, Glycine max
  Clone ID: PAT_MRT3847_74129C.1
tttatagtccaagaatctctacattgtcaaatggatggcaattatattcttaattatatacatgcaatttctgtgactccaatacaaagaaactacaaagagcataagccagcaacatttgaacttgctactaaatatatattctctacactccttataattacaactaacatgatataaacccttactacctcttaattcgtctttaaattataaccagaaatacaaaatcaaaactgaagataataaaaactctaacacaacaaattaattttgaaaaacattactcatatatttattgacaaacaaa

SEQ ID NO: 114198 - DNA, 228 bp, Glycine max
  unsure (1)..(228): unsure at all n locations
  Clone ID: PAT_MRT3847_7412C.1
attagatnttnttttttgaagcacgtccaaaatcataaattaatgaaattctaacccatcgataattaaatttgatgggaattttgatgtagcaatagcacacgtcttaccattaaaatcaaaataccagttcaaattttcaagttacttatgacagaacgtaaaaaaaaacttgtttaaatgaggtgatagctcggtacattaatatactaatacttgacctttttt

SEQ ID NO: 114199 - DNA, 218 bp, Glycine max
  Clone ID: PAT_MRT3847_74130C.1
cattattcaatggccaccacagcagctctattcggaaccatggcgagcacctccttcatgaggaagcaacctatgacgaccaagagccttatgacattccccaacgctctttttggtctgaaaggtggacgaggaggccgtgcatcttgcatgggctcgcacaaggtgaacctcataaccccataacgagaactggagtttgcaaacccagatgatgt

SEQ ID NO: 114200 - DNA, 440 bp, Glycine max
  Clone ID: PAT_MRT3847_74131C.1
ggaggatgggagtttggatgctgaagtcttgaattttatggcggtttaaaaggagcatttccatactgttttgggaccaggcaatcaatttgttttacaggaaatggtggttggggtgcctaaggtaagttggggggttttggggggccttgagattgtaaggcgtgggctgcaggagactgttaaatatcctggggggcacctagaaaaatttgggaggttgggtttgtaaccattaaagggggtttttttttttggtcctccaggagggggaaaaactttgttggccaaagcaatggttaatgaatgtcaagctaacttaataagggtagggggcccagaatggttaactatggggttgggggaaggtgaagccattgttcgggaatattttgccagggccaaacattcagttcaacggtgccttttttttgatgggc

SEQ ID NO: 114201 - DNA, 456 bp, Glycine max
  Clone ID: PAT_MRT3847_74132C.1
ggctcgagcaaacacccatcaactgatatcattattggtgttatagacacagggatatggccagagtctcctagtttcagagatgagggtataggggagattccttcaaaatggaaaggtgtttgcatggagggtcgtgatttcaagaaatccaattgcaataggtgatcatccattctcttacaaatgtttctaataaaaatgctcatatctattcataaagtcttctagtaatcataatttaacactgacaaaattacaaattgatcatatgctacacttaaattctctttataaaactgcagaaaattgataggtgcaagatactataagattcaggctacatcaggtgacaaccagactcatatagaagcagccaaaggttcccctagagatactgttggacatggaactcacactgcatcaatagcagctgggtgttcatgtcaacaatgc

SEQ ID NO: 114202 - DNA, 269 bp, Glycine max
  unsure (1)..(269): unsure at all n locations
  Clone ID: PAT_MRT3847_74133C.1
ctctgtctcntnacttctgngtgntgttggtngttttncatttgggngnnagataaangctacagtaacaacagcggctttggcaangaaattttcggagaaattaagaggaagatagaagttcttttattttgattttattaaaatggtgtttatgnnttnnntgtctgantttttgtggttttttggatgctcgtgttattttncctaaactcatatntctgataggttcagagtttatgggataatctacgaggttatgtgtttga

SEQ ID NO: 114203 - DNA, 183 bp, Glycine max
  Clone ID: PAT_MRT3847_74134C.1
tcaatatatcaacgctcattttctgttcatgtctaatgctattttaaaagttgtgaatcttaccactgtacattttcttcttatcgaactgttacatgctttattacacactctctatggccaagctataatacataatacccatttttttttttaatattttacattgtatcttttaattaa

SEQ ID NO: 114204 - DNA, 379 bp, Glycine max
  unsure (1)..(379): unsure at all n locations
  Clone ID: PAT_MRT3847_74135C.1
ggttgggtaaatcttttttttttttttttttttttttttttttaacaacaatcttaaataaaatctttatggcccttatctggattaagggaataattaaaaatcaaccaccaaaccaagaggaaattacatttgccctggaacacaacctcccctccccggggggttccnccaaaacggaaaaaaaaatgaaagaagggccgcccactaacaagggggggtcccacaaaccttcctagaagggcccaccttatgcacattattattggaaaaatatatggcaaggccacaccaggccaataatacatccccaatgttccccctgggaaggggatgaagggcataaaattgcttgaaacatacaccatctggagaggaa

SEQ ID NO: 114205 - DNA, 266 bp, Glycine max
  Clone ID: PAT_MRT3847_74136C.1
gtatcttatcttagcaatagctacgcctatcataacaatagctctattaggctaaaacacccaatgggataggaaaactagcagcctaagaatgtaatcgagaagacgcccgaggaggccgccgcagcccccaagaggcacgacggatacatccctgtcgtgtacatgctcggcttgcattgcgagggatgcgttaagaatctggagcgcacatatcggcactaccaaggtgtggtaatcgataaggtagatctatcgtcgacaaa

SEQ ID NO: 114206 - DNA, 155 bp, Glycine max
  Clone ID: PAT_MRT3847_74137C.1
tgtctgccgcttagcaacattttcggcatcgaagcaatgccacgcgtacgagctgttcgttctccgaatgtgcactgactagatgtgcccgtacaccagttgtgcaatgtgcaagttgaatgcttgctgtcgtatcacagaacatctttggcttt

SEQ ID NO: 114207 - DNA, 224 bp, Glycine max
  Clone ID: PAT_MRT3847_74138C.1
ccctcgtcgggttttgttttttggacagaataaaaccgcctcgcgatcgaaaggatttgacttttgaaaatttgcttgccgcgagttacacgagatgatcccgcacagctgagctggtcaccgcaacccccagaagtatggtgtgtgggcacaaacacaaaggacgttaggaagcccaataccccaagagaggcctggggccccccctgtaacatgaaaagttc

SEQ ID NO: 114208 - DNA, 394 bp, Glycine max
  unsure (1)..(394): unsure at all n locations
  Clone ID: PAT_MRT3847_74139C.1
ttcccctccatttcataaacccggccacggggcccccaacgggggggcattttaaaacgcagccacgaaacgcaccaaagccccacgaaaaangaacgaangcaaaccgacgccacacgggcaacaaacgaggcccagagggggggggaagaaaggaaaacaccacagccacggcggaagaacaacagatgccaacgacacgaggaggctgacagagagacaaaccacaacgaccaccaccaccacaagtcgggagatgccaagacaacagttcacaagaagaggacctcaaaggtaaccagggcggagacgcctaccctggaacaacaggaagggagcccccaccggaaggacccgagatttaaggcggattattcccatcagaaagcaatac

SEQ ID NO: 114209 - DNA, 445 bp, Glycine max
  unsure (1)..(445): unsure at all n locations
  Clone ID: PAT_MRT3847_7413C.1
nccacgcgtccggacgtggatatagaacgagatgatggaaacgatcgctatgaaactgcaactacggaaaatgctaagggagcggcagatgaagggaatggtgcgccacttaggcttcccccacgtctggtacctcgactgaatcattagcaggatgtgggtaacgaccaggatgttgatgcacgtggttgttgaagaggtactacttggacgcgtgggcttagagcactaacgttgcgaccgcaataccttcatgggcatgaacgtcaacagcatgggcaagatgctcaagtgcgcccgggatgacgacatcagaaccatgaaggccgacgacgggagcgacacggtcactttgatgtgcgaaagccctacacaagataagatttctgatgttgagatgatgctgatggacattgacagtgagcaccttgggattcagaggcag

SEQ ID NO: 114210 - DNA, 151 bp, Glycine max
  Clone ID: PAT_MRT3847_74140C.1
gtgacctcgcaaatgtggagaaactgttggaggagatggagagggaaccccatattggcatagattggattacatactctatggtgaccaatttctacataaaagcagacatgagggagaaggctctggtgtgcctaatgagtgtgagaaa

SEQ ID NO: 114211 - DNA, 418 bp, Glycine max
  Clone ID: PAT_MRT3847_74141C.1
ttaatgttactctgaatcttaaggaacaaccggataaactattgagattttttgtgctgcttaatttgcaatgataattatacttttctgccttctggagtaatctacttgtttattactggggcctaacccaagaaaagacacttcactttaggcctaggctaaataatagtttttggtgggaactttgacagagactaaattttgcaaaataagcttaacttgaaagtggttacaactatttctacagtttcatgctgcttattttaatcaaatatttcccattagcaggctaattcaattataccaattaccaagcaaagataggttagtatcatgaaattatgaattgtaacaactgctctttcttgtcaattagttgtctgttgtaggattagatgtggaaatgctggttttt

SEQ ID NO: 114212 - DNA, 1642 bp, Glycine max
  Clone ID: PAT_MRT3847_74142C.1
tgatgccattgcccgtatggaaagggcagctgaacaaaggaaaagcaattgcagcagctgttgaaggagttgcaatacactggggaacatcagactccaatacatcagtcattgagactctgcgggagcaaatattcaagccatcattgtccacaatcattcccgagaattcaaaacttgtaacagtatcaccaacagattcagttctgacagcaacaaagatgatggttgaatttcgtgcaagttgtgcagttgtgacagttaatgacaaacctcgtggcatctttacttcaaaagatattttgttgcgggtaattgcacaaaatctttctccagaatcaacccccgttgagaaggtcatgactccaaatccagaatgtgtcataattgatacacccattgttgatgcacttcacactatgcatgatgggaaatttttgcatcttcctgtggttgatagagatggcagtgtagttgctgtggttgatgtgattcatgtcactcatgctgcagtggcgacagtaagtcaggttgggaataatgaagctgccaccaccttgatgcaaagattttgggattcagccatggccttaaccccaaatgatgatgacgatgatactcgaagtgagggttcgttgaaagtggcttctgagggaggagaaacagggagatccattccttatctttcatcaagcattgccaatacattttccttcaaaatacaagataagaagggcagaatgcacagattcacatgtgatacccggagcatgatggaggttataacttcaatccttcagagacttggtgatgatatcgatcctaacaacataccccaaattctgtatgaagacgaagatcatgataaagttgtattggcttcagacagtgatcttgcagcagctgtggatcatgcaaggacagctggtttgaaggggttgaaattgcatttggactacgcaggaccacgtgataatgtgaaaggttctcgttcaggaagttatgcttattcagatgcatgggcttcagcatatagtgccgccgctgctggtgctgcacttgttgctggcttaggcatattaacgtacttgaagcgagtttgattaaatgaagaaacgagttatgccagtgaagaggccaagctgaagttagcttcaattttggaggggcgcactgtctgcttgccatctttatgttctgaaattttgtacaactacatttatatatacgaggaaaaggttaaagcatttttttgctcctgcttgttattgtgctttctgaaaattgggatggtcatcccttgctgcttgtatacttgtaattttaggatttgcagcctcatcaaccctggagactgtgtacagtaacaaacagctctgtccattttttctgacatcatgagttcataaaatcaatcgaccaggattgaatttattgggttaatgatcttatgtgatcccagtgtttatagtttatcaatgagatttgactgcaggtctggggtcctaaaggaaggtctttttcctttcctttttttaatcttgaaagagggtatagattcatttgtaaatatgagggaaatctttgtttaaagaaaaaagatgggtctttattttatttttttccctttaggttaccttat

SEQ ID NO: 114213 - DNA, 482 bp, Glycine max
  Clone ID: PAT_MRT3847_74143C.1
aaaagaaaatttttttttttttttttccaatttttagcccaacatacccgaagtttttaaaaatttttaattcttccccccctttttttttttaggaacccttggttggggcccccttttttttcggcgggtttaaacaatacctggtttttcattaaaaccctatcctggggaccccttgttttaggtaaaaaaacccccttggtttttggtggttggaacaaaaaacataaaaacctccccttttactttttaaaacctaaaaaaaccgggccctttaaaaaactgggtttaaaaaaaagcaaaccccccttttggggtccccccctttatatataaaaaccttgggctttggcacttaaaaaaactgaaactggttgaaaattttaaaaaaactgggataaggggggcgttttttttggtttaaaaaaaactttttttatctttttgggggctaactttaaaaaagcctttccgggggg

SEQ ID NO: 114214 - DNA, 684 bp, Glycine max
  Clone ID: PAT_MRT3847_74144C.1
agacaatgacgcctcactcacctctccgttcctccccgctctctgataacggcgaccctttccactggccgcaaaatgacctctgcgacaactcccacgccatcgtcatcgttgagacaacatcaactcaattcgcccaggccgtgtccctcacgctggaatccgagcactggaacccgtcaccgaagaacttcatcacccatcccatgaggctttagacgaggttgccgagcgccgttggtcgaacgtgactgagggcggtggcgccgcccagtccgatggtgcaaaaaagagaggtgatggcgaaaaaggtggcgtttggtttctggttaagcgaagtagtaccgtgtctgattttgtttttggttatagccgcggataagacccatggttggagcggtgactcttttgaccgctacaaggaatacaggtattgtttatcagtgaatgttattacatttgtatatgcagcgtttcaagcgggtgatctggcgtatcaagtagtaacggggagacgcataatcaatcaccacctgcgttaccactttgatttcttcatggatcaagcaagtcacaaaggactcaatttgattttttaattttttttaaaattgagtggtcattgagattttttccatactccggttttggcgtatcttttgatatcggctgcatcatctgctg

SEQ ID NO: 114215 - DNA, 273 bp, Glycine max
  Clone ID: PAT_MRT3847_74145C.1
caaatcaaaagaagagaataccctattctggagaagattagatactgcaagctcaaagctcatctgcccggcaacctcttgctaggcacaagtcactagcttacctacgtgcgacaattcccttagtggagaggcgcagagacccagaatcgatgccgctgtagccccagggaagaaagacagcgggggcgacatcccttgagtgggctcacagaggaggggcgggaacgtcggtgacagaatgggagctagcgatggcaccgggggaggaag

SEQ ID NO: 114216 - DNA, 612 bp, Glycine max
  Clone ID: PAT_MRT3847_74146C.1
cccatctacttgatttcatgaagatgggaactttatggtagtggtgataaaaataggatatggaagcttatattaaattatatgtatggggacagaaagattactcatgagcaaagtcagtggataattgacaccaccaatatcttgatgagccaaattaaatgtctcggtctctggcgcactctggagagacttgagggtagcgtttgcggtcggagcagtagttgtagatggtgtatttctggcgaacccaggtgagtttttgccactgagcagcatcaaggtcacggaactctggttgatcccatacatctaattgaatataagcttccatatcctatttctattaccactaccgtaatgctccaatatactagaggtgatggagctgatcccgactctgggaatggcgcatcatctcgcattcatactacggaagttgccaatggtcagtaatcctacacctgctgcaaacacacaaaatggagtgctgtctgagaccaatgaagatgtcaagaatcttgcaccaaataatgaagaatcatccaagcttgtcgttactgatgcacctggaggagacaatgtttgtgaatattaagagggaatggtgtg

SEQ ID NO: 114217 - DNA, 572 bp, Glycine max
  Clone ID: PAT_MRT3847_74147C.1
aatattggccccccatgttgggatgaaaggtctttttccactttggctaatgatgctttgattaataggaaaaagttatgctaagcatttttcttatccagctggctgtctttaaattagaatctgatcatgaaagcgctagcgtgcattctttaccattgatgcaatttcacctttgagatcattgcttttctttaccattttacttttgatctacagagattccagaacctgtaaaaaagaacgcctcaggtggatcccttgatagaggttggtgttattatatagtatttacacttttaatatagcttttagtttcataagtaactacttcaatttgtcaatttgagaagcactatctagtctatggactcctttcaaatgtacatggatggatttctagttgacacttctttatatcttgctatgtaacatgaatatgtttacaaaccactttctaaatatgctttctagagatgatggtgctgcaactaatttgtttttggatggcatatattttcctttacacatatgactgatgcaattctatggtgtacagacattgctcttgc

SEQ ID NO: 114218 - DNA, 2351 bp, Glycine max
  Clone ID: PAT_MRT3847_74148C.1
aaactcgaagatgacctaaaactatgtaaaggtgagctgcgtgtaactgaagaaactatcaaaagcttgagaagtgataagttgattttggaacagaagctatctgagcttgagaagaagagtgctgaagagattaattctcttcaatggaaacttgagcaagaacgcaaaactctgaactctaaagtgtatgaccttgaacgaaaactggatgtgtttagacaagaattaactgtagctgagtctacactctcggtcaaggactctgaattggctgcattgaagaacaatttagatgaactagaagaattgagagaaatgtttcctcaaaagaggtagcacggctgaagaagttggttgcatattggaaacaacaagctggtagaacaggttttaaggaagcgctattttaatgtaatagaagacatgaagggcaagatcagagtttactgtcgactaagacctcttagtgaaaaagagattgttgagaaagaaagagaagttcttactgcagttgatgaatttactgttgaatacccatggaaagatgaaaaactgaagcagtacatatatgaccgagtttttgatgctaatgcaactcaagaaagcgtatttgaggatacaaagtatttggtgcagtctgctgtagatggttataatgtttgcatatttgcctatggtcaaactggctctggaaagacatttacaatctatggatctgacaacaaccctggacttaccccccttgcaattgcagaactttttagaattttaagaagagataataacaagtattctttttccttaaaggcatacatggtggagttgtatcaggatacccttatagatctgttaccaaagaatggaaagcatttaaaattggatatcaagaaggattcaacgggaatggtagttgtggaaaatgtgacagttatgtctatttctacaattgaagaattgaatagtataatacaaagaggatctgaacgacgacatatatctggaacccaaatgaacgatgaaagttcaagatctcatctcattctatcgattgtaattgaaagtaccaaccttcaaagtcagtcagttgcaagtatacagctgagttttgtggatcttgctggttcagaaagagtgaaaaagtcaggttctaccgggagtcagcttaaggaagctcaaagcattaacaagtcattatcagcacttggagatgttattagttctttgtcttctggtggtcaacacacaccatacaggaatcacaagttaaccatgttgatgagtgattcactaggtggaagttccaaaactaacatgttttttcatgttaccaagtgaaattgaaagtaccaagcttcaaagtcagtcagtaggaaagggaaaggagagatttgtagttttaatgagcccagcaaaaatgaatacttaaaggaggaaggagagtcaagcttaaggatgctcagagcattaacaagacattataaacaccttgagaatgaagatttagaaggtattcaagatgaaagaacacatcagaagggaatcacaaattaacgatgtaaatgagtgattcactttggtggtaatgcctaaactctaatgtatgtgaatgtttcttcccacagaatcatatttggtatgagacaaaaaactcactcatgtatagctcaagagtgactgtcaatttgaatgatctctacatagatgttttcccaaaagagcatacacagctgaatatatttgttgcatattagaaacaacaagctggtagaacacttggagtatgatgatttagaagagattcaaaaagaaagacaaactatagagaatggaaatggcaataggtaaaagaggagttcacaaatagctaccaagatattggatttatcataggggctctattttctttttggaatgtttaatgatcattttccataatcaaattgtatatctttttagagggatctaggctctatagttgaatagcatgtatatagtactaatcctttcaatgtatgcacattcagtgagatcaattgtgaatgatccgagcaaaaatgtttcttccaaagagatagctcgactgaagaaattgattggatattggaaggagcaagcaggaaggagaggagaggatgaagatttagaagaaatccaagaagaaagaccaactaaagagaggactgatggccggcattctatgtaacaggattttgattttggaatgttgtgtgatcaattcccactcaaacaagattgcataagcttgatagagtgtaatttatttgagggatgcaagatgtatagttgaattatgtacatatatttttaatattttaagtccttcgcat

SEQ ID NO: 114219 - DNA, 255 bp, Glycine max
  Clone ID: PAT_MRT3847_74149C.1
actacacgtacgaccacacgaacggagggatagggataaaaatagggcggtttagcaaaagattgattaatcaaaagtcactgcagacaacaggctcatttaaaaaacaatttttactagcctagaatttgacaaataggatgtttgttactcaatatcttactcaattcagaaattttcttccagattacattatgtgttaattgtataccttgttaatatattagataaaatcattttacacttgctgtaaat

SEQ ID NO: 114220 - DNA, 477 bp, Glycine max
  Clone ID: PAT_MRT3847_7414C.1
atgagacggctgcgagaagacgacagaagggggatgaatttgaaatgactgatataggcagaatagcttatttcctaggtatagaatttgtgacaactaagagtgtcatattccttcaccaaaagaaatatgcaattgatatattgaaaaggttcaacatgcttgattgcaattctgctactactccttgtgaaccaggaataaaactgtctactggtgaagacacaaacttggttgattcaacactatataggcaactcattggctcattgagatatttgtgtaattctaggctagatatcacctatggagttggcttggttagtagattcatgaagaaaccttgcaaggatcatctacttgcagctaaaagaattcttagatatatgaagggcacactagaatgtggaattctgtttcttgcagcaaaagaaaattctgagatagaaattgttggctacacagatgcagattgga

SEQ ID NO: 114221 - DNA, 107 bp, Glycine max
  Clone ID: PAT_MRT3847_74150C.1
gcaaaaggttgaatgggcattgaaactgaagggtgtgttgttttagtacataaaacaagaactcttcaacaagactatgtacccttctcaagttgaacccggtttac

SEQ ID NO: 114222 - DNA, 384 bp, Glycine max
  Clone ID: PAT_MRT3847_74151C.1
tggtttctctatagcgcccgcttgggggggctcgtttttttttgttttttttccttcgcgggggagagggaaggagaaaaaaaagggccccgcgctacacatggacacatgatcgagagagcacattcaccgatctagccgaactaaggaaaaaagccggagcctctgataaggctcacctgctggcggggggggaaagcgttaaccaccctatctgatccctacaacgtccgaacgctacagagactaactgtccttctgtctgagagggtatctcataccaagccgaggttgctctgtggcgtgaaccctgaagataaaggatgtcgggccgtaatttcttgctagcaggccgggcctagagttagttgcaggtggctgcgg

SEQ ID NO: 114223 - DNA, 433 bp, Glycine max
  unsure (1)..(433): unsure at all n locations
  Clone ID: PAT_MRT3847_74152C.1
gtctgcaccgacgtgaacaggatcaacatcttcaaagataagggatcgatgatgaccgtccgggaccagaacatcctggtgatcaccttccacaacacactcgtcaccatacgacggaagataatgaccgggcatgatcgacggacagctttcacgagagaaagcacagatgccaaagatctcaatcttactctgaagcgttcgtccctctttccgtttatgaccgactttaacgtgttcatgcccaataacacactttaacacgttagcgactttcaggtcataggttgacgattggaacgatcttgcactgcctaagcatctgaatctcacaacatcngagacgcagatgcataaaaagcacacggttcagagtatttcgattgtgaaagaccaactcacggtcacagtgtgtcccaacattcaatatgca

SEQ ID NO: 114224 - DNA, 2584 bp, Glycine max
  Clone ID: PAT_MRT3847_74153C.1
gagagacaggaaacaagaaaaaaaaaaaaacttagacaagaagagggagagagaaagagaaaataataagaaaaagaaaacttgaaaactttgagggattgattagaaaaagggacatggagattctcatcttccaatgatcccttcaaccccacaaattttcccgtttggatttggtgtcacagcttgattctccattgctgcgattccaacatcaacagctaaaccaaacatctctttctttctctctctctctgtctctttgtgtcctctctttctctcttgcatctgcattgtcccttttgcactgcataaggaggctaattggaggaaccccagaaggaaatttcggatttttaagaggatttcgtttctgggtcggggcttgaattgggttttatgggtttggtgaaagagagaggggagttttggtgactaacgaggtgcagctgctgccatggttgggaataaaattccgcaaatggggggttctccttctggcaattcggttcacaaacaaagaaggctttatcaagtttggaggggaggcaacaagtttttctgtggtgggaggctggtttttggtccggatgtagcttccctgtttcttacaacattcctaattgctggacctgcaattgcattttgtgtaaagatatatcttaaaatcaagaagaccgatggtcttattcatgattactggtttcctgtattgattgtgggttcaattctcactgttttggatttaatattcctccttttgacttctgggagagatcctggaattgtccccagaaattcaagacctcctgaatttgatgaaacatgtgatatacctaccccttccatggagtggattaatggcacaacccctcatctgaaactacctcgaactaaagatgttgttgttaatggtcacatagtgaaagtaaagttctgtgatacgtgcttgctttatcgccctcctcgtacttctcattgttctatatgcaacaattgtgtccagagatttgatcatcactgtccctgggttggccagtgcattggaatacgaaactatcggtacttcttcatgtttatttcgacatcaaccagtttgtgcatatatgtcttcgcgttctcttgtatcaatattgcccacagtggcatttggaagacaataacacatgattatgtatcagattttctgataatatactgcttcatagctgtctggtttgttggtggcctcacagctttccatttctatctcatttgtacaaatcagacaacttatgagaacttccgatatcaatatgataagaaggggaacccattcaataggggatcatgcagaaatcttaaagaaacactttgttccagtattccccattcgaagaataatttccgatcatttgttgtggaggatgaacttatgatggtcgggtctctgactccaaatattggggatggaattttgaccccaaaggagaaaattgatattgaaatgggatctatgcgtgcagaagatggacgtatgcctgttcctgaacttctgcgaaattttgattttgataattttgatggtgacatgaagtttgcagatgacgacgggcagccttcttttgatccattctacagtattgaagatgatgcaaaagattcagcccgaacatccattcaaacagttctgaatttccaaagcataactgaagatccagtataagagctgtaaaaagtgaaatttagaaactttcaatgagacaatgttacattgttttatccaacaacttttttcttatgcttcttggaaatcaattcaaaagatttatagaataaacttgaaagtagacattgtatctcccggctcgagggaaaagtcagagaatctacacaaaggcactttcctgctgatggaacatatacaattaaggaaactgatgacaggaatcattcacattaagccacgatgcaaccttttggtttctaatgcaaagaggtttgttgatggtcttctctttgattgcttgtgtgccttgaattacacactgaggatagtttggttccatacttccatagttgcagcaatttgtggtttgtaagaatttccaatgtgctgactcatgcaagttcattgatactattcatgctggaattggggagattgaacctacacttctctctaattttagcataaaaagtgtggcaagtgtttgttgtaagctgtaaacgccacttgcattcaaaataatgcacaaagattttctgccccagtttatgataggtgctgtgctaggtgtgcctatctcttccactcggtcctttgttaaagatctctagattggatgatttttttatttaccactagaaatttagaatctgtaagtagtgtactgatttttttttttaaggattatatctttttctctccttaggtcctcgctgggtatgtttcaatgcaattgaaggaacaaagctaaaatgatgtcatcctaaataatttgttgagggaacgtaccacttaattaaaattaatctaggattagaaaaagggaaatgtcagttcagtttgacttggtggaaaattattttgattgatttatcc

SEQ ID NO: 114225 - DNA, 568 bp, Glycine max
  Clone ID: PAT_MRT3847_74154C.1
gataataacaaagataagtaaattaatgatatggacatagatttggccaagttacattacaattaaaaatgtacatactaatttggaaaggaaatttaataaagaatattgggaactggaaaggaaaaatgaattaaagttacgatgcctcactaaacaagatatacatgtcagaaagtgctaggttatattattagacggaaaaataaatctcccattattgtcacgatgccttgggaaagaaactagtctccttaatttggtgcctgaagattattttgggtaccggtgacacgagcagcaccactgctttgcctggttcttggaataattataggcaaacaacacactagaacgagtagtaactccatcatgaaagccatcattggtgatccataaaaatatgcaaatcttcccatgccatataatcctcttgataaggggaagttctgattcaataaccactgatgaatcatacatttgaggaatgccggcaccaggtgaatattctgctcgctgctcaagggttacttttagcatgaagtaggtacatccccttcacaaaacc

SEQ ID NO: 114226 - DNA, 162 bp, Glycine max
  Clone ID: PAT_MRT3847_74155C.1
ggctcgagctaagatgctcttttctcacatcaaatggcattccttcatctcctacttgcggatgggtgcagactatgctttcaattctggtgcttgctcccctagcgaaaactgggaagagctccattgacccgttccggacatgatgtctgatatctaaac

SEQ ID NO: 114227 - DNA, 520 bp, Glycine max
  Clone ID: PAT_MRT3847_74156C.1
cttttaagttcaaggtggaaggttcaaatcagtagccttgcagagattaaaaagtgaaagttcacatgaatggcaatgagatttaggagttttaatatttaaattcgttggtgcattaatttgtattaaattattatattatgattaatatatgtaatatataattatttttaattttttttttaaattaaatattattgactattgattatatagacttatcaacctgaattaaataagcatcaatgtattcttaacctttatgatcaaaatcacaagaattttattgattaaaaccactctaaatgagcttctaaaaatctttccaatctattagcaaataataggcctccaacggttcattaattttgatagaaaaaagtgtttgaaactcatcatcattatacttattgaaatttcttatcttgaatatgatatgtttaatttttcatctctcatggatggatagaaagttaggagtcactagagtggagtgtggtaatattacaatttttttaat

SEQ ID NO: 114228 - DNA, 514 bp, Glycine max
  Clone ID: PAT_MRT3847_74157C.1
tacggctgcgagaagacgacagaagggggcactttgtgcattttgctgaactgaacttcatcatgccgcgggaaccgaagagcctcggcgtgaagatcctatggatttggacctttggaaccgctgctattcttgttacgaacgtgatgcgcacaagaataagggaaatggaaacactcatgaacgccgaacaacaacagcaacaacaacagcacgatgtcgcaaccactgactcgtcttttatttcagacaataaagattgatttgcatttagtttttttttttatttccgtttcggtcctggagtttgtgatgctttgtaaactcgtggaatgcaaagggcacgcaacgtgtttgttgaatgtcctgactgaaaaataaggctgggacaaccagcggaatatggaaacccatttgcgattatgagatttttaatattttatctcatcattttggtgtgttagcaaaaaaaaacaaaacaaaacccaaaaaaaccaaaaaaccaaccacacac

SEQ ID NO: 114229 - DNA, 279 bp, Glycine max
  Clone ID: PAT_MRT3847_74158C.1
cttcagttctgatacgacaacaaacagagtacgaggacgtgaacataatcggcaggggtgtgcggttcccaccaacgaggtctggaataatagtgtgtccctctcaaggcccttggtctgagccttgctaatcattgagatctctcaatctctcacaacattttcagttcgtttcatctgatggtccttttatgccatttgatgagtctgtcacgctctttattgagctgaatacatcactttatatgcagggcataccacagtgctttcgcttactat

SEQ ID NO: 114230 - DNA, 266 bp, Glycine max
  Clone ID: PAT_MRT3847_74159C.1
ccttgatgtgtatagaccgcggaccagcgcatctgtgttgtcaatctgtctttgtttcgtctttctcgccttgtatctgtactcttcacagcaatcctgtcagacgcttgaacctgattttgctgctgccccgtttggtggtggttgtccataaagttctaacgatggtgctgcaaagtctggaaagggccgacttgcgatcttcgtgctgatggctcggatggggccaatccattgggccgctggagccactgcccgcgtgttct

SEQ ID NO: 114231 - DNA, 518 bp, Glycine max
  Clone ID: PAT_MRT3847_7415C.1
ctcaagctccctcgcgacttcaacatcgttgcagaactcgttgccgcgcttctgaatcttccacggcggcggcgtttccctttctccatggcggcgcgagtccactcctccgcggcagcggctccgccttcgtccctcagcgaacgtctgaatcaaatccctcttaataataaacaaattcgcatggccatcataagcaaaagagcgcgcacgcacaggattagggtttcgaacgtaacgattttggagcttccattttgattttgacttgcgctcaatcaggcaagatttggcaaattatgcagaagtatgcttcagggaatttggtgacaggcttaagcactggattacattaaacgagccagtgctatataactccggaggttatgagatgctccaagtgttttgctaactgcactgctggtgattctactaccgaaccctatgtagttacacaccacctcattcttgctcatgttgcagtagtaaaagtataaagggagaagttccaggcttct

SEQ ID NO: 114232 - DNA, 477 bp, Glycine max
  Clone ID: PAT_MRT3847_74160C.1
tgtaaatttggctcgaattgttcctgatggacttcttgtattcttcccttcttattaccttttggaccaaatcatcgcatgctggaaaagtagtaatgaaaattcaacatcaatatgggacagaatttgcaaacacaagaaacctgttatagaacctagggattcctcatcatttcccttgtcaattaaggactacatgactacgttgaatgacacctctgcctctggagcaattttttttgctgtttgtcgtgggaaggtaagtgaaggattagattttgctgatcatgctggaagagctgtggtaattactggtttgccatttgccacaagcactgatcctaaggttcgactaaaacgtgaatacttagatcaacaatctcggccacagggagaactgttcaaggttttaactggagatgaatggtataaccaacaagcctcccgagctgtgaatcaagctgttggacgtgtaat

SEQ ID NO: 114233 - DNA, 252 bp, Glycine max
  unsure (1)..(252): unsure at all n locations
  Clone ID: PAT_MRT3847_74161C.1
tgaggagagtggatcgtnantctctcaaatttcgggttaacaacatccgttaattagattgtgtgagatggggcggtggcgactgatgtctctgcacaggagtagaggtgaccttgaagggtgcatttgaaaactcattagtctcagcaaatcagaaggcattcactactgttcaggtctgtttccgtcattctctatgtgttacgactcacatagcttctgcctctatatgtgcaccattattccactctn

SEQ ID NO: 114234 - DNA, 594 bp, Glycine max
  Clone ID: PAT_MRT3847_74162C.1
cagttctgcagcttcagccttcagagcagctttttttaacttctcttgttctttctgtagtttcttttcctccatcaagcgacttctttcttcttttgtcatttttgtttttcccactgccttggttgtgttctttgcagaaactttggattttttaatattattggcgttctcctcttgcacttgtgaagaggctggatttgaaaggtcatccccaggcatttcagtttgagtagcatttccccacgaaatatgcctctctcgttcacccattccacaattttctagctcattatctgattccaaacatatatgaggagaacttccagattcccttgaatttgaagtccatcttgaatctcttggttcattctcaaccggtttacccattccacaattttctaactcattatctgattccaaacatataccaggagaacttccagaccccattgaatttgaaatccatctagaatctcttggctcatttttgccccgtgtgcccattccacattttccgcctatttatccgattccaaacctatcgtttgactattccccgggctattttttggccgcacccctaccgggggg

SEQ ID NO: 114235 - DNA, 141 bp, Glycine max
  Clone ID: PAT_MRT3847_74163C.1
gtggaatgtcgcggcttgggcgataagctgcatagtgtcagcgcgggagataggttagcatttccttgcctatcggatctattgcttctttctgtctcactagagatgtgcaatgtacaatgattctgagttttgatatgc

SEQ ID NO: 114236 - DNA, 489 bp, Glycine max
  Clone ID: PAT_MRT3847_74164C.1
ggcggccgcccttttttttttttttttttgagacttacacatacatgtgtatgattcggaatatcatcatggagaacatcctgcttttttcttatccgtatgaagaattctatcctcaccacactaaaaccctcttaactgtaacttcatgtgatgacgattctaatcgggagacatacttgaccttagaatttagaagttcatatgcgtacaaacccactggaaggggaaaaaaccatcatagagtaagatcagggattgtcataagaaccatcgtttctactctagaacactagagaaagcacattcttctattggaaaagctaacgcacccttcctaaagggctgttcgagaaatccaggattccttacttcgcatgttcaggtgctggtctaagctcccaatgaaggcctgagcttttgagaagagctcttgcccatttactcctgcaagctcctgtactgcttgaagctcttcatccatgacct

SEQ ID NO: 114237 - DNA, 523 bp, Glycine max
  Clone ID: PAT_MRT3847_74165C.1
accgattccgttccaaggaaggtttcccgtcatcactgtatgacgtcctccttctttgggggggggggggggggggggggggggggggggggggagccaagggaatgagcagattagaggcagagggaaggtggggccctcaaatcactgtaagatagtagaggaaaatagaaaaacctctattgaaattacaatcctaaataacggtaaccccacaaaggcaatagaatacatacgatagataccaatatggcaaaaaacatatctggaaaataccaatatggcaaaaaaaatatctggaaaaattattcccaacctcaaccatcaaacgtaccccccaggttggtgcaagaggccaagtgcttaacccatcattaggggttacgcgtggtttaataaaaagaacttgtcgtgcagtaccgccaacgtttgttgccttgcaagtgggcttggtataggagtaagccgagtacaatgggtaattgttaaaccgagcccggggttccgtaacctggaataaaca

SEQ ID NO: 114238 - DNA, 255 bp, Glycine max
  unsure (1)..(255): unsure at all n locations
  Clone ID: PAT_MRT3847_74166C.1
gcaaaaaactattttcgggtaattggaaagccggaacattggaagaaggatgctgcaaaatacctgaactgtagcttgttgtacccattgttcatctacntgggcncaccaattggggcaaacccaaggcgttgagttgtgggatcctatcattaacaagtgtgagaganagctagcaaaatggaaacaaagacacatttcttttgggggaagagtgacccttataaagtcagtcttaacatctatccctattta

SEQ ID NO: 114239 - DNA, 220 bp, Glycine max
  Clone ID: PAT_MRT3847_74167C.1
taataaacttattatcattcaaccacggaactgcggaaataaggaagtctcgcaacataatctagagtcaatatcgtttgtgttcataatttattcttacgacatcttacaactttggttggaatatctattctctaacaaaccctaatgctacacatgtttacctaacggtattttctaacacccggctcattaaccgtggggggggtggaggttaacc

SEQ ID NO: 114240 - DNA, 353 bp, Glycine max
  Clone ID: PAT_MRT3847_74168C.1
ggctcgagctaggactcaatcctatggttactttatagcggggccttattaactatctttctgagatggctgacgtagcctgagcctcacccttttcttacagaatggggtgctccatccccgtagggtctcagctgcctgcgaccatggaggccctgcagttaggctatgccagctttcatgtagtctcaagagctgtccttaacatgggcattagcagacttgttttaccagtctaccggatcattatcgcttttctcttgctcgttccttttgcctacttcatggaaaagaaggagagacctgacattacattaaacttcctatcacagatcgttgttgtggctattgac

SEQ ID NO: 114241 - DNA, 591 bp, Glycine max
  unsure (1)..(591): unsure at all n locations
  Clone ID: PAT_MRT3847_74169C.1
atcaagaacctgcaggctttgaatgctcagcagcagtctgagtatgatgagtctgtgatggagatgcagcaagagatcaccgagctcaggctcatgggcgacgctcgcgccgagaccattaccttgctcgaggtttccattgaagacatcaagaagcgcgctcttgccgctgagcaggacaatcgcaccaccatcgactctatgcttcttacccagcgtcagctccaagaccagaacgaacagctcgcagctgctctcaagaaacgcaacgccgatgcccttgctgccatccaagagatgaaggtaagacgcgttgaggtgaagacacagccactcgacctcaaccgtgttgttgccggcaaggtcaccaagaccagcgagaaggtcaagatcggaaagaagggcaagaagaaggtcagcaagcgtcaatgggactctggcttcggcgtcgatgagaacgtcgaagacgctgatgagctcaatggcgagggaccagtcgccgcgtgattcccttacttttnctttatggcggagcangagatgtatatgcatacacacatttactttcgcgttgcaagcccgcatgtttac

SEQ ID NO: 114242 - DNA, 627 bp, Glycine max
  Clone ID: PAT_MRT3847_7416C.1
atcttcaataccctgctccttttcctggtccctttccatttccagcacgtggtgttgctctccctgctgttccgatacctgattctcaacctcctggtgttacacctgtgggtgctgctggtggcacttctacaccttcttctagtcatcagctgaggggaacaactgctttgcaaacagaagttatttcagggcctgctgatgataagaagaaattaaattccgttgacactttgaatgaggatgctgctaataatgatcaattggatgcctggacagcccacaagactgaagcaggaattatatactattataatgctgtgacaggagaatcaacatatcataaaccttctggctttaaaggggagtctcaccaagtttctgctcagcccactccagtttcaatgattgatttgcctggtactgattggcggttggtctccactagtgatggaaaaaaatattactacaacaatctaaccaagactagctgctggcaaatcccaaatgaggtggctgaattgaaaaagaagcaggatggtgatgttacaaaagatcatttaatgtcagttccaaatactaatgtattgtctgatagagggtctggaatggttactctgaatggct

SEQ ID NO: 114243 - DNA, 555 bp, Glycine max
  Clone ID: PAT_MRT3847_74170C.1
ttccggatattaattttgttggagtcatgtataattgtaaagatgctattgttaaaaagaatactctatttaaagcatagtttctaaaaaggattaaggaagtctgaggcgatcgtgaagaaatggagaaggcggtgagagcgtatgcggaggttctgagattggtgaggctcttaccaaaggacagcagggcttattatgccaagtacgcccgcgagaacttcgtcaattaccgtgatgtcgttgatccttctgatttcgatgacctctttcaacgcacctatactcattctctatgggtccttcataagtattccattgataaatctgctgcggataagctcagagggatatgctgcacttgatgcaatttcaattgccacccaagtgtttgttcttatttctcactcattcacacccttccttgcatgcttgagatgtatctatctgcttcaaaattaaattgttttcattatcacttgaacatgtacaacaaaactacatactccttttttatgtatcagtatctttgaggatgagaattgcacatcgttg

SEQ ID NO: 114244 - DNA, 773 bp, Glycine max
  unsure (1)..(773): unsure at all n locations
  Clone ID: PAT_MRT3847_74171C.1
ccacgcgtccgattggtgcgagattgtatatggaatgcaatggggaaaccaattcaacgatgtgcaattatcatcctcaaagatactgatacataaaaaaggagtatgtagttttgttgtacatgttcaagtgataatgaaaacaatttaattttgaagcagatagatacatctcaagcatgcaaggaagggtgtgaatgagtgagaaataagaacaaacacttgggtggcaactgaaattgcatcaagtgcagcatatccctttgagcttatccgcagcagatttatcaatggaatactgcaattaatgaaacatagcaatgtaatgttgtttggaaagagatcgatcgaggaagctagggaggtaaggtatcgtaccttatgaaggacccatagagaatgagtataggtgcgttgaaagaggtcatcgaaatcagaaggatcaacgacatcacggtaattgacgaagttctcgcgggcgtacttggcataataagccctgctgtcctttggtaagagcctcaccaatctcagaacctccgcatacgctctcaccgccttctccatttcttcacgatcgcctcagacttccttaatcctttttacatatctaaatatttttagaaactatgctttaaatagagtattctttttaacaatagcatctttacaattatacatgactccaacanaattaattataggaaaacataatgctaaaattgttagtttatttaacaatcaatcgtagatgtaaaacttacttttaaata

SEQ ID NO: 114245 - DNA, 413 bp, Glycine max
  Clone ID: PAT_MRT3847_74172C.1
ccactttccacctttgactgtagccattcacgcttgttcctctcttctttgtccttcctcacacttttctctcttctccctctctctctctctctctaacttttcagttataggattcatctccaatctccatctcttctcagttctctctctattctaagtaagtttttcattttatgcatacaccgtgtttttggtttcccaggctaaggaaaatttattggcaattctggaattggtatatggttcttgttcaacaggtcaaggattagtcttcttttgctaagtttggtgttcgggaatttttaagctttctttttgttttttttaaaaaaaaaacttcagttcaaaattgagaacttgctgcgtggattgagctgagtctcacttccgtaaggctgatgattcatgaa

SEQ ID NO: 114246 - DNA, 497 bp, Glycine max
  Clone ID: PAT_MRT3847_74173C.1
cgtacggctgcgagaagacgacaaagggaagatgaagaaaaaaaggagaaagaaaaaaaaaggaagcgagttaatgacatgaagaagcagcagtaagagcatgagaagatactggccaagaaggaagaaataaaaatacaacgccgagctacgggtgaagtcctagaaaataagaaaattatggatgaaagagaaaattataagaatttgccagtgcaagacaaaagagaatgcaatatggagaaaatttctgaaaccgaaccgttggccatgagggattcggcaaatgataaaacaaaagaaccacatcctgaatattcggaatctgtgaatgattgtgctaataatggacaggtaatggacaatttgattaaagccgctgaagatgatgacttgatcataaaagactcacttcaagagcagtcatatgagatctctccatatagaggttcagatgatgaagatgaagacgaggatgacctgccaaataataagtt

SEQ ID NO: 114247 - DNA, 416 bp, Glycine max
  Clone ID: PAT_MRT3847_74174C.1
tccaggaaggtttcccgtcatcactgtatgacgtcctccttctttggggggggggggggggggggtttgttgcgactgaggtggtgctgaaaaaacaccgcgtggaatagtgtcaatgctagtcacaagacgccagagagtagagaggctagtagaacaaaaacaacaaaagatggtaaggtgggtaccctcgcgcgtttaggcaccaataagttgactgagtgagggaagtagtaaggtggggaatttacgaaagttcgtattagtcgcgtaataaattgtggggctgggcatactaaagctgtgcagaatgcaagcttcaaagcacaatagcgccccagagcggcgagcgtcttatataatggagtaggcgtatgcgtatgtaggtttaaccgtaggggtgcaaaaaccaagtt

SEQ ID NO: 114248 - DNA, 407 bp, Glycine max
  Clone ID: PAT_MRT3847_74175C.1
ggaaaaaaaagggggaaaaaaaaaagggggaagaaaaaggggggggggaaataaagggccgtgttaaaaaagggctttaacaaagttttttttaaaaaaaaattttttaaaaaattttaaatgcaacggtggttggtggccctggtaaaaaaaaaaattggaaaagaaaaatccgggggaaaaaaatttttatgaaaaacaatttttttttaaaaaaatttttagtgggggaaaaaagggcttggggaaaaccggaccgtaatttggggtttcaaacccttttggggataaccggaaaggggggtaatgcccagcatttttaatggcaacccccctgaaaaaattggtggaggggtaaaagggaaagggcctcccaaaaaagggccccaacctcggtgagcccccct

SEQ ID NO: 114249 - DNA, 155 bp, Glycine max
  Clone ID: PAT_MRT3847_74176C.1
gacaaaaaaaccaattttattttattttcccatccaattacatgggaattttaaaatctggcaaaggggaatcctattaatttacacaacctatataactatacacttatgtgaaatcaagctcaaatgactattcaacctaacaataataattt

SEQ ID NO: 114250 - DNA, 1158 bp, Glycine max
  Clone ID: PAT_MRT3847_74177C.1
acgagccccagaagagtacactaaagagacaaaaaacttgtgtgcctttctcccaagttaattgtgtggaggagttacaaatctttctaaaccacagtgcaatacaccaaaacaatggcagataaagatgctttttgctacccttatcatattcatgattgcacatcaccacaagagaacttgcccaataaagggccttttcattcagaaatgcttccctaaaattctaggaaaggagctggttacacatcggtgaagccacttgatgcaaagacactgagacgtttagctcaaaacagagaagctgcaaggaaaagccgtctcaggaaaaaggcttatgtgcagcaactagagtcaagtagattaaagctcacacaccttgaacaagaccttcaaagagctcgctctcaggatgagtttatgggatgtggtggtgctggtggcagtataagttctggtgagtttaattagccttatctcttgttggttttttaaactcaatttcatttttctgatacctcagattggaacaaagatagaagggtgtgaatatgtcaaaattttctggcacatcgtatatatgattatggagcatggaaaaacttgttacaatgagtacctgaaagatttagttggcgtgatcttttgactcttttttacactttggaacatgagacaaagaattaagagactcgttagggagcagcaattgctgttattgacacgtaacttcttcctagctatgtcctttgaatcttttttagtgccaaaaataaataaaaagtcaaatttaaccaaaatctagaatcaggtggagaagtcttggaatttgaccaaaatctgtggcctaattcacgtttgaatccacattattcttcctagccataattaagtggatttcgttgggctgctttacaaatgaatgccagcgtctcctagaagaaaaatatttatttatttttcttttcaatcttctatgttctcttgtgtctttatgttttattgtaaatgtaaatctaggttttatgtgcatgatgaggctttagctgaagagaaatagaaaaaaaaaagtttgagtttaagagaaggtgcacgtggcatggatgtagataaagtctccatacaattgactctatcttctagttagctaatggctta

SEQ ID NO: 114251 - DNA, 357 bp, Glycine max
  Clone ID: PAT_MRT3847_74178C.1
gaaaaagcgactggagatgaaacaaaccttttttgacatgaagagaactctgagtctttcggtgtaaaaggtgaaacccaaatgcaaaaagaagatgcttatcctattaaagatcgcggtgaaggacctaagattgttgaaaattcagatcttggagaacataggaaggtggaacttgttgcaaatgcttaagaaaaccctgacgaagatcctgaggcaccttcttaagaaacttttgcatttgatgaagagcataaggtattggaggctcttgctcatcatctggagattaaagacgaacatggcatttttgttggtggattgtgtcgtgatgctacagatgaagatctgagaaag

SEQ ID NO: 114252 - DNA, 1891 bp, Glycine max
  Clone ID: PAT_MRT3847_74179C.1
ccgattcccgggtcgacccacgcgtccggttttgttcttgtgatgaaattgagtttcttctacttagttagaaacttttaatttcaacttcagagaaggtgagaatggtctaagaagccttgcatggcgagccaaagaattggagaaacgggtttgtctgagtcgggaccttcaagtcaccatgttccttatggagttcttcatgggattagtacttcatcaggcctaatcaatcaagggtctgcttttgattttggggagttggaagaggcaattgttctgcaaggaattaagataagaaatgatgaagccaaagcatcagctttattcacaggcaggccttcggccacactggaaatgttcccctcatggccaatgagattccagcaaacctcaagaggaggttcaaagtcaggaggggaaagcactgattcaggatcaggagtgaacactctttcaaccaaaaatgagctaagatttgaaacagaatctccaataagcataaaagcatctccttcagatcatcatcaggcttttgatcagcaccttcaacagcagcagcaacaacaacaacaacaacaggagacagcaacagcaggcacatcatcacagaatcaatcagcagccaaatcacctcaagaaaagaggaaaggagctggttccacatcagagaagccacttgatgcaaagacactgagacgtttagctcaaaacagagaagctgcaaggaaaagccgtctcaggaaaaaggcttatgtgcagcaactagagtcaagtagattaaagctcacccaccttgaacaagaccttcaaagagctcgctctcagggtgtgtttatgggatgtggtggtgctggtggcagtttaacgagaggagccgcaatgtttgacatggaatatgcaagatggttagaagaagatcacagactaatgggggagctgaggaacgggttgcaagcaccgttatcagacagtgatatgagagtgatggtggatggatatctttctcactatgatgagattttcaggcggctcggtgtggctgctaaatctgatgtcttccaccttatcaatggcatgtggacttcccaagctgaacgttgtttcctctggattggtggttttagaccctctgatctcatcatgatgctgattcagcagttggagccactagctgagcaacagataatggggatgtatggcctgaagcattcctcacagcaagcagaagaagcactctctcagggacttgagcagttgcagcagtcacttgtggacaccataactggaggcccagtggttgatggtgttcaacaaatggtcgttgccatgagcaagcttgccaatcttgaaggttttgttcgccaggctgataatttgaggcagcaaactcttcatcagctatgtcgattactcacagttcgtcaagcagcacgatgctttattgttattggagagtactatggacgtcttcgtgcccttagttctctttgggcatcaagaccacgagagaccttgatcaacgacgataactcatgccaaacaactacggaaatgcaaatagtccaacattctcagaattatttctcaagtttctgagagatgtaattaaaacccattagcctgaaagaagtttgctcgccataattaaggggatttcgttgggctgctttacaaatgaatgtcagcgtcttcctaaaagaaaaatatttatttattttttcttttcaatcttctatgctcccttgtgtctttatgttttattgtaaatgtaaatctagtttttatgtgcatgatgaggaagctcctactttagctgaagagaaatagaaaaaaaaaagtttgagtttaaaaaaaaaaaaaagggcggccccttcaaaggaacccagcc

SEQ ID NO: 114253 - DNA, 221 bp, Glycine max
  Clone ID: PAT_MRT3847_7417C.1
ggagctccgaattaggtcttcttaactaaatactcactttatatattatatgcatggtttctgaaaaacggtttatcattacaatttaaactgcaacataaatatttttattctcttattgcgattgtaagtacggttacatcagttatatttgtgtatacgtaatttctcgaaattttaatgatggcaacaaaatatcaacttcaaccacaatctaatat

SEQ ID NO: 114254 - DNA, 909 bp, Glycine max
  Clone ID: PAT_MRT3847_74180C.1
aaaagttcaatataagaataccacgctaccaaaaactgtcagatttggttgatgaagaagattttgatgaacaaaacgctgttgagtatacaaaagttcaatataagaataccacgctaccacaaactactctgaaaacaagtgtcaaagagcttgacttagaggctgcacttgctgagcgtgagctccatgttaaactaaggaaggaagcagcggacagaggtgagaaatacaaaattaccaaactgaggcgcaatgttgagatggatgagtatgactacatgcattggcgtagatcatttgaggaaagagaaacattgattagagacatcagctgtcgcaaagctcttggtctgccattggaagagccaggaagatatatggatgctagtttttttggtaaagatcaatatgatcctacaagtcctctgtatcgttatgactactggggggaacccaagaattcggagaagagcatgcaagagcggatgacagatctccataacaaaaaaattgtgggcaagggcaatgtttggtacgaaatgtcatatgaagattgcatcaagcaacagatggaaagtgaagcccagtctaaggagcaagaaaacgatgaagatacaaggcaaggccaagctgatgaagatgaggatgacaacgatgatgatgattttgacttcagtattctgagcagtttcggtagtaatttctccgatcagcctcatgttaatgggaccgagtcttctacaatatcaagtgggggcatgtttgaggattgatgctataatgcatcattgggcagctaaagtaaaatgtacagttaggctgagaaatgtgcataaattttggcagtgtacaaattgttcacaacggcaatctaatttatttgtatattttaaaaaaaaaaaaaaa

SEQ ID NO: 114255 - DNA, 105 bp, Glycine max
  Clone ID: PAT_MRT3847_74181C.1
cgctacaatctgcacgcacatgattggaaagaagagctctacgaagaccttcactgtgaccaaccgggaatgactttctgcgccaagaatcagaggtgcttcttt

SEQ ID NO: 114256 - DNA, 441 bp, Glycine max
  Clone ID: PAT_MRT3847_74182C.1
gaaaaagcaggaccccgccaggaaaagttggaaatccataaataattaaaaaatcccccgggatccaaaccgagggctaggaaaaagtaccaaccccccaaaaaaaaaaaaagaaaagccttaaaagggtaaaaaaaaaaaaaaaaatatatataaaaaaaaaaaaaaaaaaaaaaaaaaaaaaaaaaaaataaaagggccaaaaaaaaaaagcagcccccccccacccccaaaaaaaaaaaagcaaaaaaaaggggcctcccccaaaaggccccaaaccccggggagctatatggggggaaagcccccccagcccttaaaaaagcccccccccaaagggaccacaggggcccgggaaaacccaggggcgggggcaaaaaaaagaaaaaccaaccttgcgggggattcctgcagcatccaaaacattgggaaaaccttgtt

SEQ ID NO: 114257 - DNA, 366 bp, Glycine max
  Clone ID: PAT_MRT3847_74183C.1
taacatttatttttttcaggatcaagggaactttttattgtaacttgtaagaacaactattggagctgaactcctagttgccttatgaaaagtacaattgaaccttacggataatttgcatacaattcctaaccagctaattggcacccataagtcccactcaaatttaaaaatgtaacttgcttttggaaaaaaaaaaaaaagaattacaaaatcattaatgaaatggaaataacatttattcataaatcagaactttttaatgagtccatggccaggacagccattgtaattggacttaacggtccatggccagaatcaagggcacattaaaagaagaattcttttgtcgggaggatttaccaa

SEQ ID NO: 114258 - DNA, 1843 bp, Glycine max
  Clone ID: PAT_MRT3847_74184C.1
cggctgcgagaaacgacagaacgggacccatggctcgcccaccgtaagcgtttctgcatacgagatgttctagtaccttcttcgttcacctcttctcttcaccgtcgcaacacaacgctgagctgcagcaattcaccaccgcagagttttccaagtccaatctcacttcacttatcgccagggtttaatctgaatatctttcgcgttgccactgaggttgttatctttcttccaaaatggcgacggtgatgcagaagatcaaagatatcgaagatgagatggcaaagacccaaaaaaacaaggctactgctcatcatctgggcttgctgaaggctaaattagcaaagttgcggagggaactccttacaccttcatcaaaaggagctggaggtgctggtgaaggttttgatgttactaaaagtggggattcaagagttggtcttgtgggcttcccttcagttggcaaatctactctactaaataagttgaccgggacattttctgaggttgcttcctatgagtttactaccttaacttgcatcccaggtgtgatcacatatcgtggagctaaaatccagttgttggatctccctggaattatcgagggtgctaaggatggaaagggtagaggaaggcaggttattagtactgcaagaacatgcaattgcattttgattgtccttgatgcaattaagccaataactcataagcgtcttatcgaaaaagagctagagggatttggtataaggttaaacaaagagccaccaaatctgacttttaggaagaaagacaaaggtggactcaatctcacctcaactgtcaccacaacacatctagatcttgagactgtgaaggctatatgtagtgagtacagaattcacaatgcagatattactctcaggtatgatgccactgctgatgaccttatagatgtcattaagggaagtagggtgtatataccttgtttctttcttgtgaactatgttgtgaacatgatacttcagataccacttgagtaactggagatctctcattagctacctcacaatgcacatctggagtggaaccttgatggtcttctggagaaaatttgggaatatctcaacttaactcgtatttatactaaacctaaagggatgaatcctgattatgaagaccctgtaatattatcctctaagaagaggacagttgaggacttctgcgatcgcattcacaaggacatgcttaaacagtttaagtatgctttggtctggggttcaagtgcaaaacacaagcctcaaagagttggcaaggagcatgaacttgaagatgaagacgttgttcagattatcaagaaagtataatttgttataatcagaagaatccaagatgacgttttctgcaaatcgatcagaatgccggcactctcattagattaatagaggatattctgagcagaatcaaagatcccttcgtgagactttcaccaggatctttagattacactccaattatttgtcttttttaagttgggggtgaggtagagtatattaaagtttgatgcgttgttaaaccattagttatttcaggggacgccgtttgtcgcggaagttttgaaaatgatgtatcttgtggtgggattatacaattaatgggtagaataatttggtgtctacttagtaaacattgataggctttgctggaaagatatatattattcaggtggatatgtcagactgtccatcctgctggacatttttcacaaaacgatggcatgagcttgatacagcatttacattgtttttaaaatttattgacagtgataaagctttttacattgtctatgcttctggacatttttaac

SEQ ID NO: 114259 - DNA, 991 bp, Glycine max
  Clone ID: PAT_MRT3847_74185C.1
ccaaatctgacttttaggaagaaagacaaaggtggacttaatctcacctcaactgtcaccacaacacatctggatctcgagactgtgaaggctatatgtagtgagtacagaattcacaatgctgatatcactctcaggtatgatgccactgctgatgaccttatagatgtcattgagggaagtagagtatatataccttgtatctatgttgtgaacaagattgatcagatcacacttgaggaactggagatcttggataagctacctcattactgcccaatcagtgcacaccttgagtggaaccttgatggtcttctggagaaaatttgggaatatctcgacttaactcgtatttatactaaacctaaagggatgaatcctgattatgaagaccctgtaatattatcatctaagaagaggacagttgaggacttctgcgatcgcattcacaaggacatgcttaaacagtttaagtatgctttggtctggggttcaagtgcgaaacacaagcctcaaagagttggcaaggagcatgaacttgaagatgaggatgtggttcagattatcaagaaagtataatttgttataatcagaagaatccaagatgacgttttctgcgaatcaatcagaatgcctgcactctcgttagattattagaggatgttctgagcagaatcaaagattccttcgtgagactttccccaggatcgttagattacactccaattatttggtcatttttaagttaggggtgaggtagagtatattaaagtttgatgcgttgttaaaccattagttatttcaggggacgccgtttgtcgcgtaagttttggaaattatgtatcttgtggtgggattatccgtatctaaaacaattaatgtgtaggaataatttggggtgtactagtaaacattgatatggtttgctggatggatatatattattcaggtggatatgccagtcttgtccatcctgctggacgtttttcac

SEQ ID NO: 114260 - DNA, 380 bp, Glycine max
  Clone ID: PAT_MRT3847_74186C.1
aacgttcaataatgacctttttatagctccaaagaaaaatttccaaaattggctggcgattatttctcattgacacctaataaacacctttatctcatataacaagtcttggtcaatactactccaacctctacttgggcaacactcactttatgaacaaatgcagaactttatctgaatttttagaactcaatgcctttttgcggctgcccttatccacgcgatcacttacacttcttccacttgacacatgtcactatatattcctcggagactatgacacgcttatagctagaaaccctgttatatgtgcctgaaaattttatcttaggtgatttttctttgtgaaactcatcggtgaattcctcaaggattttaac

SEQ ID NO: 114261 - DNA, 212 bp, Glycine max
  Clone ID: PAT_MRT3847_74187C.1
gccacgctgatactcaattctacagttagatgcttggaaatagtggctgctagtgacaagcgcttggcacatgccaaaattgagacgtgtgtgctggcacttttctaattgacgtgcttggtgcgtggagttacaggggacactaacattacatggcgggacacaaacaataatttcctgattgcggacataagaaaaactacattgccgag

SEQ ID NO: 114262 - DNA, 234 bp, Glycine max
  unsure (1)..(234): unsure at all n locations
  Clone ID: PAT_MRT3847_74188C.1
gggggggggnnggggggggggggggggggggggggaccatagcgtggtgcgacatgccgagttccggtaccgggaattcccgggctcgacccacgcgctccggaaaatattctagtagtagatggctagaagcagcgtgagagattgatgtctcaacggatgactcgttgtcatgtattgtggtatctgtgtcttggtctgagggtattcgatgatgtacatctatctctcagt

SEQ ID NO: 114263 - DNA, 249 bp, Glycine max
  Clone ID: PAT_MRT3847_74189C.1
acgcgatcgatcgcactgatcgagatgctggggattaccatgaatgtttccgctcgtgccaaagccgacggggccaactacgacttgggtccctcccaagatgactctgtcctcaaacacaggctactaacgctcaccacacccaccaattgtgaccctccctttaataatctctataacaagttcaccacattcgtccccgaagcctccaaatactaatacctctactaccactactgtgactatctc

SEQ ID NO: 114264 - DNA, 559 bp, Glycine max
  Clone ID: PAT_MRT3847_7418C.1
gtaaaatcttcaaatgttaaggaaccagttatatcaccaacaagtcttgtgtttggttatctcaatcttttctctgacggagtgcataacttcactgatggaatggctttaggaagtgcattcttgctttatggatctgttggtggctggtctagaactctgtttttgcttgcacatgagcttcctcaagagatcggtgattttggcattctgataagatctggtttcagcataccaaaagcgttgttcttcaactttctgtcagcacttgtggcacttgcggggactgcattggatcctggacagtcatctttgattgagggatttacagcaggtggatttatatacatcgcaatagcgggagtacttgcagaaatgaataacagtgggaatacaacattaagaaatactgttgtccaaataatctccctgaccatgggcatggctgttgcccttggtatttcccttgtagaatgaatgaaatgtggtctctttaggacttgcatgtcttgattcctgatttgccaattatttcacaaaaatatgccacccagtttcc

SEQ ID NO: 114265 - DNA, 208 bp, Glycine max
  Clone ID: PAT_MRT3847_74190C.1
gggtaaaaacaggggttcaggacttaatcaaaagccaaactcgcctagacataaactgttaatttaagatcttcacttatgacacatgcattagttgcactatattgcaacaacatacattgtgaccaaatcgatggtcaattctagaatcacaaacttaaattcaagaagccttaactcatttttttgatccaaatcacctttcaca

SEQ ID NO: 114266 - DNA, 504 bp, Glycine max
  unsure (1)..(504): unsure at all n locations
  Clone ID: PAT_MRT3847_74191C.1
aaacaacagcataacttctattataagtcatgtctataaacaaattattgatctataaaatcctttctatatagctttgtatatattccttctccgttcccctttgcctctaatgattttggctaccctctgtgtgaagtaaccttcttacccnaaaacttctatacgtcctcttagttttcaatacatgcccatcttttctatcatttgaggcaaatttctgccatcttttctaccacaggaattaccacaaagataaagaaaaaagtaaaaaaagattctgcatatgctgcaaagagaagttatcttggaactaagctatcactatgcctccaacttttggaactacttaggtgtcccaaatcattaccaccgctatcactcccacacccaagaacacagcaagaaacttgaaataggccgagtcaacctttgtcggtctgtggggcatgtacccttttgccacagatggtttactgatacatagataaacactccacaagc

SEQ ID NO: 114267 - DNA, 427 bp, Glycine max
  Clone ID: PAT_MRT3847_74192C.1
cattaataatcatcatgcttttctttttctggaaagaaaagtgaatcattaaaaactgaaagaacatgtaattcatttatcactgtagtacattagaatatcctcttttgtttccatcactaacaggtaaatattaaattatttgttcatagtaaccaaaaaatatatataaataaaaaacaaaatatctaaatccaacgtttgtgatttcgagagtggtgggcacctccgaaccatcgatcccaaccagcatcaactgaacctttggtgctgcaaacaaacattttaccttaaccttaactctaatacattaatcatttttgttcaaatatcttttctttttttaccttttggattataatatattatttactttctttactagtacattaaaaaacacatacaacgcaacattggacccttaaaa

SEQ ID NO: 114268 - DNA, 503 bp, Glycine max
  Clone ID: PAT_MRT3847_74193C.1
gaggctccacaccaagaatctatttaacagaaaatctataaaaaaattcagtcaaaaccaatttgactcgcagcagaattaattgagagtctaaaaagttacccaaacactcatgttaccatacaatctgttcttttatctcacaaaaatgtgatgtggaagctttccaaacagcctaataaaagaattattgaaatcagtagaatacaatatctcatgtcagatcaaaaaatatcatcagcaaatactctgttttaactgtctctgtcaatttcttttggccaaagttatgtctactacaaatatagtaaggcatatgtatgaactaacatacaagctcacaccttcaaatctgaatgacaagtcatggtgacttcaaagactgcatcaagtcctccatgctcccttaatttttccttgaaatttccaccagccttccgtacttgaccactggtttctgaatacatgtagtccccacaaaacattccaagaaaatataaaag

SEQ ID NO: 114269 - DNA, 368 bp, Glycine max
  Clone ID: PAT_MRT3847_74194C.1
taaaaccattaggacagagcctaattgcaacaatttaatttggtgcgcagcatctagaacgtgtgatccaatacttaatttctggcatttactcacttattaacaaaacattattacagcttgaaactgaactaattcgccttggaaagcctattgcagctgatgcaggggtaaattgtgtattcttttatttatgattgaattgcgctatccatatttacttaaccgtctgatgcatgggaagttgtactcaataatggagatatgtcggctttttgatcaaatattcaaagagcatcttgatggagtgtacgttttgactctctttacttcacatgtttaagataacaccatgagttgttatagcg

SEQ ID NO: 114270 - DNA, 1027 bp, Glycine max
  unsure (1)..(1027): unsure at all n locations
  Clone ID: PAT_MRT3847_74195C.1
ggctcgagcggctccagcctgacttgaatcatgattgcatttttgagagatttcatctttgctttgcggtggatgtatgcgaccaacacccaccccagataacctctattgcattcccaggctgatgagaaggaacaagcagaatgaaggtatgatctggtaaagggagaaaagtgtgcctgacggtgacaggtgttgtgattgcaattgtattgctaattgtgatactagcgttgacagtgttcaaagccaagcatcctgttaccacagtggactcaacgaagctagaggactttcacatgggcttggatacaccaaaactaaaggtcgatttgaatgtgaccctgcaagtggatgtctcagtgaagaacccgaacaaggtgggattcaagtattcagacagcactgcccacctcaattacagagggcagctgataggtgaagtcccgatctctgccggagagatttcatccggtgagaccaaaggattcaatctcaccctcaccattatggccgaccgtttgctctccaattctcagcttttatctgatgtcacatctggtacattgcccctaaacactttcgtgaggatgtctgggaaagtcagcatcttaggctttatcaaagtccatgtggtttcctccacttcttgtgatgttgcaattaatctttctaatggaactgttgggaaccaagagtgccagtacaagacaaaactttgattagaggtttttagttcaagagtgaaactagactctagattagtagactatacacgtattgcttaatgatgaattaattttgttcatatttcactttgtttcatttgtagttgtgatttgtatcatactagactgtctcgacctacactctccctttaagttaagctccacatctttatgctatttgtagttttaattaatatgtaattacagggtatttctttccttccacttttaattttattaaggaattggtaccctgctataattaatagtattttttttagaattcaatgcattannna

SEQ ID NO: 114271 - DNA, 426 bp, Glycine max
  Clone ID: PAT_MRT3847_74196C.1
agggaccaaaattaaagaatcttatccccaggaagaaaggggcccccctttcagaatgggcccggcctttaaaaagccagattagccaaagaaaggggcccggcaacatgccaatggggcccaaacaaggggcctgggcctaaccgaaaaggggttgccacctttatcactcccaaagaaaagggccccatacccggggaaaccggtcataaccccccaggaaccccggggaaaccggcttaacaatgggcgaaagcggaattccaaatttaaaaccctcaaaaaccccttgattcccccaaaaagacccacaggggttaacaatgcccccggggctaacaggggtaacatggtcgaaaagcccccaaattcaaggagcccttggccaaaccccttttgggcatccccaggaacccccttttgggg

SEQ ID NO: 114272 - DNA, 225 bp, Glycine max
  Clone ID: PAT_MRT3847_74197C.1
aaagggaaaagcattgaacatatatgtcatcttcttcattcccattattgtccttatccatttcattatactttctggtcataactttaaattcttttgcacccctcattttgtattctaatatataataactcctctgcttcaacacactaattctcactctccctctctaatagtaatagtattatacataagtagcataaccaatggaagcgcgtgcaggag

SEQ ID NO: 114273 - DNA, 183 bp, Glycine max
  Clone ID: PAT_MRT3847_74198C.1
agtcaaaatgataaaaccaacccgacactgtaggttcacatctgcttgcaagaattatgttggtccacagtacaagattggcgggcggatataaggacaaaggacttgtttctatattaaaacaaaatgggccatccatttacaaatgtgagaaataagacccacggttctgcaaataatgaa

SEQ ID NO: 114274 - DNA, 368 bp, Glycine max
  Clone ID: PAT_MRT3847_74199C.1
gtttgtttggtggttgcagcatccttggcactggcagtgtttgtgtccataactgtaactggcaggcctggctatgcaggtgctgggctgagccctgcaagatgcctaggtccagcgttgcttcatggaggcccactatggaatgggcattgggttttctggcttgggcctttcttggcctgcataatctattatagtgtctccattaatctaccaaagaaaggtttgaattgggttgatggagaatatgatgtcttaagattggctctgggttcttgtaggactatttctaataatacggatttaaatgatctttcttgactctcaagtctcaagtatcaaataaaataacaacttcgtgattttaa

SEQ ID NO: 114275 - DNA, 3309 bp, Glycine max
  Clone ID: PAT_MRT3847_7419C.1
tacggctgcgagaagacgacagaagggggaagtcaaccgatctaaaaaactaaaactcggatcccctttatgttgtttattttgatttggagtggttccatcgggagtttggatggccaccttgaatgttccccctcttcctccttcaccgagagacgatgccatacaactttacgctgctttcaaaggatttggatgcgatactagcgttgtgatcaatatacttgctcatcgagatgctacccagcgtgcctacatccaacaagaatacaaagcaatgtattctggggatcttctcaaacgcttatcttcagagctttctggcaagttggagactgcactactgctttggatgcacgaccctgccggacgtgatgcaatcatccttaggcagtctctaaccctgcccaaaaatcttgaagctgccactcaacttatatgttctcgaactccatcccagcttcattatttaagacagatttatcattctaaatttggtgtttatcttgagcatgacattgaaacaaacacctccggggatcataaaaagattttgcttgcatatgtaaccacaccacgtcatgaaggccctgaggtaaatagagagatggctgagaaggatgcaaaggttctctacaaagcaggggagaagagactgggaaccgatgagaagacttttgtgcaaatattcagcgaacggagtgcggctcatttggctgctataacttcttattaccatagcatgtatggacactcgttgaaaaaggcagtaaagaaggaaacatcaggaaattttgctcttgcacttctgacaatagttcaatgtgctgagaatcctgcaaagtattttgccaaggtcttacgcaaggcaatgaaaggtttggggactgatgacacaaaacttataagggtgatagtaacaagggctgagattgatttacagtatatcaaagctgaatatttaaagaaatacaaaaagacgcttaacgatgcagttcactcagaaacatccggccactacagggcttttcttctctcactcttaggtcccaaccagtagtaaaaaatgttcaacgatgttttgtgtggaatgaattcagcgtatgatgtttgaatatatgagcagtaccaatattttctgtattgatattgtaaattaggtagtgcgtggtgctttttatgtaatatgtacacacaatttggtttcagcatgcatttgcttgtcatcagagttgaaaatgtgtatgatttttgcaagtttcataaaaacttggaatgacgatgaatataatatcaatgaaactccttttataataaaaaaaaaaaaaaaaaaaaaaaaagcttttttacaaaatccatcagacacaatcagtgtcttcatttaacgtgcatcagaagaggaaagcattttgactgctatacagctcataagaaagaaaaatgttacaaaatacatagtttgacaaagacaaacggcttgtgataggttagtattaacgacgaaaagaaaaaacatgtactgtacaaagttcactctgttagggagtaaggaatcatttggtgttaaagcctgaccattctgtttgatccatcattttctctcggttcctcctccctacaagcttttctgggttcaccgtttagcataaagcaaaaatataaagagaacatttgtaaactggttggaatattttttgtgaaataattggcaaatcaggaatcaagacatgcaagtcctatagagaccaatttccattcattctacaagggaaataccaagggcaacagccatgccaatggtcagggagattatttggacaacagtacttcttaatgttgtattcccaccgttattcatttctgcaagtactcccgcaattgcaatgtatataaatccacctgctgtaaatccctcaatcaaagatgactgtccaggatctttcccccacagcagagccaatgcagtccccgcaagtgccactagtgctgacagaaagttgaagaacaacgcttttggtatgctgaaaccagatcttatcagaatgccaaaatcaccaatctcttgaggaagctcatgtgccagcaaaaacatagttctagaccagccaccaacagatccataaagcaagaatgcacttcctaaagccattccatcggtgaagttatgcactccatcagagaaaagattgagataaccaaacacaagacttgttggtgatctaactggttccttaacatttgaagattttacattatatgtggcactatctacagtattatcgtcgagattatcacctttggtcacattgcttccaattctctttctgagtgagctttcagattgagatggattatctcccttcaaggagtcaagtgacacttgatcgtcttcttttctctcatctatcaatctctcttcttttgcattattaaattctgactgaaagttggcagtagaactgttatcatctttcaatttttccttgctattgtggtgatggtggtggtgtccatgtgtccatgaattagctcttcctgagttttcttcaacatacctcactaacttctccacaagaagaaagagtacaattccagcaaggatggatattcctatggaaagatcggctaaagaatgtgcatgatcatgtccagaactatcatgatggtcatgatctccatggtcaccatgagaatgggagtgttctccaccaaaagcatgtggtaattggtgaagaaatgcatcccccaacatagctcctgccccaaataaagccaatgaatcaactacagcctttgatggtttcccttgaacaaaaattacaggcaggataatcagacaaacaagagaagccatgtataagattcaaataaacatcagcttaaaagaatcataacatggactcagatccatggtatggaatgtgccagacaaaggccgacaagtcagggatgtcaatcagtctgcgaaccgtatccagatgagttttcatcattattggtcaagaacttctccactagcataaagaaaatcctatatgaaagtatacacatgcaaatgtctcaatagatgttggctgtcctagatccttcccccacagcagaaaccaattcacgatcccgcaggtgactcacgttcacacagaaagatgattcccaagacttttgatatgcagaacccagatcttatcagaatgtcaatatcacccatcgggaatgtacatcgatgaagacatatgagcataaatgccaccagatgaagtctttttaggaaccctctacaggagaaagtattagctgggcaggagaaag

SEQ ID NO: 114276 - DNA, 166 bp, Glycine max
  unsure (1)..(166): unsure at all n locations
  Clone ID: PAT_MRT3847_741C.1
gtagtaagtaggaattgagtgagttgaggtgaaattgttttattgaggaagtttggaattccaccaatagtttcatcgtcatctaattatcaataactgcagagtatataatatatgaaatataaaaaagnagtcatgatgatgataagaattagtagatgttatg

SEQ ID NO: 114277 - DNA, 292 bp, Glycine max
  Clone ID: PAT_MRT3847_74200C.1
gggatttcgagttcaaaagagaagtggaaagttgaaattgattcaagagataagaagtcaaaaaagcctaagtaatctatcatttgtagcagaagtctttgagatacgcccactgcttcatgtagttgaactgaaaaaatcttttggagactcatcagcttacagacaggtacaagataggacaaggctagttcaatgtctgtctattttaagtgcttaaaactacgtcttttactctaaaaaaaatacattttcatcacttggaacatcattcccatcctttgcaagtact

SEQ ID NO: 114278 - DNA, 380 bp, Glycine max
  Clone ID: PAT_MRT3847_74201C.1
atggatgtcagcaaccctcgtagaaaaaacaaaaattgcttgcaatcctcacgccgaaagacaaagccactacctattaaatgagattaaagcgacagaaagaagcgtgttgcaaagagctcgggatcaacatagaaacattaactactatatcctctcctgacccagcgaaaattgctatctattcaaagctgagggggaggcagcaactcctctcttcctgggtgcagcttctgtaccggctctgaagcctctcttaaatctacggggcacggttcgcaagaacctcatacttccagctccggagggggttcttctaatggccttcacgctaccattttatttactggtgcgcccagcggggaaagcgcacgcggggc

SEQ ID NO: 114279 - DNA, 428 bp, Glycine max
  Clone ID: PAT_MRT3847_74202C.1
ggctcgaggacctgttgcaattatcggcactgacaagctgactgctttagaggcaagagatcagactatcgtaaataaccctattgaagctcatataatcgctgaagttgcataggaatcggtaaagaatggactcggctgacagcacatcggcataattactacatataagacacaggcaaacctaatacggaatgctgcttccatgacttccttggagactcataccatagacaaataccagtgttcatatagagactgtatattaacatcgcttggaacgcctaccgcacacccgaccagctgtgcagcttctatgctaggatactggcacaggataaatgcggctcttacttgcgctaacaaaacgttgatcatagttggatcgcggagaactctgatgagggttccgctattgaaacttctca

SEQ ID NO: 114280 - DNA, 668 bp, Glycine max
  Clone ID: PAT_MRT3847_74203C.1
ctttgtttttttttttctatataactatagagacattatataattttgtgagatatattgtgatgaaaaatcttatcacttagatagaaaaaaaaaattctccatattttttcccacacttttttattaaaacatctttcttgaaattaaggggttctctattgtgagatcacgatagtgggcatgagtaaaagaccttttaaggggacactttaaatctttccttgtgtaacttatgtgatacacacatgtgatattcggggatcattatattttaaaaaaatattcatataatgcgtagatcatgtgagttttctttttttaaaaaatcaaacttttttacattatcacattacattaaattttttcactctcacacagattattctctcgctagatatgccccctaatttttttatacgagaaacacatttaagttatatatatatcgcgaataactctaatttaaaatcatataactcctcatttatttttaaaagactctcgtgactcatttattcgcaataagatgtgataaccacttcttatttttctcaaaatcacgtgtaaaaaatcgcagagtgcggggcacactctacactgcttataagagaatgtgtgggacacactataaatttataatactcgattttttttgtgacactttt

SEQ ID NO: 114281 - DNA, 590 bp, Glycine max
  Clone ID: PAT_MRT3847_74204C.1
ccagccattgctggtgacccgaaaaaattggtcaaaccctgagaagtttgaccccgagaggttcatctctgggggtgaggaagcagacataaccggggtaactggggtgaagatgatgccttttggtgttgggagaaggatttgccctggcttggctatggccacagtgcatattcacctcatgatggctaggatggtgcaggagtttgagtgggatgcttacccaccagagaagaagttggatttcactggcaagtgggagttcactgtggtcatgaaagagtctcacagcaaccatcaaaccaagaggaggaggaggagaaaaagtgcacttgtaaaattttgttgctcctcctcctttctggtttttaatttcacagataacataaatattattgttgctattgttattattatatatggatacatcatcgtggtttgtggtggatttgcatacagagtactgcaagtttcatcacatcattatattgccttcttaattggtccggtttgttggagaaatatttgttttgatgacaaaaatggatctttaatttgttggacggggggggggggggggggggggtagg

SEQ ID NO: 114282 - DNA, 397 bp, Glycine max
  Clone ID: PAT_MRT3847_74205C.1
ctagaagaaacataagcgcgtggaccagtaatgtgacagtgtgaaaaagatatgcatactgataaggtgaaacgcataagtaaattgatccgtatggggactgatttgaagactcatagttacactaccacacacgagtacaaacatcaaacaccttctttgcacgcaaaaaccagaatcggagaattctgttaagagaggcaatggtgaaaattaaaagctaaatcaaagagagaaagtatacacggaatggtaggttttatcaattgaatatcaaaaccacgaaaattcaaactttccattttctcacctcatatcacttaaaatttatggctttcaagatacgattcttgataattataaactctgcacggtgtgcatagtaaattctcaccat

SEQ ID NO: 114283 - DNA, 389 bp, Glycine max
  Clone ID: PAT_MRT3847_74206C.1
tggcttggaacctttgggctgatttatgtgcttgcatggtcgtgagaagatgatagaagggggtgatgacggcggtatacctgagcctccggggtagggtgtctgcggttactctgtttcacattcctctcgttactggtactgttgctgtcactggtgctcttgcctctggtgttgttcgggggactcatactattggcagcagtccgactggtgtcgtaactagggtcttctgaactatccttaaaaactctatcagcgcaactcctcgcgaagtcgccgtcacacacggcgccaccgcggtcaccacctcctaaataaaagcagaaagcgccttagtactaaacactcacgtattcgagctctccaaggtcggacacgtaactccc

SEQ ID NO: 114284 - DNA, 273 bp, Glycine max
  Clone ID: PAT_MRT3847_74207C.1
aatcacttcttcctggggataagtggggagtccacaaattatcactgacaaacatcaaacccttctatttaatgcacagtaactgtgccacttattacatcaaataatgtaagccttaaactcattttgtacaaaatctattccgcacagctttctctactttttgaaataatataaataatgctccctataacctgctttacctcctttgtaaaaaacctttcaccatctttgtcccactcattttctgaaaaacacatttacaaaaacata

SEQ ID NO: 114285 - DNA, 250 bp, Glycine max
  Clone ID: PAT_MRT3847_74208C.1
ctataaggtgttaattcaagtgcacctcgacatcgggatcttccgcaatgctatggggtacatgaacagtttcatgacgacatgtctcagaaggtcggccattggtcttagtatttgtcataggtacaacaagaaactcaccatttcttccagggagatcctctcggcggtgcgattggtcctctctgtggatttgtgctagcttgccgcttctgaaggcgccaaagctggctcctaattcaccaggtct

SEQ ID NO: 114286 - DNA, 211 bp, Glycine max
  Clone ID: PAT_MRT3847_74209C.1
ggggggggggcaaaattaattggcataattaggaacattacttggtacactggacaatccacaggtcaacatgatgggaaaaggtgaattaacattacactacaaccatttttttaaaacaaacataagaaagtgaaaacctagggggctcaaaaccctcgttaaaatataagaataacccgcccaaagcaacattggtgagtttatattg

SEQ ID NO: 114287 - DNA, 330 bp, Glycine max
  Clone ID: PAT_MRT3847_7420C.1
acgcatgatagttctcatcatataaaagttcctcttgacaagagttctcaaatgctaggcagcaccgctgagaatcttgggggaaggcacgcattgaagcatataaatctactggactatttaagaattcataatccaaacttaaatgactgctcttgacacaaaacaaatgtctaagcgatatctaccatattaaaatcacttacccacattatacaaatccctacatatgcatatactccagacttaaacatgatgagtggataaaccacactcaacctgaacttcacactatgacactggcacaacatcttcagacattcaccaatc

SEQ ID NO: 114288 - DNA, 1798 bp, Glycine max
  Clone ID: PAT_MRT3847_74210C.1
cttaaactgcttatcccggaaaatcacgacgacaacacaacacccaactggtctgtgactgaggcagcaatggtgctgatgacagcttcataagtataatgggcttggtcactgttacatggacaaattatctaaaaaagcgtattccactaagaataaggtttcttcataccttgaaaggtaatcaaataggccaaattttaatgtctccacctcttgcatctctggaccttcctgacatctggagtcctatttcttcatgtcggagtattccagcaatacataaaagctttaatgagcagactactgtagtgcttgatggaaagttgatatccatggaaatcagatcaaaaatagctgctaaggtaagacaaatgaagaaaggcctaggaaaagttcctggattagctgtaatcttagtgggccaaagaagggattctcaaacttacgttcgcaacaagataatggcctgtgaagaagttggaatcaagtctttggtgactgaattacccactgattgtgcagtaacagatgttcaaaatgccatcatgagatttaacaaagatccatccattcatggtattcttgtgcaacttcctctaccgcaacatctagatgaggaaaaagttttggatgctgtatgtctagaaaaagatgtggatggtttccatccccttaatatggggaatcttgccataagaggaagggagccactgtttactccttgtactccaaagggctgtattgagttattgatcagatcaggagtcgagattatgggaaaaaaagccgtagtgattggaacaagtaatattgtgggtttgccagcatccttgttattgcagagacaccatgcaacagtcactgtcatacatgccttcacacaaaaccctgaacagatcacctcagaagctgatattgtagtttcagctgctggagtgcctaatttggtccgtgggaactggataaaacctggtgcagctgtgatcgatgttggtacaactccggttgaggatcctggctgcgaggatggttatcgcctcgcaggtgacgtatgctatgaagaggccgtaaaagtggcatccattattactcctgtgcctggcggggttgggcctatgaccgttgctatgctactatgtaatacattagattctgcaaagcgcatgctcaattttagttgacccctacccctcttgaaactacaatacttcgttcaaggtcatttttagcatggattgagtttaaaaactggaattcttttttaacagttttcgtaatgcacgtattcttgctgatagtctagcttctgccatgcgagttttattttgaaccttggatcgtattaaggtattattgccagataaaaaaaaaaaaaaaaaaaaaaaaaaaaaaaaaaaaaaaaaaaaaaaaaaaaaaaaaaaaaaaaaaaaaaaaaaaaaaaaaaaccccaaaaaaaaaaaaaaaaggggccccttaaacccaattttttttcccttttaagggggataaatggcccccttgggaaaaaaaggaaaaaagtttttccttgggaaaaattttttccccccaaaaatcccccaaaaaaaaaaacccgggagataaaaaggaaaacccgggggccccttaaggggggcccacctcacttttttttgggggccccaaatcccctttttccaagggaaaaaattgggcgccccattttttaaaaaaaccccccacccccgggggaggggggttttgttattggggcctttttccctttccctgaaaaagaaaccgggggcttggggttttg

SEQ ID NO: 114289 - DNA, 283 bp, Glycine max
  Clone ID: PAT_MRT3847_74211C.1
gtttaggcatccggcgaggcagcaggcgatccatttgttgatgcttgagtgactgctccacatactgagccgcatcgggagcacgagctacaaggcggtgcaccaggcgagccaccgcacgagcgggctcgaggacatattcggggacctctaggggtaccagcaggagtagatgcagcgggaaatccagatgctacgtgacatgctccatgccaacgtcgatacgaacgacgagatgtgcgaccagatcatcgatctgcacaggctgatggagttgatggtc

SEQ ID NO: 114290 - DNA, 187 bp, Glycine max
  Clone ID: PAT_MRT3847_74212C.1
cccacgcgtccgatctccttgtcctacaattaattaacatggttccagccccctcattcgagtatgttctcttcttttgttgtacttttggctttaacttggtatccaatcctggtcctgccctcaacataagaacttgaaccaattgaagtggttgcttttgtggccaagagtgccattgaccatg

SEQ ID NO: 114291 - DNA, 1974 bp, Glycine max
  Clone ID: PAT_MRT3847_74213C.1
atggaccttgcacaaggtttccatcagattcgaatggtggaatccgacattcctgaaaccacattttgtactcatcaaggacactatgagtatgtggttatgccattcagccacaacttcgatgaacacctcgaccacttggaccaagttttgcacactctacaacaaggggagttcaaccttaagctctccaaatgcgtgtttggccaacacagtatcgattacttggggcacatcgttttgacgaacgatgttgagccagaaccgtcaaagatacaagccatgctggattggtccatccccatgataaccaagatcagttttcatggtcccctgatgctcaaacggcctttgataccctcaaaaggcgatgactcaggcaccgacgcttccaatatgggaataggttttgtgttaatgcaaatgggtcatccaattgcttactttagcaagcaattttgcccaaagttgttgcgttcttccacctatatttgcgagttacacgcgattacgatcgctgtgaagcaccacaagagtttgcgcaaattaatgacccaacccattcagacaccagagcagcatatttacatcgccaagttattggggtatgattataccatccaatacaaggcagggcatagcaatgtcgtggctgatgccctttcgcgcattcgcgaaccatcaccagaggctttatggattatgaatgtgcctcattttcagttccttgatgacctcaaacacgagctgttccaaatggaggaatcaatctccttactcaatgttcaaaccaaatacatcccacaaaggccagcaggtttacttcaaccaattcctcctccgccgagcccttgggaggacatggccctcgattttatcactggacttcccaattaccagggcgccactgttatcttgacaattatcgtttgcaagctccatggatttcctaagagcttgatctctgacagagatcccatcttcatgagccgcttctggtgcgagctattcaagctcaacgacactaaattgcgcatgagcatgacctatcaccccaaagtgacggccagcccaagatgcttaaccgcgtggtgtaacaatacctgggcagcttcgtgcactagaaacctttctagtggggaaagttttcatgtcttgttgaatggctcctcatctatggagacaatcgatttccttcttacttctcgacaagatatgttcatacacctcaagagaaaaattgagcacacccaggaaaaaatgaagagttctgtcggtagccaccgctgggacatctccttccacgttgatgattgggtctacgtgaaactacgaccataccggcaaacttctttggctggcaataactatcaaaagttaggcaagtgctactatggaccatatcaggtcatagaaagggttggcctagtagcgtacaaattggctctccctgcttccgcgaagatccaccctatgtttcattgcttgttgttgaagccgcacagcggtcctatggcctcagactattaccaccttgaggacaaggtgattctcgaagcaatagggaatgatagtaaccctgaatcagaggctaatcacatgcccaaaagaattatcaaaaggccacaaagggataaagcacaccctttccatgaggaagaatgcccttacacgatggtgcaaaattatgctaaattcaacatgtctgagcatgtggcgttatgcaacagttatgctaagactcaagcctatatgcaatgtggtaccatgtcagtgaaaaaccaccctagggcgcttagaaggtcacagtgttttgcgagaatgctccaatcatatgggatcaacataggcttaaaggaacactcaaaccgggtgacccccaaggcctacactccgaagagtccgtcaggacctctccctcctgattcaggtccaacccctaaaatcatttttgcatgtagacactgctcatga

SEQ ID NO: 114292 - DNA, 240 bp, Glycine max
  Clone ID: PAT_MRT3847_74214C.1
aagcatgaaacggtacgaagtacgaggttggggaacattgtgtacataatctgtagagcaccaccattctctacgttaaagactattaaatgaccttgcagccgtcgacacggatttttaggggacactatatggaggagtaggaataggcgacgcaggtgacggggccagatcggagtatggtgaagaacaaccctggaggatcaccggtcacggcttaccagtgcaatgaacttctgc

SEQ ID NO: 114293 - DNA, 810 bp, Glycine max
  Clone ID: PAT_MRT3847_74215C.1
ctagcttgcatgcctgcagtggtctttttcccccttactcctttccagatctgtccccgaccgctaaaataacactgcatgatgtcatcattagtagcaccaacaataccagttacgacgctgttgggttgtcgttaccgatgtcaatttcatgctccttgaaggggctcttccgaaaaacatgctcggaagccagaacttgaaactccatagcagagacgggaaaggataccatactcgagaacctcctgacggtgacggagatgtcaagtttgcgaaagcaatcatcaatacgcatataatgaaaacttgagtgtacctaaagcaccgtagattaatcccatttttctttcttttattgtcatccacaaatctcatttactttcatactttctgttgttctaaattgggatcacagcttggtaaaaagtgattgaaatctttggtttagatgtggtactggtacatcataatttaagttaatgtgttagcgtaaacacttttagatctagggagagagaaagaggaagaaaagaaagaaagaaaaaaagagcaccactgtcggaaattgcctccgacagcaccccaaaattaatcgtagctaacatgtttctgatgtttagtataagtagttatatgatgtgtttccttacttttccataggtctgcattatatagacagtaatgcaaaatatatgaatttgttttctttgtagtgcatggatgaacacttcttgtgtgttatctatttacatcttggttaataaatttatttacttgtaaaaaaaacttaaaagtcatacctaacat

SEQ ID NO: 114294 - DNA, 357 bp, Glycine max
  Clone ID: PAT_MRT3847_74216C.1
ggctcgagatttatcatacatatataataattcataatcagatgcagtagtctaaaactacttgagcattagtgtataacctattttctccttcatttgtattcatttcttcctaatgtaatttgctttatatcatgagaaagtgaaaaacaattcatactatacagggaatagcacggatgtaattattatttttacataggtatacgtcatcttgattcataaatagtcgccaatttagatgcaaatatattcctttgtgcagattgactatagtctgatgtactcatgacgctaaactgtgattcgtaaatacatttacttgataaccgccgttgtcttcgtcatgtgtgacgg

SEQ ID NO: 114295 - DNA, 438 bp, Glycine max
  Clone ID: PAT_MRT3847_74217C.1
cccgcgtccgtcccaactcctcgtcgcagcgttcataaacatttcaacaaacacttggtctgcgttcggcaatgccgttagcgccgttattctccgcgtctcggagcctcgccgctgcagcagcatttctgcgccactgctccaccgccgccacgacgaaccgaagaaacctctattcccgaatcagccccctcggagacccttccatcagcgtggttcccgatctcgacgagtggatcgaagagggtaacgccgtcgacgggccccacctccatcacatcatcaaaatcctgcgtacccgcaatcgcaacacccaagcactcgagggttctgagtggatgagtagcaaagggctcccaattttctcacgtgaccaagcagtgcagctggatctcattggtagagttcatggagtggagagtgcacaaaaggatcttc

SEQ ID NO: 114296 - DNA, 340 bp, Glycine max
  Clone ID: PAT_MRT3847_74218C.1
aattcggctcgaggtaggaaagtctacacctgattgagaaattaccatatttccaccaagtctatcatctagagggctactcagacagtgttttggtgagtgatgaaccaatagaagacagacttggtggaaatatggtaatttctcaatcaagagtaggaaagtctacacctgaaaatattgtggatgatggtcaaccagagcatctaatggttgatggggagctgcagccttataaggagagaatcaattatgatgatgtcttgcttactggatcctgtaaatgataggacaacagccaaagaagattctggccctgcatttttcatatgttttattt

SEQ ID NO: 114297 - DNA, 484 bp, Glycine max
  Clone ID: PAT_MRT3847_74219C.1
acaagtcatcaaccgtttatgtactttagttataataaaaaaataacagttatttacatttaccagagtatattataatgtacaaacaccataaaaagaatatagtcagaactacagattcagagaaatgctagttgcaatgcgagaatgtctttatattaggtcagactgtagcttaatggacatgtagagaagagctaatagagcaccttggggaagtggtgcataccttgcaaggtatgagccaacccacaaggccaccacaactagtgcgacaacactactactggttttcccgcaaacccaacttgcaaatgacaagcatagtgttagcaatatgccacccctcccacccaaaatccatgctattacatagcccattttatagccggtgtctaatttcttatcaaacaatgccatcagactgctgaatgtgagtgagaaacgggatccaagcgtctgaagcaaaaataatgacatgaat

SEQ ID NO: 114298 - DNA, 299 bp, Glycine max
  unsure (1)..(299): unsure at all n locations
  Clone ID: PAT_MRT3847_7421C.1
ggccattnncatttttttcacaatcctactccaactccacacagactnnntcacaaagaacttttttacaaaaacacatccccccccctcanacaattcttcatcatatatccaatatatcaatcaacatctcctactttattcatttccccatatcaaattttcatacaactacaaactccactctcatatacattaaaataaattttattaactcccacatttattaaaaagagancgnacttatacccataataaaaatagttcactctcatatattcttattaaaataaacaaat

SEQ ID NO: 114299 - DNA, 740 bp, Glycine max
  Clone ID: PAT_MRT3847_74220C.1
acgaggtaacacgtgaccgtttcctctctctcccttgctagaatccttcgtacccatctctgtctctctctctctctcttcgtagttcatagtaatctcttcatttgtataattacggctgcgagaagacgacagaagggggagtggtggcatcaaaatcaaagggtgtctttcataaacgaagaaaatgggaagaatcttcacggtggagcttgagggtaggtcttacagttgcaagtcctgcaaaacccacctagcccttgcagatgatctcatctctcgttcattttattgccagcggggaaaagcatatctcttcaataatgttgtgaacttcacaattggagagctgggagaagacgacagaagggcgggactgcatactgtggcagatattttttgttgttgctgtggtcaaatagttggctggaaatatgagtctgcacatgagagaaaccaaaagtataaagaggggaagtttgttcttgaaagagggaggattgttgatgaaatggatttctccactgaattccgtattgagagttgtgtcagcatgagtgatgctgaaaatgcttaaactttttaaaatcttctgtacttatcagatcaggtgaaagaatcgacttttttcctttttctttttatgtgaaaataaagtagaaccatgaaatgtttagaatctaaatttgttttactatttatttatagtaataacaggtaattaaaagaagaagaaaacc

SEQ ID NO: 114300 - DNA, 335 bp, Glycine max
  Clone ID: PAT_MRT3847_74221C.1
gacgattcctgccactctgtgtcaaaaggaattactatatctatgtctcccatctctctctataatcaatacctatcctcacaaccagaaaactgagtctaacacctgccatttctataggcgacgaaaggcaaaaaacattgccggttttggtataaaacagaaaaccacccccaaagctgctggcataaaccgtccaggacagtatcattattggcaatgccatcgaacacttactcaaactttcacctactaaagttactgccaaaaatagagatctgagaacactgcaatcgcatgtactatgggaccaacaacccacccactgtgaaact

SEQ ID NO: 114301 - DNA, 262 bp, Glycine max
  Clone ID: PAT_MRT3847_74222C.1
catccacaagattgatgagaccgtccatgttggagggctcatgaaagaggagcacaccggatatcaccatggtgagcacatgggttaccactattgatatcgccgtggtgagcacaaaagtgaacacggctgagaacatcgctatggggagcacaaggagggactggtggatgagatcaaagacaaaatacgtggtgatggccatgacaagggtggtaaatataataaaaatgacattaagaacatggagcatggacatgac

SEQ ID NO: 114302 - DNA, 212 bp, Glycine max
  Clone ID: PAT_MRT3847_74223C.1
gcatgtttgcgtacatgcacacacatgcatatactcagacacctgaatacgaacaccctctgtgctgcgcagcctaggcccagtgccgggcccagggaggggaaataatcctctggcaaggcaatgtgatcattttcccttccttccgctgatccagccccaaggtctagacaggaaaaggcacgcagagcaggaaggagggctccgtgtga

SEQ ID NO: 114303 - DNA, 830 bp, Glycine max
  unsure (1)..(830): unsure at all n locations
  Clone ID: PAT_MRT3847_74224C.1
gcacagcaaccttgatagttgtcagactacggacggctcactaccttcaacatgcggtccatcacagcgatcctggtcgggcttgcggccctgaccgaggccctcccagtaggacgggatgcctcagagctcgcaaagagacagttcaccatcggcccaccgattgtgggacccatcacccccgacccaacgatccccggtggccctctgatcccggagtcggtcacgccgggagacatcgtcatcggccagccgatccccggccccatcatcccggaccccacaattccgggcggccctctcattcccagcacgaagagggacatcattatcggcaagccgattaaggtcggccccatcgtccctgacccaaccatccccggcggtcccatcgtccccagcacgaagaaggacttcatcatcagcaagccgatcgtcgtgggccccatcattccncgatccaaccntccccggagggtcctctcatccccgacccaactatccccggcggccccctcatcccagacaagcctcccatcaaggttggcgaactggagcccgacaactagtagggaaaagctagctcttaccttttgtctaagacatgttccgaaccgtcaggaacaggctgngcagcggggtcgggcagggagtgtaccaagacacatgtgaggagtgaactgcacagacagaggcagcttgcgttaactagcnaaagagatgttgagtctttgagagacggaggttacactccctcggcgagtcatgaggtgtgatgtcaagcggaaggctcacggcgcctatcactctcactctatcatagttcaact

SEQ ID NO: 114304 - DNA, 222 bp, Glycine max
  Clone ID: PAT_MRT3847_74225C.1
aaaaaacaaaagcagccatttccggcctttattaattgggaataaaacaagggggttaaagaccgagcgggggttttgctttggggaataattaaggggggcaaaaacataactatgggttccttttgcaccccctgaaacacgaaaacattttttattggggagaaacagaagtccctaacccctggggcagattcacaacatgcaaaacggccccctggg

SEQ ID NO: 114305 - DNA, 318 bp, Glycine max
  Clone ID: PAT_MRT3847_74226C.1
tggggcgctagttttcatagctttttatattcccttcaccaaacaggacacgcacggggagacaaacagatcatagaagcattgatatcgtattatcggtactaatccaaccgctcgtgggaaacaggacaaagacgaacattattcacagcatacagaccctctaattcgaaagaaaggaaccattcgcatgtatagatggacccggagcagacataaatacgcgtgcagaagaagatttcgcacatgctgactcacaaaggcacaggcgctctggagcacccatacctattaaacgccctcaccaagtgcaggatt

SEQ ID NO: 114306 - DNA, 241 bp, Glycine max
  Clone ID: PAT_MRT3847_74227C.1
ctcgagtcggtgaaatctgtgaccatacgcagaattccaacggtacgagcaacgatgccactatatgatagtctcactgagttccaaaatggccattgccacatggctattgttgtcaaacactgtgacaagacacgttattaatcttccaatagttctggctattgctcatcgtcagctgtgaaggtgtctattgatggttagaagctccccgagactgaaatttgacaaccgagatgtc

SEQ ID NO: 114307 - DNA, 330 bp, Glycine max
  Clone ID: PAT_MRT3847_74228C.1
gacacacgcgtccggtgaaacagaaactgattacaatatgaatcagtgtgatgaaaattaacgtccttgcggggctcctttctacaactttgggagcatcacaattccatgcatacaacatgtcccatcttccaataaacacttactttcgtgcccctactccgtaagtaaactgcaccaagttaaacgcttacactagaagcacacaacatcttttactttaaaaccatacactaacacttcgatcaatcaactaactgaaacatccattgctaacaatatataacatacttctaaacatttaaccaacattcttactattatgccata

SEQ ID NO: 114308 - DNA, 306 bp, Glycine max
  unsure (1)..(306): unsure at all n locations
  Clone ID: PAT_MRT3847_74229C.1
gtcgtagcngagggtctctttcntttaggtttttgtacaattgctttaatcctancccaagcatgatcgcgctccgtgtcananacgcctngcacatctancatcancncaagctgagagggtctctncgtgctttgatctgctnannagtctnacgnaagntnttccngcaagccagaagnactntcgagngcgtacanngacgcgtgtagagagagtggatagagagangnganngagannaggccaagtgangnaanatccggaattagggnnctngagnggtaaaaatgtgggaattgccaa

SEQ ID NO: 114309 - DNA, 503 bp, Glycine max
  Clone ID: PAT_MRT3847_7422C.1
cccaaaaaaccaccaatcctagttttaaaaaaaaccatggcggggttttctcccaccagcaccccgaaggggattcccattcccacaaggggcggggaaaaataccttttttatataacaataccaccacccccaccaaacccctttccatttcacatccgaaaaaaaaatttttaaaaaaagggaaatttcccccccggcccctggaaagggccctgcacccccggttgaaaggatggccctgtcctccgggccggcaattgaaaaaggaggccccggggcaaaagcagggaccagtgttcctttgcagcccaccgtacctgatgtccttggggggggctaaaaggccccggtggatctcaaaaaccaactggtactccccccctccaaggccctaagaaggggccccctggcccgggcgggaaacccatccctttcccaggggggggcccccgccccccacgggtgggggccaccgacctaatgccaccaaaaccgggggg

SEQ ID NO: 114310 - DNA, 1307 bp, Glycine max
  unsure (1)..(1307): unsure at all n locations
  Clone ID: PAT_MRT3847_74230C.1
ccacgcgtccgcccacgcgtccgtacggctgcgagaagacgacagaaggggagatcagcctctttctttctttctctctctctctctctctctgcacctttctttcacaactcaatcaaaaaaagcatatccaaggtgtggtggttaagctgtccatctatcaatcaatccaatcaatcaagagaccaatcatcaaccgaatataagagaacgaaaaaagggggctacccacaacgtcatcctctttcaccacattatcactggagttgtattctctggttatttctccgtcgccacctccctccttccgaacagctatgttatgttcactgcaacatttgtgacaccgtcctcgctgtaagtgttccttgcacaagcttgttcaagaccgtcacagtccgatgcggccattgcactaacctcctcccagtgaacatgcgagggttgcttatgccatctcccactcaatttcatttgggtcactctttcttctccccatctcataaccttctggaggagataccaaatccctctccaaattttctgatgaaccaaacaaatttaagtgcatcaaatgagttctctatgcctgctaggattgcagctgatgagcttccacggccaccgatcatgaatagacctcctgagaagagacagagagtcccctcagcgtacaatcgctttatcaaggacgagatccaacgcatcaagtctgtcaatcccgatataactcacagggaagccttcagtgcagctgcaaagaattgggctcacttcccacacatccactttggtctcatgcctgatcagactgtgaagaagacaaatgtgtgccagcaggatggagaagaggttctcatgaaagatgggttttatgcttcggctaatgttggtgtctcaccctactaattcaccccagtctattttctctttcgaagaaattatgcaaagaggaaaaattttccaagttccaccaacctatgaagctcaggaacgatctgattccttaatacttataaatgcatctatttgtggctcaagagcgattatgttgatataactaaggactactactactactacactatgatgattagctcttggggttgtgcatgcatgcatgtagttctcttcttatgattagactttaattattaactttcatgttcttcaattcccccagtactactgcagctgattgcttatctaatcaataattaattagccatactttcagtttaaaaaaaaaaaaaaaagggggggaggnngagaggggaaaagaaaaaaaaaaaaaaaaaaaaaaaaaa

SEQ ID NO: 114311 - DNA, 463 bp, Glycine max
  Clone ID: PAT_MRT3847_74231C.1
ccaaaggttccctgtccgaatgaaaactggctatggcgagcgtacttggaaggtaaaatgctcaagttttacgcttgctggggaagcacacaacatgcaagcctttacaaccattcctgaatagtgcattgaaccaacaaaagactacattaatgggaaacaatttagatcacactctaaaacagttaaccaacaatctatatgttatgctagtgaacgcgaagtccatcacaacgacatctttatatactggatcgaaaacaccttactctctaatatcccgtgctgtgaataacatgcatatggatgggaggaatctaatgagacatcgaatgatgaatgagttgacaaggcacacgcagcgacgttgccggatactcttaatgattacgaatggatggtgtattttggtcggacaactgtctagttgtccggaggatatctctacaaaatgggtatcagc

SEQ ID NO: 114312 - DNA, 980 bp, Glycine max
  Clone ID: PAT_MRT3847_74232C.1
gtttaaagtccctaatgaatatttgaattatatatgacagtattggctgatcctaggtttcttgtagaaactggagacagaaatgtttacaatcttagccaacttcccatgcttcaaggctataatccaagccaaagttcatcatacaggcacacaaactactactaaatttcacttcaaattctttcaaacatgcattttgaattgcacaactgaataaaattatttcttcttttttcagatatggatatggggatgcttctctcgctatctatgaaaacatggtgcacaggcctttcatgaatagaagttcattagatgaatctggagctgaattttgtggcagcagattaactgagagaatccatgggaccaatagtaacatcaattggactcgtaacaggttccaagttgattcttcttctagtttcaatgaaccatcaacaagcaaagtccaagaaccaaaacataagttcttctcatttggtggtaatgaatcctcatgcacacaaatcaaaatgagccaggttgatctacatcaatcaactcagctgcaaccaggtgcacaagagctcatgcctaataataagtttgcaacaaatgaggtggaactgaagaccttgaaaagaaaggcttcagatattgaccttgatttgaatctgtcacttaagttaaattcaagggtcaatgctgagaaccaaggaagcatggtggaccatgaagttgttgatagcaatctatcactttctttgtgttcacaatcctcctcctttagcagcaacaggttgaaaaactcacaagatcactctaaggagcaaggggaaattattagagccagtgctctggatctaactatatgaatgagccaaactctaagtgagatcctgaggtccctgtcagaaattatgcatattgtacccaattattacatttaactgacgcaaataaactccaatcttgtctcaaaaaacccaccaaaa

SEQ ID NO: 114313 - DNA, 279 bp, Glycine max
  Clone ID: PAT_MRT3847_74233C.1
tcggcctgccgcccaaaaccacaccacccatgcttctcacatttttttcccgttgcctttaccccaactggagcccctacacccaaatgcatacacacctgccaaatactctgcaggcatctgataaacttttatagcgtcatggaccatagacttcatcttacttctgatgcctagctatctcttctgaacttatatattataattttgagcaaattctcactaacctagaaagtttcatcaattgtatcccctggacttgataatgagctgcatgct

SEQ ID NO: 114314 - DNA, 414 bp, Glycine max
  Clone ID: PAT_MRT3847_74234C.1
ggaattcggcacgagggtcctaaggactttgccattttaacaggataactttaatgacttcaagaaataagtttattttctttgttactcctcaactcgacaactctttaggacctttttttgttaatattattgggtctaaattccgagtttattattgtgtcagaaaactcttcttccgatgacaaattccattttgttcttgaggctagtcggcgttcaaacatgatttgtttacaacttttcaagaaagagattgaagcttctcctggagaatcttctgcattatcattattttcacgtcgagtgagcagtcatggctttccatcaatttcgaatgaagcccagattcagaatattgtgaggcaactgcgcacatggagagatctgatggctcgtattcatgatgagagc

SEQ ID NO: 114315 - DNA, 588 bp, Glycine max
  unsure (1)..(588): unsure at all n locations
  Clone ID: PAT_MRT3847_74235C.1
ccacgcgtccggacgtggcctcgcctcgttgcatctccacaacactcccccatttgtctgtgttttggttgaattaatattgttggtgcttgacacatggatgcagccagattcgtcaccatcagtgtaaggttgtcatgcactagttatggaagtttcatccaaattccttgggttcatcactaatgtttttaagcaattgacctcttgagttatactcttttgtatatgctgtgagaattgtctgtttctgtgatataatctctgatgtaaggtgtgaggaatattatgattaaatctatgctagtggttgagctaaatgtttcggaaaatgtacttatagttgtctttaaatttttaattgaagatgttgcatactgaattacactggttatgttatgcctaaggtctaaaataagccttgaagtacactgcaaaacacacatcaatggagtctctagttnttcaactccatgaaatctcagcagncaaatttggnaatttnaagctcaaatttggnatgtgcttaccaatgtacgtggacctgcggcttgttatatgttatgcttgtgggttgggggntgtggg

SEQ ID NO: 114316 - DNA, 552 bp, Glycine max
  unsure (1)..(552): unsure at all n locations
  Clone ID: PAT_MRT3847_74236C.1
gccttgttctattgtttgacagtttcatatacgtgtgacaatttcctgccgccacctgcatcacgcgcacgaagtactttttttttttttttttttttttttttaaaaacctccagcaaggcaaacgatgcgtatggcggagggtgcgtgggacaaaaagctgacaaggacttaacaaaaccaggacgagatgctgccccagctagacagagcaaaatggaagggttcatctagggcagtggttctcaacctgtggggcttggccccctagaggagggngggggtcaccaaatagacctctcacaggggtcaccagagaccactggaaaacagatatttacattgcgattcagaacagtgaaactacagttaagaaatagcaacgaaaataactgaatggctgtgaggggcagtggggggggggtttgtcaccataacatggggggctgtattaaagggtccaagtatcaggaaggatgaaacccactgctttgggtctttagaggtctacagagttggcacttgaccctgggagttgcagcggctgctgtc

SEQ ID NO: 114317 - DNA, 355 bp, Glycine max
  Clone ID: PAT_MRT3847_74237C.1
tggcttcgaacctttgggctgatttatgtgcttgcatggtcgtgagaagatgatagaaggggagtactacggcgaagtcggcggagagacccaggggttagaagtccatgccagaattaagaggatcatccaacggagtaaactagccggaagaatccgcagtcagtcctttaatcggtccactcgagcgcggagaagtaccactaagttccaggagcaggagaatgagcatcgcccgcgacgaacgctcacggcccaagaaactcgctcccagctaatccgcgcgccccgccacctagcctctagtaacaaatcgtctcggtaactcagccctacgcctaacgttaaatcacaa

SEQ ID NO: 114318 - DNA, 801 bp, Glycine max
  Clone ID: PAT_MRT3847_74238C.1
atgggaggtgacaaagtattttacaactggcttcctatgttttcggaaattgctatttacagtttttttttatttctaacactaccattttataatttttaaacttttatttccaaaaacacccttttctagaaatagtttgcacgagttaaaatttctcattccacattctagaaattaattcctagaagtgttttaacacttccagaatttaacttttgaaaaccaattcattctattaccgttcacgcacctccctcatttgacattgtctccatggaatcggattcaaagaacatagtcaaatttgatcctgaatcattcatcagagcgaaacaatatgatcatgcctggaaatttcctcttgtacaatcataccaacaccaaaaaattgagctttcattatcgccacgacaatttcctcaactgctacgtgtacaccgtcaacatgtgaaaggtcgtttggcaacaattccttgctcacaagcccattgtgatagtgaataatcactgatttgaaaaataaaaagaacaatgctctcaatttcacaacacttgaatctaggggattacacttccgaaagaagaaatggggaacaagcttttttcttccttgccaaattagtctttaactcaacattatttattggatgccgagtgtatgctgatggaaattggtggtattgaaataagattaggggatagtggtgagcattgatctttgaaagagaaaaaagaaaaaggttatttcaataaatttatttaaaaaagaaaagaaaaaagggagtgtatttagtaatg

SEQ ID NO: 114319 - DNA, 275 bp, Glycine max
  unsure (1)..(275): unsure at all n locations
  Clone ID: PAT_MRT3847_74239C.1
attacatatttttanaacacaaaagaagacaacacaatcggggcttctttgaaaaaaatacatccattacaaacccaccaccgatatagaaaacatgcttttattttttaattttacaccccaacacaaacactacagggcaccaccacgcaatggccatttactaacaatggtgttattttattataagacaaatacctctcttccattcacaacatattaaagactccttctttaccacacagcgaaaccaccacacaccccaaattaacaac

SEQ ID NO: 114320 - DNA, 472 bp, Glycine max
  Clone ID: PAT_MRT3847_7423C.1
ctttattgtttatttgtttattcatcggacttgagtctatactctgaaagtttaactcttctaccccaaaacttttacaacattggacagaaatgggcttggatgcacaatgtgatctaacaggacctaaaaagaaatgttctaaaaatgggtgaggaatatcattattaacttgatataactcgccgagagattggtaattaacacataactcagataaatttcaaaggttctataacatttaatacttttcgatcaaatagttaatgtattctatgctaggatccactataactaatgatgataaatgaattaccgatcaaaataagagtacactcacaactacgcaccaaatgcggaaacaacttattctgctgagagacttatgaacctgcattaaaagcctactcatacttggggtactgggccccgaaagatttttccaattggcatatgtatgaatgcttgacac

SEQ ID NO: 114321 - DNA, 301 bp, Glycine max
  Clone ID: PAT_MRT3847_74240C.1
tcgggataaaagtgaaagtgcataaagatgcctgatcttccattccaagtaggggatttggccgagtcaagatgatttcaaggtggttaccgtggtgcatggtttagatgcaagctcgcgattttctgcggcgatcgatcccaatttttcccctgtcggagcgctggatgcgtttttagggtttgcttcgcggatatgtttttcccaacacgggatctgtgacaatggggagtgatgcatcctatactgtaccacagtacctctggtactcttatataatatatcattacttttgctgagc

SEQ ID NO: 114322 - DNA, 365 bp, Glycine max
  Clone ID: PAT_MRT3847_74241C.1
tcgtcctgagggtttatgggcatatttgaattaattgctcattattatgtttttttctttttttttttttaatttgtcaatttttttgtgttgaaaacagaatgatggaaaatttatatgtgtttatgtaatttcttaacattcctattctatttacatgttgtaacaggcggaagcgaactcctaaaatgcctttacaccttcaaaacaggcgatcccaccaactgaaccatgtcaccacatactatgggcttaaaaaaaagaggccagttatgccttacagggatgaaagtcaattaaccgaaaaaaaatcaaccctttaggaagctccaaatctttccatgctttatcaacacggttacaaa

SEQ ID NO: 114323 - DNA, 999 bp, Glycine max
  unsure (1)..(999): unsure at all n locations
  Clone ID: PAT_MRT3847_74242C.1
agtgaaagatttaattcagttcctgnggggtaataaaagtggatgttatgtgtctattggcagatatattagtgcattagaaaatcattcctctcagtcaaagagtatcacccaggcagatgatttttttttcattactgcaagtgcaataactttagctgtgcggccattttatctgacaaactatgatgtagaagtgcctggcgcactggatgtcaaccatgctgctaagcagttttttgtttatcttctgactataccttggctagtgcaacatctcccacctgttcttctacctgctttaaagcacaaatctattttgtttccatgcttccggactctattgattttgaaagagaaagttttgatggagatgttggagttcgtcaaatcagaaatacttgtctctttcaaggctattccaccagttggttgggccctcactaacagtatatgcctagcaacagggaatgagaatgaatccttcaatcaaggtttagagtatgcattgtatgtccgtgttgttattactctagcagaggccctactggcttgtcttgataatattggatgggtcaaaaagaaaaagaaagcccttcaaattgatgttgaaagttcaacacagccagttgatacagttcggcatgagggtgaagcaaccgatgaatccataataatgtcatacatggatcaatttaggcctgtttgtcagcagtggcatctcaaaaatcttttggcatcaatagatagagatgccaataacaaggctgcgactgtgatctcaaatgacctggcatgtctggggaagctagaattgtgtgatgttgcacttttttattctaacttacttagaatattttcagttttgagtccaattcgtggcccattatcagttctcaacatgctagcattcactcctggatttcttgtgagattatggggtgtactggaggattcctttttttctgaagacaaaaataattctgataatcacacaaa

SEQ ID NO: 114324 - DNA, 260 bp, Glycine max
  Clone ID: PAT_MRT3847_74243C.1
cttgctctcaggccactgtgctgcttttgtcacatttgagttctggatccaaatcgaacgtggagggcttctcacaacttctccgtcttctttgttggtgtcctgcttacatttccactcatgatgcaatgcaaactggtgttttcatatggacatggttggtttctgctgcacctgaacttggagctcttgtccttgctgagcttgtcgatgcatggttatggacaattgataccaagcggggtctttttgcatctgaa

SEQ ID NO: 114325 - DNA, 378 bp, Glycine max
  Clone ID: PAT_MRT3847_74244C.1
attcgggttcgggtggagctcgcttgggggtgagagcaccatgatgttctgggcggtctaggattagcgggatgaagacacccccgccagcgaagaatgcgagaacgtgatcgatgacaacgctaccatggctgcatgagagcctgattaaagcctctccggccgagattgtgatgtaatctagaataccacgatgtcatgggcgactccacagtcactgatacctttattatatttcttagtatcccatcccagcttttgattggatgcactgtgaagattgaccaaatttatacactacatggatggttggtactggggtcatgggaaatgcagacactaccactgggtgatatagatttgaagagctatgcatgg

SEQ ID NO: 114326 - DNA, 1604 bp, Glycine max
  Clone ID: PAT_MRT3847_74245C.1
atctgcactatgttttgaccctagtgggacccttcttgtcactgcatcagtctatgggaataacattaatatatttcggataatgccgtcattcacatgcaagagttcaggcattccaagctccaattggaactcttctcatgtgcatctttataaacttcatcgtggaataacaccagctatgattcaggacatttgtttcagtaattttagtcagtggattgcaattgtctcatccaagggtacttgtcatctttttgttttgtcaccctttgggggtgatactggttttcgaattattagttctcagggtgaagaaccgttcctactccctgttttttctctgccttggtggtatactccagcttccatttcttatcagcaatctctgcctcccccagcacctgttgtcctttctgtggctagccggataaaatatagtagttttggatggcttaatactgttcacaattcttctgcaaatgtgacaggaaaagtttttgtgccatctggtgccattgctgccatctttcataattccttatctcactcgcaacagcttgttaactcaaaggcaaaacccttagaacatatattggtttatacaccttcaggtcatgtatttcaacatgaacttctggcatctgttggtttaggaacaactgataatggtttgagaaaccagtcaacttcactcttgcatatgcaagaggatgagttcagagtcaaagtcgaacctattcaatggtgggatgtatgtagaaggtcagaatggccagaaagaggggatacttgctgcaatacctttgatagacaaggaggtattgagagagttcaagagaaaataagttatagtgatgtccatggattgaattttttgggcacaagagatacggcaggggaaaagatggtaagatcttctaatgagaatatgcacgacaggtttcattggtatctgtctaatgcggaggtgcaaaggaattttggaaggttacccatatggcaaaagtctaagatttgttgctattcaatgagttgtgcgggagctagtttcagtgctactggggagtttgaaattgaaaaggtccctgttaatgaagttgaaataaggcgaaaggagctgcttcctgtttttgaccattttcatagcatcagatcaagctggaatgagagaggtcttgctggggacagatatttaagctctacatctcctgttctcgatcaagctgatgacaaggaaactgctgatgtgacagttatttgtcattcaaagccagcatcactgagttccactgaaagctcagaaggaggttcatcaagaagaattgaaaatctgcttgacttggatcaagttgcttctagttatcaaatacttggtgagatatgcctggaaagaatggggacaatcaatgttgagccttgtctacaaaaccagattgtgatgagtccatcatgtctgtctggaaacttgaaacatgttgatttcaacgctgaccacattgccagtcctatattccaagggagaaatataacttctgaaagaagagattctataggtgttgagatcagtgagaactcagcattggttctagaacatgcttcac

SEQ ID NO: 114327 - DNA, 375 bp, Glycine max
  Clone ID: PAT_MRT3847_74246C.1
tacgacaaaacggctcgaagtcctaatttgggtaacttacaaaggatgatagacgtcatatgggatggtcttttatactagacctttcattgtaatagagatattttaagtgatcaaaataaaactttttaaatttaagatatcaaactgaaaaaaaaatgatacatcaaaactatattctatcttttactttctcaatatttcaagcatttattaaaatatactaaatactttttaatgcattggcaatattcatattaatttaaggagttaattctgtatcattgacttgacgcgtccacgttatttagaattcggagaggatagttacataattccttcattttgtaaaatgcgacttttaaatttcttatc

SEQ ID NO: 114328 - DNA, 121 bp, Glycine max
  Clone ID: PAT_MRT3847_74247C.1
atgagttggggagataacggaagaaatccgcgatcaaagttggaaaatagcagaatcagggagcagaaaacgcatcggaagaaagataaaggaactctatatgcaactgatactttgtaaa

SEQ ID NO: 114329 - DNA, 252 bp, Glycine max
  unsure (1)..(252): unsure at all n locations
  Clone ID: PAT_MRT3847_74248C.1
aggtcatttgccaaaaggtgtttctcagatggaagcattactcgcgacaattctacacctatgtncaacgccaaatcccaaagcttgaaaatttctcaaagctaggtttgcaggaccaatcagaaggnagcaatactttttttgagtcatcacctgaaatatctacttcttctgggactgagagtgacatgtcattttcaaggtacactccctcaatgcctcataaacagctttttgggagacatacaaaga

SEQ ID NO: 114330 - DNA, 537 bp, Glycine max
  Clone ID: PAT_MRT3847_74249C.1
gtgcacctgtaggcttaaagtagacgagagggatgaaaatcgccgacggtagtacaaaactatgggcacaaaggcagtaataggggccaataagaggagtagtttgtaaagcccccgtccgccattgagctaggccactccgggggcgggtagggccgcgggtaagggtaaaactcgtgatacaagcaatacggccctagaaagaagactacatttattcaatactagtggccccaaggacacacccggggtgggcggaaggtacgctgaaacggaaggcattcgccgtaagatactaacaagcaatagtgtgtgcacatacggctgctactaatggtgagatgcgttgagcgacaatttgtaggccggtgcttagggcgcctagtgtccgggtcaagcctttggcacatcagcatgcttatgtattacggcaaaaggcttcggagcgtacgcctagggcgtccctcggtatgaggggagatagtgcgagtactggttgttagcaaatctaagcagtgggcagcgccgcagcaaata

SEQ ID NO: 114331 - DNA, 970 bp, Glycine max
  Clone ID: PAT_MRT3847_7424C.1
aaaagatggcttccacattacaagatcagctaactttcccacctcgaccgaaccaacatattgtgatggggaagccatctttttttggggcaaaaccagaaatggtgatcaaaggtggggtggttgcatgggctgatatgggtgacccaaatgcaagcattctcactcctgaaccggtgaagatgaggcctatgtttggaacactaggcaaggctggtggtgctttatccatagctcttgagagcaacgcatctgtagaccagagagtacatgctctatacggacttcagaagatgacttcctcaggatcaaacgagataatgctcactacactataaatccagcttaagggaatggtttttcaaaatatgttggttcggtaaaggtgggaaagttagctgatcttgtgatgtggaagccatctttttttggggcaaaaccagaaatggtgatcaaaggtggggtggttgcatgggctgatatgggtgacccaaatgcaagcatccccactcctgaaccggtgaagatgaggcctatgtttggaacactaggcaaggctggtggtgctttatccatagcttttgtgagcaaggcagctgtagaccagagagtacatgctctatacggactgaacaagagggtggaagcagtaggcaatgtgaggaagctcactaaactagacatgaaacttaatgactctcttccacaaatcactgtcgacccagataactacactgttacagcagatggcgaggttctcaccagttttgcaaccacctttgttcccctttctcgaaattacttcctcttttaagtactagctcccataaataaagcttaaaaatgatctctcttctaaggttttaatgtgtagcactacccttataaattttttagttcccctgctcttgttcttatgaattcagatgcaataaaactaagtgtgttggtttggtaaaaaaaaaaaaaa

SEQ ID NO: 114332 - DNA, 1408 bp, Glycine max
  Clone ID: PAT_MRT3847_74250C.1
gggatttactggtattcgtatccaaagtgattccaaacttgtttgcatgcagattgatggttcctggaaagtcaagaatgaaaacttgtctacattgtataatgtggcaaaagaactcaaggataaattttcctcattccagatcagtcatgttctaaggaaatcctggaaaagctggtgctggtgctactctacgagctaattatggaattatgatttgtagattgcgtgaaggtgtgggtatagcaacaaacaatgctgctgaatatcgtgcaatgatattgggaatgaaatatgctcttaaaaagggatttactggtattcgtatccaaggtgattccaaacttgtttgcatgcagattgatggttcctggaaggtcaagaatgaaaacttgtctacattgtataatgtggcaaaagaactcaaggataaattttcctcattccagatcagtcatgttctaaggaacttcaactctgacgctgatgctcaagcaaatttggccataaatcttgcagatggccaagttcaagaagagtgtgtgtaattcactcatggcagctgatgattatgttttgggcagcgttttcaatttccatgatttttttccgccatggaggattcctatcaggacttctcaacactgcagtcacatcaagttagagtttatcattttcattctttagcatatggaagacctgaatatcttacggtctatagcaaaatgatacttgttcaataacactaatattatcatacctcttagttgaaagtactgtttcattaactttttgtatccattcggactcttactgggttttaatagttacattttcaagacgcaaaacagcaaacaagatacttgttcaaatcccccagccatgtgatttatattctctgtgttattttattctaacattattaaatgttaaatgacatttacaccccttcacttatgtatttatgtcttggtattctatatctaattgctcttttaaggctctttgatttaaatattcacataaaaactatacgtaaaataaaactagtgtggtgtttcaacaccctcctcaactctccgactggatttaccctgatccaggtaatgttcactcgtcctcctcccaccattccctattgctggttccatttcaaatgcgctattgactgtgagctactcatctgaaccaattttagagaaactacagaagaactttgacaaactcaacagttgatgaaaagatgggctggtacatgttgtcatgatttgcacctgaacataggagattgggtatatgactatatgtgcacctcagaccttgctggcaatatcctgccgtttccactattagccacaaattatgctaggcatatttttgtcctctaccaaattttagaggaaattga

SEQ ID NO: 114333 - DNA, 190 bp, Glycine max
  unsure (1)..(190): unsure at all n locations
  Clone ID: PAT_MRT3847_74251C.1
tctgcannggcnacggcggtgacgttngagcctcngngaaatttcgngcctccgaagggggaggaaccaaaggaaggaaaaaaaaacccggacaacaaaaaggnttctaagttcccttagnctnaggaaatccaaaaccagggggggcggattctacaaccttttccaangaaacaaccattcggcccat

SEQ ID NO: 114334 - DNA, 2069 bp, Glycine max
  Clone ID: PAT_MRT3847_74252C.1
gaattaatttccccccccccaggagggccacacggggtggattcaaaggggccgctgcaggaatgattgatggatccagttttttgccgacaggggattctggaactcattcgttgataaactgctacctcaaaagcagcgacaaagtggcggaagtttgatagacattatagttcaatttggtctgaatacccctcaaaaggtcttacatcgctgctgcactatgaaattgtgcatagacctggatccaatggacccgaagccaaatcttaaccctgtccttactgatgccacacccttaacaaggtcaaggctcggcgtgccttctggcttgtcaccttactctcatcagtaaggacagggttaacctttccccatggtaacatgctggcaattccaaggaagaagacaggaattcttgacgattttcgttctagcggttggctcgatgcaatgaaatcgtcttctcctactcacactaaggtatccaaggatgttagtcatgggattggatcacctgattctgcttatagtacctggctgctaaagtttccatcagcactagcatcttttggatcaaattaccaactgtgcaaaagggaagagaatagcattgtttctggattatgatgggactctttcacccattgtggataatcctgactctgctttcatgtcagtctatatgcgtgctgctgttaaaataggggcggaatattttccaaccgcgataattagtggaagaagccttgacaagctatatgaatttgttggagtaagtgatctatgttatgctggcagtcatggtatggacattattggtccttctagacaatcttttctgataataactgtgttgctcgaagcttttgtggtaggcggaatttccaagctgagtattataaatcttgtacagttttactgccctttattcatgaggtttttgtgtttttcaaggagagcagagtattaattgatttatttactgttgttaattacaaattttgtgtttccgtgaactaccgcattgtagattaaaagttataaacttcttttctgatgcttgcacaaaatagggagtttttctacataaaatgactccctctttttaccaacttatttcatattttaccctaaactaatatatcttagtgctagaaggcttttttgctatgcaaaggtatgggggagggttattgtacgcaaccttacctttgccatatgctaagaagttgtttctcaattagaatccataaccaacccgtcaccaaggcatgactctattgttgcgccagagctcgccctcaatttcatattttaacatgattgtaattatttatttcctcttaatttgtttcatttaatgtacagagttggcaaattgtgggacaacgtgtatatgatgttctgaaggagtatccacgtttgcgtttaactcatgggcggaaggttttagaggttcggccagtgattgactgggataagggaaaagctgtcacatttttactcgagtcacttggacttaattgtgatgacgtgctcgctatttatgttggggatgatagaacagatgaagatgcatttaaggttttgaaagaagctaataaaggttgtggcatcttagtgtcccgtgccccaaaagaaagcaacgcaatttactctcttcgtgatccctctgaggtcatggaatttctgacatcacttgcggaatggaaatcaagcattcaagctcgctgaaaagatttacatattgtatagaggagaacatactccactatgctatatattagagacagtcttttgtttttagtttgaattttttgttagaagactttccaagaggtctgctggaacatatttgagctcagaagacctctgacctgacgacagcaacaacattgtcattacccaattgttttactcaaattttgtgtggtagctgtaaattcctggctgagaattatatatatatatatattgggaagattaaggaaaatctcctcatagggtgtttcttttttccgcattagaagtttattatcgtattcatttcatatcctttcttcagt

SEQ ID NO: 114335 - DNA, 395 bp, Glycine max
  Clone ID: PAT_MRT3847_74253C.1
gactgcaacacaggtcatgtggcctattctcttaataacagactgacgcgcatagaaactacgtctcaatgttatatagtacaacttactcagatgcaaacccattagttagaaacatagataagaacattctaaatcactctctgcggtatagctaggtatagctatccaaaagagctactgtgaatacgagaacatttacacgagtttgactaacaatgttaaccctcttaatgtgatgaacttttcttagacttccggatacacgccggatattgtgtgcttgatacagctccaagtttgactcctgggataatgcatgacaaatcgcatgacctatggtagaaatttagctggaaacatttgtaagctcagaagtgagttaagaattagtc

SEQ ID NO: 114336 - DNA, 268 bp, Glycine max
  Clone ID: PAT_MRT3847_74254C.1
tctcgagcgattcggctgaggaaagagggtagaaatgagaagagggaagtggaagagttgaggcagaggaagaggcaggggagtaataagagcaaagagagtgtgagtgtgaagaaagagaaaaatcaagggaagaagaacaagaagatttccaagctgaagaatgaaccaaggagggtaccttcttctaagaatggttcaaagggtcgaactcgaaaccatcatggtgaggttaaagatttgtcatctgtgtcctcaaactcctcta

SEQ ID NO: 114337 - DNA, 1518 bp, Glycine max
  Clone ID: PAT_MRT3847_74255C.1
gctcgagctcatgcaagctgtgtctctcttctctctcttatattaatcactcactcacacattcgccacttccacacagcatagatcacctttccttttttcccacagaaaaaaacaccacctttctttttccgactaaaggttcgccggaaaatgcctctatcctcctcttcctcctccgccgtagactccgccgtctccggcgagatcatgctctttggcgttagagtcgtggtggactccatgcggaagagtgtgagtatgaacaacctctcgcagtacgagcttcctcgcgacgctgccaacgccaaagacgacgccgcaggatacgcctccgccgatgatgcagctccgatcaactccgacaagaaccgcgaccgcaagcgagggattccatggactgaggaagagcacaagctattcttggtggggttgcagaaagtggggaaaggtgattggagagggatctcaaggaactatgtcaaaacgaggacgccaacacaggttgctagccatgctcagaagtactttctccgccgcaccaacctcaatcgccgtcgccggagatccagcctctttgacatcaccaccgactcggtctctacaacccctatggaggaaggagtacagatccagcatcaagataatgtgtctctctttcatccagtgtaccctgtaacccctgaaggaagcaacatgaatggatttccaaagatgtccatgtatccaaaggatgttggttctggagtcatgtcagttcaagctgggaatccaatggaaacactcactttgggacaaggaaatgtggaaaaacacaatgtgccaagtactgctaacaaggcctctacagtgtctggtatcatcacccccggttcttctagttctgccattgacccaccaccgacactgtccctggggctatccttctcatctgaccaaagacagacatcatcaagacattcagctttacatgccatgcaatgtttcagcaatggagatagcatcattagtgttgcttgagaatatggtccttggattcacagattaattacatatattaatatttctctagtttcctgtctttttggtgggagaaagagaaagaggttgaaggaaagggcgatggattagagaaggcaagaagagttttaacagactgaatttgatccttctgttccttgtacagaccccagaaaaggtcctgtcctgtttcttcttgtttgcttatgttaattaatgtcatgactttagattcttgtttatttggccgtttacgtttgtagtagttgatgtaactgaaaataacaaagtacactctgttctttgctgataatgtattaacgttcgatatgaactttcactgatgaggtctttgtggctcctttcagttggtagtctgtgtcattcctgttaggtgttagcagttggccacgtttattttttctcatgaatttgggtagctgcagtagtatcataattgttttcgagcaaatgtaaatgttggtcgatttacatgtg

SEQ ID NO: 114338 - DNA, 552 bp, Glycine max
  Clone ID: PAT_MRT3847_74256C.1
ggtgtgtccccttagccaagctcgcgtctcacttctctctcttatattaatcactcccgcacacagagcataattcacctttcttttccgaccaaaggttcgccagaaaatgcttctatcctcctcctgctccgccgccggctccgccgtctccggcgagatcatgctgttcggcgtgagagtcgtagtggactccatgaggaagagcgtgagtatgaacaacctctcgcagtacgagctccctcgcgacgccgccaacgccaaagacgacgtcgctgccggctacgcctcagctgacgatgccgctccgataaactccggcaagaaccgcgaccgcaagcgagggattccatggacggaggaagagcacaagctattctatctcgggttgcagaaagtggggaaaggtgattggagagggatctcaaggaactatgtcaaaacgaggacgccaacacaggttgctagccatgctcagaagtactttctccgccgcaccaacctcaatcgccggcgccggagatccagcctctttgacatcaccaccgactc

SEQ ID NO: 114339 - DNA, 370 bp, Glycine max
  unsure (1)..(370): unsure at all n locations
  Clone ID: PAT_MRT3847_74257C.1
aaacgcgacaccaaccagagccgaggtatccgatattgcaattgctgtacgagaaggttctgatgcaataatgcttactggggaaactgctcatggaaagttcccactaaaagccgcgaaagtaatgcacaccgtagcagtacggacagaagccactacacctgggggncaaatgccaccaaataaaggtcaagttttctagaaccacacgagcgagaagcttgcttaccatgcaaccatgacggccaacaccacaggaaccgcaactgtcggcatcactagatcaggcatcatggctagcgttaagagccacgatcgaccatcaagcaccataattgcgttgacagaatcaaagaggatacaacagagg

SEQ ID NO: 114340 - DNA, 362 bp, Glycine max
  Clone ID: PAT_MRT3847_74258C.1
ggagggaaaacccaatttttgcctcaatcttgtctcaacataactgaatctcaccctccctttttttttttggataagtccatacatccatagggtttttttcattaattatcatgcaaaacagcctaatcacatttgccaaaataacataaaataaagtggaattggggaaaacatgaaaaaaaaaagaaaatgatgattttgatgatgaaaaaactcaatttggtttccttgctctacccatatatgtatatatattatggcagggtcaattcttaatcttttgcaactactggaatcttagccttgctggtttttacctgctcatataaatctcttttcttcaaaccaactttggtttg

SEQ ID NO: 114341 - DNA, 316 bp, Glycine max
  unsure (1)..(316): unsure at all n locations
  Clone ID: PAT_MRT3847_74259C.1
gggggggncatggattggtttcccccctttcccccccccgggggggttttttttttttttttttcacggccaaatattttaaactattttttaaatggcgggttttcagggggggcctgcttttaaaaaaacgggtcaagggcagaaacaaaaaccccccccccccatttttaccctcccaacagcctgaaaattaaaggggcaaacaagaacgattgacagaaatgcttggttgaaactgttctaaatcaagaagaagaatttcacatctcctttttgaaagaaccactccctcccatacaaaagttgaattatg

SEQ ID NO: 114342 - DNA, 210 bp, Glycine max
  Clone ID: PAT_MRT3847_7425C.1
aacaaagaaaattcttctttgcaattgattagatcatcaggacggagtcataatggagaattcaatcgatcaaaacataacaagctcaaccaccaagagacatcgttgcctgttctaagcagagacatacccaaatgtgagtgaagctaacactgcatcttgcacttgcagaatcccacggcctgcttatttgggggaatatccttacag

SEQ ID NO: 114343 - DNA, 403 bp, Glycine max
  Clone ID: PAT_MRT3847_74260C.1
gctttgagtcactaagcctagcttaaatttcagttcaatttggttggaaggcttcttggccctaggggtaattcactgaagcgagtggaggctaccacaggttgccgtgtatttatcagagggaaaggttcaataaaagaactagataaggtatcatctattctttagtggattgtcttgcaagttgcaaatcctaagaacctaatttaatgtcagttgcttctcctttcaatttgttgagtgtgtcttttttttttttctgactacatatattaactgtaaccattaacttcactctatcttttataatccaaaggaagagttgttaaggggaaggccaggctacgaacacttaaatgaaccactgcacgttttgattgaagctgagttacctgtcaatggt

SEQ ID NO: 114344 - DNA, 466 bp, Glycine max
  Clone ID: PAT_MRT3847_74261C.1
acgaggggaattagaaaatttgaacagttatacagttacagggttggtggtgacttctcaattccttatttaaactaatcttaagtgtcatagataattgaatctctcttcaaggtgagataataatccatgtcaactagccgtaactgggctctgttatgtgaaacttggatggtaaggtctggtatttgttatgtgccggtctactactttgcttttattcttcaagacaacaaaatgaaatagctaatgagaagtaattttaacttattccagcaattacttcaaaaattggtcatgttcttcatttttacaaaactctaaagcagtgtaatatgatctacaaattaccttattgtcatacatgattgctctttgctacagatactgccatacgatctaatagaactgccaatttgtagcttctgaacattcatctttcttcaagctaatttctcacaatcct

SEQ ID NO: 114345 - DNA, 374 bp, Glycine max
  Clone ID: PAT_MRT3847_74262C.1
agaagaagaaaaaatatttaaatattatattagataatgttcaaatgagcaaatcaatttttacatgaatacattgaattttatatagttaaatttgtaactaatttgtaacaaactaaactaataactaacttataatcaactaaactaatctttaactaacttgtaaccaactaaactaatttttatctctaataccccgtaagctggaaggggttaaaatcaccttggagcttggaaaagataatacatcaacattcgaaggaatgaaagtaaaggttgaaaacttagaatattactaaacatgtcggaaaaacatttaccaaaacataacttttagaaatttttgaccaacttaagttttttaatttttt

SEQ ID NO: 114346 - DNA, 357 bp, Glycine max
  Clone ID: PAT_MRT3847_74263C.1
cccaaaaaataaaccccggggttttaacccatggcttaaccgggaaaggcaaaaaaaattaggtccccgggcaaaagggaattgccccccctggatttcgaaaaagtatatcctacccctccaaattttccccggagaaaacacaaaaaaaaaaaatctaaccttaccctcccccgcaaaagaataaaaattaccaaaccaaaagggacccataaattttgtggttgggggacacttggaacccatttggaacccaaacccccggggggccttaaccaacaaaaacggttttttttttcccgacggaagtttccccccccacgggggccgcccccgattttaaccccccccgagcag

SEQ ID NO: 114347 - DNA, 958 bp, Glycine max
  Clone ID: PAT_MRT3847_74264C.1
catactggtagtgacacgcaaatgagagccagcaatacctccataccttgaggcagctggaacaatatcttagggattctcaggtgatgtcatatcaactgtgatcatgcaggagctactactgcatagacacagaaaagtgtattgtttttttatctaatttaagcaacgactactgaaaaaaaaaaccgagttaaaaaatgccattaggatagcaaattttgcttcctggcaaaagagtgatacatcagacctattcatgttcagttcaggaacccaaggcttctttttatttgttgttaaaataatgaaggggtactgctcccggatcaagttcccagaagcctctcaaagtgccatcttgttcttctgtcagtttgaaggcagggatttggtgggagaacctgagcaaatctttccagctatattttcgtggccctagctgatcctgcatttgacttgcgcttgaaaactgaattataaccacttaccaactccaaaggtaaaacatccatccataaatcatgttctccaacaacttcaactatgtcatattccaggtttaacaagtcggaacgttttattttagtcgtccaattcctatacaatgcccagatttcgccttcccttggaaaaatttcatattccttcttcttaccatcggtaataacctgcacctgatgcgaaacagaataggtgtttgcatatgtgcaggaacgcgcacctgctttgattttaaatcttccaatggaaataagcatatccttatcttcccatttaacacatttctccggtagccagcagttagtaagataagtaacttgcaactcaagatctggactactcttaaccctcttaatctgaccatagtattttggcagtccatcctcatcaccataaaatgcccaaatctgaccaacctgaaacttttcaagggacctctcagcatcaaaattgc

SEQ ID NO: 114348 - DNA, 304 bp, Glycine max
  Clone ID: PAT_MRT3847_74265C.1
gacctcaagatacagttgtcaataccttacaaaaggctgaagcacaaagtcgattcatcacttcatttttgagagagactgggatggcttcacctatcaaaatcacactgaagagttcagacggtgaagagatctatgtgcaggacgttgcaggtggggagtctcatacaatcacgcatatgatagacgaaaactgcgcatactagcgcaatgcatctcacgaatgttatgccaaatagtctggattatgttctcgagtattacatcagacacattgacgcgaactgcacttaggacaagccca

SEQ ID NO: 114349 - DNA, 1239 bp, Glycine max
  Clone ID: PAT_MRT3847_74266C.1
gaaggaaatgtgcattcaggccgcgcttgaaaaggaaaagaatgtgagtgaagttgaagatagtggaaagcaggaatctctagaggcattgacctcgcaggtaaatcggctcgctttgcaagattcgccccaagctcaagatattgataaaagaattcgtgctctcaaaaagaagataagtgacatggttgctattgcaaaaattattttgccactttggttttgcctacattggatcatgattccttttggacagattctagtgattttaagcaaattttttactagaagaacttcattgaagttttaaaagatgatgttcaaatagtggaatctctaccaccagaatttgcaacaattaagccagttttgaaggctccggtttcttggtctaaggcaggttattacgcaggggaggtgctgcaattattgaagaaacacaaagtgatcaaatttacctgaatattttgtggatagtcaacaatgaatatccaacaatgccatgtggcgtgtacataacctaatgccaatagcaattctgtagggagcacacaggattctcaaattaaggaaatggcgaagaacacttgacacagtcaaacagtgaatctaggcctgaaatctgaaacagcttcaagcggagtctcaggccacgcgtccggggaaatgtagagcacatttctataccgagtgatgccaaaaatttagttacattagattttgagggtaaacatcttcaagtttggaagtgtgatttaaattcaggaagtctgtgtaaagatcaacatgaggctgctgaaggagtccttcttgatgatgatttgaatgagccaacaatgggagagaaacttgctagtctaagtgttctggatgggaacaaatcaaggagtgatatagagcaagaatcttctgtcccaacaaagcctccaagtgcagactctgtatatgttttgcttaagcaagcattaaatgctgatgatcgcacccttctgctagattgcttgtttacacaaaatgagaaggatttgtctattatataagatatctacaaaaaaagatctggtatgaaggagtatcaattgcaagaaatgttctactaataattgaggtagccagaattctatttggaatcacatttttgcttatagtacttgtttgtgtgtggcgatgcagacgatactcaatgtatgaaaacattgaatttttttactagacaacaatctaaatcctatttgatac

SEQ ID NO: 114350 - DNA, 494 bp, Glycine max
  Clone ID: PAT_MRT3847_74267C.1
ggggaaaaaaaaaaaaacttttccccctttccttggggcggccaggggcaaggttcttttaccatttcccccacccttctaaaggggaaaagaaatcaaaaaaaggtgaaaaaaaagcgtagctcccggtaagaacaattttgggggcaaaaagcttttaaaaaggcccccccggggggcaaaaaagggccggaaaaaaattgggggggaaaattttccatgaaatggaaccaaagcaaaagggcccgggttgggcccccttttttccgggaaacccccccactctttttccccccttttctaaagggggggggggcccttccccttaaaaacacacaggggttttcacggggggcttttgaaatcttaaggggtccgggcccacctagagccttcccatgttcctgggctgggggcacaaaccaaaagggttgaccggccaaacctttgcccaaaagcccgggggggacgggttctcccctcctctgtggggg

SEQ ID NO: 114351 - DNA, 985 bp, Glycine max
  Clone ID: PAT_MRT3847_74268C.1
gtttaggaaaccccgcggcgacccacgcgtccggtgagtgacacagagacacagctttgtttaagaaagatgagcgacgacgaaaggaagaagcaaatagcggagctgagcaaaagcctcaaagaaggagagaggctcgtgggcccaacgagacggcccgacggaaccctccgcaagcccattcgaatccgcgccggctacacccctcaagacgaagtcgccatttaccaacccaaaggagcactcttgaaaaaggagatgggctccgctgggcctcccgggtacgaaccagacgctgattccaagcccaagaccaagtccgttaagaggaacgagagaaagaaggaaaagcgcattcaggctgcgcttgaaaaggaaaagaatgtgagtgaagttgaagatagtggaaagcaggaatctctggaggcattgacctcacaggtaaatcggctcgctgtgcaagattcgccccaagctcaagatattgataaaagaattcgtgctctcaaaaagaagattcgacttacagaagcattggagcagaaaagtgcagagcaagatctgaagccagagcagttggaaaagctagcaaaattagaagattggcgtagggagttaaagttattggaggatgagaagggtgaaacaaccgtatcatgaacaaagtattcgaaatagcatgacaaagttgtgtagttttatccatgtcttcctgaaagatatattccatggaaacaggtttaccaaagattttcctgtaatcaccatcttttgtgtgcaacttgtcagataaagtcaggctgaatttggatgaacttttcaacaagttataggaaaggaaaatttagaagtaaaacaattctctcatctattttctccaaatgttgaaaaatatgtcttgattttaacttgtaaaaggattgatttatttaacctgtctccgtactagattatttaaactaaactttaaacttcatttgttttc

SEQ ID NO: 114352 - DNA, 360 bp, Glycine max
  Clone ID: PAT_MRT3847_74269C.1
ggggcaaggtaaaaccttttttatagggaccccaaaatcaaatccacgggccgcggtttaacaacgcggggactggaaaaacccgggcgtaccccaactaaatcgcctggaaaaaaatcccctttttgccagttggggtaaaaccaaaaaggcccgaacaaatgccccttccaaaaagttgcccaccctgaatggcaaaggggaccccccctgtagggggccataaagcgcggggggggggggggttccccccagggggaccgttacctttgcaagggccttaaggcccggtcttttcgtttttttcccttcctttatggcaaggttggccggttttccccgaaaagtttaaaagggggg

SEQ ID NO: 114353 - DNA, 260 bp, Glycine max
  Clone ID: PAT_MRT3847_7426C.1
tccgggtggccccgcgtccggcggttgcgggggccgccgggggggggtggcgcttgttgttgtcaggggtcgctctgtctgcttcttccgtttctctctccttgctgggggccaagacaaaggcatggacagaggattcttcgggcagtggcaactggtaatgcagtgggaccactgtggaggtagggaagactcggtctgcttggaacgaggctagggtccctgccgaggaggtgggagaagatgatgtgggccctcct

SEQ ID NO: 114354 - DNA, 652 bp, Glycine max
  unsure (1)..(652): unsure at all n locations
  Clone ID: PAT_MRT3847_74270C.1
nnnnnnnnnnnnnnnnnnnnnnnnnnnnnnnnnnnnnnnnnnnnnnnnnnnnnnnnnnnnnnnnnnnnnnnnnnnnnnnnnnnnnnnnnnnnnnnnnnnnnnnaacaggggggcccaaggacccctcctctccccctgtgcgggaagaccggcatcatgggccagaaaatgattccaaatttcttgaggcattcttttgttacttgccccctctcagcgagtagcgagtgattgattggttgctatcttaaaaactatttggatggtgactcgtgtcgactgattgtcttgattttcttactgattggaaggggaacatctgtcccaagttgcatgcttggtgctgccagattgggggtgcagttctcagttctccccttgtgcatcatagtaattcatttagactacagagaatttgtccaggttgtggaaagggagggggaggggaaaggtacaagcttgtgcaacttcttttccttttttttgctgagagctgagctgctctttttaattgagaatgagaatgtttaagtgaaactagatgtggtctttgcaactcccccccaattttgatttgtaacatagaactcttattttacgagaatatgtatgatagagaaggggaaaagaagtaatcggattcattttttcc

SEQ ID NO: 114355 - DNA, 1192 bp, Glycine max
  Clone ID: PAT_MRT3847_74271C.1
ggctcgaccccgcctccgatttaagctctttccggtcccaattttgcagattcgaccgatctcgcaacaggtttttctgtattcccttacttgatctcgcaatttgcttttcattttcatttgccggattgattcctcaattgcgcgctcatttgttagttcttttttttttcctctcaattttctggaatattgtgatgatttatgaatctgcctttaaaattatgacgcagcgtaatgggcccttcttgattggtttcttttttctgccatttcggcagtgtttaaggttctagaaaaggtttcggaccaaagcatagaggttttaggtttttatagtgccagttcttttcacttgtggcattagggtttttgtgacgctcggttgaagactttctgtctcatgttgtgtaggtataacctcaaaagtcttatacatacgatagttggtgtaggtaagcaagttcacactccaaattccatttcgaaacttcaccagcttcaacgctcgagcaaaagcctcaaagaaggagaaaggctcgtgggcccaatgagacggcccgacgaaaccctctgcaagcccattcgaatccgcgccggctacacccctcaagacgaagtcaccatttaccaacccaaaggagcactcttgaaaaaggagatgggctccgttgggcctcccgggtacgaaccagacgctgattccaagcccaagaccaagtccgttaagaggaacgagagaaagaaggaaaagcgcattcaggctgcgcttgaaaaggaaaagaatgtgagtgaagttgaagatagtggaaagcaggaatctctggaggcattgacctcgcaggtaaatcggctcactttgcaagattcgccccaagctcaagatattgataaaagaatttgtgctctcaaaaagaagataagtgacatggttgctattgcaaaaattatgaaagccactttggtttttcctacattggatcatgattccttttggacaaattctagtgattttaagcaaatttttgactggaagaacttcactgaagttttaaaagatgatgttcaaatagtggaatctctatcaccagaatttgcaacaattaagccagttttgaaggctccggcaggttataacgcaggggaggtgctgcaattattgaagaaacacaaagtgatcaaatttacctga

SEQ ID NO: 114356 - DNA, 820 bp, Glycine max
  Clone ID: PAT_MRT3847_74272C.1
cggacgcttggggagacgcagcataagcatatagcaagaagaagaagaagaagtagtagttgaaagaaagatgagcgacgaggaaagaacgaagcaaatagcggagctgagcaaaagcctgaaagaaggagagagaatcgtgggcccaacgagacggcccgacggaaccctccgcaagcccattcgaatccgcgccggttacacccctcaagacgaagtcgccatttaccaacccataggagcactcgtccgttccctaatttcttcttcttattggtattattccatttctctttctctgactcttgttctctgcagctgaaaaaggagatgggctcggctgggcctcccggctacgaccccgacgccgattccaagcccaagcccaagaccaagtccgtcaagaggaacgagagaaagaaggaaaagcgcattcaggctgcgcttgaaaaggaaaagaatgtgagtgaagttgaagagagtgggaagcaggaatttgtggaggcattgacctcgcaggtaaatgaactcgctgtgcaagattcccaagctcaagatattgataaaagaattcgagctctcagaaagaagattcgacttacagaagcattggagcagaaaagtacagagcagaatctgaagccagagcagttggaaaagctagcaaaattagaagattggcgtagggagttaaagctattggaagatgagaagggtgaaacaaccgtatcatgaacaaagttttcgaaattgcatgacaacaatgtgtagttttatccatgtcttcttgaaagatatattccatggaaacaggattacc

SEQ ID NO: 114357 - DNA, 158 bp, Glycine max
  Clone ID: PAT_MRT3847_74273C.1
ccaaacgagaagagtcgaaagcaatgcaagtagatacaaccgagaaggtttatttattggagaggcccaaaagaaaccatacaaagcaaccatgggagtgcacgacaacaagaaggagacactgcctaaatcaataaaagaaatagagcaccgagaag

SEQ ID NO: 114358 - DNA, 392 bp, Glycine max
  unsure (1)..(392): unsure at all n locations
  Clone ID: PAT_MRT3847_74274C.1
acggctgcgagaagacgacagaagggcacctaattttctaaaaacaagtcagcaatcatcttttccaaagatagggtcatctttaattaatacataattacagtaatgagcgactttttatacataaccagcaaggtaaagggattagaaagagtaaagtgtgaagaagaaaaatactgttaaaatattatgtaaatctaaataaatgacatcctaaataatctgataccttctgcttaaatagtttaattccattgagcacaatgaacatagtgaatcagaaagaagaaacanatttggcacaagtctgaatctgctagtctattgcaacctatcaagtgagaaagcaaaagataactcanaaatacaatagaatcgttcgcatttgaacc

SEQ ID NO: 114359 - DNA, 451 bp, Glycine max
  Clone ID: PAT_MRT3847_74275C.1
ttttcgttttcatgtaagtggacaaaattggaagccacattcactgggaattgatcttcccaatagaggtgtgtggtcctaacaatggttttgaaatgtggagttttgagtgggaaaatataactttatggcactggagttaccttattgacaaattcaaacagtctccattatttgacattctcttgggaatttcccaagattttgaaattgctggaaatactattatgccagctttttatgttccacaggctattgacagattttctgaaaatgcggaatcctttgcatgatctggaatttgtattttctttctatggctcggttggttaactcaatataggaaattacgtactgaccctcttgttgagtatgctctgcctaattgcaaacatacacaccttttttaaatagatattaatgatgtgtgaagagtgcgttattttaaaaa

SEQ ID NO: 114360 - DNA, 905 bp, Glycine max
  Clone ID: PAT_MRT3847_74276C.1
gtcaagcccggcggggtttcttccgccgccgccggagcgcggtctagaccctccggtctgccgcccgtttcgggtcttggtgaggctatcaggctagaaccagaaagcagttttagtagcagtggccgaagaatggttcccagaattgagagcaataagaaaggagctagtaagcggattcatcatcccgccaacttgtctatggagtccttgacaaaagtttctgccagtaatactgataaaggcttgagtgggatgtctaggttggcccctctcccatttgaagcacacaacacatttcaaacaagtcaaccaatgtcaagctcagctgggattgttccttcatctcctgaaagcagtttagactctcctgatattcacccttttagggtgtcttcatcaggtgctgaaaaagcaagacagcttgcaggtgcttcaggtgctggtgctgcaactctgaaggaaatttcactgtcaagttcaactagtgatggatatgaggcttctggcggagaagacagtgaccgggttgacccaagtaggattgttcagagatctacaaattggactaatcttcttttcagagctgatcaggatgacaaggcttttaaaatgtctctttcatcaaccagtgttggttatagatagtagaaagttttgaaaaacttaacttgggtgtcaattagataactatctttctaactatttcatgggaattgttcattctttgagttgtgagctagaggtacttgaacaatttaatatgatgcttgcaaattttgggcgttggaagtaaggcttgagcatgtgtatcatgtgggaacttaaacaaaaaatactgtttgggcctcctcaatgtcaaaggatcttataaattggaagtccttgaacacaccctttatgca

SEQ ID NO: 114361 - DNA, 211 bp, Glycine max
  Clone ID: PAT_MRT3847_74277C.1
cagtcatcttcaacattcagacggatgtaataacaccaaatatgcgaccaatgcaaaaccgggtatctatgaaagcagaaagagagcatcacaagcagcttgataaagatcaaatcagaagatagcgccagccattacgattcatgacctcgcgccagtggagctgctgcttcttgatctctcgcatagtcggagatggtaggggcgccga

SEQ ID NO: 114362 - DNA, 416 bp, Glycine max
  Clone ID: PAT_MRT3847_74278C.1
aattcccaactcttcaacaagaaatttgattttcctagcaacataaaagtgtaatggtatactccttccttcctctgaaacactggctcattaaaatctattatctctttcctttttttacagcatatcacacagatcaacgaatttacagttactatttaccaaaaagaacaaaaaatgagagaatttatctaatccttttgtaattagctgctgttgtctcgtcttctcttatccgcttcaggttcttacttgcgtagctgcatgtaaactggctgcgtgcaatgctgccagagaggtcatcaactttatcgggaatatctgacttgtcctcgtttatttttaacttcttgaataggttgacatcatccaataggtggtttctcttgcagctttggccattcagaatctcccct

SEQ ID NO: 114363 - DNA, 488 bp, Glycine max
  unsure (1)..(488): unsure at all n locations
  Clone ID: PAT_MRT3847_74279C.1
ctacaattttttatttattattttttcataaaataaacataacagtacaaagggcatatctcagtatcattacatgatatagaaggttacaatgacaagttcnaaaaaaaaaaatgaagcttaaaaagctagggctttggtnntaaaaaacaacccntcctcntgccgaattcngcacgaacggcacgangttttttttttttttttttaaaataataaacctttttttanataanaaatccnatatnaacttntgcgaatgaacaaagtnaattttccnataaagtattcnaaaaaccggccaaaacacttaaaatacagtttgttttccnagttttgacaaatggccntgcccnaaaaacatgatggaactggaanaaaaggaagaatgtttgacacttccccatgcgattccntatacggattttacngttaacaggtngaacccaatcccttacacatttatatnttctccccttccccaaaaa

SEQ ID NO: 114364 - DNA, 375 bp, Glycine max
  Clone ID: PAT_MRT3847_7427C.1
ataaacaattatatgttattttttgactttttttgcgaccgccaaaaattttataatttggtacaggcaaaagtccaaggttcaaagatgaacctcaccaaaaacagaaatcttaaaaacaaaaacccaagaaaaagagcccactccaacccaccgtgggaggggggaaaaaaaaaaaaggggaccccctaaaaaggggcacgggggggaaaaataaaaaaatccgccgggggggggagaacaccaactttctggaaaggggcaataaaaaaacccccttttgagaccctattcccccacaaaaaaaagcctttgtcgaaaaaagcttagccaaaaaaggcgccaacaattttttttggggggccggtgtaaaaa

SEQ ID NO: 114365 - DNA, 195 bp, Glycine max
  Clone ID: PAT_MRT3847_74280C.1
cgcctgcaatcacaccatggcgacaacattagatcacgacaagctctccgatgaacaccaacagaccgagaatgtcgaggagaagatctcgccttcatcgggcagaggtgagctggaaacgcataatatggatcttgaggagaaggaagctgcacgtgtgctgagaaaggtggatatgagactcgtcccaatgct

SEQ ID NO: 114366 - DNA, 254 bp, Glycine max
  Clone ID: PAT_MRT3847_74281C.1
tatctttcttgggtgccacaaaggttttttctatgatgaaactaagacagggtcctgcacctgctcactagtgaagcaccaactctgctctcaggaaatcaccatcttacctcaggtcaggccacaccactgtaagtgcccctctctcagccccagagtgagccaccaactcaacacagccctgttaagaccccctcacgtccccagagtgaagccccaacaccactcccaaggggaccctcttctctgtgctc

SEQ ID NO: 114367 - DNA, 381 bp, Glycine max
  Clone ID: PAT_MRT3847_74282C.1
ctggcttatacaacctcactttttctgcgtttttcacctcccacccaaaaaaaaccaggcaggggccttattcaagggggaaagggaaccatatcaacccatcgaaacatcgacagatcgatcgatcctgcccttctaaccacccaatggcaggccgccctgacaaagcgcgcgacaacatacccacacaaacttggccacaccgtggagtctgtagggcccccccatcgtggggtcctggaccggcccacagcaacccctaaggcaaggggatgcccacgttaccttggggaaggcacccctccggacaacccggaggccgagggcccccatgcgctcgcctcagcgggccctggtgtagccagcactaacgcaagactt

SEQ ID NO: 114368 - DNA, 260 bp, Glycine max
  Clone ID: PAT_MRT3847_74283C.1
aaaaaaaaaaaaataaaaaaaaaaaaaaaaataaaaaaaaaaaaagggaaaaaaaaaaaaagggaaaagggaaaaaaaaaggggggccgaatataatattttctaaacttaaaaccacatgcattcacacgtcattagtcttacatcgtgttggctgggttcatttatgtgtgcacgcgttttacaaccgctttactggaaaaaccctttcttttccaaccttatatagctttgatcacagcccccttttcccacctgcc

SEQ ID NO: 114369 - DNA, 362 bp, Glycine max
  Clone ID: PAT_MRT3847_74284C.1
attcgtcaatattgctggaaattgcggacatatgtggccaatatggttcattggtcccaattgcggtcacagagattccgaaaaccttgacaatgtgaccaaaattgttgtcatggattgttattttaaaaccttgactagaaccctagaagacagaccccgactatgttaatgagcagctgctgcaggtattcaaaatctgaatgtgatgggaaaggaaatcagtcgtggtaggaagtaatttatcaacaattaacatttggtcaattaacacgttgtgtcagctcttgctttggaccacacgggatcaagagtgctttctggaagctatgactatatggtacgaatgtatgattttcaag

SEQ ID NO: 114370 - DNA, 576 bp, Glycine max
  Clone ID: PAT_MRT3847_74285C.1
aaaaagaattccatagttattctaattattcgtatatcttttatttataagattttataaattttcattcattttatgattttgcgtcgtttgtcaccatcagatgcctcctgcactacaataacatcacacacaaccacacccatttgaccattaacacttaaaatagaagattgaagtttgaatctttgttttttttttttttttttgacaaaaaagtagtatagaacaggactgaggttctttaaaaaaaaaagactatcagctgaaatattccctttatttcccactcttttctccttgccccgatgtgttaaccctccccttccttatagcatataccatagcattaagagtttatcacaataatagtaattgaaatcccgtattctaagttttaacacttaaaccatagaaatggctagtactttgctaccatgtgaataaactttaaacagtttctttttgtacagagattcaggtaaaaagagggtggatgagagcaagatcttgattttagacggcatcaggcactctttgattagggaagaggatagcataatagtcagtcttttg

SEQ ID NO: 114371 - DNA, 368 bp, Glycine max
  Clone ID: PAT_MRT3847_74286C.1
gtcatcagaagatctcttctggtcttttggtttggggggggggcgatacactttatatatttttcttatcgggtaacaatgaatccattaacatataaatgaattgggaggggagagggactccctaataaggggcacccggaagataaacggggtttaaaccgaaaataagagaaccccggagaaaaaaaaggtgcaccggtagggacaaacaacgcctctctcaaatggtgtgggacaaggggccagtgtgttataaggcaagttaataccaccccctttaacagaaatgcccgggaactacacagggggggccctctctccgacatttgagtgaatacacacaaggtttcgcgcgcaaacatttt

SEQ ID NO: 114372 - DNA, 218 bp, Glycine max
  Clone ID: PAT_MRT3847_74287C.1
gccacgcttgcgtatacgcctgctatattgaggtttaggctatatgctacacagtttggggtggctggtctgctggcgatgcaatactatcaacagggtccatgtggggcattaagggttgagaaatgcagcttgaagtacttaagacgctactatgatgtgcgaatatacgcagtgttctatggtgcacttgttcgacatattgcacttttctaggg

SEQ ID NO: 114373 - DNA, 611 bp, Glycine max
  Clone ID: PAT_MRT3847_74288C.1
acagaacagttctagatcgcacgcactctagaactagctcgctctatttctcagtctctgtgtttgcggctgaggattccgaacgagtgaccttcttcgtttctcgcaaagtttaagtaatcatgggtaaggaaaaggttcacatcaacattgtcgtcattggacatgtcgactctgggaagtcaactaccactggtcacttgatctacaagcttggaggtattgacaagcgtgtgattgagaggttcgagaaggatgctgccaagatgaacaataagtcattcaagtatacctgagtgctcaacaagctcaaagctaagcataaaagaagaattaccattaatattactttataaaagtttaaaaccaccaagtactactacacagtcattaatactcctaaacatcataactttatcaaaaacataattactaatacctcccaaaccaactatactatccttattattaactccaccactaataattttaaaactagtatttctaaagatgaacagacccgtaagcatactcttcttactgtcaccctgaatatgaagcagatgatcgtttactataacaagatagatacgcactacgccgattactcg

SEQ ID NO: 114374 - DNA, 130 bp, Glycine max
  Clone ID: PAT_MRT3847_74289C.1
gatgggaaaggagggatgaagtgaatcgcgagggcgcgagataagcgaggccgcgaacggcgtaaactatgggctataatcggtaacatgaacagcgctgttttcatgataaaatggtgcagagactatg

SEQ ID NO: 114375 - DNA, 474 bp, Glycine max
  Clone ID: PAT_MRT3847_7428C.1
acatggcatagtattttgctattcaccaatcaccatcttcagtcactgtttttatagctaggggaataatataactaatacatatttgggaggactggattatgtaccaaatagaactcagtttgacatgtccaagagcaaattatttaattcagaactggaggaatgaattttaatttgatatgatgtctgtctattattggtaacatttgcatgttaaaagaatgaacttcatttaaattataaaatctttggtcttgcttacagttcactttgatgtgtgattttgttgcagcctcacattatctgaaccacaatgataaaatataaatggcttaaggattctgaataccatgtactgtctagttgggaataaaaacactagtcacttcctgaagttggcgtttccttcattggtgtccttttaattttttagtctgatttattgcactttttgaaaacagtatgtaagct

SEQ ID NO: 114376 - DNA, 406 bp, Glycine max
  Clone ID: PAT_MRT3847_74290C.1
gaccagtaatgtatccatggccaatcatatcgacaaacttgcgctacattcaacgtttcattccattatttcgttcgatccattaaaaagtctgggtatagtatcttgtttgactacagtttcttccattatccggtccacacgacctccccttacgaaacgagagttagaacccgcaggagtcacgatcatttgcttaaacgccatgcccagtctcggtcttcgacgccgtaaagttatccgcggcgttggtgttggagtgggtgaaaaccttcttgaccttttccaacaaaccctccttgtgagctccgccggtaccctcgaggttcttgtcgtggaccccagtggtggtggattctcggccggtcaaaccggtaggctgggaggagtggtaagcggcatcctt

SEQ ID NO: 114377 - DNA, 189 bp, Glycine max
  unsure (1)..(189): unsure at all n locations
  Clone ID: PAT_MRT3847_74291C.1
nnattatttgtttttttttttttttttttttttttttttttttttttttttttttttttttgaacaaaaccctactttgggatttatttttaagcccgtttaccccttaccaaaaactgaaagttccgcaacctacatgaaggtgaagtctcaacttaaatatgtacataaaataatgttcataaaggg

SEQ ID NO: 114378 - DNA, 340 bp, Glycine max
  Clone ID: PAT_MRT3847_74292C.1
tttgcttgttaacaagcacacaaattctcactcatgctgaatgacattacctacaagttgaaggcttgaacatgtgaattgcttaagttcaaattacagtgcaagcaaaagggaattcgaaacatgagacatagaaaaccaaatattattttgaccttgtatgattttctttttgttcttttcaggattcatctgttattgcacagttggggatacctgacatgcgcttaccgctcctttatacattatcttggccagaaagaatctattgctctgaagtaacttggcctcggattgatcttagcaagtatggttctctaacattttatgcaccggatga

SEQ ID NO: 114379 - DNA, 2265 bp, Glycine max
  Clone ID: PAT_MRT3847_74293C.1
gttggttttgagttcaaactcacttcaatggatattgctaagaaacatgttagtttttttagtggaacattaaagaatggaagcaatttcgataatagcccggttacattcagagggaagcaatcaaatattttgaaattcaatttgttccctcgaatatatcataatttacatgagctaaagctcatacagcctttatttcacgagttcctcccaggttcagcttctcgtgatacaaatgaggctcgagcatcccttgaaagttctaccgatggaccagtcaacaccacattgtttatcaattttctctctgattatgttgtggagatcgataaagagaatattttgggtcctgtgagcttccttgcggaccttggtggcttgtattgtattagcataggcatctttttctacctgttgatacagtgcgagtataggataaagaagctcagaaatgaagatagcattatgcgcagaattagaaatcggcgtaaagctcaagaacattgggacaaactgaggaaatatgtaatgtacacctacggctgtcctacaatagacaacaactacaatagcactggaaaggaaacagattgtggtggatgtatgttgcattcaattcgtggtagtggttcatcacgtaaacgaaggctgaaaagcagaaaagattctataagtttgtaccagaaacctagcttacctgatatcaagtcagtgagctgcaaaccgcttggatccacaaatgattccaaattgcattcagagaatatgacaaagcagcagaatgctggttcatgcaaggattcccctcagtctcagtctcaagaatcttctattattgatgataacttcattcctcctctaccttcactagaaattaaaggtggctctgaaatggacttgtccgatattcagaagaatctaaaaaatttgtacgagtataatgtcatgctaaggaacaaattattagctgcacaatctctgctcaattcttcctcaactgggcacacttcttcagtaaacaaggaaacttaggtatcttttcaaacaagagtctttatcggtgtgcactggtcagatttgttccatgatttttacaacaagcatggatgttctacaatggaagttgattcttgattgaaaatgaaaactgaccaaagggaactaaagattgtgaaaactttgcaaaatacaaatgcaagaatgtggtgcatggacctctacttctcctggccagatattccttcctacatttaaagctactaagcattgtgatccacatttgtttgagaaaagggattttggttctttcatgttgattttcggtgtcaatattcatttcacataaccttgtacagctattgatttgttttgtgcacagtagagtagcacccaacttgttcttacaggcattattgttgtgaatgaatagtccttcagcgaaggctgaaaagcagaaaagattctataagtttgtaccagaaacctagcttacctgataacaagtcagcgagctgcaggccgcttggatccacaaatgattccaaattgaattctgagaatatggcaaagcagcagaatgctgtttcatgcttggattcccctcagtctcagcctcaagaatcttctattattgatgataaattcattcctcctccaccttcactagaaattaagggtggctctgaaatggacttgtccgatattcagaagaatctaaaaaatttgtacgagtataatgtcatgctaagggacaaattattagctgcacaatcactgctcaattcttcctcaactaggcacacttcttcagtaaactcttcagtaaataacaaggaaacttaggtatctttgcaaacaggagcctttatcagtgcaccttactcagattgttccatggtttttacaagcatggatgttccacaatggaagttgattcttgattgaaaactgaccaaacggaacaaaagattgggaaatctttgcaaaatacaaattcaagaatgtgctggatggacctctctactactcctggccagatattccttcctacatttaaagctgctaagtgtggactaagcattgtgatccacatttgtgtgagaaaagggattttggttctttcatgttgattttcggtgacaatattcatatcaaataaccttgtacagccattgatttgttttgtgcacactgcacagtagagtagcatccaacgtgttcttacaggcattactgttgtgaatgaatagtccttcagaacgt

SEQ ID NO: 114380 - DNA, 376 bp, Glycine max
  Clone ID: PAT_MRT3847_74294C.1
ctttctcttgttctttttacctcaggtattttagtctttcatggattataagatcactgagaagtgtatgcatgtaatactaagcaccatagctgttctgcttgaatttatttgtgtgtaaattgtaatgtttcagcgttggctttccctgtagctgctacaatggtactgtatatctattttttgcattgttttcattttttcttttacttaatcttcattgctttgaaattaataaaacaatataatatagtttgaactttgaactattgcctattcatgtaattaacttattcactgactcttattgattttctggtagaattcattttaaattgaaggataaattaagaggcaatacttgtaaattgacctg

SEQ ID NO: 114381 - DNA, 1786 bp, Glycine max
  Clone ID: PAT_MRT3847_74295C.1
tctcgagccgaatcggctcgagtacggctgcgagaagacgacagaagggggaaggtatagtggcagtccaattgtaatttgcaacaagggcatctaaacccagaacccaatcatcttttattgcaaacttttgtgcattggaatttggaggccataaaaaagatgcgatgctacacgcaaacaagtagtacaagtccaataagaaaagcaagatagaaagattggctagttcacacacctcaattaatacaacaacaccctgttgctgatagttattatagagagagttcgatcaattcaagcttgcaagcttaaccatggaacggtatgagataattaaagatattgggtcaggaaactttggtgtggcaaagctggtcaaggaaaaatggagtggtgaattatatgctatcaagttcattgagagaggcttcaagattgatgaacacgtgcaaagagagattataaatcataggtccttgaagcatcccaatatcattagatttaaagagttgttgcttactccaactcatcttgcaatagtcatggaatatgcttccgggggagaactgtttgaaagaatatgcagtgctgggagattcagtgaggacgaggcgagatatttctttcagcaactgatttctggagtcagctattgccattcaatggaaatttgccacagagatcttaagctggaaaacacacttctagatggaagctcagcaccacgacttaaaatctgtgactttggttactcaaagtcatctgttttgcactcccagccaaaatcaacggtaggaacccctgcctatattgcaccagaggttttgtcaagaagagaatatgatgggaaggtcgcggatgtttggtcttgtggggtgaccttatatgtgatgttggttggagcatatccttttgaagacccagaagacccaagaaacttcagaaaaacacttcagcgaattcttagtgtccactattcaattccagactatgtacgaatcagtaaagagtgtaggcaccttttgtctagaatatttgtggccaacccggaaaagagaattaccataccagagattaaaatgcacccttggttcctaaagaatttgccactagaatttatggacgagggcgaaggggtgttgcagaatgatgatcatgtgaatgaagagtcatctgaaatcactcaaagcattgaagaaatactggccatagttcaagaggctaggaaaccgggtgagggcccaaaagttggtgagcaatttgttgggggcagcatggacctcgatgatattgatgcggatgctgacatcgatgacattgagacaagcggtgattttgtctgtgcattgtgaatgaatattgatgatgcttgcaatcttgcactttgcatactatttctccctgaaaagcgtttaagataagagggtacttaacgagatagatgttaggaagtttggtatcaattagtttcaattgattttaagttgaaatctaacatggtattaaaatctatagtccatcttaatttcttattttagtaggttgtttgtattgattttagattgaaatctaacaatagatagatagggtagaatcaaacaaaatctggctatcatggtttttgatttttcttttattagaagttagcttgtcttgttatctgccaatgccaatgtgggaataagggaatgttactggtttcttggttggtttaatgcttagccaaaaaatcaagccagactgcatgcatatgtaataattaataatatagtagtttgggtct

SEQ ID NO: 114382 - DNA, 221 bp, Glycine max
  Clone ID: PAT_MRT3847_74296C.1
gtcacaagtgagttatttggtggaaatatcgagaaacagtgtgttgaaaatgaatgtccttgttttcttcggtgctacaatttttgtagcatttcattaccatgctttcaattttttcccttttcaaatgaacactgtctatacttcccttactacaaatgtaaaatgctcaagttgtaggctttctacataagcacacaacatctttgacttttatacca

SEQ ID NO: 114383 - DNA, 446 bp, Glycine max
  Clone ID: PAT_MRT3847_74297C.1
gtccggaattcccggggcgacccacgcgtccgcaaactcacacaatggtgagcatctacaactacaccaaatattcattcttctcctataaaccctcatgacctatttcatcacttaacaatattgccttctatttcacctcactctccattttttccactttctgtgcaaatgtgcaactctacaatgagtaagacaatcactttttgacccaaacacaggttcaactcccacattcccaatgctattcacattaaccccagcagcaacttcataggaaaaaaaagatctcactatcaccgcatttcattttcatttttcttctttactcatggctaagataagccaagaaaaagatggatctgaaaccgaaaccctaaaaccaatcatggatccatttccctttccacatttagctaccacgaaacctaatttcaatttctctg

SEQ ID NO: 114384 - DNA, 886 bp, Glycine max
  Clone ID: PAT_MRT3847_74298C.1
aaaaaacactgaaggggatttgatcgaattatattctacggccactttcgcgtttctttttaataatttcaatgatatacattgtaaaaaatggaagccacttagggaggggtttagacaagtaacaaatcagaaaccaattcattaaccaaataagacataatgtccccctcaacctctaaacccttttcaaatgcttcaacatcaaagtcaagccatttcccacatccagagctcatgtccttggtgacaagctcatccaccattgtctcttccatgcttctaatacccagcaactccttgtacagttcctctgccatccagctcttcctctgaactgacatcacccatccaggccatgctttgcacgttccaacaaaagcttgcttacatctcaactctaggaactcactcgcacagtcaaatatagccttcctttcaagcttagagtaatcttctccgaagttttcagttccataaatctgattctccaacagatcaaagacatttggcattatgagtgtactagtttgacccgtgacaaattcttctgccgtaaactctgcattgcaaagaatatcatgtacatattcaagtactgtgttccttgatcttttaaaatcaaccgaatttgatgttctacttatttgtttgatggccatatttccaccccccaatggtgaagagctttgctctgaccctttcacctcactttcaagtgatacagattcacttatcagggtaaaactagatacttcttcatcttgtgggaagaataaactgtgctgcctgaaaagaggaagggaaaaaacttatgtgcattacaactttatagataagtgcatttatgctgagggaatgcaacaaattgtttccggacgcgtgg

SEQ ID NO: 114385 - DNA, 215 bp, Glycine max
  unsure (1)..(215): unsure at all n locations
  Clone ID: PAT_MRT3847_74299C.1
ttttgggaaaataacttactgacaatagttctcaacttcaaatgcaacgtggtaaatattttggcgcaaaaaggttttagttcaacctgttatctagctgtgcctgagtctgttttacttcattaagctgtcttattaggttgagtggaatatcaacgtatgaagtgacttgagatcttcctttgcagggacggtgggggggtgttggnggggtc

SEQ ID NO: 114386 - DNA, 317 bp, Glycine max
  Clone ID: PAT_MRT3847_7429C.1
aacatagcagagacaactatgggtccaatgccagaaggcccaaagctggaatagactctatctagcataagcatgccatacatacgtttccccactaatattttctctcaaaatatccttaattaatacaaattcttatttatggtcttgatcttgttttttagtttatttgttctctagtaggtcaagactgaaaataatcaaagcgtatgtattgtatatttgtaatattgtcttgggttaaatttttcacgagagtcatgcctaatggcgtctcgttgaaaaaaaaaaaaaaaaaaaaaaaaaaaaaaaaaaaa

SEQ ID NO: 114387 - DNA, 616 bp, Glycine max
  unsure (1)..(616): unsure at all n locations
  Clone ID: PAT_MRT3847_742C.1
ctgaattttgctataaaawtcttttggwhrcattttggttagcacacatacaaaacatttgcaggktattgtctttatgtgttcatcatgagtaaagttcaaccyactatggkgacatcnggagaatttaaaaacyaatgactttccaaagtccaaccyataaggcyaatatttaagcaagactacaaaaaatgaattgggaaccgatctcactagttattcyagccagtatgtctggatttatgcatactcyagctattagactattagtcatgaagtaacaaatttctgaatttcccycccccyttagaaataagattccaaatttatgatgggttyscgagcattatcttcatgacttaaagatttgcaagaccaagacgtaaaaattgcctatgttgaaatggtgattgaacttgttaacaagaatacatgtagcaaccagatgtactctctctcttctaaacaggtaaaaagatgttcacagtgtagaattccataccaaatgttcacgacaaagttcaacagcaacaactggtggggaatttagacttgaaattgcagcacggtagctatttcctgcatttgccaccataagaggaagcacgtctgtttt

SEQ ID NO: 114388 - DNA, 201 bp, Glycine max
  Clone ID: PAT_MRT3847_74300C.1
tggtgatctttgtcaaactcggcgtatgcgcacaccgtgaaaagcaggtcattccctgattacttctgctcttacactgcataagctgacatcataagaccctattgatccattttctatgcctccaaaccaatacagaaatgggttttctgaatgaacctatccagaactcactgagaaagaacagaatcatggcctact

SEQ ID NO: 114389 - DNA, 222 bp, Glycine max
  Clone ID: PAT_MRT3847_74301C.1
cgacatgactactgaagagggatacatctacaatggaaagaatcagatatacagggtgggggatggttaaatgccaggcgaaatgataaatccatatttatctcttcgttcaaacggcagattctatcctccctacattcccatctcattgtttctctcgaggatccattgaaacgacaagtctatgttggaccatcctgtgtatccgattgccgttttgat

SEQ ID NO: 114390 - DNA, 514 bp, Glycine max
  Clone ID: PAT_MRT3847_74302C.1
cacccaattcatctccactcgaagaccaacaccttcaccatggttgctatcgcccgctccttcggtgctgcccgtgtggccagccgcagcctcaccaccgctgcccgcccccagaacagcctcgttgctgcccgctccgctttccgcaacaacgccgcccgcaacgtcatccagaagcgtggcatcgtcgctgagtccaccgctgccgccatggtcgccgccgccaagatccagggtgctggtctcgctaccatcggtcttgccggtgctggtgtcggtatcggcacagttttcggtggcctcatccagggtgttgcccgcaacccttccctcaggggtcagctcttccagtacgccgttctcggtttcgccttcgctgaggctactggtctcttcgccctcatgatgtccttcctgctcctctacgtcgcatagatatgtgcatcagagtgggctttgttgacattgggtcaacggtctgggtcgctggatggaaacttgcgtggatgggtgt

SEQ ID NO: 114391 - DNA, 283 bp, Glycine max
  unsure (1)..(283): unsure at all n locations
  Clone ID: PAT_MRT3847_74303C.1
ccgaattcccgggtcgacccacgcgtccgaaagagtccatgtctccgtaatcgaatcagggaatagtttcagaagagtngagtaacaaccctttttgctccacaacanaggttttctccacagggcaagaagctggtttggtgtttctttcatttcacttttatatgaatagaagtttgaagggttttagggatttgcatgatgttaggttaggggggatattgccactctttgttcctccttctgatggaaatctaggtcctctccctgagtgtcatgtgat

SEQ ID NO: 114392 - DNA, 603 bp, Glycine max
  Clone ID: PAT_MRT3847_74304C.1
cactatcgaagacctatgatgtacgctgccctcagccgggatcctgtataccggacacccgtcgccctttttttttaattttgaaattattgaactgcatccaccaactatccttaggggaacagaattagaccatcgaactcgtgagtaacgaacattattccatgtttctacacttataagcaatgcctcacttttcaatgtgtcacgtgaaacaaatttttcttgccatactgggtaataccaagggttactattgtactcgcaaagttatcactgccacgtttaaaacaccctgcaacataggaaagaacatagaacatagctgctggctttagcttagaatacataagtgtggaagtctacctttgtgggatgccctgtacaatttatgctttgacatacttgacgacaccttcaatgtgctgaggagagccatacaactctataatgccattgcctgcgcgggcaatgctggacaagattgactagcaaagacttgcatgaaagatcactccatgagattaatgattgcgcacaaccttctaggctttattcatcggcacactggtataaagatctgcaactccctaacctctttat

SEQ ID NO: 114393 - DNA, 1311 bp, Glycine max
  Clone ID: PAT_MRT3847_74305C.1
ccacgcgtccgcatctacggcttttcttccttcttctctcagaacccttttccacatctcatctcaacgttctcttcctaattcctttcacaactccatcactcttgcatcatctttcaatccactgactcattcaaagcagcacctgaaccacagaggctgcaactccaagctcttggctatttcttacaggtatttcattgaagaagaagaagaagatgatgaaaacaacaactttgatgaagcagtggctctcttcaatggaggagagtactacaaatgccatgactatcttgaagccctttggctcaatgctgaagagcccaccagaactctcattcatggaatactgcaatgtgccgtgggtttccaccacctcttcaaccagaaccacagaggagccatgatgcaattgggggaaggactatgtaaactgagaaagatggaattctcaaatgggccgtttcaaaagtttgagaaagacatttcagctgttctagattttatctaccagactcagatagaattagctgcatgtagtgaggatatgtgtgttgcaatggatcgatcagaaaggtcttaccaacttctaggggaatatgcttcagggcagcgtgtgtatgatctagaactttgtagtgatgcatcagtgtacattgtgttctgccctcaaggctctaataatggtggtgccaccgaagccccaagggtgaagcttccaacgcttaaggctaccacagaacatcttgtggcctatgaataaaagtgaacatcatttaaggccaaagaccaatgctatagataaaaccacatgcaaaatttgttcttgtgcagttgtcacataatagaaccctaattaaattaaaagcagtaacaaatcacaatatgtcaaaccttatgttttgcaatgatttcataaaggatttttgtcaacacgagtgaagatactcaacaccctagactgcacaaaatgtgtatttgtgtatttatgcagtctggaaacagactgaagaggggagtttagggtgggtttgggataactgtaaaatttaattatttcaataatcaattatatatttataatttattattgttataattggttataatcataacattttcgggaatttctgcccatttttcttataatttagcatacctctttcttcccattctaggtttagacaacctttgtaagaactaaaaacatctgtatatattacattacagtttactctcatgacttagttaattttcaatttttcactttatatgataaataagatttgaatatgttttttatccctgtaa

SEQ ID NO: 114394 - DNA, 367 bp, Glycine max
  Clone ID: PAT_MRT3847_74306C.1
ttttgtgccaacggtggcctttattttcgtctgggtctagttaaccactggggaccaagattgtgaagaggggtacctggactgtgaccaattaatggcatttgagtagtacattgcccgggatgtgcaaaccatcccaagtgctgtgactgacgcagataaccccaactgggtgagatgatgtgtaacatatgggtatgctttgctcaacaacaaggggggacacatgggaggtacctatactgatgaccacgcatgtacaagtggatacatgtacaaagtgatcatcttccacctgatgagcattcacaatgccctgattgctgggttgacatattcaacagcaccatggatccactttatggtc

SEQ ID NO: 114395 - DNA, 451 bp, Glycine max
  unsure (1)..(451): unsure at all n locations
  Clone ID: PAT_MRT3847_74307C.1
acgaggatttgcaggactttttgcattagtttctctactttgtcccttaattccttttttgatggtctgtttgtgtggacattatcttgtccttctgttacatacatcattgttactgggccaaattttagctaactaagtaatattctcaactgagatttgttccattatgtttcaccactgacatgattgccacaactgtgaaacataattgttatcagattgtaaaaagtacatacaaattagtttattttaattttctagacatgctattttatataggaattttgatgtcagtttttaccggaatctggattgcagaagcaatgcttaagattttgtatgactgctatttgcctatttcattcttgttgcctgaagtttgtttttagatgacaagatttaccttatgaagttcanatgataagatttaataatataattgaatctg

SEQ ID NO: 114396 - DNA, 477 bp, Glycine max
  unsure (1)..(477): unsure at all n locations
  Clone ID: PAT_MRT3847_74308C.1
tcgagggatatccctccatcaaaagtggcatatgtagctaaagaactatatgatatgggttgctttgaaagctcacttggggacacaattggagttggtactcccggtaatgaattagctagatgtctttctttttgaaaactttatgctacacacagaacataataatatcagcctcatggcagcattcccttgtttggcatttgtcttcaaacactttttactaaacatcagcctattactcacctttcctgtgctttgtgttgatcgtgatataccttatccttttttttaacttggcaatataattgtcttgagaatgttcagtatcaaaaacatttgtcgtacattatacctcaatctgcattaccctgttttgagttttaagctctacagtctacacctgatggaggaatctaatatggtcgtcctatttccttataactctatgncaacctgtttcttttatgcttattc

SEQ ID NO: 114397 - DNA, 413 bp, Glycine max
  unsure (1)..(413): unsure at all n locations
  Clone ID: PAT_MRT3847_74309C.1
ctcgcgcgtccgtcaagcattgcatccctctttattcgtagcttgntttgtgctttagataaaacgtctaccaaatcaagaggggttgtacgatcatagtgtgtgttttgcaacaatggctaagttctctgctactatgatcttgacactctttgtcattttcatacttcatacagtgataatggctgctaatgaactatgactccacttgtttgacatcaagatcaaatacttaagattaagtgtcaagactgtccaatgcccatcactatgctcgactagatgtaaccataccctttaccacaagatctgcatgtttttctgtcataagtgctacaagacttgcctgttcattcttgccgtttattatagtcataaagctctattcccttgcttcaacaacttagaatacc

SEQ ID NO: 114398 - DNA, 158 bp, Glycine max
  Clone ID: PAT_MRT3847_7430C.1
agatacttaagtctactgaaaccctccaatcgcaattatgccatggttaagatctttcttcctcaaaggagggctcatgggtatcaagcaccgctcccagggaacacactgctaacggggtagaatgtggttcaccgtggcataattgcgaggggagg

SEQ ID NO: 114399 - DNA, 210 bp, Glycine max
  Clone ID: PAT_MRT3847_74310C.1
tcgtccacgcgtccgttttttttttggcatcatcaaatagaacaaaaatcacaggagaaaataggaaaatgaaaacaagaaatcaaaaaaacaataaaaaaaaggacagcaactattgaggtaccaacgcttatctaaacctgcctaccacttcaactgtcttttatgctgctacttaaattcagtatacaagccttacatttacaaccc

SEQ ID NO: 114400 - DNA, 656 bp, Glycine max
  Clone ID: PAT_MRT3847_74311C.1
attcattataaagcaagtacaagtcttaccagggggacattttatgtctgttgcagttccatcactgccaacttctggacagctaagaggatttttccactcagaaagatttagtttatccagagctgatgtataccaattttttgcagtctcctcagacataaccccatcacaagtgtcaaatttactttgacacaaatctccaagatactcatacagagtgacttcgagcttcaatttacactttgagcaacaaaacagtgtgttgctttcctttaaaatctgttcagcactccgtagttccttttctgctaaatcccaaagtcttttcttaacataaagttttcctaaagaggaagaaaaaacaattaaaaagaaagggaggtttagtgaacaggatatggctttgccccacttgaaataggtttcagcctcagctccatctccaaccatttcatggatgattcctacctgaagagtgctctcaagatagcattgcataactttccatgcactaagataattgtcttccaagtcccatgatatagaatcaaatagcaaaacttccctggcaactgataagttcaatccaatattttcaataccatccattagattctttgaggaatcagctattacattttgctcttcattct

SEQ ID NO: 114401 - DNA, 232 bp, Glycine max
  Clone ID: PAT_MRT3847_74312C.1
tacgttccttcttgcctccattggggtctttcctctactccctgctgtgcctattgactctctaggtatcattagctctgatgcgcttgccattgactactactcccctgcatgttctgcagtcggagccacctcaaagtccctgacccatcaaactattgttgccatactgtacagtgatggcactttcattggggaaatatcacccttcaccctcgctcgctgcgatgat

SEQ ID NO: 114402 - DNA, 274 bp, Glycine max
  Clone ID: PAT_MRT3847_74313C.1
aagcggtgggtgtgccatcgaaggacgtgcacatcgccttcatctctctgaaccggatatgcaaccggatcttgacacaacgaggccacgttgctaccgacttacaactccttgtttcttcactgatacatgaaaaatattctcatgaacttccggacgaatcacgactggaactccgattcatggatctgaacccaatactgttcatagacgacatgactatagcgagatgacaagagtttataggaccatccatgactatgccacgtatgac

SEQ ID NO: 114403 - DNA, 677 bp, Glycine max
  Clone ID: PAT_MRT3847_74314C.1
atttgtaggaggaagtaagaaaacacaacacgaatttcattgcagagtgttattttgagtatcagcatcaatggctccaattgcagtgggaaacgtgattccagacggcattttggcttacttggatgaagaaaacaaaccccaaactgtctccattcactctctcgccaccggcaagaaagtcatcatctttggggttcccggtgccttcactcctacttgcagtgaatgatccatttgtgatgaactcatgggccaaaacattcccagagaacaagcatgttaagttccttgctgatggtgcagccaaatacaccaatgcccttggtcttgagcttgacctcactgacaagggtctcggcgtccgctcaaagaggtttgctctgctggtggaagacctcaaggtgaaggttgcgaatgttgaaagtggaggagagttcaccatctccagtgctgaagagatcatcaaggccctttaaaacccttgaatcctcttgttggctgtttaactgtctttaatgtgtggtgtgagactcttttgatgcaagaatatactagaaacattttccttttcatagatgtaattgtgttgtgtgctctgggaagggccatgatatggtgcatattatggaaataaataagatttcttgtttcaaatgctgtcaaaaaaaagaaaa

SEQ ID NO: 114404 - DNA, 943 bp, Glycine max
  Clone ID: PAT_MRT3847_74315C.1
cgtacgcaagcaaggaattcggcgcgagcgtgagagagcatccgccccaataactataacattatgttgtattgtacagacagagggacctgtattctttgtggggatgctgctggtgctggggtgagtacaggcctccaacagtgaagaagatggtttatttggttttgatttgcatagtgatggcagtggtcaaaggcacttgaatgcttccattaaagaaaatgagtcaaataatgcattggattcaaattcggctcgaggttggaatctggtgaaagtcagccactgttcacaccaacggacattattcgacggtgacgatggaaccggcgtcgtcctcgtcctcatcggagcaccaccgaagctactggcggtggagcaagtgcgacttcttccccgagaagtcattcgagaacgggaaatcctaccgcgcagccctggccgccacgtgtccgcgcctcaaggaccggctcctgaaccggtcgagcgacgcgcacgagctcctggtgctcccacgcaccagcgagcaccgcatgaatcgctgcctcacgtggtgggatctgacctggctggccttcgggtccgtggtgggttccggcatcttcgtggtcaccgggcaggaggcccgtctccacgccggccctgccatcgtcctatcctacgccgcctccggcttctcggccctcctctccgccctctgctacaccgagttcgccgtcgacatccccgtcgccggcggctccttctccttcctccgcatcgagctcggtgacttcctcgccttcgtggcggccggcaacattctcctcgaagccctcggtcggtgctgccggcctcgggcgctcctggtcctcgtacttcgccagcatggtcaaatccgacccgacttcttccgaatccacgtcccctccttcaaccccgggttcgacatgctcggatc

SEQ ID NO: 114405 - DNA, 128 bp, Glycine max
  unsure (1)..(128): unsure at all n locations
  Clone ID: PAT_MRT3847_74316C.1
ttgggcacgnccgcatctcataatgcttatatagatgacaaggcaacggggtcttcagctgcaaaattcgaatatgtatatacggcagatgttaacgcataggacatggggacctcttatgacagaaa

SEQ ID NO: 114406 - DNA, 579 bp, Glycine max
  Clone ID: PAT_MRT3847_74317C.1
ggaattccgcacgaggcacaaaattcattgcacagtgttattttcagtatcagcatcatggctccaattgcagtgggagatgtcattccagacggcattttggcttacttggatgaagaaaacaaaccccaaactgtctctattcactctctcgccgccggcaagaaagtcatcatctttggggttcccggtgccttcactcctacatgcagcttgaagcacgtgcctggcttcattgagagagcagaagagctgaaaggaaagggtgtggacgaaataatctgtatcagcgtgaatgatccctttgtgatgaactcatgggccaaaacgttcccagagaacaagcatgttaagttccttgcaaatgttgaaagtggaggagagttcaccatctccagtgctgaagagatcatcaaggccctctaaacccttgaatcctcttgtttgctcttttgccgtctctaatgtgtggtgtgactcttttgatgcctgaacatactagaatcctttcccttttcatagatgtaattgtgttatgtgctctggaaaggaccatgatatggtgcatattatggaaat

SEQ ID NO: 114407 - DNA, 987 bp, Glycine max
  Clone ID: PAT_MRT3847_74318C.1
ccacgcgtccggcctaataatttatatttcaaattttcatgaaacccccttaatagttaatacaacagattacagtatttaattaaaagacgggactatttgctatataagttgggctggattttgtggaggatgtaagaaaacacaaacaacacaaaattcattgcacagtgttattttcagtatcagcatcatggctccaattgcagtgggagatgtcattccagacggcattttggcttacttggatgaagaaaacaaaccccaaactgtctctattcactctctcgccgccggcaagaaagtcatcatctttggggttcccggtgccttcactcctacatgcagcttgaagcacgtgcctggcttcattgagagagcagaagagctgaaaggaaagggtgtggacgaaataatctgtatcagcgtgaatgatccctttgtgatgaactcatgggccaaaacgttcccagagaacaagcatgttaagttccttgctgatggtgcagccaaatacaccaatgccctcggtcttgagcttgacctcaccgacaagggtctcggcgtccgctcaaagaggtttgctttgctggtggaagacctcaaggtgaaggttgcaaatgttgaaagtggaggagagttcaccatctccagtgctgaagagatcatcaaggccctctaaacccttgaatcctcttgtttgctcttttgccgtctttaatgtgtggtgtgactcttttgatgcctgaacatactagaatcctttcccttttcatagatgtaattgtgttatgtgctctggaaaggaccatgatatggtgcatattatggaaataaataagatttcttgcttcaaaaaaaaaaaaaaaaaaaaaaaaaaaaaaaaaaaaaaaaaaaaaaaaaaaaaaaaaaaaaaaaaaaaaaaaaaaaaaaaaaaaaaaaaaaaaaaaaaaaaaaaaaaaaaaaaaaaaaaaaaaaaaaaaaaaa

SEQ ID NO: 114408 - DNA, 955 bp, Glycine max
  Clone ID: PAT_MRT3847_74319C.1
cccacgcgtccgctcctctcttccagaagcttctgcattggcagttcctagtcctacctctaaatctaataaacaaattacagtatttaactaaaacacgggactatttgctatataagtcgggttggatttgtaggaggaagtaagaaaacacaacacgaatttcattgcagagtgttattttgagtatcagcatcaatggctccaattgcagtgggaaacgtgattccagacggcattttggcttacttggatgaagaaaacaaaccccaaactgtctccattcactctctcgccaccggcaagaaagtcatcatctttggggttcccggtgccttcactcctacttgcagcttgaagcacgttcctggcttcattgagagagcagaagagctgaaagggaagggtgtggacgaaataatctgtatcagtgtgaatgatccatttgtgatgaactcatgggccaaaacattcccagagaacaagcatgttaagttccttgctgatggtgcagccaaatacaccaatgcccttggtcttgagcttgacctcactgacaagggtctcggcgtccgctcaaagaggtttgctctgctggtggaagacctcaaggtgaaggttgcgaatgttgaaagtggaggagagttcaccatctccagtgctgaagagatcatcaaggccctttaaaacccttgaatcctcttgttggctgtttaactgtctttaatgtgtggtgtgagactcttttgatgcaagaatatactagaaacattttccttttcatagatgtaattgtgttgtgtgctctgggaagggccatgatatggtgcatattatggaaataaataagatttcttgtttcaaatgctgtcaattgttgccaagtttgatggttgcttgttttggtatatttgtggaatcaaatagtagtaaactcttcattcttaagagagag

SEQ ID NO: 114409 - DNA, 379 bp, Glycine max
  Clone ID: PAT_MRT3847_7431C.1
ctgatcaaccccacactctgctacggtttcagagtctccgctctttctcactagtcttcgaactcctacaatacatgcctgattccactccgtctccaccggcgattaagtccaaatcgccatggacgtcacacacactgcttgtaaacgctgcaagcgctgaccaggcaacactcaggtgacctgccgacggacgctcgaaacaccttcatgaccagactcttccaaggaaaccgctctctctcgctggggaactgccacatgactacaaggctacttagagtggcaggctttcagagctcatactgcataatgctctgggcgcgcaatggcgacgcggcacaatgtgaggtggccaacgatggatgtgcttgggccc

SEQ ID NO: 114410 - DNA, 1027 bp, Glycine max
  Clone ID: PAT_MRT3847_74320C.1
cccacccacctagtccctattgcaattgcctacagaaaaatcttgaaagttttattctacctcttactcaaaaattccttacctatcacttgcaatcctcaaaagcactaagccttcaacagcaacttgccattgcctagagaaaaatgaaggatgttttgttctccctcttacttttcatctgatttcgctccgtatatttaaccaaagcattagcccaagcacctgatacagccccatctgaaccaattgcccaaacactaccccagtcatcctcttcagatacctctgattcttcccctgatgacatcatcagaatattaaggaaggccaaatcgatcaacgtcctaattcgcctactgcaaaccggccgacaaatcaaccatcgcactgcttcagttccatgttctagacacttatgtttcaagctcaaaccacgattcactggtcgctttcgtgaacactaagcacggggctaatcccaccaggttgcaatttaatgtgacagcatatggcagcaatgtgaatatctcaacaggagtggttaatgccacggtcacgggagttgtgtactcagataaggtgcttgcagtctatcatgtggacaaggtgcttctccctttggatttcctcaggcctaagccaccagctcctgcaccctctcccgcaatggcgccaaaagctgataatgataactcatctgctgatgctcgccttggaacatccaaggacagcgctgatgcaagcagtttgataagtactcgaggaatgacattgctgtcctttggagttgctttagttgcattggtgtttattgcaagttgaaggctggccagaccagatcagaccagacaatctatttgacgattttgactttatgttctttctttgagctgcgtaggaagagtgctgtttgagggacatgtgaattatgaagcgttgagttgtttacatgtccttttgatacaattaagattgtttttgtgtgattttgatacaatcaaggcaacaaatattttcattctcc

SEQ ID NO: 114411 - DNA, 878 bp, Glycine max
  unsure (1)..(878): unsure at all n locations
  Clone ID: PAT_MRT3847_74321C.1
gcagatccagagcatcacattgagtaagagcctccctttagaactcaattaaatcaaatcataggtagacctaagttagtgattacagagctagagtctcagtattttaagactatcttgtaaaaagatggagtttgtcctgtcaaatttcatttctatcttaaaattaaaaactcatttttctatcctgggcctggagttttaccaagttgtgccccagagttctaagaaatgtaaatttctaatattttccatgtcacggcgatccagagaatggctttcaatggtaaacagaagaggaagaaattgaattttccatagttcaaatagtcagttttccctgtcatatttttggtgtagtatttcactcttaatgagaccaatgaaaataaatgtaaaaaataaatcatctcattcattgttttatattggctatggctggttcaaatatgtaaacttctcaaatttcttttttattctcattttaaacttttcaagatgccacaatgataaatcattaccttcacaaagtttttccttctccttgtcattgcttttgtacctttttgatgaatatggttcctcaacattgtgatggtgttggaggaatagaatatacaagtattagggcaattctctcattgcatgactgatggtcttatttttaatttgccttctgatgtcatgtactctntagctntcctatgtttggactcattttgcaatatatccatcccaatgttgttactgttgagtaattgatctttgctataattgtagggtttatgcagtcacttcaagtgccacaaaaaactgctgcgcgaattcccgaattttttgaattacactaaaggacattttcaaattccttgcattag

SEQ ID NO: 114412 - DNA, 217 bp, Glycine max
  unsure (1)..(217): unsure at all n locations
  Clone ID: PAT_MRT3847_74322C.1
cgtttgttgttttttttgcatgatcaacacaacacgttgtgcatgctaattaaatcatcaacatcctnnaaattcnatcccactactggctgaaacagataactataatcccgcatgggaagccgagtaaccattctgttgagaatggggacagaagtaccaagtaaatgccacatgttccttagaagacagctgtcgntatgtgtatatatatatg

SEQ ID NO: 114413 - DNA, 357 bp, Glycine max
  Clone ID: PAT_MRT3847_74323C.1
atctagttaaagattttgtccggttggtagtttgactggccccagaccagtggaaagaccccaaattgggatttcccttctttttgagagtctttccgaataacccttcgtttttcaccccaaaagaaaagttgggggcctgggtgaccagggggctgggatggacatggacccgatctaacccgggatcctatttaacgtgcgtagaaaagaaaataataatttttggggggggaaaacctggaaggggtacaataataagtttactttgggggcccattacgataatttgaaaggaaccagaacttggggagggcaaaaaatctctttttaaaaaaggggccagggggggcccat

SEQ ID NO: 114414 - DNA, 427 bp, Glycine max
  Clone ID: PAT_MRT3847_74324C.1
aagagataaagattatattatttatatacactgaaatacgctctattgcacaccatctgaaggtgatgaaaccctgcctattaactatcacccctaaactccaaatgcagcagctagctgactcaaaaacagaactcccagaatttacaaagtgaccgaaagggaaacaggcaccaggcgaaccaagtgttgagcttactggtgggtgctcccactataatacaacctactacttcggcatgacctgagaagattactgaagtaaacttaacatgtgcattgaatagctttcaaggacgttgttaaacatggcatgaacaatggtacatctgattcacacgctgggaccattggaaagctagaccatgagactaacactgcacataggtcaaactttgaatttttttaataggaaccattacggggg

SEQ ID NO: 114415 - DNA, 362 bp, Glycine max
  Clone ID: PAT_MRT3847_74325C.1
ttcaagcggttatgaaccgcctttatattaaacgtcgttgaaagtcaagtacatttaaggaggattccaactacaaccatcataaaaaagttgacatattctaagatgattctttgttacgaaccgtcttagaaagtacgctttctaagatggttcttaataaataatcgtcttagaatatgcacattctaagatgtttcttaggaaagaatcgtcttaaaaagtgagcttggtcatgaagttcttggtcatgaattttgtacataatgcattacataacatggttatactacaactatatcatatacaatgcatttgatgaactaaacttgaaaacaaaaatccaaggtcccaacatttta

SEQ ID NO: 114416 - DNA, 232 bp, Glycine max
  Clone ID: PAT_MRT3847_74326C.1
tacggctgcgagaagacgacagaaggggggtgcagaacaagatagataccaaaccataatgttgctgcaacattctatgttctgtgccattcctccctctcacttcaccccaccactcaaacaaaggaacccatctcttcaccgtcttccctctcctagaaagcccaaaggcttccaccctaagatttccctcccttggcgctggtttcttcgatgacatcgtccaaattgc

SEQ ID NO: 114417 - DNA, 249 bp, Glycine max
  Clone ID: PAT_MRT3847_74327C.1
aagaaggtagccacataaaatatgtatttttccatttgactttgttgcttgcattcaagtgtatctcatttaaagagcatcaaaagaattatgtgtctgcagagagttgacagtgcatttaattgtgactggtctagcaggtttctgtgacagtagttaccctgtctactgttctcttttatagtctgggccaaggattatttgtcctagtatggcagatttgtaatttgtttaaacttcattactgga

SEQ ID NO: 114418 - DNA, 1108 bp, Glycine max
  Clone ID: PAT_MRT3847_74328C.1
acgagaaaagattgagtttccgtattatagtccaatcattttcccaaactctgttcgtcggttgtaccccacgcgtccgataatataaaaaacttttctttgtttctcttttctttgtattagccttttgttgtagatggcattggggagaaggagtggactctttgctcttgaaaagcattttgctttctatggagcataccacagcaacaaaattaacatagcaatccacgtgttgtttgtttggccaatttttttctcggcccttcttattctctattttgtccctctccctcccttattcaaccttcaaaacttggagttttccatgtgggagaactatgtgatattggtttggaatgttgggtttttggttgctttgctctactcagttttctatgtttctttggatctgaaagctggctctttggctgctttgctttgtgctctttgttggattggtagtagctttgttgcaagccaacttgggttgtctctagcttggaaggttgttcttgtggttcagatagtatgttggacagggcagttcattggtcatggagtatttgagaaacgagctcctgctcttttggataacctcattcaggcctttgtaatgggtcctttctttgtattgctagaggttctccagactttatttggttatgagccatatccaggatttaattcaacagtgaaagcaaaagttgaagccaacataaatgagtggcaagaaagtaagcagaaactaatatcttagcttcttcttaagtttgtgcatctttaaaagttaaatgatctcccccaacagaggaagaataaaagctacaaatgatcatatatgtatggtactagggtatatatgcctttcaggataattgtgtatatgccttgtatatttgttgagaagacacagtatatcatattatcatgggcatgctactatgttattctaatagaagcatcgactctgtattttgttcgtgtggtttgaatactctctttggacgtggcaatatatgaacaggtgattgtgtaaaaatgtttaccctaccatttgattgctcaaaattaattggtataggaaataacatttatcgtggtccct

SEQ ID NO: 114419 - DNA, 221 bp, Glycine max
  Clone ID: PAT_MRT3847_74329C.1
aagatacaggggtcactgacacagagagacactcgtcacagatcccatttcaatctcatgactatgcgcgaccttcgtgaacattcatatccgtcacgcagggatccacgtcggaaattcctgctgggaacactattgactgcatgccggcatccacctagaaggcatcattccctccgacgccaccttcggtgtagcccactacacgttcaaaatcttct

SEQ ID NO: 114420 - DNA, 527 bp, Glycine max
  unsure (1)..(527): unsure at all n locations
  Clone ID: PAT_MRT3847_7432C.1
attcggctcgnggagcgtgcggactccaagccgtttccgaattgactacgtggtgatgcacgttggctgtatctctatcgggcacagatgctcatgctacgagcgagagcaactcctcagcgctgctgctgcggcactttacataccagtgacaaaacaagctggcactatcagcaacaatatattgggctcctacaaagtctacaaagccttgaaggaaatgcaggaccagatcccgtaactaagataacaactagtgaaggtgaccaaaccatcttccaagcttaacaaattgcaaccgccgatgacgaggcttaacttcggtctaacgactaccgacatacgtgtgagatgaccgcgtcacaatgaaagtctggagaaggggacattccaaacacagatggatgctgacaactgatagtgactggctagtatggagctaggccactctaaatttctagaccaaaaactaagcaccactctgatatgctgagcgagatgaacaatagggaagcggtgctggaata

SEQ ID NO: 114421 - DNA, 354 bp, Glycine max
  unsure (1)..(354): unsure at all n locations
  Clone ID: PAT_MRT3847_74330C.1
gagacccgttatagcggttccagctactgctgcgctcgtatgcagagcgtactcgcgaaagtcactgaccccaatcggacttcttgcagcgttcgtgacagcagttgtacacgcgttacatccgtggagagtattctttgctcttcttgcagtcttcttcttggctggcagtaccgcaacgaaggtcaagcatgatatcaaagtgaaattgacacagtcagcgacaggtgcatctggtggagaaggcactcgcaaccatgttcaagttattgcgaactccggcgtagcctcggtgctaatattactacacctctggcagctaanggaaagatgggagatatggtgaccagggtc

SEQ ID NO: 114422 - DNA, 393 bp, Glycine max
  Clone ID: PAT_MRT3847_74331C.1
tgcacgcctcgtaagctcgctaattagctagagcacagtcaagggttgtcacctattattctattggtacaataaattctggcgaggagtgtgtcggccatcatgcaattcaggaaatgcttaaagatcccaccgattaaaataattactagatgccgtaacaagtgaggaaaacttaatctgctaaactttccttgtctgaacactcagagatggcatctgtaccatacataagagactttattttccctgcgattggggttaaggccaggcatactggtgaactttccaaaatcaggcagagaggtagtgaaagacaacgaccttgagggctgccgacgacctaaatgactatgccaccagactctaacttataatgggttttacatgaca

SEQ ID NO: 114423 - DNA, 759 bp, Glycine max
  unsure (1)..(759): unsure at all n locations
  Clone ID: PAT_MRT3847_74332C.1
gcgggctgccgtccttttttttttttttttttttttgagcatgtaaatcaagattaaactcaatgttaggatacccaattacacgctacctagtacttatacttattcgactaaaaataacatgcaagcgtgttacaagaggagtcacattacattgtcactttcaaacaggagatgaaaagagcaaaatttgattcaccagcataggaaattgccttggcttcacgcaaaacagctacttttaaaaaaaatcgattaaaaaaagattaacttgacgcagtatatttacagaaatatgcaagaagctcaaacataggcagatactacaaatcatgattgttcatccccttccaaagtattgggtcttccacaagactttaggcagaaatcatacggaaactcagacccagctgatacagaaatcgcactactctctctgcaattctttctcatcattccattatagtaaatacacaaaccaattctgcttcagacgattccactcgcgtcttgaacaaagttagccaatgaagtgagctcataatgatagtgtttgggtcttactcttcacactgcagtgcattttagctacggaaagaaccaaaccttgatgaagattgccaaagccatttgcaagaaaaatgctgcaataatcgccactgaaagttcattgccttctatatnagatctcaggtttaaggcaacaaagcttgccgaggcaacgcccgtaaggagtattataacccaccgaagaaactc

SEQ ID NO: 114424 - DNA, 369 bp, Glycine max
  Clone ID: PAT_MRT3847_74333C.1
attccttttttttttttttttttttttttttttttttttttttttttttttttttttttttttttccccccccccgggaaaaaaaaatttttttctcccccctcaaaaaaaggaaaggggcacaatttttttatggaaaaccctccaaaaaaagggggggggggggggagcttttttgggggggaaccaaaagcccttgtggggggggggggaaatacgggaattttttggggcaacccggttgaaaactggacccggggtttgggaaccccggccccccattaaagaaaccccttattgggaaaatacccggggggggacgctccttaattaaagggaaaaggggcccccttgaccttagaaccgggg

SEQ ID NO: 114425 - DNA, 286 bp, Glycine max
  Clone ID: PAT_MRT3847_74334C.1
gcctttgactcaaaagcatggtcgacgacaaacctttagtttgtacttttgctttggattacagaatatatctgttatactgccgtgatcacctcaaggcaatttcacctttcatgccaaggtctttctattcaaaccaagatctacaagacaccattatgtttgtctcttgctgaagaccccacaccctaacacaaaccacggggagactggcacttcagcaattagattaattgatcgaccacatagccttataggagacgtccttctctccaaaaaataaaag

SEQ ID NO: 114426 - DNA, 1311 bp, Glycine max
  Clone ID: PAT_MRT3847_74335C.1
gctcaatgtggtaaagccatagcctgtgaggacttttttaaatgcttccgtggtttgttttttttttcgttcccaaacccagtggaaagtagcgaaatgtatcgaacggcggcgaagcggttggtgagcggtgcaagatactactatactggcaaggttgggctcagattccggccttctcagatattgataccctcttctcgcttttccacatccgagactcaaccacttcccattcccgtcgccaccgaaaccgaaacccctaactcttcagattcgtccccttcttcttcatcttcctcaacagccacaaaacccagagccaagtacgaggaccaacaaactcgcgtgcttcaggcctcgctctcttacgtcttaaagttggggtggacagaagctgctctagttgcaggagcaagggatgttggtctttcaccatctatcgttggatctttgcccagaaaggaagcaacactggtcgagtatttcatggacggctgcttacaaagacttgttgataaaattgactcagatgagagtttaaaaaatttgacaccaagtgactgcatctctaagcttatcagatttcgtttagaaatgcaagctccatatatatcaacatggccccaagctcttagcatccaggcacaacctgttaatgttcctacaagttttaagcagagggcagtgcttgtggatgagatctggcatgctgctggtgataatgcttccgacattgattggtatgccaagcgcactgtccttggaggaatatactcaacaactgagatttatatgctgacagatagctctcctgatttccgtgatacatgggctttcctggatgctcgagtgaaagatgcctttgatataaagaaaaccattcaagaggcacagtatttggcagaagctgtcagtaccgggctggggaactcctttcaagggtttgtcgggaaagttttccagagatgagtcgggctggggaactcctttcccttggttatatgttgttgtttcaaacaatgtttctccgagacattgattgtcacttgaaggagatgctatattatacacgcgtagtaattagttatctttcatttacttcaaatttggtctgttttcggcacttctttcaacgcttgagttccaggcagggtcatgagtgcaaaataatgattttaagcttgtaaataattctattatgatttataatactaatcgaaaaaaacttgctcttttttcccttcccccaagtaaaaataaataaaaaaaaaaaaaaaaaaagggcggccgctcttaaagagatatcca

SEQ ID NO: 114427 - DNA, 766 bp, Glycine max
  Clone ID: PAT_MRT3847_74336C.1
gagcatactcaagaagcaagcaaagcaacagctgcttcatcaaagaaacagaagaaaccttttcttttcgattccgacaatgcgtccaccgcgtaagagggtggatttcgcgcgcgacgacaaggtggagatctgcggcaacgaggatggcttcctcggctcctactaccaagccacggtcgtgtcgcgcctcgacaacggcctctacgtcgtacgctacgacacgctcctcgaagacgacgcatcacaacaaccccttaccgaaacccttttccccaaagaactccgtccccagccgccacgtgtctccaaaaccgatttcgcgctctaccagtgcgtcgacgccttcgacaacgacggctggtggctcggccaggtcaccggaaaaaaagacgccgagcattactacgtgtatttttctaccactaatgaggagattgcgtatcatgtttctgcgattagggttcatcatgagtggagccatggggagtgggttttgtccaattgaagaatgttgagttcggaattcgtgtcgcgtctttgttttaggagacattaattcgacggttgatttgattcgctttcttgggatcgtatatgcgttatatcttgttgtgggttgttttttttctttctttcttggttttagtctaaatagtgttgttgtaggatggaagtaattgtaccctgtgcttcttgttcatacgtgtaattggaattgtacttccaatcggtgataggaaaagtggaaaaacctaccctttcg

SEQ ID NO: 114428 - DNA, 437 bp, Glycine max
  Clone ID: PAT_MRT3847_74337C.1
caggctttgagtaatgggctttataagagtgtgtggcatcgtgctgttgtcaatgttgagaagccagggctttctgtggcgtgcatttctttgtccaaatgacgaggcattgataagccctgcaaaaccactcacggaaggtggatccgaagcaatatacagaggatttacatatgcagaatactataagaagttttggagcaggaacttagaccaagaacactgtttggaatttttcaagaacaagtaacccaagggtatcttaatattttgtttttcactcctccttgttagtgccacttgcttttgttgttttattgttggtacatttggttagtgcaaattgtagtttgttacacaacttctgtgtcagacgctcatgatttctcttgtggtgatatagctgcaagactgaactgcttattcccttgcttcat

SEQ ID NO: 114429 - DNA, 302 bp, Glycine max
  Clone ID: PAT_MRT3847_74338C.1
gaccgacgcgtccgaccacgcgtccgcaacggtttagtctattgtaggaaaatggggagctcttaggtcgcgcggaccagggtcacactataacggccatcagttctgaaagattgttgaagcccatcttgtcagctgatgaagtatcagtctgtgtacatggaacctacaggaagaatcttgattccatcttgaaatcatgtctgaaacgcatgacaagactacatgttcacttttcatgtggcttgcctacaagcggcgacgtgatctctggcacgctactgaacattatcatactgatg

SEQ ID NO: 114430 - DNA, 697 bp, Glycine max
  unsure (1)..(697): unsure at all n locations
  Clone ID: PAT_MRT3847_74339C.1
gcgagcaacctttgcttctctcattaattaattcacaaactaacttagcttccaaattcatatggagagggtgacaaagatggtatcagagaggccagtggtgatattcagcaagagctcgtgctgcatgagccacaccataaagaccctcttgtgtgactttggggtgaatccagcggttcatgagctggatgagatcccaagaggcagagacattgagcaagctctttcaaggcttggttgttctccatctgttcctgctgtcttcatttctggtgagcttgttggtggagccaatgaagtcatgagccttcaccttaatcgctccttaattccaatgctgaagaaagcaggagccctttgggtttaattgatcaattcatataattgatcttctcccaattcatcaccactcatcttgatcaaccacacatatatgcaggctctctaattaataattatacctgttttggttatatatatgtatgtaatgatgtgattatatacgtaggagcagcatatatataatgaggatatatgtgtgtgtgtgtgtgtgtgtgtccncggtattattaggatagagtatatcgcactagctatgtaataatgaggctaacttaactgatcgtggtgtagtttagccttttttgacgggttaaatcaatgtaatgttatctttttgatatacatatataat

SEQ ID NO: 114431 - DNA, 168 bp, Glycine max
  Clone ID: PAT_MRT3847_7433C.1
aataatggtcacaaccatttccactcaaacatggatctgttcatgtcgaaaaaataaaaaagagaatatatattctgtcagtgtatctattacaaatttattacgcatatactaaaattcttgactatcacaaagcatggtaaggttcctatatttaacacactcata

SEQ ID NO: 114432 - DNA, 231 bp, Glycine max
  Clone ID: PAT_MRT3847_74340C.1
agaaattgcagcggctgcgattggtttgttgtgcttgtggagtgttgctgacagtgttcccaacaccaacatcactgtcattctgtgcaacgttggggcgtacacctcaggtgatccttttgctgtcagtttatcctatgttgttagagaattggagacagagactccaaccaggaaaaactacgattactacaacatttctccatatcctaatgcctttgcctatggaca

SEQ ID NO: 114433 - DNA, 459 bp, Glycine max
  Clone ID: PAT_MRT3847_74341C.1
ttttctctttccatttccttcttggctagattacccacatctacgacgagtctttggtatgaatggatcctcatatctcaaaatgattcaccgttgtcatttcattctaactaatctctgcagaaccctctaatctctgatttcgaacgtgcaaagatttttgacttgaccggatgctggtgcggttgaaatctgtgtgagaaataggggttagacgcagccttcactatcctttggactccttctacgccatttggacccttgcttggacctatgtcacgggggatcctgctgtcatcgtctcaaacatctttaaaaacgtgatcggcgttgccgtcttagttaacattacgagcttctctttcttctgtttttttttcccggccttcgaggttatgatgtttagaaaacaaatacctgtttcggattcatctatttttggctgacaaatttgaggat

SEQ ID NO: 114434 - DNA, 235 bp, Glycine max
  unsure (1)..(235): unsure at all n locations
  Clone ID: PAT_MRT3847_74342C.1
tttngagaacggggttgagtctttgaaaaaaaacacacactttacacatcagtacgacattgaaaagaggggtggaagaatcttaatgggcagagcttgctaaaggagcaggtcatgcctaatttcccttattgaaactaacaaacgagctggcgaaagtttttacagctgggtgatcatgcagaggattccgccttgtaaaaaaacctggcaaaagcctgagtgacacaaaaag

SEQ ID NO: 114435 - DNA, 1495 bp, Glycine max
  Clone ID: PAT_MRT3847_74343C.1
agccatttataagcaagcgcagctttcaatttattcaatggaaaaaggttgtcaacctgtattcaagatgaaaatcattagtcatatcctgaaaaagtaatttcattactttcagaaacacaattctgaaagtctagagggaatttacaagcaacataaactagtcgcttgctttccgacatgaatttccgacaactggcaactacgcaaataaattgagctattttcaaagctctataacttcataggtagaaatgatttcaaccattgtttccatggagcatcctgttgttgctcaacccaagacaagaaacagcgaatccaacaagcagaagaagttgacataaaggagttgatacctcacaggtataaaccgaaagttcgcaacctgaacaattggccatatgcccccttctaaaacaaaggctgggagaaaatctctcttcacatcttcttttacttgaggaacactctttccagcagaaaaacccatataagtgaaaaacacaagtaaatccaatggtccaaagataaacccatcaacggcaactttagtggcaacaaagcggaaggaattcggtttaagcatgagtttcagtcttataaaccgatccaaaccttcgtaccagaagtggccaacagggccaacaaatcctaacccaaacaagctggtcgtagacacccgtctccagttgatcttgaattctttagtgtcatccgcatcaaaagtgacacgtttcttggcagtgtagtgggtaactgcctgagcagctatgtcaccagcaccccaaatcaagccagagctgatgacctgtgtcttaacagggtgaaccgccaagcaattctggtaccatttccacaacctcagcatatccaacaacaacaacaacaacaacaacaacaacaacaaccgctatttattgatcatggaaaaatgtaaaacccctttttctatatttggggatttattcaaatgggtctcgcattagaggataaaggatgaatcttttggcggtggaacaagaatggcactttcttcggtttctatggggtactgtgttcgctcgggccaattaaaagaacaagaggaaggaatacgctgtggacgcctgctacacaacaactcaggaacaacccttaactcaacctcgagccgaattgatattaacatatctttgcctgatagttaggttggcgatcgaggggcgcactctctatcctcaagaactcttgctgacaacattcatgactcagctgttttattaatgtttagtggtctctctctttctctcactctcatttaaagattgtttcaatcgtgtctaatgtgtatccccataggatgtagtttcagtgttgtaagttgcagctagttagagtatgtgatatatttatcggctgattaggtagatgctgcattctgcagatttatgagtaggctaatttggatgtaatgaaaacttgtttgcctatttatttatgcctgaatttgagg

SEQ ID NO: 114436 - DNA, 247 bp, Glycine max
  unsure (1)..(247): unsure at all n locations
  Clone ID: PAT_MRT3847_74344C.1
ggctcgagattacctttttgtgaagaaaagggagaacgaaagaaacacaactttgtcgtgtaatttggtatcgatgcatttagttcaggagtagcttgtagctatgatgctgccaccagttatattagtatacagagtgcggaaaacaaaattgcctgtaactaaaaacgaaattttgcttttgtaaattcagtgtgaacgtaaagggcttaacaagagaaggacttttcttcgttgaagggcccna

SEQ ID NO: 114437 - DNA, 1048 bp, Glycine max
  Clone ID: PAT_MRT3847_74345C.1
aaacaattcaaattcctgtagaaagaaagaaactccgttttttttcatttttaattttctttctgccaatttccaataatttttctccctctaataacacatttttctttgacccttttgttccctctccacccacctcctttcctcttcttttctccctccaagatcacatttttctttgacccttttgctccctgtatctaaaattcccctctccacccactttccctttaagtcaatttcatgcttctctgtctcagatcctagatcttgctgtcggtgggttgatcggagtagatgtcgccgtcaaacgggttgcagaacggcggcggcggcggcggtaatggggtgagttatatagagcaccaggtttcaaaacttgacactcttgctggtgtggcaatcaagtacggtgttgaggtagctgacatcaaaaggatgaatgggttagccacagatcttcaaatgtttgcactgaagacattgaaaattccattaccaggacgtcatccgccatctcctgctcctggtccacatgaagaacctacaaaatcaggagatgctagcattgagaggaaacccctacgcataggtcaatcatttgccagaaaacctctccagtccttaggactgaaaccacctcaaccgaatatttctccagctatgagcattttacagaaattctatggcctcaaatcttcaaattcaagagatacattgaatggaacagaaatggcagtttattcatcctcaacttctgatcattctaatggggaatggcttcccaaagccttgccaatttctgacctgccatcagcatcaaatgattaccccaggtcaacaaatttagtgtatgatctactgaccggggatgatgaatatgtgcctcttgcggaaattggggatgcaccccataaaaaattatgaaagaaggaaatggtaatggatcaaatggtttttcttcaaatggaaaaacattagccatgaaaaattatgaaaggaaggaaatggtaatggatcaaatggtttttcttcaactggaaaaaca

SEQ ID NO: 114438 - DNA, 1281 bp, Glycine max
  Clone ID: PAT_MRT3847_74346C.1
ccacgcgtccgctctctctatattcggctcgagcccagttttgaatatatttttattccttctttgtttcttcactttcttccatacacataaccatgtcttctcagactgttgtcctcaaagttggtatgtcatgtcaagggtgtgctggagcagtgaacagggttttgggaaaaatggaaggtacttttattcctgcaaactatctctactatcagatccaaaatgaaaatgatctagtaattgtagcaaggtaatatcttagtcaattttttgtagttgtgtcttgcccctgtcaattttatcaatcaaaatatgctgcatgcttctcattttaattaccagaagtatttggttttacgtatgtgtaaactgttttgttaattctgatgttcttttccattcatttcctttgtaaattactttaaatctgtgcaatgccatttgtaatgttaaccacctgaagttccttctaatatccttttctcttaaacttcttgccagttcctgttgggttgcgattatataattatgtggttttcttgttacaattaacttttggacaccatcaagaataccctgcacaagtgaagtgcttgtatggtgggttacttcttattaaatgtggtctgaatttgatgcatgtagagtagcataattctggatgcttcttgtcttgcaagattggacttccggaagtgatttttcaagttgggcatgatcttcatcaatgtgtaagacagtgacccaactaggtgcaacccttaactcacattgggcttctttttctttgatatttagaatcaggcaatgcttgcttagttatcgaactgggtgcgccttcatcaaacatttgattgaagtttgagacatgtttgaaagattttcaaaacctttcaatttttgcaaggattgtgtgacacaacacaacaaagataatggaaataccttgtaattttctaggatggaatgctaagcaaaaggtttgctcactgcccattattagatttaactattttgaagacgtttggttctgatggagtcacaatccaattcaatgaaacttcaattttcctcttaaacagatcatggtccctgactatattactctgtaaattctttatccaagaacatttcactgccaacagtggcattatcatctatgaggtgcatcaactctctattttttgacattgtgcatgcatgccatttaaacatatatcatttccctagcaggagacatgcattagcatatgcaaaaagcgcaccaactctaaccat

SEQ ID NO: 114439 - DNA, 571 bp, Glycine max
  Clone ID: PAT_MRT3847_74347C.1
atccttagagttcaagcagtttgttctgaagatgagtggcttttctgtgaaatttatgatggctttaatgggagagatgcagctgactttctgataccctttatgactttatcatatcttattttaacatgttatactgggatttggaaccagattccataaaagcttctaacattgagagtatgggtggatcctttcaatataattttgatgatagtcttaatcttcaggagcatcaatctctgtcaacatttaagggaaacgattctagtcttgactgtttcacagacaatattccacattccaattcgaaagcatctcctaaatcattttcacaaactacagtacttgatggcctccaacatgttcttagtcaggttgagaatgatttcctatacatggttgagtaggaaatggaggaacatccagatttagtttcgattggatcttgtgttttacttgtgcttcttcatgggaatgatttgtacacacttaatctaggcgacagtagagcagtggtggcaacatgcatcacagataacagtttgaatgcgaatgagagattgaaggc

SEQ ID NO: 114440 - DNA, 262 bp, Glycine max
  unsure (1)..(262): unsure at all n locations
  Clone ID: PAT_MRT3847_74348C.1
ccnttgtaaggtgtgggtcgtacctttttcccacaaaacaaaatatacaggtcgatattgtagtacaaactacataataatataggtgggattatataagccagctaatctgattttgggttctgaacaaaacccaaatatagcaccctccaaaaatgtttttatgaggggtgaacaaaactgagtcactcggcttacacagaaacattggacaaaagtttgtacctaaatcttcaatgataacgtaagaaaaagaaaacct

SEQ ID NO: 114441 - DNA, 625 bp, Glycine max
  Clone ID: PAT_MRT3847_74349C.1
ccacgcgtccgcaccgcttgaggctctctttctagtttctagggtttgttgggtctcaaaatcgaagcgatttcgatggcggaagagcgattcacgggcgtggtgcagtggtttaacaatggcaagggcttcggcttcatcaagcccgacgacggcggcgaggatctcttcgtccaccagtcctccatcagatccgacggctaccgcaccctcctcgagggcgaccgcgttgagttcgccatcgccaccggagacaacgacaagaccaaggccgtcgacgtcactggcgtcgacggcgcccctctccagccccgcgcctctgccgccaacaaccgcgccggaggatccggcttcggcgccaggcgcaatggtggcagcggcgccgcgtgctaccagtgtggtgatttcggccacctcgcaagggattgcaacaggagcagcaataccggcggcggtggaggcggcagtggcggtggttgtttcaattgcggcgggttcggccacctcgcgagggattgcgtgcgcggaggaggcggcaatgtgggtgtaggcggcggttgcgggagcggatcctgctttaggtgtggtggattttgacacatggcgagggattgtgccaccggga
